United States Patent Application Publication US 2007/0054278 A1 - sequence listing, part 126

SEQ ID NO: 278731 - DNA, 201 bp, Homo sapiens
gccaagatcgcaccactgcagtccaactgggtgatagaacaagatcttgtctcaaaaaaaaaagatatttgcctgctctataatgactaggaaggagggasgtgggaaagaatttcctacagttgacagtttcgtgttttcttgagctacgatttcttctttcctatcctctatgctttagaagatgccttgtaactagca

SEQ ID NO: 278732 - DNA, 201 bp, Homo sapiens; identical to SEQ ID NO: 56357

SEQ ID NO: 278733 - DNA, 201 bp, Homo sapiens
cagttacagtggcattggatgtccatttgcagtgagtgactgggagtgtcaagttgagaagggagagagaaaactggaagcactcaaacactgaaagaatrgggtggccaggcacagtggcttacgcctgtaatcccagcactttgggaggcaaaggcgggtggatcacaaggtcaagaaatcgagaccatcctggccaat

SEQ ID NO: 278734 - DNA, 201 bp, Homo sapiens
caaacttttggtattttgtccaggaatctccacacttggagaagttgataagataaaagatcattctctttcaaagagaatgtttcatatatatatatatrtgtgtgtgtatatatgtgtgtgtatatataatatatatacttttttttactgagacagcgtctcactgtgtcacccaggctgaagtgcagtggcgtgatc

SEQ ID NO: 278735 - DNA, 201 bp, Homo sapiens
gctcagtggtgtcgttcagtttagcatatgatagaataggtccactaacatcacctctgagagtgtgttgaattatagtgcagtattaagtatggcctatkaaagaaatcatgacaaaatgcttaaaagtgttttaccagtgcctaggtacctggaaaactcagctgatagtactgtcagagggtttcatatagccctttt

SEQ ID NO: 278736 - DNA, 201 bp, Homo sapiens
ttgggtttttgtaaaaccccatagaacgtctttgtagacggtagggtagacttctgcagcttaaaaaaaaccactcccgaggaatcccagaactgacaggsatgcggcgctgtttgttaagccactgtgcgtaaaactagtccctgtcttctcctctggctcttttagaaggaggtcattgaaggattctgagaatccctc

SEQ ID NO: 278737 - DNA, 201 bp, Homo sapiens
ctcatttatctcttctaatttctcctactgagtcttggctaacggcttataccatgtaatactaaattttaactccagagtccatacaaacggctattgcygccattttacatgaataattcctcttttgtcaccaatctttgcaggtataaagaagcgactaaacggagaccccgaagtttactggagaaactgcgttgg

SEQ ID NO: 278738 - DNA, 201 bp, Homo sapiens
tgttgtggaatatttatttctcttgagaatacccagaaagccagacacatttgcataggggtagatgtctaatgttcatcaaaacctacctgttcattaasttgaagcatgaccaaaaaaatatggggagtaaataacaaaatagtgagtataaagatgtcaaaattatttgaataactgatggagaatttccccctcttc

SEQ ID NO: 278739 - DNA, 201 bp, Homo sapiens
tataaataatgagaaacatcctggccagagtctcccggttgtctttgctggagattaagactggaggggacgctatcttcatacacacttccagtgacatygagagtcacttggtggctgttctgggcccacagctggctttttcaacacctccaagttcaaccaccagtctgtctgctgtgtccaaggtagagcccaggg

SEQ ID NO: 278740 - DNA, 201 bp, Homo sapiens
tcgcctcttttcacctccagaccgattgttattgaacgattcctgacctcctttggctgcagagtcgaactccccactaaccgtcacacttagcaataaarcgttgagatgcctgtttctttaggcggccattcctggcgggggcgctcagtcaaaagagcctgggaatccgtgtttatttcttactgtaactgtctcctc

SEQ ID NO: 278741 - DNA, 201 bp, Homo sapiens
cacagctggctttttcaacacctccaagttcaaccaccagtctgtctgctgtgtccaaggtagagcccagggactgcgagcatgtgcagctccattgcccrtcattgctccagctgaggtcatgctggaaggggtgcttcctctcctgacagtgcttcatggtggccagcccgctcctgctggcactcagagcctcagtac

SEQ ID NO: 278742 - DNA, 201 bp, Homo sapiens
atgctgcccattcttcagtgccgtgctcaactcccaactctgccaagaagccccaactgattcgacagctgactttgagctctcctttttcttaattctcrtgcccctcaaagtctgctgtttactttagtactagactttatactgcgttcagtttccctctaatttctccttagactttctattacatttgccatttcc

SEQ ID NO: 278743 - DNA, 201 bp, Homo sapiens
acatttgccatttcctgtcacaatcagattccttaaaggaatctgattttttcttttttacacagccatagttttggacaaaaaaatttttgattgatcartgatgtaaataacagagaaaaattaaatcattagacctaccattctcatatttttagatatttggaggtgagccaaacaaacaagcttcctttttagaaa

SEQ ID NO: 278744 - DNA, 201 bp, Homo sapiens
tcagaaaatacaaaggcaagaattgaaatcaggttttcagaagagaatataaaatgagggtctaatgcacttacatgggtctaatacgttacaaaaatatrtatgtcattgcccccaaaatggcatagacactcaaagatcacaatttttctttttgttatgaggactgaacttaatgcttttcaatgtaagactcgactc

SEQ ID NO: 278745 - DNA, 201 bp, Homo sapiens
tcattagacctaccattctcatatttttagatatttggaggtgagccaaacaaacaagcttcctttttagaaaaagagtagtgggccagttgtggtggctyacgcctgtaatcccagcattttgggaggccgaggcaggcggatcacctgaggtcaggagttcgagaccagcctcaatatggagaaactccgtctctacta

SEQ ID NO: 278746 - DNA, 201 bp, Homo sapiens
ctcttgcctgttgctctttttttgcaccccatgtctggtttttcctggaagggtgccaaggcctcagacatagatgtcctgctgaacaggacagactcagygagacttggctttccagtgttctcattttttcagttctttggtcactaagataagctggtcttaccccatttctcttttcccttaatctaaaatattggt

SEQ ID NO: 278747 - DNA, 201 bp, Homo sapiens
agcaagatcagcaaagggaaaaggcacctggagcaaagtccaggaaaaaccaggtgcatgcctccaaaagtcctctcccaaggaagtcacaccggatatgrcaatgggttgtgacaaaatctgtgaaatgtttaccaaagaaactcagtgcctaggtttttactaggagcttgtcatgtaggcagcctctgcctgacacat

SEQ ID NO: 278748 - DNA, 201 bp, Homo sapiens
tgtcctaaataaatcagtgtgtgttcatttctttttatctgctggtcttgatgtatgtatgtgtcatgatgtctttcttagaatgtaaactctgtgaggasagatagcatctattctgtaaactcttcgtcaaacatcaagatgagtgccactgaacagtgtgggtctcaataaatcctttgcttttgcttgtgctgtgtg

SEQ ID NO: 278749 - DNA, 201 bp, Homo sapiens; identical to SEQ ID NO: 56356

SEQ ID NO: 278750 - DNA, 201 bp, Homo sapiens
tttggttttaattttctagaattctatagtcagggaagaaaaaactttaaataggaaatgaagaagaaatacttgaacttaagcaaaaacaaaaattattyaaaaaaaaatacttgaacttaaggactgttcaaaaaattagagtacctcaattctgttcttttttttccaaagtgaatggcgtagctagagattgttgta

SEQ ID NO: 278751 - DNA, 201 bp, Homo sapiens; identical to SEQ ID NO: 56359

SEQ ID NO: 278752 - DNA, 201 bp, Homo sapiens
agtggatcacttgagttcaggagtttgagaccagcctggccaacacggtaaaaccccatctctactaagatacaaaaattagtcgggtgtggtggcacacrcctgtaatccctgctactctggaggctgaggcacaagaatcacttgaacccaggaggctgaggttgcagtgagccgagatcgcgccgctgcactccagcc

SEQ ID NO: 278753 - DNA, 201 bp, Homo sapiens; identical to SEQ ID NO: 56355

SEQ ID NO: 278754 - DNA, 201 bp, Homo sapiens
cagcaaatatcgagtgttttcataccagttactgtgctatgtggactatgatccctgtgagcagatcacaatgaagaaaaagacaaattacaatccagtgygtttcccggtatactgaagatttccaaataaaatcccaacttactggtctttcacaatttagtaaaatgtgttgagttgccctcacctacccttcctgcc

SEQ ID NO: 278755 - DNA, 201 bp, Homo sapiens
aactcttccaccacgtctccattggtgttacagtaccaggtcacagttaggacaggtcactgctcttctttggggtccatgggaagctgctgaattgcaarccagtacaagctttgctacctcttctggaggtctctttggctttgggccaccagccccacagcaccagctacaggttgtccaggcaattgtctcagtcag

SEQ ID NO: 278756 - DNA, 201 bp, Homo sapiens
aaagcatacctgaatatcttagtaccatttctatctgcatctacttccatttggacctcagaggagtatccctccaccagcaggatatctttgctcatctrtcagcgtatttggtctttatctgactgcatactgcctatactactctctcctaccagaagctacagccactggtgacaggaacagagctctcatgagggt

SEQ ID NO: 278757 - DNA, 201 bp, Homo sapiens
gacagagcaagactgcatctcaaaaaaaaaggaggatgatgttgtcgacattaagggaatgggaatgggtactgttcaaaaaggaatggcccataaatgtkgccatggcaaaactggaagagtctacagtgttccccagcatgctgttagcattgttgtgaacaagtaagttaagggcaagactcttgccaagagaattaa

SEQ ID NO: 278758 - DNA, 201 bp, Homo sapiens
cgcaccattgcactccagcttgggcaacaaaagcaaaactccgtctaaaaaaaaaagaaaaagaataaagcaatctgttattgagctagaaagaaacagamggtattgtgttttgttttttagtttgggctagaatagtggttttcaaagtgtaattcctggaccagcagcataagtatcatttgggaacttactagaaat

SEQ ID NO: 278759 - DNA, 201 bp, Homo sapiens
accccatgtctggtttttcctggaagggtgccaaggcctcagacatagatgtcctgctgaacaggacagactcagtgagacttggctttccagtgttctcrttttttcagttctttggtcactaagataagctggtcttaccccatttctcttttcccttaatctaaaatattggtttattagagtaaaaaaaaaaaaaaa

SEQ ID NO: 278760 - DNA, 201 bp, Homo sapiens
agaatcacatgaacctgggaggcggaggttgcagtgagccaagatcgcaccattgcactccagcttgggcaacaaaagcaaaactccgtctaaaaaaaaaagaaaaagaataaagcaatctgttattgagctagaaagaaacagacggtattgtgttttgttttttagtttgggctagaatagtggttttcaaagtgtaat

SEQ ID NO: 278761 - DNA, 201 bp, Homo sapiens
ttacttgagcctgcagcaagctgtgactgttaggaggctgaggcaggtggatcacctgaggtccagaattcgaaaccagcctggccaacatggtgaaaccycatctctactaaaaatacaaaattagccgggcgtggtggtgcatgcctgtaatccaagctccttgggaggctgaggcaggagaatcacatgaacctggga

SEQ ID NO: 278762 - DNA, 201 bp, Homo sapiens
gccatagtaaagcgctgaaaatagatgtggttttctttcttctcttcttttcacttttctttctcatctatagaaaagaaggctgttggccccaggaagcmtcagcacaggatgaagaaaatagagcaggaaaagacatcaagcagccagaaggatatgaggaaaaacagaagaaatgctgttagaggctaagacaggaaa

SEQ ID NO: 278763 - DNA, 201 bp, Homo sapiens
gacaaaagtagattttctgatcagatttgaggttaatttagcaaagaaagaagtgagagcagaggagcatcaagacaaaagaagagtctgtcaggtacatrtagcccaaatagccctcagattcatccatataggaacctgtaagtgaaagtcttaatcataactgcagccatgtcactcatgcagaaagatgttatagag

SEQ ID NO: 278764 - DNA, 201 bp, Homo sapiens
aggagaggttgcagtgagctgagatcacgccactgcactccagcctggcgacagagcaaaagcagagcaattgagactctgtctcaaaaaaaaaaaaaaaatttagtttaatccatgcaaaagatgataaaggcctcaaaaagatgttgtctacagaacttagttaccaagcaattataaaaagtgagagaaaagaaagtt

SEQ ID NO: 278765 - DNA, 201 bp, Homo sapiens; identical to SEQ ID NO: 56358

SEQ ID NO: 278766 - DNA, 201 bp, Homo sapiens
taaaagtgtacaagagttatgtgcaggccgggcacggtggctcatgcctgtaatcccagcactttgggaggccgagttggacagatcatctgaggtcaggrgttcgagaccagcctgaccaacatggtgaaaccccgtctctactaaaaatacaaaattagccgggcatggtggcgcatgcctataatcccagctactcag

SEQ ID NO: 278767 - DNA, 201 bp, Homo sapiens; identical to SEQ ID NO: 56360

SEQ ID NO: 278768 - DNA, 201 bp, Homo sapiens
gcaagggatctaggttgcgcactccttattgagaatctaatgcctgttcatctgagatggaacagttttcatccccaaaccaccccccatccccactccayccatggacaaattctcttccatgaaactggtccccagtgccaaaaaggttgggaaccactaatgtagagcactagttctggagtcagactgactgtgttc

SEQ ID NO: 278769 - DNA, 201 bp, Homo sapiens
tttttcctggaagggtgccaaggcctcagacatagatgtcctgctgaacaggacagactcagtgagacttggctttccagtgttctcattttttcagttcyttggtcactaagataagctggtcttaccccatttctcttttcccttaatctaaaatattggtttattagagtaaaaaaaaaaaaaaaaagaccctaccct

SEQ ID NO: 278770 - DNA, 201 bp, Homo sapiens
ttataatcccagtactgtggggggccgggcaggggattgcttgaacccaagagttaagaccagcctgagcaataaagtgagacctctgtctctacaggaamaattggttaaaattagctaggagtggtggtgtgcacgtcaggtcccagctcttccggattgggaggttgaggtgggaggttcacttcgcgctcaggaggt

SEQ ID NO: 278771 - DNA, 201 bp, Homo sapiens
gggctccagtgcccgtgagttttgggggcttgggtttgctggccgcccctcaggtctggaatctgagctgctcttcggttcttgctgtcagcagcgagggytctgtgtgccccaggcctgcctttggaacttctgcctctagaggctggaatcgtgccgttcagtgggaaacctcatgttgtggctgcctgggagactctt

SEQ ID NO: 278772 - DNA, 201 bp, Homo sapiens
ggagttgggcggtagggtttgaaccccgggctccagtgcccgtgagttttgggggcttgggtttgctggccgcccctcaggtctggaatctgagctgctcytcggttcttgctgtcagcagcgagggctctgtgtgccccaggcctgcctttggaacttctgcctctagaggctggaatcgtgccgttcagtgggaaacct

SEQ ID NO: 278773 - DNA, 201 bp, Homo sapiens
cggccctgcaggcggtgaactcggtccagtcggggaacctggccttggctgcctcggcggcggccgtggacgcagggatggcgatggccgggcagagcccygtgctcaggatcatcgtggagaacctcttctaccctgtgaccctggatgtgctgcaccaggtgaggtggtcccatcaccgccagggcaggtcggctgcta

SEQ ID NO: 278774 - DNA, 201 bp, Homo sapiens
tggagttgggcggtagggtttgaaccccgggctccagtgcccgtgagttttgggggcttgggtttgctggccgcccctcaggtctggaatctgagctgctsttcggttcttgctgtcagcagcgagggctctgtgtgccccaggcctgcctttggaacttctgcctctagaggctggaatcgtgccgttcagtgggaaacc

SEQ ID NO: 278775 - DNA, 201 bp, Homo sapiens
gaggtctcattggcaagggccagtccctgttccccatcctccttgagcaggtgccggagtctcccgaggctcttgccgtccgcgtcgggaggaggcagctktggggctttggaggctcgggcagtcttccttccaggaagctcttgagccagggccagggcaggagtggagctgaacgtgggtggaggggaggcggcctta

SEQ ID NO: 278776 - DNA, 201 bp, Homo sapiens
tcgggaccacggccccccctggagcagcggatctgcccgcgaaggctctgccggggccgcccgccggccgggttggggcccatcccgcagcacagcgcccsctcgcggtggaggttgtgggtgcgatgattagtgtctcatttatttctaggtgcacctggtataatctcagcctctccgtatgcaggagctggtttccct

SEQ ID NO: 278777 - DNA, 201 bp, Homo sapiens
gctctctgcacggccagcacagcacggtccagtgtcccccacgtcgggaccacggccccccctggagcagcggatctgcccgcgaaggctctgccggggcygcccgccggccgggttggggcccatcccgcagcacagcgcccgctcgcggtggaggttgtgggtgcgatgattagtgtctcatttatttctaggtgcacc

SEQ ID NO: 278778 - DNA, 201 bp, Homo sapiens
tcgggggcagatccttgggcccaccaccccttgcagggacaggggtccttcttggggtgggggatgaacagagactggagagggtgggggagaaaggagtygaggggctaatttacaggacctctcaggccgggtgtggcagctcacacctgtcatcccagcacactgggcagctgaggcaggaggaccccttgagcccag

SEQ ID NO: 278779 - DNA, 201 bp, Homo sapiens
tctccgttgaccgggtggttcgggccaaaggaccttgccgtgcgatgcctccatggagctcggcggccacccctaatccgggctggaatcctctggcaccrgacgcccggcggggctccaaggctcctgggcccacgccaggccccggcctgaaacgcagcactgctggaataaaacacgccagagaagcagggcgctagg

SEQ ID NO: 278780 - DNA, 201 bp, Homo sapiens
tccccccggggtgtcccgaggagggagagtcgggtcgggcggggctcgggttgatcagtaactgaggctgtgttctggtcggtctgttaatttttattgayggtttccacggccgcctcctgctctcctcggtggatcgggctccactctgctgagaggcaccctcttgggggcccacccctacccgggtggaagctctgg

SEQ ID NO: 278781 - DNA, 201 bp, Homo sapiens
gccgcatgggcgcttggccactctccagcttgggggaggaccagccctggtgtcctggacggggtcggctcctgggctcccccagcctctgagctggaggrgagagcagacaggaagcgacttcctgtgggaggcgaaggttggaggccctgcgtctcaggtgcacccatcctcccttcctcccgtcctcccttcctccgg

SEQ ID NO: 278782 - DNA, 201 bp, Homo sapiens
gtctcaggtgcacccatcctcccttcctcccgtcctcccttcctccggtcctggcactgctgtgttttctgatcgcgtggtttccacctgaggcggctggytctgacccctttcccctgggcctgcgcagccccgccttgtgctcatagggggccccagactctgaaagcgagaggactcgagggtctgttttcagtattt

SEQ ID NO: 278783 - DNA, 201 bp, Homo sapiens; identical to SEQ ID NO: 56371

SEQ ID NO: 278784 - DNA, 201 bp, Homo sapiens
gggtttcctgcccgactccaagatggcgatgcgactccctttgccctcacggcccaggcgggcgggtcctgcccacttgcaagatggcggcagcctgggcmaagcacgcttcccgccgcctgactcgccacgtacccactctcaagatggcgtctcccgcaaagccacgcgccagctgactggctcagacgccgtcacgtg

SEQ ID NO: 278785 - DNA, 201 bp, Homo sapiens
agaagtgaggacggctgcctgggccctgccgtgtgctgctgggggggctggctccatggagggggtcctctgccctgctggctggtggctgaggccccagrcctgtgcccagggccgccggcagcacagtgaggccacgtccacagcagagttggccgtggagatagtgtacgtggtgccctccgtagctgagagcctccc

SEQ ID NO: 278786 - DNA, 201 bp, Homo sapiens
ggcttccgatgggggtgtctttgtcttggaacgtgtggggcctggtccagaggtggggcctggggtcctgctgggagggaggggcgccaaaggacaatggkggccccttttcaagttgcagtcaagtggacggctcacttccctgcccttctgagctttctctagcggggcctcgtgcagccagagggagccctgcggagg

SEQ ID NO: 278787 - DNA, 201 bp, Homo sapiens
ctcctggttgctgccctgtggagcctcggagcctccaggtgtcccttccgttctgctggggcgccgttgagctgagccaagccggcctgtgccgcctgggyaggcatggagtttgctgccgcagacagttgtgggcaatgccaggccacttgcccatgggaatgagattagggcttcaggcaggcggccaagaggaccgct

SEQ ID NO: 278788 - DNA, 201 bp, Homo sapiens
tcgcgtgtgcagagacggaggtcgggtttcttttccgggctggaaaacaggagaggaggggctcctgcgagagtgagggaggcagcgctataatttggttytcttgcgaggccaccagaagtgaggacggctgcctgggccctgccgtgtgctgctgggggggctggctccatggagggggtcctctgccctgctggctgg

SEQ ID NO: 278789 - DNA, 201 bp, Homo sapiens; identical to SEQ ID NO: 56373

SEQ ID NO: 278790 - DNA, 201 bp, Homo sapiens
ttgtgggattggtgggagactcagggctgcagttagaggtctcattggcaagggccagtccctgttccccatcctccttgagcaggtgccggagtctcccraggctcttgccgtccgcgtcgggaggaggcagctgtggggctttggaggctcgggcagtcttccttccaggaagctcttgagccagggccagggcaggag

SEQ ID NO: 278791 - DNA, 201 bp, Homo sapiens
aggaccagggcctgaccaaggactacggcaactcacccctgcaccgcttcaagaagccgggctccaagaacttccagaacatattcccgccctcggccackctgcacctctccaacatcccgtgagtgctgggccggggggctcatggggccgggggcgggcaagggctctgcttggctgtcctaccgcgtcggtgtgtgg

SEQ ID NO: 278792 - DNA, 201 bp, Homo sapiens
caggtgggtcctgcagacggcgagacgagggctccccgctctcggacccagcaccgcgggctcgggggccgcgcactcgcctcccggagtgaggcaggagrcccggaggctgcccttccgacggacgctccgagtcacttagggcctcgccgggagttgcagtggccgggagaagccgtggggagctcactgttgggtcag

SEQ ID NO: 278793 - DNA, 201 bp, Homo sapiens
cttgtgtcactaacggaccgtttatcatgagcagcaactcggcttctgcaggtaaggccgggactcggcccagggcaagacccgtgggtgtctttccctgraacaacgttacgttcttgttctgggactctactttccatctccaactgcaggggcccatggtccacgctacagacccaggtccaagttctcgctgcagag

SEQ ID NO: 278794 - DNA, 201 bp, Homo sapiens
acttgtgtcactaacggaccgtttatcatgagcagcaactcggcttctgcaggtaaggccgggactcggcccagggcaagacccgtgggtgtctttccctsgaacaacgttacgttcttgttctgggactctactttccatctccaactgcaggggcccatggtccacgctacagacccaggtccaagttctcgctgcaga

SEQ ID NO: 278795 - DNA, 201 bp, Homo sapiens
agtggccaccaggctaacgttgtctcctttctttctctctacagcattgtcccagatatagccgttggtacaaaggtaggcacttctcactttgcttctcygtgacgctcctctgaccttgtgccgaccccgggggccaccccccagcgctgttgcgttggctagagggcgcttttccattcctaaggggcactacccttg

SEQ ID NO: 278796 - DNA, 201 bp, Homo sapiens
ggagggggtcgttggacactttggaggttttggctcaggggatgctccctgtgagaatgtataatgcacacatttatttatttatattttttgaggcgaartcttgctttgtcacccaggctggagtacagtggaacgatctcggttcactgcaacctccgcctcttgggttcaagtgattgtgccacctcagcttcccga

SEQ ID NO: 278797 - DNA, 201 bp, Homo sapiens; identical to SEQ ID NO: 56361

SEQ ID NO: 278798 - DNA, 201 bp, Homo sapiens
gtgctgctcccccagccatgagccacctgaacgggcacaagctgcacgggaagcccatccgcatcacgctctcgaagcaccagaacgtgcagctgccccgygagggccaggaggaccagggcctgaccaaggactacggcaactcacccctgcaccgcttcaagaagccgggctccaagaacttccagaacatattcccgc

SEQ ID NO: 278799 - DNA, 201 bp, Homo sapiens; identical to SEQ ID NO: 56363

SEQ ID NO: 278800 - DNA, 201 bp, Homo sapiens; identical to SEQ ID NO: 56365

SEQ ID NO: 278801 - DNA, 201 bp, Homo sapiens
gtcgctggacgggcagaacatctacaacgcctgctgcacgctgcgcatcgacttttccaagctcaccagcctcaacgtcaagtacaacaatgacaagagcygtgactacacacgcccagacctgccttccggggacagccagccctcgctggaccagaccatggccgcggccttcggtaagaggctgcccgacgcggcgcc

SEQ ID NO: 278802 - DNA, 201 bp, Homo sapiens
tatagccgttggtacaaaggtaggcacttctcactttgcttctccgtgacgctcctctgaccttgtgccgaccccgggggccaccccccagcgctgttgcrttggctagagggcgcttttccattcctaaggggcactacccttggtctggaatctggagttgggcggtagggtttgaaccccgggctccagtgcccgtga

SEQ ID NO: 278803 - DNA, 201 bp, Homo sapiens; identical to SEQ ID NO: 56367

SEQ ID NO: 278804 - DNA, 201 bp, Homo sapiens
tccggggtgctcacaccgtgcaggcggggacgaggagggcccagcgctcactgcctccccaacaggccttcatcgagatgaacacggaggaggctgccaayaccatggtgaactactacacctcggtgacccctgtgctgcgcggccagcccatctacatccagttctccaaccacaaggagctgaagaccgacagctctc

SEQ ID NO: 278805 - DNA, 201 bp, Homo sapiens
tcatcgagatgaacacggaggaggctgccaacaccatggtgaactactacacctcggtgacccctgtgctgcgcggccagcccatctacatccagttctcyaaccacaaggagctgaagaccgacagctctcccaaccaggcggtgcgtggccccgcggcggaccccagcagcccggggacctcgggggtgggcccagccg

SEQ ID NO: 278806 - DNA, 201 bp, Homo sapiens
ctgggccctgccgtgtgctgctgggggggctggctccatggagggggtcctctgccctgctggctggtggctgaggccccaggcctgtgcccagggccgcyggcagcacagtgaggccacgtccacagcagagttggccgtggagatagtgtacgtggtgccctccgtagctgagagcctcccagccccacactggctgag

SEQ ID NO: 278807 - DNA, 201 bp, Homo sapiens
aggaagctcttgagccagggccagggcaggagtggagctgaacgtgggtggaggggaggcggccttaagagaagaccaagcgcaggctcggggaggccagygttggtgggggctctttggccaggtgtgggggcagctccttgaccaggcatgggggtgtgtggagctgggggttgtctgaggggggacagggtgtgatat

SEQ ID NO: 278808 - DNA, 201 bp, Homo sapiens
aacggaccgtttatcatgagcagcaactcggcttctgcaggtaaggccgggactcggcccagggcaagacccgtgggtgtctttccctggaacaacgttaygttcttgttctgggactctactttccatctccaactgcaggggcccatggtccacgctacagacccaggtccaagttctcgctgcagagaatttccaggg

SEQ ID NO: 278809 - DNA, 201 bp, Homo sapiens
cctgggatggccctgtcctggggggcctgggcgttgctgccctcagcgcctgcagaggctcgctttgcagaccaagcgcctgtgctccaaggtcctcagayccgagctttgttttctgtgtaactaagggccgtaaccaacgtctcctccaatttcactctttgaataaacgtgtgtcttcaatccttgcagcggggggga

SEQ ID NO: 278810 - DNA, 201 bp, Homo sapiens
atgcaccctcctggggctcagggttggtctccgtagcaggcagggctctagggggatagcagggaccttcctctgtgggctcctgcgagttggtgcctgcrtctcatggcacccccttttcagcaaacggaaatgacagcaagaagttcaaaggtgacagccgaagtgcaggcgtcccctctagagtgatccacatccgga

SEQ ID NO: 278811 - DNA, 201 bp, Homo sapiens
atgcccacaccaccttcccaggcagctccgcatccacggcggcagcctgggcggactgggcactcgagtgccaggtcaggggcccttcccgggagaggggwcgccacgtccacagagcaggcttggccagggcagtggtaggacagggctgtggaggcccacgtgtggacggcgccagccagaagccgctaatcgcacagt

SEQ ID NO: 278812 - DNA, 201 bp, Homo sapiens
cttcctctgtgggctcctgcgagttggtgcctgcatctcatggcacccccttttcagcaaacggaaatgacagcaagaagttcaaaggtgacagccgaagygcaggcgtcccctctagagtgatccacatccggaagctccccatcgacgtcacggagggggaagtcatctccctggggctgccctttgggaaggtcacca

SEQ ID NO: 278813 - DNA, 201 bp, Homo sapiens
cagccctcgctggaccagaccatggccgcggccttcggtaagaggctgcccgacgcggcgccagtgtgcagagtggtctattagggccgctcagtccggakccccggcggcacgggcccggccctgcaccagggtgatgcacctgctgctctctgcacggccagcacagcacggtccagtgtcccccacgtcgggaccacg

SEQ ID NO: 278814 - DNA, 201 bp, Homo sapiens
cccctgtgctgcgcggccagcccatctacatccagttctccaaccacaaggagctgaagaccgacagctctcccaaccaggcggtgcgtggccccgcggcrgaccccagcagcccggggacctcgggggtgggcccagccgcaggggccggggactcacggctgtgcctcccacagcgggcccaggcggccctgcaggcgg

SEQ ID NO: 278815 - DNA, 201 bp, Homo sapiens
ccccggcggcacgggcccggccctgcaccagggtgatgcacctgctgctctctgcacggccagcacagcacggtccagtgtcccccacgtcgggaccacgkccccccctggagcagcggatctgcccgcgaaggctctgccggggccgcccgccggccgggttggggcccatcccgcagcacagcgcccgctcgcggtgga

SEQ ID NO: 278816 - DNA, 201 bp, Homo sapiens; identical to SEQ ID NO: 56372

SEQ ID NO: 278817 - DNA, 201 bp, Homo sapiens
ggcggggcgcatgcagatgagcccaggcccggcccggcccgtgctgtgaggagaggcgggcgctggtgcaggagccggcgggtggctgtgcgggggtcggrcgaccccacaggcacccagggtagggccagagccagggccgcctcccgcgcggctcggctcctcggtgcatgaggacggggagcgtcggcctctcccact

SEQ ID NO: 278818 - DNA, 201 bp, Homo sapiens
ggtcagcgggacacacagggttagcgcggcggggtgtgggcagcccctgtggctcgagagcctgtcacttaactggtggatccgttatttcccagaatggwtaaattcccctcggggagagcttgggtgaaacaagaggcccaaaatatgtaactcttgatggatgggatcctcctggaatcagcatttcaggctgttctg

SEQ ID NO: 278819 - DNA, 201 bp, Homo sapiens
acttccctgcccttctgagctttctctagcggggcctcgtgcagccagagggagccctgcggaggtggcagctgcagggacctacgggctctcctggcccsgggacagctgggtgctcctgctgctgagtggccaccaggctaacgttgtctcctttctttctctctacagcattgtcccagatatagccgttggtacaaa

SEQ ID NO: 278820 - DNA, 201 bp, Homo sapiens
cgctcctggggggcgtggttgggatcggcttctgggagcccctccagcagcgctgtctctgccggcatgtgagtgaaggtgcttctcttaccgtgtgcccstcgaggtaaacctgtaactggaatgtgtgtggagtgtgactgatagaacactacctgattcttatgtatttactgacctgtgtttttttgctactttttt

SEQ ID NO: 278821 - DNA, 201 bp, Homo sapiens
gaggcgctggatggatggtccaggctggcacttggacctgtgggcgggttgtcaggagctgtcgggagcaggggtcctgactgtgcaggtcttggcctctsgcgctgctggttcacatgcaccctcctggggctcagggttggtctccgtagcaggcagggctctagggggatagcagggaccttcctctgtgggctcctg

SEQ ID NO: 278822 - DNA, 201 bp, Homo sapiens
cacggctgtgcctcccacagcgggcccaggcggccctgcaggcggtgaactcggtccagtcggggaacctggccttggctgcctcggcggcggccgtggaygcagggatggcgatggccgggcagagccccgtgctcaggatcatcgtggagaacctcttctaccctgtgaccctggatgtgctgcaccaggtgaggtggt

SEQ ID NO: 278823 - DNA, 201 bp, Homo sapiens
gagaatttccagggaggcgctggatggatggtccaggctggcacttggacctgtgggcgggttgtcaggagctgtcgggagcaggggtcctgactgtgcargtcttggcctctcgcgctgctggttcacatgcaccctcctggggctcagggttggtctccgtagcaggcagggctctagggggatagcagggaccttcct

SEQ ID NO: 278824 - DNA, 201 bp, Homo sapiens
atcatcaccttcaccaagaacaaccagttccaggccctgctgcagtatgcggaccccgtgagcgcccagcacgccaagctggtgagtggggctcccgggayggcgcccgccctggccctggcccggcgacgtctcacggtccctctcccctcagtcgctggacgggcagaacatctacaacgcctgctgcacgctgcgcat

SEQ ID NO: 278825 - DNA, 201 bp, Homo sapiens
tggtcagcaacctcaacccagaggtacgtgggcttttcctccgcgccgccgttcctcccggaagagcgagcaggggatgttgtgctcgggctcgggtccckgagcagcgccgcccctcgctgtgtctgcgcctctgccctggcagcccctctgctgcagcgctgagaccctccttttccaagatggcttgagttttcctct

SEQ ID NO: 278826 - DNA, 201 bp, Homo sapiens
tccgcgccgccgttcctcccggaagagcgagcaggggatgttgtgctcgggctcgggtcccggagcagcgccgcccctcgctgtgtctgcgcctctgcccyggcagcccctctgctgcagcgctgagaccctccttttccaagatggcttgagttttcctcttttcctgaattcacatcttggttcgcgttttctcttgca

SEQ ID NO: 278827 - DNA, 201 bp, Homo sapiens
agcctcgcggacctgactgggcgcccccacccccacgcggccccaggctcacgcctttctcctcccacaggccctcagtctccgaggaggatctcaaggtmctgttttccagcaatgggggcgtcgtcaaaggattcaagttcttccagtgagtatgaggcgggctgtccctggctctccccaggctgccctgcggccggc

SEQ ID NO: 278828 - DNA, 201 bp, Homo sapiens
cggaagagcgagcaggggatgttgtgctcgggctcgggtcccggagcagcgccgcccctcgctgtgtctgcgcctctgccctggcagcccctctgctgcakcgctgagaccctccttttccaagatggcttgagttttcctcttttcctgaattcacatcttggttcgcgttttctcttgcatgatacgcagaatgaatta

SEQ ID NO: 278829 - DNA, 201 bp, Homo sapiens
gcaggggcgggggctgcgttccctctcgggcgcctggtcacgcgggtgctgctcccccagccatgagccacctgaacgggcacaagctgcacgggaagccsatccgcatcacgctctcgaagcaccagaacgtgcagctgccccgcgagggccaggaggaccagggcctgaccaaggactacggcaactcacccctgcacc

SEQ ID NO: 278830 - DNA, 201 bp, Homo sapiens
gcctctttattcttttcggtatgttatcgttcacacttttattaccttgttttcattaattgagatgattttgatgccctgagacgtattatgagtttgcrgtttggcactctgatgctccgtggcatccgcctcgttttatggtttgctttcggtttgcgaattttatttggtcccgtagatacgtacgcatggtttatc

SEQ ID NO: 278831 - DNA, 201 bp, Homo sapiens
cggggctcaaacgagccctacggccttgcggccgcccgggactccccggcaaagaaggtaacacaaagggagacggccaggcagcccgggggccacggcgygggctcctccccgcgcggccggggcctttggcgctttgacctttgcctctttgcacctgggcgtgcgcagcccaccgacccggccccgctttccactcgc

SEQ ID NO: 278832 - DNA, 201 bp, Homo sapiens
gggacgtgtgtttgggcaggtaggtgggcaggagggaggatagccacgtagacctgtcggtggccggctggcggggcacgtcggaggcggcaggaatgggrcggccccattcgcacccacacttgctcctcccttagagccataccccaggccccacggggaaccacccagcaaggcggctggcccccacccttcctctgc

SEQ ID NO: 278833 - DNA, 201 bp, Homo sapiens
gagaggggcagaggcggagatgcttggggacagagatggacacgggaggtcctgccgcgtgcgtcagccgtgggaccagccaggctccggggcatgccctsgtgggacttctctccccgcaaattgtagtttcccgaaagccaggcccacaagggtgtgggaatgcgcgggtgggtgggcaggtgacgactggggacgtgt

SEQ ID NO: 278834 - DNA, 201 bp, Homo sapiens
ccctgaattcctcccttcctcctctgagaagatgggaggacccagagctgggagggtcttggccctgagggtgtgggctcagggggacgaggtggtcgggsgccgcagagagagggtggggtgacaggagagcagtgcgtttgagtggggctgccaggtgcacgcagtgggctcgtctgttactgaggtgtaattcacctg

SEQ ID NO: 278835 - DNA, 201 bp, Homo sapiens
cagggaccccatggggttggcgcctttgggcggagccttgatctcagcgcagccgtcagtacctcccaggactcgggacacaccatgggtgtccatgcagstgtccggccgtttctggaggtggcttctgttcgtgggaggccacactggtttcttgttggccggggagccggcccctctcacccaagtttaaggggtggg

SEQ ID NO: 278836 - DNA, 201 bp, Homo sapiens
ttgacgatctcctggatgatggcgttctcctggttgttgaatacgcccgagttgaggtcatgctgcaccttgtgcaggaggatggaattcttcttgcctgmgggagagggggcgttagcgtgtgcacagggagcgcctgctgcgtacagcgggcaccgagcacctactctgcaccgcgggtgcgcacacagtgcttgccgt

SEQ ID NO: 278837 - DNA, 201 bp, Homo sapiens
  misc_feature (1)...(201): n = A,T,C or G
cacagcagggaccttgagggccatgaggtctctgcagggagctgcggtgacccccgtcctgtgagcctgggtcccaccagctgccacggggctcaccgggnccgttcatcccccgcagcggaagaccctgaagaccctgcgggaccaatgggagaaagcactgtgccgggcgctgcgggagaccaagaaccgcctagagcg

SEQ ID NO: 278838 - DNA, 201 bp, Homo sapiens
cactgggtcaaaggagaaattgctcagaacagggatgtcaggaaaaatgaatacaagaaaaaaattatatatatatgttattttatatatatatatatatrtgtgtgtgtgtatattttaagacagagtctccaagtctgtcgacagcaaagtttctgtctcccaggctggagtgcagtggtgagatcccggcttaccgca

SEQ ID NO: 278839 - DNA, 201 bp, Homo sapiens
aatgtaccaccaccgtgctgggcctcgggtgggactcaccggccccttcccctttttagcaaataggaggtggaattcagagcatcacctacacccacaayggagacatcagccggtgagtggggggcccgggctggggcctggccgggggtctggagagcagccacggtggagacagcggccagttaggggtgtccctgg

SEQ ID NO: 278840 - DNA, 201 bp, Homo sapiens; identical to SEQ ID NO: 56423

SEQ ID NO: 278841 - DNA, 201 bp, Homo sapiens
aggttcaagtgattatcctgcctcagcctcctaagtagctggagttacaggtgcccgccaccacccccgattaatttttgtattttgagtagagacggggktttcaccgtgttggccaagctggtctcaaactcctgacctcgtgatctgcccccctgagcctcccgaggagctgagattacaggcgtgagccaccgtatc

SEQ ID NO: 278842 - DNA, 201 bp, Homo sapiens
gcatctagctcaggggccccggtgcccagcgccctgaccgccctgtcctacaggtgcccgagccctgcctgccgcggcagtactgggaggagctgggggcscccgaggccctgcgggagcagccctggcccctgccagtgcagatggagctgggcaagctgctggcggagatgctggtgcaggctacgcagatgccatgca

SEQ ID NO: 278843 - DNA, 201 bp, Homo sapiens
gccctctggcaagcccccaacctcactacccccatccctgcaggatgggcgtgtgtcctacccgaagctgcacctgcccttgaagaccctgcagtgcctcyttgagaagcagctccacatggagctggccagcagggtgtgcgtggtgtccgtggagaagcccacgttgccaagcaaggaggtcaagcacgcggtaggggc

SEQ ID NO: 278844 - DNA, 201 bp, Homo sapiens
tacaggcgtgtgccaccacccccggataattgttttaatttttatttttagtagaggtggggtttcagcatgttagccaggctaaggcattgcttctatcttttttttttttttttttttgagatagactctctgtctgttgcccaggctagggtgcagtgccatgatctcggctcactacagcctccgcctcctgggttc

SEQ ID NO: 278845 - DNA, 201 bp, Homo sapiens
acaggcgtgtgccaccacccccggataattgttttaatttttatttttagtagaggtggggtttcagcatgttagccaggctaaggcattgcttctatcttttttttttttttttttttgagatagactctctgtctgttgcccaggctagggtgcagtgccatgatctcggctcactacagcctccgcctcctgggttca

SEQ ID NO: 278846 - DNA, 201 bp, Homo sapiens
ccactgggtcaaaggagaaattgctcagaacagggatgtcaggaaaaatgaatacaagaaaaaaattatatatatatgttattttatatatatatatatakgtgtgtgtgtgtatattttaagacagagtctccaagtctgtcgacagcaaagtttctgtctcccaggctggagtgcagtggtgagatcccggcttaccgc

SEQ ID NO: 278847 - DNA, 201 bp, Homo sapiens
gagatgttctcggggacccgggccatccaggtacgtcctgtcctgtccccgctcggccaggactccctaagcaagtggacgggatccccggcctgagcccyctgccctgagacggcctgtgtcccacagcactggctgaccgagagtgcccgcctcatctcccacatgggctctgtggtggagtgggtcacacccctgggc

SEQ ID NO: 278848 - DNA, 201 bp, Homo sapiens
cagtgaggtctaccatacagaggttgtttagaaactgccccaaaaccggccgggcacagtggctcacgcctgtaatcccagcactttgggaggctgaggcsggcggatcacgaggtcaggagatgagaccatcctggctaacacagtgaaaccccgtctctactaaaaatatacaaaaaattagccgggtgtggtggcggg

SEQ ID NO: 278849 - DNA, 201 bp, Homo sapiens
ccaccagcaacttgcaggagacgcagaaacgcgtgcacccatgctgtctcggggtcctgggagggcaggtcgccctctggcaagcccccaacctcactacycccatccctgcaggatgggcgtgtgtcctacccgaagctgcacctgcccttgaagaccctgcagtgcctctttgagaagcagctccacatggagctggcc

SEQ ID NO: 278850 - DNA, 201 bp, Homo sapiens
acccttcggcttctgcctttatggaggcccccgcccacacgcccggccccgctcagccgctctcgtctttcccgcagggaccgccggtggcgtctgcggcyccaggaggagctcgtccgccagcccccaggagcaagaccaagaccgcaggaaggactggggccacgtggagctgctggagggtgagcgcgacccccacgg

SEQ ID NO: 278851 - DNA, 201 bp, Homo sapiens; identical to SEQ ID NO: 56417

SEQ ID NO: 278852 - DNA, 201 bp, Homo sapiens
aaaaggcaaaggctcagattctgagacaggctgagggcggtctccacctctcgggtcccaggacacgcccagacggcgttgctgaaacatctcttgcaccrctcatgggccctgtccttgctgagcaggctccttcctggagctctcgtaattccccctccccagaaccccaccaggtgctcccactttccagggacatag

SEQ ID NO: 278853 - DNA, 201 bp, Homo sapiens
agtgggcggttcagggtcctgggagtctgtgcagaggccctgagctagacagtgagaggggcaggggaggcgggggccacctggatagattctggaggcamgcccagaggaggtactgagaggtggacggagggagttgtcacagaccccgggttctgggcctgtgcacctggagggtctgagcggccagtgaccggggag

SEQ ID NO: 278854 - DNA, 201 bp, Homo sapiens
agtgagaggggcaggggaggcgggggccacctggatagattctggaggcaagcccagaggaggtactgagaggtggacggagggagttgtcacagaccccrggttctgggcctgtgcacctggagggtctgagcggccagtgaccggggagacgtggtgctgcaggtttcggtggcagcttgttagggctgctgagttctg

SEQ ID NO: 278855 - DNA, 201 bp, Homo sapiens
cacagaccccgggttctgggcctgtgcacctggagggtctgagcggccagtgaccggggagacgtggtgctgcaggtttcggtggcagcttgttagggctsctgagttctgtgaggctcgggtggggaggtgcggaggtggtggggtgcgtgtgtctggaaagcagcgggcagaccttacaacgttgttggcaagtatgag

SEQ ID NO: 278856 - DNA, 201 bp, Homo sapiens
agccaccgtatccggccaaagtttctcctcggaactcttggttgttttggagggtgttgtttacacaccctttcaaagcagcaaacgttcccagctttctccccccccatgatccttcagccctaatttgagaaacaacagtaaaagcttctcttaatatttgggtaaacatgggatactattatattaaaatacagatat

SEQ ID NO: 278857 - DNA, 201 bp, Homo sapiens
tggatcccctgaggtcaggagttggagaccagcctggccaacagggcgaaaccccatctctactaaaaatacaaaataattagctgggtgtggtggcatgygcctgtagtcccagctactcaggaggctgaggcaggagaatcggttgaacccgggaggcggaggttgacagtgagctgagattgcgccactgcactccag

SEQ ID NO: 278858 - DNA, 201 bp, Homo sapiens
gcctcccgccgcagctgccgcccccggtcaacacctccaagctgctcagggacgtgtatgccaaggtgagcccacgtgggccccggcagacttcagtcctyatagctgccctttgggggttcctggagcctcagctcagaccaatgggcctccccggtgcccagggctcacctgggctgggccctgaattcctcccttcct

SEQ ID NO: 278859 - DNA, 201 bp, Homo sapiens
gccccagcaccggggccctgacccgtctgcctgtcgcaccccagatcggcatcctgaagccgcacccggcctacgtgcagctgctggagaaggccgcggarcccacgctgaccttcgaggcggtggatgtacccatgctttgccccccgctgccctggacatcgccgcactctggtgctttcctgctcagccccaccaagc

SEQ ID NO: 278860 - DNA, 201 bp, Homo sapiens; identical to SEQ ID NO: 56427

SEQ ID NO: 278861 - DNA, 201 bp, Homo sapiens
gtcccccgcccgctctcctcccccgcgccccctgcccgtcctgcttctcccttctcccctgccccagggcccccgcgttccccacgttcccccctcccctkcatccgccgagctgcttcctcccccggcgcccccaggtcctctgtccaccctcctcccccggcagctccggacacgcttgtttcagcccggtccacccgc

SEQ ID NO: 278862 - DNA, 201 bp, Homo sapiens
gcctcccagcaggagccctggctgctcccccagaccactggctgcctgttagggcttgggcgtttcttgctgactgcgtgggcgccaggccccattccccygcccccctgctaggccctaggccttgggcctcagtggctctgaaataggggggagtagggcgtgaacgggccagcccctgaggacctgcacctgctgccc

SEQ ID NO: 278863 - DNA, 201 bp, Homo sapiens
gtgtcccacagcactggctgaccgagagtgcccgcctcatctcccacatgggctctgtggtggagtgggtcacacccctgggcgtccccgtcatccagccstatcgcctggactccaaggtcaaggtcagtgtaccaccccatccctccccagtgtgccaccatcccagtgtaacagcgtcccagtgtaccagtgccccag

SEQ ID NO: 278864 - DNA, 201 bp, Homo sapiens
cggtgatgacggtggtgtacggggtcacgcgctatggcgggcgcctgcagattgagaagcgcctccgggagctgagcgactttccccaggtgcgccaggcmtgtcgcgctgcgaacacgttggtttcactgccatttaaaactcagacgggtgtgcccccgacccagcctcccagcaggagccctggctgctcccccagac

SEQ ID NO: 278865 - DNA, 201 bp, Homo sapiens
cctgtcctgaggatgtggtggggctggggcgggggcttcatgggtgcttggtggcccctgggctgctagcggggctgacccgcgcccccggcccacccgcsgtgcaggtggaggtgttccgtaggcaggacgcccagcggggcatgcgggtggcacaggtgctggaaggtttcatcacccgcaaggtggtgaagcagacgg

SEQ ID NO: 278866 - DNA, 201 bp, Homo sapiens
ctgtcgtttattgcgcggaatgggggtgtgggggttaatggggcgtggggggccacggtgggggcactgctgcctcggctcgtcagtacattcatcacggsggcgggaccccagcctcccccccgcgccctgcgcagccaggcctgcctctcggtgccagtgctggagggaggcggggtgctgctccccgaggtcaccggg

SEQ ID NO: 278867 - DNA, 201 bp, Homo sapiens
tcaacctggagccctcggatgtgccgcaggacgtgtacagcggcgtggccgcgcaggtagggtgtgccctgctgcccgggggcatctcggcgtgggggcartgtgagccctgagtctcggccccaggtgccctcaccttggcctgtcctgaggatgtggtggggctggggcgggggcttcatgggtgcttggtggcccctg

SEQ ID NO: 278868 - DNA, 201 bp, Homo sapiens
cagtgaacggtctccccaggctctgccagctcccagcatcaccgcccctgccaccccctgcacggtgcccagtgtcccttctagaggggtcgaggccaggagggtcaaggcctttggtttgcactgctggcactgactttacccgcagcccgcctttccccgcgtcagcgatagccaccagcaacttgcaggagacgcaga

SEQ ID NO: 278869 - DNA, 201 bp, Homo sapiens
gttgggccatccccccagaccctcaccctggcttggtctcccagggtgccttcaaggagctggtatatgtgttattcatggtgaaggatgccggcttgacyccggacctgctgtcctatgcggctgccctccagtgcatggggaggcaggaccaggacgccgggaccatcgaaaggtaggtggtgtcgggagggcccccac

SEQ ID NO: 278870 - DNA, 201 bp, Homo sapiens
gagctctcgtaattccccctccccagaaccccaccaggtgctcccactttccagggacataggtgaggcccaagattatgtctggagagaccccccccccsgccccgccgccaaggccacatgtgcagagccaggatgtgaaccctgaactgactcagctgtcctggcttggctctggggggtaggcgcctaatggagact

SEQ ID NO: 278871 - DNA, 201 bp, Homo sapiens
gggcggtggggcatctagctcaggggccccggtgcccagcgccctgaccgccctgtcctacaggtgcccgagccctgcctgccgcggcagtactgggaggmgctgggggcgcccgaggccctgcgggagcagccctggcccctgccagtgcagatggagctgggcaagctgctggcggagatgctggtgcaggctacgcag

SEQ ID NO: 278872 - DNA, 201 bp, Homo sapiens
tgcgcggaatgggggtgtgggggttaatggggcgtggggggccacggtgggggcactgctgcctcggctcgtcagtacattcatcacggcggcgggacccyagcctcccccccgcgccctgcgcagccaggcctgcctctcggtgccagtgctggagggaggcggggtgctgctccccgaggtcaccgggggacgcgcgcg

SEQ ID NO: 278873 - DNA, 201 bp, Homo sapiens
gagggtgagcgcgacccccacggcggcccgggagaggagagtccgctccctgctgccgggagaaaaggcaaaggctcagattctgagacaggctgagggcrgtctccacctctcgggtcccaggacacgcccagacggcgttgctgaaacatctcttgcaccgctcatgggccctgtccttgctgagcaggctccttcctg

SEQ ID NO: 278874 - DNA, 201 bp, Homo sapiens
cggggcgggcaggcactcacggctgccttccgcaggtcctgcaggcgctgcccgcccaaggtgagtccttcaccaccctggcccgggagctgagtgcgcgyactttcagccggcacgtggtgcagaggcagcgggtcagtggccaggtgcaggcgctgcagaaccactacaggaagtacctctgcttgctggcctccgacg

SEQ ID NO: 278875 - DNA, 201 bp, Homo sapiens
atgcggctgccctccagtgcatggggaggcaggaccaggacgccgggaccatcgaaaggtaggtggtgtcgggagggcccccaccccccaccatgtccctsccagggttttaagatctgggacggtgcctgggctgggggctggggacccccagagggcctgacagccacaccgagacctgcaggctagcaggaggtggtc

SEQ ID NO: 278876 - DNA, 201 bp, Homo sapiens
tcttacagctgggggaactgaggcaccgaggtgaagggagccccctcgcacgcgaggccgccgccgggggcaggggcgatgggggtgggcgcggggcgatraggggggacggccgggggcgcggagggggctgccccgccggccctgcccgtccgtccaactacggctacctacgtctcgtctatggcttctgggcggact

SEQ ID NO: 278877 - DNA, 201 bp, Homo sapiens
acatcttcttcccgatggtgccttcgcggatgatgtagtcacccggctggaagacctcgaacttgagcttggtcagcatggccgtgacgaagttggggtcrgcgttggcgaacagcggcatggaggccaccagcttccggcagttgaagttgacgatctcctgcaggggggaggcagggctgggtccgctgcggaccccac

SEQ ID NO: 278878 - DNA, 201 bp, Homo sapiens
ttcaaatacaaatcacgtgtgactctcaaattttgaaaatgaccaaaaaagtagggagaaattctgctaatgccttgagcatttccttccgttctttctcrgggctcgtgaatctgtctgggcaggggtgcttttggcctcgtcggggggcagcctgcagagccctcgtcaggatgaggctttggtgttggggttgacttt

SEQ ID NO: 278879 - DNA, 201 bp, Homo sapiens
  misc_feature (1)...(201): n = A,T,C or G
acagccacaccgagacctgcaggctagcaggaggtggtcacgaggttcccctggggtctgtggaagcccagcgtggggctggcccgtccctcgagcaggcngcctgcaccacaggtgtctggaacagatgagccaggaggggctgaagctgcaggcactcttcaccgccgttctgctgtctgaggaggatcgggccactgt

SEQ ID NO: 278880 - DNA, 201 bp, Homo sapiens
tgagtgcagccgggagccgggccacctgccctggtcgttggagacaggaacttgccctcatttagactggacttttctctcttagcccccaggttcaagtsctttgttttttattttaataattcttttaggcttttcaaatacaaatcacgtgtgactctcaaattttgaaaatgaccaaaaaagtagggagaaattctg

SEQ ID NO: 278881 - DNA, 201 bp, Homo sapiens
  misc_feature (1)...(201): n = A,T,C or G
gcagaagcggaagctgctcacgctggacatgtacaacgccgtgatgcttggctgggcgcggcaggtgagtgcagccgggagccgggccacctgccctggtngttggagacaggaacttgccctcatttagactggacttttctctcttagcccccaggttcaagtcctttgttttttattttaataattcttttaggcttt

SEQ ID NO: 278882 - DNA, 201 bp, Homo sapiens
gcttccctgtgcttgcttcccgccggtgcttctgtcccacatcctgtctgcgtccattaggcagccgggaagggagaggcgggagaacctttataaagggaaaaaacctggccaggtgcggtggctcacgcctgtaatcccagcacttttgggtggccgaggtgggcggatcaagaggtcgggggttcgaggcctggtgcg

SEQ ID NO: 278883 - DNA, 201 bp, Homo sapiens; identical to SEQ ID NO: 56413

SEQ ID NO: 278884 - DNA, 201 bp, Homo sapiens
ttcctgcctcggcctcccaaagtgctgggatgaccgacgtgagccgccatgcccggccagcaatagatttccaacaaggcttctttaaagagatacagaamacttaggcattgattggttggcaaaaatgcaacctgaggcggcacgagcaggagccgcgttttccctgcgagctagtggctcagcgtccaccggtgtaga

SEQ ID NO: 278885 - DNA, 201 bp, Homo sapiens
cttaggtgatcttcctgcctcggcctcccaaagtgctgggatgaccgacgtgagccgccatgcccggccagcaatagatttccaacaaggcttctttaaasagatacagaacacttaggcattgattggttggcaaaaatgcaacctgaggcggcacgagcaggagccgcgttttccctgcgagctagtggctcagcgtcc

SEQ ID NO: 278886 - DNA, 201 bp, Homo sapiens
cccactttccagggacataggtgaggcccaagattatgtctggagagaccccccccccggccccgccgccaaggccacatgtgcagagccaggatgtgaascctgaactgactcagctgtcctggcttggctctggggggtaggcgcctaatggagactggatgactgcgaaacttgggagggacagcccaggctccagcg

SEQ ID NO: 278887 - DNA, 201 bp, Homo sapiens
cagccctggcccctgccagtgcagatggagctgggcaagctgctggcggagatgctggtgcaggctacgcagatgccatgcagcctggacaagccgcatcrttcctctcggcttgtccccgtgctctaccacgtgtattccttccgcaacgtccagcaggtgccaggcagtgccctcctgagctggggggcatcccgctgg

SEQ ID NO: 278888 - DNA, 201 bp, Homo sapiens
cggtgcccagtgtcccttctagaggggtcgaggccaggagggtcaaggcctttggtttgcactgctggcactgactttacccgcagcccgcctttccccgygtcagcgatagccaccagcaacttgcaggagacgcagaaacgcgtgcacccatgctgtctcggggtcctgggagggcaggtcgccctctggcaagccccc

SEQ ID NO: 278889 - DNA, 201 bp, Homo sapiens
ccactcttaagcagccactgggtcaaaggagaaattgctcagaacagggatgtcaggaaaaatgaatacaagaaaaaaattatatatatatgttattttayatatatatatatatgtgtgtgtgtgtatattttaagacagagtctccaagtctgtcgacagcaaagtttctgtctcccaggctggagtgcagtggtgaga

SEQ ID NO: 278890 - DNA, 201 bp, Homo sapiens
ggagttcaatggcgctatcttgagtcactgcaacctctgcctcccaggctcaagcaattctcctgcctcagcctcccaagtagctggtactatagacacaygccaccacgcccagctaattttttggatttctaatagagacggggtttcaccatgttggccaggctggtctcgaactcctgaccttaggtgatcttcctg

SEQ ID NO: 278891 - DNA, 201 bp, Homo sapiens
cgatggccaccgtctcgaaggcgcgccgcatcatggggtactcctccagcacctcgttgaagttgtccacgctcagcgaatagaggcggcagtaggtgtcrgcccgcacgctcgccgtgcggcggccccgggtgagcaggcagatctctgcacgtggcgcgcaggggggggttgctggacgaggcgggcgccgcggccctc

SEQ ID NO: 278892 - DNA, 201 bp, Homo sapiens
agcggggcatgcgggtggcacaggtgctggaaggtttcatcacccgcaaggtggtgaagcagacggtgatgacggtggtgtacggggtcacgcgctatggygggcgcctgcagattgagaagcgcctccgggagctgagcgactttccccaggtgcgccaggcatgtcgcgctgcgaacacgttggtttcactgccattta

SEQ ID NO: 278893 - DNA, 201 bp, Homo sapiens; identical to SEQ ID NO: 56420

SEQ ID NO: 278894 - DNA, 201 bp, Homo sapiens
aagcccgtgctccgagagtttccgctgcgtttagggctcctttgcccttcgacccttcggcttctgcctttatggaggcccccgcccacacgcccggcccygctcagccgctctcgtctttcccgcagggaccgccggtggcgtctgcggccccaggaggagctcgtccgccagcccccaggagcaagaccaagaccgcag

SEQ ID NO: 278895 - DNA, 201 bp, Homo sapiens
agcctggacaagccgcatcgttcctctcggcttgtccccgtgctctaccacgtgtattccttccgcaacgtccagcaggtgccaggcagtgccctcctgarctggggggcatcccgctgggaggaccagggaccccatggggttggcgcctttgggcggagccttgatctcagcgcagccgtcagtacctcccaggactcg

SEQ ID NO: 278896 - DNA, 201 bp, Homo sapiens
gaggtctaccatacagaggttgtttagaaactgccccaaaaccggccgggcacagtggctcacgcctgtaatcccagcactttgggaggctgaggcgggcrgatcacgaggtcaggagatgagaccatcctggctaacacagtgaaaccccgtctctactaaaaatatacaaaaaattagccgggtgtggtggcgggcgcc

SEQ ID NO: 278897 - DNA, 201 bp, Homo sapiens; identical to SEQ ID NO: 56444

SEQ ID NO: 278898 - DNA, 201 bp, Homo sapiens
aagagcacagagaagacaggaggagcgcccgccttccgggtcccagcatcagaggcaggcaaaacacagaaatgagactttggtccaaaatttgaaggaaraaaaaaccctgaagtttgagagcaagttttctaggcgactgcaggtgaaggcgtggtgtaaggcaaccggaggcgatgccagaggcggcgacacgcccgc

SEQ ID NO: 278899 - DNA, 201 bp, Homo sapiens
gcgggaatatgttctggaagttcttggagcccggcttcttgaagcggtgcaggggtgagttgccgtagtccttggtcaggccctggtcctcctggccctcrcggggcagctgcacgttctggtgcttcgagagcgtgatgcggatgggcttcccgtgcagcttgtgcccgttcaggtggctcatggctgggggagcagcac

SEQ ID NO: 278900 - DNA, 201 bp, Homo sapiens
tgattagagggctggggttggggtgtcgcagccgcggccgccgcgccccagctgcatgatcctgcaggagccggccaggccccctgcctctctctggtgtracccccccaccccttgggtccccaggacaccccgggtgggtgtgtggctgcaggaaggcaggttttttaaggcacaaggaagccaagtcgtggtcggggc

SEQ ID NO: 278901 - DNA, 201 bp, Homo sapiens
cttgttacacgcttttacggaaaggggatcctaggagagcccccgggacaggacgcgggggcggtagaaagagcacagagaagacaggaggagcgcccgcyttccgggtcccagcatcagaggcaggcaaaacacagaaatgagactttggtccaaaatttgaaggaagaaaaaaccctgaagtttgagagcaagttttct

SEQ ID NO: 278902 - DNA, 201 bp, Homo sapiens
gggcggggctcacgctggacgcctcttacaggaagaccttcccgtcccagcacgccacgctgtcagccttcgccgcggtctatgtgtcggtgagtccggcmcctcactgcccttcccaggccctcttgctgacccgtggggagccctccctgaccccaacccccatgccccagatgtacttcaactcggtcatctcggaca

SEQ ID NO: 278903 - DNA, 201 bp, Homo sapiens
agggctggggttggggtgtcgcagccgcggccgccgcgccccagctgcatgatcctgcaggagccggccaggccccctgcctctctctggtgtgacccccycaccccttgggtccccaggacaccccgggtgggtgtgtggctgcaggaaggcaggttttttaaggcacaaggaagccaagtcgtggtcggggcgcccacc

SEQ ID NO: 278904 - DNA, 201 bp, Homo sapiens
tcttcgcctttgccatcgccgcgggcgtatgcgggctcacgcagatcacgcagtaccgcagccaccctgtggacgtgtatgccggcttcctcatcggggcrggcatcgctgcctacctggtgagtggcaggttctgatgggggtcggcatgggttcccaggggatctgaggggggaggcatgagtgcccacagggcctgag

SEQ ID NO: 278905 - DNA, 201 bp, Homo sapiens
ctgaggggggaggcatgagtgcccacagggcctgagtggggaggctggcccaggggtctgaggtgggaggcaggctcagggggtctgacaggggaggctgrtagcctgaggggtgaggcatggttcccaggggttctggcggggggctggcccagagggtctgaggggggaggcatgggtgcccaggggctctagggggga

SEQ ID NO: 278906 - DNA, 201 bp, Homo sapiens
ggcccctgccgcctcggtgagcacctgcaccggggcctgtgccagcctgtgggcaccacggctgggagcccacccccgccacctcggtgaacatccacacyggggcctgtcggtgaacatccacaccggggcctgtgccagcctgtgggcaccgcagccactgccacctcggtgaacatccacaccggggcctgtgccagc

SEQ ID NO: 278907 - DNA, 201 bp, Homo sapiens
ggtgagttgcgggacgcgccccgaccctgagctacctccacatgcagggggtggggctgtcccgggtccccagctccccgcctggccgagccttccgcccygcaggtgtccacgtgttcggcctgtgtgccacagccctggtgacggacgtgatccagctggccacgggttaccacactcccttcttcctcaccgtctgca

SEQ ID NO: 278908 - DNA, 201 bp, Homo sapiens
tgtgccagcctgtgggcactgcagatgggagcccgcctgagcgccccctccctgtgggcaccgaggcctgagcgccccctccctgttggcagatcatggtrgccgagggcatgttgtactgtctgcagtcccggctgtggggccgtgccggggggcccgccggggcggagggcagcatcaacgccggcggctgcaacttca

SEQ ID NO: 278909 - DNA, 201 bp, Homo sapiens
cccttcttcctcaccgtctgcaagcccaactacactctcctgggcacgtcctgcgaggtcaacccctacatcacgcaggacatctgctccggccacgacayccacgccatcctgtctgcacggtgagccggacccccaactcccctgactgggagccttcttccgccccggtgaacatgcggggaaacagagacacagaga

SEQ ID NO: 278910 - DNA, 201 bp, Homo sapiens
gccggggggcccgccggggcggagggcagcatcaacgccggcggctgcaacttcaactccttcctgcggcgtacggtgcggtttgtgggtgagttgcgggmcgcgccccgaccctgagctacctccacatgcagggggtggggctgtcccgggtccccagctccccgcctggccgagccttccgccccgcaggtgtccacg

SEQ ID NO: 278911 - DNA, 201 bp, Homo sapiens
tgccacagtcaccaagagcctgagctgtccctgtcaccgcagggtgagcaaggtgaactagatttaatttttttaaaaacaggtaaactgatttctctttwaaaaaataaaatctctggtctgctaaggtcacttcagctgtttttaaagtggcttttctctggaatgatggaagttgtcgccagggggcccggccgtggg

SEQ ID NO: 278912 - DNA, 201 bp, Homo sapiens; identical to SEQ ID NO: 56448

SEQ ID NO: 278913 - DNA, 201 bp, Homo sapiens
cagaacagcctgaaatgctgattccaggaggatcccatccatcaagagttacatattttgggcctcttgtttcacccaagctctccccgaggggaatttawccattctgggaaataacggatccaccagttaagtgacaggctctcgagccacaggggctgcccacaccccgccgcgctaaccctgtgtgtcccgctgacc

SEQ ID NO: 278914 - DNA, 201 bp, Homo sapiens
gccctctgagccccaggcctcacccccagacccctctccccgacaggcctgccacgcggtgggcaacttccaggccccacctgcagagaagcccgcggccycggcccccgccaaggacgcgctgcgggccctgacgcagcggggccacgactcggtttatcagcagaataagtcggtgagcaccgacgagctggggccccc

SEQ ID NO: 278915 - DNA, 201 bp, Homo sapiens; identical to SEQ ID NO: 56450

SEQ ID NO: 278916 - DNA, 201 bp, Homo sapiens
atcccgtgggctcagacctgcccgatgtgctgggtcagcaaccttggggtgggaaccggtcccactggacaagagcttgccagcccccacccccggtccaragccccccgcggcaagtccaacgatcacaggggaggagccctctgagccccaggcctcacccccagacccctctccccgacaggcctgccacgcggtggg

SEQ ID NO: 278917 - DNA, 201 bp, Homo sapiens
aaaaaagtagcaaaaaaacacaggtcagtaaatacataagaatcaggtagtgttctatcagtcacactccacacacattccagttacaggtttacctcgasgggcacacggtaagagaagcaccttcactcacatgccggcagagacagcgctgctggaggggctcccagaagccgatcccaaccacgccccccaggagcg

SEQ ID NO: 278918 - DNA, 201 bp, Homo sapiens
gcatgggtgctgaagtgtctcgcccttggaatgctggagtcagaatcccgtgggctcagacctgcccgatgtgctgggtcagcaaccttggggtgggaacyggtcccactggacaagagcttgccagcccccacccccggtccagagccccccgcggcaagtccaacgatcacaggggaggagccctctgagccccaggcc

SEQ ID NO: 278919 - DNA, 201 bp, Homo sapiens
ggaggctggcccaggggtctgaggtgggaggcaggctcagggggtctgacaggggaggctggtagcctgaggggtgaggcatggttcccaggggttctggyggggggctggcccagagggtctgaggggggaggcatgggtgcccaggggctctaggggggaggcacgggtgcccagggtgtctgaggggatagacgtggg

SEQ ID NO: 278920 - DNA, 201 bp, Homo sapiens; identical to SEQ ID NO: 56451

SEQ ID NO: 278921 - DNA, 201 bp, Homo sapiens; identical to SEQ ID NO: 56452

SEQ ID NO: 278922 - DNA, 201 bp, Homo sapiens
ccacacaccgacgcggtaggacagccaagcagagcccttgcccgcccccggccccatgagccccccggcccagcactcacgggatgttggagaggtgcagmgtggccgagggcgggaatatgttctggaagttcttggagcccggcttcttgaagcggtgcaggggtgagttgccgtagtccttggtcaggccctggtcct

SEQ ID NO: 278923 - DNA, 201 bp, Homo sapiens
cctgaccccaacccccatgccccagatgtacttcaactcggtcatctcggacaccaccaagctgctgaagcccatcctggtcttcgcctttgccatcgccrcgggcgtatgcgggctcacgcagatcacgcagtaccgcagccaccctgtggacgtgtatgccggcttcctcatcggggcgggcatcgctgcctacctggt

SEQ ID NO: 278924 - DNA, 201 bp, Homo sapiens
ccttcttccgccccggtgaacatgcggggaaacagagacacagagaggccactggagctggggtccccaggtgggcggggctcacgctggacgcctcttayaggaagaccttcccgtcccagcacgccacgctgtcagccttcgccgcggtctatgtgtcggtgagtccggcccctcactgcccttcccaggccctcttgc

SEQ ID NO: 278925 - DNA, 201 bp, Homo sapiens
gccggccgcagggcagcctggggagagccagggacagcccgcctcatactcactggaagaacttgaatcctttgacgacgcccccattgctggaaaacagkaccttgagatcctcctcggagactgagggcctgtgggaggagaaaggcgtgagcctggggccgcgtgggggtgggggcgcccagtcaggtccgcgaggct

SEQ ID NO: 278926 - DNA, 201 bp, Homo sapiens
ggtgcaggggtgagttgccgtagtccttggtcaggccctggtcctcctggccctcgcggggcagctgcacgttctggtgcttcgagagcgtgatgcggatsggcttcccgtgcagcttgtgcccgttcaggtggctcatggctgggggagcagcacccgcgtgaccaggcgcccgagagggaacgcagcccccgcccctgc

SEQ ID NO: 278927 - DNA, 201 bp, Homo sapiens
gccccccagtggggcagcatgggccctccctgttgccggcatcgttattttctcccagctcctgatgggtcccttgggttgtgcttcggggcggggcaggygggtgtgactgcactgcgcccgtccagcctcccacccgcacctcctgcccttcccgagccccctcctctgtcatttctccccctggagttcctcacgcac

SEQ ID NO: 278928 - DNA, 201 bp, Homo sapiens
  misc_feature (1)...(201): n = A,T,C or G
agaccatcaggtaggccgggctcccccgcaggctgtggcgccaaggcctgattcgggacctgccagctggcggtcctgggcctcgctgtacctgcacggtnggtgctttcacggggcctgcggcactgtgtgtcggtgcagactcccaccaggaccccaggccggccccaccgtctggaaccacctagaggtgtcccgccc

SEQ ID NO: 278929 - DNA, 201 bp, Homo sapiens
tgctgtggtcgccgtttctgcctgttttttcatctgtgtgcgtgttggcctcgtggcagcccaagtcccgctgagctgtgtcgggcaggctgccgtggagsccggcttggtcagggatgttggtcttgctgaacaggacctccagaccgtcctccagctcatgctggcggtgtgccggcggcacctccacggcgcaggtca

SEQ ID NO: 278930 - DNA, 201 bp, Homo sapiens
cctcggtggccccggtccggtcgtgtcacctggcccaggtggctggctccttggcccggttcttcccggccacctccctgaggcaccacctccttgagatyccagcacagaaataaaagccacactatttttatccctcaaaactccctgtgggccaacacacatgtgccatgtggactctgctgtggtcgccgtttctgc

SEQ ID NO: 278931 - DNA, 201 bp, Homo sapiens
cacgtcctcatccttccgggacccggggcgctgggagcctcacgtcctcgtcctccgggacccggggcgctgggagcctcacgtcctcgtccttccgggayccggggcgctgggagcctcacatcctcgtccttccgggacctgaggcgctgggagcctcatgtcctcgtccttccgggacccggggcgctgggagcctca

SEQ ID NO: 278932 - DNA, 201 bp, Homo sapiens
  misc_feature (1)...(201): n = A,T,C or G
tcaggtaagccggcccaaccccctgtgtccacccagaacatcaggtaggccgggctccgtcccgtatccacccagaccatcaggtaggccgggctcccccncaggctgtggcgccaaggcctgattcgggacctgccagctggcggtcctgggcctcgctgtacctgcacggtaggtgctttcacggggcctgcggcactg

SEQ ID NO: 278933 - DNA, 201 bp, Homo sapiens
tcctttcccagagtccagaggcgcccgcatccctcagctccaggcccttcctcccccttcacctccaagagcgcaacctcttccagtctctgactctcggygcccgccccccaccgccctcttaaacggaccctgtgaggacatgggcccccatcaccccggatgctctgccgtctcagggttcttatcacacctgtagag

SEQ ID NO: 278934 - DNA, 201 bp, Homo sapiens
cctctgtcatttctccccctggagttcctcacgcacagggctttgtcctaagtggtcgccacacgccgttttaagagaaacctgagcgttggggtgagcgycggacctgggggaggggggccgggcaggggccgagtccaggcacgtgggtggcgccctcacccaccctgtccccccaggaagcaggtcctggggaccaag

SEQ ID NO: 278935 - DNA, 201 bp, Homo sapiens; identical to SEQ ID NO: 56488

SEQ ID NO: 278936 - DNA, 201 bp, Homo sapiens
aggtgatccaccctcctcggcctcccaaagtgctgggattacaggtgtgagccacggcgcccggcacgaagaaggaatttaacctggttgtggtggtgtgyacgtgtggtcccagctacctgggaggctgaggtgggaggactgtttgagcccaggagttcaaggccagcctgagcaacaggaacgggggcagggagggag

SEQ ID NO: 278937 - DNA, 201 bp, Homo sapiens
gctgccctccctggtcttggcgtgggagggaggagactgatgcaggtccagcccctgctgttctgggggcctgagacagaagcagaggccatgaggccagrtgaaggtcacctgctgggtgggtccaggcgtccccgtgaccctcagggccagagaagagccggaaggctggggtgccccgggccgccccactccgaccca

SEQ ID NO: 278938 - DNA, 201 bp, Homo sapiens
ccgtctctgggttggtcacctcgtgccacgtgtgccgcctgggcctcgtccccaggtacaagcactgggccgtgttgcccgtgtgtcctggagtgtagtcyaggcaggacgtgcgggtgtgagggcagccccgggtctgacggaggggtctgcaccttgctgccctccctggtcttggcgtgggagggaggagactgatgc

SEQ ID NO: 278939 - DNA, 201 bp, Homo sapiens
aggtgctttcacggggcctgcggcactgtgtgtcggtgcagactcccaccaggaccccaggccggccccaccgtctggaaccacctagaggtgtcccgccmtcctcagtcctggggccttctccttacccagccgtctctgggttggtcacctcgtgccacgtgtgccgcctgggcctcgtccccaggtacaagcactggg

SEQ ID NO: 278940 - DNA, 201 bp, Homo sapiens
ccggaggctgggatggccaggcccccgggtttagaatccagaggctgggatggccaggccccccggtttagaatccggaggccggggtggccaggcccccsggtttagaatcctgctgaggccacggagaggctcaggccgtttttgcgtttcccatctcacctgtgctggttcccgtctccagggatggtcctgcctcct

SEQ ID NO: 278941 - DNA, 201 bp, Homo sapiens
tggccaggcccccgggtttagaatccggaggctgggatggccaggcccccgggtttagaatccagaggctgggatggccaggccccccggtttagaatccrgaggccggggtggccaggcccccgggtttagaatcctgctgaggccacggagaggctcaggccgtttttgcgtttcccatctcacctgtgctggttcccg

SEQ ID NO: 278942 - DNA, 201 bp, Homo sapiens
ccggaggccggggtggccaggcccccgggtttagaatccggaggctgggatggccaggcccccgggtttagaatccagaggctgggatggccaggcccccsggtttagaatccggaggccggggtggccaggcccccgggtttagaatcctgctgaggccacggagaggctcaggccgtttttgcgtttcccatctcacct

SEQ ID NO: 278943 - DNA, 201 bp, Homo sapiens
ggccaggccccccacgtttagaatccggaggccggggtggccaggcccccgggtttagaatccggaggctgggatggccaggcccccgggtttagaatccrgaggctgggatggccaggccccccggtttagaatccggaggccggggtggccaggcccccgggtttagaatcctgctgaggccacggagaggctcaggcc

SEQ ID NO: 278944 - DNA, 201 bp, Homo sapiens
gcacaccctggtagcagccagccccagagcccagagccgtgcctggtcggtgataggggctcgagcccattgcctgcggctgcagcctcgttcctgttttstgtcaaatggggtcagcgtgccgcctggccctgctgtgccacccccggaagcccctttgcttccagtcctggggggacattcttgacgcgtgtcctggag

SEQ ID NO: 278945 - DNA, 201 bp, Homo sapiens
cttggtcagggatgttggtcttgctgaacaggacctccagaccgtcctccagctcatgctggcggtgtgccggcggcacctccacggcgcaggtcagttcycaccctggccctcccctgcgtctccccacagccgccacctctgcggtgccgtccccggggcaccgtcacccccccagcccgtccaccctggccctcccct

SEQ ID NO: 278946 - DNA, 201 bp, Homo sapiens
acctatttttgttggtattttgtataaacagaatcttaaaaacaacttttaaaatattgcacacataatgcatgtgtcttcctcgccccaggacccaggarcatccagggcaccttccatcctgcactcgctggtacctggtgtcgtggggtcatctcggggcagcatcctggtgctgggcggtctcggctctgagcagcc

SEQ ID NO: 278947 - DNA, 201 bp, Homo sapiens
  misc_feature (1)...(201): n = A,T,C or G
cgcaggctgtggcgccaaggcctgattcgggacctgccagctggcggtcctgggcctcgctgtacctgcacggtaggtgctttcacggggcctgcggcacngtgtgtcggtgcagactcccaccaggaccccaggccggccccaccgtctggaaccacctagaggtgtcccgccctcctcagtcctggggccttctcctta

SEQ ID NO: 278948 - DNA, 201 bp, Homo sapiens
ttgatctcacgatccagacgtgacctttgactccttttagcgttcagggacctcgttcttggggccagagggacaaagcgaggggccctgtgtgagcggtrgggaacgagcaccctgtccaggaatctccccctcccaccgtcacttcctgccaagagcctggacacgacacgacactgcagggcccggcccgctctgccc

SEQ ID NO: 278949 - DNA, 201 bp, Homo sapiens
cctcgtggcagcccaagtcccgctgagctgtgtcgggcaggctgccgtggagcccggcttggtcagggatgttggtcttgctgaacaggacctccagaccrtcctccagctcatgctggcggtgtgccggcggcacctccacggcgcaggtcagttcccaccctggccctcccctgcgtctccccacagccgccacctctg

SEQ ID NO: 278950 - DNA, 201 bp, Homo sapiens
catccgcctcggcctcccaaagtgcagggattacaggcgtgagccaccgcggccggcctttttttttttttttttttttggagacagagttatactctctygcctaggctgcagtgcagtggtgcgatctcggctcactgcagcctccactactcgggttggagcagttctcccccttcatcctgccaagcagctgggatt

SEQ ID NO: 278951 - DNA, 201 bp, Homo sapiens
cagctctctccaggcctcccggctcgggcccgcgtcccggaccccgacctcagaagctccgggctcgctcatcccagctggtcttggcctttctcagagtscactgaacaggtggcttcttgggacccaaaccccgagttctgggccgtttcttctgccctctggcggtttaattccaagcagtttctggatgtttttgtt

SEQ ID NO: 278952 - DNA, 201 bp, Homo sapiens
ccccaacctggctctttgtcccccatcctggcaggcagctcctttgggacccagatcatcgggggccgggaggtgatcccccactcgcgcccgtacatggyctcactgcagagaaatggctcccacctgtgcgggggtgtcctggtgcacccaaagtgggtgctgacggctgcccactgcctggcccagcggtgagtaccc

SEQ ID NO: 278953 - DNA, 201 bp, Homo sapiens
tgcctccccctccgcccctgcgagaaagagggagcggagcccaggccgcgccggcctttcagctgccctccccgccctccccggaggagacaaagaggccyccccagaccccgtagctgctattgttggggagctgggcccgtgagcgggggagcgaggccagcctgggggtggctggcgcggccactcgctcagtctcca

SEQ ID NO: 278954 - DNA, 201 bp, Homo sapiens
gcccgtcaccacgcccggctaattttttgtatttttagtagagacggggtttcagcgtgttagccaggatggtctcgatctcctgacctcgtgatccatcygcctcggcctcccaaagtgcagggattacaggcgtgagccaccgcggccggcctttttttttttttttttttttggagacagagttatactctctcgcct

SEQ ID NO: 278955 - DNA, 201 bp, Homo sapiens
tcgttcctgttttctgtcaaatggggtcagcgtgccgcctggccctgctgtgccacccccggaagcccctttgcttccagtcctggggggacattcttgaygcgtgtcctggaggtggagccgggggcaggttcctcgtaggtcctggtgtgcgcggtgcagcccctcatagggccgggtgtacacggtgccctccaggaa

SEQ ID NO: 278956 - DNA, 201 bp, Homo sapiens
agccaggttcaagcccagcttcttgccccttttcctctttttttttgtttgagacagagtctctctctgtcacccaggctggagtgcagtggcgcgatctyggctcactgcaagctccgcctcccgggttcacgccattctcctgcctcagcctcccaagtagctgggactacaggcgcccgtcaccacgcccggctaatt

SEQ ID NO: 278957 - DNA, 201 bp, Homo sapiens
agggtccagccaggttcaagcccagcttcttgccccttttcctctttttttttgtttgagacagagtctctctctgtcacccaggctggagtgcagtggcrcgatctcggctcactgcaagctccgcctcccgggttcacgccattctcctgcctcagcctcccaagtagctgggactacaggcgcccgtcaccacgcccg

SEQ ID NO: 278958 - DNA, 201 bp, Homo sapiens
catctacgaggtgagcgcggcccccacgggcctcaagtcctcatcctccgggacccagggtgctgggagcctcacgtcctcatccttccgggacccggggygctgggagcctcacgtcctcgtcctccgggacccggggcgctgggagcctcacgtcctcgtccttccgggacccggggcgctgggagcctcacatcctcg

SEQ ID NO: 278959 - DNA, 201 bp, Homo sapiens
tctgtcatttctccccctggagttcctcacgcacagggctttgtcctaagtggtcgccacacgccgttttaagagaaacctgagcgttggggtgagcgtcrgacctgggggaggggggccgggcaggggccgagtccaggcacgtgggtggcgccctcacccaccctgtccccccaggaagcaggtcctggggaccaaggt

SEQ ID NO: 278960 - DNA, 201 bp, Homo sapiens
ccagggtgctgggagcctcacgtcctcatccttccgggacccggggcgctgggagcctcacgtcctcgtcctccgggacccggggcgctgggagcctcacrtcctcgtccttccgggacccggggcgctgggagcctcacatcctcgtccttccgggacctgaggcgctgggagcctcatgtcctcgtccttccgggaccc

SEQ ID NO: 278961 - DNA, 201 bp, Homo sapiens
gccgagtccaggcacgtgggtggcgccctcacccaccctgtccccccaggaagcaggtcctggggaccaaggtggacgcggagcgtgacggcgtgaaggtscccaccacgctggccgagtactgcgtgaagaccaaggcgccggcgcccgacgagggctcagacctcttctacgacgactactacgaggacggcgaggtgg

SEQ ID NO: 278962 - DNA, 201 bp, Homo sapiens
aagcacctgctggcctctggaggtcacagggtagctgccctggccgtccctctggtgcagatgtcctcggtggccccggtccggtcgtgtcacctggcccrggtggctggctccttggcccggttcttcccggccacctccctgaggcaccacctccttgagatcccagcacagaaataaaagccacactatttttatccc

SEQ ID NO: 278963 - DNA, 201 bp, Homo sapiens
tgagccccacagccccttctcttgggtgcctgtgttcacatgaatgtgtaaacacgtgcgtgtctgtgtacaaagacaaggctttctttacgggttgacgrccttaatggttcctgctcttcctgttacatagaggcccttcctatccatttttttttttctcagagtgatattgcatagatttcctcacagaggcctcac

SEQ ID NO: 278964 - DNA, 201 bp, Homo sapiens
acccagggacgtccctgaggccagacgcctgccctccacgcgtcatgcatccccataaaaagcactgggcttgtgggctgggcttggggctgtctgtctgytccctggtgccctcccatgcgggcactgtgggacccgcacaccctggtagcagccagccccagagcccagagccgtgcctggtcggtgataggggctcga

SEQ ID NO: 278965 - DNA, 201 bp, Homo sapiens
cacgcagaacgtcaggtaagccggcccaaccccctgtgtccacccagaacatcaggtaggccgggctccgtcccgtatccacccagaccatcaggtaggcygggctcccccgcaggctgtggcgccaaggcctgattcgggacctgccagctggcggtcctgggcctcgctgtacctgcacggtaggtgctttcacggggc

SEQ ID NO: 278966 - DNA, 201 bp, Homo sapiens
cgtcctcgtcctccgggacccggggcgctgggagcctcacgtcctcgtccttccgggacccggggcgctgggagcctcacatcctcgtccttccgggaccygaggcgctgggagcctcatgtcctcgtccttccgggacccggggcgctgggagcctcacgtcctcgtcctccacgtcctcatcctccgggacctggggca

SEQ ID NO: 278967 - DNA, 201 bp, Homo sapiens
ccggggcgctgggagcctcacgtcctcgtcctccgggacccggggcgctgggagcctcacgtcctcgtccttccgggacccggggcgctgggagcctcacrtcctcgtccttccgggacctgaggcgctgggagcctcatgtcctcgtccttccgggacccggggcgctgggagcctcacgtcctcgtcctccacgtcctc

SEQ ID NO: 278968 - DNA, 201 bp, Homo sapiens; identical to SEQ ID NO: 56485

SEQ ID NO: 278969 - DNA, 201 bp, Homo sapiens; identical to SEQ ID NO: 56489

SEQ ID NO: 278970 - DNA, 201 bp, Homo sapiens
cgctgctgctggagctcaaggggctgcaggaagagccggtcgagggattccgcgtgacactggtggacgagggcgatctatacaactgggaggtggccatyttcgggccccccaacacctactacgagggcggctacttcaaggtgagcgcggcgacccccgcccgggtcccggagcccacgagcgacctcgggcgccggg

SEQ ID NO: 278971 - DNA, 201 bp, Homo sapiens
ggccgtttcctgacactaccagcctgggaggcccaggtgtagcggtccgaggggcccggtcctgcctgtcagctccaggtcctggagccacgtccagcacwgagtggacggattcaccgtggccgactcttttccctgctttggtttgtttgaaatctaaataaaactactttatgagaggccagagaagctgtgcttggg

SEQ ID NO: 278972 - DNA, 201 bp, Homo sapiens; identical to SEQ ID NO: 56486

SEQ ID NO: 278973 - DNA, 201 bp, Homo sapiens
cgcgggtccacagccgcctgggcgttgatctcagcgtctcagggctcccaggaccacagatgcccccgatcagcactccggcggctccagctccgtccagrcacaccctcggggtggggagccgtggccctgggcacacagggcaggcacctcacgtcctggtgtcaggaagtccccagcatcgttttattacatgtcatg

SEQ ID NO: 278974 - DNA, 201 bp, Homo sapiens
gggctcccccgcaggctgtggcgccaaggcctgattcgggacctgccagctggcggtcctgggcctcgctgtacctgcacggtaggtgctttcacggggcytgcggcactgtgtgtcggtgcagactcccaccaggaccccaggccggccccaccgtctggaaccacctagaggtgtcccgccctcctcagtcctggggcc

SEQ ID NO: 278975 - DNA, 201 bp, Homo sapiens
aggaggggcccgtccacgatccaagacccccaaagtgccctgcctgtccgggaggggcctcgcccacaatccaagacccccgagtaccctccctgtccagrcctcgcccacgatccaagacccccgagtgccctccctgtccagacctcacccacgatccaagaccccctgagtgccctccctgtccagacctcgcccacg

SEQ ID NO: 278976 - DNA, 201 bp, Homo sapiens
ctgacggaggggtctgcaccttgctgccctccctggtcttggcgtgggagggaggagactgatgcaggtccagcccctgctgttctgggggcctgagacaraagcagaggccatgaggccagatgaaggtcacctgctgggtgggtccaggcgtccccgtgaccctcagggccagagaagagccggaaggctggggtgccc

SEQ ID NO: 278977 - DNA, 201 bp, Homo sapiens
cgtctggaaccacctagaggtgtcccgccctcctcagtcctggggccttctccttacccagccgtctctgggttggtcacctcgtgccacgtgtgccgccygggcctcgtccccaggtacaagcactgggccgtgttgcccgtgtgtcctggagtgtagtccaggcaggacgtgcgggtgtgagggcagccccgggtctga

SEQ ID NO: 278978 - DNA, 201 bp, Homo sapiens
gcatcgttattttctcccagctcctgatgggtcccttgggttgtgcttcggggcggggcaggcgggtgtgactgcactgcgcccgtccagcctcccacccrcacctcctgcccttcccgagccccctcctctgtcatttctccccctggagttcctcacgcacagggctttgtcctaagtggtcgccacacgccgttttaa

SEQ ID NO: 278979 - DNA, 201 bp, Homo sapiens
tgggatggctgggtcaaatggtatttctagttctagatccctgaggaatcaccacactgacttccacaacggttgaactagtttacagtcccaccaacagygtaaaagtgtccctatttctcgacatcctctccagcacctgttgtttcctgactttttaatgattgccattctaactggtgtgagatggtatctcattgt

SEQ ID NO: 278980 - DNA, 201 bp, Homo sapiens
ttaatatagtccagcaaaattaaaaaaggaagcaaaggagactgtactgtactgaagcccacacttatggctgctgttccggtgagtacagaatatgaatrtgaacataagaggattgtttatataatttattgatcgtacttggaccttttaaaaagtaatactcttagatatgtctacattttaaaataattttacctt

SEQ ID NO: 278981 - DNA, 201 bp, Homo sapiens
gttttcaacttctttgcctttggtttgaatgtcctcccgtagctcggagtaatttgattgtctgaagccttcttctctcagctcgccagagtcattctccrtccagctttgttccgttgctggtgaggaactgcattcctttggaggaggagaggcgctctgctttttagagtttccagtttctctgctctgttttttccc

SEQ ID NO: 278982 - DNA, 201 bp, Homo sapiens
tgacattgagatgttcaaccagttgaggaatctttcccagagcttataaattagtgtgttgccaagaataatgtatgcgtacattaaaatcatttatcctycctttattaaggttactgtttaaaaaggtcaaggccctgctgggagggaatgtccgcatgatgctgtctggaggggccccgctatctcctcagacacacc

SEQ ID NO: 278983 - DNA, 201 bp, Homo sapiens
ctgacatatgattgcttatttctggtattaaaacaagatttcataaaataaacatgacaattaaactcgttgtttgaagtactgaactttgtaggtcaatyttgaaaaaggaagctacatgactgtcttagcaatatttataggtatattatatgtaagtgggtgggtttcttggaaattgaattggtaatatggctttag

SEQ ID NO: 278984 - DNA, 201 bp, Homo sapiens
aagccaattttctctctggacctttacagaaaaagtgctgaccccagagataaggtaaccttataaattgttgattacacacacacacacacacacacacmcacacacacacacacacacacacaatttaacaaactaccctgactttttataccttctggttacatttccaggtgatattgtgattcaggagagtgcatt

SEQ ID NO: 278985 - DNA, 201 bp, Homo sapiens
ctccctgccaccttgcagtttgatctcagactgctgtgctagcaatcagcgagactccgtgggcgtaggaccctccgagccaggtgcgggctataatctcstggtgcaccgttttttaagcctgtcggaaaagcacagtatttgggtgggagtgacccgattttccaggtgacccgtttctttgactaggaaagggaactc

SEQ ID NO: 278986 - DNA, 201 bp, Homo sapiens
caagagaaaataggagagaactgggagacagagagccatagacacctctttcaaggagtgccaaagagatagaaaataaatgggctatagctgaaaagaaratgcaaaggagggaatgttttttaagatgaaagaaataacagctggttatgatgctgaagggaatagttcagaagagcagggaaaattaatgaggaagga

SEQ ID NO: 278987 - DNA, 201 bp, Homo sapiens
gagttgatacttgcatcagccctgctagctgccttgaatcctagctcagtaggggtcactcttaagctgccataggcataacaacttctacataggtggcmcttctggcactttggagaacattctagtggtgggatagttccctaacccctgtcttatctctgtggtaccctgcatctatgccatttttgtttggttaca

SEQ ID NO: 278988 - DNA, 201 bp, Homo sapiens
gtgccacccagtggcacgttatagacaagctgctgatgttgctttagcactcttcactgcatcaaattctttcctttcccatccctttcccttccccttcycttcttcccttcttcccttcatccctccttccctcccttccttcctctctccctttcttcccttctctcttctctcctccttccctccctcccttcttcc

SEQ ID NO: 278989 - DNA, 201 bp, Homo sapiens
agacatgacctctgcctctaaggagcttagagcctagcaggggaacaggaacttagacaaatttaagtgctgtcccgtagggtactttgaggtcaaatagyagaggcacttcacgtaacataggaggtcaaggaaggctttctacacatttcatttaaatgaagacctaaagggaagcaagaaaaggcagaagagaatgtt

SEQ ID NO: 278990 - DNA, 201 bp, Homo sapiens
ccatgaccccctcactacctgcagaaagaatttgaaaacctctagactaaatgatctctctggtttcttctcacctgaatgttctttgagccttgcctackgtgtgtgtgtgtgtgtgtgtgtgtgtgtgcatgcgtgtgtgtgtgtctgtactaagcactatgaggattacctagaaagcatttctctttctctaagact

SEQ ID NO: 278991 - DNA, 201 bp, Homo sapiens
catagccaatgagtggtagagcaggaattccaatcaaaatctatcttatgacaagcttaggtagataacggtggagccatctctcctcctttaacagatattttgtacttaattacataaaatataaccatgaaaagcaaaaatgatgtaacaacaatggaatccattgcactattgaagtggagttgaaatactgaaaaa

SEQ ID NO: 278992 - DNA, 201 bp, Homo sapiens
tttctttgactaggaaagggaactccctgaccccttgtgcttcccgagtgaggcaatgcctcgccctgcttcggctcgcgcatggtgcgcacacccactgrcctgcgcccactgtctggcactccctagtgagatgaacctggtacctcagatggaaatgcagaaatcacccgtcttctgtgtcgctcaggctgggagctg

SEQ ID NO: 278993 - DNA, 201 bp, Homo sapiens
catggtgcgcacacccactgacctgcgcccactgtctggcactccctagtgagatgaacctggtacctcagatggaaatgcagaaatcacccgtcttctgygtcgctcaggctgggagctgtagaccagagctgttcgtatttggccatcttggctcctcccccttctcttttgttatgagtggtcagggatgtcctctcc

SEQ ID NO: 278994 - DNA, 201 bp, Homo sapiens
tactgccttacaactgtaattggctaggaactttaaaataatatgtgggcatctcattcatttattaattcattcaactatcttcttccttcatctgtcamgtatgtcaggccctcaggacatgatggttaagacaaaccctactctatgagtttatactttgggctgatggagatggttggggggcatgtggagagacag

SEQ ID NO: 278995 - DNA, 201 bp, Homo sapiens
tttttttttttttttttcttgagacagggtttcacttctttcacccaagtgcaatggtgtgacctcggctcactgcaacctccaccttctgggctcaagcratcctcccacataagcatcctaagtactgggaccacaagctcatgccaccatgcccagttaatttttgtattttttgtagagacagggttttgccatgtt

SEQ ID NO: 278996 - DNA, 201 bp, Homo sapiens
ataaacctaacactatttaaagatgtctagtttacatgcacatgtttaagagaaatcttattattggcataccctattctaccaaagttttgacaaacttraatatcatattcatgcatttgtgtaagcattaaggttgttattcaactcacagaatgatatgcagagtaccagtacacctagaaacctagaaaaaaataa

SEQ ID NO: 278997 - DNA, 201 bp, Homo sapiens
caatctcactgcaagctctgcctcccagattcacgccattctcctgcctcagcctcccaagtagctgggactacaggcacccgccaccacacctggctaatttttttttttttttgtatttttagtagagacagggtttcaccgtgttagccagggtggtctcgatctcctgacctcatgatccacccgcctcggcctccc

SEQ ID NO: 278998 - DNA, 201 bp, Homo sapiens
atgtgggtaagatgactatacaagatacgtggaaaaaatataaaaatctaaaagagttttattttattttattttattttattttttgagatggagtctcrctcttttgcccaggctggagtgcaatggcgtgatctcggctcactgtaagctccacctcccgggttcacgccattctcctgactacaggcgccctccacc

SEQ ID NO: 278999 - DNA, 201 bp, Homo sapiens
tgagacttgtaggttatgatagttgttaacagataatcacagagcaataaaagctcaaattccaagtgtaacttctgtatttgttattaatacttgaattrcaacatgttttaaggttggttttcctgatcatatttattttttctttaatatagtccagcaaaattaaaaaaggaagcaaaggagactgtactgtactga

SEQ ID NO: 279000 - DNA, 201 bp, Homo sapiens
ctaaaatacttacatttgagacttgtaggttatgatagttgttaacagataatcacagagcaataaaagctcaaattccaagtgtaacttctgtatttgtyattaatacttgaattacaacatgttttaaggttggttttcctgatcatatttattttttctttaatatagtccagcaaaattaaaaaaggaagcaaagga

SEQ ID NO: 279001 - DNA, 201 bp, Homo sapiens; identical to SEQ ID NO: 56503

SEQ ID NO: 279002 - DNA, 201 bp, Homo sapiens; identical to SEQ ID NO: 56499

SEQ ID NO: 279003 - DNA, 201 bp, Homo sapiens
tccaaaatgctcactgtaatcagaatttgataaacatttttgttttctagcccaggctggagcacaatggtatgaccatagctcaccatagcctcaacctkctaggctcacccagtcctcctgccttatcttcttgagtagcaaggactgcaggtgcatgccactgcatccggctaacttttttagtttttgtagcgacag

SEQ ID NO: 279004 - DNA, 201 bp, Homo sapiens; identical to SEQ ID NO: 56495

SEQ ID NO: 279005 - DNA, 201 bp, Homo sapiens
tttaaatgtgatgctgaggagtggggatggggaagcattttttattggaagtgagataagataggtgattaaatgttccaaagataattaaaatttttttwcctctgatgtctgttttctttcatttacttgtgtcagcatagtttcccgatgctacacattatctttcttcatttttaaagagttttttctggcattttt

SEQ ID NO: 279006 - DNA, 201 bp, Homo sapiens; identical to SEQ ID NO: 56496

SEQ ID NO: 279007 - DNA, 201 bp, Homo sapiens
tgaggcaggagaatgggatgaacccaggaggtggagcttgcagtgagccgagatcccgccactgcactccagcctgggcagcagagtgagactccgtctcaaaaaaaaaaaaaaaaatttagattaacttaatgtatagaactgaagaaacccctatatctgtccttagtctttttgaagtagtgaacaagtagtcagtga

SEQ ID NO: 279008 - DNA, 201 bp, Homo sapiens
attataatttacaattacaattttgatagtaggtatgcagattactattatagcaaaatacaattactattttgatagtaggtatgcagattactaatatkaaacatttgcacactggaggatgcttataataggattccttcattctacaacaacactctactgtaaatgtaattaatgccttgtactgaacactcaggt

SEQ ID NO: 279009 - DNA, 201 bp, Homo sapiens
caaattccaagtgtaacttctgtatttgttattaatacttgaattacaacatgttttaaggttggttttcctgatcatatttattttttctttaatatagkccagcaaaattaaaaaaggaagcaaaggagactgtactgtactgaagcccacacttatggctgctgttccggtgagtacagaatatgaatatgaacataa

SEQ ID NO: 279010 - DNA, 201 bp, Homo sapiens
atttgtgtgcttgcagttcattaggcacttgatagatctacatcgtatttatatatcttcatactaatcatgggggagaatttatgtaacaaaatgaatgataatagaattattagctaagattggactatttctcttggcattcaaactagactctgtctttgagtttagatgaagagaatgggtctaagataaataagc

SEQ ID NO: 279011 - DNA, 201 bp, Homo sapiens
gaatgggcagggaaatagcaaacaggtaatgagaaaacaaaaagagctcagaggacgtctttcttggtcaaccacatgtgattttatataactgtttcctrtaacatactctatgctaggccttcctcactcttcacctctccacccaaggggcagcatgggcacatatatttttttttactgttggctatttatatgtgt

SEQ ID NO: 279012 - DNA, 201 bp, Homo sapiens
tttgtgtgcttgcagttcattaggcacttgatagatctacatcgtatttatatatcttcatactaatcatgggggagaatttatgtaacaaaatgaatgataatagaattattagctaagattggactatttctcttggcattcaaactagactctgtctttgagtttagatgaagagaatgggtctaagataaataagca

SEQ ID NO: 279013 - DNA, 201 bp, Homo sapiens
ttgtgtgcttgcagttcattaggcacttgatagatctacatcgtatttatatatcttcatactaatcatgggggagaatttatgtaacaaaatgaatgataatagaattattagctaagattggactatttctcttggcattcaaactagactctgtctttgagtttagatgaagagaatgggtctaagataaataagcat

SEQ ID NO: 279014 - DNA, 201 bp, Homo sapiens
ttttgtaaataacgattaaggcaatgatattcaaagaagacagtcagaattgcatataccttagttaaacagacttaacattctttatgacttaacagatmgtaagaaagatctagtgaagttacaagcaggagagtatgtatctcttgggaaagtagaagctgcactgaagaattgtccacttattgacaacatctgtgc

SEQ ID NO: 279015 - DNA, 201 bp, Homo sapiens
gccgaggtgggtggttcacttgaggtcaggagttcaagaccagcttgtccaatatggtgaaaccctgtctttactcaaaatacaaaaattagcggcgtgcygtggtgcacacctgtagtcccagctactcagaaggctgaggcaggagaatcgcttgaacctgggaagtggaagttgcagtgagccgagatcatgccactg

SEQ ID NO: 279016 - DNA, 201 bp, Homo sapiens
agatagtactctgtgacactttggaggccccccatcaattgcctttgtctgaactttcccaaaatatgtttcaaaatggaaataattagctcccttatcamccttgtcttactcatcttactgaagcataagccagataaacaaatgaatgtggagggagagaacagaatggaatgtattcccaatcctaatgtggaaata

SEQ ID NO: 279017 - DNA, 201 bp, Homo sapiens
acatagtgcaaattgtgtaaccttcatgcttttataacaccaatcttttccaactctatgcaacaggcagtttttccagtttcatattttctattaagcarctaacaacatgttcaagtttattttaattaccagggattttaagagtatagtatttcctaggatgttgacatggacaagtgattgttttttaagatgatt

SEQ ID NO: 279018 - DNA, 201 bp, Homo sapiens
acggggtttcaccatcttggccaggctgatctcgaactcctgacctcgcaatccacccacctcagcctcccaaagtgctggaattacaggcgtgagccacyatgcccagcctgtggtaacctttttaagggatggttctgctgtcttcatttgtgagtggctctattctaatattgaaagaactgcccattaagttattca

SEQ ID NO: 279019 - DNA, 201 bp, Homo sapiens
aagtggatacttttgtttagatttttaaaagttttagtttcatgtcttctaaactttaaaaatatcatcttattatatgatttattgttttgatctctctmtatatatatatataattttatttttttgagatgcagtcggagtgcagtggcatgatctcagctcactgcaacctctgcctcctgggttcaagcgatcctc

SEQ ID NO: 279020 - DNA, 201 bp, Homo sapiens
atggttatccagccttttggcttccctggaccatgttggaagaagaattgtcttgggctacacataaaatatgctaacactaatgataactcatgagcttaaaaaaaaaaattaaaggtgtatacataattttcacgatatctaccaccagagataagcaaaaatgtcctcgcattcaaagggttggacacggctgtgagt

SEQ ID NO: 279021 - DNA, 201 bp, Homo sapiens
gagtgaattctctaaactcgagctaacatttcttaaaaatttagattaacttggctgggcacggtggctcacgcctgtaatcccaacactttgggaggccraggtggcggatcacgaagtcaggagttcgacaccagcctggctaacacattgaaaccttgtctctactaaaaatacaaaaaattagccgggtgtggtggc

SEQ ID NO: 279022 - DNA, 201 bp, Homo sapiens
accatgttggccaggctggtctcgaactcctgacctcaggtgatccacccacctcagcttcccagagtattaggattacaggcgggagccactgcgcctgscctgacctaacagccttgtaacagctgtgtctgcctacattacatcacttctgatttatcctgtatccttctattagatgcatccacctcatccactgct

SEQ ID NO: 279023 - DNA, 201 bp, Homo sapiens
ttgtcatctagcattaggtatatctcccaatgctatccctccccccttccccccaccccacaacagtccccagagtgtgatgttccccttcctgtgtccaygtgttctcattgttcaattcccacctatgagtgagaatatgcggtgtttggttttttgttcttgcgatagtttactgagaatgatgatttccaatttcat

SEQ ID NO: 279024 - DNA, 201 bp, Homo sapiens
cattgccatcttctgtgagaccagggccgaatggatgattgcagcacagacctgctttaagtacaactttcctcgtaagtgccttgtgtttttggaggggkgagaggagggtctttgcttgcatgtgagaattgttttgagatgctcttgttttcacagtaggtgttgtttagccattttacacattaattatgtccataa

SEQ ID NO: 279025 - DNA, 201 bp, Homo sapiens
cacttttcaataatgtctttcctaactacttcattttacattcattgtttaagtctctaagctactattgtgcttaccttcagtgcccatgcagtttagtrtttaaatgttctctgaattgtttcacatgcatttcttcccagttcatttgtaaggtcattgagtgcagggtctccttatctctcatgtgctgtttacata

SEQ ID NO: 279026 - DNA, 201 bp, Homo sapiens
aggtgacccgtttctttgactaggaaagggaactccctgaccccttgtgcttcccgagtgaggcaatgcctcgccctgcttcggctcgcgcatggtgcgcrcacccactgacctgcgcccactgtctggcactccctagtgagatgaacctggtacctcagatggaaatgcagaaatcacccgtcttctgtgtcgctcagg

SEQ ID NO: 279027 - DNA, 201 bp, Homo sapiens
atgtttgtatttttgctagagacagggtttcaccatgttggccaggctgacctcgaactcctgacctcaagtgttctgcccacctcgacctcccaaagtgytgggattacaggcgtgagccaccatacccagccagtgaaatattttcatatgttcattagctaatagtgaaaagcaaaaaattaagacagtgtttttggt

SEQ ID NO: 279028 - DNA, 201 bp, Homo sapiens
taatttcccccaataatagcctcatgcataagtatagtgtaacatcacaactacaaaattgaaatcgatgcaatccatcaaccttactcagatttcgtcasctttaatgcagtcatttgcatgtatgtatttagttctacataatgttatcacgtgtagatttatataagcactaccacagtcaagatacagaacaattgc

SEQ ID NO: 279029 - DNA, 201 bp, Homo sapiens
gtgttctaatggagatttctatttcctttattccttctacatttattagaattcttctatgaggaagattagtctcttctccctcatttacttatttgatygttcatttatattagtatggactcgtgggtattattttactctgtgggatataatctagtattattgttatttgttgcccagattgtgttaataccagct

SEQ ID NO: 279030 - DNA, 201 bp, Homo sapiens
tctaacaagaaagacttttaaatgttcttgatacgtaaggcagcaggtggagattcaatgatggtactgccattgagcatatcggtcaagattttaacagkgtaaggcctcttccttaaattgtaaaatagctcatcttttgattgaaactgctaaagtgtaagacatgtaagactcctgttagaattaacactctctgcc

SEQ ID NO: 279031 - DNA, 201 bp, Homo sapiens
aaactgaaccggcttatattcctatcagagatatatgaatatacctatttctctaactgggctcctattatttctatttattaaaaatgttaactacttargttacattttggtttaaaaatatagtttatagtaatagtttttctacctgaaaactaatttctccccaagaataattttctgaattctagacactgtgaa

SEQ ID NO: 279032 - DNA, 201 bp, Homo sapiens
ccattacagctcagccatatctttgcatttctttgtggacttagttagaactgaatgattgatgattttcagcgcgaggagtacaaaataggggagttgayacttgcatcagccctgctagctgccttgaatcctagctcagtaggggtcactcttaagctgccataggcataacaacttctacataggtggcacttctgg

SEQ ID NO: 279033 - DNA, 201 bp, Homo sapiens
ctcttgggaaagtagaagctgcactgaagaattgtccacttattgacaacatctgtgcttttgccaaaaggtaactttccaaagttgtattttttgtttcrtaagtcaaaagatatttagaaaataatgtgattacatattatcataagggtaacatagtcttctcttagaattttcatcagatctggggaattgtacatt

SEQ ID NO: 279034 - DNA, 201 bp, Homo sapiens
aaccccttatcagatatatgatttgcaaattttttttttctattccatagattgcctttttactctgctgattgagtcttttgatacacacaagtttttarttttgttgtagtcccagttatctgttttttgcttttgttgcctttgcttttggtgtcacacccaagaaatattgccaaatctattctcataaagtgtttc

SEQ ID NO: 279035 - DNA, 201 bp, Homo sapiens
aaccttctaggctcacccagtcctcctgccttatcttcttgagtagcaaggactgcaggtgcatgccactgcatccggctaacttttttagtttttgtagmgacagagtcttgccatgttggccaggctggtctcgaaatccagggctcaagtgatcctcccaccttggcctctcaaagtactaggattacaggcatgagc

SEQ ID NO: 279036 - DNA, 201 bp, Homo sapiens
caggtgcatgccactgcatccggctaacttttttagtttttgtagcgacagagtcttgccatgttggccaggctggtctcgaaatccagggctcaagtgawcctcccaccttggcctctcaaagtactaggattacaggcatgagccacctcacccagctcgttttgatgatttaaagcaaatactgtctattgatagctt

SEQ ID NO: 279037 - DNA, 201 bp, Homo sapiens
ttaaacttgtatttcattctgatgatatatatgtggcttcttagccattttggtatattctcggaaggaaaagtggttactaggctagcactatacactgycttgaaagtggaagctccagggttctgtttaaaacttatcaccttcaaatgttagcattgaagtcaccttaaagatcagatccagtggttttcaatcagg

SEQ ID NO: 279038 - DNA, 201 bp, Homo sapiens
aactccacacatttcacattggaaatacaaagttgagaccagaaattgaattttgagatgtagacagcaccttgcccagtgatcagctagaacgaagaaamtggagtgaatcacccacagcaggtgtttattaagcactgactgtgcaaggaagttattgtgaagcatacaaagaagtatacgcgtgtgctctctgtgcta

SEQ ID NO: 279039 - DNA, 201 bp, Homo sapiens
agaccagaaattgaattttgagatgtagacagcaccttgcccagtgatcagctagaacgaagaaaatggagtgaatcacccacagcaggtgtttattaagmactgactgtgcaaggaagttattgtgaagcatacaaagaagtatacgcgtgtgctctctgtgctaaaggagctggttaatgtgcttttctaaaagctaat

SEQ ID NO: 279040 - DNA, 201 bp, Homo sapiens
tttctccctttagcaaaattgtggaagtcaggtaggtaaacagagaactgggattctaagaattcttttggatggactccaaaacctcagagagcccctgsagctcccctgcatactctttgatttggaagcttgcctgagtccataacacttctatcctcttttgcaaccattagttttggcatcccagtgtgtcctaag

SEQ ID NO: 279041 - DNA, 201 bp, Homo sapiens
atggtttgaatgtgtccctctcaaaattcaggtgttgaaacttaatggccaattgatggtataaagagatggggcctttagaaggtgattaggccatgaargctcctctctcatcaatggaattaaaacccttatagaagaggattcatgcagtgtttggctaatttgcccttctaccttctgctctgggaggacacagca

SEQ ID NO: 279042 - DNA, 201 bp, Homo sapiens
ttggcctctaccataaaatgttaaataaatccaggccctgaagctctttgggctgccagactgagaagaattaggattgagtgctaaccacccacaacccstttgaggcagggagggagcaaatgcacatattattgccctaccattagagattcctttacgtcaagggttctcagtgtggctgcatgctagaattacctg

SEQ ID NO: 279043 - DNA, 201 bp, Homo sapiens; identical to SEQ ID NO: 56513

SEQ ID NO: 279044 - DNA, 201 bp, Homo sapiens
acctagtatagtgttccaaaagtctactttgagagcctcctgcactgagtcacagttggggatggggcctgggaaacatgcactttccagagcctcccacyttcctcttacacagccatttattaggctgggtgggagaaaactgagagggagagtgtaggaatgtgcttctttcacaatatggccagataggaaagaatc

SEQ ID NO: 279045 - DNA, 201 bp, Homo sapiens
gggttacaataaagagcaaagacagtagaatgggggggtgtctctgtggactgtgagcaatatcgatggctcacaaatatgaatatggctcctaaggactyctttagcagcagcaagtggaatcatttccatcttgcaaggtgtgaaactgggcccagtttcctccatggaggacaccatagccagtaatctgagagaaat

SEQ ID NO: 279046 - DNA, 201 bp, Homo sapiens
atccttcacttattgtcataacctaccaaagcccccagaaaacagtcagggttttgcagaaattacaaagacaatcaaatacagcatccaagaatgtcagkagagggaattagtgaaaacctcttaagggagctcagcatgtgctaggcaactaagtgtggataccttggtggcagcacatgccatccattcatgatctgt

SEQ ID NO: 279047 - DNA, 201 bp, Homo sapiens
tcacatgaaggttgttacaggagcttagctttctagatcttgtgaaaccaaagtagcaagtatcagctttccctgatgctcagtaaaatggcatgaccatrgctttcttgaactccatcctagaagtgaagtgacatggaaaaccatgaagccatggccgcgtgtgtgaggggccatgtcgggggaggtacagagaaggga

SEQ ID NO: 279048 - DNA, 201 bp, Homo sapiens
cttgttgaagctttgccactttgcacaccaataggttttctgactaaaattcacattctctatactctacaaactttggctctagatagctgggtgcgtaygtgtcagggtggatgtctgcgtgtgcatacatgtgtgtatgtgtaggtatgtgtttaaaactgaattctaatgttcactttctctggggagcatgtgtct

SEQ ID NO: 279049 - DNA, 201 bp, Homo sapiens
ggatgtttagtagtaaaagtagatgactagaagttattgtctaaatgtagcaaaatatagtaaagtttcagtcaaaagcaataaacctatttgtaaaatcsccacttctttggtggtatccatgtcaaaatgacagttcatatcaattgcctagatgttttagctctaacatatcaaaatgatacacatagctcaattttg

SEQ ID NO: 279050 - DNA, 201 bp, Homo sapiens
ggagctgagacgctgattgagatacattagttttactgcaatatgtagtaaaaaaaaaaatttaaagaatgaaggaaagaaggaaagaagggttaaagagrgccttcgagatactttaagtcaagatttgagctcaaaggctctcatccaagctttcgtttagtttctctcatgattctttttttattgcttcctgatgtt

SEQ ID NO: 279051 - DNA, 201 bp, Homo sapiens
ttctattccattgcttggaattcagtcatatggctacacttaggtccaagaaagactggaaaatatggattagctctctgcccaagaagaagagaaaatayatttgtgttgaacagctagtagcattgaatatgacaactttttactttttcttccaacagagttccagagcccagtagttttggctgcttgcttcataag

SEQ ID NO: 279052 - DNA, 201 bp, Homo sapiens
tattttaatttaggaagagaaataggaattgagtgacatggaaattggcttctcccggagtttcatggcatttcctgctgctagtgaaagaaagggtcctrgacagcctgctatggttggtgccacaatataaagacatagacactagacagctcaagtagctcagagaaagtgctggtgtcatatcctggtgagatgcga

SEQ ID NO: 279053 - DNA, 201 bp, Homo sapiens; identical to SEQ ID NO: 56514

SEQ ID NO: 279054 - DNA, 201 bp, Homo sapiens; identical to SEQ ID NO: 56516

SEQ ID NO: 279055 - DNA, 201 bp, Homo sapiens
tggaatttgtcaacagactggagtccttgacaggattgtgaatgcatagaggatgcaaagaaatggacacactgaggtagctatgccagtggtctgcatgygcaggcagtaaactgaagacatttgagcggtgaattacttggtgagtagttgacagctcttgtttataagaaagattgtaatggggggaaaaaagacaca

SEQ ID NO: 279056 - DNA, 201 bp, Homo sapiens
tctgaatcaatttaatctgtttcctatagacgtctgcacctcctggtagaggtgggtatgggggatgtctacatgtttattacacagacattcaaagagcyctcgctcttttagtgtttggcctcaccttcacttctacagtacttggtggttgtaattactctttccaggattcttaaggggcagatctgcttgttgctt

SEQ ID NO: 279057 - DNA, 201 bp, Homo sapiens
catttgggtgcatacagccaatcgagtcgcaagtgctcttcggagccacggcttacctgtaggggtcgtcctgaccacaggacaagacagccaaagcatgyggaaagccctccagaggattcaccaggcagacagaattcgcagtgagtgctttctcccgctgaaatttaaacgtgacttcagggaaagagattacaatct

SEQ ID NO: 279058 - DNA, 201 bp, Homo sapiens
ttcgagatactttaagtcaagatttgagctcaaaggctctcatccaagctttcgtttagtttctctcatgattctttttttattgcttcctgatgttgtcwtatacaagctgttaacttgattcaggctgtaattagaaagacaaatcaatctttcatagaagtcctcggcttgacaagctggtatgaggagccatttccc

SEQ ID NO: 279059 - DNA, 201 bp, Homo sapiens
tacttggtggttgtaattactctttccaggattcttaaggggcagatctgcttgttgcttatcagtaattccctctgcaagcacttaggtttgactgttcyccactttgctaaatcagttgccatgtttgtagcaactttttattttcagattctgtggtacagggttacagatgtttcctaataccattagatatggaga

SEQ ID NO: 279060 - DNA, 201 bp, Homo sapiens; identical to SEQ ID NO: 56518

SEQ ID NO: 279061 - DNA, 201 bp, Homo sapiens
tgatggctatttcttcaagggcaacaatatattttttaaaatgttagcctgacataatgcttataatatagtaggtgcttgtgaaggtttggtgaattaawcaactagtgaaagagttggatttcaccaaaaggtcttctctggttgtgattgtaatgtaattggtgatcttcattaaaggtgtgcctctatgtcctaccc

SEQ ID NO: 279062 - DNA, 201 bp, Homo sapiens
atttctgagttttctttaaaagttttaagatctgtcaaccttggatctcatcatgacaatcggctataactcagtagtagttgcgttttgtggaaaaggcrtgttctttgcagtttgatacaattcccaccactctatattgtcttatactcagcatatttcacgtctttatattacctgtctggccccataggcgaggtg

SEQ ID NO: 279063 - DNA, 201 bp, Homo sapiens; identical to SEQ ID NO: 56512

SEQ ID NO: 279064 - DNA, 201 bp, Homo sapiens
acatgtcaggatctgctctaatagttacagtctgggtgagatggggtgtggtgggcagcagtgtaaccctgacacattcagagagaacccactgaattcaycttccctcttcattttctgactactctttcctctttgcttctccctgtgttttcctctttgtctcatctttctctctctccattcatctctctttctcag

SEQ ID NO: 279065 - DNA, 201 bp, Homo sapiens
agcctcagtttcatcatctgtaaatagtgatgataataacacctacttcaaaggactgtgatgagttttttaaattcagtttttaaaatgagacaatacayggaaagagtgtagcccagcatttgacacacagcaagaactcagtatatcttagactttgttagtctaagtgctaatttctggattaaatgcacagatact

SEQ ID NO: 279066 - DNA, 201 bp, Homo sapiens
gggagaaaactgagagggagagtgtaggaatgtgcttctttcacaatatggccagataggaaagaatcctgagagaagatgagacttgggataaatctgcmtgctgccctcctcctctggtctgcctcccctccccgccctgttagcaactgttcaaatgaatgacagtggcaggaaatatcacaaaggggttacaataaa

SEQ ID NO: 279067 - DNA, 201 bp, Homo sapiens; identical to SEQ ID NO: 56519

SEQ ID NO: 279068 - DNA, 201 bp, Homo sapiens
gcacaaagaccagcacagcctggccagctgaaaacccagtgtgttggatcaactcagaggtgggaatgttgtttttgagttttaatcttcacttttggctstaggtagatgcagtttctttctcagaaggctctgtgcctttcaaaacagaacactagcattctgtttgctttcaggagcttgctgccctgtgtgtgtgtg

SEQ ID NO: 279069 - DNA, 201 bp, Homo sapiens
agggctctttggccttcccagttgtgactcagctggtccaaggtgtggcttggcctactgctctggaagatgcaagccatacatctcggtagtatccacgyggtgccaactttgcaggctctcagagtgcaagaggtatggaggcatggatacatccatctagatttcaaaggatgtcttgtacagcttcaggacccaggc

SEQ ID NO: 279070 - DNA, 201 bp, Homo sapiens
aaatgctcatcttgctaaagctgatgttgcaaactttctctgcatcctggggttgtccagaatcttggtaggacatgactgcatgtaggcatctacctgcwctttatatgggatcttctctgttggttacagctgaggatggatgcctataaagatctatcaaagatctagacagaattattcccatgctagtaccattag

SEQ ID NO: 279071 - DNA, 201 bp, Homo sapiens
atcatgggttttgaaggcagactgccttaagtttacttaagctctccatgtcttcttttcctcatttttaaaattgaaaataacaatagtacctaactaayagggttcttgtgaggattaaatgaattaacacactaaatagtttgcctggcacctgataacccctcaattaatgttagccattattattattaaagttgt

SEQ ID NO: 279072 - DNA, 201 bp, Homo sapiens
tagcccctatcctgtagagagggcaagtacttagtattttgtcaaaatcaattctctataaaacacaataccttgggaggctgaggtgggcagatcacgargtcaggagttcgagaccaacctggccagcatggtgaaaccccatctctactaaaaatacaaaaattagctgggcgtggtggcgcgcttctataatcccag

SEQ ID NO: 279073 - DNA, 201 bp, Homo sapiens
  misc_feature (1)...(201): n = A,T,C or G
gcccaggagccttcctgaagtcagcctacacaaggctaactccttgggtccttgtcatattgtggaaggaacctcttgcaaggggtaagggcactcctctnggaggaacagcctgggagtggctactttgaggctcttggtgctggagtgtcatcagcacatccttcaagagcccaaagattggttctagtgttcttctgt

SEQ ID NO: 279074 - DNA, 201 bp, Homo sapiens
ccatcttctataactgctactgaaaatgcttcacctggccgggtgtggtggctcacgcctgtaatcccagcactttgggaggccgaggcgggcggatcacraggtcaggagatcgacaccatcctggctaacacggtgaaaccccgtctctactaaaaatacaaaaaaattagccaggcgtggtggccggtgcctgtagtc

SEQ ID NO: 279075 - DNA, 201 bp, Homo sapiens
acattttgtagcccctttttccctgttagagttatcactagacctgagatataggattagaataattttagttttctttttttgccatttccactgtgttstatttatctatttctgaatgaccaaagaccaccggttgacccagttgtaaaagagctcagtgataaaataatgtaactccctcattttcagatgaaaacc

SEQ ID NO: 279076 - DNA, 201 bp, Homo sapiens
agacttaggtaggcagttgattgtgtctgatattcatattcttttttatctgtcctttatttcatcattctgtgggctgcttctctgtctgaatagtgatycaaatgaaatttaggtttatgtatctctttctgctcggaggatttatatcaaatattttgctgattcttgttctaataaaaaaattaataacagagatat

SEQ ID NO: 279077 - DNA, 201 bp, Homo sapiens
gctgagtggtattccatcatatatataaatatatgtatatatgatgtgatatatatgtacacacatataatatatatatatacatatatatcatatctatmcacacacacacacacacacacacacacacacaacaatttctttatccactcgttgattgatgggcatttgggctggttccatatttttgcaattgcaaat

SEQ ID NO: 279078 - DNA, 201 bp, Homo sapiens
tttcatcattctgtgggctgcttctctgtctgaatagtgattcaaatgaaatttaggtttatgtatctctttctgctcggaggatttatatcaaatatttkgctgattcttgttctaataaaaaaattaataacagagatattaacaatgctggatttggactttattgttactgataagtttataataagtattactgtc

SEQ ID NO: 279079 - DNA, 201 bp, Homo sapiens
gcttagctttctagatcttgtgaaaccaaagtagcaagtatcagctttccctgatgctcagtaaaatggcatgaccatagctttcttgaactccatcctakaagtgaagtgacatggaaaaccatgaagccatggccgcgtgtgtgaggggccatgtcgggggaggtacagagaagggaggaattgtttgctcatcctctc

SEQ ID NO: 279080 - DNA, 201 bp, Homo sapiens
gtcaaagctagctagtgtgtcttcttgtgctagtatatgtggccacagtaaagacactagactgtaatttatagtatggtagtggatgtaggaaaagtatdcaaatacattatgttgtcttcatgtgccgtttactcttgctacacaactgtgccagatttgagaattaattgttgtctcagtgaccaaactgctcttctg

SEQ ID NO: 279081 - DNA, 201 bp, Homo sapiens
gagggtcccagattaaattatgactggcattctttcttgcccccatctgtattttaatcctctctaggaggtggaagcacctttataattttttggtgctrcatggtggttaaacagggtaccaacactgaactgaaaaaaaaagttcagaaggatagggaaaatgaatcaatctcatgtttacagggttcaactcatatg

SEQ ID NO: 279082 - DNA, 201 bp, Homo sapiens
attctctcttaaaagaaaaaaacaaaacaaatagtgcatgtgtggtgaagataaaacttgcccatttcctcccttttcctcattattcatgaagtagaackcacacagactcaataaaaatttgcttacaaagtttgtgagaattatttaaatcttaaaacaaacacacacaaatctcccaaaccaaagaaagcctaacga

SEQ ID NO: 279083 - DNA, 201 bp, Homo sapiens
ttcagctagcttgctattctgtattctgccatgcgaagacatagtgttcctcctcttgggagaggatgcagcaacaaggcatcatcttgaaagcagacaayagacctcaccagaccaccatacctgctggtaccttgatcttggacatcccagcctccagaactgtgagaaatatattcctctctttataaattacccagt

SEQ ID NO: 279084 - DNA, 201 bp, Homo sapiens
gcagtgagtgctttctcccgctgaaatttaaacgtgacttcagggaaagagattacaatctccaaaaggtttcctaccctcacaccctagggtagcacatyccttcccatttctttacacatttgccctttttcactcacacacaggtcccaagactgccctgcttcaacagagcctattttatgaactgaataacagtac

SEQ ID NO: 279085 - DNA, 201 bp, Homo sapiens
gattaaatgaattaacacactaaatagtttgcctggcacctgataacccctcaattaatgttagccattattattattaaagttgtggttattattattaytgtgggtcaggcactctgcaggggatataatagagatcaaaatagaaatgagatctttcccccaatgaaggagaacagtttttccatttcaggtgctaag

SEQ ID NO: 279086 - DNA, 201 bp, Homo sapiens
attctgttatagcagcacaaatggactataggccttcaacaccaacattggcatggtgtatgtttgttcagtctatgtgagggctttgacttaaattagtrgcaggaaacctctggatcttgccttggacttaattcaatcaaagaggagaactgcttcaaatgtaaacttgaggtattggggaattgtcagctctactct

SEQ ID NO: 279087 - DNA, 201 bp, Homo sapiens
  misc_feature (1)...(201): n = A,T,C or G
agggcaaagagttcactactcattgtgtctttcttcagattcacagagctatatgatggcaacttttattcttttacaaagatacattccttcctctttgnactattcctctattagcattgggtgcatacctgttgactgtaattccaaccccctgatactctatagggccggttgttgctggagtggtgggcctcacca

SEQ ID NO: 279088 - DNA, 201 bp, Homo sapiens
ttactttataaggtacattttttgttatttttgtatataaaaaatacaagcccatattagccttgttaatactgatttccaggaagtcctgtttcggtacrattgcctcattacatgacccactgattttcttttttccacagtggtttaccattcctacaggccccatttagagtgaagtgttttcatgatgccaagaat

SEQ ID NO: 279089 - DNA, 201 bp, Homo sapiens
aaattttgacatgagaataaaaagtcatcactttttaccatatgagtgagaaaaatgaatagtaagagggctattaccgttactaagggattggtatactsttataagggatgggtagccttatagtagggaatgttcttttgtaaataaaaaaaaataaattgttttatttcattttattttttttactattttggccga

SEQ ID NO: 279090 - DNA, 201 bp, Homo sapiens
gttgtcagaataaattttctgacatctgggaaagtcttcaaactccttagatatggcagaggccatggaagtagtcatccaggaactgctgcattaatatractttgcatatgactttactcttgaagtgcaacccaagatgaagtgaaatttatcatggaactgcaatgcagatttggcacagtattctggactgatgta

SEQ ID NO: 279091 - DNA, 201 bp, Homo sapiens
gggtgattgggtgtggctgaaaaagttctcccttggagattttggagaccttaagtccatcaaatcaagagcaagtgatgtgttcgaaatggtatgagaamtcttcgtttatgtaaattcccactaaaataaatctgttctccaaagtaactaacatcagagctgtttaggaagaccccttaacaaatcagtgcagggaaa

SEQ ID NO: 279092 - DNA, 201 bp, Homo sapiens
cagaggctcagggaggttaaatgaggtactcgttgttatagagtgtctggcacatatagtaggtactcaataaatatttctcagccaactattaggtggcrgagctgataataaaatccaaatctcctgattcttattctagtactttttctgctcacactgtaagctaagcccagtgagttaagggaggagcctctatat

SEQ ID NO: 279093 - DNA, 201 bp, Homo sapiens
gtaactgtaatttttaagtttaacttctgtgcatgacctcatttcagctcagaatgcagaatgtctgtgaggtggagggtgggagagaaggaaaatgtctrtttggattgctggtataggtataaaccctttatgtggaagggacatttttctaaaactgctggcaactaagtttcatcactattcattctcctccttttc

SEQ ID NO: 279094 - DNA, 201 bp, Homo sapiens
aatttttaagtttaacttctgtgcatgacctcatttcagctcagaatgcagaatgtctgtgaggtggagggtgggagagaaggaaaatgtctatttggatygctggtataggtataaaccctttatgtggaagggacatttttctaaaactgctggcaactaagtttcatcactattcattctcctccttttctttctagg

SEQ ID NO: 279095 - DNA, 201 bp, Homo sapiens
cctccccttctttccttccttctttctcttcttccctccttccctctcccttcctcccccttcctcttttccttccttctctcttcctcccttccttcctwccttcccttctttttttcttttttcttttttaaagaataagtttccttctgtaaaatcttgagttgggggatcaagactaaatcctacagcaacataaaa

SEQ ID NO: 279096 - DNA, 201 bp, Homo sapiens
tattgggtaaatacagctgttctaaatgggaaaaattggccaataccaaggggttacagggcccatgcaagtccgaaatccagtggggcagtcaaattttwaagctccaaaatgatctcctttgactccaggtctcacatccaggtcacgctgatgcaagaagtgggttcacatggtcttgggcagctctgcccctgtgac

SEQ ID NO: 279097 - DNA, 201 bp, Homo sapiens
tgttcaagatggaagaaagagaaagtgcaaatgtggcgtgcaaaagcaggagattccttaagtttccaggcaatggggtacatgaaaagtgataaccttcytccttaagatactgaatttctaaagggggtgattctctccctagaggtggggattgaaaggggagtgaaggaaaggacagagtgagccctgctgtggaag

SEQ ID NO: 279098 - DNA, 201 bp, Homo sapiens
aaatagcttcccgggcgcttgtaacgtgcagccagagttgagaaatgctgctttcacttaataataatcaaataaatatttcttgctttaagttcccattrttttaatatgacttcgcttagtcagattgttttctttattacagtacagatctgctcactaagggaatggaaattttgaggatgcagagaaaaaaaccca

SEQ ID NO: 279099 - DNA, 201 bp, Homo sapiens
ggcattgagtgtgtgtggcttttccaggtgcacagtgcaagctgtcggtggatctggagaatggtggccctcttctcacagctccactaggcagtgccccrgtagggattctgtgtgggggctctgaccccacatttcccttcctcagtgccctagcagaggttctccatgagggtcctgctcctgcagcaaacttttgcc

SEQ ID NO: 279100 - DNA, 201 bp, Homo sapiens
aaggcaggagaatcgcttgagtctgggaggcggaggttgcagtgagccgagactgcgccactgcactccagcctgggtgacagaacgagactctgtctcaraaaaaaaaaaaacaaaacgcctagcttctcagagttccatttaatttccagatgggcaactttgaaacttaagaaaatctagtcttagggtgggtaaagg

SEQ ID NO: 279101 - DNA, 201 bp, Homo sapiens
cagaacaacgaccaacttttgatgaaatatttaaccaggtaaggactctgaatcttatcattgcccaggagccttcctgaagtcagcctacacaaggctarctccttgggtccttgtcatattgtggaaggaacctcttgcaaggggtaagggcactcctcttggaggaacagcctgggagtggctactttgaggctcttg

SEQ ID NO: 279102 - DNA, 201 bp, Homo sapiens
tatcaggcatcacctttattctctgagccaaagattcctgacagccaaggtagggttcatagatgagtcccatggaggagcttctggggatcccatgaacrccatggaatgatatgcaaattgtgtatatgtgcattttttacagggctgatctgcatactcaatgactttttgggcttcctgcatactgatcatagtctt

SEQ ID NO: 279103 - DNA, 201 bp, Homo sapiens
gtacatgtttaacgaacggtggttttctgtgtgaagccaggcttcccatcagattgtaaaaactacctgaaatgaaattatgcatccctatgctctagccrctttccatggaagtctgatcccatgcaggtgttcacacctgagtaacctaggcaatggccccagaacaactgtgggccagtagtattctatttccaaaat

SEQ ID NO: 279104 - DNA, 201 bp, Homo sapiens
gttctatttatctatttctgaatgaccaaagaccaccggttgacccagttgtaaaagagctcagtgataaaataatgtaactccctcattttcagatgaaraccaaggtccagagaggtgaagtagtttgagcagggtcacacagtcaactgatagcagaatcaggtcaagactcaggaagcctgacttcctttttagtga

SEQ ID NO: 279105 - DNA, 201 bp, Homo sapiens
gttcgatcaagtaagtacacattcataggttgtcatgagctgagaacctaaaacatcagcatggtaaattattttcagaccaacagtctcaattccatagkaggcccagtcaatggcaggcaaccacagacaaattaaaaacatctttagtttgctgaaaacatttgtgaaacaaaggcatattatttgagattttgttct

SEQ ID NO: 279106 - DNA, 201 bp, Homo sapiens
tgggcccactgcccattgcccacttcaagcccctcttgtactatacaggcaacaaattatcaatgcctaactggccagttctactttttcaatatttctckccttgtgggctagtgataaatcactgtattaccttttctcgtacatgagtcctgtttcagtcactatttttctgacaagtgtggagctccttgctgagat

SEQ ID NO: 279107 - DNA, 201 bp, Homo sapiens
ttttcaatatttctctccttgtgggctagtgataaatcactgtattaccttttctcgtacatgagtcctgtttcagtcactatttttctgacaagtgtggrgctccttgctgagatttttgtatatatctaggcttatcagctgtatttaccagaaacttttaggtagatttacattctggggagactttctcaaatgact

SEQ ID NO: 279108 - DNA, 201 bp, Homo sapiens
ctgctcctcaaaccatgaaccctgttggaagtttttgtccaatggcacaaaaggtcatttacttaccaagcagggcacctgtagggttgcattcattcagraggggttcctcttctaattcctgcgaaggttagcaggaggccctacctgcagctctttagagaacttttcaaatggctattctaagccctctcttctcct

SEQ ID NO: 279109 - DNA, 201 bp, Homo sapiens
agaaaggcagaacagaggcagaaaatttgactcctctgaggtcatcactcaggccctggggtgactagcttgagtttacactccttttctcttctgagacytgtggttcttgacaaccaagtaactgacctatagatggaggccaacctggagtcttaccctacctgtaagagtcccttggctggaagaaaagaacactgc

SEQ ID NO: 279110 - DNA, 201 bp, Homo sapiens
gcagtaggactaccggctattcctgggatctgttgacaagaccaccttggaggggatgtttatgtcatttcctccggaggcactgcctgatccctttcaarggatcaattttgccaaccaaaataagactggctactctttgactgcctggcttgtattcaggacaatttctcccatccttcctcccctactaggatggta

SEQ ID NO: 279111 - DNA, 201 bp, Homo sapiens
tacaggggctgcctctgaagcagggccctacacgtcacctgataactcttatcttgtgtccccaaatatccactacttctcaaacctggtttttgtatcakctggttactttccataaaatttcacctactgaggttaattttgggctgacaagccccctcttttaatcatagatgtgcttttttgagggtgagaaacaat

SEQ ID NO: 279112 - DNA, 201 bp, Homo sapiens
accacacattcttctgcaggttggcctgtggcatcattgcacgctccgctggccttttccagaaccccaagcagatctgctcttgcgatggcctcaccatytgggaggagcgaggccggcccatcgctggcaagggccgaaaggagtcagcgcagccccctgcccacctttgagcaggacctcaccttggctctgttgctg

SEQ ID NO: 279113 - DNA, 201 bp, Homo sapiens
cggatggtgcatgaggaacccaggggtgggggccaaacaggtacccacccctgaccacacattcttctgcaggttggcctgtggcatcattgcacgctccsctggccttttccagaaccccaagcagatctgctcttgcgatggcctcaccatctgggaggagcgaggccggcccatcgctggcaagggccgaaaggagtc

SEQ ID NO: 279114 - DNA, 201 bp, Homo sapiens
ttgaacctggggggtggggaggttgcagtgagcccagatcgcaccactgcactccagcctgggcaacagagtgagactctgtctcaataaataaataaatwaataaattaattaattaattaaaagaaatacaaaaactagccaggcgtagtggcgcgtgcctgtaatctcagctacttaggaggctgaggcaggagaatt

SEQ ID NO: 279115 - DNA, 201 bp, Homo sapiens; identical to SEQ ID NO: 56525

SEQ ID NO: 279116 - DNA, 201 bp, Homo sapiens
cacagggaactccggggagaggtgagtggtgtcggcccctgtaggaggctgtgctctgcggatggtgcatgaggaacccaggggtgggggccaaacaggtrcccacccctgaccacacattcttctgcaggttggcctgtggcatcattgcacgctccgctggccttttccagaaccccaagcagatctgctcttgcgatg

SEQ ID NO: 279117 - DNA, 201 bp, Homo sapiens
ctcactacagccttgaactcatgggctcaagcaatcctcccacctcacctgatagctgggaccacaagcatgtaccattatgcccagctaatttttttttkttgtttttttggtggtagaaatagggtgtcactatgttcctcaggctggtctcaaactgctgggcttgagcagacctccctcctcggcctcccagtgtta

SEQ ID NO: 279118 - DNA, 201 bp, Homo sapiens; identical to SEQ ID NO: 56526

SEQ ID NO: 279119 - DNA, 201 bp, Homo sapiens; identical to SEQ ID NO: 56528

SEQ ID NO: 279120 - DNA, 201 bp, Homo sapiens
aagtagcttgcctctgaccatgggaagtttggtggaaatggggatggagaattgctgtctgtttttctgttccctgctgccagcactgggtgccagcctcwgttgccctcttccctctctttcttgccaggtgtccaggatgtggaggtgcacttggaggaccagatggtcttggtacacaccactctacccagccaggag

SEQ ID NO: 279121 - DNA, 201 bp, Homo sapiens
ggggggtggggaggttgcagtgagcccagatcgcaccactgcactccagcctgggcaacagagtgagactctgtctcaataaataaataaataaataaatwaattaattaattaaaagaaatacaaaaactagccaggcgtagtggcgcgtgcctgtaatctcagctacttaggaggctgaggcaggagaattgcttgaac

SEQ ID NO: 279122 - DNA, 201 bp, Homo sapiens
acctggggggtggggaggttgcagtgagcccagatcgcaccactgcactccagcctgggcaacagagtgagactctgtctcaataaataaataaataaatwaattaattaattaattaaaagaaatacaaaaactagccaggcgtagtggcgcgtgcctgtaatctcagctacttaggaggctgaggcaggagaattgctt

SEQ ID NO: 279123 - DNA, 201 bp, Homo sapiens
tgactccaaagttaggagtttaaaacaacaaacatatactgtctctggggcaggaatttgtgtgtgacttagctgggtgcctgcagctcagggtctctctyggggctgcagtcatctcagggccccacgtggggagaatctgcttccaggtttgctcatgttgctgttggcaggccccaggtcctccttggctgttggcca

SEQ ID NO: 279124 - DNA, 201 bp, Homo sapiens
ctgttcctggaatctgggagtcagggaaatgacactggctgcctatgatggtcagggaagccaagcttggccaacttaagcctataggaattgaagacagycaagggctcacagagccatcaggaggctgcacaactgagctaactggaggctgagaagcagagctgggcaattgcctcgccggaaaaacagtctgatcca

SEQ ID NO: 279125 - DNA, 201 bp, Homo sapiens
caaaatgtcaggttggggacaatttatttgcacagatgtgggtttctgtggctcactagtaaggccttgtcaccccaaaacacaccaactgttgtattcaycctgtgtgtcatcacccctagtctgttctgtatctgggcccccaccatgttctgagtcccttgaggatggtgacctgcatactccctgccatgttgggta

SEQ ID NO: 279126 - DNA, 201 bp, Homo sapiens
gaatgactgcacaggcaggggaaacttccactggctcttttcagcccactgtcatcctgcccaggatttcagttccagggagggagtgttcagatggtccrggacttcctggaccactttccacttccagacagggccaagaggaccttgcctgcccagtccttggggagctcagatcctacgagactggtacccacagga

SEQ ID NO: 279127 - DNA, 201 bp, Homo sapiens
tgggtgacaaagcaagactccgtctcaaaaaataaaaagattcaaccctgagctgcctttgaccccagctccacacccactatatcagttgaccagaaggwggggctcagagcaaaaaaatattcttggcacttccagtaacaaagcgttatgcagtcagtgctgttcaaggttgagtgggcaggggctgtcttcaacccc

SEQ ID NO: 279128 - DNA, 201 bp, Homo sapiens
agagtctgttgttttcttcatccaggagagaagtggatgggccctatacctccagccgtgaatgccagactttaagattgcccggaggaagcaaactcttsgtataaaaaaagcaggccatctgcttaacccttggctccaccataaggcactgggactcggatttctctatctgatagaggtattttctgtggccctggg

SEQ ID NO: 279129 - DNA, 201 bp, Homo sapiens
gagtctgttgttttcttcatccaggagagaagtggatgggccctatacctccagccgtgaatgccagactttaagattgcccggaggaagcaaactcttcktataaaaaaagcaggccatctgcttaacccttggctccaccataaggcactgggactcggatttctctatctgatagaggtattttctgtggccctggga

SEQ ID NO: 279130 - DNA, 201 bp, Homo sapiens
tcagagaggtcaagtggctcacccaaggggcacagctaagtgaaaggcactgcaggcatctcaaactacccccttcccacaagactccactgcagagcagkacagtcaccctgacaccagcccaatgggttcatcttgcccattacccagatggggctaatttatcaagacaagggaattgcaatagagaaagagtttaat

SEQ ID NO: 279131 - DNA, 201 bp, Homo sapiens
aaggaggggctcagagcaaaaaaatattcttggcacttccagtaacaaagcgttatgcagtcagtgctgttcaaggttgagtgggcaggggctgtcttcawccccataaaagaaaaggaagccttctataccttgaagccaagcaaaagtctttctagaaaacccctgggaccttgtgggaccaactcctgctgccagaac

SEQ ID NO: 279132 - DNA, 201 bp, Homo sapiens
caagagcgaaacaacaagagaaaaaaaaggaagctgccctctgcccaaaacccacgtcgaggtccccaaacctgggacccttaggtcttttctcacttagygtgcccaaccttctcctggcaggaaacaagcctccaggtctgcttccccgcaaaggactatacatggcaaatgacttaaagctcctgagacaccatctcc

SEQ ID NO: 279133 - DNA, 201 bp, Homo sapiens
ctctgtgtggcctttctcctggagctcctttcccttgacttaagttgattcagctggcagcaaccactctgtggctgaagcactgctcattttcttggaasccctgccagagccagtcatctgttacgagctgtatcagcgatgtcttgactctgcttatgatccccggatctgccgacaggtgggttctactgacctggg

SEQ ID NO: 279134 - DNA, 201 bp, Homo sapiens
cttgtgtgatatgttctctttataactcgtttctttacttacagtgggaaatgccgggttccagcctggtgtgaccgaattctttggagaggaacaaatgwtaatcagcttaattatcggagtcacatggaactgaaaaccagcgaccacaagcctgttagcgccctcttccatattggggtaaacacttgtttgtacatt

SEQ ID NO: 279135 - DNA, 201 bp, Homo sapiens
atttggttgggagatttgaattatagactttgcatgcctgatgccaatgaggtgaaaagtcttattaataagaaagaccttcagagactcttgaaattcgrccaggtaagtaaagtttcattttataggaactttcctagatgggagatgagattgttagagttatgggaggtatatcttactctagggagtgatggaaac

SEQ ID NO: 279136 - DNA, 201 bp, Homo sapiens
tgaagtttcggcaactacaaaaggagaagttccagatcagcaacaatggacaggttccctgccatttttctttcatccctaaacttaatgacagccagtastgcaagccatggcttcgggctgaaccttttgagggctacttggagccaagtgagttttccctttaccattgtctctgctggtgatgtcatgactcccatc

SEQ ID NO: 279137 - DNA, 201 bp, Homo sapiens
aggaagagctccagcagatcattgattgtctggataccagcattcctgagacaatccgtatcctttgcgaccaaagcttaagaagctggatgagtacttgrtcaaactcttcttcgcacctatatttgatttttgtggttctatatttattttctttgtaatatcttttattataagataaccactgactatccacttgtt

SEQ ID NO: 279138 - DNA, 201 bp, Homo sapiens
tgcaggcacatggcagtcaatagtccttgtccccaggccctccagccctgaggttttgcttaggttatgtctgacagaagtttccgcttgtctttctctcrtcttgtagctactctcttcactagtcttctcctgaggcctccacccaaccttatggcaagacagactccaagtgaccgccagcgtgctattcagttcctt

SEQ ID NO: 279139 - DNA, 201 bp, Homo sapiens
atcccagggaaagaaaggaagcaaactgaatgtggggaaaaaaaagaaagattttaaatggtaaccaactgtcacactcccttctctttcttattcccttrgaaaggcacagcagcttttaaaggtcatcagtgcttgttaaagaacacaatgttaagaagagacctcagctcggctgtagtgtatgtggtctctgtcaaa

SEQ ID NO: 279140 - DNA, 201 bp, Homo sapiens
gtattcattcatttgtaagtgtatgtatataccttttattatatatatatatcctttaatatatatacttagaaattatatatatatatatacacacacckgtgtgtgtgtgtgtgtgtgtgtgtgtataaaattttccattattaagatgtttaccttcttctgcttgacctacctcggtagcctttgaatgatcccttt

SEQ ID NO: 279141 - DNA, 201 bp, Homo sapiens; identical to SEQ ID NO: 56547

SEQ ID NO: 279142 - DNA, 201 bp, Homo sapiens
agcactgctcattttcttggaagccctgccagagccagtcatctgttacgagctgtatcagcgatgtcttgactctgcttatgatccccggatctgccgayaggtgggttctactgacctggggatgtgtttgacgcagattgccccatagagaagtcgtcagttttacagagccagataggcagccagctgtctggtagg

SEQ ID NO: 279143 - DNA, 201 bp, Homo sapiens; identical to SEQ ID NO: 56549

SEQ ID NO: 279144 - DNA, 201 bp, Homo sapiens
ggtgacattgcattagtctccctttcactgttttcttattctgtaattgtttgttatatttcccaaaaacgtcttgatcactaagcaaagctgctagtggsattctatatttcgtgtcatcttttttattataatttattgcaaatttttttctgaataaatatatgttgtgtgaaaaagcaaagtgtgattttggtgagg

SEQ ID NO: 279145 - DNA, 201 bp, Homo sapiens
gatgtttaccttcttctgcttgacctacctcggtagcctttgaatgatccctttgtctttctctctctctctctctctctctctctctctctctctctctstctctgtctctgcccttcattttttcctattcagggctgtcagattgatctttctgtactactgctttggggcctatcacttccttgcttaaaggtagtc

SEQ ID NO: 279146 - DNA, 201 bp, Homo sapiens
aatgtatagtaaactttgtgtatgaaaaatgtatttcattttcaacaatcataatttatttgaagaattcaaagctgtttaaagcatgtatatctggtaaratagtgagttctaatactgatctgtttctaattctgtaaattaattctaatcatattctgtctgtcaatgactttcttttcctgctccgctctcaggaag

SEQ ID NO: 279147 - DNA, 201 bp, Homo sapiens
ctacccatttttcttctctccatccttctctgttttttttatgctaatcgctacttctgttcatacatttttttgatccttagggttgtcatttggttggragatttgaattatagactttgcatgcctgatgccaatgaggtgaaaagtcttattaataagaaagaccttcagagactcttgaaattcgaccaggtaagt

SEQ ID NO: 279148 - DNA, 201 bp, Homo sapiens
tattaacattaaccttttgtaactccccggaactcataggttcaactggtgcgccttgttgggatgatgcttcttatatttgccagaaaggatcagtgtcsatacattcgtgatattgctacagaaacagttggaactggaatcatggggaaaatggtgagttactttggaaatgagcttgattattattcatgttcatgt

SEQ ID NO: 279149 - DNA, 201 bp, Homo sapiens
cctttcccttgacttaagttgattcagctggcagcaaccactctgtggctgaagcactgctcattttcttggaagccctgccagagccagtcatctgttasgagctgtatcagcgatgtcttgactctgcttatgatccccggatctgccgacaggtgggttctactgacctggggatgtgtttgacgcagattgccccat

SEQ ID NO: 279150 - DNA, 201 bp, Homo sapiens
atcatctggttcaggcctctaccttcagacagggtattttctccattctaatagatgagacaaccaaggcccagaaaggttgaaaaacttgctgaagtcaygcactgtacccacttggtggaatttaatgccttttgatgatggggatggtatactgttttcatgctttagttattaacactaagtaaggttacagagtgt

SEQ ID NO: 279151 - DNA, 201 bp, Homo sapiens
gcttgttctgtgtactaattgaataattactcttgctaacagggaaacaaaggtggggtagctgtgagatttgtatttcacaacaccaccttttgcattgkcaattcccatctggctgcacacgtggaggactttgagagaaggaatcaagattataaggacatttgtgcgagaatgagttttgtggtcccaaatcagacc

SEQ ID NO: 279152 - DNA, 201 bp, Homo sapiens
tgtttttctcactgcctgcccctatttttaaaaacaggtgatctcccagcttccgagatgccatagaaatgttttccgttacttgatggcattccttcgakaactcttaaaattctctgaatacaatagcgtcaatgccaacatgatcggtaagagtgcttcatgcaacacggggcgtttgttgagaatactcttagtgca

SEQ ID NO: 279153 - DNA, 201 bp, Homo sapiens
taccttactcctcatatcctctatggaataatccaactgacttacttcccctactagtgatgcatgtttgtgtctgtctgttattccccagtttgtgtttkaaaatgtgaagtttcggcaactacaaaaggagaagttccagatcagcaacaatggacaggttccctgccatttttctttcatccctaaacttaatgacag

SEQ ID NO: 279154 - DNA, 201 bp, Homo sapiens
ttcctgctgctcttctgatccttgggtaatcatcataacctcaggagtgattatcttgcctgtcccttcattctgacttctttggtaggaggacctgttcyagacccctggaatgcaggaagagctccagcagatcattgattgtctggataccagcattcctgagacaatccgtatcctttgcgaccaaagcttaagaag

SEQ ID NO: 279155 - DNA, 201 bp, Homo sapiens
attatgggatatgtatagatctcatatcccttttttcctcagattccaagaactggacttgagcacagaagccttcttctactttgaatctgtgaaggaayaagaatggtccatggctgtagagagaggtttgcattccaaagccaagtataagaaagtaagccgcatttaattatctttttaagtgtatgactaaatagg

SEQ ID NO: 279156 - DNA, 201 bp, Homo sapiens
gtgtcatgtaaaatttagtggtaatatgtcacttcaccactgaacacttcagcctgcatctcttaacaaaaagggcacacttaagcacaataccattattwtgtataagaaaactaacagtaatccatagtatcatttaacattcggtccatattcagatttcttcagttgtcccaagaatttctgttataccttttttta

SEQ ID NO: 279157 - DNA, 201 bp, Homo sapiens
gtgataaaaagtaaatacaacatttattcaaaacgtctttatcattaagagatttcagagatttgtctaaatgagttggtgaatgggtggggttaattggrgaacacttcctggaggaagtgggccttcagctatgttgatgtggtttggcagatggaacagtgaaaactgttctatgattacttggcaagctgaggaaca

SEQ ID NO: 279158 - DNA, 201 bp, Homo sapiens
ttgcatggtttgattttatttcgtctctattagaagaagctagacttgtccataaatgtctggtttaaaggagaaatcaatactgttattcctctccaaarattaagcccagtctaggaagagaagattggagttttagacttgattagttatctatctgttgtgaagtgttgttgatgctcatagagtaaaggaaaagga

SEQ ID NO: 279159 - DNA, 201 bp, Homo sapiens
gatatgtatagatctcatatcccttttttcctcagattccaagaactggacttgagcacagaagccttcttctactttgaatctgtgaaggaacaagaatrgtccatggctgtagagagaggtttgcattccaaagccaagtataagaaagtaagccgcatttaattatctttttaagtgtatgactaaatagggctcacc

SEQ ID NO: 279160 - DNA, 201 bp, Homo sapiens
gagatagagctaggatagggttccaaccctgcacttggtactgtgatctgttgcattggttctcagacttcagtggatgtaagaattgcttagagagcttkaaaaaaagtgtggatgcatgtgtcctcacccctagaggctgtgattagtagacccaggcagctgtgcttttaagacatactcaagttgattctgtcacat

SEQ ID NO: 279161 - DNA, 201 bp, Homo sapiens
ctctttataactcgtttctttacttacagtgggaaatgccgggttccagcctggtgtgaccgaattctttggagaggaacaaatgttaatcagcttaattrtcggagtcacatggaactgaaaaccagcgaccacaagcctgttagcgccctcttccatattggggtaaacacttgtttgtacattcatttatttgtgtgt

SEQ ID NO: 279162 - DNA, 201 bp, Homo sapiens
ttaagttgattcagctggcagcaaccactctgtggctgaagcactgctcattttcttggaagccctgccagagccagtcatctgttacgagctgtatcagygatgtcttgactctgcttatgatccccggatctgccgacaggtgggttctactgacctggggatgtgtttgacgcagattgccccatagagaagtcgtca

SEQ ID NO: 279163 - DNA, 201 bp, Homo sapiens
ccttctttttgtgcacaagtgattgagggttaaaataatagaaccctgatcatttttaattacagaatttctgagtttttattaaattgtatgtgtgtggwcatcatttttcttttaaagcttttattttgtaggatttagggttcttttcacagtctgttgcatttcagtgttattaaattcctgtatctcattgatgag

SEQ ID NO: 279164 - DNA, 201 bp, Homo sapiens
cctagccagtccctctctccaaaggaaaccattcttaacagttgggtgtgtagccttttagatctgtactgtccaatatgacaaccagtagccatatatgrctgttaggtacctgaaagtgactggtccaaattaagatatgctgtatgcataagctatatattggattttaaagacttaggaagaagatgtacgatatct

SEQ ID NO: 279165 - DNA, 201 bp, Homo sapiens
ggtctgcatctgttattaatggcaggacaccaacattgagagttgctacccttaaattttaggttgtgttgtttcctacgatatttgccacctttttcccrttggcctatttctgtttacagaaaacatagtggggtggatccctctactctggggtaaattggtgaagctgattgtacgtggaattctggctgacattac

SEQ ID NO: 279166 - DNA, 201 bp, Homo sapiens
caaaggtggggtagctgtgagatttgtatttcacaacaccaccttttgcattgtcaattcccatctggctgcacacgtggaggactttgagagaaggaatyaagattataaggacatttgtgcgagaatgagttttgtggtcccaaatcagaccctcccgcagttgaacatcatgaaacatgagtaagtggttaactcacc

SEQ ID NO: 279167 - DNA, 201 bp, Homo sapiens
tgtttctatcctcaccacttattgaaaccaaacaattattggtctccagtgaactccttgacacgtccaaagaaagtctctttggccctcattttcttgtyctattttcagcatttgatactgctaacctcccctgcatattccttctttatctttcgttttcattgactgcaaatgattttcagtgcaggaaagtacatg

SEQ ID NO: 279168 - DNA, 201 bp, Homo sapiens
tggaaatgagcttgattattattcatgttcatgtaaagttcagttgcttgttctgtgtactaattgaataattactcttgctaacagggaaacaaaggtgrggtagctgtgagatttgtatttcacaacaccaccttttgcattgtcaattcccatctggctgcacacgtggaggactttgagagaaggaatcaagattat

SEQ ID NO: 279169 - DNA, 201 bp, Homo sapiens; identical to SEQ ID NO: 56543

SEQ ID NO: 279170 - DNA, 201 bp, Homo sapiens
gttggttccttcctctttgctttaaagtggcttcaggctttgtcaacaacctctgtttgacccttctaactaatttaattaaaattgtacttcgttccttyttatttccaaacctcttcaatctgtggtctcttgtctccgttttctcacaatacagttcctcctcaattccccataatcttgtttctatcctcaccactt

SEQ ID NO: 279171 - DNA, 201 bp, Homo sapiens
tgtcaacaacctctgtttgacccttctaactaatttaattaaaattgtacttcgttcctttttatttccaaacctcttcaatctgtggtctcttgtctccrttttctcacaatacagttcctcctcaattccccataatcttgtttctatcctcaccacttattgaaaccaaacaattattggtctccagtgaactccttg

SEQ ID NO: 279172 - DNA, 201 bp, Homo sapiens
tcatctggttcaggcctctaccttcagacagggtattttctccattctaatagatgagacaaccaaggcccagaaaggttgaaaaacttgctgaagtcatrcactgtacccacttggtggaatttaatgccttttgatgatggggatggtatactgttttcatgctttagttattaacactaagtaaggttacagagtgtg

SEQ ID NO: 279173 - DNA, 201 bp, Homo sapiens
ctggttcaggcctctaccttcagacagggtattttctccattctaatagatgagacaaccaaggcccagaaaggttgaaaaacttgctgaagtcatgcacygtacccacttggtggaatttaatgccttttgatgatggggatggtatactgttttcatgctttagttattaacactaagtaaggttacagagtgtgggct

SEQ ID NO: 279174 - DNA, 201 bp, Homo sapiens
aacttccccagtctgagatacttgactcagctttgatgttcttattttcaacattttaaaaaatttttatttcacttcaagttgtgggatacaagtgcagaacgtataggcttgttacataggtatgtgtgccatgttggtttgctgcacctatcaacccatcatctaggttttaagccccacgtgcattagctatttaac

SEQ ID NO: 279175 - DNA, 201 bp, Homo sapiens
tgtgtactaattgaataattactcttgctaacagggaaacaaaggtggggtagctgtgagatttgtatttcacaacaccaccttttgcattgtcaattccyatctggctgcacacgtggaggactttgagagaaggaatcaagattataaggacatttgtgcgagaatgagttttgtggtcccaaatcagaccctcccgca

SEQ ID NO: 279176 - DNA, 201 bp, Homo sapiens
ggagatagaaaggaatctgggatgctgcttaggagactggctggggtgagaagaatgaaaatggaaagtagagtggtttaccatctccttccagatggccrctgttgggcccacagccatattctttcattgaggtatatacctcaatgcacctgcctccaagcagcagacaggaagagacatcaggggcatttggctggg

SEQ ID NO: 279177 - DNA, 201 bp, Homo sapiens
ttgacccttctaactaatttaattaaaattgtacttcgttcctttttatttccaaacctcttcaatctgtggtctcttgtctccgttttctcacaatacakttcctcctcaattccccataatcttgtttctatcctcaccacttattgaaaccaaacaattattggtctccagtgaactccttgacacgtccaaagaaag

SEQ ID NO: 279178 - DNA, 201 bp, Homo sapiens
gctgtgtcatgtaaaatttagtggtaatatgtcacttcaccactgaacacttcagcctgcatctcttaacaaaaagggcacacttaagcacaataccattwttatgtataagaaaactaacagtaatccatagtatcatttaacattcggtccatattcagatttcttcagttgtcccaagaatttctgttataccttttt

SEQ ID NO: 279179 - DNA, 201 bp, Homo sapiens
ctgtgcttgattaacacttaactgtggtccctggaatttgtccctaggctttcccatatcagagacctctgacttggtgagactcccctaaagtcctgccrgctgtccttaagtgtgtttgaagtacaggaaagatatttactgtagcagtcaagtcattgagactcagtacataaaaacagtaggactcaaggttctaga

SEQ ID NO: 279180 - DNA, 201 bp, Homo sapiens
tctagatgcaaaagatctttcttacatatgtggcaaaacattttgaggaattatgttagcatattgtgaacatacctttgtatggaagcgaaaagaaagamcttctgttggtttatacttgatctttgttttcaaattatcttttcgtattatgtattagattttttgttggaacttggaatgtgaatggccagtctccag

SEQ ID NO: 279181 - DNA, 201 bp, Homo sapiens
catacattttaaacttgaggtaatgagttgtagatgcttcttttcagaatacttcaaaccagtatcactatttttaagttattttgtaaatttaatctgtrcttacggacaaaccatcctacttattttattcccttcatgcttcagatactctgacaatgtgatctggacttgaaatggtaggaatttccagctaaggaa

SEQ ID NO: 279182 - DNA, 201 bp, Homo sapiens; identical to SEQ ID NO: 56560

SEQ ID NO: 279183 - DNA, 201 bp, Homo sapiens
ttcaccttgttagccaggatggtctcgatctcctgacctcatgatccacccgcctcggcctcccaaagtgctgggattacaggcgtgagccaccgcgcccrgccagtagacccttttgatttcctaatcatcctagtaaagtgcccccagtaagttcttagtgagtatttgtcctctacctactatctctttcttttcttt

SEQ ID NO: 279184 - DNA, 201 bp, Homo sapiens
acctgtttttctcactgcctgcccctatttttaaaaacaggtgatctcccagcttccgagatgccatagaaatgttttccgttacttgatggcattccttygagaactcttaaaattctctgaatacaatagcgtcaatgccaacatgatcggtaagagtgcttcatgcaacacggggcgtttgttgagaatactcttagt

SEQ ID NO: 279185 - DNA, 201 bp, Homo sapiens
tgccatgtttgtttcactcacctgactttagagtcagctgcagagctactgatgagaaatatctgtgtcaccttctggatcagggtacaaggtgttgcttcttttaatagaatgatgaataggttctttttccctacccttggtattctgtggactgacatttgctcagacttgcatggtttgattttatttcgtctctat

SEQ ID NO: 279186 - DNA, 201 bp, Homo sapiens
tttgctttagtgaccttaaaaattgttagagactcttggaggtataaaagttgagaacacataaaactaaagcaaggatctgttttctttcaggtgcaagytgtggatgaagcaagatatagagagtgtttgaggatgttgtttgcaccacagtttattttaaatagttactgtaatgaccagttttaaattgttagataa

SEQ ID NO: 279187 - DNA, 201 bp, Homo sapiens
aaggcgataaggctgctggttctgcttgggggtactgaggacagtttcatggaggaggtgatatttgagatgaaactcggaaagaaacagagtgttcctgwcaaaaaactaaaaacaatacttgaagagtgcttgactttgagaatgctagttgacgttcagaatggctgtttaccagtaggtcgtaccttgattctggac

SEQ ID NO: 279188 - DNA, 201 bp, Homo sapiens
tgtcagatcgactgggtgggtggaagtgtcctagtcacagatgtcacagctgaagcatgtaaaggtaagttatttactaagacaaaggcctaagtgtagtygtggcagagccaggaccaaattaagagcacctgtctcctggctaccctctcattttccctggacagctgcacacctgagtctataatgcctactttggct

SEQ ID NO: 279189 - DNA, 201 bp, Homo sapiens
gtattaacattaaccttttgtaactccccggaactcataggttcaactggtgcgccttgttgggatgatgcttcttatatttgccagaaaggatcagtgtygatacattcgtgatattgctacagaaacagttggaactggaatcatggggaaaatggtgagttactttggaaatgagcttgattattattcatgttcatg

SEQ ID NO: 279190 - DNA, 201 bp, Homo sapiens
caggtaagtgagagtagaccttccctacaactttggaaggtgtgtaactactataggaaatcacaacacctcacgtcagcatagcgcttttaactttcccragctacctgcacacagtggcactgtcagatcgactgggtgggtggaagtgtcctagtcacagatgtcacagctgaagcatgtaaaggtaagttatttact

SEQ ID NO: 279191 - DNA, 201 bp, Homo sapiens; identical to SEQ ID NO: 56619

SEQ ID NO: 279192 - DNA, 201 bp, Homo sapiens; identical to SEQ ID NO: 56620

SEQ ID NO: 279193 - DNA, 201 bp, Homo sapiens; identical to SEQ ID NO: 56621

SEQ ID NO: 279194 - DNA, 201 bp, Homo sapiens; identical to SEQ ID NO: 56622

SEQ ID NO: 279195 - DNA, 201 bp, Homo sapiens; identical to SEQ ID NO: 56623

SEQ ID NO: 279196 - DNA, 201 bp, Homo sapiens; identical to SEQ ID NO: 56624

SEQ ID NO: 279197 - DNA, 201 bp, Homo sapiens; identical to SEQ ID NO: 56625

SEQ ID NO: 279198 - DNA, 201 bp, Homo sapiens; identical to SEQ ID NO: 56626

SEQ ID NO: 279199 - DNA, 201 bp, Homo sapiens; identical to SEQ ID NO: 56627

SEQ ID NO: 279200 - DNA, 201 bp, Homo sapiens
tcagatgagatttgggtgggggcacagccaaaccatattagaggtcatctagcacttcgtttccaattcaggaatcccttttacaaaatccttggcaaatkcttatctagcctgtttactatttttttgtttgtttattttcttttttagaatgttattttccacaatgggttgaaatcagcctctttataatattgacca

SEQ ID NO: 279201 - DNA, 201 bp, Homo sapiens; identical to SEQ ID NO: 56628

SEQ ID NO: 279202 - DNA, 201 bp, Homo sapiens; identical to SEQ ID NO: 56629

SEQ ID NO: 279203 - DNA, 201 bp, Homo sapiens; identical to SEQ ID NO: 56630

SEQ ID NO: 279204 - DNA, 201 bp, Homo sapiens; identical to SEQ ID NO: 56631

SEQ ID NO: 279205 - DNA, 201 bp, Homo sapiens; identical to SEQ ID NO: 56632

SEQ ID NO: 279206 - DNA, 201 bp, Homo sapiens; identical to SEQ ID NO: 56647

SEQ ID NO: 279207 - DNA, 201 bp, Homo sapiens; identical to SEQ ID NO: 56648

SEQ ID NO: 279208 - DNA, 201 bp, Homo sapiens; identical to SEQ ID NO: 56649

SEQ ID NO: 279209 - DNA, 201 bp, Homo sapiens; identical to SEQ ID NO: 56650

SEQ ID NO: 279210 - DNA, 201 bp, Homo sapiens
cctacccccgcgctcccgcaccagttgggcgctcccggatgatgccctacccctttggatccacgtggtctgcaacctggtgcgagcagcccgggctacarggttgcctgaggtgtgggtcccaggatggaggagccccaggccggcggtgagggtgcgggttgacggggtgcggagggtgcgttggtggaaggagaaagg

SEQ ID NO: 279211 - DNA, 201 bp, Homo sapiens; identical to SEQ ID NO: 56652

SEQ ID NO: 279212 - DNA, 201 bp, Homo sapiens; identical to SEQ ID NO: 56653

SEQ ID NO: 279213 - DNA, 201 bp, Homo sapiens
attagaggtgagtcacagagcacagtgaaagaaacaagtttattggaaactactcctttacagagtagagtgtcctcagaaagcagggggagaaacccacrgccctttgttagtatttctacttataagaaactataaggaactatagttaaacttggagtgtgcagataagctcactaaaggtaggggctattggtgtta

SEQ ID NO: 279214 - DNA, 201 bp, Homo sapiens
ccccgcgctcccgcaccagttgggcgctcccggatgatgccctacccctttggatccacgtggtctgcaacctggtgcgagcagcccgggctacagggttrcctgaggtgtgggtcccaggatggaggagccccaggccggcggtgagggtgcgggttgacggggtgcggagggtgcgttggtggaaggagaaaggggcgt

SEQ ID NO: 279215 - DNA, 201 bp, Homo sapiens; identical to SEQ ID NO: 56655

SEQ ID NO: 279216 - DNA, 201 bp, Homo sapiens; identical to SEQ ID NO: 56656

SEQ ID NO: 279217 - DNA, 201 bp, Homo sapiens
gctgaggcaggagaatcgcttgaacccaggaggtggacattgcagtgagccgagatcatgccactgcactccagcctaggcaacagagcaagactctctcaaaaaaaaacaaaaaaaaaatcaaaaaaccttccctctcctgttccacttaagcctctgccctccctgtttctctctgtagcttcaatgggcggcatgtgc

SEQ ID NO: 279218 - DNA, 201 bp, Homo sapiens; identical to SEQ ID NO: 56657

SEQ ID NO: 279219 - DNA, 201 bp, Homo sapiens; identical to SEQ ID NO: 56658

SEQ ID NO: 279220 - DNA, 201 bp, Homo sapiens
gagaatcgcttgaacccaggaggtggacattgcagtgagccgagatcatgccactgcactccagcctaggcaacagagcaagactctctcaaaaaaaaacaaaaaaaaaatcaaaaaaccttccctctcctgttccacttaagcctctgccctccctgtttctctctgtagcttcaatgggcggcatgtgcctctctctgg

SEQ ID NO: 279221 - DNA, 201 bp, Homo sapiens; identical to SEQ ID NO: 56659

SEQ ID NO: 279222 - DNA, 201 bp, Homo sapiens; identical to SEQ ID NO: 56660

SEQ ID NO: 279223 - DNA, 201 bp, Homo sapiens
acctggtgcgagcagcccgggctacagggttgcctgaggtgtgggtcccaggatggaggagccccaggccggcggtgagggtgcgggttgacggggtgcgkagggtgcgttggtggaaggagaaaggggcgtccgagagggttcgggcggaaaaggaggcgtacctgcaagcaggacttgcgaagagcgtgcattcccagt

SEQ ID NO: 279224 - DNA, 201 bp, Homo sapiens; identical to SEQ ID NO: 56661

SEQ ID NO: 279225 - DNA, 201 bp, Homo sapiens
aacctggtgcgagcagcccgggctacagggttgcctgaggtgtgggtcccaggatggaggagccccaggccggcggtgagggtgcgggttgacggggtgcrgagggtgcgttggtggaaggagaaaggggcgtccgagagggttcgggcggaaaaggaggcgtacctgcaagcaggacttgcgaagagcgtgcattcccag

SEQ ID NO: 279226 - DNA, 201 bp, Homo sapiens; identical to SEQ ID NO: 56662

SEQ ID NO: 279227 - DNA, 201 bp, Homo sapiens; identical to SEQ ID NO: 56663

SEQ ID NO: 279228 - DNA, 201 bp, Homo sapiens; identical to SEQ ID NO: 56664

SEQ ID NO: 279229 - DNA, 201 bp, Homo sapiens
tgaacccaggaggtggacattgcagtgagccgagatcatgccactgcactccagcctaggcaacagagcaagactctctcaaaaaaaaacaaaaaaaaaawcaaaaaaccttccctctcctgttccacttaagcctctgccctccctgtttctctctgtagcttcaatgggcggcatgtgcctctctctggctcccagatc

SEQ ID NO: 279230 - DNA, 201 bp, Homo sapiens
gtctgtactcccggctacttgggaggctgagacttgagagaatcgcttgaatccgggaggcagaggttgcagtgagccaagattgcgccactgctctccascctgggtgacagagtgagactccatctaaaaaaaaaagtacagaatgtggactgaacatggaggctcacacctgtaatcccaacactttgggagtccaag

SEQ ID NO: 279231 - DNA, 201 bp, Homo sapiens
aggagcctggatcagaggatcagggactgtccagggttaggaggagagagaagctggaaaagaccctgccacaggtgggaggagggaggaggtgtgggaakaggtgcgaggaggcaggaggtgtgggaagaggtgggaggagggaggaggtgcaagaagaggtggaggagggccctgtggttatcaagggtcatccctatt

SEQ ID NO: 279232 - DNA, 201 bp, Homo sapiens
cgcaccaccgcactctagtctgggtgacagagagagactccgtctcaaaaaaaaaaaaaaaaaagaaagaaagaaagaaaaagaaaaaaagaaaagaaactgagggtagaaatccaacatccaacttgccaacttggaaataacgtagaacccagggcaattttttcccctcgctcttaactaatgttaaccgattcagaa

SEQ ID NO: 279233 - DNA, 201 bp, Homo sapiens
agatctacctttggtcaacttgagacaattggttacatcactcataaacaacgacctcggtgcactttcaaaaataaatcttggccaggcaccgtggctcrtgcttgtaatcccagcactttgggaggctgaggtgggcagatcacttgaggtcaagagttcgagaccagcagggccaacatggtgaaactccgtctctac

SEQ ID NO: 279234 - DNA, 201 bp, Homo sapiens
ctgagcccgggaggttgaggctgcagtgaggtgtgatcgcaccaccgcactctagtctgggtgacagagagagactccgtctcaaaaaaaaaaaaaaaaaagaaagaaagaaagaaaaagaaaaaaagaaaagaaactgagggtagaaatccaacatccaacttgccaacttggaaataacgtagaacccagggcaatttt

SEQ ID NO: 279235 - DNA, 201 bp, Homo sapiens
ggcacgtggacacagatttgggggacgcacccacttcccttcccactggggccgccccgcgttgggcggcggttggagccgcgagacggtggctagacagrgtgacccgactgcattcctggccagtgtgtcagcgccacttcccgccccctctgccaagatttaggatcctactccagaattggggcaccccttctcccc

SEQ ID NO: 279236 - DNA, 201 bp, Homo sapiens
tcctccctgccccagggagcgtgtaaacagcggcacgtggacacagatttgggggacgcacccacttcccttcccactggggccgccccgcgttgggcggyggttggagccgcgagacggtggctagacagggtgacccgactgcattcctggccagtgtgtcagcgccacttcccgccccctctgccaagatttaggatc

SEQ ID NO: 279237 - DNA, 201 bp, Homo sapiens
gccccagggagcgtgtaaacagcggcacgtggacacagatttgggggacgcacccacttcccttcccactggggccgccccgcgttgggcggcggttggarccgcgagacggtggctagacagggtgacccgactgcattcctggccagtgtgtcagcgccacttcccgccccctctgccaagatttaggatcctactcca

SEQ ID NO: 279238 - DNA, 201 bp, Homo sapiens; identical to SEQ ID NO: 56686

SEQ ID NO: 279239 - DNA, 201 bp, Homo sapiens
ggaagtgaaacctctgagttcctgtgctccctgcaggctgtgacagctgcagactgctgggcagagccagtcctagttccctgggtcatgaagccctcacygtagccctccaaggccagagcagatggtttggcagtgggccctgcttcccaccgcgagccatgcagtgtccccgtgcccacactctctagggcccctggc

SEQ ID NO: 279240 - DNA, 201 bp, Homo sapiens
catttgttcatttattgttggtcatcccccttccaatttccaaagagtaagcttccagaacagagagctttgtcttgttcaatactgcattctcacagtcyttaccagtgcctggcgtatagtagatgctcaataaatacctgttgattggggcaggtgccgtggctcacacctctaatcccagcactttgggtggccaag

SEQ ID NO: 279241 - DNA, 201 bp, Homo sapiens
cagagcgagactccatctcaaaaaaaaaaaaaataataataataataataacttaaaaagattgtaactggattgtttgtaactcaatggataaatgcttsagggtataggggaaaataaagaaccaaaaccccactctagatttacccaggaaacagctcctttaatgactggttcctcatttttttctccctcccatcc

SEQ ID NO: 279242 - DNA, 201 bp, Homo sapiens; identical to SEQ ID NO: 56687

SEQ ID NO: 279243 - DNA, 201 bp, Homo sapiens
gatctgggagccagagagaggcacatgccgcccattgaagctacagagagaaacagggagggcagaggcttaagtggaacaggagagggaaggttttttgwttttttttttgtttttttttgagagagtcttgctctgttgcctaggctggagtgcagtggcatgatctcggctcactgcaatgtccacctcctgggttca

SEQ ID NO: 279244 - DNA, 201 bp, Homo sapiens
  misc_feature (1)...(201): n = A,T,C or G
tccatgggcggctgcagagcctggggaagaacttcgccttgcgggtcctgcttgtccaggtggatgtggtaagcaggggctgctccctagccagcctcacngggctttgaggttgtgcagtgggctgttgaatcccttccaagaggaaatgcagctaaaacctcagcgaggaacgtttttcacatctgagatgacatgggt

SEQ ID NO: 279245 - DNA, 201 bp, Homo sapiens
ctgaggcaggagaatggcgtgaacccgggaggcggagcttgcagtgagccgagattgcgccactgcactccaacctgggcgacagagcgagactccatctcaaaaaaaaaaaaaataataataataataataacttaaaaagattgtaactggattgtttgtaactcaatggataaatgcttgagggtataggggaaaata

SEQ ID NO: 279246 - DNA, 201 bp, Homo sapiens; identical to SEQ ID NO: 56689

SEQ ID NO: 279247 - DNA, 201 bp, Homo sapiens; identical to SEQ ID NO: 56682

SEQ ID NO: 279248 - DNA, 201 bp, Homo sapiens
gaggccaaggcgggcagattgcaatgtcaaggccaggagtttgagatcagcgtaggcaatagagcaagaccccgcccccccgcttcatctctacaaaactwtttttgtttgtttgtttgtctgagacggagtctcactgtcacccaggctggagtgcagtggcgtgatctcggctcactgcaagctccgcctcctgggttc

SEQ ID NO: 279249 - DNA, 201 bp, Homo sapiens
taacaccaatagcccctacctttagtgagcttatctgcacactccaagtttaactatagttccttatagtttcttataagtagaaatactaacaaagggcygtgggtttctccccctgctttctgaggacactctactctgtaaaggagtagtttccaataaacttgtttctttcactgtgctctgtgactcacctctaat

SEQ ID NO: 279250 - DNA, 201 bp, Homo sapiens
cagagccttcccactgtggacacctcggcccaggcggcccctcagacctacgccgaatatgccatctcacagcctctggaaggggctggggccacgtgccmcacagggtcagagcccctggcaggagagacgcccaaccaggccctgaaacccggggcaaaatccaacagcatcattgtgagccctcggcaggtgaggagg

SEQ ID NO: 279251 - DNA, 201 bp, Homo sapiens; identical to SEQ ID NO: 56684

SEQ ID NO: 279252 - DNA, 201 bp, Homo sapiens
tgggcgacagagcgagactccatctcaaaaaaaaaaaaaataataataataataataacttaaaaagattgtaactggattgtttgtaactcaatggataratgcttgagggtataggggaaaataaagaaccaaaaccccactctagatttacccaggaaacagctcctttaatgactggttcctcatttttttctccct

SEQ ID NO: 279253 - DNA, 201 bp, Homo sapiens
gcactgggaggctgaggcaggcgcatcaggaggtcaggagatcgagaccatcctggctaacgtggtgaaaccccatctctactaaaaaaaaatacaaaaarttagctgggcaggggcctgtagtcccagctactcaggaggctgaggcaggagaatggcgtgaacccgggaggcggagcttgcagtgagccgagattgcgc

SEQ ID NO: 279254 - DNA, 201 bp, Homo sapiens
ggcaggagaatcgttggaacccaggaggcggaggttgcagtgagccaagatcacaccactgcactccagcctgggtgacaccaggagactgtctcaaaaawataataataacttagccaggcgcagtggctcacacctataatcccagcactgggaggctgaggcaggcgcatcaggaggtcaggagatcgagaccatcct

SEQ ID NO: 279255 - DNA, 201 bp, Homo sapiens
ctgaggcaggagaatcgttggaacccaggaggcggaggttgcagtgagccaagatcacaccactgcactccagcctgggtgacaccaggagactgtctcaraaaaataataataacttagccaggcgcagtggctcacacctataatcccagcactgggaggctgaggcaggcgcatcaggaggtcaggagatcgagacca

SEQ ID NO: 279256 - DNA, 201 bp, Homo sapiens
tctctggaacagctcatcgccgcatcaagagaagatctggccttatgcccaggcctgggccctcagaaagtaagagctctgggaaagaacccaaggagttrggggaaggagagagccccaaataaacacaacctgagaccccaaagttttaaggtgaaaaaagaaccaaagaccagacacagtggcttccgcctgtaatcc

SEQ ID NO: 279257 - DNA, 201 bp, Homo sapiens
tgccctgttcctcaggtgagctctgcggcgccaccccagacttcaggaagggcaccccactggcctgggagggtcatgtcccagtgttctggactgttctrtgagaagcctctgggcatggtcctgcaggttctgggccttggtgggaccctgtgttggaggcagggggtcttggcctggaggtgcccagtgcaacaagag

SEQ ID NO: 279258 - DNA, 201 bp, Homo sapiens
tggaggagggccctgtggttatcaagggtcatccctattgatggcttctgcccttcgtccctccccagaggggcaatcccgtactgaagttcgtgcgcaaygtgccctgggaatttggcgacgtaattcccgactatgtgctgggccagagcacctgtgccctgttcctcaggtgagctctgcggcgccaccccagacttc

SEQ ID NO: 279259 - DNA, 201 bp, Homo sapiens
ccagtcctagttccctgggtcatgaagccctcaccgtagccctccaaggccagagcagatggtttggcagtgggccctgcttcccaccgcgagccatgcartgtccccgtgcccacactctctagggcccctggcacctgttctccccttgaagcccaagtctcttcccctcttcatgaagaagccaggggtctggtcttc

SEQ ID NO: 279260 - DNA, 201 bp, Homo sapiens
gtgctgccatctactgatggcttgctatgaatgtgcttgtcagcaaattttgcctctcttaactcaaaggcctccagaatcgatccctactacctcctagwccaagtcaccattggactcaactggaccatgacagtgactggtctccctgactccacacttgtcctccaaagtctattccccacctacaacccaaaggac

SEQ ID NO: 279261 - DNA, 201 bp, Homo sapiens
agtgctgccatctactgatggcttgctatgaatgtgcttgtcagcaaattttgcctctcttaactcaaaggcctccagaatcgatccctactacctcctartccaagtcaccattggactcaactggaccatgacagtgactggtctccctgactccacacttgtcctccaaagtctattccccacctacaacccaaagga

SEQ ID NO: 279262 - DNA, 201 bp, Homo sapiens
cagttgtgagccacctctcccggcccagctcctactttctacaccggctccatgtgactgatgaggacatggctccgggagtcctggggcccacatggatragtacaggtttagatgtaaatctaggcactgagagtgttatgttcgggtgtgtgggcttgggaatagccgtcccaatagaggggtaccatctttggagct

SEQ ID NO: 279263 - DNA, 201 bp, Homo sapiens
tcacttgaacccaggaggcagaggttgcagtgagccgagattgtgccactgcactccagcctgggcagcagagcgagactccgtctcaaaaaaaaaaaaaatcagatgagaacacgtagtgacaaaaaataaaaaataatatttacaaatttaaaaaatttaaactctattttagcaactttgaaatacacaatacattag

SEQ ID NO: 279264 - DNA, 201 bp, Homo sapiens
ggctggaattttgatttttagcaaccacaattgtttttttttttttttttttttttgagacggagtctggctctgtcgcccaggctggagtgcagtggcgygatctcggctcattgcaaactccacctcccgggttcacgccattctcatgcctcagcctcctgaaaagctgggactacaggcgcccgctaccacgcccgg

SEQ ID NO: 279265 - DNA, 201 bp, Homo sapiens
ccggtgggggcgaggggcggagcgatgggacttgtggacctgtaaggggcggggcgagccgaaggtggaggtcaaaggggcgtggcgttacagagcctctrgcgctgggtgttggggacctgacgctatggagctctcggagttttgtgggggacggctgtgagtggggggttcctgctgcgggatgagaacgtagacgcc

SEQ ID NO: 279266 - DNA, 201 bp, Homo sapiens
cggctcactgcaacctctgcctcccaggttcaagtgattctcctgcctgagcctcctgagtagctgggactacaggtgcccacaaccatgcctgtctaatktttgtattttttagtaaagatggggtttcagtgtgttggccaggctggtcttgaactcctggcctcaggtgatcctcccgcctcggcctcgaaagtgctg

SEQ ID NO: 279267 - DNA, 201 bp, Homo sapiens
cccgacactttgggagggcgagaagggaggatcgcttgagcccaggagttcgagaccagcctgggctatagtgagaccccacccccccacccccacgcctytacaaaaaaaatacaaaagttggccaggcgtggtggcgcgcgcctgtggtccagctactcggtaagctgatgtgggaggatcatctgagcccgggaggtt

SEQ ID NO: 279268 - DNA, 201 bp, Homo sapiens
catcccaaagtgctgggattacaggcgtgagccaccgcgcccggcctagtattggcaattcttatgactgaccataatgaagcaaatctataatctgatayctcacctcccggctgccctgtatcctgttatcccagccccgaggaagctgggcggtacctggagacctacaaggcctatgagcagaaaccagcggacctc

SEQ ID NO: 279269 - DNA, 201 bp, Homo sapiens
aaaacacaaaaagttgctgggcgtgagggcaggaagtgttcaggaccacaggacacgcagactggggctggagggagagggctgagctggagacagaccckgggaccctttaggaaaggcctggtgccagtgggcatggaggggaggagcctggatcagaggatcagggactgtccagggttaggaggagagagaagctgg

SEQ ID NO: 279270 - DNA, 201 bp, Homo sapiens
ggcgtgaacccgggaggcggagcttgcagtgagccgagattgcgccactgcactccaacctgggcgacagagcgagactccatctcaaaaaaaaaaaaaawaataataataataataacttaaaaagattgtaactggattgtttgtaactcaatggataaatgcttgagggtataggggaaaataaagaaccaaaacccc

SEQ ID NO: 279271 - DNA, 201 bp, Homo sapiens
aacagcatcattgtgagccctcggcaggtgaggagggagacggagaagtgaggccttgaggttttcagtgggaaacgctgttctagggatgactccagtgsaaggaggtctgagttccagccactttgttctccccattcattcattcattcattcattcattcgacagcagtgtgtgggttgagagtgccccagctctac

SEQ ID NO: 279272 - DNA, 201 bp, Homo sapiens; identical to SEQ ID NO: 56703

SEQ ID NO: 279273 - DNA, 201 bp, Homo sapiens
cccaacacttccaatcctcttgtggtgcaccatcgcccccttgcagaaaacgcaggagttgcagggttaagtctggcaattccattccccaaggggataaytgagtcacaagcccttctacttgggatgacctacttctagaatcgctgtatggtcttggatacagaggcatatttcattttttctttttttcgttttttg

SEQ ID NO: 279274 - DNA, 201 bp, Homo sapiens
aaaaaagaaaagaaactgagggtagaaatccaacatccaacttgccaacttggaaataacgtagaacccagggcaattttttcccctcgctcttaactaaygttaaccgattcagaattccactgatcgcaggcggcgggccctttaccgcacttctgcttcaaggaaatgaatcgggagcggggaatgggccgccttcta

SEQ ID NO: 279275 - DNA, 201 bp, Homo sapiens
gggaggccgaggcgggtggatcacctgaggtcaggagttcgaaaccagcctggccaacatggtgaaaccccatctctactaaaaataaaaaattagctggktgtggtggcatgcgcctgtagtcccagctactcaggaggctgaggcaggagaatcacttgaacctgggaggcggaagttgcagtgaatcgtgatcatgcc

SEQ ID NO: 279276 - DNA, 201 bp, Homo sapiens
aggcccacaggagataaggctcagaatcatgcgtgccggtcacagagcatgcaatcaacatttgctattataacgggaaatgtcattttattttatcaccrgcaccttttattcatgcagttaatttatcccaaggcctgtcctgtgctgggcagcgctggggacaaggcgatgactgagatggccttgaccctgccctta

SEQ ID NO: 279277 - DNA, 201 bp, Homo sapiens
tttttgtatttttagtagagttggggttttgccatgtttgccaggctggtctcaaactcctgacctcacgtgatccgcctgatgcctcagcctcccaaagkgctgggattacaggcatgagccaccgcgccccgcttatgataataattttgtatttgtagacccccaaaggggtgctggggaaccccctaaggttctttg

SEQ ID NO: 279278 - DNA, 201 bp, Homo sapiens
cttagcctcccaaaatgctgggattgcaggtgtgagccagtgcacctggcctcctactccacgtggccctgatatgtgccatgaggctctgatatgtgccmtgcactgtggggggtgccaaaaattagagctacatggctacagagaccctcctgtgctatggcccacgcagcttctagacacacacagaagacccagtac

SEQ ID NO: 279279 - DNA, 201 bp, Homo sapiens
ggaggctcacacctgtaatcccaacactttgggagtccaaggcaggaggatcccttgaggccagcagtttgagatcagcagcctgggcaacatagcgagamcccatctctacacaaaaatagccagctctggcggtgcacacctatagtcccagctacttgtgaggctgaggtaggaggtttgcttgagcctaggagtttg

SEQ ID NO: 279280 - DNA, 201 bp, Homo sapiens; identical to SEQ ID NO: 56685

SEQ ID NO: 279281 - DNA, 201 bp, Homo sapiens
acctcaggatcagctgaggtcaggagtttgagaccagcctggccaacatggtgaaaccccgtctctactaaaaatacaaaaaaaaaaaaaaaaaaaaaaaattagccgggcatggtggcacatgcctgtaatcccagctactaaggaggcaggagaatcgcttgaacccgggagggggaggtgcagtgaactgagatcgcg

SEQ ID NO: 279282 - DNA, 201 bp, Homo sapiens
gacctcaggatcagctgaggtcaggagtttgagaccagcctggccaacatggtgaaaccccgtctctactaaaaatacaaaaaaaaaaaaaaaaaaaaaaaattagccgggcatggtggcacatgcctgtaatcccagctactaaggaggcaggagaatcgcttgaacccgggagggggaggtgcagtgaactgagatcgc

SEQ ID NO: 279283 - DNA, 201 bp, Homo sapiens
gtggagattggcgccgcggaagccaatcattgccgagtctgagagatggacaaggccaggcgtggggagggcgtccagatgctagcctcgggggccggackaacggaaggcgggggatggtggggacggagccaatagaatccggtgggggcgaggggcggagcgatgggacttgtggacctgtaaggggcggggcgagcc

SEQ ID NO: 279284 - DNA, 201 bp, Homo sapiens
tgacctcaggatcagctgaggtcaggagtttgagaccagcctggccaacatggtgaaaccccgtctctactaaaaatacaaaaaaaaaaaaaaaaaaaaaaaattagccgggcatggtggcacatgcctgtaatcccagctactaaggaggcaggagaatcgcttgaacccgggagggggaggtgcagtgaactgagatcg

SEQ ID NO: 279285 - DNA, 201 bp, Homo sapiens
gtgacctcaggatcagctgaggtcaggagtttgagaccagcctggccaacatggtgaaaccccgtctctactaaaaatacaaaaaaaaaaaaaaaaaaaaaaaattagccgggcatggtggcacatgcctgtaatcccagctactaaggaggcaggagaatcgcttgaacccgggagggggaggtgcagtgaactgagatc

SEQ ID NO: 279286 - DNA, 201 bp, Homo sapiens
tgaacccaggaggcggaggttgcagtgagccgagaccacgccattgcactccagcttgggcagcaagaaagaaactctgtctcaaaataaataaataaatwaattaattaacaaataagaaacagttcacatccctcttttgctcaaaaccctcccatagctcctgacccactctgtaaaagacttcacctcagcccatcg

SEQ ID NO: 279287 - DNA, 201 bp, Homo sapiens
atactatttgataacacaaccaggtgactatagtcaataataatggtacattttaaaataacttggcagggtgcggtggctcacacctgttatcctagcastttgggaggtcaaggcaggtggatcacgaggtcaggagttcgagaccagcctggccaatatggtgaaacccctgtctctactaaaaatacaaaaattagc

SEQ ID NO: 279288 - DNA, 201 bp, Homo sapiens
ggtgtgagcttgctacgtgcctgtagtctcagctactggggagactgaggtgggaggatcgcttgagcccaggaggttgaggctgcagtgagctataagcrtgttactacgctccagcctgggtgacagagcgatcctgtctcaaagcagaagcaatccaatgaggaagaatgaaactagatagctatctctcgccatata

SEQ ID NO: 279289 - DNA, 201 bp, Homo sapiens
tgctgggattacaggcgtgagccaccgcgcccggcctagtattggcaattcttatgactgaccataatgaagcaaatctataatctgatacctcacctccyggctgccctgtatcctgttatcccagccccgaggaagctgggcggtacctggagacctacaaggcctatgagcagaaaccagcggacctcctgatggaga

SEQ ID NO: 279290 - DNA, 201 bp, Homo sapiens
aatgaggctgggtgtggtggctcacacctgtaatcccagcactttggagaggctgaggcaggtggatcacctgaggtcaggagttcgagaccagtctggcsaatatggtgacaccccatctctactaaaaacacaaaaagttgctgggcgtgagggcaggaagtgttcaggaccacaggacacgcagactggggctggagg

SEQ ID NO: 279291 - DNA, 201 bp, Homo sapiens
attggaatccactatatatggagtctcactgtatggcccaggttgatctccaactcttggtctcacggggtcctcccacctcagctttccaaggagctggkattacaagtgcaggctaccatgcctggctgtcacacatgtcgttttaaatgtttaggccagggtggctcacactcgtaatctcagccctttgggaggcca

SEQ ID NO: 279292 - DNA, 201 bp, Homo sapiens
tattggaatccactatatatggagtctcactgtatggcccaggttgatctccaactcttggtctcacggggtcctcccacctcagctttccaaggagctgrgattacaagtgcaggctaccatgcctggctgtcacacatgtcgttttaaatgtttaggccagggtggctcacactcgtaatctcagccctttgggaggcc

SEQ ID NO: 279293 - DNA, 201 bp, Homo sapiens
atacaaaagttagcctgtaatcccagctacttgggaggctgaggcaggagaactgcttgaatgtgggtggcggaggttgcagtgagcctagattgctccaytgcactccagcctaggcaacaagagcaaaactccatctcaaaaaataataaataaataaataaatcttacatagattaaagccagatgacctgctcattc

SEQ ID NO: 279294 - DNA, 201 bp, Homo sapiens
ctgcaatgaacttgagagtgtagataacccttcgacatcctgatttcaattcctttggaaatataaccagaggtatatgagtctgctagatccatatgtaygattttatttttacttattatatatatatatacacacacacatatatattttctttttcttttttgagatgaagtcttgctcctgtcgcccaggccgaag

SEQ ID NO: 279295 - DNA, 201 bp, Homo sapiens
tatactgtttctatgagctcgactttttaagattccatataaaagtgggatcatgtggtgtttgtctttctgtgtctggtttatttcacttagaataatgwcctccagttccatccatgttgtcttgaatggcagaatttcctcccttttcaaggctgtatagtattccatcgtgtgtatatgcaacatttgctttatcca

SEQ ID NO: 279296 - DNA, 201 bp, Homo sapiens
ttttttttttgagacagagtctcaccctgtcgcccaggttggagtgcagtggcgcgatcttggctcactgcaacgtctgcctcccgggttcaagcagttcycccacctcagcttccctagtagctgggattacaggcacctgccaccacgcctggctaatttttgtaattcctggcttctaggtttctaattctgattttc

SEQ ID NO: 279297 - DNA, 201 bp, Homo sapiens; identical to SEQ ID NO: 56707

SEQ ID NO: 279298 - DNA, 201 bp, Homo sapiens
gcagccctgggctgcagaatcgctggtgagcagactctgggggcccagctggaggggtggttggccagtgaaggctgtgccataactttttctttttttctttttttttttgagatggagtcttgctctgtctcctaggctggagtgcagtggcgtgatcttggctcactgcaacctctgccttccgggttcaagcgattc

SEQ ID NO: 279299 - DNA, 201 bp, Homo sapiens
cagagtcgtcgttccctcctgcagtgggtgaaggagagccttgtttccctcagcaggtccctgagctgcccagccctgagccccttcacatgctccccacmacttaccttctgtggaatcaggagttgaggaggctgtagacggagcttcttctgcgagagggaaagaatcgaagactcttagaagcttagactgtccgaa

SEQ ID NO: 279300 - DNA, 201 bp, Homo sapiens
acagaaggggcaggatggggctgggaagtccaaccccacgcatttgggctcagccttggacatggaggcctgacagctgttgtcctttggggatcctttgsttctctggggcctcaacagaactaaagaagaaaaccgaccctttccccaactacatgtaccagcggaaggaaggaaggccaatgtaggaacccaaaatgc

SEQ ID NO: 279301 - DNA, 201 bp, Homo sapiens
ccccaccgggctcctttttctccaccggcttcagggcagcctggacaacatgacctgcatcctggtctgcttccctggggcccctaggccttctgaggagrcgatcaggagggagctagcactggacgcagccctgggctgcagaatcgctggtgagcagactctgggggcccagctggaggggtggttggccagtgaagg

SEQ ID NO: 279302 - DNA, 201 bp, Homo sapiens
tgagaaacaatgataacctccgaggaacagggttcaaggtctcccagagtggggtggagaaggggaggggaattaatgtcaaagcttggcctggaaggatsacgtgctccccaggtaaaggaggtcaggacaacatcaacatccggacatgggactcggcttggacatacgctggaaaagtggattctctcacatagtcag

SEQ ID NO: 279303 - DNA, 201 bp, Homo sapiens
aggagaaggtcagctcccggggggtgccccagtcctgcgacgtggtctcctcctcgtcctcctctgagaattcccgggctgtgtgcagctctcgaaaatcrgagtcgtcgttccctcctgcagtgggtgaaggagagccttgtttccctcagcaggtccctgagctgcccagccctgagccccttcacatgctccccacca

SEQ ID NO: 279304 - DNA, 201 bp, Homo sapiens; identical to SEQ ID NO: 56710

SEQ ID NO: 279305 - DNA, 201 bp, Homo sapiens; identical to SEQ ID NO: 56711

SEQ ID NO: 279306 - DNA, 201 bp, Homo sapiens
tcctgcctcagcctcctgagtagctgggattacaggcatgcacaatcacacccagctaatttttgtattgttagtatagacggggtttcacgatgttgtcyaggctggtctcgaacccctggcctcaagtgatccgcccgccttggtctcccaaagtgctgggattacaggcgtgcgccactgtgcccagcctaactcttg

SEQ ID NO: 279307 - DNA, 201 bp, Homo sapiens; identical to SEQ ID NO: 56712

SEQ ID NO: 279308 - DNA, 201 bp, Homo sapiens; identical to SEQ ID NO: 56713

SEQ ID NO: 279309 - DNA, 201 bp, Homo sapiens; identical to SEQ ID NO: 56714

SEQ ID NO: 279310 - DNA, 201 bp, Homo sapiens
gatcctcctgctttggcctcccaaagtgctgggattacaggcgggagccactgcaacccagccagcttgctatattaatacattcctactcccagccctgragcattgtgcaaggcatgaggagggagacgcagatgcagagaagagactgtgattcccctccaagaaatgtgagccggcaacgctctgcagtgccccatc

SEQ ID NO: 279311 - DNA, 201 bp, Homo sapiens
gttggtccctttaattcaaaatcctctcaccttttgccttctgtgggccaatgcagcatcttcatacacgttgcttacctagaaggcgtggctccaccgtkaattctaattggtccgtgctatcgaggcactgtccccttactggctctcgctccagtggcccccactgcttttcttcctcttccagcaatggctcttcgg

SEQ ID NO: 279312 - DNA, 201 bp, Homo sapiens
ctcatctctctccagctgcatggacgcctcgctggccatcaaacccgtatttgagcgtttccagtctgtcatcatcacatctggggtaaggacccttcccsgtcccctcctagtccctgacctccctccatgggcctcctggtccctgcccagtcctgctgagatccctcccactgtcccgccacagacactgtccccgct

SEQ ID NO: 279313 - DNA, 201 bp, Homo sapiens
aacctctgaccccttgcagctgtgatccggaactatgggaacctcctgctggagatgtccgctgtggtccctgatggcatcgtggccttcttcaccagctrccagtacatggagagcaccgtggcctcctggtatgagcaggtacgcctggccaccccctccctgcacctgctctcctcagtccctggcactgcaccgcta

SEQ ID NO: 279314 - DNA, 201 bp, Homo sapiens
cgtaaaggcagacaaaggaaggggcgggacagggactgagtccgcttgttatcggcaggcatatccgctggaggtgaccaaactcatctactgctcaagarctgtgccagagattgagaaggtaagctgggactcatcctggtgctccagccccactgttccctaggccctattggtccccctggcggtggccgtcaccag

SEQ ID NO: 279315 - DNA, 201 bp, Homo sapiens
gcatgccaatgtggtggtttatagctaccactacctcctggaccccaagattgcagacctggtgtccaaggaactggcccgcaaggccgtcgtggtcttcracgaggcccacaacattggtgaggggggcgccaggggccaaagggatgccagcccctctgagtgaggcccctgcaggcctgcctgagccggctctctccc

SEQ ID NO: 279316 - DNA, 201 bp, Homo sapiens
gacccttccccgtcccctcctagtccctgacctccctccatgggcctcctggtccctgcccagtcctgctgagatccctcccactgtcccgccacagacastgtccccgctggacatctaccccaagatcctggacttccaccccgtcaccatggcaaccttcaccatgacgctggcacgggtctgcctctgccctatggt

SEQ ID NO: 279317 - DNA, 201 bp, Homo sapiens
ctggctgctgcttctgcctctgtctctctgtcctgccccatcttccatccctacctttgtcattctctacccactatttcccatctgccaacacctcatgktctttcacctggatcatccttcctcatcttcctcatcccccaaccacctccccctcatccttaggctctcagcttagtagagatgtcttgtcctccagga

SEQ ID NO: 279318 - DNA, 201 bp, Homo sapiens
atgttcagattttcaggttacgagagagggacatcattctggaggctttatgggccggtgttccctccccatcctcagcgtgaagctgaccaggggctcaktctgcctcctgggggtttctcctgtacccaggaaaccagatcgggcctcatgtcctgcggcagggcctgacaggaggatggagatctgggcccttgccct

SEQ ID NO: 279319 - DNA, 201 bp, Homo sapiens
tcccactgtcccgccacagacactgtccccgctggacatctaccccaagatcctggacttccaccccgtcaccatggcaaccttcaccatgacgctggcasgggtctgcctctgccctatggtgagtgggagaggctagggctggggccgggaggggagatgggggcaaggggccgccctccttccttggcttcccccact

SEQ ID NO: 279320 - DNA, 201 bp, Homo sapiens
acaggcatgtgccaccacgcctggctaatgtatttttagtggagacagggtttcaccatgttggccaggctggtctcgaactcctgacctcgtgatctccycacctcagcctcacaaagtgctgggattacaggcgtgagccaccgcgcccagcccaattttactactcttgtatccctgcattaagttcccacgcgtctt

SEQ ID NO: 279321 - DNA, 201 bp, Homo sapiens
tcctccgtatctgcaggcgcggctggaatacctgcgggaccagttccagattcgtgagaatgactttcttaccttcgatgccatgcgccacgcggcccagygtgtgggtcgggccatcaggggcaagacggactacggcctcatggtctttgccgacaaggtgcagcttcaggggtgcccctgtgctcccatcccaggctc

SEQ ID NO: 279322 - DNA, 201 bp, Homo sapiens
cctccctcagccccatcttatgttgacagggatggcccgctctggattatacggacatctccaaattcattcaaacatcctgtccctactggccattcggsggggtggttggggaagtgcagcagctgcctgggcccctgcccaacagtgcccccctctccctttcctctgttctctgcaggaggatcagctgggcctgtc

SEQ ID NO: 279323 - DNA, 201 bp, Homo sapiens
tgccctcagcaaagagaagtttatcgtgcatctacgtgccaggctctggggggaagggggagattcgaggggccacagatgccagcaggtggcccaggcamggcagggtgagagaagttggggtgaggaggcattgggcgttttcaggagagacggtgctggcctggagaaagccggtccttctccgactccctagctggc

SEQ ID NO: 279324 - DNA, 201 bp, Homo sapiens; identical to SEQ ID NO: 56745

SEQ ID NO: 279325 - DNA, 201 bp, Homo sapiens
accctctccccccaactcagacacagcatcctgggttgcgtgaggctgtccctgtcccaccagccacacttgtaacccccctcgccccctctcctctgccyaccagtgcaccactacgggcgggccgtcatcatgtttggcgtcccctacgtctacacacagagccgcattctcaaggtgagtagctctgtctcccaggga

SEQ ID NO: 279326 - DNA, 201 bp, Homo sapiens
ccaacagtgcccccctctccctttcctctgttctctgcaggaggatcagctgggcctgtccctgctcagcctggagcagctagaatcagaggagacgctgmagaggatagagcagattgctcagcagctctgagtggggcgggtggggccataaacggttcctggtgactcctgagtcttgcctggccctggttcccagcg

SEQ ID NO: 279327 - DNA, 201 bp, Homo sapiens
gcttctgcccacagcggtttgcccgtggggacaagcgggggaagctgccccgctggatccaggagcacctcacagatgccaacctcaacctgaccgtggaygagggtgtccaggtggccaagtacttcctgcggcagatggcacagcccttccaccgggtgaggcctgcgtccccctcccggcaccctcccaggctgagct

SEQ ID NO: 279328 - DNA, 201 bp, Homo sapiens
gctggcaggggttggggtgccctgattggccacccgcttgggccacatgcctgccccacttatccagcaatgattggttccccacccagatcactgtttcsccaaagaactgaggttggacaattccaccctccctcaccacatctcagatgagccagctgaggcccagagacatggtgatgtgggagtccccagaagagt

SEQ ID NO: 279329 - DNA, 201 bp, Homo sapiens
gctctccccactgaactgcacaggtggctgtgtgtttctggactctccattctgtcccagtggtctgtccttgcattggctccacactgtctctattgtastgtcatatgggaagtctcagggcagcctctgattggctctgcctgcctcacagtcagcccctccaccaatcgctggcaggggttggggtgccctgattgg

SEQ ID NO: 279330 - DNA, 201 bp, Homo sapiens
cacagcgcccggccccttctgcactcatttcattggccatggcaaatcacatagccaggtgtgacttcaggaagtggcaaggcgggtcctcagacacgccygggaggaggaggagggggatatgtgtgaaaagcctgacaggcagcctcagtggggtttccagaaactcctagttctaagacagagaagggaggaggacct

SEQ ID NO: 279331 - DNA, 201 bp, Homo sapiens
ccgctggaggtgaccaaactcatctactgctcaagaactgtgccagagattgagaaggtaagctgggactcatcctggtgctccagccccactgttccctrggccctattggtccccctggcggtggccgtcaccagctttcgggggtgtttgggaagctggggaagagactgggacctggcagggcaggggtttgtgcct

SEQ ID NO: 279332 - DNA, 201 bp, Homo sapiens
aaacaagaaaaggtcatgggagaaagcttgaggctctggctcctggctttggcgtgggtgctgggcagcccatgcggtgctgggagagtgagcagtgggcrgggctgtgggctctctacttgggatccttcgtgaaagtttgcacaggtgtgggcccgaagcggacaggttggggtgtattttggactcagatgcctggtt

SEQ ID NO: 279333 - DNA, 201 bp, Homo sapiens
ctaccactacctcctggaccccaagattgcagacctggtgtccaaggaactggcccgcaaggccgtcgtggtcttcgacgaggcccacaacattggtgagkggggcgccaggggccaaagggatgccagcccctctgagtgaggcccctgcaggcctgcctgagccggctctctcccccttctccagacaacgtctgcatc

SEQ ID NO: 279334 - DNA, 201 bp, Homo sapiens
ccccccagatcctgcatgccaatgtggtggtttatagctaccactacctcctggaccccaagattgcagacctggtgtccaaggaactggcccgcaaggcygtcgtggtcttcgacgaggcccacaacattggtgaggggggcgccaggggccaaagggatgccagcccctctgagtgaggcccctgcaggcctgcctgag

SEQ ID NO: 279335 - DNA, 201 bp, Homo sapiens
ggagcagttgctgctgcctcgcttatcgtgacctctgttgctctccagatcatcggccgtggcaatgaccaggtggccatcagctccaaatttgagacccrggaggatattggtatgctgccagtggggctggtttctgtgggttccaagaggggaggtgtatcagtcaggtgggctgagtcatgctgctgtaacaaatat

SEQ ID NO: 279336 - DNA, 201 bp, Homo sapiens
gggtgtgcgaggccagcgtggagaggggtgggggaggtggctctgaggagtgacctaacttgcgtctcggtctccccacctcaggcctgcgagaatggccscggggccatcctgctgtcagtggcccggggcaaagtgtccgagggaatcgactttggtgagtggactgggctcttcctccccaggtgtcttcccagagct

SEQ ID NO: 279337 - DNA, 201 bp, Homo sapiens
tgcgaggccagcgtggagaggggtgggggaggtggctctgaggagtgacctaacttgcgtctcggtctccccacctcaggcctgcgagaatggccgcgggsccatcctgctgtcagtggcccggggcaaagtgtccgagggaatcgactttggtgagtggactgggctcttcctccccaggtgtcttcccagagctctctg

SEQ ID NO: 279338 - DNA, 201 bp, Homo sapiens
gtgaccacatgactctggagtgtctgattattgctctgtctgtgccattatgcggcaatggctatttgtgacatgcaggtgtacagcgtgggggtgcaagkttccaaaacaggcccagtgcccaccctcactgagtgctcattggctggggagacaggcacgtgaccgtcgtgatggcggaggcagggctgctggtcctgc

SEQ ID NO: 279339 - DNA, 201 bp, Homo sapiens
cacagcatcctgggttgcgtgaggctgtccctgtcccaccagccacacttgtaacccccctcgccccctctcctctgcccaccagtgcaccactacgggcsggccgtcatcatgtttggcgtcccctacgtctacacacagagccgcattctcaaggtgagtagctctgtctcccagggagtcccacagtgttaggatcaa

SEQ ID NO: 279340 - DNA, 201 bp, Homo sapiens
acacagcatcctgggttgcgtgaggctgtccctgtcccaccagccacacttgtaacccccctcgccccctctcctctgcccaccagtgcaccactacgggygggccgtcatcatgtttggcgtcccctacgtctacacacagagccgcattctcaaggtgagtagctctgtctcccagggagtcccacagtgttaggatca

SEQ ID NO: 279341 - DNA, 201 bp, Homo sapiens
tgagaatgactttcttaccttcgatgccatgcgccacgcggcccagtgtgtgggtcgggccatcaggggcaagacggactacggcctcatggtctttgccracaaggtgcagcttcaggggtgcccctgtgctcccatcccaggctccaagaaccaggctgtttcccgttcatttcccaggtggggtgggttgcagggtgg

SEQ ID NO: 279342 - DNA, 201 bp, Homo sapiens
gtttcccgttcatttcccaggtggggtgggttgcagggtggagagtggcccaggctccccgaatgaccttctgtccctggcctgcgcttctgcccacagcrgtttgcccgtggggacaagcgggggaagctgccccgctggatccaggagcacctcacagatgccaacctcaacctgaccgtggatgagggtgtccaggtg

SEQ ID NO: 279343 - DNA, 201 bp, Homo sapiens
tgtttcccgttcatttcccaggtggggtgggttgcagggtggagagtggcccaggctccccgaatgaccttctgtccctggcctgcgcttctgcccacagyggtttgcccgtggggacaagcgggggaagctgccccgctggatccaggagcacctcacagatgccaacctcaacctgaccgtggatgagggtgtccaggt

SEQ ID NO: 279344 - DNA, 201 bp, Homo sapiens
gaagctgccccgctggatccaggagcacctcacagatgccaacctcaacctgaccgtggatgagggtgtccaggtggccaagtacttcctgcggcagatgscacagcccttccaccgggtgaggcctgcgtccccctcccggcaccctcccaggctgagcttctcctccagaaagtccccttggattctccccactcccca

SEQ ID NO: 279345 - DNA, 201 bp, Homo sapiens
gctgccccgctggatccaggagcacctcacagatgccaacctcaacctgaccgtggatgagggtgtccaggtggccaagtacttcctgcggcagatggcayagcccttccaccgggtgaggcctgcgtccccctcccggcaccctcccaggctgagcttctcctccagaaagtccccttggattctccccactccccaccc

SEQ ID NO: 279346 - DNA, 201 bp, Homo sapiens
ctgcccacagcggtttgcccgtggggacaagcgggggaagctgccccgctggatccaggagcacctcacagatgccaacctcaacctgaccgtggatgagsgtgtccaggtggccaagtacttcctgcggcagatggcacagcccttccaccgggtgaggcctgcgtccccctcccggcaccctcccaggctgagcttctc

SEQ ID NO: 279347 - DNA, 201 bp, Homo sapiens
ttggtccccctggcggtggccgtcaccagctttcgggggtgtttgggaagctggggaagagactgggacctggcagggcaggggtttgtgcctccaatgarcacaagctccccctgccccccaactttggagtaggtgattgaagagcttcgaaagttgctcaacttctatgagaagcaggagggcgagaagctgccgttt

SEQ ID NO: 279348 - DNA, 201 bp, Homo sapiens; identical to SEQ ID NO: 56748

SEQ ID NO: 279349 - DNA, 201 bp, Homo sapiens
caggtgattctgatgcttcagcctcctgagtagctggtacaggcatgtgccacgatgcccagctaatttttgtaattttagtagagacggggtttcaccaygttggccaggctggtctgaaactcctgacctcaagtgatccgcccgcctggtcctcccgaagtgctgggattacaggtgtaagccactgcgcgcagccat

SEQ ID NO: 279350 - DNA, 201 bp, Homo sapiens
ctacccactatttcccatctgccaacacctcatgttctttcacctggatcatccttcctcatcttcctcatcccccaaccacctccccctcatccttaggytctcagcttagtagagatgtcttgtcctccaggaagccctccctgacccccaggctgagtcaggcccctcctctgggcacctctgtcccagcactgccca

SEQ ID NO: 279351 - DNA, 201 bp, Homo sapiens
taatcctggcactttgggagcctgaggcgggtggaccactgcaggtcccccatctctactaaaaatgtagaaattagctgggtgtgttgtaggggggtgtycctataatcccagctactcaagaggctgaggcaggagaatcaatcacttgaacccaggaggctgagcttgcagtgagccgagatcatgccactgcactct

SEQ ID NO: 279352 - DNA, 201 bp, Homo sapiens
ggtcaggagttcgagaccagcctgaccaatatggtgaaaccccgtctctactaaaaatacaaaaattagctggacgtggtggcacgcacctatagttccarctactcaggagcctgagacaggagaattgcttgaacccgggaggcggaggttgcagtgagccgagatcacaccagctgcactccagcctgggtgaaaatg

SEQ ID NO: 279353 - DNA, 201 bp, Homo sapiens
ctgaggtcaggagttcgagaccagcctgaccaatatggtgaaaccccgtctctactaaaaatacaaaaattagctggacgtggtggcacgcacctatagtyccaactactcaggagcctgagacaggagaattgcttgaacccgggaggcggaggttgcagtgagccgagatcacaccagctgcactccagcctgggtgaa

SEQ ID NO: 279354 - DNA, 201 bp, Homo sapiens
cagctacttgggaggctgaggcaggagaatcatttgaacccaggaggcggagtcgagatggtaccagtgctctccagcctggatgacagggcaagactccrtctgaacaaagaaaaaaaagaaaaagaaaaaaagaacccacttaggaggtcgtgctagcaggtgtgacaagtgaccacatgactctggagtgtctgatta

SEQ ID NO: 279355 - DNA, 201 bp, Homo sapiens
atcacctgaggtcaggagttcgagaccagcctgaccaatatggtgaaaccccgtctctactaaaaatacaaaaattagctggacgtggtggcacgcacctrtagttccaactactcaggagcctgagacaggagaattgcttgaacccgggaggcggaggttgcagtgagccgagatcacaccagctgcactccagcctgg

SEQ ID NO: 279356 - DNA, 201 bp, Homo sapiens
gtggatcacctgaggtcaggagttcgagaccagcctgaccaatatggtgaaaccccgtctctactaaaaatacaaaaattagctggacgtggtggcacgcrcctatagttccaactactcaggagcctgagacaggagaattgcttgaacccgggaggcggaggttgcagtgagccgagatcacaccagctgcactccagc

SEQ ID NO: 279357 - DNA, 201 bp, Homo sapiens
tgggtggatcacctgaggtcaggagttcgagaccagcctgaccaatatggtgaaaccccgtctctactaaaaatacaaaaattagctggacgtggtggcaygcacctatagttccaactactcaggagcctgagacaggagaattgcttgaacccgggaggcggaggttgcagtgagccgagatcacaccagctgcactcc

SEQ ID NO: 279358 - DNA, 201 bp, Homo sapiens
taggcacccggcgggaacacaccctctccccccaactcagacacagcatcctgggttgcgtgaggctgtccctgtcccaccagccacacttgtaacccccytcgccccctctcctctgcccaccagtgcaccactacgggcgggccgtcatcatgtttggcgtcccctacgtctacacacagagccgcattctcaaggtga

SEQ ID NO: 279359 - DNA, 201 bp, Homo sapiens
ccattatgcggcaatggctatttgtgacatgcaggtgtacagcgtgggggtgcaagtttccaaaacaggcccagtgcccaccctcactgagtgctcattgkctggggagacaggcacgtgaccgtcgtgatggcggaggcagggctgctggtcctgctcatgcttccgtctgccccccgaccccgtctctcctccccgcca

SEQ ID NO: 279360 - DNA, 201 bp, Homo sapiens
tccagaaagtccccttggattctccccactccccaccctcagcctgcctgtcctcctgccctcagcaaagagaagtttatcgtgcatctacgtgccaggcyctggggggaagggggagattcgaggggccacagatgccagcaggtggcccaggcaaggcagggtgagagaagttggggtgaggaggcattgggcgttttc

SEQ ID NO: 279361 - DNA, 201 bp, Homo sapiens
aaggtgagtagctctgtctcccagggagtcccacagtgttaggatcaagggaggagtggctcccccacctccccagcttctcatcctccgtatctgcaggygcggctggaatacctgcgggaccagttccagattcgtgagaatgactttcttaccttcgatgccatgcgccacgcggcccagtgtgtgggtcgggccatc

SEQ ID NO: 279362 - DNA, 201 bp, Homo sapiens
cccagcctaggtgcacagaggggccctcccctcccctctgtccctaggcacccggcgggaacacaccctctccccccaactcagacacagcatcctgggtygcgtgaggctgtccctgtcccaccagccacacttgtaacccccctcgccccctctcctctgcccaccagtgcaccactacgggcgggccgtcatcatgtt

SEQ ID NO: 279363 - DNA, 201 bp, Homo sapiens
agctaccagtacatggagagcaccgtggcctcctggtatgagcaggtacgcctggccaccccctccctgcacctgctctcctcagtccctggcactgcacygctatgtcagcttcattcctctcacactctgatggtgacaggtttcctgtgtgacaggagagtgcgtgcagcatgtaggaatggggtgtaagcagcacac

SEQ ID NO: 279364 - DNA, 201 bp, Homo sapiens
aacaagctgctctttattgagacccaggatggtgccgaaaccagtgtcgccctggagaagtaccaggaggtgggtgtgcgaggccagcgtggagaggggtsggggaggtggctctgaggagtgacctaacttgcgtctcggtctccccacctcaggcctgcgagaatggccgcggggccatcctgctgtcagtggcccggg

SEQ ID NO: 279365 - DNA, 201 bp, Homo sapiens
gcttcaaagccagctgctctatgaccctgcctcggccctgcctgtgtgtggttgtggccgagtggccctgcacatgcgtgagtgtgtggacgtggtatccrtgggactctgtgggatgtgggtgttgactgcattcctctgtgagcccatggggttccgacaccgtgtgtgtccccataggtgcgtgagaggcagtgggag

SEQ ID NO: 279366 - DNA, 201 bp, Homo sapiens
ctccccagcttctcatcctccgtatctgcaggcgcggctggaatacctgcgggaccagttccagattcgtgagaatgactttcttaccttcgatgccatgbgccacgcggcccagtgtgtgggtcgggccatcaggggcaagacggactacggcctcatggtctttgccgacaaggtgcagcttcaggggtgcccctgtgc

SEQ ID NO: 279367 - DNA, 201 bp, Homo sapiens
gtggttttagctttcacatccaggtctatgaggtacctcaaattcatctttctatgtggtgtgaagtagggggtcaaggttcattttttggttccatttgraaatccacttgctccagtaaaagctctccccactgaactgcacaggtggctgtgtgtttctggactctccattctgtcccagtggtctgtccttgcattg

SEQ ID NO: 279368 - DNA, 201 bp, Homo sapiens
tctatgagaagcaggagggcgagaagctgccgtttctgggactggctctgagctcccgcaaaaacttgtgtattcaccctgaggtgagcacctgttccttytccttgcccttagcccagaggtagagaaaactctttcgtccaaccacaagtcctggatccccaggccatatctcttgcaaaggcatgcagtggctacaca

SEQ ID NO: 279369 - DNA, 201 bp, Homo sapiens
gcatgggaggcgggaacgtcatcctcacagccaggacatcggccttgtgcttcaataggcggcttccacgcggcgggaaaggtgacccagtccccacagcscaggtgccttttgtgtcctacttaagacacctttgcctaccccaaggtcatagagagaggctcctttgtttccttctaggagcttgtggttttagctttc

SEQ ID NO: 279370 - DNA, 201 bp, Homo sapiens
agggagtcttcaaattctacccaggcctaggagaggttaaaaaggcagctcttagagtctctggcaagcctggtttcctggctctgaaacttactagcccrgtatttatggagaggcattttctgccacctgggcctcagtcttcctttctgtaaaatggggataattatgtacctgcttcataaggttgctgatgataaa

SEQ ID NO: 279371 - DNA, 201 bp, Homo sapiens
ttcattcctctcacactctgatggtgacaggtttcctgtgtgacaggagagtgcgtgcagcatgtaggaatggggtgtaagcagcacacacccccatgccycgcccccagtacatcaggctgagaatgcagatataagccccaatgtgggcccctccctcagaggagtaccctgtggcagagtcacccccacgttctaggt

SEQ ID NO: 279372 - DNA, 201 bp, Homo sapiens
cctgcacctgctctcctcagtccctggcactgcaccgctatgtcagcttcattcctctcacactctgatggtgacaggtttcctgtgtgacaggagagtgygtgcagcatgtaggaatggggtgtaagcagcacacacccccatgccccgcccccagtacatcaggctgagaatgcagatataagccccaatgtgggcccc

SEQ ID NO: 279373 - DNA, 201 bp, Homo sapiens
ttgtatccctgcattaagttcccacgcgtcttaactaataatgcaacagactgaggttcaagttgtccaaaaccccagccagctgggaggtgtggagaccwgggtttgaagagtggttgggtttccaccctgtctgggtgctaagatgccccacacccccaggtgacacccctgcgctttgggaaggacgtcgatgggaaa

SEQ ID NO: 279374 - DNA, 201 bp, Homo sapiens
ccctgcgctttgggaaggacgtcgatgggaaatgccacagcctcacagcctcctatgtgcgggcgcagtaccagcatgacaccagcctgccccactgccgmttctatgaggttactggagggcagggctgagggagggaggcaggacaggtagcctggggcaggcagcctccctgacccctggcactcttgtcccaggaat

SEQ ID NO: 279375 - DNA, 201 bp, Homo sapiens
ttacaggcatgtgccaccacgcctggctaatgtatttttagtggagacagggtttcaccatgttggccaggctggtctcgaactcctgacctcgtgatctscccacctcagcctcacaaagtgctgggattacaggcgtgagccaccgcgcccagcccaattttactactcttgtatccctgcattaagttcccacgcgtc

SEQ ID NO: 279376 - DNA, 201 bp, Homo sapiens
gcccaacctctgaccccttgcagctgtgatccggaactatgggaacctcctgctggagatgtccgctgtggtccctgatggcatcgtggccttcttcaccmgctaccagtacatggagagcaccgtggcctcctggtatgagcaggtacgcctggccaccccctccctgcacctgctctcctcagtccctggcactgcacc

SEQ ID NO: 279377 - DNA, 201 bp, Homo sapiens
gtgatctcggttcaccacaacctccacctccgaggttcaagtgattcttctgcctcagcttcctgagtagctgggattacaggcacccaccaccacgccckgctagttttttgtatttttagtagagatggggtttcatcatgttggccgggctggtctcaaactcccacactgggcccacagactatatattatatcaca

SEQ ID NO: 279378 - DNA, 201 bp, Homo sapiens
tctaactcccgaccttgtgatcctcccgcctcagcctcccaaagtgctgggattacaggcatgagccatcgtgcccagccttatttattattattattttygaaatggagtttcactcttgttgcccaggctggagtgcagtggcgtgatctcggttcaccacaacctccacctccgaggttcaagtgattcttctgcctc

SEQ ID NO: 279379 - DNA, 201 bp, Homo sapiens
gcagcgcctgcgggacgagtaccggcgtctggtggaggggctgcgggaggccagcgccgcccgggagacggacgcccacctggccaaccccgtgctgcccracgaagtgctgcagggtgagccccgaccccccgctgccccccagtccctttcccgcctccccgtcgccgctgatagcgtctcctcgcagaggcagtgcct

SEQ ID NO: 279380 - DNA, 201 bp, Homo sapiens
ctcgatactcagtgaggaggctggtgggatgggcagaggggcgagtgtgagggtgtgggctgcccgcccgtctcctgtctgcccatgtctgtctgttgctwgctgtgagtctgcctgtctgcatctccctgttggtgggtgcccgtatctgttggtctgtctctatccatctgctcatacttctgcctggcctgtgtctgc

SEQ ID NO: 279381 - DNA, 201 bp, Homo sapiens
tccccagcttctcatcctccgtatctgcaggcgcggctggaatacctgcgggaccagttccagattcgtgagaatgactttcttaccttcgatgccatgcrccacgcggcccagtgtgtgggtcgggccatcaggggcaagacggactacggcctcatggtctttgccgacaaggtgcagcttcaggggtgcccctgtgct

SEQ ID NO: 279382 - DNA, 201 bp, Homo sapiens
gcggcgccagggctggtgcccatacttccttgctcgatactcagtgaggaggctggtgggatgggcagaggggcgagtgtgagggtgtgggctgcccgccygtctcctgtctgcccatgtctgtctgttgctagctgtgagtctgcctgtctgcatctccctgttggtgggtgcccgtatctgttggtctgtctctatcca

SEQ ID NO: 279383 - DNA, 201 bp, Homo sapiens
acgtcgatgggaaatgccacagcctcacagcctcctatgtgcgggcgcagtaccagcatgacaccagcctgccccactgccgcttctatgaggttactggmgggcagggctgagggagggaggcaggacaggtagcctggggcaggcagcctccctgacccctggcactcttgtcccaggaatttgatgcccatgggcgtg

SEQ ID NO: 279384 - DNA, 201 bp, Homo sapiens
agagaggctcctttgtttccttctaggagcttgtggttttagctttcacatccaggtctatgaggtacctcaaattcatctttctatgtggtgtgaagtarggggtcaaggttcattttttggttccatttggaaatccacttgctccagtaaaagctctccccactgaactgcacaggtggctgtgtgtttctggactct

SEQ ID NO: 279385 - DNA, 201 bp, Homo sapiens
gccggcatggcgaggggtgttcttcgggatccggctggcccagggcctggggctggctagagtgtagctgctgttggagagtgtggacagactcgggtccrgttccatctttgccacctgtttgctgtgtgaccttgggcaggcaactcaccttctctgagcccaggtcatttgtgcaatgcagataacagggttgctgag

SEQ ID NO: 279386 - DNA, 201 bp, Homo sapiens
atcccagctactcaagaggctgaggcaggagaatcaatcacttgaacccaggaggctgagcttgcagtgagccgagatcatgccactgcactctagcctgrgcgacagcgcgaggctccatctcaaaaaacaaaaacaagaaaaggtcatgggagaaagcttgaggctctggctcctggctttggcgtgggtgctgggcag

SEQ ID NO: 279387 - DNA, 201 bp, Homo sapiens
gtgcaggcctgtgtgggagtgacgggccagtgtggccaggggtaggggtaggggttggggtggcagggccctggtaaccctgctccccggccccccagatsctgcatgccaatgtggtggtttatagctaccactacctcctggaccccaagattgcagacctggtgtccaaggaactggcccgcaaggccgtcgtggtct

SEQ ID NO: 279388 - DNA, 201 bp, Homo sapiens
aggcctgtgtgggagtgacgggccagtgtggccaggggtaggggtaggggttggggtggcagggccctggtaaccctgctccccggccccccagatcctgyatgccaatgtggtggtttatagctaccactacctcctggaccccaagattgcagacctggtgtccaaggaactggcccgcaaggccgtcgtggtcttcga

SEQ ID NO: 279389 - DNA, 201 bp, Homo sapiens
tgtgacatgcaggtgtacagcgtgggggtgcaagtttccaaaacaggcccagtgcccaccctcactgagtgctcattggctggggagacaggcacgtgacygtcgtgatggcggaggcagggctgctggtcctgctcatgcttccgtctgccccccgaccccgtctctcctccccgccagattctgtgctgaacgcctccg

SEQ ID NO: 279390 - DNA, 201 bp, Homo sapiens
tctgcaggcgcggctggaatacctgcgggaccagttccagattcgtgagaatgactttcttaccttcgatgccatgcgccacgcggcccagtgtgtgggtygggccatcaggggcaagacggactacggcctcatggtctttgccgacaaggtgcagcttcaggggtgcccctgtgctcccatcccaggctccaagaacca

SEQ ID NO: 279391 - DNA, 201 bp, Homo sapiens
aatattcatgagggaggcgggtcgaccccgctgcacagtccggccggcgccatgaagtgagaagggggctgggggtcgcgctcgctagcgggcgcgggggrtcttgaagatggggtcatcggtgggcgcgcctgggtccccaagggggcgaggggagggtgaaggggtgggacgggggcagccgcagggagcagcagtgat

SEQ ID NO: 279392 - DNA, 201 bp, Homo sapiens
gggttccgcaggaccacgatgactgagtccccgcgcaggaacatcttggagatgtagcggtctttgttgactggcttggacttcttcttgcccttgccacycttgggtacctcagtccacatctccttcacgttctccagcaccatgttgcagtgcctggtggggaacagggaggggaggcactgggcgtgaggggcgtgc

SEQ ID NO: 279393 - DNA, 201 bp, Homo sapiens
cggcccaggagtttcttattgttgcggcagttgatgagcacttgggtattgttcttgactgactgtgtgagcacagagagtggaccggtgttaaattcctmctcctctcgcttctgcagctcctctggggtcatctcactcttgggcttgttgaggaggctcctgcatggacaaacatggaaccaataagtgagagaggct

SEQ ID NO: 279394 - DNA, 201 bp, Homo sapiens
tcttaagcatgcaagcgggcaagaagtgtgggtatgttgaggctgagggctagtcctgagctggctctggccacccccctgctgctcccacaggcagcccyggtgaccctgcaactgctcttcttggatggtgaagaggcgctgaaggagtggggacccaaggactccctttacggttcccggcacctggcccagctcatg

SEQ ID NO: 279395 - DNA, 201 bp, Homo sapiens
tgaggcaggagaatcacttgtacgcaggaggcggaggttgcagtgagccaagatcacaccactgcactccagcctgggcaacagagcgagactccatctcwataaataaataaataaataaatattttttaaaaagagtaaaagactaaaagactattactggtctggcccagtgatgccacccagctagatgaattctct

SEQ ID NO: 279396 - DNA, 201 bp, Homo sapiens
aactgagcttgaggaataataatcagagataacccttatttagttatatgccaggcactgttctaagacctggattcaaaccttaccctttgaaaagaackgttattgccgggcgcggtggctcacatctgtaatcccagcactttgggaggctgaggtaggtggatcatttgaggtcaggagttcgagaccagcctggcc

SEQ ID NO: 279397 - DNA, 201 bp, Homo sapiens
atttatagatgaagaaactgatccttccagaagttagtaacttccccatgcctgctttgttatgaagcagccaagtacggatttgatcccagacaactgaytcggaatctgtgctcttggctaccacgttctatgagtgaggacaccttatgtgttctcttaagcatgcaagcgggcaagaagtgtgggtatgttgaggct

SEQ ID NO: 279398 - DNA, 201 bp, Homo sapiens
ccttgccactcttgggtacctcagtccacatctccttcacgttctccagcaccatgttgcagtgcctggtggggaacagggaggggaggcactgggcgtgrggggcgtgcctctgacagtgccccctactgcctgctgctcgccccctccagcagcatggcttggggaagggtgcaggtgctaggccgggatgaccaagct

SEQ ID NO: 279399 - DNA, 201 bp, Homo sapiens
ttcttgatctcctgggagcccccaatcccaccttctacagccacttccctcgcacggtccgctggttccatcggctgaggagcattggtaagggtgaatgyggaggtgggccccagcccacctggggtatggggtacagggcggtgggctggggtaggacaggcacctacactctaaaggctcatccaccagtctgggcca

SEQ ID NO: 279400 - DNA, 201 bp, Homo sapiens
gactggagctggagtggcctctccaggcctgcggagaacacctcccaggacccagcactcacctatcgaaggccttcacgcggcccaggagtttcttattrttgcggcagttgatgagcacttgggtattgttcttgactgactgtgtgagcacagagagtggaccggtgttaaattcctcctcctctcgcttctgcagct

SEQ ID NO: 279401 - DNA, 201 bp, Homo sapiens
ccaagctgccaaagcaactctgccagtccttaggttgaggctgaggcaaaggactgcacctctctgtgccagtttgctcctttttaagagggaagataatsacgttaccttcctcacagggccattgaaaattatcattttcttttttgagacagaatctcactctgttgcccaggctgcaatgcagtggtgcgatttcag

SEQ ID NO: 279402 - DNA, 201 bp, Homo sapiens
aatcttaccagctggatgaacttggacaagtggcttcatttctttgagcctcagtttcctctctgtaaaacggccagtgggggccgggcctggtggctcaygcctgtaatcccagcactttgggaggccgaggtgggcgaatcacaaggtcagcagttcgagaccagcttggccaatatggtgaaaccccatctctactaa

SEQ ID NO: 279403 - DNA, 201 bp, Homo sapiens
cctagaagtctccgatgctggaggcggcagattaggaagagaacccggggctcctcgcgggtgacggcgcccggggtagggttgaaatgggggggttgctstcattcttcccttccctatcccacctccttcccaaggtcccattgatcggaagcctccccgaagcccggctgcggagggtggtgggacaactggatccac

SEQ ID NO: 279404 - DNA, 201 bp, Homo sapiens
cctgccttggtctccctaagtgctgggattacaggcatgagccaccacaccaggccacaagatcttgtctcaaaaaaaagaatgtctatgtcttagactcygagggattgaatgagaccaggaacatagtgagcccacaggaaggagtaactggcattcattcttgttgggctgaccagggctttgtctctgggtgctctg

SEQ ID NO: 279405 - DNA, 201 bp, Homo sapiens
ctgaggcgggcagatcacctgaggtcagtagtttgagaccagcctggccaacatgatgaaaccccatctctactaaaaatacaaaaattagacaggtgtcrtggtgcctgcctataatcccagctacccgggaggctaagacggtagaatcgctggaacctgggaggcagaggctgcagtgagccgagatcacgccactgc

SEQ ID NO: 279406 - DNA, 201 bp, Homo sapiens
aaaaaattatctgggagtagtggcatgctacttgggaggctgagaggggaggatggcttgagtctaggagtttgagactgcagtgagccatgatcgtgccmctgtattctagcctgggtgacagagaccttgtctcttaaaaaaaaaaaaaagaatatgcttttcatagatatcttcctggctggctcccactcttcactc

SEQ ID NO: 279407 - DNA, 201 bp, Homo sapiens
aaaaaagaatatgcttttcatagatatcttcctggctggctcccactcttcactcaggtgtccactccaatgtcaccccttcaaagaggccttcccggccrggcgtggtaactcgcacctgtaatcccagcactttgggaggccgaggcaggcagatcatttgaggtcagaagttcgagcccagcttgtccaacagggaaa

SEQ ID NO: 279408 - DNA, 201 bp, Homo sapiens; identical to SEQ ID NO: 56784

SEQ ID NO: 279409 - DNA, 201 bp, Homo sapiens
tgttgtcttccagaaagcatgaagagtcatttaaaggccaggcgcagtggttcacacctctaatcccagcactttgggaggccgagacaggcagatccctygagatcaggagtttgagaccagcctggccaacatggtgaaacctcatctctactaaaaatacaaaattagccaggcgtggtggtgggtacccgtagtccc

SEQ ID NO: 279410 - DNA, 201 bp, Homo sapiens
atcatgtgaatttttaagacagaacccagaggctcccaaagtatttcactatggaacactttttattgggaagcacttcatagaactaggatacttcggcygggcatggtgggtcacacctgaaatcccagcactttgggaggccgaggccagcagttcagctgagctcaggagttcgagagcagcctggacaacatgatg

SEQ ID NO: 279411 - DNA, 201 bp, Homo sapiens
taccagacaggggctctaaggtgagacagccgtggtttccaatcttaccagctggatgaacttggacaagtggcttcatttctttgagcctcagtttcctmtctgtaaaacggccagtgggggccgggcctggtggctcatgcctgtaatcccagcactttgggaggccgaggtgggcgaatcacaaggtcagcagttcga

SEQ ID NO: 279412 - DNA, 201 bp, Homo sapiens
cagcacccagcacatagcaagcattccagaaatgtttgcagctgggcacggtggttcacagctgtaatcccagcactttgggaggctgagcggggtggcgrggggggatccttgagcccaggagtttgaaaccagcctgggcaacatggcataaatcttgtctttactaaaaatacaaaaaaattagccgggcatggtggt

SEQ ID NO: 279413 - DNA, 201 bp, Homo sapiens
tgaccagggctttgtctctgggtgctctgccttcctctgatttgtggactggggaccttcgactactaaggactaacccttcctctctaatcgcccccacytccagagaagcgtctgcaccgtttgaacctgctgcagtctcatccccaggaagtgatgtacttccaacccggggagccctttggctctgtggaagacgac

SEQ ID NO: 279414 - DNA, 201 bp, Homo sapiens
ccccaaaatagacctcgaagtacacatgcattaaggtcccagaggacagggaacatcagtaaggaaaggaaggaatcaagcatcactctaagacaaactcrgaccatctcttttcggtctgaaaaaataatccgtttaattgaaaaacctggaggatactattccactcccccagatgaggaggctgaggagaccagaccc

SEQ ID NO: 279415 - DNA, 201 bp, Homo sapiens
gctctagatcaaagaaaacaaacctcaaaaatactttcctccctctaccccacttgacccttgtcccggggcagtaggcatctccgtcaaaactcttgtcyctggtctgtggtaactttctcagctccccaacccatgtccctcaaagtcccctccctatagggcaagaacccagcaacttcgctctgccccgactctagg

SEQ ID NO: 279416 - DNA, 201 bp, Homo sapiens
aacccatgtccctcaaagtcccctccctatagggcaagaacccagcaacttcgctctgccccgactctaggcgggatgtagctcattttgggatacgagtstccatcgtggagcctggcttcttccgaacccctgtgaccaacctggagagtctggagaaaaccctgcaggcctgctgggcacggctgcctcctgccacac

SEQ ID NO: 279417 - DNA, 201 bp, Homo sapiens
cctcagcctcctgagtagctgagaccacaggcgcgtgccagcatgcctggctagtatttttttacagatggggtcttgctgtggtgaccagacttgtctcmaactcccggcctcaagcgatgcttccgcctgggcctcccaaagtgttgggattataggtgtgagccactgcatactggaacacatactttatacttgaat

SEQ ID NO: 279418 - DNA, 201 bp, Homo sapiens
gcaagccccctccccatccgactgtgcagacagctggggactgcctggggtcgggtggggccagaacaaacacttccagaaagtccctggctcacatcctrggtgtctcccaacattctacagcattctagagtggggatttctggcccccctctattagcacagcttctccattttccagggatcctagtctgagaaaag

SEQ ID NO: 279419 - DNA, 201 bp, Homo sapiens
acccttgccctgctgcctctgctgcagcaagcccggggccgggtgatcaacatcaccagcgtcctgggtcgcctggcagccaatggtgggggctactgtgkctccaaatttggcctggaggccttctctgacagcctgaggtgaggggtacagggctctgggttccaggactaacagcagcccactcaacaaacgtgggcc

SEQ ID NO: 279420 - DNA, 201 bp, Homo sapiens
aaaaaaaaaaaaaaaaaaaaaagatgcctctgctccatacagcaggtctgtacacaggatctggctcatgtggttttagttaagttagccacaaatacagsgtctgcccacatctttgctttgaacagatgagccatggttggccaattatctgccaaccagataatttctcaatatgctcacaccagatgcttccagcta

SEQ ID NO: 279421 - DNA, 201 bp, Homo sapiens; identical to SEQ ID NO: 56792

SEQ ID NO: 279422 - DNA, 201 bp, Homo sapiens
agcaacttcgctctgccccgactctaggcgggatgtagctcattttgggatacgagtctccatcgtggagcctggcttcttccgaacccctgtgaccaacytggagagtctggagaaaaccctgcaggcctgctgggcacggctgcctcctgccacacaggcccactatgggggggccttcctcaccaagtgtgagtagcc

SEQ ID NO: 279423 - DNA, 201 bp, Homo sapiens
cgatttccagcgggtgctgaatgtgaacacaatgggtcccatcggggtcacccttgccctgctgcctctgctgcagcaagcccggggccgggtgatcaacrtcaccagcgtcctgggtcgcctggcagccaatggtgggggctactgtgtctccaaatttggcctggaggccttctctgacagcctgaggtgaggggtaca

SEQ ID NO: 279424 - DNA, 201 bp, Homo sapiens
aaagccagattagaaagggttttgtgttgctgcccacgcctcctctcattccccggaaaggaaaacaaaggctcagtctatcttggcccctgtcaggtgtyctgcccactccctcagcccccaccaaccccttccccgctccagcccccacacattccagtgggtgggggcaccggatgtggaatctcctggctgagtaga

SEQ ID NO: 279425 - DNA, 201 bp, Homo sapiens
tctgaagtgcctaaaatgcttctctacaatgatcacccagagctgagagacttcagtggggtagtgagaagaaagagggttgggagagacaggaaagcatyctctccttgagggaaggaactgggaatcaactgagaaccagctagcactgccaggaggtgaggagagggaaggagaataatttaaatgaggccagggagc

SEQ ID NO: 279426 - DNA, 201 bp, Homo sapiens
gggagtgcctcacctacccccagcatccttttcatctccccacagggctttttggtctggtgaataatgctggtgtggctggtatcatcggacccacaccrtggctgacccgggacgatttccagcgggtgctgaatgtgaacacaatgggtcccatcggggtcacccttgccctgctgcctctgctgcagcaagcccggg

SEQ ID NO: 279427 - DNA, 201 bp, Homo sapiens; identical to SEQ ID NO: 56795

SEQ ID NO: 279428 - DNA, 201 bp, Homo sapiens
tgagaaaataggttgagagagacagtgagatgctcagtatcacacagcaaacctcttggccctatacatcattccaaacacaagacccaggttgcatataraaggttcagtgtccctggtttagaaggagaggtggtgtgaggcaagcaagaagatgcctctgctgcactccagccctgggcgacagagtgagactccatc

SEQ ID NO: 279429 - DNA, 201 bp, Homo sapiens
tgggggctactgtgtctccaaatttggcctggaggccttctctgacagcctgaggtgaggggtacagggctctgggttccaggactaacagcagcccactmaacaaacgtgggccagcagaggtggttaagatacagcacattggaatagttaagaagagacagtttagggctagacttcatgggttcaatgaagtctacc

SEQ ID NO: 279430 - DNA, 201 bp, Homo sapiens
gacttcagtggggtagtgagaagaaagagggttgggagagacaggaaagcatcctctccttgagggaaggaactgggaatcaactgagaaccagctagcaytgccaggaggtgaggagagggaaggagaataatttaaatgaggccagggagcttctgctccctcaattaaacggtgatagacggcctgacaccaccagcc

SEQ ID NO: 279431 - DNA, 201 bp, Homo sapiens
ggaaactgattgcaaccacctatggggctgcagacctgaaaatgcaacagcgcatcatgaacctgatctgtgacccggacctaaccaaggtgagccgatgsctggagcatgccctgactgctcgacacccccgaacccgctacagcccaggttgggatgccaagctgctctggctgcctgcctcctacctgccagccagcc

SEQ ID NO: 279432 - DNA, 201 bp, Homo sapiens; identical to SEQ ID NO: 56797

SEQ ID NO: 279433 - DNA, 201 bp, Homo sapiens; identical to SEQ ID NO: 56799

SEQ ID NO: 279434 - DNA, 201 bp, Homo sapiens
aaaataatccgtttaattgaaaaacctggaggatactattccactcccccagatgaggaggctgaggagaccagacccctacatcacctcgtagccacttytgatactcttcacgaggcagcaggcaaagacaattcccaaaacctagaaggaaagatggggacaggggtggagaggagtcagaagggctagctacctcag

SEQ ID NO: 279435 - DNA, 201 bp, Homo sapiens
gggttttgtgttgctgcccacgcctcctctcattccccggaaaggaaaacaaaggctcagtctatcttggcccctgtcaggtgtcctgcccactccctcarcccccaccaaccccttccccgctccagcccccacacattccagtgggtgggggcaccggatgtggaatctcctggctgagtagagctctggggtgggaag

SEQ ID NO: 279436 - DNA, 201 bp, Homo sapiens
ccagccttggagatgagaattctctattcccaccacccctgctcccagcaaccccactcacatctgcctgcatcctgtccaggatcgaagcagtgtggttrtttttcgggtaattctccatctgctgccggaagttgttattaaactctgacatcacctgagagtacggaggagcactgttgcagtcagaattcaagcacc

SEQ ID NO: 279437 - DNA, 201 bp, Homo sapiens
tgaggagaagcagttttcagatgctcccaggaagaagagggagctgtgggagtgcctcacctacccccagcatccttttcatctccccacagggctttttsgtctggtgaataatgctggtgtggctggtatcatcggacccacaccatggctgacccgggacgatttccagcgggtgctgaatgtgaacacaatgggtcc

SEQ ID NO: 279438 - DNA, 201 bp, Homo sapiens
ttttcatctccccacagggctttttggtctggtgaataatgctggtgtggctggtatcatcggacccacaccatggctgacccgggacgatttccagcggrtgctgaatgtgaacacaatgggtcccatcggggtcacccttgccctgctgcctctgctgcagcaagcccggggccgggtgatcaacatcaccagcgtcct

SEQ ID NO: 279439 - DNA, 201 bp, Homo sapiens
agtgaggaagggaaactgattgcaaccacctatggggctgcagacctgaaaatgcaacagcgcatcatgaacctgatctgtgacccggacctaaccaaggkgagccgatgcctggagcatgccctgactgctcgacacccccgaacccgctacagcccaggttgggatgccaagctgctctggctgcctgcctcctacctg

SEQ ID NO: 279440 - DNA, 201 bp, Homo sapiens; identical to SEQ ID NO: 56806

SEQ ID NO: 279441 - DNA, 201 bp, Homo sapiens
tttgggcgccttctggcactgcagctggaccagagaggcttccgagtcctggccagctgcctgaccccctccggggccgaggacctgcagcgggtggcctyctcccgcctccacaccaccctgttggatatcactgatccccagagcgtccagcaggcagccaagtgggtggagatgcacgttaaggaagcaggtaagtat

SEQ ID NO: 279442 - DNA, 201 bp, Homo sapiens
tcttggctcaccacaatttccacccccggggttcaagcgattctcctgcctcagcctcccgagtagctgggactacaggcatgcgccaccatgcctggctwatttttgtatttttagtagagacagggtttcactatgttggccaggttggtctcaaactcctgacctcgtgatccgcccacctcagcctcccaaagtgct

SEQ ID NO: 279443 - DNA, 201 bp, Homo sapiens
aggtacaggcctggtccccagctctggctttctgcctctccacgtgctcatggcctctcccaggctaactctaagcagtgtcatgagtctgagccaggtgkgagattaattcctgggggcacttcagggctgagaagggggaggaatgacaggtccagtaaccgttaccaacagagcagtgcagctgccatccttgacagc

SEQ ID NO: 279444 - DNA, 201 bp, Homo sapiens
gggcccccctctggcgctatacctccgtgccaactcggggtaggagagcggggcggagcgcagcctgggtcactctggttcagagaagcggacgaggtggrtgagagttaccctctgagcgccggggcggagagctgaggccgggtgacaatgtggtctgtgaggtttccccatcctaccgtaggggatgagccagctctc

SEQ ID NO: 279445 - DNA, 201 bp, Homo sapiens
agacagggtttcaccacgttggccaggctagtcttgaacttctgacctcaggtgatctgcccacctcggccttcaaaagtgctgagattacaggcgtgagycaccacacccagccttggagatgagaattctctattcccaccacccctgctcccagcaaccccactcacatctgcctgcatcctgtccaggatcgaagca

SEQ ID NO: 279446 - DNA, 201 bp, Homo sapiens
cacctcggccttcaaaagtgctgagattacaggcgtgagtcaccacacccagccttggagatgagaattctctattcccaccacccctgctcccagcaacsccactcacatctgcctgcatcctgtccaggatcgaagcagtgtggttgtttttcgggtaattctccatctgctgccggaagttgttattaaactctgaca

SEQ ID NO: 279447 - DNA, 201 bp, Homo sapiens
ctcttgtccctggtctgtggtaactttctcagctccccaacccatgtccctcaaagtcccctccctatagggcaagaacccagcaacttcgctctgccccsactctaggcgggatgtagctcattttgggatacgagtctccatcgtggagcctggcttcttccgaacccctgtgaccaacctggagagtctggagaaaac

SEQ ID NO: 279448 - DNA, 201 bp, Homo sapiens
cagataatttctcaatatgctcacaccagatgcttccagctagggagggtattaggggaaagggcttgagggccacagtaaactggacaagtttttctgcycagcctaggctgccacctgtaggtcacttgggctccagctatgtggctgcctcttctgctgggtgccttactctgggcagtgctgtggttgctcagggac

SEQ ID NO: 279449 - DNA, 201 bp, Homo sapiens; identical to SEQ ID NO: 56800

SEQ ID NO: 279450 - DNA, 201 bp, Homo sapiens
cctcagccctcaccactgtggagccaggtctccccgcaccctgccggcgcgccccccaggacccctcgccactcacgcaaaaggccagcaggaggacgtasagcaagaacttcacacatttcattcctccttccaccgccatggctgccgggcctggggcagaggggagggcggggggattaaaactggccgaagggggac

SEQ ID NO: 279451 - DNA, 201 bp, Homo sapiens
agatgctcagtatcacacagcaaacctcttggccctatacatcattccaaacacaagacccaggttgcatatagaaggttcagtgtccctggtttagaagragaggtggtgtgaggcaagcaagaagatgcctctgctgcactccagccctgggcgacagagtgagactccatctcaaaaaaaaaaaaaaaaaaaaaaaga

SEQ ID NO: 279452 - DNA, 201 bp, Homo sapiens
atgctcagtatcacacagcaaacctcttggccctatacatcattccaaacacaagacccaggttgcatatagaaggttcagtgtccctggtttagaaggaraggtggtgtgaggcaagcaagaagatgcctctgctgcactccagccctgggcgacagagtgagactccatctcaaaaaaaaaaaaaaaaaaaaaaagatg

SEQ ID NO: 279453 - DNA, 201 bp, Homo sapiens; identical to SEQ ID NO: 56801

SEQ ID NO: 279454 - DNA, 201 bp, Homo sapiens
cctttgctagatgccaccccactttcagcttagagggcagctaagccaaagccagattagaaagggttttgtgttgctgcccacgcctcctctcattcccyggaaaggaaaacaaaggctcagtctatcttggcccctgtcaggtgtcctgcccactccctcagcccccaccaaccccttccccgctccagcccccacaca

SEQ ID NO: 279455 - DNA, 201 bp, Homo sapiens; identical to SEQ ID NO: 56807

SEQ ID NO: 279456 - DNA, 201 bp, Homo sapiens
acttagcaggaagtactcataaggttctttagctgtcacttagggataacactgtctacctcacagaaatgttaaactgagacaataaaaaccaaagcataaaaatggattctgaaatgttgttcaaatagtagttacttcctttaaaaatagcttttctagaaagaagggttagctagaaaaagtaatcaaatagacatc

SEQ ID NO: 279457 - DNA, 201 bp, Homo sapiens
ggctcacgcttataattctagcactttgggaggctgaggcgggcagatcatgaggttaagagatcgagaccatccttgctaaaatggtgaaaccccgtctstactaaaaatacgaaaaattagccgggtgtggtggcagacgcctgtagtcccagctactcgggaggccgaggcaggagaatggcatgaacctgggaggcg

SEQ ID NO: 279458 - DNA, 201 bp, Homo sapiens
tgaggcaagagaatcgcttgaacccaggatgcggaggttgcagcaagtggagatcacgccactgcactccagcctgggtgacacagtgagactctatctcaaaaaaaaaaaaaaaattaataaataaaaattgagaaaagcataagaacttaaaaaagactattccctgaatacagaactgctgtagcttttggccttagt

SEQ ID NO: 279459 - DNA, 201 bp, Homo sapiens
accctgtctctaaaaaactaaaaaattcctatgtaggttaactcatttatggaaaggaaaaaataaatgagttatttttctgaggctctcagagtgacagyagactagagatccctgatatagtcatcatttgatttaaatatttgttttctttccacaatgatccagcttaccttactggataatccttagacatttttt

SEQ ID NO: 279460 - DNA, 201 bp, Homo sapiens
cagtcgggagcgctcagtcatctcgaagcccagaagcccagtctctggcccgagccagccccacacacgcctagctcctggatcctaacctggctcagcckctcccgtcttggcttgggcagctgatgtgattccaacaatggagttggaaggacagtcattgatggaagggctgatgctgtcacaggttttcagaggaac

SEQ ID NO: 279461 - DNA, 201 bp, Homo sapiens
tggtcccgctgccataagagaagctggcttgatgaaaaggctctccagtttgggtaagtggttagatttttagatattagtgcaggactagtaatagaccwcttcagagtcttttctctgacatccagggactacacagctttgtgtttgggaacagtctgccacatcccgcatcctcctttggattccgtctgcggctta

SEQ ID NO: 279462 - DNA, 201 bp, Homo sapiens
agatattagtgcaggactagtaatagaccacttcagagtcttttctctgacatccagggactacacagctttgtgtttgggaacagtctgccacatcccgmatcctcctttggattccgtctgcggcttaagatcaaggagtcatcagggaaagtcttcttgcaataaagagtgtgttggaaggcaaggaggtagagtgag

SEQ ID NO: 279463 - DNA, 201 bp, Homo sapiens
ttctcatatcttaacacaggaggtggttttgcaaattggagcaaggtgcccaccatttgtacccaggggagttaggctcttacccttctgtaggaactgakaggttgaggcactatctccctaaatgtttgcatctccaggagatggcttcctgggtccttgaagaagcattcctgggttgtgagacttgtgagaggccta

SEQ ID NO: 279464 - DNA, 201 bp, Homo sapiens
tcaaacataatgaaagtagagatggtaacataactgacttgatatatccataagccagcatcatcaccaatacgtggcaatgttttttacaccacctccaraccattttggagtaaatcagacatcttgtttcatggactggacagcacctttgatcacacacagtgtatcctaactttattatggccacccagaggggaa

SEQ ID NO: 279465 - DNA, 201 bp, Homo sapiens
tttttgttatggaagtattcaaacataatgaaagtagagatggtaacataactgacttgatatatccataagccagcatcatcaccaatacgtggcaatgytttttacaccacctccagaccattttggagtaaatcagacatcttgtttcatggactggacagcacctttgatcacacacagtgtatcctaactttatta

SEQ ID NO: 279466 - DNA, 201 bp, Homo sapiens
  misc_feature (1)...(201): n = A,T,C or G
gtatgtagcaaccaggtctgcagcctgttaactacataggtaaatatgctagagtctcttgcctgcaaaggatcttttctgctattccacatcattgcagngtttgtttttgcttaaacttttgtagctaaaaattatatggccatgctaataaaaaggatatagtcctttagagtcatgcttggacatggctcttaccaa

SEQ ID NO: 279467 - DNA, 201 bp, Homo sapiens
taacatatggctgaattttctcttgatcaagtacaagacactgggtcagtctgctgggagacaaaaagatgttgttagatgtggaacctgcctccagagckcaggcctgcaggggtgagaatgaagtttgcagtaataactacatttcagggcatatggtgtggtgctctaacagatacagataacacattagagttcaaa

SEQ ID NO: 279468 - DNA, 201 bp, Homo sapiens
gtttgcagtaataactacatttcagggcatatggtgtggtgctctaacagatacagataacacattagagttcaaaagtgggaatgcagtttggctagtgmaagtggcagatttcctctgccttcatacttgattcatttccaggcaggcatctggaaggttcctagtcatactggaggtggcatacattttgccaacaag

SEQ ID NO: 279469 - DNA, 201 bp, Homo sapiens
ggaggtgaaagtagaaacatccaggaattgtccattcaagatctgtacagtacactgggtgcagtggctcatgcctgtaatcccagcactttgggaggccraggcaggtggatcacttgcggtcaggagttcgagaccagcctagccaacatggcgaaaccctgtctctactaaaaatacaaaaacaaattcaccagacgt

SEQ ID NO: 279470 - DNA, 201 bp, Homo sapiens
aagaacctaatggttgatgtgatttaaggagagtgctgagataaacatggaggtgaaagtagaaacatccaggaattgtccattcaagatctgtacagtasactgggtgcagtggctcatgcctgtaatcccagcactttgggaggccgaggcaggtggatcacttgcggtcaggagttcgagaccagcctagccaacatg

SEQ ID NO: 279471 - DNA, 201 bp, Homo sapiens
ggtattggtagtacccaatactattggcacagtgggcattagaggagaaagctcttaagaggtgacatcaggctggcatcatgtatttgttgattcagttmtgtaattaactagaatagtttaacataaatttgtaatcctagagcaactttcatattttgttcttaaaggttatggcagtagaataaaaaagtactcacg

SEQ ID NO: 279472 - DNA, 201 bp, Homo sapiens
ccgcccataaatgagcatactgtctcttaaaatagcttgtacacactgcctttttaaaagaatcattttacactgaagacgacaatctctggttatcactrtttttaaatcctggagacatctctgcagtccatctgaactcggccaagcattgctcaaattgctctaccgtctgtaggttctgccttaagagattcctga

SEQ ID NO: 279473 - DNA, 201 bp, Homo sapiens; identical to SEQ ID NO: 56826

SEQ ID NO: 279474 - DNA, 201 bp, Homo sapiens
ccaccttgtgtcacttctccttcccagatcaagtgtgtcctgtgttgctctaaacttaccctgtgggtggcagaagaaagcagattgcatacccacggacrcacatgataatgatcttggtgagaacaagaattcttgattaatcctgtccatttctccctttcataggtaccacaactcccaggattttcctggatcaaa

SEQ ID NO: 279475 - DNA, 201 bp, Homo sapiens
atttagtcttcttttaatgtgtggcaagttaactaatgggaggaagtttttattcccgcccataaatgagcatactgtctcttaaaatagcttgtacacaytgcctttttaaaagaatcattttacactgaagacgacaatctctggttatcactgtttttaaatcctggagacatctctgcagtccatctgaactcggcc

SEQ ID NO: 279476 - DNA, 201 bp, Homo sapiens
gatgcatttggctgaagtttagggcctgtcctagccaattatgttctatttgaaaggctgatgcttaacttggtctattgcaggtcactacaacaaacccrccctctcccccaaatacatatttgttaaaaatgctctttaaactaaggactcctccctttatatctcatcacagttttattttaaagaactatgatatcc

SEQ ID NO: 279477 - DNA, 201 bp, Homo sapiens
ggttagacctgggaccacggctggatactctgaggctgtatgtttgatcacacagccacttagcaggaagtactcataaggttctttagctgtcacttagkgataacactgtctacctcacagaaatgttaaactgagacaataaaaaccaaagcataaaaatggattctgaaatgttgttcaaatagtagttacttcctt

SEQ ID NO: 279478 - DNA, 201 bp, Homo sapiens
gagagaatgaggaagaggattccttggaggggctggaggaggcgaaactggtcagaatccccagtggagaatcgatggaggaggttaaaaggagcgaccgwggatttaagtcttctggatccattcactcagaatgagcattaactgggagggaaattggagctggcctctccagcgcgggaggtggggaggagctgtttt

SEQ ID NO: 279479 - DNA, 201 bp, Homo sapiens
tgagctatgatcataccactgcattccagtctggcagcatggacaacagaataaagcctcatctgtttaagaaacaaaacaaagaaacctgacatatgctrcaatatgggtgaactttgaggacattatgctaagtgaaataagccagtgacaaaaggacaaatacagcatgattccatttatatgaagtttttagagaag

SEQ ID NO: 279480 - DNA, 201 bp, Homo sapiens
taatcccagcactttgggaggctgaggcaggcggatcacctgaggtcaggagttcgagaccagcctcaacatggagaaaccccatctctactaaaaatacmaaaaaaaattagccgggcatggtggtgcatgcctgtaatcccaactactcgggaggctgaggcaggagaattgcttgaacctgggaggcggaggttgtga

SEQ ID NO: 279481 - DNA, 201 bp, Homo sapiens
ggtttcaccatttgagccagactggtcttgaactcctgaccttgtgatctgcccgcttcagcctcccaaggtgctgggattacaggcatgagccaccgcayggggctgagattatataaatatatttcaaggaataggaagctgttattcccatgtgttgccttctctaaagaacatcagctgtgattaaatgtcctttca

SEQ ID NO: 279482 - DNA, 201 bp, Homo sapiens
  misc_feature (1)...(201): n = A,T,C or G
tctcttcaatgaaggaaacctgcagtcgggagcgctcagtcatctcgaagcccagaagcccagtctctggcccgagccagccccacacacgcctagctccnggatcctaacctggctcagcctctcccgtcttggcttgggcagctgatgtgattccaacaatggagttggaaggacagtcattgatggaagggctgatgc

SEQ ID NO: 279483 - DNA, 201 bp, Homo sapiens
caggcatgagccaccgcacggggctgagattatataaatatatttcaaggaataggaagctgttattcccatgtgttgccttctctaaagaacatcagctrtgattaaatgtcctttcagtggagaaatttttcactgctccaagtcaaagcagtatatacttttaacaaatgattttatcctgagttatttaattatcca

SEQ ID NO: 279484 - DNA, 201 bp, Homo sapiens
agtagagatggagtttcaccatcttggccaggctggtctggtctggaactcctgaccttgtgatccacctgccttggcctcccaaagtgctgggattacakgtgtgagccaccgtgccccgcccatgtagcatgtagaatgtagtcttttctaagaggttaatgctcccagctaaaaaccttttctttccggaaaaaggga

SEQ ID NO: 279485 - DNA, 201 bp, Homo sapiens
ctttggagttatggtgttgccatggagacctctgaactgttttggagagcagtgtgtaaattgacatgaggtgaaataaatttcaggagtttatgtaaaarattaatttggtagaaataatgtctagattcttgcatgccatggtgtcttggttaagaacttggaatgtggagtcagctctgccacttacaagctatgtgg

SEQ ID NO: 279486 - DNA, 201 bp, Homo sapiens
agaaggaaggaagggaggtctctttctttattttcaacagggagaattaagcctcttaatttttttttttttttttttttttttttttgaggcagagtctygctctatcgctcaggctggagtgcagtggcgtgatctcggctcactgcaagctccgcctcccgggttcacaccattctcctgcctcagcctcctgagtag

SEQ ID NO: 279487 - DNA, 201 bp, Homo sapiens
agggagaattaagcctcttaatttttttttttttttttttttttttttttgaggcagagtctcgctctatcgctcaggctggagtgcagtggcgtgatctmggctcactgcaagctccgcctcccgggttcacaccattctcctgcctcagcctcctgagtagctgggactacaggcgcccgccaccacgcccggctaatt

SEQ ID NO: 279488 - DNA, 201 bp, Homo sapiens
taacttggtctattgcaggtcactacaacaaacccaccctctcccccaaatacatatttgttaaaaatgctctttaaactaaggactcctccctttatatytcatcacagttttattttaaagaactatgatatccagtatttttccatgagagatattgatcgacttggtatccagaaggtcatggaacgaacatttgat

SEQ ID NO: 279489 - DNA, 201 bp, Homo sapiens
ggcaaacccccaatgggcaacacacttttagcctgtttcttgaggacagcagctttacttttaaaatacaaagcaaaaacatacacataattttaaatagytcagaaaggcaaaatttgaaacacaggtcatattcttcctctggggtttttgggaggaggtttcctctaaatcattgcctagatcttctgtctcatgaat

SEQ ID NO: 279490 - DNA, 201 bp, Homo sapiens
acttatatacaaatattcatagcattattcataatggtcaacatgtggaaactcaaatgtacattaattgaataggggaggaaaatttgacatatccatayaatggagtattattcagtcataaatggaatgaagtactaatttatgctacaacatggatgaacctagaaaacatgctaagtcaaagaaggcagacacaga

SEQ ID NO: 279491 - DNA, 201 bp, Homo sapiens
cagcttctgaagagccctcgttctcagtgtcttccttcccacatttcccaccacagccatctcatgatcctcaagctcatgcttttccagttcgggtaggractctctcaactttctccctgtcatcccccacatcagttgtattgacaaagaacgtcagaggatgaaggtctagttctgtattaggtttgtgcaaaagta

SEQ ID NO: 279492 - DNA, 201 bp, Homo sapiens
ctctggcttctttcagggatttactcactagccctgaaatagaagtgctgttcacagatattgctaaggtcaggtaaggctgttttgatttcttccttacmgcctggttgcatcattctgttgatgcacttgtgttcttgttccactctgatagagcctggagaggtttatcaaggccaaaggtaacatctgggcctgaaa

SEQ ID NO: 279493 - DNA, 201 bp, Homo sapiens
tgaggtctaatggttaaccatttttttattgttgggttaagtcaatcgatatctcttagtttcagtttccaacatctgcaaaactgttcataataggatcragataatcttcccacaatcatttgacattttaaattttactgtgacaaaatgattatgatgtgtactttgtcacgtattatcattgtggcccaggctagt

SEQ ID NO: 279494 - DNA, 201 bp, Homo sapiens
aaaatggactcttgtttttactttggcttgttctccctgtcccagtgggatgaccctcactgagagtagcagcaagggaacctgaggttttgtcacacttygttcttccagggttgctatcagcactggatcttgttgaagtcaatcctcagttggccacctcagaggaagaggcgaagactacagctaacctggcagtag

SEQ ID NO: 279495 - DNA, 201 bp, Homo sapiens
tgcagagtttgtttttgcttaaacttttgtagctaaaaattatatggccatgctaataaaaaggatatagtcctttagagtcatgcttggacatggctctwaccaaattacactaaggtaataatgagtaaaaaattgtatatttaaacaattaaatacaagaataaattgtcaaactgatgcagttctttgagttatcta

SEQ ID NO: 279496 - DNA, 201 bp, Homo sapiens
tgagcactagatccaaaatgcagatttgatttgtcttcctggcttagaaaccacggttgttccccaccacatttaggacctgggccttgccccggctcctrccgcatctctttgcagtcctctaggtgcactctgggttcggaggaattgtgcattgttctatagggctgaaggcattctctcctcctcagtaagcatttc

SEQ ID NO: 279497 - DNA, 201 bp, Homo sapiens
caccagacgtggtggcgcacacctgtaatcccagctacttgggaggctgaggtaggagaattgcttgaatccaggaagtggaggttgcagtgagccgagaytgtgccactgcactccagcctgcatgatagcgcaagaccctgtctcaaaaaaaaaaaaaaaaaaaaaaaaagtctgtgcagtccaggattgtgttgtcaa

SEQ ID NO: 279498 - DNA, 201 bp, Homo sapiens
attggagcaaggtgcccaccatttgtacccaggggagttaggctcttacccttctgtaggaactgagaggttgaggcactatctccctaaatgtttgcatytccaggagatggcttcctgggtccttgaagaagcattcctgggttgtgagacttgtgagaggcctatttagtcattatgaagattcacataaatttgaaa

SEQ ID NO: 279499 - DNA, 201 bp, Homo sapiens
cttgaacctggggagacctagacttagccacacagatggcaaagtcctaggcatgagagccacaagccaggtctctgaattactgcataaaggaaagcctmctgctgacctggaatatctaccctggatgctaaacaaacaagaaataaacttgtttgagccatattttgggctcaaacatattttgctatgacagttaat

SEQ ID NO: 279500 - DNA, 201 bp, Homo sapiens
gaagtgggaggatcacttgaggtcaggagttcgagaccagcctgaccaacatggcgaaacctcgtctctactaaaactacaaaaattagctgggcatggtrgtgcatgcctgtaatcccagctacttggggaggctgaggcagcagagccccttgaaccagggaggtggaggttgcagtgagccgagatcatgccattgca

SEQ ID NO: 279501 - DNA, 201 bp, Homo sapiens
aatgtcttccagactcagatattgctgcttctgagaagttctcctgacccttctcttcctgggtctctgttcccgccacaccctttgtacatctggttcayagcaattagcactgggctgggctgccactttctctgcctgacatcctaccagcctgtgacctccttgaagtctgcaccataccttatttctgcattccta

SEQ ID NO: 279502 - DNA, 201 bp, Homo sapiens
aagaagcattcctgggttgtgagacttgtgagaggcctatttagtcattatgaagattcacataaatttgaaaagcacacaaatattatgaaatagaaggraggaagggaggtctctttctttattttcaacagggagaattaagcctcttaatttttttttttttttttttttttttttttgaggcagagtctcgctcta

SEQ ID NO: 279503 - DNA, 201 bp, Homo sapiens
tgttgcccaggctggagtgtgggggctattcacagacataatcatagtacactactgcctcaaacttctgggctcaagcaagcctcctgcctcagccttcwggatagctgggattacagatgtgcaccactgtgctcggctgcagattccttttaggaggtgaatacataatcagtaatttgctaatgccttagtaaaaac

SEQ ID NO: 279504 - DNA, 201 bp, Homo sapiens
agtaatagaccacttcagagtcttttctctgacatccagggactacacagctttgtgtttgggaacagtctgccacatcccgcatcctcctttggattccrtctgcggcttaagatcaaggagtcatcagggaaagtcttcttgcaataaagagtgtgttggaaggcaaggaggtagagtgaggcaaggtctgaacagctg

SEQ ID NO: 279505 - DNA, 201 bp, Homo sapiens
aactaaaaattgagcaaagcggccgggcacagtggctcacgcctataatcctagcactttgggaggccggagcaggtggatcacctgaagttaggagttcragaccagcctggccaacatggcgaaaccccatctctactaaaaatacaaacattagctaggcatggtggcgcatgcctgtaatcccagctactcaggagg

SEQ ID NO: 279506 - DNA, 201 bp, Homo sapiens
tgtctcctcggcctccaggtgtggctgtcaaaggtgtgcttctcacctcccgatggagtttagcaaggtccttccggtagtttcgaagcttagacatcatrgggtttcggaaagacaggggtgcataacgtagctcctcctccatctctgccagctgggaaggcagaaagtagtgagcagatagcctggttcttccctcac

SEQ ID NO: 279507 - DNA, 201 bp, Homo sapiens
agcctgaggacttcttggttagaggctcccaggccatactctcagacacactgatctagaagacaaataaaaccatgacctctgggtaatattttcctgarcagttcagaatatatgggagtccatgttaggcacagactagaatctgtatatccctcccctcagtgagggaccaagtcaaaccaggacactacaaagatt

SEQ ID NO: 279508 - DNA, 201 bp, Homo sapiens
tgcttgatccggtgggtggaggttgcagtgagccaagatcacgccacttcactccagcgtgggtgaaagagcaaaacttcatctaaaaaaaattttttttwaattttaaattaatttccaagaattccttttgcatggggctaaatctgccatgtaaaatatttgagtctgtaactttaaaagccattagtaccctctcag

SEQ ID NO: 279509 - DNA, 201 bp, Homo sapiens
taaatatgctagagtctcttgcctgcaaaggatcttttctgctattccacatcattgcagagtttgtttttgcttaaacttttgtagctaaaaattatatsgccatgctaataaaaaggatatagtcctttagagtcatgcttggacatggctcttaccaaattacactaaggtaataatgagtaaaaaattgtatattta

SEQ ID NO: 279510 - DNA, 201 bp, Homo sapiens
gtgctgagaaagcttttcagatcactgaacagaaatgaaatctttgttacatctggagaagcaggtagattcctccttgggagtaaaaaaaaaaaaaaaakactcaggttgaagaaaacggtcacacccaggttccctactgagatgactaggccattcaattaaatcaaccagagggcaagtctcctgcctcctttctca

SEQ ID NO: 279511 - DNA, 201 bp, Homo sapiens
tcttgtactagagcctgaaaggatttctaataagggggatacagttagatgagaatggctgatggaaagagtactaagatgaattctacgttatcaagacyggctacttttccaaaattcatacttgtttgcaaacagtttccatttctgtcagaaagcttctggttttaaagctacttcaaatgacctttcattccaaaa

SEQ ID NO: 279512 - DNA, 201 bp, Homo sapiens
tgttatgttagttgaacagggatggtttatttcattatcttaaaaggtttcttttaatctactatagcacaacagtgttttaacttaaattcatggccaagaggatgaggtgcaaggggcttcctaaaaataggtattttctactataaaatggactcttgtttttactttggcttgttctccctgtcccagtgggatgac

SEQ ID NO: 279513 - DNA, 201 bp, Homo sapiens
aaaggatttctaataagggggatacagttagatgagaatggctgatggaaagagtactaagatgaattctacgttatcaagactggctacttttccaaaaytcatacttgtttgcaaacagtttccatttctgtcagaaagcttctggttttaaagctacttcaaatgacctttcattccaaaatttaaagaactaccaaa

SEQ ID NO: 279514 - DNA, 201 bp, Homo sapiens
gttatgttagttgaacagggatggtttatttcattatcttaaaaggtttcttttaatctactatagcacaacagtgttttaacttaaattcatggccaagaggatgaggtgcaaggggcttcctaaaaataggtattttctactataaaatggactcttgtttttactttggcttgttctccctgtcccagtgggatgacc

SEQ ID NO: 279515 - DNA, 201 bp, Homo sapiens
ttatgttagttgaacagggatggtttatttcattatcttaaaaggtttcttttaatctactatagcacaacagtgttttaacttaaattcatggccaagaggatgaggtgcaaggggcttcctaaaaataggtattttctactataaaatggactcttgtttttactttggcttgttctccctgtcccagtgggatgaccc

SEQ ID NO: 279516 - DNA, 201 bp, Homo sapiens; identical to SEQ ID NO: 56828

SEQ ID NO: 279517 - DNA, 201 bp, Homo sapiens; identical to SEQ ID NO: 56829

SEQ ID NO: 279518 - DNA, 201 bp, Homo sapiens
tttaaactccaacctaaagtgatggtgaggcttcagtttatatggccttccctttgactttttttctcaaatatatttaattgtacaattatatccttacygtgtagctgactggtagctcagtatcaccagcagtctgaaatagaatctcatagcctattaaataaaactgtggctctcagcagatttctagcatgtggt

SEQ ID NO: 279519 - DNA, 201 bp, Homo sapiens; identical to SEQ ID NO: 56830

SEQ ID NO: 279520 - DNA, 201 bp, Homo sapiens
attcctgctggggcctttgctttggttatgctaacccccatcccttatccgactcttccccaggtggtgcctcggtgcacaacgccatgcagctgaagccrggcaagcccaatggctggaggattcccttcaacagccatgagggcggctgtggggctgccatgcgggccatgtgcatcggtctcaggttcccacaccata

SEQ ID NO: 279521 - DNA, 201 bp, Homo sapiens
gtaatgaccttctttgtctcttttgatctttgttggtttaaagtcttttttatcagagactaggattgcaacccctgcctttttttgttttccatttgctyggtagatcttcctccatccctttattttgagcttatgtgtgtctctgcatgtgagatgggtctcctgaatacagcacactgatgggtcttgactctatcc

SEQ ID NO: 279522 - DNA, 201 bp, Homo sapiens
tagaatggctcatgtgtgtgatggagatgagaactgggaatacagagagatatctgacctggtagtaattttttcttgcatgactactacattgataagcrctgtgctaaaatttttcaattaattatttcatgcaatcttcaaaccaactttatgaaatatgtactattatttttcctacttaataacagaaagtgaagc

SEQ ID NO: 279523 - DNA, 201 bp, Homo sapiens
ctgctgggaaaacccctttcccacagtgggctcactgttgccaagtaaacaaaacctgttgcactgacaaaaattttcaggggagtttttcatgttctaasatgaccctcccgtgaggtttagaagttcatttttagatatgacttcatctgggcatgtctataaggcctgcacccatcatagggcagctgatctaggctt

SEQ ID NO: 279524 - DNA, 201 bp, Homo sapiens
gagagagagagagagagaagggaggatgagaacgaatggggggaagagataaactttatgcataacattagggtaaatcaataaagatggtctgacacatmgtatgaatttgccattcttatcaagttaatctatgcatattgaacaacagaagaggtcatatgtgacatttcaaatgatgctttttggacctgctgtgtg

SEQ ID NO: 279525 - DNA, 201 bp, Homo sapiens
ctgtcatttgcaggttgcctactcagggcccacggtgctagcctgactgctgggaaaacccctttcccacagtgggctcactgttgccaagtaaacaaaamctgttgcactgacaaaaattttcaggggagtttttcatgttctaagatgaccctcccgtgaggtttagaagttcatttttagatatgacttcatctgggc

SEQ ID NO: 279526 - DNA, 201 bp, Homo sapiens
caatctcagctcacttcaacctccacctcccaagttcaagcgattctcgtgcctcagcctcccaagtaggtaggattacaaaaatacatgtatttaataarctataggaggagtcatgaatatttatgaaaggagaaacatgtgcatgtgcaactgagcgtcatgccccttcaagagtcccttttacaaaaaatggcagca

SEQ ID NO: 279527 - DNA, 201 bp, Homo sapiens
agcaaaccgtgtgggtgagaaatactgactacagcggcggcttccttcatctcagcaacaagtttgtggcagagcttagtggataccaccctattcacctkagatttggaatactgaagctttggaaatcatgaaggcagaacttgctatgaaaggactccactgcactgtctccttctgtattggcagaaggggcctagt

SEQ ID NO: 279528 - DNA, 201 bp, Homo sapiens; identical to SEQ ID NO: 56836

SEQ ID NO: 279529 - DNA, 201 bp, Homo sapiens
agagcaagactccatctcaaaaaaaaaaaaaaaaaaaagacgccatccttcccacaccagccagaaagagagcaaaccgtgtgggtgagaaatactgactrcagcggcggcttccttcatctcagcaacaagtttgtggcagagcttagtggataccaccctattcacctgagatttggaatactgaagctttggaaatca

SEQ ID NO: 279530 - DNA, 201 bp, Homo sapiens
taacgaagggatccagtttcagctttctacatgtggctggccagttttcccagcaccatttattaaacagggaatcctttccctatttcttgtttttgtcrggtttgtcaaagatcagatattgtagatgtatggtattatttctgagggttctgttctgttccattggtctaatctctgttttggtaccagtaccatgct

SEQ ID NO: 279531 - DNA, 201 bp, Homo sapiens
gttgcagtgagccgagatcacaacactacaatccagcttgggtaacagagcaagactccatctcaaaaaaaaaaaaaaaaaaaagacgccatccttcccayaccagccagaaagagagcaaaccgtgtgggtgagaaatactgactacagcggcggcttccttcatctcagcaacaagtttgtggcagagcttagtggata

SEQ ID NO: 279532 - DNA, 201 bp, Homo sapiens
tttacattaggtatatctcctaatgctatccctcccccctccccccagcccatgacaggcccccgtgtgtgatgctccccttcctgtgtccaagtgttctsattgttcaattcccacctatgagtgagaacatgtggtgtttggttttttgtccttgtgatagtttgctgagaatgatggtttccagcttcatccatgtcc

SEQ ID NO: 279533 - DNA, 201 bp, Homo sapiens
ttgtaaatccatccttggctttactgtaataaaagtaaaagaaattcttttaaaaataattcacataaaaattcttttaaaaatttttatgtgaaaaattdaaaggataaatttatgaaagtatatttttataattctagggtgagcaagacacaaaacttggaagccacgaaaaaagaaaagatacacagatttgaattc

SEQ ID NO: 279534 - DNA, 201 bp, Homo sapiens
agccctcgttcagagtgagggccgtcttcttactaacccaccacacactcttcctcctatacttggcatcttactcttcctgcctgtgactctttttttttaattaatttttttattatcaatttttgtttattattctactttaagttctagggtacatgtgcacaatgtgcaggtttgttacatatgtatacacgctcc

SEQ ID NO: 279535 - DNA, 201 bp, Homo sapiens
gtgacagagcaagattctgtttcaaaaacaaaacaaaacaaaacaaaaaaactttaaatgagtttgttctgaggagcagacccagggttggagaagaatadagcaggaattactgctcctcagtgtaaattctttagtgccacttatttttttgtaaatccatccttggctttactgtaataaaagtaaaagaaattcttt

SEQ ID NO: 279536 - DNA, 201 bp, Homo sapiens
gagatggatgaagacgggcaaaggaagccgaacccgaatacctatattactggaaaacaaaacaaaacaaaacaaaaccaagtaaaagatttaaaaggagrctgggcacagtggctcatgcctgtaatcccagcactttgagaggctgaggtgggcggatcacttgaggccaggagttcgaggccagctggccaacgtgat

SEQ ID NO: 279537 - DNA, 201 bp, Homo sapiens
ttctggagcccctgtgagtgagcagctgacccatgctggaccagtgtacttgtttgcacaggtggaacctgacagcaccttgcatgggttgcagtgagccragatcacaacactacaatccagcttgggtaacagagcaagactccatctcaaaaaaaaaaaaaaaaaaaagacgccatccttcccacaccagccagaaag

SEQ ID NO: 279538 - DNA, 201 bp, Homo sapiens
cttctttttaccaagctgtcatgaaatgagagacccagggatattcccagacaaccacctccagccagtttcttatgtcatttgggaaacttttgacacarccccgggtgctcacagggttttctttctcttcaaccttctcacaatactcccttgccataatgcacacccaaagataaacccttaaggttcacaatttta

SEQ ID NO: 279539 - DNA, 201 bp, Homo sapiens
agagagagagagagagaagggaggatgagaacgaatggggggaagagataaactttatgcataacattagggtaaatcaataaagatggtctgacacatcrtatgaatttgccattcttatcaagttaatctatgcatattgaacaacagaagaggtcatatgtgacatttcaaatgatgctttttggacctgctgtgtga

SEQ ID NO: 279540 - DNA, 201 bp, Homo sapiens; identical to SEQ ID NO: 56835

SEQ ID NO: 279541 - DNA, 201 bp, Homo sapiens
atggggtttcaccatattggccaggctggtctcaaactcctgaccttgtgatccaccctcctcggcctcccaaagtgctgggattacaggcatgagccacygcacccagccgagttttagaaatttcatgagggactacatgaatacaaattttgacgatcacagacaccctcaaattttaagaatcccagtgaaatccta

SEQ ID NO: 279542 - DNA, 201 bp, Homo sapiens; identical to SEQ ID NO: 56847

SEQ ID NO: 279543 - DNA, 201 bp, Homo sapiens; identical to SEQ ID NO: 56840

SEQ ID NO: 279544 - DNA, 201 bp, Homo sapiens; identical to SEQ ID NO: 56841

SEQ ID NO: 279545 - DNA, 201 bp, Homo sapiens
cccaaaacctcccccaaccaaccccgtccatggaaaaattatcttctgtaaaaccggtcgctggtgccaaaaaggctggggactacaactccagaaaaaawtttttaaaacattagccaggtgtcatggcacatacctgtagtcccagctacttggggggctgaggtaggatgattgcttgagcccgggaggttgaggcta

SEQ ID NO: 279546 - DNA, 201 bp, Homo sapiens
acacaggatgagatggaactggggtttaaaaccaggtctgtttatcctacaaaggatggaaaagaaccaaaccaaggtgcttttcccagtctcatgcagcmctcacacttctgacacccaaaggtgtgagagttgtttctccatgcaccaagcaagtttctaacagacaccaagtgagtgtcctctaattcagttccgatg

SEQ ID NO: 279547 - DNA, 201 bp, Homo sapiens
catctgctaaggatttcaagttcccttccagtaatgattctacaaagtagccaagtggatacctcaatgaatagggcagctgtggtgtttccctcttacamggaatcctgtcatttttgtggctatcctattctgccatgaattttcatgcctatttcctactttcctggaatttgctttttcagtgttgtcttggtatac

SEQ ID NO: 279548 - DNA, 201 bp, Homo sapiens
tttggttttttgttttgagacggagtctcgctctgtcacccaggccagggtgcagtggtgcaatctcgactcactgcaacctctgcctcccgggttcaaaygattctcctgcctcagccttccaaatagctgggactacaggcatgtgtcaccacgcccggctagttttttgtatttttagtagagacggagtttcaccgt

SEQ ID NO: 279549 - DNA, 201 bp, Homo sapiens
agcaattctcctgcctcagcctcccaagtggctgggattacagtcacccgccaccatgcccagctaatttttgtatttttagtaaagaagggatttcaccstgttggccaggctggtcttgaactcctgacctcaagtgatccgcccgccttggcctcccaaagtgctgggattacaggcgtgaaccaccgcgccagactg

SEQ ID NO: 279550 - DNA, 201 bp, Homo sapiens
  misc_feature (1)...(201): n = A,T,C or G
gttgggtggggtttggagttttggggcatgcatcatcatattttttggctctccctttccatcaaaaatacttggagacagagtttagttatttattcctnctggggcctttgctttggttatgctaacccccatcccttatccgactcttccccaggtggtgcctcggtgcacaacgccatgcagctgaagccgggcaag

SEQ ID NO: 279551 - DNA, 201 bp, Homo sapiens
ctggccaacatggcaaaaccccatctctactaaaaatttaaaaattagctgggcatggtggtgggtgcctgtaatcccagctactccggaggctgaagcakgagaatcgcttgaacctgggagatggaagttgcagtgagctgagattgaacaattgcactccagcctgggcaacagagtgagactctgactcaaaaaaaa

SEQ ID NO: 279552 - DNA, 201 bp, Homo sapiens
  misc_feature (1)...(201): n = A,T,C or G
gtaaagccttgcacttctaaggccaaatcccagctaagaagagcaaatgatgagctgggtttgacttgcagaatttagtgggcttactactcaccaagagncaagagatacagttgtagttatgatgatagactttggagtcagatggacctatgttgggatcccagccctgccacttattggctctgtgacctgagacaa

SEQ ID NO: 279553 - DNA, 201 bp, Homo sapiens
attttgaggcctttggtaatgatcctctgtggctttgaggtgtttctgtttctttgttttgagctagtcatggccataaatgccttctacatctgtaggcraccaaactggagaaaataatctacatgtaagcaggataaattttgattgtgtttaaggaagcattttttttgtgttgaagctggaaaaggtgactttcaa

SEQ ID NO: 279554 - DNA, 201 bp, Homo sapiens
caagatgttttagatgggccaaatgattttgaggcctttggtaatgatcctctgtggctttgaggtgtttctgtttctttgttttgagctagtcatggccrtaaatgccttctacatctgtaggcgaccaaactggagaaaataatctacatgtaagcaggataaattttgattgtgtttaaggaagcattttttttgtgt

SEQ ID NO: 279555 - DNA, 201 bp, Homo sapiens; identical to SEQ ID NO: 56838

SEQ ID NO: 279556 - DNA, 201 bp, Homo sapiens
tcagagaacagaggaatggggagccaagatgttttagatgggccaaatgattttgaggcctttggtaatgatcctctgtggctttgaggtgtttctgtttmtttgttttgagctagtcatggccataaatgccttctacatctgtaggcgaccaaactggagaaaataatctacatgtaagcaggataaattttgattgtg

SEQ ID NO: 279557 - DNA, 201 bp, Homo sapiens
ttcatttcattcatttcatcttccatcactgacactctttcttccagttgatctaatcggctactgaagcttgtgcattcgtcatgtagttctcgtaccayggttttcagctccaacaggtcatttaaggacttctctacactggttattctagttagccatttgtctaatcttttttcaaggtttttagcttctttgaga

SEQ ID NO: 279558 - DNA, 201 bp, Homo sapiens
ataagaagaacagggtctttctttgatgatagtatacagttgctaaattaaccctgggacttcttacctttagacattttgttacataagataataagtgycattattatttaagcccagtgagtatgtggtgttttgggggtggggaagagtgatggttatttgccgttatttggagctggaaacatgctaactgataaa

SEQ ID NO: 279559 - DNA, 201 bp, Homo sapiens
tgaagatgcctatgatgtgtcttcctcaataaaactaagagcaaggaaccaactatgcaatatatttgtctttccaggacctatactaatgcctagcaccyagtaagatgccaagtaactatttgttcttcttggcagaacaacattcactgtttcctttgcaaacaaaccctgatttttgtaaaagaacctacctctacc

SEQ ID NO: 279560 - DNA, 201 bp, Homo sapiens
atgtataaagatcattcttgtaagtgaccagtttgttaagaacagtgtcattgttccgaccttatagatgaagtgtctgaaatatcttaagatcaggtccragggctacaagtttatttctcagcaacagcctcagcatagcaattgattctgtattggtgagtaatgaagatgcctatgatgtgtcttcctcaataaaac

SEQ ID NO: 279561 - DNA, 201 bp, Homo sapiens
tcctcccatttgacagaaagcctcatcttctcgtgcatcaccagcctcatccctgagacaccatggtgaaggtgaaggtggaagtcaacggatttggccayactgggcgcctggtcaccagggctgcttttaactctggtaaagtagatattgtcaccatcaatgaccccttcattgacctcaactaccccttcattgacc

SEQ ID NO: 279562 - DNA, 201 bp, Homo sapiens; identical to SEQ ID NO: 56853

SEQ ID NO: 279563 - DNA, 201 bp, Homo sapiens; identical to SEQ ID NO: 56854

SEQ ID NO: 279564 - DNA, 201 bp, Homo sapiens
gttacttaaaattccctgtatttaggttataacttctaggagcatagatactcatcttcattcattgattcatgcatacatacatttaatcattaattcaytcatttattcagtaacatttactggatatttgatagaaacaaagggttcaggataaacaaaaataagacatgttccccaacctcaagtagctcagaatct

SEQ ID NO: 279565 - DNA, 201 bp, Homo sapiens
tgctccattcttaacagtattccaatactgtaattagatagtgggctgtatagactgaaaaatggttttgctaagtgtaatgggaattgtttccaggttaycctttcatcataagaattcactaaggcatgcaaaccaatttcatttatttcttcttctgtttctcagaaaagggccttttttagcagggtggtggtgggg

SEQ ID NO: 279566 - DNA, 201 bp, Homo sapiens
tgctgcactcagttccccaccacactgagaatctcccctcctcacagtttccatgcagaccccctgaagagggagatgcctagggagcccctccttgtcaygaaccatcaataaagtcccctgtgctcagccaaaataaaaaaaaagaaagtaaaaagtataagaagaccttagaatcaacagatggcacatgtttgcctt

SEQ ID NO: 279567 - DNA, 201 bp, Homo sapiens; identical to SEQ ID NO: 56855

SEQ ID NO: 279568 - DNA, 201 bp, Homo sapiens
tcccacatgcactgctttttctccagtaatagactgcattttggatgactgccaggcaacaatagttgactcgtgctggccagctctcaacataggtctcygaagaagctggggaacagggcaaattgacgcttctagttttctctcaataatccctccccagggttcaggttcacatgtggacttctgttaccaaccttg

SEQ ID NO: 279569 - DNA, 201 bp, Homo sapiens
atgaaatacttaatgatctttccattggaaataactggaagtgaagaggttttgttgcttgtacagtgtcagatgaggaacaccactatcttaattttgcratacactgcatttgctggtgctatttttatacagtgaagcaacagctttgcagcaaaataataaaatacttctttgttaaaaaaaaaaaaaataacatcc

SEQ ID NO: 279570 - DNA, 201 bp, Homo sapiens
tattgacaatcattttccaaaaaacaaattgtttgattttataaaaatgacttattgggtggtccctcgactgaccaaagatcagcccattcctgaggccrttacagcgttcactgatggctccagtaacggaaatgctggttatgtgggtcctacagacaagcttatttctaccccttatacaactgctcaaaaggcaga

SEQ ID NO: 279571 - DNA, 201 bp, Homo sapiens
gctggacggtactgctgccatctcggctcactgcaaactccctgcctgattctcctgcctcagcctgccgagtgcctgcgattgcaggcgcgcgccgccaygcctgactggttttcgttttttttttttgatggagacggggttttgctgtgttggccgggctggtctccagctcctaaccgcgagtgatccgccagcctc

SEQ ID NO: 279572 - DNA, 201 bp, Homo sapiens; identical to SEQ ID NO: 56858

SEQ ID NO: 279573 - DNA, 201 bp, Homo sapiens; identical to SEQ ID NO: 56859

SEQ ID NO: 279574 - DNA, 201 bp, Homo sapiens; identical to SEQ ID NO: 56860

SEQ ID NO: 279575 - DNA, 201 bp, Homo sapiens
ggctgtaattgtgatgtaagtaaactactgaaatttttctcttttgatcttttaggttaaattaatgacaataaaccataaatacttgtgctggggaacastgtaagtgaatagtaatttagttttatggcactgtggtgaaaagtttagttatgaattctcattgaaagtataggacaagttattttcttctgtagtaag

SEQ ID NO: 279576 - DNA, 201 bp, Homo sapiens
ttcacaacagatatgagcaatcttcccatcatgacatttaccagcctttcagtgatgggcagaataatggtcccccatagatgtctactttctaatccctsaaattgttaatatgttaggttacatggtaaagaggaattaaggttgctagtcagttgaccttgaaatggggacgttatcctggattattcacatgtgccc

SEQ ID NO: 279577 - DNA, 201 bp, Homo sapiens
gcaatcttcccatcatgacatttaccagcctttcagtgatgggcagaataatggtcccccatagatgtctactttctaatccctgaaattgttaatatgtkaggttacatggtaaagaggaattaaggttgctagtcagttgaccttgaaatggggacgttatcctggattattcacatgtgcccaaagtatataatcaca

SEQ ID NO: 279578 - DNA, 201 bp, Homo sapiens
ctctgttaaccaccattttactgtctacttccacgagatcaattttttttaactcccatatataggtgagaacctgcagtatttgtctttctatttctggmttatttcacttaacaaaaagttatccagccttacccatgttgctgcaaatgaagggatttcattctttgtttttttattttggctgagtaatattccatt

SEQ ID NO: 279579 - DNA, 201 bp, Homo sapiens
tttctgggttctctattctgttccattggtctgtatgtctgtttttatgccagtaacatgctgttttggttactatagtttggcggtatattttgaagttyggtaatgtgatacctcaagcttttttttttttcccctggtattgcattggctattctgggtcttttgtggttccatatgaatttttggatttttttttcc

SEQ ID NO: 279580 - DNA, 201 bp, Homo sapiens
gtatgtctgtttttatgccagtaacatgctgttttggttactatagtttggcggtatattttgaagttcggtaatgtgatacctcaagctttttttttttycccctggtattgcattggctattctgggtcttttgtggttccatatgaatttttggatttttttttcctatttttgtgaagaatattgttggtattttga

SEQ ID NO: 279581 - DNA, 201 bp, Homo sapiens
aagatggtggaaggcatgacttgatcccaagagtttctctttttgactcctagaaatagcctttctcacctatcatccttctctgccttttttttttttttcaaactttcttcaagtactctttaaaaacagtttaaatttcattaaaaactgtagcatgaattcatattccaactcattccagtagcactttaggaagga

SEQ ID NO: 279582 - DNA, 201 bp, Homo sapiens
tctctgaatttatttatttgagtcttttcctttttccttattctacctacagatttgtcaatattgtttatcttgtcaaaaaattgacttttggagctctygtaaaagttcagattgcttactgttgtggacttggagtgtctgcaacgaaaggataccctggctgtgtgggaaggctggctagggctttatagcctcatg

SEQ ID NO: 279583 - DNA, 201 bp, Homo sapiens
aaagatggtggaaggcatgacttgatcccaagagtttctctttttgactcctagaaatagcctttctcacctatcatccttctctgccttttttttttttttcaaactttcttcaagtactctttaaaaacagtttaaatttcattaaaaactgtagcatgaattcatattccaactcattccagtagcactttaggaagg

SEQ ID NO: 279584 - DNA, 201 bp, Homo sapiens
tttatcttgtcaaaaaattgacttttggagctcttgtaaaagttcagattgcttactgttgtggacttggagtgtctgcaacgaaaggataccctggctgygtgggaaggctggctagggctttatagcctcatggactcatggagcgtgcttcctacaccgtaacactgctgaacaacctctttgatttggtgtcttttt

SEQ ID NO: 279585 - DNA, 201 bp, Homo sapiens
ggattacactagatcacttgaggccaggagttcaagaccagtctggccaacatggtgaaaccccatttctactaaaaatacaaaaattagctggtgtggtrgcacacacctgtagtctgagttacttgggaacctgaggcacgagaattgcttcacactgggagatggaggttgcagtgagctgagatcatgccactgcac

SEQ ID NO: 279586 - DNA, 201 bp, Homo sapiens
aaattcagagtttatgctagtaaccacaactgcaaaagctttacttataattggagcaaaatcagtagttactaaagaaagtaagcaggaagagaggcaargcaagttgctctgctatagatgcagattggtgaagaaacccttattctgttcctcaggacaccattaatttgcaaataacaaggggggaatttttcagca

SEQ ID NO: 279587 - DNA, 201 bp, Homo sapiens; identical to SEQ ID NO: 56866

SEQ ID NO: 279588 - DNA, 201 bp, Homo sapiens
cacaccattgccaactctagttattataaaaattctgtaggctaggcatggtggctcacgcctgtaatcccagcactttgggagggattacactagatcayttgaggccaggagttcaagaccagtctggccaacatggtgaaaccccatttctactaaaaatacaaaaattagctggtgtggtggcacacacctgtagtc

SEQ ID NO: 279589 - DNA, 201 bp, Homo sapiens
aaatagatgttttttaaatccagtttttgttgttgttcctagcattaagactggcttgccagaaactagctcatcatagctggcattggaaatttcacgcrgtattttttttttatatagaagatatgttcaaatcaggttccaaataaattttacacattgcatttgattgatataccttataagtcttttttaaatatg

SEQ ID NO: 279590 - DNA, 201 bp, Homo sapiens
ggtttttctgcctgctttatattctggctgtgctggcagctgattagatggtgccctcccagattaacggtgggtctgactttcccagcccactgactcaratgttaatctcctttggcaacactgtctcagacacacccaggatcaatactttgcatccttcaatcaaaccaagttgacactcagtattaaccatcacaa

SEQ ID NO: 279591 - DNA, 201 bp, Homo sapiens
aggctgggaggctaagccagtctagtcttttcaggtttttctgcctgctttatattctggctgtgctggcagctgattagatggtgccctcccagattaasggtgggtctgactttcccagcccactgactcaaatgttaatctcctttggcaacactgtctcagacacacccaggatcaatactttgcatccttcaatca

SEQ ID NO: 279592 - DNA, 201 bp, Homo sapiens
ctatgaatcagaggatgaggttgtataattcaaaagcattgccttagtctagaaataattattgtacctatcatttagttttagaaataaaaagcaagctkattttttttgatgaaccatttatatctgtgatggaataataaaatttcacacttccggattcctttgttctcaattttgagccttgagttgttttaatta

SEQ ID NO: 279593 - DNA, 201 bp, Homo sapiens
atttgtgttattttctaggcaaagggtcttcagtactttaggtatttcaggacttctaatctacctttagaacaacaccaacaaagtgcagaaatcccaasgtgcctttaaaaggaaggttttcttgatgtggttgaatgtttttgaaatgacagattcttgtttcatatagtggaaccaggacagttgtatgctttgttt

SEQ ID NO: 279594 - DNA, 201 bp, Homo sapiens
acctggtataaaaaagagtagtggagaacaagataaaatgaaagtgatagcaaggcttgtaaggtccttatctacagtctggcagtctctttacaggggcytttcaaagcatagttggcttcataaaaattacgtgactacatttagcactatgtgaataagaagagggcaggcttggaggcacttcagatagaatgtgaa

SEQ ID NO: 279595 - DNA, 201 bp, Homo sapiens
tatgcctttaacacctttaattctttatgtctggtgattactttaatgcaggtgataatttgcttctctttggtgtattctccttaggtgatttttcaccrttctcatttaattcttcttgttaggcatctgatctacagattgcggcttatgcctttacatcttttggcaaaaagctaaccaagaacaagatgcttcacc

SEQ ID NO: 279596 - DNA, 201 bp, Homo sapiens
aatctccctgcttcccctcatggcctgaattagttttcaggtgttttggatgccctttggccaagaagagggtccattttgttgggaaagggcttagaacktttaaaaacttatttattttagtttatagttccccttttttttgttaaggtatgccatcaatggccaagctcttattttgtccagtattgatgtcagggt

SEQ ID NO: 279597 - DNA, 201 bp, Homo sapiens
ctttaaaaaaattgcttcattttatttccaacatgagctatactttttttttttgtacagttgacccttcaacatcatggaggttaggggtccccaagccyccagtgcattagaaaatccaagtgtgtgaccagaagtcttaccaataacataaacaattaacacacattttgtatatgtattatatattgtattcttaca

SEQ ID NO: 279598 - DNA, 201 bp, Homo sapiens
gtctactttctaatccctgaaattgttaatatgttaggttacatggtaaagaggaattaaggttgctagtcagttgaccttgaaatggggacgttatcctrgattattcacatgtgcccaaagtatataatcacaagggtccttattcatggaagagggaggcaaaggagagaaccaaagagatggaagtatgagaaggtt

SEQ ID NO: 279599 - DNA, 201 bp, Homo sapiens
ttacttgattgttccagtctgtaatatcttccatcttaaaaggaaaacaattcacctcatgtctccttcaagtatcaggccccagtcgaagccatcatccyatctctcttagattgttctcacctggacaactttagtcacctcctaacttggcataccttctcttcacccttgtaatctgttctccatgtaacagctgga

SEQ ID NO: 279600 - DNA, 201 bp, Homo sapiens
tgaacctgggaggttgagggtgcagtgaacggtgtttgggccagtgcacttcagcctgggaaacagactgagactctgactccaaaaaaaaaaaaaaaaaagggttcagtagttgtattaatccatattcaggtttaggtgatagaaacctaaatcaaactagcgttagcgtaagaagatatttgttggcaaggagttagc

SEQ ID NO: 279601 - DNA, 201 bp, Homo sapiens
ccatacctgttgcaatgaatttacatgtatacctagcttaaaaaatatatataatatataatatgtattatatatgtatatacatatatatggtatacatyttctatgtatatgttttaaagtatattacagaaaatttcaaaatgtataggggattatataatgataactcccgtgtacccatctcctaacttcaacagt

SEQ ID NO: 279602 - DNA, 201 bp, Homo sapiens
acataagtaactatttttttccacttaggcatttaatgcatattcatgtttctctgtcctgcttttgagacacttgtcagattagtcccttaggtgtcttyatgcagaacactgtttcaagtcgattcggcaatcatatcatcatcctcaaaatcagtacacccatgaacatatttggtttgtacaaggtattttataata

SEQ ID NO: 279603 - DNA, 201 bp, Homo sapiens
gcagaggaaaacaggtattagctgaaaatagtctcttctgtgtccatgtttttgatagtgttcgattctgtaacctatgagtggaatactttgtttagcgktgctatcagttttaaaaaatagtttttgagagaataggaagttcaaattcaatattaacgttctttgatttctcagttgctattttaacatataattaca

SEQ ID NO: 279604 - DNA, 201 bp, Homo sapiens
tttgtgctccaaagttttctatatcaatgcaatatcaacacataatccttttctatacatcaaatactatctacccactaagatttactgcaggttccctyaccttctatcatgttgttttgtataggggaaagattgtagtcttaacagatctgggtttgggtcctgtgtttgacattaggtaagttactaaatttctga

SEQ ID NO: 279605 - DNA, 201 bp, Homo sapiens
acttcctgagaaatccttgaaagcttttaaattgaagtaatttcttaacatgtgccatgaaattgagctaaattaaagctctgtggatttttgactgatgkaaatttctttatgggagaacccagttatttatctgctgtatgtttaaagatacatgaaattcaccaatctaggagcataaaatactgtggagggggagta

SEQ ID NO: 279606 - DNA, 201 bp, Homo sapiens
ccctaaagtcagggccagaattactctctcttgactttgcatatcacatatcagtgttgctgatcataactatattatgattttattaaatttggttgacstgaagaggaatggtgagatgatatatgtgtttaagatgtaaattcttacaaaccaatattaaacccttttaatttggaaaaattaaatttattttagatt

SEQ ID NO: 279607 - DNA, 201 bp, Homo sapiens
ggcatttaatgcatattcatgtttctctgtcctgcttttgagacacttgtcagattagtcccttaggtgtcttcatgcagaacactgtttcaagtcgattyggcaatcatatcatcatcctcaaaatcagtacacccatgaacatatttggtttgtacaaggtattttataataagctcagataaaatgtttaaatatatg

SEQ ID NO: 279608 - DNA, 201 bp, Homo sapiens
gctgaagaagttagagtccaacgttcaaggccaggaagcatctagcacaggagaaagatgtaggctgggaggctaagccagtctagtcttttcaggtttttctgcctgctttatattctggctgtgctggcagctgattagatggtgccctcccagattaacggtgggtctgactttcccagcccactgactcaaatgtta

SEQ ID NO: 279609 - DNA, 201 bp, Homo sapiens
tcacacgatcacaaggtcccacaataggccagctgcaagctgaggggcaagaaagccagtttgagtcccacagctgaagaagttagagtccaacgttcaasgccaggaagcatctagcacaggagaaagatgtaggctgggaggctaagccagtctagtcttttcaggtttttctgcctgctttatattctggctgtgctg

SEQ ID NO: 279610 - DNA, 201 bp, Homo sapiens
aacagaggccttagaaataacaccacacatctacaaccatctgatctgtaacaaacctgagaaaaacaagcaatggggaaaggattccctatttaataaaygatgttgggaaaactggctagccatttgcagaaaactgaaactggaccccttccttataccttatacaaaaattaactcaagatggattaaagacttaaa

SEQ ID NO: 279611 - DNA, 201 bp, Homo sapiens
tatccaatcctgttccccggcgaatgcggggcgggaccctagcggccttcagtccaattcccgcacctttgaggcccaagggggagcgagccggtgctgcygcaggctgaggctgcggcagaggcggcgaggcgcgggcggtgaggacggacaggtccgttgaagcagcattccctccctcccctaatccttcaactcggg

SEQ ID NO: 279612 - DNA, 201 bp, Homo sapiens
aggctgaggtctaggaggatcgcttgaacctgggaggttgagggtgcagtgaacggtgtttgggccagtgcacttcagcctgggaaacagactgagactcygactccaaaaaaaaaaaaaaaaaagggttcagtagttgtattaatccatattcaggtttaggtgatagaaacctaaatcaaactagcgttagcgtaagaa

SEQ ID NO: 279613 - DNA, 201 bp, Homo sapiens
  misc_feature (1)...(201): n = A,T,C or G
aagtcctagatatgctgtggtccctaaatactggtttagtgaattgtgaattgtacctaggatacgtaacactatctatgagattgaagttgtgagggctntctctcttttctttaggtttcctattgtgattttatcatggaaaatcaattggctaaatcaactgaagaacgaacatttcagtaccaggattctcttcca

SEQ ID NO: 279614 - DNA, 201 bp, Homo sapiens
cctatgaagtaaaacatgttttcattgtttttggcattgtgtttctttcatgaattgtctgtacatgtaggaaaggctgttctttagaaagataactgaawtttttttaaaaaattgacacttgaataagaatggttaatctgtggagagaaacatgtttagatgctgctaaatatctgggaattccatgccaagtgtagc

SEQ ID NO: 279615 - DNA, 201 bp, Homo sapiens
attagcctcacatggtgttgtgcgcctgtgatcccagctacttgggaggctgaggtctaggaggatcgcttgaacctgggaggttgagggtgcagtgaacrgtgtttgggccagtgcacttcagcctgggaaacagactgagactctgactccaaaaaaaaaaaaaaaaaagggttcagtagttgtattaatccatattca

SEQ ID NO: 279616 - DNA, 201 bp, Homo sapiens
cctgttccttcacttgaagaatcattaaaaaaataccttgaatcaggtatgttaataatcttttagtatatattaatattattagtaacttagaaaactgygatactgttgctggagaaggggtctcgatccagactctaagagagagttagagttcttggatctcttgcaggaaggaattcaaggtgagttgcagagtgc

SEQ ID NO: 279617 - DNA, 201 bp, Homo sapiens
tctgcaaatataatccactcagacattggtttcatcattatatactgggctagagcatgttcttatttttatttctctttgtttaacttaaagcacatgtkgaagacataatttactctttttttaagtgatgtgaaaattgcatggttttccagaagcattacattgcacattttaattttgagcctaattcatatttcg

SEQ ID NO: 279618 - DNA, 201 bp, Homo sapiens
ggaggtcgaggctgcagtgagctgtgattacgccactgcactccagcctgggtgacagagcaagacgctgtctcaaaaaaaaaaaaacaaaaaaaaaaaaacaaaaaaaagctatatctagtcaactgacaggtgaaaaatggttttcattgttgttcgaattggcatatccctcattacaagtgaggttgagcattttta

SEQ ID NO: 279619 - DNA, 201 bp, Homo sapiens
aggaggtcgaggctgcagtgagctgtgattacgccactgcactccagcctgggtgacagagcaagacgctgtctcaaaaaaaaaaaaacaaaaaaaaaaamacaaaaaaaagctatatctagtcaactgacaggtgaaaaatggttttcattgttgttcgaattggcatatccctcattacaagtgaggttgagcattttt

SEQ ID NO: 279620 - DNA, 201 bp, Homo sapiens
catggtaaagaggaattaaggttgctagtcagttgaccttgaaatggggacgttatcctggattattcacatgtgcccaaagtatataatcacaagggtcyttattcatggaagagggaggcaaaggagagaaccaaagagatggaagtatgagaaggttatgatcttcccttgatggctttgaagatggaagaaggggtt

SEQ ID NO: 279621 - DNA, 201 bp, Homo sapiens
actcagctgttcctttggccacattgtgatttacagtttaatgatgctactgctctcttcatggctccattcctacttccccgtcttcacttctttctggytcttcaccatcattactcccaggcatacacattcaaatctttgctacctctccccagtactgatgtggtaaaacctaaacatcgtttaaaatttaatttg

SEQ ID NO: 279622 - DNA, 201 bp, Homo sapiens
gattctttattggctcacaagagtgtgctggaacagtggtcaccacgttgaatgcctgtgggactttatgagaggcaggtttaattttggatgaatgtacscaagtgtgtattcccttactccactagaggtacttagaagcacttgatagggtcctctccactttggagaaagttgtctataggaggtccttctttccaa

SEQ ID NO: 279623 - DNA, 201 bp, Homo sapiens
ccgggaggcagagcttgcagtgagccacgattgtgccattgcattccagcctggacaacagagcgagactccatctcaaaaaaaaaaaaaaaaaaaaaaaagaaaaggaaaggaaagcatttatctcttataaaccattcattggaattggaatggcttaaattagcctatttgatatgccaaggtaagcctgaggttgat

SEQ ID NO: 279624 - DNA, 201 bp, Homo sapiens
cactaccgcgcaggcccggctcgcccccgacgtcaggcacggggcgggacccttgcagctgtccgtccagtcccgttccccggaaagtgaggggcgggacmctcgcggctttctatccaatcctgttccccggcgaatgcggggcgggaccctagcggccttcagtccaattcccgcacctttgaggcccaagggggagcg

SEQ ID NO: 279625 - DNA, 201 bp, Homo sapiens
ggccaattaaactttctaggccagatgggaatggaggtgggcaggcactccttaaccttaaaaccccttttaagcaacataagagccaaaagccaaatggsacggttataaaatttgcttatttataaattctatacattaagctattttaatcttgacttgtagcaattagccatataaaatacaacattttgttcagct

SEQ ID NO: 279626 - DNA, 201 bp, Homo sapiens
gaatgacatgaaaagaagcccatacgtagccaaatacttaaattatttaatatcaaggcatagaaaattatattcagatataggcaaaattattaaatgartcttaatgttttgaatacaggcctgtccctatgtctctgtctgtaggtctcatgaaaatagtttactttgattgtccaggtctaaagacaaggctttgat

SEQ ID NO: 279627 - DNA, 201 bp, Homo sapiens
acttcttaaattatacttctactttattctagtccttcatgttctatatggaggcactaaaggtcaaggactctgtattacctatttctgtgtaataaatkaccccaaaacgtagtggcttaaaacacatacttttttatatcacacattttgtgggtcagtaattttatatcacatattttgtgggtcagtaattttata

SEQ ID NO: 279628 - DNA, 201 bp, Homo sapiens
ttgtccctccaccttatatgaggtaaaagcctggagtcactcttcctttttttttttttttttttgtttgagacagggtctcactctgttgcccaggttgygacctcagctcactgcaacctccacctcctgggcacaagtggtcttcctgcctcagcctcctgagtggctgggactataggcaggcactgccatacctgg

SEQ ID NO: 279629 - DNA, 201 bp, Homo sapiens
ttgtcatatgtggcttttattgttttgatgtatatttcttctttactgagtttgttgaaaattttttttatcatgaaggtatgtttaattttatcaaatgsttttcagcatctattgaaatgattatagggtttttgtcctttattctgttgatgtgatatatcatgcttattaatttgcatatgttgaaccatctgaatc

SEQ ID NO: 279630 - DNA, 201 bp, Homo sapiens
cacacagaaatgtacaactaaatattcatgtaacctgcacccaggtcaaaaattagaacatttctaatactccaaagattcccgtcatccctcttccagamtttcactccttcccaggggcagtcatttaggttgtttacagtttgcattattatttgaaaaaggctgctgtgaaaatccttgtgtaagtcttttggtgta

SEQ ID NO: 279631 - DNA, 201 bp, Homo sapiens
aggcacggggcgggacccttgcagctgtccgtccagtcccgttccccggaaagtgaggggcgggaccctcgcggctttctatccaatcctgttccccggcraatgcggggcgggaccctagcggccttcagtccaattcccgcacctttgaggcccaagggggagcgagccggtgctgctgcaggctgaggctgcggcaga

SEQ ID NO: 279632 - DNA, 201 bp, Homo sapiens
tatattatagttgatgtgaccatttctttatgatatgacattaaagttgtttccatttgttgctataacaaataattaacattttcaaacatgcccctttktgtatttggataaaatatctatggtttgatattagaagtgaaatgttcacatcatctgatgtatacatttaaaatttttgactgagtcaaattgtcatcc

SEQ ID NO: 279633 - DNA, 201 bp, Homo sapiens
gaattggaatggcttaaattagcctatttgatatgccaaggtaagcctgaggttgatgaaagaggtaattcactgcgtacccaacagtttttctggtttaraagggaggccgtagtttgtgcccattctgtaaacaaattagctctaatattataatagatcaagtttaatattaaaactagtaatttcattttgagagta

SEQ ID NO: 279634 - DNA, 201 bp, Homo sapiens
ctgtaactgtaaggcacaaggattagttaatagcacttgataaggacccttttaaggaactagagggagtcctttaacggattttttttcttttatttttmttttttttttgaaacatggtctcgttccgttgcccaggctggagtgcattggtgcaatctcagctcactgcaacctctgctccctgggtttaagcaattc

SEQ ID NO: 279635 - DNA, 201 bp, Homo sapiens
ttttctactgaaaattattttattgagttatcatagctagatattactgcaattaaattatctgatgagtaattaacattaaaataatccaaaagagaaayctgttaattcaaatggctgtcctccaagattccactggtctccttctccccttcccatttctgttcctaagtaaaattagaaaggtctgtagtagtttgg

SEQ ID NO: 279636 - DNA, 201 bp, Homo sapiens
aaagtagtcttcatgaaagtttgagggttttttatttttgtttttgtttgtttgttttgccttttcacattttgtttttcagtttcaaatgagtttctaayatgtacatttcttttacagttctggttgaactgtacaagaaaaacaaaatctctaagtaacctaaacatcaagttttatttcaatactagtagactaata

SEQ ID NO: 279637 - DNA, 201 bp, Homo sapiens
ctttttttttttttttttttgtttgagacagggtctcactctgttgcccaggttgcgacctcagctcactgcaacctccacctcctgggcacaagtggtcytcctgcctcagcctcctgagtggctgggactataggcaggcactgccatacctggctaattgtgtattttttgtagagatggagtttcaccatgatgccc

SEQ ID NO: 279638 - DNA, 201 bp, Homo sapiens
caaaacaataaatttctactagagaaaactatgtccagatgtacatgatttcacaggatttacgacagagccagtctaggaaatcatgaaagagattgtcratatggcaaaaaaaagtggagggtgaaggatttcaaggtatggatgttgggccagtttcagtggctcatgcctgtgtttccagcagtttggaaggccaag

SEQ ID NO: 279639 - DNA, 201 bp, Homo sapiens
ttttttgtagagatagggttttgccatgttggccaggctggtctcaaattcctggcctcaagtgatctgcctgcctccgcctcccaaagtgctgggattayaggtgtgagccactatgcccagccagtttttatatttctgatttagtattgcagtttttgtttggaaaaggaaaattgttaatgccttaataactgttat

SEQ ID NO: 279640 - DNA, 201 bp, Homo sapiens
aacccaggaggcggagcttgcagtgagctgagattacgccactgcactccagcctgggcgacagagcgagactccatctcaaaaaaaaaaaaaaaaaaaaagaaaagaaattcaagtacaactttataacgtaaacagttgattaacagataattttatgttatatgtattattttctgaattatttaagttagagtaaag

SEQ ID NO: 279641 - DNA, 201 bp, Homo sapiens
gatataaagaaatacctgagactgggtaatttattttcaaaaaagaagtttaattggctcacagttctgcaggctatacaggaagcatagtgctggtatckgcttctggaaagtcctcaggaaccttacaatcatggcagaaggtgaagcaggagcaggcacttcacatggtgacaacaagagcaagaaagagagagtgac

SEQ ID NO: 279642 - DNA, 201 bp, Homo sapiens
gcctggccctttaactgattcttttctagtatatataattatcagggtggaggtggtatgtgttaggccatttttgcattgatataaagaaatacctgagrctgggtaatttattttcaaaaaagaagtttaattggctcacagttctgcaggctatacaggaagcatagtgctggtatctgcttctggaaagtcctcagg

SEQ ID NO: 279643 - DNA, 201 bp, Homo sapiens
gcgtgaacccgggaggcagagcttgcagtgagccacgattgtgccattgcattccagcctggacaacagagcgagactccatctcaaaaaaaaaaaaaaaraaaaaaaagaaaaggaaaggaaagcatttatctcttataaaccattcattggaattggaatggcttaaattagcctatttgatatgccaaggtaagcctg

SEQ ID NO: 279644 - DNA, 201 bp, Homo sapiens
tttcaattgtagacgatccataggctctcatttccttcagtttatagctctaggaaactacatctttcagtactccaactcagctgttcctttggccacaytgtgatttacagtttaatgatgctactgctctcttcatggctccattcctacttccccgtcttcacttctttctggctcttcaccatcattactcccagg

SEQ ID NO: 279645 - DNA, 201 bp, Homo sapiens
gtgcctggatttggtgggggagtagtgtcatcaagcatctcgcctgctggggtctcaggggtaccctcaaggttgggccgcggggctgctccgttgtagtrcttagatttctctcacttgatggcctcttgagtgcagagttgctcttgggttggtgggaagagcctccgagctctcattgccctctgctcctgcttctac

SEQ ID NO: 279646 - DNA, 201 bp, Homo sapiens
accaccacaccaggctaatttttgtattttttgtagaaatggagctttgccatgttgcccaggctggtcttgaactcctgccctgaagcaatccacctgcyttggcctcccaacgtgctggtgttacagacatgagccactgggcccggccaaaagtacatttttatattcataactttcttcacatctctctctccctac

SEQ ID NO: 279647 - DNA, 201 bp, Homo sapiens
tcacattatgatcttctagaacttgggtagctccactctggttaaagattccatttcttggcacaacagtaaaagacatcagataggcccccaagcttgcagggtaagcatccctggggtattcaaataacttgggtagcaatgaagagctgcagaagagcaaggagacccgagatgatgtagtgtgctgcggcatacctg

SEQ ID NO: 279648 - DNA, 201 bp, Homo sapiens
gcgggggaaagttaagtcgtgcagaaccgcaaaggtgcctggatttggtgggggagtagtgtcatcaagcatctcgcctgctggggtctcaggggtacccycaaggttgggccgcggggctgctccgttgtagtgcttagatttctctcacttgatggcctcttgagtgcagagttgctcttgggttggtgggaagagcct

SEQ ID NO: 279649 - DNA, 201 bp, Homo sapiens
tgtatcttttgtagagatggggtttcaccatgttgcccaggctgccaacattttagaaacatgtttcccatattataaacatttcttaattggaaatgacycagatatccagtgagtcatgccaggaaagccatagaccaaaattttgggtaaagtagtcttcatgaaagtttgagggttttttatttttgtttttgtttg

SEQ ID NO: 279650 - DNA, 201 bp, Homo sapiens
gcggcgaggcgcgggcggtgaggacggacaggtccgttgaagcagcattccctccctcccctaatccttcaactcgggggcgggggaaagttaagtcgtgbagaaccgcaaaggtgcctggatttggtgggggagtagtgtcatcaagcatctcgcctgctggggtctcaggggtaccctcaaggttgggccgcggggctg

SEQ ID NO: 279651 - DNA, 201 bp, Homo sapiens
caatcacattatgatcttctagaacttgggtagctccactctggttaaagattccatttcttggcacaacagtaaaagacatcagataggcccccaagcttgcagggtaagcatccctggggtattcaaataacttgggtagcaatgaagagctgcagaagagcaaggagacccgagatgatgtagtgtgctgcggcatac

SEQ ID NO: 279652 - DNA, 201 bp, Homo sapiens
gcttttgtctttgatgtaatacatgaaggatgtttggtcaccccgccagagcttctcaggttttcagactactttcttgagtttcattaggtcttatggtrttgcttgaattaaaatatacatgtttagaattgcctttcaaggtgatagtaagctgaaaaataagaattttatgcatgcttttttaaaaaaaaactattt

SEQ ID NO: 279653 - DNA, 201 bp, Homo sapiens
atcacattatgatcttctagaacttgggtagctccactctggttaaagattccatttcttggcacaacagtaaaagacatcagataggcccccaagcttgcagggtaagcatccctggggtattcaaataacttgggtagcaatgaagagctgcagaagagcaaggagacccgagatgatgtagtgtgctgcggcatacct

SEQ ID NO: 279654 - DNA, 201 bp, Homo sapiens
ttaagatttgcataagttagtaataatagaggtgagttggtggtacttggtctaaataccttaatacgtatttttcctttctagtgaaaccatttgcaaakcaagaagaatataagaaaactgaagaaatagttcaaaaatttcaaagtgggattggagaaaaattgcaccagaaattgcttgaaagagcaaaaggaaaaa

SEQ ID NO: 279655 - DNA, 201 bp, Homo sapiens
tacagcttcatcaattggcttcctctttttgtatattaaatggtttttagaaacaatataagcatctgtaggcctagtaaaatgttcttttattgtgccayacagcggaggaggtggaaattttgttctctcaacaagtctggttggctatttacgagtccagggagtggtagttcccatggtacacaatggttatggatt

SEQ ID NO: 279656 - DNA, 201 bp, Homo sapiens
aggaaacaacagatgctggagaggatgtggagaaataggaatgcttttacactgttggtgggagtgtaaattagttcaaccattgcagaagacagtgtggygattcctcaaggatctagaaccagaaataccatttgatccagcgatcccattgctagatatatacccaaaggattataaatctttctactataaagatac

SEQ ID NO: 279657 - DNA, 201 bp, Homo sapiens
gccctactaggtgcttccaaatttaaacaactttttttccaaaaaataaaatatagcagttactgaactgtagggaatcttctatcttatcatatcctcargaggtgaggcatttgaagactctatgctttattatctgttaagaatggacacaaagtgaaaataaaatattgggtcaagttttaagttgacataaagtat

SEQ ID NO: 279658 - DNA, 201 bp, Homo sapiens
acaccctcatgaccccaagccccaccagaagccctactaggtgcttccaaatttaaacaactttttttccaaaaaataaaatatagcagttactgaactgyagggaatcttctatcttatcatatcctcaagaggtgaggcatttgaagactctatgctttattatctgttaagaatggacacaaagtgaaaataaaatat

SEQ ID NO: 279659 - DNA, 201 bp, Homo sapiens
aacagctatgacaagacatttttatcatggccgtacagagactatgcgatcatgcacagttgaagcagtgaggtggtgccagtccatgcaggatccttctstcaatgtgagtattggaaaggaaaaaaactcacaagatttgtttaattgttctaaaggaaccgtggtctttgagtaactaacttctttgcttcagttttc

SEQ ID NO: 279660 - DNA, 201 bp, Homo sapiens
ttggattcaagatttgtagttttgggaatagctcaggactgcaaattacagacttaggagtcatcactaccaggcatagaaagcaactgtaaatccataasagtagccaaggttacttttgggacatatgtaaagatgatcagtgctgatccttatcacaggttcaatactgtattttccaatcagaggaggaggagccag

SEQ ID NO: 279661 - DNA, 201 bp, Homo sapiens
tcttcacttctttctggctcttcaccatcattactcccaggcatacacattcaaatctttgctacctctccccagtactgatgtggtaaaacctaaacatygtttaaaatttaatttgtcttttctctacatatcaaagatacctactctagcaatttacttggccagagaaaaccataaaacttacttaatgatctcagt

SEQ ID NO: 279662 - DNA, 201 bp, Homo sapiens
tgcagtcctttgcccatctccctggctccctcccgacttgctaatcccattctctcaagcaaggatttccaaatcttttgtttcttttccgccactttcaygttgtcaactcttaattttattgttctgctctgctatttaatacagtactgtgttttacatatctgagtcttaagatttgcataagttagtaataataga

SEQ ID NO: 279663 - DNA, 201 bp, Homo sapiens
gtgatgaaaaatgcagtcctttgcccatctccctggctccctcccgacttgctaatcccattctctcaagcaaggatttccaaatcttttgtttcttttcygccactttcatgttgtcaactcttaattttattgttctgctctgctatttaatacagtactgtgttttacatatctgagtcttaagatttgcataagtta

SEQ ID NO: 279664 - DNA, 201 bp, Homo sapiens
tactttaggacaaaaatttaccatacaagatactttttcatacaaaagtattcccttctgtataacctttcttaccaaaaatatgtattttttttttttttgagatagggcctcgctctcttgcccaggctagagtgcagtggcaaattcacggctcattgcagccttgacagcccaggctcaagtgatcctcccacctca

SEQ ID NO: 279665 - DNA, 201 bp, Homo sapiens
aaaaggcaaagaaaaattctgcagtgtgactacttctgcttatgggaagcccatttagataacctggacatcaaacctgatgaaaaaagtgcttggatttractggacctaggaagagtatattcaaggttatgattatagcataggattacctcactcttaggaacagcattagttttttgattacattgacaatttaga

SEQ ID NO: 279666 - DNA, 201 bp, Homo sapiens
ataccaagcatactgaaaagaaatgctttccaagtgctggaaagctcatgaaactatgctgttatggggtcataagaccgggaatccatagccaaaatacragtttctagagaactcatgtcctgggatatattatggcagtaatcaggaacataatattcagttttgttcaagacacaagttcctcccttggctgcagtt

SEQ ID NO: 279667 - DNA, 201 bp, Homo sapiens
cttcagggagtaagggagctccttgcttgcatgatatcccaattgtttctagaaagttaatatactaggttagtaaatagaaaggtgaaacagctgctaarctattttatcttgcaaccctatacaataaacacaacagaaataaaagcacaataactaataacaatgaatattataataccaagcatactgaaaagaaat

SEQ ID NO: 279668 - DNA, 201 bp, Homo sapiens
cattatgtatgtgttctatgcagagcaatgcatatggatatatttatagagttcaagattcacctagtaactaggtaactattttcctaaaatgacacatratctttggaacactatttaggctgtggatattaaaatggcagttactaccattttgaccattttcataaaaaatgaacaacttttcttgcttctcctctg

SEQ ID NO: 279669 - DNA, 201 bp, Homo sapiens
agtagttacacattcatgtattatgaagaacattaagctgatgttctcaatttcttttagctggaagagtggtggctgaatgttgcctatctggatgttcrtataccatcacaattgaatgtcaactttgcgggtcctgcagctcattttgaacactactggcctccaaaggaagggactcaattagaaagaggaagtata

SEQ ID NO: 279670 - DNA, 201 bp, Homo sapiens
ttttgtttggcctcatatttaggtagactgcccaatgtgattgttgtaccaacagtctcatatcttcatagctttcttcatagactcccaaaggaaatagycagcttctttgtttccaatggttacagcaaaagtcctggaataatcctcatcagttgtgattggcctgtgtgattcatgtccccatcctggggaatcagg

SEQ ID NO: 279671 - DNA, 201 bp, Homo sapiens
atttctcttgggtatattttaggggtagaattgccaggtcatatggtaattctatgtttaactattgagaaactaccagagagttttccaaaatggcgcaktatattagggttccagtttctccacatcttcaccaacacttattgtctgccttttttattgtagcgatgctagtaagggtaaagtgggatctcgttgtag

SEQ ID NO: 279672 - DNA, 201 bp, Homo sapiens
tgctgtttgtcttaaatgaaacaatatatttgataatatctgaaaattctttgtaaaattgtaaagtaccacacagttgtgagatactgttagaaaatggrtttgtcagcgacctgtgagtcttgtcatgtgtgctgttgttggcagataaactgctcaggcatcttatactgacctccctcaagagcctttcctgatgta

SEQ ID NO: 279673 - DNA, 201 bp, Homo sapiens
tagatataagtctttttacagatatataatttgcaaattatatctcctaggcttggcttttcactttcttgatggcctcttttgatgcacaatatttttcrttttgacaaaatccaattttatctctttttttgttgttacatgtgcttttggaattgtatctaagaaaccattgcctaatctgaggacatgaagatttac

SEQ ID NO: 279674 - DNA, 201 bp, Homo sapiens
tttgttcttcaaaatagatgatgggaaaattcactaactgcaatttctttctctaaatacacctggcaaacctgaaacagccccgtaacacccagcctatytttcccacatttcttaaactgagaattatcacattgggacattcatatgtataaaaaacacaaaatggttatgctttctaatattcactaagtggcctaa

SEQ ID NO: 279675 - DNA, 201 bp, Homo sapiens
gataatcactggagaacaaaaatcgaggacagtaaattaaagagtgaatggaaagcgatgaagcagaagccagactgtgtgggttatagaatatttaaaamaatatatgattctgtaatgcagatatttttaatacaaatctttgtgctttgaaatataaaaaattagatgtgtagctgaaaaacaggtgcatagttagcc

SEQ ID NO: 279676 - DNA, 201 bp, Homo sapiens
tccttacctaaagaagttcatgcccatcccaaatgctttcagataggttgccatccccatctgcttttccaccctgttcttacaattccagaacatcttcrtgttgcatatatacacttgctttgacttctagtaaaaatagcaattaatttatctagattgtttatatgttattttatacaccctcatgaccccaagccc

SEQ ID NO: 279677 - DNA, 201 bp, Homo sapiens
gtagcaaaatgttgagaagcttaatttacttatttggggatgaacacttcagttgtggctggtttttaaattttataatgactttttgatcaaaatccttyttttaatagagaaaaagtgcctgttcataaagttggaaatactcctctagatatgaatcaattccgaatgctattttctacctgcaaggttccaggaatt

SEQ ID NO: 279678 - DNA, 201 bp, Homo sapiens
  misc_feature (1)...(201): n = A,T,C or G
tatggtgaacatcagttattatgtggatgagaaaatttttcagaatgaaggaagatggaaggtatgtttgaataaatatttcatcttttttctcctaatanttctatagataaaatatttttaagtcttccctattttcagggttcagagaaggtacgagatataccacttccagaagagctcattttcattgtggatgag

SEQ ID NO: 279679 - DNA, 201 bp, Homo sapiens
agtatagctttcccatatctggcaaaggggacaaagtggattagtccaaagcatatactggcgtacatcttgcaaggctactttaatttttattatacccyagggactctcaccccattgggctgggactctaacccaaatattataccctagagactctaaccccattgggctagaaatattatccttgataggatgcca

SEQ ID NO: 279680 - DNA, 201 bp, Homo sapiens
tcaatcacattatgatcttctagaacttgggtagctccactctggttaaagattccatttcttggcacaacagtaaaagacatcagataggcccccaagcttgcagggtaagcatccctggggtattcaaataacttgggtagcaatgaagagctgcagaagagcaaggagacccgagatgatgtagtgtgctgcggcata

SEQ ID NO: 279681 - DNA, 201 bp, Homo sapiens
cacagtttttccttgttactttatcacagtatccacttgataacttttgacgtgtctattctcatctgaaagaggattggtcatctttggcattcagatcrcttggttttcttgcaacgtcagttttctgatgggttcatgaaaagttgtgattttataaattatccagcctttactcatttttagaataggagcgacatt

SEQ ID NO: 279682 - DNA, 201 bp, Homo sapiens
gtcaatcacattatgatcttctagaacttgggtagctccactctggttaaagattccatttcttggcacaacagtaaaagacatcagataggcccccaagcttgcagggtaagcatccctggggtattcaaataacttgggtagcaatgaagagctgcagaagagcaaggagacccgagatgatgtagtgtgctgcggcat

SEQ ID NO: 279683 - DNA, 201 bp, Homo sapiens
acatatttatcaggtacatgtgatttttttgatacatgcataaaatgtgtaatggtcaaatcacggtaattgggatgtccactgcctcaaccatttattaygtcttcgtgtggggaatgttccaagtcttctcttcttggtattttgaaatatacaacaaattattgttaactatagtcaacctactgtgctatcgaacac

SEQ ID NO: 279684 - DNA, 201 bp, Homo sapiens
gtagaccatgctgaaggaaaacattttgtccaggtgactagcttgaaaaatcagaaacactaaaatagacatgtcacataggtggcatagaaatattttcrtagtacaatggagaaagggaatcattaaaaatcagagtggagaatggttatgtatattgtatatttcagttagataaattgaggaagctagtataataat

SEQ ID NO: 279685 - DNA, 201 bp, Homo sapiens
tatcaggtacatgtgatttttttgatacatgcataaaatgtgtaatggtcaaatcacggtaattgggatgtccactgcctcaaccatttattatgtcttcrtgtggggaatgttccaagtcttctcttcttggtattttgaaatatacaacaaattattgttaactatagtcaacctactgtgctatcgaacactagaagt

SEQ ID NO: 279686 - DNA, 201 bp, Homo sapiens
actaagtcaatcacattatgatcttctagaacttgggtagctccactctggttaaagattccatttcttggcacaacagtaaaagacatcagataggcccccaagcttgcagggtaagcatccctggggtattcaaataacttgggtagcaatgaagagctgcagaagagcaaggagacccgagatgatgtagtgtgctgc

SEQ ID NO: 279687 - DNA, 201 bp, Homo sapiens
tttaaagtataataaaaaaaattctgcaaagccttcaaatagatgttttttaaatccagtttttgttgttgttcctagcattaagactggcttgccagaarctagctcatcatagctggcattggaaatttcacgcggtattttttttttatatagaagatatgttcaaatcaggttccaaataaattttacacattgcat

SEQ ID NO: 279688 - DNA, 201 bp, Homo sapiens
cataataaaatgatgaaagattgttcagctggaaaaggtacttaagttaaaatttttctgacttaaaaatctctcatggtgaaaaatttttttctaacctsagatttggggtttcattgcaggatttgatcgtcaccttttaggtctcttactcatagcaaaagaggaaggtcttcctgttccagaactctttacggaccc

SEQ ID NO: 279689 - DNA, 201 bp, Homo sapiens
aatatgcatgacatatttcagtttctaatacaactgacccttgaacaacatgggtttgaactgcatgggcacacttacatgcagattttaaataaatgagwaaattttttggagattgagacaatttgaaaaaactcaaaactgtgtagtgtagaaatattcaaaaactaaagtattcatgaatgcataaaatatatacag

SEQ ID NO: 279690 - DNA, 201 bp, Homo sapiens
tagattgtttatatgttattttatacaccctcatgaccccaagccccaccagaagccctactaggtgcttccaaatttaaacaactttttttccaaaaaakaaaatatagcagttactgaactgtagggaatcttctatcttatcatatcctcaagaggtgaggcatttgaagactctatgctttattatctgttaagaat

SEQ ID NO: 279691 - DNA, 201 bp, Homo sapiens
gctttgacttctagtaaaaatagcaattaatttatctagattgtttatatgttattttatacaccctcatgaccccaagccccaccagaagccctactagrtgcttccaaatttaaacaactttttttccaaaaaataaaatatagcagttactgaactgtagggaatcttctatcttatcatatcctcaagaggtgaggc

SEQ ID NO: 279692 - DNA, 201 bp, Homo sapiens
ggtaaggctaaccaaaatgaaagggttttaaaattttatttgtgggtgtgagtgatttctaactatagcagaaaataaaagcaaaaataattaagctctaygtcagtgtaacccagtggaaccccgaatgctggaagaatgccataaaatgaattgtccctaccatcacttttagggacctcaagccatccttccagggct

SEQ ID NO: 279693 - DNA, 201 bp, Homo sapiens
tcttcctattagccaaatgtcttgctcagatagattttagataaatgtctccaaggaaagcacgcgttttggggagggttgctatcctgtctaccatggcragtcctggggaacctgcacaggtgcttacactctggctctgctgctgctgtgactgacaatgtcacttgtgtctgggccgagagtctcctgtctttggct

SEQ ID NO: 279694 - DNA, 201 bp, Homo sapiens
cacccttggccttcagatctccagagaattcttgttcttcctattagccaaatgtcttgctcagatagattttagataaatgtctccaaggaaagcacgcrttttggggagggttgctatcctgtctaccatggcgagtcctggggaacctgcacaggtgcttacactctggctctgctgctgctgtgactgacaatgtca

SEQ ID NO: 279695 - DNA, 201 bp, Homo sapiens
gatttcatcaaaaggagcacccttggccttcagatctccagagaattcttgttcttcctattagccaaatgtcttgctcagatagattttagataaatgtstccaaggaaagcacgcgttttggggagggttgctatcctgtctaccatggcgagtcctggggaacctgcacaggtgcttacactctggctctgctgctgc

SEQ ID NO: 279696 - DNA, 201 bp, Homo sapiens
tcacaaccatattaggagtggcagtgaagtccataacagactcgtaggctccttaaaaaaactctccctccacagcccccaggacttcctggtcactgccygctctgagatcagggaagccgtggggcctctccctgccagcttccatccatgccccaaggatgggctactcacccctaattcctgtccctcccctgcaaa

SEQ ID NO: 279697 - DNA, 201 bp, Homo sapiens
gtttgttaagcccacagcaggaatgcataacctggccatgtgtgaggatctgatcttaggactgcggagccccggctggaagaggcagcctgtgctgaacrcagagatgggtcagggccacacaggaggctgctgtccacccctcctgccctgaagcctgggggggggtctgtgccttcccgtggaagtgggctcagaggt

SEQ ID NO: 279698 - DNA, 201 bp, Homo sapiens
tcagggccacacaggaggctgctgtccacccctcctgccctgaagcctgggggggggtctgtgccttcccgtggaagtgggctcagaggtggagatggcaygtgtcctgtcctcagagctcagtgggagacatagatgtagacaaaggatgcacaggagatgatgcctgggagtatggggacactgagatggctggtggga

SEQ ID NO: 279699 - DNA, 201 bp, Homo sapiens
tgaaaagcaaaagtgagttgggccccagggccccctgccccaccgggcataaatatacccacaggcatgcacacactcacaggcacaggtgaccgtgaccrcccgtacacctgtgtgcacgcccttgtgcacacacatgcacacccacccacacccatacacacacgtgcacacaggcacacgcacctatacatgctcatg

SEQ ID NO: 279700 - DNA, 201 bp, Homo sapiens
ctgtggccctaggcactgtggctatggtgccgcctgggtaggctggccctggggaaactggacttccacctgcctcaggggaggaattggcctttcgtccyaagaaaagtctcctcagaagaacccgagtgggagtgaaaagcaaaagtgagttgggccccagggccccctgccccaccgggcataaatatacccacaggc

SEQ ID NO: 279701 - DNA, 201 bp, Homo sapiens
agaaacctgctcctgtgactatgtcgctgggaacagttttgccataggaatgccatctggccctcaaaactccttctgagatatagaagaaaatgaacatrtaatgagctatcattaaaatgatttttattcatgtatcagcaatcaattcaataacattgtcctccaaatttctaaacaaaatattggaaaatacctcat

SEQ ID NO: 279702 - DNA, 201 bp, Homo sapiens
gcagggggtaggtgcactgttgagtcagaagccggagcggagatggcttggactacacggggaggagcagggtcttcagaaggacagggtggggtctaacstgcaggtacatgttgagggtggggatcccgggggacagtggcgttggagatgtgggggcggggctgctctctgaatgggtttcatacttctgattttatt

SEQ ID NO: 279703 - DNA, 201 bp, Homo sapiens
tgggccaaggggccatgcaccctggttacccgagatccttcctatttatgccttctgtcccaggaaattattaataactaatagtgctcctgtctcctcaraagtattccactttggttaggaattatacggttgccctacatactatagatgagacagttcagcagcaaccctgtgattatttttacctttgcagatgga

SEQ ID NO: 279704 - DNA, 201 bp, Homo sapiens
ctctgaatgggtttcatacttctgattttattaaagaaatataagacattgaattctgcattcctaagcacaattatcttaagaatcagcgagtcatactktccatatgttttcaacacctctagcgtgtcttaaacagcgttaacaagtctgggactctccgtggcccgaagcactttcaccagaggggtccgtgatgga

SEQ ID NO: 279705 - DNA, 201 bp, Homo sapiens
ggcccagactcaggcaggacaacctggcttgcccaggccctggaaggttcttctaaccaggcctctttctgtgccccagactccgggaggctccctcgggygacttggatctccatgtcgctggctgctctgctgatcggaggcttcgcaggtctcacctcgacggtgatttgcaggtggtaagtccttcactttttgact

SEQ ID NO: 279706 - DNA, 201 bp, Homo sapiens
ttcaggtcctcagcgcctgcacctgtgtggccccgggtgctgggggtctgggcagacgccgcaggagaggctggcagcacacagctgtgggcagctggtcytgagtgcctgccctgggggttctccatgcactgtgaccttactcactgtctccttctctggaggttttggtgggagaacagccacgtcttcacggatgca

SEQ ID NO: 279707 - DNA, 201 bp, Homo sapiens
ggctccaccattcaactcttacgtaagcctggtcaggttgtttctcccacccacagcttctttaacctagaacagtgtttttataacaatgaagcaactasgaagcacgtagcacttagaatgggagctagcactgatttttcctagatccaaccacacgagcaagcaggcacctaactaaacaaattgtgacacaatcgt

SEQ ID NO: 279708 - DNA, 201 bp, Homo sapiens
gtctcgggtcatctgtgacaacactggcctcaccagggtgcccatggatgccttccaagtcggcaaattccccgaagactttgagtcttgtgacagcatcmctggcatgaacctggaggcctggagggaaacctttcctcaaggtgaagttcggtctcctctcacaccacgttacagcacgtgcatctcatcaaacaaagc

SEQ ID NO: 279709 - DNA, 201 bp, Homo sapiens
agaggcgtgagctggagaagcactccctgtctcgggtcatctgtgacaacactggcctcaccagggtgcccatggatgccttccaagtcggcaaattcccygaagactttgagtcttgtgacagcatcactggcatgaacctggaggcctggagggaaacctttcctcaaggtgaagttcggtctcctctcacaccacgtt

SEQ ID NO: 279710 - DNA, 201 bp, Homo sapiens
aaagtggatttcatcaaaaggagcacccttggccttcagatctccagagaattcttgttcttcctattagccaaatgtcttgctcagatagattttagatwaatgtctccaaggaaagcacgcgttttggggagggttgctatcctgtctaccatggcgagtcctggggaacctgcacaggtgcttacactctggctctgc

SEQ ID NO: 279711 - DNA, 201 bp, Homo sapiens
ttccaggctctcctgaactgagctccccacaggctgggctctgcagaacatggacatgacgggaaagtgaccagccagcaagggagagtcctctgagctayacggcagttgcagggacaggaagggctggcatgggcagcatggcctggggacctatccgggggatccactgggtgataccctccacgtcactgtcaagag

SEQ ID NO: 279712 - DNA, 201 bp, Homo sapiens
tactttattttaattcaaattcatttattaatggttcctttgacaacccgctcacttctgaaatcagaaaaccagcaacttcctcagttcccacaagttcrcctggacaatcacacgggcaggaacaggcgcgacaccctggtggcttcatggtgctttgattaaaggatgttttatgccacaggatttcaaatgatctct

SEQ ID NO: 279713 - DNA, 201 bp, Homo sapiens
agagcctgaaagtgtcacctattaataccttgcttatgttctgaagctgaggtcttaaagtaacatgcagccctgggctgggctgcaaactgtctgcattmggaatgacccatggctggggcccctgggaaatagcagcagatgaacagagcagactgtggcttgtggggtggttgaagcacctttccaggctctcctgaa

SEQ ID NO: 279714 - DNA, 201 bp, Homo sapiens
attgatttaataagcacggatctatgacagatgttggtaattattatgcatagagataaatatttattggaattagtttattgatgagatgggtggagttycagttagttccttcatcagttggctgaacatcacctgtgggccaaggggccatgcaccctggttacccgagatccttcctatttatgccttctgtcccag

SEQ ID NO: 279715 - DNA, 201 bp, Homo sapiens
tactgtgggtacacatatatatagcatgtatgatagtgtgtgggcagatgtgtacatagcatgtatgatactgtgggtacatatatatatagcatgcatgwtagtgtgtgggcagatgtgtacatagcatgtatgatactgtgggtacacatatatatagcatgtatgatagtgtgtgggcagatgtgtacatagcatgta

SEQ ID NO: 279716 - DNA, 201 bp, Homo sapiens
atgatactgtgggtacacatatatatagcatgtatgatagtgtgtgggcagatgtgtacatagcatgtatgatactgtgggtacatatatatatagcatgmatgatagtgtgtgggcagatgtgtacatagcatgtatgatactgtgggtacacatatatatagcatgtatgatagtgtgtgggcagatgtgtacatagca

SEQ ID NO: 279717 - DNA, 201 bp, Homo sapiens
tcactggaaattccctgggtacacgtatatatagcatgtatgatagtgtgggtacacatatatatagcatgtatgatactgtgggtacacatatatatagyatgtatgatagtgtgtgggcagatgtgtacatagcatgtatgatactgtgggtacatatatatatagcatgcatgatagtgtgtgggcagatgtgtacat

SEQ ID NO: 279718 - DNA, 201 bp, Homo sapiens
atggtataaaacaaaatgtgaaagtctgtttctttgtcctattcccaggggtagcagttgtgaatatctggtgcatctcactggaaattccctgggtacaygtatatatagcatgtatgatagtgtgggtacacatatatatagcatgtatgatactgtgggtacacatatatatagcatgtatgatagtgtgtgggcaga

SEQ ID NO: 279719 - DNA, 201 bp, Homo sapiens
tgatccagtcactgctgcaggaggcaccttgttggaagggaatggagctggctccttcttgtttgtatgatccagtcattgctgcgggaggcaccatgttrgaagggaatggggcaggctccttcttgtttgtatgatccagtcactgctgcgggaggcaccatgttggaagggaatggggcaggctccttcttgtttata

SEQ ID NO: 279720 - DNA, 201 bp, Homo sapiens
ttgtatgatccagtcattgctgcaggaggtaccatgttggaagggaacggggcaggctcgttcttgtttgtatgatccagtcactgctgcaggaggcaccwtgttggaagggaatggagctggctccttcttgtttgtatgatccagtcattgctgcgggaggcaccatgttggaagggaatggggcaggctccttcttgt

SEQ ID NO: 279721 - DNA, 201 bp, Homo sapiens
gatatagttggctgtgtccccacccaaatctcatttgaattcccacatgttgtgggagggaccaggtgggaggtaattgaatcatgggggcaggtctttcytgtgatgttctcgtgatagtgaataagtctcacgagatttgacagctttataaggggaagttcccctgcacaagctctctttctgcctgccgccatccat

SEQ ID NO: 279722 - DNA, 201 bp, Homo sapiens
gggaatccctgagcaaagccagtaggcctcacacatgatctaaatcttgcttgatttgcaaacagaagagaaacttaactggagattttttttttttttttgcaaatgcctggattaaagaaaaatgaaatataagcccgaccattccgaaactgccaactaacctgtttaactaggaaccttccagcaggacagaccaaa

SEQ ID NO: 279723 - DNA, 201 bp, Homo sapiens
ggaggcaaactctgaagaggatgcagagctgtgtcagttgccctgtagaggcaagaactaagtgcaggctgggcaataacaggaatgcacttagatgtcayggactcagcattcttgctgtctccagctcctttatgaacaaacctgcaaaaagagctctggcgtccgagctggaacattctagcctggcaaactgccggg

SEQ ID NO: 279724 - DNA, 201 bp, Homo sapiens
ggacagcaggagtcaggctgaggcagcgcagcttctcacgggggctcgggggaacccttgccagatgtggaagcaccagggctacggggccagccaaggcrggtgactctaggagcacaagagtcagacacacacttgttcctcctgagggtgaaccagggagccacctgctaagaaatggactcaatggcacctgacagc

SEQ ID NO: 279725 - DNA, 201 bp, Homo sapiens
tccctgaagggccaaattacgtgcttaggaaatgcattctggcacatggaagaaacatattacaagtgtgtaaataatattggttatttttaaacaatccrcttgccttcctaaactggtaagctaaaagagaagattcatattctagaattattcctattatgcttcatttggatgcagtttattgaccaaaatattccc

SEQ ID NO: 279726 - DNA, 201 bp, Homo sapiens
ctccacgtcagggggatgatgaattcagccatgtgcaacatcgtgggcatccttaaagcaaattgcagtggagggtgaattacagtgcttggggaatcccygagcaaagccagtaggcctcacacatgatctaaatcttgcttgatttgcaaacagaagagaaacttaactggagattttttttttttttttgcaaatgcc

SEQ ID NO: 279727 - DNA, 201 bp, Homo sapiens
ataattatataagttcttgagatacaaaatatcaaaagacagcagttaatttattccaaatttctattattccagccagaaaaataccttactgttcataytggctgcaaacaaattattatttattttctaaaaattgaatcaaagggaaaagaaagagaaacactatttctcataaactcacgcacactttaatatgtc

SEQ ID NO: 279728 - DNA, 201 bp, Homo sapiens
ggggaatccctgagcaaagccagtaggcctcacacatgatctaaatcttgcttgatttgcaaacagaagagaaacttaactggagattttttttttttttttgcaaatgcctggattaaagaaaaatgaaatataagcccgaccattccgaaactgccaactaacctgtttaactaggaaccttccagcaggacagaccaa

SEQ ID NO: 279729 - DNA, 201 bp, Homo sapiens
tggggaatccctgagcaaagccagtaggcctcacacatgatctaaatcttgcttgatttgcaaacagaagagaaacttaactggagattttttttttttttttgcaaatgcctggattaaagaaaaatgaaatataagcccgaccattccgaaactgccaactaacctgtttaactaggaaccttccagcaggacagacca

SEQ ID NO: 279730 - DNA, 201 bp, Homo sapiens
atttaaatagcttttccagccacagcaagggcagtgccagcaagtcccctgggcccctaattagtctgactgacaccaggggcaaggccaggcgttctgtkcatctgtggtcgcagggacctgtgtgctcagcacggcttcttcctgaaggaccctgcctgcggattgcagatcccactctgtgagtaggaacctttgcca

SEQ ID NO: 279731 - DNA, 201 bp, Homo sapiens
ctacggaggtcgacccaggggccaccccccacccacccccaccctgccccacgtccctcctccacgtcagggggatgatgaattcagccatgtgcaacatygtgggcatccttaaagcaaattgcagtggagggtgaattacagtgcttggggaatccctgagcaaagccagtaggcctcacacatgatctaaatcttgct

SEQ ID NO: 279732 - DNA, 201 bp, Homo sapiens
ccaaaaatttaaataggttattactgagatatattggcaactggagctgccaacataaaaactctgtttttgaataatgggggcctgggaggcctgctcarcgctgcagtttctgtaacctcctgacatggacggcgactctggtctcgcagaccccaggcctgtgagggtcgctcactgcggtagaggctgcgtggagtc

SEQ ID NO: 279733 - DNA, 201 bp, Homo sapiens
tttccttttctgcctgctgccttctgtctgtcagccatgacccagacctcaggtgcattctgatggctctccctacggaggtcgacccaggggccaccccscacccacccccaccctgccccacgtccctcctccacgtcagggggatgatgaattcagccatgtgcaacatcgtgggcatccttaaagcaaattgcagtg

SEQ ID NO: 279734 - DNA, 201 bp, Homo sapiens
gacccatctcattttatgttttctgcaacatacgaggtggcaaccatgaggggtgtgtgtgtgtgtatgtgtgtgtgtgtattgtaaaccaaaaataaaawtctaagtcttgcgatcatctgaattgacccctcctgttggcaagggtgttccaaagctaacctgaaaaactaatctgaccgtgatggggagagtgaggtc

SEQ ID NO: 279735 - DNA, 201 bp, Homo sapiens
ccagctgtggacagatacaccagcacagagttcccctacaaaagccaacaactttacctaggcaattttcctaggcgggcttttagtaagaggacctggtrttcccagaagccgtgagaagccctgggtagagctggaggctgtgtcactgaagacggctcggtgctcccagcagcagggacaaggcaattgggctcacgc

SEQ ID NO: 279736 - DNA, 201 bp, Homo sapiens
aaaaatttaaataggttattactgagatatattggcaactggagctgccaacataaaaactctgtttttgaataatgggggcctgggaggcctgctcagcrctgcagtttctgtaacctcctgacatggacggcgactctggtctcgcagaccccaggcctgtgagggtcgctcactgcggtagaggctgcgtggagtcag

SEQ ID NO: 279737 - DNA, 201 bp, Homo sapiens
tgcaggcagcaaaggtgcttagcatggaagaactcctcaaagggactcgagctcctcactgctgggtgtgctgaggtcagaaggaagatgccccccccgaragagggatcagcgggacccaggcagagccctggcttggacaggccctgtcctgagacagagagcaggggctttgcgacaatgaacaggaatcggggtcct

SEQ ID NO: 279738 - DNA, 201 bp, Homo sapiens
gaaaatgttattgttttacatgtcacatttagatctgtgacccatctcattttatgttttctgcaacatacgaggtggcaaccatgaggggtgtgtgtgtrtgtatgtgtgtgtgtgtattgtaaaccaaaaataaaattctaagtcttgcgatcatctgaattgacccctcctgttggcaagggtgttccaaagctaacc

SEQ ID NO: 279739 - DNA, 201 bp, Homo sapiens
atcagtggatgttctgtttagcccaaagagcgcaggtggtgggactcaggtctgactcagaccagctgtggacagatacaccagcacagagttcccctacraaagccaacaactttacctaggcaattttcctaggcgggcttttagtaagaggacctggtattcccagaagccgtgagaagccctgggtagagctggagg

SEQ ID NO: 279740 - DNA, 201 bp, Homo sapiens
ataaagttccaaaccctgagaacaagtttcactggagtgaatactgcaggggcatttgcctggacattttaccccatggacaccgctggccccgggagcargtgacacctcgctgggcaggtccctgggcctctgcacacagtcccggggcccctggagcaggtgacacctcgccgggcaggtccctgggcctctggacac

SEQ ID NO: 279741 - DNA, 201 bp, Homo sapiens
ttgaaaatttagaacacgaggaacctaaaaaggtttcccattacttcatcaccaagacagaattccattaaaggtcagtgcctgtccttctaggctgctccttcatgttggtcttgtgtgttacatgactatgacctcatagttcttttcttctttttttttgttgagatgaagtctccctctgtcgcccaggctggagtg

SEQ ID NO: 279742 - DNA, 201 bp, Homo sapiens
aaagatgactgctttactcccagaggtgaatttatttgctggacactcatagcctagtagaatctactggtctatttggtcaaaaaatgggtcattttgcytgtaatttaactactcatttcaatgaataagccagcctgtttgctcttgtgccatgttcagtgatgaaattatctagaaatacatcagtggatgttctgt

SEQ ID NO: 279743 - DNA, 201 bp, Homo sapiens
tttagaattttttaaaatgatttccgttgtaagtatagcccatcttgaaaatttagaacacgaggaacctaaaaaggtttcccattacttcatcaccaagmcagaattccattaaaggtcagtgcctgtccttctaggctgctccttcatgttggtcttgtgtgttacatgactatgacctcatagttcttttcttctttt

SEQ ID NO: 279744 - DNA, 201 bp, Homo sapiens
acttgttgatgtaaagatgactgctttactcccagaggtgaatttatttgctggacactcatagcctagtagaatctactggtctatttggtcaaaaaatsggtcattttgcctgtaatttaactactcatttcaatgaataagccagcctgtttgctcttgtgccatgttcagtgatgaaattatctagaaatacatcag

SEQ ID NO: 279745 - DNA, 201 bp, Homo sapiens
ttctagatgccaggatacagagatgagttcgatcatttcatattctcagaagtccgtgctccttccataaagtcatttttctagatgctgggatacagagrtgagtttgatcatttcatatcctcagaagtctatgctccttctgtaaagtcattgttctagatgccaggatacagagatgagttcgatcatttcatatcc

SEQ ID NO: 279746 - DNA, 201 bp, Homo sapiens
gtgggctaggtacatcccaagatgattatgagttcagcaatccacttgttgatgtaaagatgactgctttactcccagaggtgaatttatttgctggacaytcatagcctagtagaatctactggtctatttggtcaaaaaatgggtcattttgcctgtaatttaactactcatttcaatgaataagccagcctgtttgct

SEQ ID NO: 279747 - DNA, 201 bp, Homo sapiens
aagattgacagccatagatgaaatgaatacctttccaagggaacttgggagagaaatatttggctatagttgattttagactctggagttctaaaaatacrctaccaagcaccaatttagtttgcaaaatgccacttagctgaaagatatgaaaaagtggatgttaatgtgccatcacacgcttgagaacacaggcagtta

SEQ ID NO: 279748 - DNA, 201 bp, Homo sapiens
cagagatgagttagattatttcatattctcagaagtccgtgctccttctgtaaagtcatgttctagatgccaggatacagagatgagttcgatcatttcayattctcagaagtctatgctcctcctgtaaactcattgttctagatgccgggatacagagatgagttagatcatttcatattctcagaagtccatgcccgt

SEQ ID NO: 279749 - DNA, 201 bp, Homo sapiens
gttttttggaagggttatttttaagcttccccattttttctttatattcctttcccagtagtctgtaagtccttctgggagcttctaacctgtctcaaaagttgaccggctccaggcgtagtggggagtggggagggcaggggtgctgcagtgcgtccggcgatacctgcttagatgagagctgagtcatgcacagtgcac

SEQ ID NO: 279750 - DNA, 201 bp, Homo sapiens
tatttcatatcctcaaaagtctgagctccttctatgcagtcattgttctagatgccgggatacagagatgagttagattatttcatattctcagaagtccrtgctccttctgtaaagtcatgttctagatgccaggatacagagatgagttcgatcatttcacattctcagaagtctatgctcctcctgtaaactcattgt

SEQ ID NO: 279751 - DNA, 201 bp, Homo sapiens
aggtgagccctcgagtgggtgcaggtgatgttctaggaagcagagaaagtggatttcatcaaaaggagcacccttggccttcagatctccagagaattctygttcttcctattagccaaatgtcttgctcagatagattttagataaatgtctccaaggaaagcacgcgttttggggagggttgctatcctgtctaccatg

SEQ ID NO: 279752 - DNA, 201 bp, Homo sapiens
tgtaaactcattgttctagatgccgggatacagagatgagttagatcatttcatattctcagaagtccatgcccgttctgtgcagtcatttttctagatgycgggatacagagatgcgttagatcatttcatattctcagaagtccgtgccccttctgtaaagtcattgttctagataccgggatacagagatgcgttaga

SEQ ID NO: 279753 - DNA, 201 bp, Homo sapiens
gcctgtcccggaagccacgtgggcatcaccgcagcaagatgggcttgaggaacaaagcaacactgtcagtgaatcgctgaactgtcattgcgctttgactstgtgacattctgttccgtaggaaagcctgaggagtctcgtgtctctagcgtcttggaggaaagcaagcgcctggtggacaccgccatgtacgccacgatg

SEQ ID NO: 279754 - DNA, 201 bp, Homo sapiens
agcttccaggtcataagtagatgtaacagttttctgactgacaatcagctgaaggaattattatcagtaggacggaatgtctgggttatgttaaggggttrtggacaccaaggttttatgagcttcacagagaagagatggtgaatgtttcttatcagacttaaggtctgtgttgatgttgatgctggaggggtagaagga

SEQ ID NO: 279755 - DNA, 201 bp, Homo sapiens
tgtaaaagcattccttttctccacatcctctccagcatctattgttttcctgactttttaatgatcgccattctaactggtgtgagatggtatctcattgyggttttgatttgcatttctctgatggccagtgatgatgaacattttttcatgtgtctgttggctgcataaatgtcttctttgggaagtgtctgttcatat

SEQ ID NO: 279756 - DNA, 201 bp, Homo sapiens
gatcttaacctcttacacattccaggtgctaaaacaaataacacaggagtgctttcattggaaactactggtatagtggaattattttatcttttattaartacacaagataggcaaatcttatcaactttaccactggctcaggtaaccagtgatgaatgttcagaacaaaagttattcggaatcatttgaagtggtttg

SEQ ID NO: 279757 - DNA, 201 bp, Homo sapiens
cctgcccgggctgtggctgcaccaggctttcttcagcccatggacattactccgtggaggtgagtgagtgcggtccctgcagctggtccccatgaactctyccttctttttttaatttttttaaattatattttaagttctagggtacatgtgcacaacgtgcaggtttgttacgtagggtatacatgtgccatgttggtt

SEQ ID NO: 279758 - DNA, 201 bp, Homo sapiens
cagagagcagcgggcggcttctccagagcaagtaattaagtcccgtgactccctagaactcagtgttcagttctgaaaaaaaacttcgggttcaaactccytaagtctatggtccttgcatcagacgcctcttccctgggattgctgggaactgaggaaggaagggcgctgcagagctaacgatagcaaggggctcagagc

SEQ ID NO: 279759 - DNA, 201 bp, Homo sapiens; identical to SEQ ID NO: 56872

SEQ ID NO: 279760 - DNA, 201 bp, Homo sapiens
  misc_feature (1)...(201): n = A,T,C or G
atggaaacatcaatacaagcgatgaaaagaaaagtcaacctgaaaactcaacaatcacagcatccaacgggtaatgtgtgcccctctccccactgaggagnggcaactcccgaaggaggacaccttgactttgtgcaggggctgcttgctcagggcatgttttttacttgagaccaagcaggatgggactccagctctttc

SEQ ID NO: 279761 - DNA, 201 bp, Homo sapiens; identical to SEQ ID NO: 56879

SEQ ID NO: 279762 - DNA, 201 bp, Homo sapiens
agtgtgtgctgctctcttagtaacaatttgtgaacccaagtatctaagacagatctcagtcaatttagaacgtttattttaacaaggataaggatgcaccygtgacgcagtgtcaggaggtcctgaggacatgtgcccaagatggctggggcacagcttgcttttacacatcttagagagacataagacatcaatcaatac

SEQ ID NO: 279763 - DNA, 201 bp, Homo sapiens; identical to SEQ ID NO: 56881

SEQ ID NO: 279764 - DNA, 201 bp, Homo sapiens
tcacatctgcaatcccaacacagtatcaggccagtgccgtgactcacatctgcaatcccaacacagtatcatcaggccagtgccgtgactcacatctgcartcccaacacagtatcaggccagtgccgtgactcacatctgcaatcccaacacagtatcatcaggccagtgccgtgactcacatctgcaatcccaacacag

SEQ ID NO: 279765 - DNA, 201 bp, Homo sapiens
cgatgcaggcagcaaaggtgcttagcatggaagaactcctcaaagggactcgagctcctcactgctgggtgtgctgaggtcagaaggaagatgcccccccygagagagggatcagcgggacccaggcagagccctggcttggacaggccctgtcctgagacagagagcaggggctttgcgacaatgaacaggaatcggggt

SEQ ID NO: 279766 - DNA, 201 bp, Homo sapiens
cgttctgttcatctgtggtcgcagggacctgtgtgctcagcacggcttcttcctgaaggaccctgcctgcggattgcagatcccactctgtgagtaggaasctttgccacgtggatcctctgtggcctcctgcaaacaagcatttgtccggaagccagaaacttccctccagcatgacaagcaagaaggatggctcatctc

SEQ ID NO: 279767 - DNA, 201 bp, Homo sapiens
actggagtgcagtggcgcgatctcagcccactgcaagctccacctcccgggttcacgccattctcctgcctcagcctcccgagtagctgggactacaggcrcccgccaccacgcccggctaatttttgtttttgtatttttagtagagacggggtttcaccatgttagccaggatgtatttcctacatcttaaggactctt

SEQ ID NO: 279768 - DNA, 201 bp, Homo sapiens
tgtgatggatgtgatgcttgcatggtgctgtccctgccccgctccgcccctgctgggctcctggctgccgaacctgaagtcagggtccgccgcagaacacrtcttcccgctgagccctgcagcccctcaagcagctggctgcctccgaggagcttcctctccgacagctgccgtgtacctccctgacctccctggctgtga

SEQ ID NO: 279769 - DNA, 201 bp, Homo sapiens
aaagcatctctattctgcagaattggtcatgaaattagagaggctgaggagtcccaggatctgctgtctgcaaactggagccccaggggagctggcggggyagttccagtctgagggcaggtgaagctgcaatgagatgtcccagctcaagcagagagtcaggaaaagagaagtgaagccctttttcctccacttcctgct

SEQ ID NO: 279770 - DNA, 201 bp, Homo sapiens; identical to SEQ ID NO: 56882

SEQ ID NO: 279771 - DNA, 201 bp, Homo sapiens
tctctattctgcagaattggtcatgaaattagagaggctgaggagtcccaggatctgctgtctgcaaactggagccccaggggagctggcggggcagttcyagtctgagggcaggtgaagctgcaatgagatgtcccagctcaagcagagagtcaggaaaagagaagtgaagccctttttcctccacttcctgctctactg

SEQ ID NO: 279772 - DNA, 201 bp, Homo sapiens
gccatctgctcggcttctggggaggcctctggaaacacagtcatggtggaaggggcagggtaggaggcccatcacaggctgggagccaggagccgggaggsagaggggcagccacacatggagaccaccagatggcaggggactcactgcacaggaccaagaggggtggtgctggacccttcctgagaacccaccctgtga

SEQ ID NO: 279773 - DNA, 201 bp, Homo sapiens
ggatgggacagggcccacccatgttggggagagccgtctgcttttctcagaccacagattccaatgctgatcccttccaggacccaactcaaaaacacagygggaataatgtctaatctgggcgcctgtgctccagtcaagcggacacataaaattaaccatcccagtcatgttattctgacctgaattctccaaaatccc

SEQ ID NO: 279774 - DNA, 201 bp, Homo sapiens
acagagtctgactgtgttgcccaggctggtcttgatcttgggctcaagcaatcctcccactttggcctcccaaagtgctgggattacaggcgcaagccacygcgcctgactcaagattcaagttttaaggccccattggtcagaacaatgggtgcttctgcccaacctcgacggctcccaggggaggctgcagtatctgag

SEQ ID NO: 279775 - DNA, 201 bp, Homo sapiens
acaggaactggtttttaaaaacttgaaagcttagcaaccagatgttacccatgatctttatcgtttccaaagggccttgtcaagaatccacagttaatggmctcttttctgttgtttttatttttgtgatcacttgtaagggaagactctgtacctgccatctgctctgcatcctgtctctctggggctgagatatggtag

SEQ ID NO: 279776 - DNA, 201 bp, Homo sapiens
tttgtcaaagatcagatagttgtagatatgtggcattattactgagggctctgttctgttccattggtctatatctctgttttggtaccagtaccatgctsttttggttactgtagccttgtagtatagtttgaagtcaggtagtgtggtgcctcccactttgttcttttggcttaggattgacttggcaatgtgggctct

SEQ ID NO: 279777 - DNA, 201 bp, Homo sapiens
gggcgccctgggtggctgcgggcaaagcggggggcgcctcgtgtgggtgcgcagcatcgtggcttctctctcccaggtacttgcacagccatcatgggcgyccacatgggtgagctccaggtcgtggggccctgtgtgggtgcgcagtcctgctgggcgccctgcatgggcgtgtggagggtcatcgtgagctcctgtgca

SEQ ID NO: 279778 - DNA, 201 bp, Homo sapiens
cacctcagcctcccaaagtgctgggattacaggcgtgagcccccgcgcccggccggaagcgcttgtttaatgcacgatcttttttaacgtggaccctgtgstggctctgagccaaggctggggcctcgttgctgccccgacccccagctggccttgggctgcacagctgccaggcctgggcgctgcccagaggggttctga

SEQ ID NO: 279779 - DNA, 201 bp, Homo sapiens
agccccggctggaagaggcagcctgtgctgaacacagagatgggtcagggccacacaggaggctgctgtccacccctcctgccctgaagcctgggggggggtctgtgccttcccgtggaagtgggctcagaggtggagatggcatgtgtcctgtcctcagagctcagtgggagacatagatgtagacaaaggatgcacagg

SEQ ID NO: 279780 - DNA, 201 bp, Homo sapiens
gtcagaaggaagatgccccccccgagagagggatcagcgggacccaggcagagccctggcttggacaggccctgtcctgagacagagagcaggggctttgygacaatgaacaggaatcggggtcctgggtatatgatgatggttaagaacaacagctttgcaactggacagccctggatttgaaacctggaatcaccacct

SEQ ID NO: 279781 - DNA, 201 bp, Homo sapiens
tggaccaaaaccacagcacccccagacctgtgattaggtgagctcagaaggtcaagtcactcattaggaaatgtcttcccaccacctaccctgagaccccyattctgctcccagcaaatgggctcaacacaatcccagcctcgcctccctgtgtcttattcttcagcttttaaaaacatgatcttatttccaccttagggc

SEQ ID NO: 279782 - DNA, 201 bp, Homo sapiens
agagacaattaacagccgatagtcaatagctccaatcccttgaaatttcttgacccttttcttatacttctttttatttttttgagacagagtctcactcygtcacccaggctggagtgcagtgccgcaatctctgctcactgcaacctccgcttcctgagctcaagtgattctcctgcctcagcctcctgagtagctggg

SEQ ID NO: 279783 - DNA, 201 bp, Homo sapiens
gtgtgagcacacaggaggagtcacgacagagcagtgtaagagccgccacgtgggtcccacacagggggagtcacgacacagcagtgtaagagccgccacgwgggtcccacacagggggagtcgcgacacagcagtgtaagagccgccacgagggtcccacacagggggagtcacgacacagcagtgtaagagctgccacgt

SEQ ID NO: 279784 - DNA, 201 bp, Homo sapiens
ccccattttttctttatattcctttcccagtagtctgtaagtccttctgggagcttctaacctgtctcaaaagttgaccggctccaggcgtagtggggagtggggagggcaggggtgctgcagtgcgtccggcgatacctgcttagatgagagctgagtcatgcacagtgcaccagaggggcaagggccagcctggccctc

SEQ ID NO: 279785 - DNA, 201 bp, Homo sapiens
gtgactggggggaaatcctcactgcagcccgcgtcccttgcatgattgttgtaagaaagccccagctcagctgcgtggagacagggtcctcttggctgcawattctaaaatcatttttcctatgaagagagcagtgctaattttttccaaaatatatcagattatgatcgacttgactgaagtgtgaaatgaaagtgggtt

SEQ ID NO: 279786 - DNA, 201 bp, Homo sapiens
ctccagcatctattgttttcctgactttttaatgatcgccattctaactggtgtgagatggtatctcattgtggttttgatttgcatttctctgatggccwgtgatgatgaacattttttcatgtgtctgttggctgcataaatgtcttctttgggaagtgtctgttcatatccttcgcccactttttgatggggttgttt

SEQ ID NO: 279787 - DNA, 201 bp, Homo sapiens
cgacccctgcagcctcttccaggcaagagaccaccggtgagcaggccaggggggaggtggggggctggctggaccaacccctgcagcctcttccaggcaasagaccaccggtaagcaggccggggggggaggtgaggggactggctggactgacccctacagaggactggaggggcagagaaacgtgcggcgctgcggggt

SEQ ID NO: 279788 - DNA, 201 bp, Homo sapiens
agtcaggattatttgacaaggattgtttttgatgcttttatgcaattcagaacctcaatgaatatagaaaataatttaaaaagacataagagctctctagrttgaaataagcatggtgcttataaaacaatggtgaacagtgaatgccaattattttaatttaaatttctattatgcagcaaattcataaaatggggaaag

SEQ ID NO: 279789 - DNA, 201 bp, Homo sapiens
cgcccacctcagcctcccaaagtgctgggattacaggcgtgagcccccgcgcccggccggaagcgcttgtttaatgcacgatcttttttaacgtggaccckgtgctggctctgagccaaggctggggcctcgttgctgccccgacccccagctggccttgggctgcacagctgccaggcctgggcgctgcccagaggggtt

SEQ ID NO: 279790 - DNA, 201 bp, Homo sapiens
gaccaccagtgagcaggctgaggggaggtgcggggctggctggaccgacccctgcagcctcttccaggcaagagaccaccggtgagcaggccaggggggargtggggggctggctggaccaacccctgcagcctcttccaggcaagagaccaccggtaagcaggccggggggggaggtgaggggactggctggactgaccc

SEQ ID NO: 279791 - DNA, 201 bp, Homo sapiens
accccttactcacattcgccatccacactggcaacagccttgtttttttctcatttttttctgcttgtttggcggcaaaaaaaaaaaaaaaaaaaaaaaaggagagagagagatatttcgttgttacattagttgctttccctgaatattagtgaattttaaagttgtcctttatttatctttttttggcaatttgtattt

SEQ ID NO: 279792 - DNA, 201 bp, Homo sapiens
taccccttactcacattcgccatccacactggcaacagccttgtttttttctcatttttttctgcttgtttggcggcaaaaaaaaaaaaaaaaaaaaaaaaggagagagagagatatttcgttgttacattagttgctttccctgaatattagtgaattttaaagttgtcctttatttatctttttttggcaatttgtatt

SEQ ID NO: 279793 - DNA, 201 bp, Homo sapiens
gtaccccttactcacattcgccatccacactggcaacagccttgtttttttctcatttttttctgcttgtttggcggcaaaaaaaaaaaaaaaaaaaaaaaaggagagagagagatatttcgttgttacattagttgctttccctgaatattagtgaattttaaagttgtcctttatttatctttttttggcaatttgtat

SEQ ID NO: 279794 - DNA, 201 bp, Homo sapiens
attgctgggcgcccacctcagcctcccaaagtgctgggattacaggcgtgagcccccgcgcccggccggaagcgcttgtttaatgcacgatcttttttaaygtggaccctgtgctggctctgagccaaggctggggcctcgttgctgccccgacccccagctggccttgggctgcacagctgccaggcctgggcgctgccc

SEQ ID NO: 279795 - DNA, 201 bp, Homo sapiens
cccgccaccgcgcccggctaattttttgtattttaagtagagacggggtttcactgtgttagccaggatggtctcgatctcctgacctcgtgatccgcccrcctcggcctcccaaattgctgggcgcccacctcagcctcccaaagtgctgggattacaggcgtgagcccccgcgcccggccggaagcgcttgtttaatgc

SEQ ID NO: 279796 - DNA, 201 bp, Homo sapiens
caaatccccccactgcgtgcaacctcctcaaataccccactgcgtgcaacctcctcaaatccccccaatgtgaggaacctcctcaaatcctcccactatgwgcaacctcctcaaatctccccactgtgtgcaacccccccagatctcccccactgtgagcaaaagcacaaatcccccactgtgtgcaacattcctcaaatc

SEQ ID NO: 279797 - DNA, 201 bp, Homo sapiens
cgttctgcacagaggcaggtggtctgcgttggttctgaagccagccagacctgcattcacattccggctccaccattcaactcttacgtaagcctggtcasgttgtttctcccacccacagcttctttaacctagaacagtgtttttataacaatgaagcaactacgaagcacgtagcacttagaatgggagctagcactg

SEQ ID NO: 279798 - DNA, 201 bp, Homo sapiens
ctgcagcaacatcaccaaggagcttatcacacctgcggcgtctggggccaccacaatccctgagtcagggctgcagcaacaacatcaccaaggagcttatyacacctgtggtgtctggggcaccacaatccctgcgtcagaatccacactcttcacaagaccccatgagactgtgtatatgaaggtctgagacacccatcg

SEQ ID NO: 279799 - DNA, 201 bp, Homo sapiens
gacggtgactggtacgttcctatccagagcgtcttccttcacgttctgcacagaggcaggtggtctgcgttggttctgaagccagccagacctgcattcamattccggctccaccattcaactcttacgtaagcctggtcaggttgtttctcccacccacagcttctttaacctagaacagtgtttttataacaatgaagc

SEQ ID NO: 279800 - DNA, 201 bp, Homo sapiens
ctgagcactgcccaggttcgcacattctcatcgtcctggggtggccgagtcggggaccaagaccctgtggcctatgtggaccccggctcctccactcagcrgtgagactggggagggtccctccacctctcccagtgcttttgctctgtctagggatgtcgtcagcaccagggccccaggagtgcagggaggttgctgcct

SEQ ID NO: 279801 - DNA, 201 bp, Homo sapiens
gctctgccactgacacttcagtgacaaaagggtcacgaatcgcaaggttttcctgttcccttggcttagagactgcacaaacttgaaacggccacttcacycacgattcctggttttccgtgttggcattacagttaaggaattgatggcaggtgcttcagggtatagcatgttgcgtgttctacgttaacaagccttcct

SEQ ID NO: 279802 - DNA, 201 bp, Homo sapiens
gcatggaatgccttcttctacccctttaccttaagtttatgtgagtccttatgtgttaggcatgtctcttgaaggcagcagatggttggtgaattcttatscattctgcaattctgtatcttttaggtggagcatttagaccatttacattcaatgttagtactgagatgtgaggtatcattccattcattgtgctatttg

SEQ ID NO: 279803 - DNA, 201 bp, Homo sapiens
atagaaacacaactactctgtcgggtgatgacatctgtgtaaactcgtggttgctgttaacactattgcatgactcctgaccataggctctgccactgacmcttcagtgacaaaagggtcacgaatcgcaaggttttcctgttcccttggcttagagactgcacaaacttgaaacggccacttcactcacgattcctggtt

SEQ ID NO: 279804 - DNA, 201 bp, Homo sapiens
gtagtattccatcgtatataaaaaatcacagtttctttatccactcattgattgatgggcatttgggttgcttccacagtttggcaattgtgaattgtgcrgctataaacacggatgtgccaatgcatttttcgtataatgacttcttttcctctgggtagatacccaggaatgggatcgctggatcaaatagtagttcta

SEQ ID NO: 279805 - DNA, 201 bp, Homo sapiens
tctggtctcgcagaccccaggcctgtgagggtcgctcactgcggtagaggctgcgtggagtcagtggagggagcccctcagcagggagacaaggacacagmggttcccatggccttgtcagtgcttgattacatactctgtctccttccgttaattttagaatgagagcgctcgctgtgctgtctgtcacgctggttatgg

SEQ ID NO: 279806 - DNA, 201 bp, Homo sapiens
gaagcttgccattgttaatttacttccccagtgtcatgtgcaagcagcagacagaactggtatttaatctccaatcctttcttaagcaagacacaaaggargagcaccctgatgcaattagcaattacgtataccctggttaaaagacagtagaggctgacgtcctgatagcaaaaccagcctctcttctccaggattagg

SEQ ID NO: 279807 - DNA, 201 bp, Homo sapiens
agaaaagaaaaacaaaaaacaaaaaacctgtaaagcagtttgccctcccaagcttattattttgtaggaagttgactaataattatataagttcttgagayacaaaatatcaaaagacagcagttaatttattccaaatttctattattccagccagaaaaataccttactgttcatattggctgcaaacaaattattatt

SEQ ID NO: 279808 - DNA, 201 bp, Homo sapiens
gtcctcgtctccatgagtctggacttccggccacacgcgtggggaggcaggtcccagacggctgccttctcccctctgctcaacccctgaggccttcggcsctcctgtctgcttccttgcttctgtgccccttccctgactgcgacctccacgggcagatgttcatccatttaattcttgtttctcaggacccacaatttg

SEQ ID NO: 279809 - DNA, 201 bp, Homo sapiens
ttagagaaaaataacaataaaattatttgtaaacaattttaaaaataaaaggcaagaccacatctggcagggaggacacctgcgtgcccgtgggtgagaamgtgggagaggccccagggtgggtctccagggcactttccagggctcttggtgtcaggcatgaacctcctggcttgcagttaagagtgtccatcaattatt

SEQ ID NO: 279810 - DNA, 201 bp, Homo sapiens
ttcttgtttctctaattccttaaggtgtaaccttagattgtcagtttgtgctctttcagattttttatgtaggcatttagggctatgaactttcctcttarcaccgcctttgctgtatcctagaggtttcgataggttgtgtcattattgtcattcagttcaaagaatttttttttttttgagatggagtttcgctcttgt

SEQ ID NO: 279811 - DNA, 201 bp, Homo sapiens
ccaattttgctgagttttgatcataaaaggatgctggatctttttgaatgctttttatgcatctatcgagacgatcatgtgatttctgcttttgattctgyttacatggtgtatcacatttattgacttgtgtatgttaagccatccctgcatccctggtatgaaacccacctgatcatggtggattatctttttgatatg

SEQ ID NO: 279812 - DNA, 201 bp, Homo sapiens
gaattctctattcatgtccttagcccactttttgatgggattgtttggtttttcttactgatttgtttgagtttgttgtagattctggatattaatccttygtcagatgtgtggattgtgaagattttctcccactctgtgagttgtctgtttactctactgactgttccttttgctgtgcaaaagctctttagtttaatt

SEQ ID NO: 279813 - DNA, 201 bp, Homo sapiens
agaaaacccaaatacgtgtgtgtaggtaaacacacacacacacacacacacacagatatcaatgaaagataaatgaacagcaagatgctgtttttaaacayacagactggaaagaaattatgaaattttaatttagtgttgttgagggtattgagaaatcatttgcatccatgcattgctgtgcaaaagtaaactggtgaa

SEQ ID NO: 279814 - DNA, 201 bp, Homo sapiens
gtatcaacttgcctgcaaactgtaggaaggtgagaataagaagggaaagatcttggctggtgctcagactgggtgggtgcaggagagactcttgttccagrgcaggatcccctagggtcaaagcacaaagagaaataaacttcagcacctgaaaattctgtaataagagtctttgaaaatggaaaaaaaatctatgcttga

SEQ ID NO: 279815 - DNA, 201 bp, Homo sapiens
aaaacatctgaatgtttccgatataagttaacaatgcaatgtcattgaaaatttcttcgccaaaaggtgcttctgaaactgttatcttcccaggagcaatytggggatagaaagcaagggctctccccttggctggccatgttcccagctggcctttttctaggtagtgaggcctcaggacaggcacgtggaatcgtgacc

SEQ ID NO: 279816 - DNA, 201 bp, Homo sapiens
tcgctttcaagcagcgactcagacactttcctgcttccccgtgcaaacgggaatataaacccaggagctgctgagcggtggaatccaggtcctcgtctccrtgagtctggacttccggccacacgcgtggggaggcaggtcccagacggctgccttctcccctctgctcaacccctgaggccttcggcgctcctgtctgct

SEQ ID NO: 279817 - DNA, 201 bp, Homo sapiens
gaaatgaaaacaggaaccttgtcactatgtgaagtaaaaatcatcaggcacccacgtcgctttcaagcagcgactcagacactttcctgcttccccgtgcraacgggaatataaacccaggagctgctgagcggtggaatccaggtcctcgtctccatgagtctggacttccggccacacgcgtggggaggcaggtcccag

SEQ ID NO: 279818 - DNA, 201 bp, Homo sapiens
caacaggagctgatcaaagtctcagagggacccttctcagtcctgctgacctgctgaccgtgaaggtcaggtgacacatttgcggagggtccacaacaaaygtctgtgagtgcccttgagccattgtaatgtcctagtgaactgctgacatataaaagtcaatcagcaaaaaaaatcactgcttaagcagttaaattaaca

SEQ ID NO: 279819 - DNA, 201 bp, Homo sapiens
acatccacacagtagcgcttggtggggagcatcagccggacggaggaggcttatgtgggtgagaagatcgagttagaaatgaaaacaggaaccttgtcacyatgtgaagtaaaaatcatcaggcacccacgtcgctttcaagcagcgactcagacactttcctgcttccccgtgcaaacgggaatataaacccaggagctg

SEQ ID NO: 279820 - DNA, 201 bp, Homo sapiens
aattttgataaatattgcagaattactctccattaatattgcacaaatgttcactcttaccagaaaagaaagagacaatataggtagatttttaattttayttctctctggaaaccagccttgaagttaacaagggacattttctttttttttttttaagacagggtctcacccagtcgcccaggctggagtgcagtggtg

SEQ ID NO: 279821 - DNA, 201 bp, Homo sapiens
cagttaaattaacattatttttaattgagtaatctaacacctccctatgagccatactttatggaatttcaataaagacaaaccaaccataacgaatctgracactttattaaagcaatctttccaatcttcagttgctgacgtattgcagctgattatatgcattactctcccatacatttttgcaaattgagccacttt

SEQ ID NO: 279822 - DNA, 201 bp, Homo sapiens
ctgggcgccctgggtggctgcgggcaaagcggggggcgcctcgtgtgggtgcgcagcatcgtggcttctctctcccaggtacttgcacagccatcatgggygcccacatgggtgagctccaggtcgtggggccctgtgtgggtgcgcagtcctgctgggcgccctgcatgggcgtgtggagggtcatcgtgagctcctgtg

SEQ ID NO: 279823 - DNA, 201 bp, Homo sapiens
aaacacggcagacgagttcactgtcctaacgcacacatccacacaggaaacacggcagacgggctcactgtcctaacacgcatccacacagcaaacacagmagacgagctcactgtcctaacgcacatccacacagcaaacacggcagacgagttcactgtcctaacacacacatccacacagtagcgcttggtggggagc

SEQ ID NO: 279824 - DNA, 201 bp, Homo sapiens
gcctattatcccatgtgtacctgcactttttctcatcctctgtgtcacatcatgtgcatgctcagtgcctggtaaggaccacttagcaatagttcttatayatgtctgcttaacattaagtgaacagaaatgtaattgtttacaacttagtattccatttgtgtgtgcattataatctatctaaccactttccctattaat

SEQ ID NO: 279825 - DNA, 201 bp, Homo sapiens
cctgggattctttctttctttttttttttttttgagctggagtcttgcccaggctggagtgtagtggcgcaatctcagctcactgcaacctccgcctcccrgatataagcgattctcctgcctcagcatcctgagtagctgggactacaggcatgcgccaccatgcctggctaatttttctatttttaatagagatggggt

SEQ ID NO: 279826 - DNA, 201 bp, Homo sapiens
gctgggactacaggcatgcgccaccatgcctggctaatttttctatttttaatagagatggggtttcatcgtgttggccaggctggtctcaaactcctgamctcaagtgatctgcccaccttggcatcccaaagtgctgggattacaggtatgagccactgtgcctggccctagtgttattcttcaccactcaggacccca

SEQ ID NO: 279827 - DNA, 201 bp, Homo sapiens
agagaaggaattcaatgaacgtgtattgttattgctgtgttgctggaagcgtagacctctgagagggatgtggggtgattagggaagctcagcagggaggsagcacgttgggtagggagctgcactgagagaactactctgtgtggaggttgggctcccctggagctgcactgagagaaccactgtgtagtggggtggggg

SEQ ID NO: 279828 - DNA, 201 bp, Homo sapiens
ccacctgtcatcccagctactcgggaggctgaggcacgagaatcagttgaacccaggaggtggaggttgcagagtcgagatcacaccactgcactccagtytaggtgacagagtgagaatccatctcaaaaaaaaaaaaaaaagagagagagagaaaaaaagaaaagcatcagtcctggatagagtttaggttgtatcaac

SEQ ID NO: 279829 - DNA, 201 bp, Homo sapiens
atgcattaggggaaacagatttttttcattcccaataattattcccagtactgttacactatttgacattaccaaaaatttaaataggttattactgagayatattggcaactggagctgccaacataaaaactctgtttttgaataatgggggcctgggaggcctgctcagcgctgcagtttctgtaacctcctgacatg

SEQ ID NO: 279830 - DNA, 201 bp, Homo sapiens
tctgtgccatgctgtgctgtgtgctaggcaggctgaaaaggaagacaggctggtccctggaaggtgggcaggacagttacataaaccagcagttacaaaaytctgggcatctgcagaggaggtcccagtgggcaaaatcaagacatctaaacaaaatatcccaaaaggaataatattgggggaaaggtggaaaaggagcac

SEQ ID NO: 279831 - DNA, 201 bp, Homo sapiens
atgtctgcgtggagaatggaaaggaaggggagtcactcctcccaacccacgttgaaatccagccaagcaactcccttaggcttcaaggccaaggagtactygcttgtggctggaggctctgccctctgagtcatgaactcaactgtcctaaagcctggctgttttgtcaatgactcttcacttaatccccacaacaacact

SEQ ID NO: 279832 - DNA, 201 bp, Homo sapiens
tgctctccagatgccctggcggaacggtgttaaacataacagcaacagatgtctgcgtggagaatggaaaggaaggggagtcactcctcccaacccacgtkgaaatccagccaagcaactcccttaggcttcaaggccaaggagtactcgcttgtggctggaggctctgccctctgagtcatgaactcaactgtcctaaag

SEQ ID NO: 279833 - DNA, 201 bp, Homo sapiens
tggcaggggagatgcacatgggagatgcatgctttacggcattcaggccaggagctattggggctttggcaactattttcatattttgagaggaaagtggracttcatttcttcacattgcaatttttctgattaatcatggcctggaggaagaagctgaaggtagagagactgtgcagggcacgttgacttcagaatagg

SEQ ID NO: 279834 - DNA, 201 bp, Homo sapiens
gcatgtggagactggacaccacagccatctgcgcactcactgcgcgtggagatgtgtggacaccacggccactcttcttgaaactcaaggcgaagcagtcrgagagcagagcctcggcctccatgcaggtcaccctggtatctggggacactgcggctgaggctggtttcctcctctgtcgggagcgctgctcttcagaca

SEQ ID NO: 279835 - DNA, 201 bp, Homo sapiens
tgcacaatgccagatttgcagacgtgctcccctgctgcattttgggattggtcatgaatgacagtgtacaaggagatcacccagagattacagtgccccasagaacagcagaccaggatgtttctcccagagaactttccagaagcctcggtgatagaaacacaactactctgtcgggtgatgacatctgtgtaaactcgt

SEQ ID NO: 279836 - DNA, 201 bp, Homo sapiens
catgctttacggcattcaggccaggagctattggggctttggcaactattttcatattttgagaggaaagtgggacttcatttcttcacattgcaattttyctgattaatcatggcctggaggaagaagctgaaggtagagagactgtgcagggcacgttgacttcagaataggagcaccctctaaaatagctggatttgc

SEQ ID NO: 279837 - DNA, 201 bp, Homo sapiens
cttcttttattaacagattcatctgttcttgttgacaataccgtgtggacttggtcatagcggccttatagtatatcctattatctgtcaagtcaataccrcatcaccattcttttccctagtttattaaggaataaataaataatggaatttgtatcttcatataaactttaaaattaatttatctatttcaaaatgaaa

SEQ ID NO: 279838 - DNA, 201 bp, Homo sapiens
tttcatattttataaggccaggtctacttatgtgttgatggcttctaggctcagttttggttcaggaatctcctttgctcgaagtcgacagtgacctcctkggtggtattacagcacgggtttccattcattttgcacagtggacagtctgggtgcgttttattcccattcagatggaaaaccagctggttctgccctcct

SEQ ID NO: 279839 - DNA, 201 bp, Homo sapiens
tgacactgccaggttggaaggcagctttagcactgctatgctggtactactgtctaaaaattctgtgaccctcacagcaacgactgagtgtaccccttacycacattcgccatccacactggcaacagccttgtttttttctcatttttttctgcttgtttggcggcaaaaaaaaaaaaaaaaaaaaaaaaggagagagag

SEQ ID NO: 279840 - DNA, 201 bp, Homo sapiens
caaaatgagaatagctgcccggaatacttagatccaaataactttggacgtgagctttgttagatctttgctgcaaacaggtttcaaaggcgaaaaaggtrgacaaggagtgagccttggtccttcactctatatgattgcttggcttttcattttgtttacggtgccattattcataaatttaggtcgattttcgtcaat

SEQ ID NO: 279841 - DNA, 201 bp, Homo sapiens
tttaataggtactcccaaatttctctgcagcaatgagatggcgaattgtattttctaattgattatttttcagcaacaattaatcttacataattcctatwattttccaatgcggtaaagaagaaaatcttgaattttacattattggctttaaaacctgtatctgtgtctcttttgttgacctaaagcaagaagctgagg

SEQ ID NO: 279842 - DNA, 201 bp, Homo sapiens
taactccggagctggcggccctccggggcccctctgtcccacctgcttaccctccagccggctggtgattatcccaccaagacccaacaaccacagccccmcaacagtggcagccagaccacccaggtttcccggtgcgcacagccaagctacgtgctttacagatttcaactcatttaataattcccagaacaacccttg

SEQ ID NO: 279843 - DNA, 201 bp, Homo sapiens
gggagctgcactgagagaactactctgtgtggaggttgggctcccctggagctgcactgagagaaccactgtgtagtggggtgggggctccacctttgggstcccctggagctgcactgagagaatcactgtgcgtgggggctccacctttggggatctcctggagtttcgctggtttgggcaagagctggtgaaaagcag

SEQ ID NO: 279844 - DNA, 201 bp, Homo sapiens
caggcacacgcacctatacatgctcatgacacacagacccacacacacacctgcacacacctcacatgcacacagctgctccaggatccttctgctgacaygcggaccctgtgtaactcaggagtgtattggacgagggcagggggggccgtggcgaggagcaggatactgtgatgcccgtggagacccccgcagaggttc

SEQ ID NO: 279845 - DNA, 201 bp, Homo sapiens
gatactgtgatgcccgtggagacccccgcagaggttccggggggtccgggcactggctccttcggggctccctactggatctcaagggaaaggcgggtgcyctcatcagccatgtcactctccagtgtcctcctttctttttagggctcagttagagtgagcccggtcaccccaggtaccgtctctctgccctatttcaac

SEQ ID NO: 279846 - DNA, 201 bp, Homo sapiens
ctgtctttcgtggggcaggactggggttgacagcacttcccttccacacggagcacatgcttgtgggaccctgaaggcagagaggctggggcaggtgctgygggcagcaggcggggaggggctggaccatctcaggcggggagcctgcagggcttgttcccaggagctgaggagctgactccagacctcagggctctgcgc

SEQ ID NO: 279847 - DNA, 201 bp, Homo sapiens
gcccctcagcagggagacaaggacacagcggttcccatggccttgtcagtgcttgattacatactctgtctccttccgttaattttagaatgagagcgctsgctgtgctgtctgtcacgctggttatggcctgcacagaagccttcttccccttcatctcgagagggaaagaactcctttggggtaagtagcaaacacatt

SEQ ID NO: 279848 - DNA, 201 bp, Homo sapiens
ggctgaacaaaagttcagttctgtgagagaaaccctgcagcctctcccctgtgcaggttacaatgagtggagggagttctgcggcctgcctcgcctggagwcccccgctgacctgagcacagccatcgccagcaggagcgtggccgacaagatcctggacttgtacaagcatcctgacaacatcgatgtctggctgggagg

SEQ ID NO: 279849 - DNA, 201 bp, Homo sapiens
ccagtccacatgcctaacatgctcaccccattccaaggttcccccaaaccccatcccatgacggcaccaactctaggcccaaaatccaatccaaatctcaycacataaatcatccacatcaggtagggcaggctcagggtaagatccatccaggacaaaattcctctccatctggacctagcctgtgagacagggaagctt

SEQ ID NO: 279850 - DNA, 201 bp, Homo sapiens
aatgttgtctgtctctgtgcctttgtttggagtcacatctccacctcccgtcaggagagggcctccaactttaaggacccatgtgactggattggacactygtggagacccaggacaaccttcccatctcaaggcccttaatgtaatcgcatcagcaggctccaaggattagcgaatggatgttgtgcgagaggcattttt

SEQ ID NO: 279851 - DNA, 201 bp, Homo sapiens
gctggttctttctggaagctccaggggagatccctttcctggcaattccagcttctggaggtgcctgcatcccctggctcatggcacctccttccaagccrgcaatgttgtctgtctctgtgcctttgtttggagtcacatctccacctcccgtcaggagagggcctccaactttaaggacccatgtgactggattggaca

SEQ ID NO: 279852 - DNA, 201 bp, Homo sapiens
ggggtgccacagcgcagccctgcagactgggggtgccacagcgcagccctgcagactgggggtgccacagcgcagccctgcagactgggggtgccacagcrcagccctgcagactgggcacttgaacaagagatttctctctcagcaagtcctggaggctggagtccaagatcaaggggagggcacggttggctccccctg

SEQ ID NO: 279853 - DNA, 201 bp, Homo sapiens
tcctcacccagccttggaagcactgacattcgagttgtgcgtgggctgctgatgaatcctggttcagtgagcttagctgcctaggcagggtggtaattagmgtacggagttttacaggagaatctactgcataattcatgaggaaactgaaacgcaaaaaagatgtgtagttaaagccatgtgctcctgtgagtgggtggg

SEQ ID NO: 279854 - DNA, 201 bp, Homo sapiens
tcaaggtgttgcagagctggttctttctggaagctccaggggagatccctttcctggcaattccagcttctggaggtgcctgcatcccctggctcatggcmcctccttccaagccggcaatgttgtctgtctctgtgcctttgtttggagtcacatctccacctcccgtcaggagagggcctccaactttaaggacccatg

SEQ ID NO: 279855 - DNA, 201 bp, Homo sapiens
gggtgccacagcgcagccctgcagactgggggtgccacagcgcagccctgcagactgggggtgccacagcgcagccctgcagactgggggtgccacagcgmagccctgcagactgggggtgccacagcgcagccctgcagactgggggtgccacagcgcagccctgcagactgggcacttgaacaagagatttctctctca

SEQ ID NO: 279856 - DNA, 201 bp, Homo sapiens
ggggtgccacagcgcagccctgcagactgggggtgccacagcgcagccctgcagactgggggtgccacagcgcagccctgcagactgggggtgccacagcrcagccctgcagactgggggtgccacagcgcagccctgcagactgggggtgccacagcgcagccctgcagactgggcacttgaacaagagatttctctctc

SEQ ID NO: 279857 - DNA, 201 bp, Homo sapiens
tccgtcacaaaaaatcctcctcatgttggaattttaataggtactcccaaatttctctgcagcaatgagatggcgaattgtattttctaattgattatttytcagcaacaattaatcttacataattcctattattttccaatgcggtaaagaagaaaatcttgaattttacattattggctttaaaacctgtatctgtgt

SEQ ID NO: 279858 - DNA, 201 bp, Homo sapiens
tattcctgccgtcgttctggagcaaaagttcacgacgtgaacctccacacactgctctgtttgtccaagtgagagctgaaacctagtcctgcctcttgtcygccatgatccgtcacaaaaaatcctcctcatgttggaattttaataggtactcccaaatttctctgcagcaatgagatggcgaattgtattttctaattg

SEQ ID NO: 279859 - DNA, 201 bp, Homo sapiens
agtgcatgccccccgtagaagcaggtgcgcaggataccagtgttaggattttggaacaacacagacaaaagcaataggaaaatgttttcttttgcttttamatacatccctacctatccaattctctctctatttttggtagtcactgtgccgaggtcagatttttgttgtaaaggatctgtgttcttcccagagagtgca

SEQ ID NO: 279860 - DNA, 201 bp, Homo sapiens
tagatccaaccacacgagcaagcaggcacctaactaaacaaattgtgacacaatcgtgacagcccggagactgcatcccatccctcacgtcccatgacaaygcccgggaaagcgcagaggtggacagtgactcaggcgcagacacaggccatgcccggtgctcatggatgcctctaggctggacaggacttcccggccccc

SEQ ID NO: 279861 - DNA, 201 bp, Homo sapiens
cgccattctcctgcctcagcctcccgagtagctgggactacaggtgcccgccaccgcgcccggctaattttttgtattttaagtagagacggggtttcacygtgttagccaggatggtctcgatctcctgacctcgtgatccgcccacctcggcctcccaaattgctgggcgcccacctcagcctcccaaagtgctgggat

SEQ ID NO: 279862 - DNA, 201 bp, Homo sapiens
ttaattgtgtgatggagaaaagcacttatgcacctggaaatgcggtccctgactctaggggtctcacaggttgttaggaagaaggatgggctgtttgatawgcgagtcaccgtgtgtgtctgttgcaccaggccctgtggcggcctgggcatcgtgtctgcagtcctagccgggagcctgcagggaggtgcgcgtcagtcc

SEQ ID NO: 279863 - DNA, 201 bp, Homo sapiens
gcacccaggaaggatgggatttccagcctcccctctgcaaaggtcagtcctttcttcaatgacaattacaaaacatctgaatgtttccgatataagttaayaatgcaatgtcattgaaaatttcttcgccaaaaggtgcttctgaaactgttatcttcccaggagcaatctggggatagaaagcaagggctctccccttgg

SEQ ID NO: 279864 - DNA, 201 bp, Homo sapiens
ctgcacttcccagttaattgcacctgcttcctgttttcacgtggggagagcatcctcacccagccttggaagcactgacattcgagttgtgcgtgggctgytgatgaatcctggttcagtgagcttagctgcctaggcagggtggtaattagagtacggagttttacaggagaatctactgcataattcatgaggaaactg

SEQ ID NO: 279865 - DNA, 201 bp, Homo sapiens
tagcactgatttttcctagatccaaccacacgagcaagcaggcacctaactaaacaaattgtgacacaatcgtgacagcccggagactgcatcccatcccycacgtcccatgacaatgcccgggaaagcgcagaggtggacagtgactcaggcgcagacacaggccatgcccggtgctcatggatgcctctaggctggaca

SEQ ID NO: 279866 - DNA, 201 bp, Homo sapiens
acagggcccctgtttgcctgtctcattgggaagcagatgaaggctctgcgggacggtgactggtacgttcctatccagagcgtcttccttcacgttctgcrcagaggcaggtggtctgcgttggttctgaagccagccagacctgcattcacattccggctccaccattcaactcttacgtaagcctggtcaggttgtttc

SEQ ID NO: 279867 - DNA, 201 bp, Homo sapiens
cttcctccccagggctcggacagggcccctgtttgcctgtctcattgggaagcagatgaaggctctgcgggacggtgactggtacgttcctatccagagcrtcttccttcacgttctgcacagaggcaggtggtctgcgttggttctgaagccagccagacctgcattcacattccggctccaccattcaactcttacgta

SEQ ID NO: 279868 - DNA, 201 bp, Homo sapiens
cctgagggtgaaccagggagccacctgctaagaaatggactcaatggcacctgacagcagttttctaaaagctcaggattttttttgttttttgtttttttgagacgaagtctcactcttgtcacccaggctggagagcaatggggtgatctcggctcacggcaacctccgtctcccaggttcaagcaattctcctgcccc

SEQ ID NO: 279869 - DNA, 201 bp, Homo sapiens
atttttttctttccttctcatggctaaaactgtcctctttctcactgagtctcccctgcaatctctctgctctccattgctgggtggccacgtcttcccartgctcctttctgacagagactgggggcttcagccagatctttagttgcctctctttcattctcccattatgtgatagcctcgggttttccacgtccccct

SEQ ID NO: 279870 - DNA, 201 bp, Homo sapiens
acagtgtggtacaatagatttccactgggaaaggatctttccaacaggagctgatcaaagtctcagagggacccttctcagtcctgctgacctgctgaccrtgaaggtcaggtgacacatttgcggagggtccacaacaaatgtctgtgagtgcccttgagccattgtaatgtcctagtgaactgctgacatataaaagtc

SEQ ID NO: 279871 - DNA, 201 bp, Homo sapiens
tgtgaaggtatttttcttgtgttttctgctgaaaatgttattgttttacatgtcacatttagatctgtgacccatctcattttatgttttctgcaacataygaggtggcaaccatgaggggtgtgtgtgtgtgtatgtgtgtgtgtgtattgtaaaccaaaaataaaattctaagtcttgcgatcatctgaattgacccct

SEQ ID NO: 279872 - DNA, 201 bp, Homo sapiens
tgccacgtgggtcccacacagggggagtcacgacacagcagtgtaagagccgccacgagggtcccacacagggggagtcacgacacagcagtgtaagagcygccacgtgggtcccacacagggggagtcacgacacagcagtgtaagagccgccacgagggtcccacacagggggagtcacgacacagcagtgtaagagcc

SEQ ID NO: 279873 - DNA, 201 bp, Homo sapiens
acgacagagcagtgtaagagccgccacgtgggtcccacacagggggagtcacgacacagcagtgtaagagccgccacgagggtcccacacagggggagtcrcgacacagcagtgtaagagccgccacgagggtcccacacagggggagtcacgacacagcagtgtaagagctgccacgtgggtcccacacagggggagtca

SEQ ID NO: 279874 - DNA, 201 bp, Homo sapiens
cacctcaccagggaggaagagctgacagggaaagggcacatgctctctgcagcccacagagctcgactcttcccaggaaacctgtaaatctggaaaaaatrttttagatctccatgttacagatgagaagatggaagctggccacagccagagttggaatcccacccaaggtctcctcactcccctcaagctgcctttaca

SEQ ID NO: 279875 - DNA, 201 bp, Homo sapiens
tgcagaacatctaaatcggtcacatttaatacgaatgactaatgtatgttataaccataaaggcgatggtaatttatgacaaaaccactaatttttaaatrtttatattcccaaacactccaaatgttttaaaaagttatttatcttgtcacgattcttgtagacttcactccttgtattttttaagtgtgtacatatcag

SEQ ID NO: 279876 - DNA, 201 bp, Homo sapiens
tccttcttggcctcagttggacaatccctaaaatgggataagactgtcttacccaccttatgctcaacagtggaccagttcaacccccgaggctttttaarctctcagtattatgagattgtgattctgtaaacccatatttgctcagaattatttcactattgagaaaaatcagagttcaagtgtctttaaatgaaattg

SEQ ID NO: 279877 - DNA, 201 bp, Homo sapiens
aatttttaaatatttatattcccaaacactccaaatgttttaaaaagttatttatcttgtcacgattcttgtagacttcactccttgtattttttaagtgygtacatatcagatacatgggaggattttcaaagcctgcatcctagtcacgcctgactcttttgtcatgtgccttgcaaagcctcccaataccagttgtcc

SEQ ID NO: 279878 - DNA, 201 bp, Homo sapiens
gctcccagcagcagggacaaggcaattgggctcacgctctgctcccactggcttcctgcaagtcgctttccttcttggcctcagttggacaatccctaaartgggataagactgtcttacccaccttatgctcaacagtggaccagttcaacccccgaggctttttaaactctcagtattatgagattgtgattctgtaaa

SEQ ID NO: 279879 - DNA, 201 bp, Homo sapiens
tatcttgtcacgattcttgtagacttcactccttgtattttttaagtgtgtacatatcagatacatgggaggattttcaaagcctgcatcctagtcacgcstgactcttttgtcatgtgccttgcaaagcctcccaataccagttgtccatgatgcagcttcagactctgcagactcagccctggttgtgttgcatgactc

SEQ ID NO: 279880 - DNA, 201 bp, Homo sapiens
aaagcctcccaataccagttgtccatgatgcagcttcagactctgcagactcagccctggttgtgttgcatgactctgcagctgccacacacagaacctcmgtgctggttgttcccacacgggcatgactgacagataccaatggaacccggatatcatgacaatgttagacccaaaacaatctgtatttatttttaacaa

SEQ ID NO: 279881 - DNA, 201 bp, Homo sapiens
agtactcactttttgccacatagatgcattaggggaaacagatttttttcattcccaataattattcccagtactgttacactatttgacattaccaaaartttaaataggttattactgagatatattggcaactggagctgccaacataaaaactctgtttttgaataatgggggcctgggaggcctgctcagcgctgc

SEQ ID NO: 279882 - DNA, 201 bp, Homo sapiens
atgatgcagcttcagactctgcagactcagccctggttgtgttgcatgactctgcagctgccacacacagaacctccgtgctggttgttcccacacgggcrtgactgacagataccaatggaacccggatatcatgacaatgttagacccaaaacaatctgtatttatttttaacaaaaggaacctacttttttccacaaa

SEQ ID NO: 279883 - DNA, 201 bp, Homo sapiens
gctggaggctgtgtcactgaagacggctcggtgctcccagcagcagggacaaggcaattgggctcacgctctgctcccactggcttcctgcaagtcgcttkccttcttggcctcagttggacaatccctaaaatgggataagactgtcttacccaccttatgctcaacagtggaccagttcaacccccgaggctttttaaa

SEQ ID NO: 279884 - DNA, 201 bp, Homo sapiens
cggccctggcacgatggctccctccagtctatgaggacggcttcagtcagccccgaggctggaaccccggcttcttgtacaacgggttcccactgcccccrgtgggtactcagaacgctactatcctggactaagattgggtcctgtgatgctgagggagggaaatagccttttactgggttcttgctcgtgctgggtgct

SEQ ID NO: 279885 - DNA, 201 bp, Homo sapiens
atggccacctttgaagcccctttcttcaaagagtctgagtcttgattcttgaagaggtgtgatttttctttgaaaaattgcattatttcttgctgggcackttggctcacgcctgtaaagacagcactttcggaggctgaggtcgggggatcgcttgagcccaggagctcaagaccagcctgggcaacaaagcaatacctc

SEQ ID NO: 279886 - DNA, 201 bp, Homo sapiens
gtattccaccaaaaataaaacatctgctcagaaatcggtcacttgttgttataaaagtgagccacagagggcccctgacccttggcccctgggtggtttawtttttctctgcaggcctgttagtgccaaagcccaccaagaccaagctcaaatttactcatgcccaattgtgataaaaatagcccaaacaagcagactttt

SEQ ID NO: 279887 - DNA, 201 bp, Homo sapiens
gcctctcccctgtgcaggttacaatgagtggagggagttctgcggcctgcctcgcctggagacccccgctgacctgagcacagccatcgccagcaggagcrtggccgacaagatcctggacttgtacaagcatcctgacaacatcgatgtctggctgggaggcttagctgaaaacttcctccccagggctcggacagggcc

SEQ ID NO: 279888 - DNA, 201 bp, Homo sapiens
cgctcctgggagaatctctgctgaccacacaatgacattggcactgggagctgtgatctggggacacttagatctgagctggtttctctccttctgtggtracagctacagttttcattaagaattcacagcatctggatctaaaatctcctacgttcaaggcttcacacattgtattccaccaaaaataaaacatctgct

SEQ ID NO: 279889 - DNA, 201 bp, Homo sapiens
ctgcagtagagcctgaacctttctttggtttgatgcttcctgattcataaatcatgatcactcaaaaaaaactctttaaaaaatgtattgtgcctaagtttacattttaacaacctcaagaccagggcctcagccggcagcagtgagttcctgctcggcccttctgaaaggccctgctgctgtcttgggcgcctctgcccc

SEQ ID NO: 279890 - DNA, 201 bp, Homo sapiens; identical to SEQ ID NO: 56875

SEQ ID NO: 279891 - DNA, 201 bp, Homo sapiens
ctacacggggaggagcagggtcttcagaaggacagggtggggtctaacgtgcaggtacatgttgagggtggggatcccgggggacagtggcgttggagatrtgggggcggggctgctctctgaatgggtttcatacttctgattttattaaagaaatataagacattgaattctgcattcctaagcacaattatcttaaga

SEQ ID NO: 279892 - DNA, 201 bp, Homo sapiens
ggaacagtggtccccaggcaccctggccactccctcagctaagctgagtcttcctttcactgttctggatgttagaattcagcaaacgcttcttttttttktaatctttctgttgctgagaaataaaacaaaaagctttaaaaactggtgggctccttctccaggcccctttctttctgagggtccatcccccatgagcca

SEQ ID NO: 279893 - DNA, 201 bp, Homo sapiens
gtgatttctaagtcttccttttgggcatcctaaggccaaaccgatcctttaaagactctggtggcatgcagtggtgggttcacacgccactgagatagacsgaccctgacaggccgtggggcctgctttccatgcggggcctttggagatgacaggaacagtggtccccaggcaccctggccactccctcagctaagctga

SEQ ID NO: 279894 - DNA, 201 bp, Homo sapiens
ttgcatgttactttttatgtattttataaatttaaatttcatatttagaaaatgttcagtgagcacaagggcctcagtgttcattgttttcttcaagattkagttattttttacacattattagaacacaattgatttaataagcacggatctatgacagatgttggtaattattatgcatagagataaatatttattgga

SEQ ID NO: 279895 - DNA, 201 bp, Homo sapiens
atgtatgatactgtgggtacacatatatgtagcatgcatgatagtgtgtgggcagatgtgtacacagcatgtatgatactgtgggtacacatatatgtagyatgtatgatagtgtgtgggcagatgtgtacatagcatgtatgatactgtgggtacacatatatagcatgtatgatagtgtgggcagatgtgtacatagca

SEQ ID NO: 279896 - DNA, 201 bp, Homo sapiens
tcccagtactgttacactatttgacattaccaaaaatttaaataggttattactgagatatattggcaactggagctgccaacataaaaactctgtttttraataatgggggcctgggaggcctgctcagcgctgcagtttctgtaacctcctgacatggacggcgactctggtctcgcagaccccaggcctgtgagggtc

SEQ ID NO: 279897 - DNA, 201 bp, Homo sapiens
tgttttcccatacaagtaagttttagaaaacgtttctatgtttgttatgaaactaagtgctatttaaaacgtcaaacagaatggtataaaacaaaatgtgraagtctgtttctttgtcctattcccaggggtagcagttgtgaatatctggtgcatctcactggaaattccctgggtacacgtatatatagcatgtatgat

SEQ ID NO: 279898 - DNA, 201 bp, Homo sapiens
gggtggataccaagtgcgtagtaagaagtgtgtgctgctctcttagtaacaatttgtgaacccaagtatctaagacagatctcagtcaatttagaacgttyattttaacaaggataaggatgcacctgtgacgcagtgtcaggaggtcctgaggacatgtgcccaagatggctggggcacagcttgcttttacacatctta

SEQ ID NO: 279899 - DNA, 201 bp, Homo sapiens
aaagtttctgctgtgcggcatctggccttccccctgcccaggctcgtttcacacttttgggtaaacatggagctgcttacgtccctgctgtgggtctgccrtttgctggtgtgaggtgggcttcaatcagatgctcgccacggcccaggacgtggctcctcctctcactcaaggctctgatgtcagatgcctggctttgct

SEQ ID NO: 279900 - DNA, 201 bp, Homo sapiens
tgggcagatgtgtacatagcatgtatgatactgtgggtacacatatatatagcatgtatgatagtgtgtgggcagatgtgtacatagcatgtatgatactstgggtacacatatatgtagcatgtatgatagtgtgtgggcagatgtgtacatagcatgtatgatactgtgggtacacatatatatatagcatgtatgata

SEQ ID NO: 279901 - DNA, 201 bp, Homo sapiens
ggggtgccacagcgcagccctgcagactgggggtgccacagcgcagccctgcagactgggggtgccacagcgcagccctgcagactgggggtgccacagcrcagccctgcagactgggggtgccacagcgcagccctgcagactgggggtgccacagcgcagccctgcagactgggggtgccacagcgcagccctgcagac

SEQ ID NO: 279902 - DNA, 201 bp, Homo sapiens
tccttatgaattacccattctcaggtatttctttacagcaatgcaaaaaataggttaacaagtaagctttttaaaaatttatttttattgtatgtatttcygatgtgcaaaatgatgttttgatatacaaatacataatgaaatgatcactaccgtcaaacaaagttaacatacccatcaccttccgtagtgattggtgtg

SEQ ID NO: 279903 - DNA, 201 bp, Homo sapiens
ggggtgccacagcacagccctgcagactgggggtgccacagcaaagccctgcagactgggggtgccacagcgcagccctgcagactgggggtgccacagcrcagccctgcagactgggggtgccacagcgcagccctgcagactgggggtgccacagcgcagccctgcagactgggggtgccacagcgcagccctgcagac

SEQ ID NO: 279904 - DNA, 201 bp, Homo sapiens
gtgagaaaggtgtgggatttgggggaacgggtagaataataaggtgtagatgcttttcccccttaaatctcatgttaaaatgtgattctggatgttggagktgaggcctggtgagaggcgattggatcacaagggcaaatccctgatgaatggtttagccccatcctcttggtgatgagtcagttcttgcccaggaagtcc

SEQ ID NO: 279905 - DNA, 201 bp, Homo sapiens
  misc_feature (1)...(201): n = A,T,C or G
aagcctctggaatgagctcccttgaagccagtcatgacctgggcctccaggaggcctttcgggtcttctggggagctgtgccccttgggcctccggagagnccccacttattctccctgagaatggtgtcttatatctggaactcactgcttctgtgttcttctcccccatctcaaacacatccttgcatttgtctccaca

SEQ ID NO: 279906 - DNA, 201 bp, Homo sapiens
tttttgtcagaatatattttgaccaatagaacaaaactgcagaccagcctacttatgggaaacttcaccatctagcctattggctgaagccattgtcatcrccaaatcaaacagccaaatacaactgactctctctctctctcaggagagacttaactttatttttaacttactttattttaattcaaattcatttattaa

SEQ ID NO: 279907 - DNA, 201 bp, Homo sapiens
tggctgcctgcctgtcccggaagccacgtgggcatcaccgcagcaagatgggcttgaggaacaaagcaacactgtcagtgaatcgctgaactgtcattgcrctttgactgtgtgacattctgttccgtaggaaagcctgaggagtctcgtgtctctagcgtcttggaggaaagcaagcgcctggtggacaccgccatgtac

SEQ ID NO: 279908 - DNA, 201 bp, Homo sapiens
atgttcagaacaaaagttattcggaatcatttgaagtggtttgggcaagtgcgaaattaaggtgagtagctctgatcccatcctccaggcagctccgtgcrgtgggggtggacgcccctctgtagcggggaagtgaaggcctgtggagggaagcgaccccgggacctggctgcctgcctgtcccggaagccacgtgggcat

SEQ ID NO: 279909 - DNA, 201 bp, Homo sapiens; identical to SEQ ID NO: 56891

SEQ ID NO: 279910 - DNA, 201 bp, Homo sapiens
tgaccttactcactgtctccttctctggaggttttggtgggagaacagccacgtcttcacggatgcacagaggcgtgagctggagaagcactccctgtctygggtcatctgtgacaacactggcctcaccagggtgcccatggatgccttccaagtcggcaaattccccgaagactttgagtcttgtgacagcatcactgg

SEQ ID NO: 279911 - DNA, 201 bp, Homo sapiens
atggcttggactacacggggaggagcagggtcttcagaaggacagggtggggtctaacgtgcaggtacatgttgagggtggggatcccgggggacagtggygttggagatgtgggggcggggctgctctctgaatgggtttcatacttctgattttattaaagaaatataagacattgaattctgcattcctaagcacaat

SEQ ID NO: 279912 - DNA, 201 bp, Homo sapiens
ggctggagggaccaggcctggatggaggaggggatggggctggagggcctgggtggaggagggcagggggtaggtgcactgttgagtcagaagccggagcrgagatggcttggactacacggggaggagcagggtcttcagaaggacagggtggggtctaacgtgcaggtacatgttgagggtggggatcccgggggacag

SEQ ID NO: 279913 - DNA, 201 bp, Homo sapiens
agcaggagcgtggccgacaagatcctggacttgtacaagcatcctgacaacatcgatgtctggctgggaggcttagctgaaaacttcctccccagggctcrgacagggcccctgtttgcctgtctcattgggaagcagatgaaggctctgcgggacggtgactggtacgttcctatccagagcgtcttccttcacgttctg

SEQ ID NO: 279914 - DNA, 201 bp, Homo sapiens
gactgtggcttcctgaggtctccccagaagccaagcagatcctgggtccatgtttgcacagcccgcagaaccttgagccaattaaatcccttttccttatraattacccattctcaggtatttctttacagcaatgcaaaaaataggttaacaagtaagctttttaaaaatttatttttattgtatgtatttccgatgtgc

SEQ ID NO: 279915 - DNA, 201 bp, Homo sapiens
agccagaagaaccgtgagccaattaaacttcttttctgggtaaattaccaagtctcaggtatttctttatagcaatgtgaaaatggcctaacacagaaaaytggtactgaggagtagggtgtttctataaagatacctgaaattgtggcagtggctttggaactgtgtaatggcaggggttggaagagtttggagggctga

SEQ ID NO: 279916 - DNA, 201 bp, Homo sapiens
tgcacaggacagcagctgacaactgccccgcgtgctgggcacatgcttctgcctgctccaatatttcaaagctgacttattgtttgcttgaaatgtgaatragttactgaaaaaatattatgtgtctcacagtatttctattttacagcctttaatagttgttttgcagctttaaatctgtttggaaaatgatgcccaatg

SEQ ID NO: 279917 - DNA, 201 bp, Homo sapiens
cagggtccttcttgtttgtatgatctagtcattgccacaggaggcactatgttggaagggaatagggcagggtccttcttgtttccatggtgtagtcagtrccacaggaggcactatgttggaagggaacagggcagggtccttcttgtttgtatgatctagtcattgctgcaggagctaccagttgtaaatgaatggagc

SEQ ID NO: 279918 - DNA, 201 bp, Homo sapiens
gtaaagtcattgttctagatgccaggatacagagatgagttcgatcatttcatattctcagaagtccgtgctccttccataaagtcatttttctagatgcygggatacagagatgagtttgatcatttcatatcctcagaagtctatgctccttctgtaaagtcattgttctagatgccaggatacagagatgagttcgat

SEQ ID NO: 279919 - DNA, 201 bp, Homo sapiens; identical to SEQ ID NO: 56877

SEQ ID NO: 279920 - DNA, 201 bp, Homo sapiens
catcgatgtctggctgggaggcttagctgaaaacttcctccccagggctcggacagggcccctgtttgcctgtctcattgggaagcagatgaaggctctgygggacggtgactggtacgttcctatccagagcgtcttccttcacgttctgcacagaggcaggtggtctgcgttggttctgaagccagccagacctgcatt

SEQ ID NO: 279921 - DNA, 201 bp, Homo sapiens
ttctcagaagtccgtgccccttctgtaaagtcattgttctagataccgggatacagagatgcgttagatcatttcatatcctcagaagtccgtactccttmtgtaaagtcatcgttctagatgccgggatacagagatgagtttgatcatttcatatcctcaaaagtctgagctccttctatgcagtcattgttctagatg

SEQ ID NO: 279922 - DNA, 201 bp, Homo sapiens
catagacgacaagtgtggcttcccagagagcgtggagaatggggactttgtgcactgtgaggagtctgggaggcgcgtgctggtgtattcctgccggcacrggtatgagctccaaggccgggagcagctcacttgcacccaggaaggatgggatttccagcctcccctctgcaaaggtcagtcctttcttcaatgacaatt

SEQ ID NO: 279923 - DNA, 201 bp, Homo sapiens
atgtaacagttttctgactgacaatcagctgaaggaattattatcagtaggacggaatgtctgggttatgttaaggggttgtggacaccaaggttttatgwgcttcacagagaagagatggtgaatgtttcttatcagacttaaggtctgtgttgatgttgatgctggaggggtagaaggaggtgtgtctgacccaccacc

SEQ ID NO: 279924 - DNA, 201 bp, Homo sapiens
gatgtaacagttttctgactgacaatcagctgaaggaattattatcagtaggacggaatgtctgggttatgttaaggggttgtggacaccaaggttttatkagcttcacagagaagagatggtgaatgtttcttatcagacttaaggtctgtgttgatgttgatgctggaggggtagaaggaggtgtgtctgacccaccac

SEQ ID NO: 279925 - DNA, 201 bp, Homo sapiens
tggccgagtcggggaccaagaccctgtggcctatgtggaccccggctcctccactcagcggtgagactggggagggtccctccacctctcccagtgctttygctctgtctagggatgtcgtcagcaccagggccccaggagtgcagggaggttgctgcctccagcctggccctcggcggaggctgcacccaggccagctct

SEQ ID NO: 279926 - DNA, 201 bp, Homo sapiens
cttcactcacgattcctggttttccgtgttggcattacagttaaggaattgatggcaggtgcttcagggtatagcatgttgcgtgttctacgttaacaagycttcctatggtgcacttcactgtacacctgcgtctctccttgcccaaatacccagacgtttcacgtgtccattttagcttcattttaagtatgaatgacc

SEQ ID NO: 279927 - DNA, 201 bp, Homo sapiens
tgaattttgaatcttctgttttgtcttaacaactagaattctaaaatcattttatggacataagaatgctttaagaaattcaataggcatttaggggttttatttatcacttttataaagactaaatttctaatagtactcactttttgccacatagatgcattaggggaaacagatttttttcattcccaataattattc

SEQ ID NO: 279928 - DNA, 201 bp, Homo sapiens
aagccacaggggcagagctgcccaaggctatgggagcccattcctcacaccagggtacaggacacggagtcaaaggagattgtttcagagctttaagattyaatgaattgcctgctgagtgtagactggtgtggggcctatcaagccttcctgttggctgatttctcccttttagaatggaaaaatatacccaatgctggt

SEQ ID NO: 279929 - DNA, 201 bp, Homo sapiens
tcctgctcttactccgggacctgaccactccccattcaacttctgccatggttgtcggcttcatgaggccctcaccagaagccaggcaggtgcaggagccmtgcttatatagccagaagaaccgtgagccaattaaacttcttttctgggtaaattaccaagtctcaggtatttctttatagcaatgtgaaaatggcctaa

SEQ ID NO: 279930 - DNA, 201 bp, Homo sapiens; identical to SEQ ID NO: 56883

SEQ ID NO: 279931 - DNA, 201 bp, Homo sapiens
acagcatgtgctgagctcgggagagggtgcctgtgggaaccaagcctctggaatgagctcccttgaagccagtcatgacctgggcctccaggaggcctttygggtcttctggggagctgtgccccttgggcctccggagagaccccacttattctccctgagaatggtgtcttatatctggaactcactgcttctgtgttc

SEQ ID NO: 279932 - DNA, 201 bp, Homo sapiens
tagcatgtatgatactgtgggtacacatatatgtagcatgcatgatagtgtgtgggcagatgtgtacacagcatgtatgatactgtgggtacacatatatrtagcatgtatgatagtgtgtgggcagatgtgtacatagcatgtatgatactgtgggtacacatatatagcatgtatgatagtgtgggcagatgtgtacat

SEQ ID NO: 279933 - DNA, 201 bp, Homo sapiens
tgcccccaaaatgcccaaacacttgcctggcgaacaaatacaggcccatcacaggagcttgcaacaacaggtattgtttgtggattttcttaatcttctcrtgaaagttggatctgaacatgactagatgccatcatgaaggaacttctaccaccactggtggatctgtatccacccctgagcccctggttcctgtccttg

SEQ ID NO: 279934 - DNA, 201 bp, Homo sapiens
acacagcatgggggatccgaacctgttgtagtggaatccttcagagtcagtacggcgtctgtgaggcactcaggccccagaggacctggggaaggacctgygctccttagagacccacgtctgccctggaaatgagcagggggagctgttcccagcctggtcacacatgaaccacagcaaggacagcctcccaccccagtc

SEQ ID NO: 279935 - DNA, 201 bp, Homo sapiens
attaattagtaattaagtaccaaagataccatagacaaataatctattttatatcttctttatgtgccatagaaacctcaagaaaagaggaatcctttctscagctcagcttctgtctttttccaaacttcctgagccaacaagcggagtgattgcccgagcagcagagataatggaaacatcaatacaagcgatgaaaag

SEQ ID NO: 279936 - DNA, 201 bp, Homo sapiens
aagtggatggcagggtttctaaggcttgtttttcctttgttggtattttcctaattgcctaggacgtatcacataaaattacttaacaagtagtggaaaasaatgatttttctttcaccatttcacctggacattttgtttgtatggtgtagtcggtgccgcaggagctaccttgttgaaagagaagggggcaggctgctt

SEQ ID NO: 279937 - DNA, 201 bp, Homo sapiens
ccggaagccacgtgggcatcaccgcagcaagatgggcttgaggaacaaagcaacactgtcagtgaatcgctgaactgtcattgcgctttgactgtgtgacrttctgttccgtaggaaagcctgaggagtctcgtgtctctagcgtcttggaggaaagcaagcgcctggtggacaccgccatgtacgccacgatgcagaggt

SEQ ID NO: 279938 - DNA, 201 bp, Homo sapiens
cctgaggagtctcgtgtctctagcgtcttggaggaaagcaagcgcctggtggacaccgccatgtacgccacgatgcagaggtgagccttgcggaggggccrccgccccaaatgccaccgacaggcgcatcctccctgacatccacacacgtgtggcctgattttcgcaattgcagatgaaaacctgaagcttgccattgtt

SEQ ID NO: 279939 - DNA, 201 bp, Homo sapiens
ctttgtcacaatagtgtggcgccaggatggctgcaggcttgatgttcaccgatgcaggcagcaaaggtgcttagcatggaagaactcctcaaagggactcragctcctcactgctgggtgtgctgaggtcagaaggaagatgccccccccgagagagggatcagcgggacccaggcagagccctggcttggacaggccctg

SEQ ID NO: 279940 - DNA, 201 bp, Homo sapiens
ccattcccgttggactgttagtgagcattcatgattgaaagactagtttgtttctctcatatctgaaaatggaatgcattccttcctggcttttttttctkttgaatatctcaatttcactggtatcttgttaatcaaagttttgtggcattatcctcaaagatttatataaaccatattggagaagtaatcgatgattac

SEQ ID NO: 279941 - DNA, 201 bp, Homo sapiens
cagcctagatcacaccccagacaaaaaacctatgaaacaggcaggattcattacagacccatccatcacctctcctcctcctgggacccctccaaatgcayccgactgcaccctgaccagggccagcagcacagctgcctgcctgttctcccacctccacctccggatgtccccgcccggcatggggcctgggtgctcaac

SEQ ID NO: 279942 - DNA, 201 bp, Homo sapiens
aatgcacactgcagtccaaggtttacttaactgttcccatagagccattcccgttggactgttagtgagcattcatgattgaaagactagtttgtttctcycatatctgaaaatggaatgcattccttcctggcttttttttcttttgaatatctcaatttcactggtatcttgttaatcaaagttttgtggcattatcct

SEQ ID NO: 279943 - DNA, 201 bp, Homo sapiens; identical to SEQ ID NO: 56876

SEQ ID NO: 279944 - DNA, 201 bp, Homo sapiens
aagtattgatgctacgcaggtgaatttagtaacaggactgacgtgtgaacatggccggaaacacttgccgtcttcctgttaccgcgtccggaacttcacgktgatacccagaaatgggatcttaacctcttacacattccaggtgctaaaacaaataacacaggagtgctttcattggaaactactggtatagtggaatta

SEQ ID NO: 279945 - DNA, 201 bp, Homo sapiens
gagaccagcctggccaacatggtgaaaccccatctctactaaaaatacaaaataaacaaacaaaaaacattagccgtgtgtggtggcagatgcctgtagtyagctactcaggaggctgtggcaggagaatcgcttgaacctgggaggcagagggtgcaggtgagccgagatctcaccattgcattccagactgggcaacag

SEQ ID NO: 279946 - DNA, 201 bp, Homo sapiens
ttgagttgcctgggcagttgcagtgggtttagaaggaaataagaggaaaataaaggaaaattccaggtgtcttatatctcaagcttttgtgggaacaggargttccctgattcttgagagctgaaagaaatctccataaagcccggaatgctggtccttgaggtccacacctgccaccgatcctgcgacgcccaggccgcc

SEQ ID NO: 279947 - DNA, 201 bp, Homo sapiens
tgcaaacctctctgtaaaaccatcctaagacgtaactctgtgcacttgccaggccctcagcccagagccgtgcaaacttctctcttcagagcacacttgcraggccctcggccaagagctgtgcaaacttctctctaaaaccatcctaagatgtaactctgcagctaggagagaaaaccgcgccaggtgaagtgagctgcc

SEQ ID NO: 279948 - DNA, 201 bp, Homo sapiens
aaaggcacgacggccgggagcactgaacgcttgccaggccctggaccaaaagccgtgcaaacctctctgtaaaaccatcctaagacgtaactctgtgcacytgccaggccctcagcccagagccgtgcaaacttctctcttcagagcacacttgcgaggccctcggccaagagctgtgcaaacttctctctaaaaccatcc

SEQ ID NO: 279949 - DNA, 201 bp, Homo sapiens
ttacctccacagctctgcaacatggagattggtcttgggcaggtggtggacgtcctggattctgaggaagacctgcacgcaattcagtgggcatcaggagmcttcagatgctttcatcaaaggcacaggcacaagcaggccttggtttagaaaggtcacttgggtgacagcaggagggacagaaggatggtggggagatca

SEQ ID NO: 279950 - DNA, 201 bp, Homo sapiens
cccggcctcccttcctgtagttgccccagagaggcctcctcaaaacgtgtttcctgggaactcaaagtcctttgctttggtcttgcagcttcttggaaaaygattgttcttttgctgaggggctgtgcagcagagttctaacgatccattcgagtttccatcttggggcgctcagggggctccctcgtggaagcaggagtc

SEQ ID NO: 279951 - DNA, 201 bp, Homo sapiens
tggcaggagagctaatgtgagctgatggaaactgagaagcagcagataaaggaaaagccatctgccctgcctctattgcctaaaagtagaacataaatccrcaaaagtgaccatttccctctccaacagaaaggacagaaattcatcaccagggaccccaggccctcaacagcctggaaccagccccagaggcatttgtgt

SEQ ID NO: 279952 - DNA, 201 bp, Homo sapiens
atatattggcaactggagctgccaacataaaaactctgtttttgaataatgggggcctgggaggcctgctcagcgctgcagtttctgtaacctcctgacayggacggcgactctggtctcgcagaccccaggcctgtgagggtcgctcactgcggtagaggctgcgtggagtcagtggagggagcccctcagcagggagac

SEQ ID NO: 279953 - DNA, 201 bp, Homo sapiens
tgaaaattctgtaataagagtctttgaaaatggaaaaaaaatctatgcttgaccattgttgtctaagagaagtttgctatcaatccctcctctaacgcccygaacagaatgttcttcaccagaaccctgtgtattcatcaccacacaggctgagaggcattccagcatttgtgcaacatcaagatttatgtgcaattatct

SEQ ID NO: 279954 - DNA, 201 bp, Homo sapiens
tctcccacaggcagggacatctaaagtgatgttctttcttcccagctctgcggcctctgaagctgtgatgagcttcagcctccatgtctttacctcctgcmcaggccttgcatattttccctctagagttggaaaaagatgcaaatgtgtttcctcttagagcaataagaaaggaaattacccttctaacttcgttgtttt

SEQ ID NO: 279955 - DNA, 201 bp, Homo sapiens
atgccacgatccacccgctggtgaggaggctggacgccagcttccaggagcaccccgacctgcccgggctgtggctgcaccaggctttcttcagcccatgkacattactccgtggaggtgagtgagtgcggtccctgcagctggtccccatgaactcttccttctttttttaatttttttaaattatattttaagttctag

SEQ ID NO: 279956 - DNA, 201 bp, Homo sapiens
aaaaaaaaaaaattgagatattgttgtttctctagaactgagccaagagctgtccttgccttgtgcatggtattttccaggtggtttggacccactaataygaggccttcttgcaagaccagccaaactgcaggtgcaggatcagctgatgaacgaggagctgacggaaaggctctttgtgctgtccaattccagcacctt

SEQ ID NO: 279957 - DNA, 201 bp, Homo sapiens
atctcagcaccctccttctcaactcctccctcagtccccactgcactcagagtgagttcagatccgcccaacagtggtgactgcccacctcctctggtccrcaatggcaggagatggacaggagctttggccacacacagaggcatgtgattcagtctggggttcagaatggttttctgaagaaggtgatatgcgagtgag

SEQ ID NO: 279958 - DNA, 201 bp, Homo sapiens
gtcggcaaattccccgaagactttgagtcttgtgacagcatcactggcatgaacctggaggcctggagggaaacctttcctcaaggtgaagttcggtctcytctcacaccacgttacagcacgtgcatctcatcaaacaaagcttatcttccccaggagctgattttaacttttcactgtttagaaaatagtgtcaacgcc

SEQ ID NO: 279959 - DNA, 201 bp, Homo sapiens
ccctgttatggccaacaccatctcagcaccctccttctcaactcctccctcagtccccactgcactcagagtgagttcagatccgcccaacagtggtgacygcccacctcctctggtccacaatggcaggagatggacaggagctttggccacacacagaggcatgtgattcagtctggggttcagaatggttttctgaag

SEQ ID NO: 279960 - DNA, 201 bp, Homo sapiens
tctagcgtcttggaggaaagcaagcgcctggtggacaccgccatgtacgccacgatgcagaggtgagccttgcggaggggccgccgccccaaatgccacckacaggcgcatcctccctgacatccacacacgtgtggcctgattttcgcaattgcagatgaaaacctgaagcttgccattgttaatttacttccccagtgt

SEQ ID NO: 279961 - DNA, 201 bp, Homo sapiens
gtggtccccaggcaccctggccactccctcagctaagctgagtcttcctttcactgttctggatgttagaattcagcaaacgcttcttttttttgtaatcwttctgttgctgagaaataaaacaaaaagctttaaaaactggtgggctccttctccaggcccctttctttctgagggtccatcccccatgagccacattgt

SEQ ID NO: 279962 - DNA, 201 bp, Homo sapiens
acacgggtaaatctagtaccatgtcgtagttactctcaggcatggatgaataaatgttatagctgcatttgtctggccttttcttgtaaacattgcctgayttgttccttctggggctttgccattaaaatgtatttacagattacacatctttattttgtgaaccctggaaacaccactcttgcaatcctcctgtctcca

SEQ ID NO: 279963 - DNA, 201 bp, Homo sapiens
atgccttccaagtcggcaaattccccgaagactttgagtcttgtgacagcatcactggcatgaacctggaggcctggagggaaacctttcctcaaggtgamgttcggtctcctctcacaccacgttacagcacgtgcatctcatcaaacaaagcttatcttccccaggagctgattttaacttttcactgtttagaaaata

SEQ ID NO: 279964 - DNA, 201 bp, Homo sapiens
agtggtccccaggcaccctggccactccctcagctaagctgagtcttcctttcactgttctggatgttagaattcagcaaacgcttcttttttttgtaatmtttctgttgctgagaaataaaacaaaaagctttaaaaactggtgggctccttctccaggcccctttctttctgagggtccatcccccatgagccacattg

SEQ ID NO: 279965 - DNA, 201 bp, Homo sapiens
taactccagggcacagatctcctaggggcacctggagctctgtgaacaagaaccacaccaggaagtgcatgatcccaaagggtcatctttctgctaccacrgggtcctcctatgtcctgaccaatggtctcttcctacccaggtccgggaggtgacaagacatgtcattcaagtttcaaatgaggttgtcacagatgatga

SEQ ID NO: 279966 - DNA, 201 bp, Homo sapiens
cttctggccacctgacagggtgtcaggcgtttttggggacaaaatgaatcctcgcacacctggcccagcaggatgagggcatcccgtgtcccgctgctgcyccgctgagaaagaggtgccgttacaggagtggaaagctgacttcgtccacagtttctctcccagcatttcacactgcattgctgtttgcttcttttcatg

SEQ ID NO: 279967 - DNA, 201 bp, Homo sapiens
gattgtgaggcctccacgtggaatcgtaagtccattaaacctccttttcttctcagactcaggtatgtctttatcagcagcatgaaaacagactaatacasatggagtaggggagggctactgaagaaatgaagcctctcagctactggaaatagatgcaatcagggtggaattactcacggacagtcctccagaggcagt

SEQ ID NO: 279968 - DNA, 201 bp, Homo sapiens
gaaaagagctcctgtccaggcccttctgtcttgtatcaagtgtgtgctgttactggagcagtcagaattcagacgttattaatgtttgttctgcatttttrcaggagagtgctgggatggaaggccgggatactcacaggctgccgagagccctctgagggcaaagtggcaggacactgcagaacagcttcatgttcccaa

SEQ ID NO: 279969 - DNA, 201 bp, Homo sapiens
cgtcaaacaaagttaacatacccatcaccttccgtagtgattggtgtgtacatgtggtgagagcacttaaaatctctcttagcacattagtttttagtatycaatattattaactacggaaggaatacaagtgcttagcacagcacctaaaactttattttcactcagtaagcactatgtattttggggttattattaata

SEQ ID NO: 279970 - DNA, 201 bp, Homo sapiens; identical to SEQ ID NO: 56896

SEQ ID NO: 279971 - DNA, 201 bp, Homo sapiens
cactgacaggagggctgtcttccatgtacacctaggtcggagtccgcaagggtggggcggtgacggtgcactggactttgctggcggtgctggaatggctrtgcggagggcgctgtggtgcggggactgcgctccccaggaggacctcgggagttgtttgtttgtaggtattacagtattgtctaacgttgccgcgttgac

SEQ ID NO: 279972 - DNA, 201 bp, Homo sapiens
gtgccctcacagtctctctaccccacacctgcccgccaccgtgccctcacagtctctctaccccacaccggccctgccaccttgccctcacagtctctctwccccacacctgcctgccaccgtgccctcacagactctctaccccacaccggcccgccaccgtgccctcacagtctctctaccccacacctgcctgccacc

SEQ ID NO: 279973 - DNA, 201 bp, Homo sapiens
gctgaggtatttggtccaggctataatgtagaacttaagaactccataatttagaattttttaaaatgatttccgttgtaagtatagcccatcttgaaaayttagaacacgaggaacctaaaaaggtttcccattacttcatcaccaagacagaattccattaaaggtcagtgcctgtccttctaggctgctccttcatgt

SEQ ID NO: 279974 - DNA, 201 bp, Homo sapiens
tctctacccgacaccggccctgccaccgtgcccttacagtctctaccccacactggccctgctaccatgccctggcagtctctctaccccacaccggcccrccaccgtgccctcacagtctctctaccccacacctgcccgccaccgtgccctcacagtctctctaccccacaccggccctgccaccttgccctcacagtc

SEQ ID NO: 279975 - DNA, 201 bp, Homo sapiens
tctcggtccactgtcctgttacgggacactgtcctgtccactgtcctgtcaggcctcctatggaaatggcagttcctgacgtcagaagatgtgggtctttytggtccatgccttagagccacatgctcactgccgggtctgtagacatcgatgtttaggagaataggctgaggtatttggtccaggctataatgtagaact

SEQ ID NO: 279976 - DNA, 201 bp, Homo sapiens
ggacagacgtagagtggccagcctgggctacacagcatgggggatccgaacctgttgtagtggaatccttcagagtcagtacggcgtctgtgaggcactcrggccccagaggacctggggaaggacctgcgctccttagagacccacgtctgccctggaaatgagcagggggagctgttcccagcctggtcacacatgaac

SEQ ID NO: 279977 - DNA, 201 bp, Homo sapiens
gtcgggagtttgagaccagcctggccaacatggtgaaaccccatctctactaaaaatacaaaataaacaaacaaaaaacattagccgtgtgtggtggcagrtgcctgtagtcagctactcaggaggctgtggcaggagaatcgcttgaacctgggaggcagagggtgcaggtgagccgagatctcaccattgcattccaga

SEQ ID NO: 279978 - DNA, 201 bp, Homo sapiens
aacagccttgacatggttacctgtacatgaaacactttaatagctgctgctagatagagacaattaacagccgatagtcaatagctccaatcccttgaaayttcttgacccttttcttatacttctttttatttttttgagacagagtctcactctgtcacccaggctggagtgcagtgccgcaatctctgctcactgcaa

SEQ ID NO: 279979 - DNA, 201 bp, Homo sapiens
aagaccagtgcataaaccaggagcaaatgtcgtcatttcttcagctctaaagcactctatgggcataagatactgagatggtaatgcaggcattcaaaagkcatattggtgcttcctatgatgcagagcaagtaagcgaaatgtctttttaattaatttatcaagaattttttctctgcagcgccatgagctacttggcct

SEQ ID NO: 279980 - DNA, 201 bp, Homo sapiens
atcagttgaacccaggaggtggaggttgcagagtcgagatcacaccactgcactccagtctaggtgacagagtgagaatccatctcaaaaaaaaaaaaaaragagagagagagaaaaaaagaaaagcatcagtcctggatagagtttaggttgtatcaacttgcctgcaaactgtaggaaggtgagaataagaagggaaag

SEQ ID NO: 279981 - DNA, 201 bp, Homo sapiens
accaagaccctgtggcctatgtggaccccggctcctccactcagcggtgagactggggagggtccctccacctctcccagtgcttttgctctgtctagggrtgtcgtcagcaccagggccccaggagtgcagggaggttgctgcctccagcctggccctcggcggaggctgcacccaggccagctctgttccctccagaca

SEQ ID NO: 279982 - DNA, 201 bp, Homo sapiens
cgctccctgttatggccaacaccatctcagcaccctccttctcaactcctccctcagtccccactgcactcagagtgagttcagatccgcccaacagtggygactgcccacctcctctggtccacaatggcaggagatggacaggagctttggccacacacagaggcatgtgattcagtctggggttcagaatggttttct

SEQ ID NO: 279983 - DNA, 201 bp, Homo sapiens
aacagtggtccccaggcaccctggccactccctcagctaagctgagtcttcctttcactgttctggatgttagaattcagcaaacgcttcttttttttgtratctttctgttgctgagaaataaaacaaaaagctttaaaaactggtgggctccttctccaggcccctttctttctgagggtccatcccccatgagccaca

SEQ ID NO: 279984 - DNA, 201 bp, Homo sapiens
tttttccaaaatatatcagattatgatcgacttgactgaagtgtgaaatgaaagtgggttggagtgttcctgccaaagacaagcacggctgccttgccgtygctcgtgccgtgctctctaccctccacagtcacggtgccggaccctctcccgataactggacacgtgtctcccacaggacacgcactggcactaaatcca

SEQ ID NO: 279985 - DNA, 201 bp, Homo sapiens
tgaccgctattctgacctcctgatggcatggggacaatacatcgaccacgacatcgcgttcacaccacagagcaccagcaaagctgccttcgggggagggkctgactgccagatgacttgtgagaaccaaaacccatgttttcccatacaagtaagttttagaaaacgtttctatgtttgttatgaaactaagtgctattt

SEQ ID NO: 279986 - DNA, 201 bp, Homo sapiens
ccatgccttagagccacatgctcactgccgggtctgtagacatcgatgtttaggagaataggctgaggtatttggtccaggctataatgtagaacttaagractccataatttagaattttttaaaatgatttccgttgtaagtatagcccatcttgaaaatttagaacacgaggaacctaaaaaggtttcccattacttc

SEQ ID NO: 279987 - DNA, 201 bp, Homo sapiens
tgctgtggggtgaaggccactggcccaggacagggtatggcccagactcaggcaggacaacctggcttgcccaggccctggaaggttcttctaaccaggcytctttctgtgccccagactccgggaggctccctcgggtgacttggatctccatgtcgctggctgctctgctgatcggaggcttcgcaggtctcacctcga

SEQ ID NO: 279988 - DNA, 201 bp, Homo sapiens
gagcatctcaggagctgggaggtgaacagctggggatgctggcttcagtgcttcccccaccaccagcacccttatgattatactgctgcccctgcaaaaaygaccatggaaaattaggatgctgggcatgacctttctgcatccctgacgcacaagcctaactgttgttgcacggaggccacacacgtccctgatgaaaga

SEQ ID NO: 279989 - DNA, 201 bp, Homo sapiens
taaatgtccctccctccctgcgtcatgctgtggggtgaaggccactggcccaggacagggtatggcccagactcaggcaggacaacctggcttgcccaggycctggaaggttcttctaaccaggcctctttctgtgccccagactccgggaggctccctcgggtgacttggatctccatgtcgctggctgctctgctgatc

SEQ ID NO: 279990 - DNA, 201 bp, Homo sapiens
cagagtgcccactgagacactgcttaatggagctgtgggaagggggccatcgccctgcagaccccagaattgtagatccaccagcagcttgcactctgcamctgaaaaagcctcaagtgctcaactccaacccatgagagcagccaggtgggctgtgttcagggaagccacaggggcagagctgcccaaggctatgggagc

SEQ ID NO: 279991 - DNA, 201 bp, Homo sapiens
ctggaggctggagtccaagatcaaggggagggcacggttggctccccctgaggactcaccccttggctgcagataccaccttctccccatgtcctcccagrgcagtccctctgtgtgtccatggcctcatctcctcatctcataaggacatagctgccttgggccacggcccacagtgacatccccatgccactgcaatta

SEQ ID NO: 279992 - DNA, 201 bp, Homo sapiens
taaaagtctgtggcatctcccccactctactctcctgctcctgctcttactccgggacctgaccactccccattcaacttctgccatggttgtcggcttcrtgaggccctcaccagaagccaggcaggtgcaggagccatgcttatatagccagaagaaccgtgagccaattaaacttcttttctgggtaaattaccaagt

SEQ ID NO: 279993 - DNA, 201 bp, Homo sapiens
ggggtgccacagcacagccctgcagactgggggtgccacagcacagccctgcagactgggggtgccacagcaaagccctgcagactgggggtgccacagcrcagccctgcagactgggggtgccacagcgcagccctgcagactgggggtgccacagcgcagccctgcagactgggggtgccacagcgcagccctgcagac

SEQ ID NO: 279994 - DNA, 201 bp, Homo sapiens
tgggctgggctgcaaactgtctgcattcggaatgacccatggctggggcccctgggaaatagcagcagatgaacagagcagactgtggcttgtggggtggytgaagcacctttccaggctctcctgaactgagctccccacaggctgggctctgcagaacatggacatgacgggaaagtgaccagccagcaagggagagtc

SEQ ID NO: 279995 - DNA, 201 bp, Homo sapiens
gttaggaggagccccttggacacctgtgtggttcagaaacgttgccacataaattgcacctgaggtggagaggctgtttgcacgatgaagtcgtgcaactrctctctgggatgctgacccatagcacagtgcttggcaccaatggatgaactagcacagggacggaaaccccactgggaaacatttggatgctgccttttc

SEQ ID NO: 279996 - DNA, 201 bp, Homo sapiens
tattttatcccactttacgaatgagaaaactgagatgcggagaggtcaccaagtcaaactcaagcgacaccccagcccccctcggtgatcaggctgaagcratgactaaatgccatttgctcctaatgacaccgtcacaagcactgaagccaccaaggaccgttgggcctgtacagaggagaggcagactcaggccctccc

SEQ ID NO: 279997 - DNA, 201 bp, Homo sapiens
ctttagggttttctaggtaaacaatcatatcattagcaaacagcaacagtttgacttcctcttcgccgatttggatgccctttatttcttttgtctgattsctctggctaggatttcgagtactatgttgaagaggagtggtgagagtaggcatccttgtcttgttcccattctcagagggaatgctttcaacttttcccc

SEQ ID NO: 279998 - DNA, 201 bp, Homo sapiens
gcaggtggtaagtccttcactttttgactgttacttagacacaaagcaatctcctttcctctggacatggctgcaatgaagctgctttattttcccgaagstaacacaggttactggtatctcaaaggcattgatctcagagctattttgtacaacgtaatagactctccggatctttcattatgctttaaataatgaaag

SEQ ID NO: 279999 - DNA, 201 bp, Homo sapiens
atagtctggcttccagctcttatagaaaaataattatttaccagactcaagttacagacagacttcctttgagctactgtcataggggagagaggtctccrgaaagaaccaagtgcaaggctcaaatgcagcaaaggtagctgggacgtccagccagggcggagaggggtcagtgcaaaacgcttcatgactcaactgcat

SEQ ID NO: 280000 - DNA, 201 bp, Homo sapiens
gctatcagaagaccagtgcataaaccaggagcaaatgtcgtcatttcttcagctctaaagcactctatgggcataagatactgagatggtaatgcaggcaktcaaaagtcatattggtgcttcctatgatgcagagcaagtaagcgaaatgtctttttaattaatttatcaagaattttttctctgcagcgccatgagcta

SEQ ID NO: 280001 - DNA, 201 bp, Homo sapiens
atttgcaggtggtaagtccttcactttttgactgttacttagacacaaagcaatctcctttcctctggacatggctgcaatgaagctgctttattttcccraagctaacacaggttactggtatctcaaaggcattgatctcagagctattttgtacaacgtaatagactctccggatctttcattatgctttaaataatg

SEQ ID NO: 280002 - DNA, 201 bp, Homo sapiens
  misc_feature (1)...(201): n = A,T,C or G
gttttacctgtgcacaccccgcagtgcctgtcacattgtctgggacacagtagttactcaataaatgtctgcttaattaattagtaattaagtaccaaagntaccatagacaaataatctattttatatcttctttatgtgccatagaaacctcaagaaaagaggaatcctttctccagctcagcttctgtctttttccaa

SEQ ID NO: 280003 - DNA, 201 bp, Homo sapiens
gatttgcaggtggtaagtccttcactttttgactgttacttagacacaaagcaatctcctttcctctggacatggctgcaatgaagctgctttattttccygaagctaacacaggttactggtatctcaaaggcattgatctcagagctattttgtacaacgtaatagactctccggatctttcattatgctttaaataat

SEQ ID NO: 280004 - DNA, 201 bp, Homo sapiens
gccgagagtctcctgtctttggctggcatccatgaactatggctggctaatgtgttagttgtaagtagctataatctcagtgtcctcaaagttcatgactrtatagtaccttttacaaacatgtcagccgatataaaacacgtgttttatattttaagttaaatgtcatacgcatttgtatgtacatgaagttatttctaa

SEQ ID NO: 280005 - DNA, 201 bp, Homo sapiens
atgtctggctgggaggcttagctgaaaacttcctccccagggctcggacagggcccctgtttgcctgtctcattgggaagcagatgaaggctctgcgggayggtgactggtacgttcctatccagagcgtcttccttcacgttctgcacagaggcaggtggtctgcgttggttctgaagccagccagacctgcattcacat

SEQ ID NO: 280006 - DNA, 201 bp, Homo sapiens
ggttctgaacctcccaggaacgtatgagctgggaccttgagaaacagccgcttctagtagagggaggagggagtgcgcgggcagacaatggcaggtctgtrtctggtatcccgggaagctcctgggatggctagagtgcccccctccccttctcctccccaccacaaggtcccagagcctgcaaagatcattccgtcacat

SEQ ID NO: 280007 - DNA, 201 bp, Homo sapiens
ccccaccgggcataaatatacccacaggcatgcacacactcacaggcacaggtgaccgtgaccacccgtacacctgtgtgcacgcccttgtgcacacacaygcacacccacccacacccatacacacacgtgcacacaggcacacgcacctatacatgctcatgacacacagacccacacacacacctgcacacacctcac

SEQ ID NO: 280008 - DNA, 201 bp, Homo sapiens
cccctgagcccctggttcctgtccttggcctccccgacatggcctcctgcatgcctggtggtgcctcaagcagcgtgccaagcagtactgtcattcccagmcacaacgtcccatccacataggtgcttacaggtgactcttaacttcctaaccccacaaattccaccgcccttcacctaagagctcaagccacgtgcttag

SEQ ID NO: 280009 - DNA, 201 bp, Homo sapiens
ggagaacagccacgtcttcacggatgcacagaggcgtgagctggagaagcactccctgtctcgggtcatctgtgacaacactggcctcaccagggtgcccrtggatgccttccaagtcggcaaattccccgaagactttgagtcttgtgacagcatcactggcatgaacctggaggcctggagggaaacctttcctcaagg

SEQ ID NO: 280010 - DNA, 201 bp, Homo sapiens
  misc_feature (1)...(201): n = A,T,C or G
cccgggtgctgggggtctgggcagacgccgcaggagaggctggcagcacacagctgtgggcagctggtcttgagtgcctgccctgggggttctccatgcantgtgaccttactcactgtctccttctctggaggttttggtgggagaacagccacgtcttcacggatgcacagaggcgtgagctggagaagcactccctgt

SEQ ID NO: 280011 - DNA, 201 bp, Homo sapiens
ccatatttgctcagaattatttcactattgagaaaaatcagagttcaagtgtctttaaatgaaattgtgttggttttctacccagctgtgacaaattgctycaaatttagtggctgaaaacaacataaatgtgatcttccaatttcacaatcagtgtctgatgtctcacttggctgaaatcaaggtgttgcagagctggtt

SEQ ID NO: 280012 - DNA, 201 bp, Homo sapiens
gcccagactcaggcaggacaacctggcttgcccaggccctggaaggttcttctaaccaggcctctttctgtgccccagactccgggaggctccctcgggtracttggatctccatgtcgctggctgctctgctgatcggaggcttcgcaggtctcacctcgacggtgatttgcaggtggtaagtccttcactttttgactg

SEQ ID NO: 280013 - DNA, 201 bp, Homo sapiens
actacatgtcaacctgtccacatttcatagacgacaagtgtggcttcccagagagcgtggagaatggggactttgtgcactgtgaggagtctgggaggcgygtgctggtgtattcctgccggcacgggtatgagctccaaggccgggagcagctcacttgcacccaggaaggatgggatttccagcctcccctctgcaaag

SEQ ID NO: 280014 - DNA, 201 bp, Homo sapiens
cccgaagactttgagtcttgtgacagcatcactggcatgaacctggaggcctggagggaaacctttcctcaaggtgaagttcggtctcctctcacaccacsttacagcacgtgcatctcatcaaacaaagcttatcttccccaggagctgattttaacttttcactgtttagaaaatagtgtcaacgccctgccttacacc

SEQ ID NO: 280015 - DNA, 201 bp, Homo sapiens; identical to SEQ ID NO: 57018

SEQ ID NO: 280016 - DNA, 201 bp, Homo sapiens
attggagataggaggtgaaagagaaggagatttagatgtcttgggacaatcccccagctttggtttgttattgtctagtcttcttggtcagctctgaaacwttttttttttttaacatatggaaggctgtattctagtacattgtctactaaatgttgcccttggagggttgctgggacaccttccttccgtgggaaactt

SEQ ID NO: 280017 - DNA, 201 bp, Homo sapiens
agaagtcaagtcttaagacagtgggtgacccagattgccatagaggtcaggcctgcggtgctggaacacaggcaggtgtcggcgcaactgtcgcagatagytgaggtctattcgggcaaggcagaggcctggcccctcagagcagcgggccaccactgttccccaggggtctaccaccatgctgtggccataacttgctct

SEQ ID NO: 280018 - DNA, 201 bp, Homo sapiens
ggaggtgggagggggaagggcctaggggagaatttgggtggaaaaggagagaacggaggcttggggaatggagagagtgtcggtgggaggaggtaatggaraaagtgagagactgggaggaagaaagtttgggaggaaggggagtggaatgggagataggacagtggagctgcacgggtgatagaggttcgggggtttccc

SEQ ID NO: 280019 - DNA, 201 bp, Homo sapiens
tgaaaggatgctgtgcgcccacatcttgccccataaaaaaaaaaaatcaggcgaggtgacatttctcctaggtcctgtatttgctctcacatgtcttgtcttttttttttttttttttgagacagagtctccctctgtcgcccaggctggagtgcagtggcgcaatctcggttcactgcaagccccacttcccaggtgcac

SEQ ID NO: 280020 - DNA, 201 bp, Homo sapiens; identical to SEQ ID NO: 57020

SEQ ID NO: 280021 - DNA, 201 bp, Homo sapiens; identical to SEQ ID NO: 57021

SEQ ID NO: 280022 - DNA, 201 bp, Homo sapiens; identical to SEQ ID NO: 57022

SEQ ID NO: 280023 - DNA, 201 bp, Homo sapiens
gagcaggagggagaggctgagggtgtgaaggggaagggggctgtggcatgtggttggagggaggactggactctgatgaggggtgttgcgaggaggtgggkaaaggtcagaattggagttaagacgtttctggggggcttcgaaagtgttaaattggaggtgggagggggaagggcctaggggagaatttgggtggaaaag

SEQ ID NO: 280024 - DNA, 201 bp, Homo sapiens
catagagatggggtttcaccatgttgtccaagctgatctcaaactcctgggctcaagtgttcctcccaccttggcctctcaaagtgcagggattacagacrggagccactgcacctgtcctataggatgtttctaaatatccctggcttctactcattacatgctgatggcagtccccttccccaccaggcataataatca

SEQ ID NO: 280025 - DNA, 201 bp, Homo sapiens
ttttagtttagaagagcagagtctgtgtagattaaactccttcttggtaggcaaaagtaacccaaagatcatcctggaaaagtatactgggaggaaactgytggtgaaagtgaagtgaatacaaaactaaacatcttgaatttggcatagattcagctgagagaagcaaaatttgtaagcagaaaaagaaggataaaggta

SEQ ID NO: 280026 - DNA, 201 bp, Homo sapiens
cttttagtttagaagagcagagtctgtgtagattaaactccttcttggtaggcaaaagtaacccaaagatcatcctggaaaagtatactgggaggaaactkttggtgaaagtgaagtgaatacaaaactaaacatcttgaatttggcatagattcagctgagagaagcaaaatttgtaagcagaaaaagaaggataaaggt

SEQ ID NO: 280027 - DNA, 201 bp, Homo sapiens
ataatatataattatatattatatacagtatataatatacaatatataatatataatatatatataatatacagtatataatatataattatatatataaattaaattttatatatataaaatttaaaagtatatatatatatatatacttttagtttagaagagcagagtctgtgtagattaaactccttcttggtaggc

SEQ ID NO: 280028 - DNA, 201 bp, Homo sapiens
tgagtgaaacaggacttggctttataaaatctaggatctgataattctcttttacaatataagaaaattaagcaattgaaactaacatagcccttgtagawttttttacaacaccttttttttagatatgtgtacttcctgataagcagagatgatgaaataatggcctattaaaagcaaataagtttctataaaaacgcc

SEQ ID NO: 280029 - DNA, 201 bp, Homo sapiens
gtataatatataattatatattatatacagtatataatatacaatatataatatataatatatatataatatacagtatataatatataattatatatataaattaaattttatatatataaaatttaaaagtatatatatatatatatacttttagtttagaagagcagagtctgtgtagattaaactccttcttggtag

SEQ ID NO: 280030 - DNA, 201 bp, Homo sapiens
gaatgttcatgaccacagcccactctgcatatgagacaacgaaccatcactaactgcaaaggagcaaacaacgtgtctccagtcagccttagtgaaaattsctcctgatccctctcttctttcaggggttgcagcagctcagacaatccttaccatgtgaaaggaggaatgactgtcatggcatgaaaaaagcatcactat

SEQ ID NO: 280031 - DNA, 201 bp, Homo sapiens
ttaattattctctctataagtgtctattgagcaccactgttttccaggcatattatagatgaagagaacatggtggtgaaaaaaatgatcaaggttttatyatatcatagagatgccattttagagatggttatagacattaagcaagtaaattaatttcacaatacaagcaagatgtgacaaatgctatgaaagaaataa

SEQ ID NO: 280032 - DNA, 201 bp, Homo sapiens
agagcttatttgttgatcatctaaactggccaagaccattcacaaaaataaaggattggttgagacacacacattgtattttaatatcacttcaggtgacrctgaagcaggtgatttacaaaccatacattgggaaccactggattaagaaaagacatgtcattacaaatgtattttagaaatctaatctttgataaaagg

SEQ ID NO: 280033 - DNA, 201 bp, Homo sapiens
gtaagaaacagactaacatgggtaacaggcgtaagggatgagtggagaacatcaagattaacccaccatagtgccagggttcccattcatttccccttaargtagctatttggagtatgcttttaaaagagaaccctgttcccatgctttctcttaagtacaacttttgcatcaaccaaagatggactagctattatgatg

SEQ ID NO: 280034 - DNA, 201 bp, Homo sapiens
acttcccccccatttcagttcctggcctgattctgaaaggtttggtgtcatgttatttctcactacagaggaaatagtttgctagacacattaaaccctargtagccaaattccagggatcttagttggtcatatattacttggctacttgttgaactgtaatcctatcctctacatacaagtccaggactataacagttt

SEQ ID NO: 280035 - DNA, 201 bp, Homo sapiens
ttcagtagtgttataattatacatcacttcagtataaataacttttgttcatataatccaatgcctaataggaatgcttgatagtgtcctaatcaggaccygccctcttcagaggtggctacttagctatttgtagtgaaatcaacacctaaagttttgttatttactataaaagatgtcagaaagaattttgtacaatta

SEQ ID NO: 280036 - DNA, 201 bp, Homo sapiens
tcaacactgccaccctgacatgggacttctggcaagtgacaaaatatttcaatttcaatctcctcatttgtgaaatgaaggacgttatattcagtccacamgttgtcatgggaattatgtcaaatactagaaggattaaatgctagtaaaggaagccaagaaagtcatggcaggctgaggttcttgatctttcaataagaa

SEQ ID NO: 280037 - DNA, 201 bp, Homo sapiens
agccactacacccagccaacgcttgtattgttttctaaaaaggctttactgttgagtgcccaggccattttaaaaattttttaccttttagattgacaggraaaggtcagcagtgcctttaattttacatttaggcctactttcagggaaaattggtatttcatcttcttataaataaaatctggctggcttgatttttct

SEQ ID NO: 280038 - DNA, 201 bp, Homo sapiens
cagtattaataagaacaaacaaaaattttaatcaaccatgcttgaaataagactgaaatatctttctattctctctacagaaaataatacaaaatttttgytatatgaagagataatccagaattatgaaattaaaatatagataaaagctcttagaggattgtgtctggcagtggctgaatatgaaatattgttttttag

SEQ ID NO: 280039 - DNA, 201 bp, Homo sapiens
actgtataatatataattatatattatatacagtatataatatacaatatataatatataatatatatataatatacagtatataatatataattatatatataaattaaattttatatatataaaatttaaaagtatatatatatatatatacttttagtttagaagagcagagtctgtgtagattaaactccttcttgg

SEQ ID NO: 280040 - DNA, 201 bp, Homo sapiens
ctgaaagtaaaaaaaaaaaaaaaaaaaaaaaaggaactagacatagtggcgtgcacctgtagtcccagctgcttgggaggctgaggtgggaggatcgctaragcccaggacctggatgctgcagtgatctgcacccagcctgggtgacagagaaagaccctgtcttttaaaaatttgtttttaatttttaaataaaaaata

SEQ ID NO: 280041 - DNA, 201 bp, Homo sapiens
atactgtataatatataattatatattatatacagtatataatatacaatatataatatataatatatatataatatacagtatataatatataattatatatataaattaaattttatatatataaaatttaaaagtatatatatatatatatacttttagtttagaagagcagagtctgtgtagattaaactccttctt

SEQ ID NO: 280042 - DNA, 201 bp, Homo sapiens
tcaagaatctttccttctaaagaggggaagcatataataaatacatgcaaaactagaaaagataatttcagacggttataaaagctccgaaaaaataaacygggataatgggtagaaagtgattggccaaagtggagagtgaaatgaagtttagcgaggtcaagaaggccttctgaggggatggcactccatctaaaagct

SEQ ID NO: 280043 - DNA, 201 bp, Homo sapiens
ataattatattatatactgtataatatataattatatattatatacagtatataatatacaatatataatatataatatatatataatatacagtatataatatataattatatatataaattaaattttatatatataaaatttaaaagtatatatatatatatatacttttagtttagaagagcagagtctgtgtagat

SEQ ID NO: 280044 - DNA, 201 bp, Homo sapiens
tataattatattatatactgtataatatataattatatattatatacagtatataatatacaatatataatatataatatatatataatatacagtatataatatataattatatatataaattaaattttatatatataaaatttaaaagtatatatatatatatatacttttagtttagaagagcagagtctgtgtaga

SEQ ID NO: 280045 - DNA, 201 bp, Homo sapiens
aattattggagtacttcgtgcttccgcaggaatattatcagtcttttgaattttgcctcccattcccatggtctctcattgttttgatctatgtttttctmaacagtggtcacatagatgatcttttctcacactgttggccattggctattttgtgagcaaaagatcaaaagtcttccttggaggctaagggagaaaagt

SEQ ID NO: 280046 - DNA, 201 bp, Homo sapiens
gtgtcattctgtgcctaaaactttaaataaattgccattccatatggatgttaaagcattcatgtgacaaatcatcacataatcgtgtaatgaaagggggytgctgtttttcaaatttgttgattaatagagtagttcaagctaaagttgctttttacaaagtatacaatattaggaggcaaattacctggcagggggtag

SEQ ID NO: 280047 - DNA, 201 bp, Homo sapiens
tgagaagttcatttttcctcccaacttaaaaatattaatttggggacataggtttattaaactatccaaaaatgcattataatactttattttgcctttaygcagaaaaaaaatgactcccgccactctttcctccttaataaggaaaagtccaaccttgttaaatatcttcttaagcatttcagaaataaaggaaaaact

SEQ ID NO: 280048 - DNA, 201 bp, Homo sapiens
taatataattatattatatactgtataatatataattatatattatatacagtatataatatacaatatataatatataatatatatataatatacagtatataatatataattatatatataaattaaattttatatatataaaatttaaaagtatatatatatatatatacttttagtttagaagagcagagtctgtgt

SEQ ID NO: 280049 - DNA, 201 bp, Homo sapiens
tatataatataattatattatatactgtataatatataattatatattatatacagtatataatatacaatatataatatataatatatatataatatacagtatataatatataattatatatataaattaaattttatatatataaaatttaaaagtatatatatatatatatacttttagtttagaagagcagagtct

SEQ ID NO: 280050 - DNA, 201 bp, Homo sapiens
cagtatataatataattatattatatactgtataatatataattatatattatatacagtatataatatacaatatataatatataatatatatataatatacagtatataatatataattatatatataaattaaattttatatatataaaatttaaaagtatatatatatatatatacttttagtttagaagagcagag

SEQ ID NO: 280051 - DNA, 201 bp, Homo sapiens
atacagtatataatataattatattatatactgtataatatataattatatattatatacagtatataatatacaatatataatatataatatatatataatatacagtatataatatataattatatatataaattaaattttatatatataaaatttaaaagtatatatatatatatatacttttagtttagaagagca

SEQ ID NO: 280052 - DNA, 201 bp, Homo sapiens
tgataatagttagggtccagtgtcattctgtgcctaaaactttaaataaattgccattccatatggatgttaaagcattcatgtgacaaatcatcacatartcgtgtaatgaaagggggttgctgtttttcaaatttgttgattaatagagtagttcaagctaaagttgctttttacaaagtatacaatattaggaggcaa

SEQ ID NO: 280053 - DNA, 201 bp, Homo sapiens
agtaccatttaatttagaaattaattggtgttaataaataaatgtaataatctaatatacataatatatgtataaattcaaattatattatatattatatactgtataatatataattatattatatactgtatataatatataattatatattatatacagtatataatataattatattatatactgtataatatataa

SEQ ID NO: 280054 - DNA, 201 bp, Homo sapiens
tagtaccatttaatttagaaattaattggtgttaataaataaatgtaataatctaatatacataatatatgtataaattcaaattatattatatattatatactgtataatatataattatattatatactgtatataatatataattatatattatatacagtatataatataattatattatatactgtataatatata

SEQ ID NO: 280055 - DNA, 201 bp, Homo sapiens
ttttagtactattaaaaaatgcctaagtttagagggttttgattcaatttcctctgaatttcactcttcccatgataaccagtcactaccatttgtatccycagaggtttgaatgaagtctgaacaaagtttacttcaattgatttcctgccaatctgagataggctgagactgtcaaagtgaaggaaaaacagtacaaat

SEQ ID NO: 280056 - DNA, 201 bp, Homo sapiens
gatctgattgggctgaggatactgtatcagagaatcaaggccagggttgaagtgtcagttaaagaatttgagagagggtcagggacctaattaggtaccamacatgcccagggtgcctctacacgacccgaaagtcaatctgctgggcatctccttgaggtaacagagctttccaaattcacactgtttcatgcagtctag

SEQ ID NO: 280057 - DNA, 201 bp, Homo sapiens
ttctttttggtattttattcttaccaacatatgacaacattcaatgtgtttttaatctcaaggttcctgattgtcatagaaaaaactcttgggctggaggyacaaaaagtaggatcaaatatcaacactgccaccctgacatgggacttctggcaagtgacaaaatatttcaatttcaatctcctcatttgtgaaatgaag

SEQ ID NO: 280058 - DNA, 201 bp, Homo sapiens
gtgggcctaacctgacctgacacgaagctatttatagtctttatttattccatgtactatgactattcatacatttgctccaaaaatagtaatgtgttcarttacaaggtactcccccagaccctgataagggcattcatatataatatttgtgttgtattgctttccaaaaatctgagaaattctgaattctgaaacaca

SEQ ID NO: 280059 - DNA, 201 bp, Homo sapiens
tcttccttttaatcattcaacaaatatttaggcaccctcagacactggacaaaatcctcagagatctcaagaatctttccttctaaagaggggaagcatayaataaatacatgcaaaactagaaaagataatttcagacggttataaaagctccgaaaaaataaactgggataatgggtagaaagtgattggccaaagtgg

SEQ ID NO: 280060 - DNA, 201 bp, Homo sapiens
gcctcctgagtagctgggattacaggcatgtgccaccacacccggctaattttgtatttttagtagagatggagttttaccacgttggtcaggctgatctygaactcctgacctcgtgatccgcccgcctcggcctcccaaagtgctggaattacaggcgtgagatactgtttttaaaaagtacttgctatcagaacttgc

SEQ ID NO: 280061 - DNA, 201 bp, Homo sapiens
aaatagtaagagaattttttcttacaaagaatattcaattgattttttaaatgggagatgttgctcaaatcctctatagaagaatccctgaaaagttctaygaaaaagttattattaaattgggtatgcccgggtaaccaagtaactcttgaaattatagcacttctacttaacctttactgagcacttacaatatgccaa

SEQ ID NO: 280062 - DNA, 201 bp, Homo sapiens
  misc_feature (1)...(201): n = A,T,C or G
gtttaaatcaaactttttgtttgctacttttatctgtaggtacatattataaacaatttatagagtacaaaggccctcaaagacatacagcttgaaaaatntccccttctaaagcagagagaaaataccttacctcttgtcagttgttaattgaaaaaaaattcaaaatttagctaagcagtgttcgattgataataatct

SEQ ID NO: 280063 - DNA, 201 bp, Homo sapiens
caaacttagctttattgttttaaaggtaagcagttaaaccataaatcagagatttgtcatgttttgcagcatggagaactgtcatatatttgtgtaaaatraatctgatttatgctgattctagaaaagattaaacttaaatgattgtcttataaagtataaatgacagagataaaaaataagccctcaactcaagagtta

SEQ ID NO: 280064 - DNA, 201 bp, Homo sapiens
aatttagtaccatttaatttagaaattaattggtgttaataaataaatgtaataatctaatatacataatatatgtataaattcaaattatattatatattatatactgtataatatataattatattatatactgtatataatatataattatatattatatacagtatataatataattatattatatactgtataata

SEQ ID NO: 280065 - DNA, 201 bp, Homo sapiens
tctctttatatcaaacacaaaagttgtcctggagagctatttataaagacaatgagactgctcctgcctcgccaccaccacacacacccttcagtcagaarctggttccccgccttgaaagatctctcttctctgttgtctcagtgacttccactggtgactccaccttgaatctgctatcaatcatgtaaaagtcgtcct

SEQ ID NO: 280066 - DNA, 201 bp, Homo sapiens
cctaaatttagtaccatttaatttagaaattaattggtgttaataaataaatgtaataatctaatatacataatatatgtataaattcaaattatattatatattatatactgtataatatataattatattatatactgtatataatatataattatatattatatacagtatataatataattatattatatactgtat

SEQ ID NO: 280067 - DNA, 201 bp, Homo sapiens
gaataattttagtttggctttagtgggtcatatttatgtgggtatcagtcatttctgtatattgataatttattgctagccattcagggtagcatccactrtgccaaaacaaatatgcagggccagaagtcatattgaaaagtgaaagtgtgcttcctaatggctcccaggttcagaaatttgtaggttattgaagagaaa

SEQ ID NO: 280068 - DNA, 201 bp, Homo sapiens
taccctaaatttagtaccatttaatttagaaattaattggtgttaataaataaatgtaataatctaatatacataatatatgtataaattcaaattatattatatattatatactgtataatatataattatattatatactgtatataatatataattatatattatatacagtatataatataattatattatatactg

SEQ ID NO: 280069 - DNA, 201 bp, Homo sapiens
gtgagtagtttttgaagtggctgttgaagtgaatattaattcagtattcttcctaaaggagaaagcatgtcaagaaaatagcatttaggatttttaaaaawgtttgtaaaagtctacaaatatgtttttaatatattacctggaaatgtttgttaaaaacatagattcccaggtcttgcatgcagagattttgattcagta

SEQ ID NO: 280070 - DNA, 201 bp, Homo sapiens
tttataacaatgagaaataacctaaatgcccattgattgaggaatggctaaataaacaatggcaagccataaaaaagaacgttgcaaagccaaaaaaaaaatactctttgtataatggccaaattccaagaaaatgaattaaggaaaaaaagtaaaacaaaacatgtaaaacaaaaagaaaaaaattactctttgtatagt

SEQ ID NO: 280071 - DNA, 201 bp, Homo sapiens
aagtgagaaacatgtgactcttcctctcactggagtacttacaggtcattgtagggttattaaacagattaatttcaatattcttgtctcagggaataggsagacttacagagagggagatagatggggaatagccagtcagtaaagtagttaaaacacacacaacatttacagattaagttcatcatcttacttggacat

SEQ ID NO: 280072 - DNA, 201 bp, Homo sapiens
atgcctataatgcccctactttgagaggccaagacaagaggatccctggagcccaggagttcaagaccagcctgagcaaaatagcaagactctgtctctaytgaaagtaaaaaaaaaaaaaaaaaaaaaaaaggaactagacatagtggcgtgcacctgtagtcccagctgcttgggaggctgaggtgggaggatcgctag

SEQ ID NO: 280073 - DNA, 201 bp, Homo sapiens
aaaatacagaatgcataaaagattagcatacaaatatcagtatatttcctacacaccagtaacaatcagaaaagacgataggaataaatagaataaaactraaacaaccaatatgcatgtcaataaagatttttgccattgaaatagaatctggcatcattcctagagaaaaaaataaaagctttatactagaaattaaat

SEQ ID NO: 280074 - DNA, 201 bp, Homo sapiens
ataagctagagtttgtggagcatcaggctaacaatcggttcccttttcttccagtgctgaaaggtggtcctttctctgacagctacaggctctttcagttycattttcactggggcagtacaaatgagcatggttcagaacatacagtggatggagtcaaatattctgccgaggtaatgtaatttagtaagtgagagataa

SEQ ID NO: 280075 - DNA, 201 bp, Homo sapiens
ggaatcaagcatttgataaggcattgattttacacgtgtttgtcctggtaggtcctgaacaatggagcaagctgtatcccattgccaatggaaataaccartcccctgttgatattaaaaccagtgaaaccaaacatgacacctctctgaaacctattagtgtctcctacaacccagccacagccaaagaaattatcaatg

SEQ ID NO: 280076 - DNA, 201 bp, Homo sapiens
gaaaaaacccatgaccccaaaatccttccctcgaagctctatccagaggcttggtactgcttcaagtagaaaatctgatttggtttctgggaaggaggacmtgttggaaagttacaagattgacgtgacagtgacaagtctggaacctcctggctctgatgcacagtgcttgaactcccttagaaatgaagcattgccccc

SEQ ID NO: 280077 - DNA, 201 bp, Homo sapiens
tgcgtagcaggaatattactttaattgatagtatcagtgagagagattattatttcagtcagctttgtgagaagttcatttttcctcccaacttaaaaatrttaatttggggacataggtttattaaactatccaaaaatgcattataatactttattttgcctttatgcagaaaaaaaatgactcccgccactctttcct

SEQ ID NO: 280078 - DNA, 201 bp, Homo sapiens
aaaacatgttttctattcatgtcttccacccacccatttaatgtcttttccgtcttaacgaaacacccatcttgcactgtagctgtaacttttacagtttragttgcaacaccaacactagcacgaatttctttttcctccttcacaattacctggatagaagatttgttcttaccgtagatcttagcaacctcagtatat

SEQ ID NO: 280079 - DNA, 201 bp, Homo sapiens
ctgtaatgatgtattcttttcttccagggcaaacgagccccattcacaaattttgacccctctactctccttccttcatccctggatttctggacctaccytggctctctgactcatcctcctctttatgagagtgtaacttggatcatctgtaaggagagcatcagtgtcagctcagagcaggtagagttgtgaatgaat

SEQ ID NO: 280080 - DNA, 201 bp, Homo sapiens
gttcgattgataataatctttatctcatactttattttcttaaatctccaggttggtgaggccaacccaaagctgcagaaagtacttgatgccctccaagyaattaaaaccaaggtaaacacactaaataagtagtttaaatcagagaacaagaatttacagatctatggaaatcatttaatgaagtattaaaactgggga

SEQ ID NO: 280081 - DNA, 201 bp, Homo sapiens
atttttaaaaatcagaagattgaattccaccttttttactgtcagcatagtatttcatttgggtgaatgcatcagaatttatttaactgccttctattgaygaacaatcacaacatatgatttttgttatattggtttcttttgcttttattaaaaaatgcttcagtgaatatatctgtacatatatcttgtgcactagtg

SEQ ID NO: 280082 - DNA, 201 bp, Homo sapiens
tataatatatataattttgcaacctgctttttttctatttacccacttatcatgacaatttttaaaaatcagaagattgaattccaccttttttactgtcrgcatagtatttcatttgggtgaatgcatcagaatttatttaactgccttctattgatgaacaatcacaacatatgatttttgttatattggtttcttttg

SEQ ID NO: 280083 - DNA, 201 bp, Homo sapiens
aatcatccaaggtgatcataaagttcccatatctctttctaaaaaataaaaataaaatagaacaaagccagaagattttaaaagttttttttaaaaaactscaaggttttagtactattaaaaaatgcctaagtttagagggttttgattcaatttcctctgaatttcactcttcccatgataaccagtcactaccatttg

SEQ ID NO: 280084 - DNA, 201 bp, Homo sapiens
tgctctttattttaggtgtatgaattatataatacatgtgtacccatatatgcaggttgactttttaattttactttcatcaaatgaattctataatatayataattttgcaacctgctttttttctatttacccacttatcatgacaatttttaaaaatcagaagattgaattccaccttttttactgtcagcatagtat

SEQ ID NO: 280085 - DNA, 201 bp, Homo sapiens
agtgttttaaaagagtagtttctgaactagtagagtttatcccaaaaatacaagaatgactcaatattagaaaatcttaaattaattcattatattaactagttaaaggtgaagaaaacctcatgatcaacttgttaaatgcttaaaatcatttgataaaagttaatgccctttctttaggatgaaacaaaatgaaagaaa

SEQ ID NO: 280086 - DNA, 201 bp, Homo sapiens
gtacaaaggccctcaaagacatacagcttgaaaaatctccccttctaaagcagagagaaaataccttacctcttgtcagttgttaattgaaaaaaaattcraaatttagctaagcagtgttcgattgataataatctttatctcatactttattttcttaaatctccaggttggtgaggccaacccaaagctgcagaaagt

SEQ ID NO: 280087 - DNA, 201 bp, Homo sapiens
attaattaaccatagtatcatttttagcttcacgtagctcactggaattctgcaaagtactccagccttgctgaagctgcctcaaaggctgatggtttggyagttattggtgttttgatgaaggtgagttacagataattacacagctctgcttccactgtcttaccaattagacctcaaaatagaaggaaataaggcaac

SEQ ID NO: 280088 - DNA, 201 bp, Homo sapiens
gatgtggattgcctgcccagagaaggtaacttgcatgatcaatgggtaccttcagatgatagtagctggtgaattggtgctaatagcgctggtccagtgamgaaaggatgaggtgcaatccacatggagtttccacatagtaagccccactgagtgttagacatcaagctcaatacttcatgtctgttattttattttatt

SEQ ID NO: 280089 - DNA, 201 bp, Homo sapiens
tccacatagtaagccccactgagtgttagacatcaagctcaatacttcatgtctgttattttattttattttattttttgacagagtcttgctctgtcacytagagggcatctcacattgcacccagggaatgcagtggtgtgatggctcactgcaacctccaccccctgggttcaagtgattctcctgtctcggcctccc

SEQ ID NO: 280090 - DNA, 201 bp, Homo sapiens
gtaggtgggattacaggtggctgccaccatgcccggctaacttgtgtatttttagtagacagagggtttcgacatgttggccaggctggtctcaaacttcyggcatcaagcaatcatcccgcttcggcttcccaaagtgctgagattacaggtgtgagccatggtgcctggccacatctgatatctctttaacattttctt

SEQ ID NO: 280091 - DNA, 201 bp, Homo sapiens
gtgagatactgtttttaaaaagtacttgctatcagaacttgcatttgatagggaaaataaaaatttcagaggaaggaaggcaggaaagaagggagggaggraggaaggaagggagggaggaaggaagggagggagggaggaagggagggaggagaataggaagaagagagattaaataagtgatatggatagaactgtttt

SEQ ID NO: 280092 - DNA, 201 bp, Homo sapiens
aatcttaagagaatatcatttaatacactgaaataaaccctaatctaataagcaaacaggtaactatactcctaaaacttggaatcaagcatttgataagrcattgattttacacgtgtttgtcctggtaggtcctgaacaatggagcaagctgtatcccattgccaatggaaataaccagtcccctgttgatattaaaac

SEQ ID NO: 280093 - DNA, 201 bp, Homo sapiens
tcgcttgagcttgggaggcagaggttgcagtgagccaagagcgcatcactgcactccagcctgggtgacagagcaagactctgtcaaaaaaaaaaaaaaaragagagagaaagaaagagagagagagaaagaaggaaagaaagaaagaaagaaagaaaaagaaggaaagaaagaaagaaaagggacatcttcaaacacaga

SEQ ID NO: 280094 - DNA, 201 bp, Homo sapiens
accaacctcgactagcttctaacttttcttctgcagcttctttgcctttctcaggcttcacagaattaaaaagagctatagccttgctctcattaggattyggcttaagggaatgtggttgttggtttttgatcttctatccagactatgcaaactttctccatatcagcaataatgctgctttgctttcttatcatttgt

SEQ ID NO: 280095 - DNA, 201 bp, Homo sapiens
ttcttaaataagatttgaaagttgaaattactccttgatccatagactgcagaatagatgctgtgttagcaggcataagcataacatcaatctccttgtamatctccatcagagctcctgggtgaccaggtgcactgtcaatgagcagtgatattttgaaaggaatcttcttttactgaggagtagagctcaacagtgggc

SEQ ID NO: 280096 - DNA, 201 bp, Homo sapiens
actaacatagcccttgtagatttttttacaacaccttttttttagatatgtgtacttcctgataagcagagatgatgaaataatggcctattaaaagcaartaagtttctataaaaacgcccaagcagggatttaaggcatctcctgcatgcacagttgcagttagttattccaggtattatttttgttttcagaaaaaga

SEQ ID NO: 280097 - DNA, 201 bp, Homo sapiens
tcagtcacatctttctcttccttccaccccgagggaccatgtcgaggctcagctggggataccgcgagcacaacggtgagcgccttttcctgatccaaggrggggtttgtgcgggggacgagaggactagcgcgacgccccggcgctcgctgaccacacactgggctcgcacattgagaaactttttcggttcctctttaa

SEQ ID NO: 280098 - DNA, 201 bp, Homo sapiens
tttcgccatgttgcccaggctggtttcgaactcctgagctcaggcaatccgcctgcctcggcctcccaaagtgctgggatttcaagcatgagtgcattaatttttttttttttattgactaatgttgaaatgatatttttgatgtattaggttaaataatatatatcattaagaataatttcactttcctttttagttttt

SEQ ID NO: 280099 - DNA, 201 bp, Homo sapiens
ttcgccatgttgcccaggctggtttcgaactcctgagctcaggcaatccgcctgcctcggcctcccaaagtgctgggatttcaagcatgagtgcattaatttttttttttttattgactaatgttgaaatgatatttttgatgtattaggttaaataatatatatcattaagaataatttcactttcctttttagttttta

SEQ ID NO: 280100 - DNA, 201 bp, Homo sapiens
tattactaacacccaactttaccatgagatgaaagtgaattatatgactcaatcaatactattcacgtgaaaataatttggtttctgagtcgcctaggcargacagagctaagttatcaggcaagtgcaatttttcttcatgttctcatggttactgagctgtagagtttagatgccctgtatagccctgctgttcagaga

SEQ ID NO: 280101 - DNA, 201 bp, Homo sapiens
accaaattgtccttaaaaactttgatccccaatgcttgcggagactgatttgtgtaataataaaactccagtcctctgcacagccggctctacgtgaattwccctttatgaattgcaattcccctgtcttgataaatcagctgtgtcttgacagtgggcaaggtaaacccattgggtggttacaaactgtgtacccaagca

SEQ ID NO: 280102 - DNA, 201 bp, Homo sapiens
cccggctactcaggaagctgaggcagaaaaatcacttgaacctaggaggtggaggttgcagtgagctgagatcgtgccactgctctccagcctgggcgacrgagactccatctcaaaaaaaaaagaaacaaaagaatggctactccatagacagagttgccctaagggcaactggttgtctactttttatggttatttctt

SEQ ID NO: 280103 - DNA, 201 bp, Homo sapiens
gagaattgcttgaacctgggaggtggaggttgcagtgagccgagatcgcaccattgcactccagcgtgggcaacaagagcgaaattccatctgaaaaaaawatatatatatataagtccattgaatgatggatgctctacagatgacctaactagtttcctatgaaaggtaatttgattgttgccaatacttaggttgctg

SEQ ID NO: 280104 - DNA, 201 bp, Homo sapiens
gtttaatatgattaaatattactaacacccaactttaccatgagatgaaagtgaattatatgactcaatcaatactattcacgtgaaaataatttggtttytgagtcgcctaggcaggacagagctaagttatcaggcaagtgcaatttttcttcatgttctcatggttactgagctgtagagtttagatgccctgtatag

SEQ ID NO: 280105 - DNA, 201 bp, Homo sapiens
gactgagatgggaggattgcctgaggccaggagttccagactagcctgcagggtcatgggggggacaaggagaaggaggagaggaggaaattttttttggraaaattgaaaaaggggacctctttaagaggcagggtactgaactgactatggtagttagtagataatattgggaatgtgatacaaacaattattactttt

SEQ ID NO: 280106 - DNA, 201 bp, Homo sapiens
aaaaaaaaaaaaaaaaaaaaaaaaaagggctgagtgtagtggtgcatacctgtagttctagctacttgggaggctaaagtgggaggatgacttgaacccaraagttagaggttgcagtgagccgtgattgcatcagcttaggcaacagggcgagaccttgtctcaaggaaaaaaaaaaaagaagttagagtttgttcaaga

SEQ ID NO: 280107 - DNA, 201 bp, Homo sapiens
ggcaaaataaccatagaagaaccttctgaaatgaagaaagagagaaataaattacaatctgactctactgcagataatcaacaatattacgtttcctgacrtggtgcagccattttatttggattatcctaggtgaaaaatttgtgtgtttccttggtatgcctgttgcacatcacaggtaattgagtggaggcctgagtg

SEQ ID NO: 280108 - DNA, 201 bp, Homo sapiens
tgagatgggaggattgcctgaggccaggagttccagactagcctgcagggtcatgggggggacaaggagaaggaggagaggaggaaattttttttggaaarattgaaaaaggggacctctttaagaggcagggtactgaactgactatggtagttagtagataatattgggaatgtgatacaaacaattattacttttatt

SEQ ID NO: 280109 - DNA, 201 bp, Homo sapiens
tcaatgttgactttgatgacacagagaacaaatcaggttggcttttctttttttgtgtgtgtggtggtggatgaagggtttgaatgattagactatactctttttttttttttttttttgagacagagtctcgctctgtcgccaggctgaagtgtagtggcgcgatcttggcttattgcaacctccgcctcctaagttcaa

SEQ ID NO: 280110 - DNA, 201 bp, Homo sapiens
caatgttgactttgatgacacagagaacaaatcaggttggcttttctttttttgtgtgtgtggtggtggatgaagggtttgaatgattagactatactctttttttttttttttttttgagacagagtctcgctctgtcgccaggctgaagtgtagtggcgcgatcttggcttattgcaacctccgcctcctaagttcaag

SEQ ID NO: 280111 - DNA, 201 bp, Homo sapiens
gtgtgtggtggtggatgaagggtttgaatgattagactatactctttttttttttttttttttgagacagagtctcgctctgtcgccaggctgaagtgtartggcgcgatcttggcttattgcaacctccgcctcctaagttcaagagattctcctgcctcagcctcccgagtaactgggattacaggcgcacgccactat

SEQ ID NO: 280112 - DNA, 201 bp, Homo sapiens
tattaaagtttaatagtttttatagatatttcatgatttgtttctgcaaagttttagccgtaattattttagcattatttgcaaacctataatgccatttaagtacctgctttaatagaaaaagtttagtttaaaaaaaacttattctcttattttaattgccaaagtaatatccactcatagtaaatgaaacaatatgga

SEQ ID NO: 280113 - DNA, 201 bp, Homo sapiens
tgaggtaggagaatggcttgaacccaggaggcgcaggttgcagtgagccaagatcatgccactgcactccagcctgggcaacagagcaagattccatctcaaaaaaaaaaaaaagtaaagctacccattcctcattttagaatgagaaatgattatattttacttcatctaaaactttaagtatattttttataaatgtag

SEQ ID NO: 280114 - DNA, 201 bp, Homo sapiens
tacccagctactttttttgtatttttagtagagacagggtttcaccatgttggccaggatggtcttgatctcctgacctcgtgatccgcctgcctcggccwcccaaagtgctgggattacaggcgtgagccaccgcacccagaatacactctctaatctttcatgttttgtttttgctagacctggaatttgtcaaattga

SEQ ID NO: 280115 - DNA, 201 bp, Homo sapiens
  misc_feature (1)...(201): n = A,T,C or G
tacggcaggttcaccttcactgggggtccgctgatgaccacggctccgagcacatagtagatggagtgagctatgctgcagaggtaagccataagacatanctgtgattcacagttttcccacatggtgggatttaaggggtacagagacaactttactgattccaaatagatcctgagccaattaggtatcttagtgtct

SEQ ID NO: 280116 - DNA, 201 bp, Homo sapiens
ggaggaggtcccattactatcttgtttttacacttggaagataaagcttagaagttagggtttgttgccaggtgtggtagctcatgcctgtaatcctagcmctttgggaggatcgcttgaggccaggagtttgagaccagcctggataacatagtgaggccctgtctctacaaaaaaaaaaaaaaaaaaaaaaaaaaaaaa

SEQ ID NO: 280117 - DNA, 201 bp, Homo sapiens
ctccttggcctcccaaagtgctgcgattacaggcatgagctgcacctggcccattctttctttctttaattattattgttattaatttttgaggcagtgtygcactctgttgcccaggctggagtgcagtggtgcgatctcgactcactgcaacctccgcctccaggttcaagcgattctcctgcctcagcctcctgtgta

SEQ ID NO: 280118 - DNA, 201 bp, Homo sapiens
cagacaaataccccagctttgttgaggcagctcatgaaccagatggactggctgtcttgggagtgtttttacaggtgagaatctactgttttcattttaartgatcagccttgttgaagaaagagcttcagtcacgaagtagacattcaaccatcttgtttaatagtaaattcattttaggtgtagcagtttccttttgaa

SEQ ID NO: 280119 - DNA, 201 bp, Homo sapiens
tctcctgatctcgtgatccacactccttggcctcccaaagtgctgcgattacaggcatgagctgcacctggcccattctttctttctttaattattattgktattaatttttgaggcagtgttgcactctgttgcccaggctggagtgcagtggtgcgatctcgactcactgcaacctccgcctccaggttcaagcgattc

SEQ ID NO: 280120 - DNA, 201 bp, Homo sapiens
tcccgacttactggctctcctccacccaccaaattgtccttaaaaactttgatccccaatgcttgcggagactgatttgtgtaataataaaactccagtcytctgcacagccggctctacgtgaatttccctttatgaattgcaattcccctgtcttgataaatcagctgtgtcttgacagtgggcaaggtaaacccattg

SEQ ID NO: 280121 - DNA, 201 bp, Homo sapiens
tagatgccctgtatagccctgctgttcagagaaatccgacaatcagaacttttttccagtttcactcttccattgacatgtacctctgccctttcaggttwtcatctgaaatgtttgctttgccactaaatcacttgtgtttgaggccaagtagctttagagtatggaacctgctctgtcctcagggtagagaaataaaat

SEQ ID NO: 280122 - DNA, 201 bp, Homo sapiens
ctgatgaccacggctccgagcacatagtagatggagtgagctatgctgcagaggtaagccataagacatatctgtgattcacagttttcccacatggtggratttaaggggtacagagacaactttactgattccaaatagatcctgagccaattaggtatcttagtgtctgaaactgctttattcattcaatatgagagt

SEQ ID NO: 280123 - DNA, 201 bp, Homo sapiens
tagagtttgggccaggcgtggtggctcatgcctgtaatcccaacacttcaggaagctgagacatgcggatcacttgagcccatgagtttgagaccagcctrtagtgagactttcaacaaaaaaaagttttttataaaagtagctgggtgtggtggtgcacacctgtactcttagctacttgggaggctgaggtggaaggat

SEQ ID NO: 280124 - DNA, 201 bp, Homo sapiens
cattcctcattttagaatgagaaatgattatattttacttcatctaaaactttaagtatattttttataaatgtagacattcatagtgtaaaaattttctrctctaatttgctctatgagaacccaggtttctctctctctctcttctgtttttctcttcctttcattttccttctacttcgggttaatcagtgaaatcaa

SEQ ID NO: 280125 - DNA, 201 bp, Homo sapiens
ggaatagataaaccttacaagagctgatgacagaatgccgtcatgcccctaatatcgctctgtggttatatttcaaagagttgacagcaatagaatgacaytgacttattcattctaggccaaggaactactaaattctttaacagccgaattactttggcatgaattatctggacttttcaacactgatctgatgtttat

SEQ ID NO: 280126 - DNA, 201 bp, Homo sapiens
aatatatcttgtttaaaaagctaaactgcagccgggtgtggtggctcacatgtataatcccagcactttgggaggctgaggtgggaggattgcttatgtcyaggagttcaagaccagcttgggcaacatagtgagaacttatctctacaaaaaataaaaaattaatcaggcatggtggggtgtgcctttactcccagctac

SEQ ID NO: 280127 - DNA, 201 bp, Homo sapiens
tctcctaacaatggacattgaagggagggaaagtagaagtttaatttttttaaaaaaataaatatatgaaacttttttactgtatattccctattagtacttttttctagaacacgtaatcatttcgtttaatgattagttcttgggatagtgtctttcacaccatgaataaataatggacttatagattatttgttaatt

SEQ ID NO: 280128 - DNA, 201 bp, Homo sapiens
cttttgatggtcaaattatcccaaatttgtcagcagttcctccttcaagctaccttatttgtgcgtatctgtgtatgtgtgtgtgtgtgaatgtgtctgtktgtgtgaatgtgtctgtgtgtgtgtgtgtgtttgaatgctttctagctttctggcataagaaatatgttctaggctcatcttagtctttctctgctctag

SEQ ID NO: 280129 - DNA, 201 bp, Homo sapiens
tcttattctttttttctcaagataaaccaaaagagattgtttcatggtgatttgggagattaaatcaattaaaaagaagaaaccaccatagttaaacaagttttttttttttttttggttttgttttttttttatttttggtaaactataaaaaacacaaagatactttctgtagcaaaccacattaatttgaataaaaca

SEQ ID NO: 280130 - DNA, 201 bp, Homo sapiens
ccatcctgggactactggacatatcctggttctcttacagttccacctcttcttgagagtgtcacatggattgttttaaagcaacctataaacatcagctytcaacaggtacataatctcttccaggttgatactgattccctcagaggaaactgggctttttttttttttttttcaaccctgcccttaatttctactgtg

SEQ ID NO: 280131 - DNA, 201 bp, Homo sapiens
ttagctaaagctctctatgagcaacaactatgtcttacttacctacctagcatggtgcctggcacatggtaggtgctcaatacatgtgtgtttaagttacaaaaaaaaaaaaaaaacttgtatgacggaaagacatggaaaataccatgacatagcattgggatgccttagcatacatagattaactctcgataaaattac

SEQ ID NO: 280132 - DNA, 201 bp, Homo sapiens
agtttaatagtttttatagatatttcatgatttgtttctgcaaagttttagccgtaattattttagcattatttgcaaacctataatgccatttaagtacmtgctttaatagaaaaagtttagtttaaaaaaaacttattctcttattttaattgccaaagtaatatccactcatagtaaatgaaacaatatggaaacata

SEQ ID NO: 280133 - DNA, 201 bp, Homo sapiens
gaattctttttgatcctccagggtaaacaaactcgattcacaaattttgacctattgtctctgcttccaccatcctgggactactggacatatcctggttytcttacagttccacctcttcttgagagtgtcacatggattgttttaaagcaacctataaacatcagctctcaacaggtacataatctcttccaggttgat

SEQ ID NO: 280134 - DNA, 201 bp, Homo sapiens
gggtaaacaaactcgattcacaaattttgacctattgtctctgcttccaccatcctgggactactggacatatcctggttctcttacagttccacctcttyttgagagtgtcacatggattgttttaaagcaacctataaacatcagctctcaacaggtacataatctcttccaggttgatactgattccctcagaggaaa

SEQ ID NO: 280135 - DNA, 201 bp, Homo sapiens
gcgcgacgccccggcgctcgctgaccacacactgggctcgcacattgagaaactttttcggttcctctttaaactaagcagcactcctgggagcccagtgygagaagcggagagcagtcttgtcagggtagacgggttgttggtggtggatgtgagcgttggtgtgtgttatctctgtcaggattccccaaactcccaagt

SEQ ID NO: 280136 - DNA, 201 bp, Homo sapiens
cttgaaagtactacatactcagagaggcttaggttttctgccagctggcaagtagtttcctgaaaagggtcctcctgacatatgtcagaggctcagagtcyttacctgcagatcaagggccatttttgtagacaaagacttttttgttgttgttgttctgcaataaataattatcttttatttatttatttattttaaagc

SEQ ID NO: 280137 - DNA, 201 bp, Homo sapiens
tggcaagtagtttcctgaaaagggtcctcctgacatatgtcagaggctcagagtctttacctgcagatcaagggccatttttgtagacaaagacttttttkttgttgttgttctgcaataaataattatcttttatttatttatttattttaaagcaaaccagtgaaggaaaggaccaaaacctttggttcacttatgtat

SEQ ID NO: 280138 - DNA, 201 bp, Homo sapiens
aaatgtaaaaataggcaagggtttgtagccatacactaaaaattattgtaaagcactgtcactgttagcatggccaagatatacctagaagaacacttttygtcttcttgtagcactgcttcttggatgtgataggtgctccacaaatatactattaatttaattaagcaaatttgatttagaataatctcctggccaaat

SEQ ID NO: 280139 - DNA, 201 bp, Homo sapiens
tttttaaaaaataatttttaaatagtggctgaaattgagtgattcagacttgatctgctacagtaaccatttcttttgaaatttcatgtttttagattggygaacctaattcccaactgcaaaagattactgacactttggattccattaaagaaaaggtaaaatgaattactgttaataattaacatatttcttgttctc

SEQ ID NO: 280140 - DNA, 201 bp, Homo sapiens
tctcatctgtggaaggcctggaggagcctccagttacttgggagcaatagctggagtttgttagggctgaaggggctgtgaaggatgttcaaggctttttwaaaaatttatttattttctgatatgaagtgtcgctctgttgctcaggctggagtgtggtggcgcagtcttagctcactgcaacctccacctcctgggttc

SEQ ID NO: 280141 - DNA, 201 bp, Homo sapiens
gccgtgggaccaaaccgtgggtgcccttagccaggatagatgatcgtaaactatgtctatgagtgagccctcctcatcgaaggtgttcatttccatctctstcttcaggacagctacagaacagtacacattttagaatgaaaatgaggagtcactggtaactgcggtacctaaaacataatttgctctgtgcatttcatg

SEQ ID NO: 280142 - DNA, 201 bp, Homo sapiens
atcttaaaaagagacacacatgagaataaccaatctcacattccagtcctgtaatcccagtatgtttgggctactgattctctttttaaaagtggcatctytcatttttaaaagagaaaatcctagatagtgactcctattatcatcaagtaatatatatcaaggccccaaggctaccttgtcacattttactctggcata

SEQ ID NO: 280143 - DNA, 201 bp, Homo sapiens
aggaatcccctttgttccagcaggaaacttgatgcctatccagaagcaaagttcacttggccgccctcaccgtggaaacgtgttgccacaccaaatgaacwtccccctcctgctgtcaaagagcagtcagtggccaccgctattgacctgagctctaattaggctggttttataatgaggaaaagagtgcgattctaatta

SEQ ID NO: 280144 - DNA, 201 bp, Homo sapiens
gccctcaccgtggaaacgtgttgccacaccaaatgaacatccccctcctgctgtcaaagagcagtcagtggccaccgctattgacctgagctctaattagkctggttttataatgaggaaaagagtgcgattctaattagtaaatttccatctctttctcaataggtatcctccagtcaaagcaatcagctatcctcatca

SEQ ID NO: 280145 - DNA, 201 bp, Homo sapiens
atcacactggttccattgccaaaaaaataactgtatcataaaactctagtaaaagtgatgatggttaagacaacaagagagcagaacgaggttttatttgstgctaatgacctgcattctctctcttaggtccgtggcactcaggtagttggttctgacatgactgtgacaattcagtttaccaatcctttaaaagaaacc

SEQ ID NO: 280146 - DNA, 201 bp, Homo sapiens
actgggcacaacatatagaaggcaatggcagccatagcttgcgccatgcatagcctggagtagacaaacctaaatgaactttcttccttctcacttctcayggactcatttaggtgaatgccaaagatgacgaaggtgtcctcgttggatcctgggacaatatctatgcctatggcgtccccccatcggcctggactggaa

SEQ ID NO: 280147 - DNA, 201 bp, Homo sapiens
aggctattggtgtgtatcctttggccagaataaccagccaagcatgtttacagtgatgcagggaatcaatccgttctatgactatttccttaactctccarttagttgctatcctgcccagcaaacacagctgagagaagctgcttaataagaaccaaaatactgagctatttgcatacctgaagaactagtgcaattacc

SEQ ID NO: 280148 - DNA, 201 bp, Homo sapiens
attcaggaaaatctcttactacagtgaggtacagtataggtaaaatcttcctgtcttgctatttgatctttattcctttttaagaaaattctggtattgcytgtggctagcagttctttctaagaagactgaactggtaccagactcctcccttgatagtgtaatctactttctgcagccttctgccctctccttgatcct

SEQ ID NO: 280149 - DNA, 201 bp, Homo sapiens
gtggaggtatgaatatgcttctgtttgaattgatgagtgtgaattacttgagggactttcaggtaaacctgtccaatagataatatgagtctgaagcttcrggaggaggtttgggttggacaggagataatttggatatcatacacacgtgggcaagctcactcagaaaaaggtaaatcaagtcagcagtggactgaggct

SEQ ID NO: 280150 - DNA, 201 bp, Homo sapiens
tgggaggccaagatgggaggatcgcttgaggccaggagtttgagacctagtctctaaaaaataaaaattaaaaattagatgggtgtggtggtgcacacctrtactcccagctacttgggaggctgaagtgggagaattgcttgagttcgggagttggaggttacagtgagcaatgattgtgccactgtactccagcctggg

SEQ ID NO: 280151 - DNA, 201 bp, Homo sapiens
tatttgatctttattcctttttaagaaaattctggtattgcctgtggctagcagttctttctaagaagactgaactggtaccagactcctcccttgatagygtaatctactttctgcagccttctgccctctccttgatcctggggtccaccttgtctcagaagaggggaaaccttagagggacagtcactatatgaggtc

SEQ ID NO: 280152 - DNA, 201 bp, Homo sapiens
tctaaaaaataaaaattaaaaattagatgggtgtggtggtgcacacctgtactcccagctacttgggaggctgaagtgggagaattgcttgagttcgggarttggaggttacagtgagcaatgattgtgccactgtactccagcctgggcaacagagcaagactccgtctttgaaaaaagaaaaaaaacaagctcatgtat

SEQ ID NO: 280153 - DNA, 201 bp, Homo sapiens
aggggtgagactgtcgcccaagtgaaaaagatagcagaagataagaaggaaaactgtttccagaaattgtcaaaagacagccaggtgaacaagattgtggyccgaggtggcacaggatgctgggctgaaaattacagcagcatgcacagcacttattgataggagaatgctcagctgtgctcctgagggcccttcagcctg

SEQ ID NO: 280154 - DNA, 201 bp, Homo sapiens
cagaaaatggttaagattaaaactgttcaatgcactgattcaaatatctttgggtggccttgaagctgctcttagcagagggaaagagacatccagccatktgagtgtcctgagggatgccaatgagaatgaatctgcccagaaaacccaagtctagagccccaggatatctccaggagccctcagatttggcttaatcca

SEQ ID NO: 280155 - DNA, 201 bp, Homo sapiens
tgcactgattcaaatatctttgggtggccttgaagctgctcttagcagagggaaagagacatccagccatgtgagtgtcctgagggatgccaatgagaatsaatctgcccagaaaacccaagtctagagccccaggatatctccaggagccctcagatttggcttaatccattctaataatctgtagatagcatatgcaca

SEQ ID NO: 280156 - DNA, 201 bp, Homo sapiens
ttagagggacagtcactatatgaggtctcctactattttgggtgcaaactaagtagtgtgaagcaccttcctgtgatacacctgagagctctttattttckaaatgcacgaggattcacattactttcgaggtcctaagactctggcctgactttggtaaatgattcattccttcttcttgggtacaggagccaatatgtt

SEQ ID NO: 280157 - DNA, 201 bp, Homo sapiens
aaacctctttttttggagtgaacggtcgtagatacatctgaggacccaggtgctcaatgggcattgtccttggcatttctaaatcaccaaggaactttttygcatttacccatatggattttaatttttgaaaaagttcatctatcaaaacaaatcatgattatgtaataataccttgttaccccattcttgtgtcagatt

SEQ ID NO: 280158 - DNA, 201 bp, Homo sapiens
gagcttctgggtctccaaccctatcagcttttatttaaaagtgttattgtctctttctatgattcatatcaggaatgaaatttctcagtttggaacagcakaaaaaggcagaagcctccggtgttccttgcaacctttccaattgtaacgcatatcaattagtaggagctctcggggtgacaactttgggagaatccactg

SEQ ID NO: 280159 - DNA, 201 bp, Homo sapiens
gccctttgtggtatgcactggtaagatataaggcaggagagaaaatagagaactcgaaaaataattatagatcatcctttaaattgtttttccagaacctrgcctccttttatgtcatgtgatttcctccaaagcttcagtatgtgggtatttgtcttctaacttgccaactatgctaagcagctgcagctctgacctccc

SEQ ID NO: 280160 - DNA, 201 bp, Homo sapiens
atctcagcctcaaataatctttatttaaagtactactaaatcaactagattcgcctttagaatattttcaaaacctgtttggccctatgatacgaatccartgttgttgaagaaaggggcatgtcagctccagagatctctagacgactgctctatggacagttaaagactttggcaacagcagacatgtgatgatggcta

SEQ ID NO: 280161 - DNA, 201 bp, Homo sapiens
acagtgatttctgcatttccatctgaggtatggggttcatctcactagggagtgccgcacagtgggcacaagtcagtgggtgcgtgcactgtgcgcgagcygaagcagggcgaggcattgcctcactcaggaagtgcaaggggtcagggagttccctttccgagtcaaagaaaggggtgacggacggcacctggaaaatgg

SEQ ID NO: 280162 - DNA, 201 bp, Homo sapiens
tcatttacattacagctaagaaagatggcactcatgtggtggaaaatgtggatgccacccacattgggaaattaattgtgaccaaacaaattggaggagayggcatgatggatattactgatacttacaaattccaagaaggtaatttactaccactgaatgaagatttatttgcccaagtccattgagtacttattcatt

SEQ ID NO: 280163 - DNA, 201 bp, Homo sapiens
tgaaaattgcatgcccaacctctccacctccttatcctcctccatgtggctcaatttccaaagcagttcctacctcctcacccctaagtggatttacttayggctcttcttgggctccaccctaaccctatcagactataatctatcagagcaaacattctgttttgttctctgatgtatcccatgtacctagatcacagc

SEQ ID NO: 280164 - DNA, 201 bp, Homo sapiens
cgaccatttctgtagggcgtggagtaaaactagggttggtttgaccagcactttcatcatttaatccttaaagacaccctacgatgtagatactgctattrtctcccttctgtagctgaggaatttgaggctttgagaggttgactggttacacaggttcagttacacagtttatgaaaacagagccaagattcagactca

SEQ ID NO: 280165 - DNA, 201 bp, Homo sapiens
attcatataggactgtaattccaggaggaaactagtggcaaaaactgagctgaggctcagaagatcagtcacatagataaggctactatggagggcttggrgacaagctagagttcagttgattaatggttggatgggaatcagcccagctcctgatggccactgggaggctggcggatgcatcccagtggaaggaaccat

SEQ ID NO: 280166 - DNA, 201 bp, Homo sapiens
catatcaggaatgaaatttctcagtttggaacagcagaaaaaggcagaagcctccggtgttccttgcaacctttccaattgtaacgcatatcaattagtargagctctcggggtgacaactttgggagaatccactgatttatattaatgaagagtgttactgtagtccaacagagtaaagtactaaattaccaactctaa

SEQ ID NO: 280167 - DNA, 201 bp, Homo sapiens
attgtagtgggccaaatatgctcatagtttctctttgactgcagaatctttatagaaagaatgatagactatatcctgtgtaatccatcacttaacacccraagaaatagagggttacagtaaaaatatagagaaaaaagccattttcttttcagccaccacattttaaaaaaactaaaacagttaaaactaaaataataa

SEQ ID NO: 280168 - DNA, 201 bp, Homo sapiens
ttctctttgactgcagaatctttatagaaagaatgatagactatatcctgtgtaatccatcacttaacacccgaagaaatagagggttacagtaaaaatayagagaaaaaagccattttcttttcagccaccacattttaaaaaaactaaaacagttaaaactaaaataataaataacaaaagatatatattgcttattta

SEQ ID NO: 280169 - DNA, 201 bp, Homo sapiens
gtccattgagtacttattcattgtcactcagagatgagttccagagaatgcactggcatttgcagcatttggtagcaacagcagaagtataaactttcacrtgtgaaagacacgtcacatatgcaatttttcattgtagttttctttgctagcttgctttgggcagaattctcattcacgtggcttgtaaaatgatttggt

SEQ ID NO: 280170 - DNA, 201 bp, Homo sapiens
agcagaagtataaactttcacgtgtgaaagacacgtcacatatgcaatttttcattgtagttttctttgctagcttgctttgggcagaattctcattcacstggcttgtaaaatgatttggtttaaagtcatacctaatttaacagaatatagaatatgttcttgctcacaagaaccttaattttaaataatcctattaga

SEQ ID NO: 280171 - DNA, 201 bp, Homo sapiens
ctgtgtctgagcacttattaatggttttgactatcactcctactacacatacacctcatagtttaatggtggaagctacagcacctgtccaagtgcacccygccatctgcaaccccctccattgaggtctcttgtgctatatcagactgtatttacacgtgacttctcagtgagacttgcaaaaccccttgccttcacagg

SEQ ID NO: 280172 - DNA, 201 bp, Homo sapiens
tcagatgcaagaatcgttcaggcaaagtgaaacacgtttcctcttccatacagccccctgctgtatccaactttttccttcccagacagtaaacccacaarctttatctgagtgtaccggaaacttctctatctttacaccttggctatccccctagaattccaccttggtcaaggccaacacatgaaaaaagacactgtg

SEQ ID NO: 280173 - DNA, 201 bp, Homo sapiens
aatagaaattaaaataactacttcacatttgtttagtactttaccaattatttccacatacattgttctattacattatcatggaagactacaacgtagayaatacaatattaataggacaatgcaatctctctaactcaggacaattaggtcgaaggccagtttcaattccaaaataatgtcatggtgggtttttgttaa

SEQ ID NO: 280174 - DNA, 201 bp, Homo sapiens
ggcatctaagaaagtaggacagtgtttcccagagtgtgttctctatgaacacctgtcatgtgagattctccttgggggaaaaaagttccatcatcaaatayagttggatcatgctgtgttttgtgtctcttctcatagaggcccaaggcacattaatatataaaaggctatgagtagacacgtagtcaaaaaatgaatctt

SEQ ID NO: 280175 - DNA, 201 bp, Homo sapiens
ctaataatggcatctaagaaagtaggacagtgtttcccagagtgtgttctctatgaacacctgtcatgtgagattctccttgggggaaaaaagttccatcrtcaaatacagttggatcatgctgtgttttgtgtctcttctcatagaggcccaaggcacattaatatataaaaggctatgagtagacacgtagtcaaaaaa

SEQ ID NO: 280176 - DNA, 201 bp, Homo sapiens
ttcttgggtaactactgggctccagacgctgttcttaaagcactttacatggttgcattttcaaccaccaacaaccccacaaggtaaagagtactggcatyactttacagatgagaaaactgaagcacagagaggttctataactcctccaaggccatacagccagcaaatggcggagctgggcttccaaccccagcaggc

SEQ ID NO: 280177 - DNA, 201 bp, Homo sapiens
ggagtcactggtaactgcggtacctaaaacataatttgctctgtgcatttcatgtttgctatttttttgaatcttaaaaagagacacacatgagaataacsaatctcacattccagtcctgtaatcccagtatgtttgggctactgattctctttttaaaagtggcatctctcatttttaaaagagaaaatcctagatagt

SEQ ID NO: 280178 - DNA, 201 bp, Homo sapiens
ttccaggaggaaactagtggcaaaaactgagctgaggctcagaagatcagtcacatagataaggctactatggagggcttggagacaagctagagttcagytgattaatggttggatgggaatcagcccagctcctgatggccactgggaggctggcggatgcatcccagtggaaggaaccatgacccaataagactgtca

SEQ ID NO: 280179 - DNA, 201 bp, Homo sapiens; identical to SEQ ID NO: 57053

SEQ ID NO: 280180 - DNA, 201 bp, Homo sapiens
atagaaagaatgatagactatatcctgtgtaatccatcacttaacacccgaagaaatagagggttacagtaaaaatatagagaaaaaagccattttctttycagccaccacattttaaaaaaactaaaacagttaaaactaaaataataaataacaaaagatatatattgcttatttatcattgagaagttgtataaatat

SEQ ID NO: 280181 - DNA, 201 bp, Homo sapiens; identical to SEQ ID NO: 57054

SEQ ID NO: 280182 - DNA, 201 bp, Homo sapiens
ctgtgtaatccatcacttaacacccgaagaaatagagggttacagtaaaaatatagagaaaaaagccattttcttttcagccaccacattttaaaaaaackaaaacagttaaaactaaaataataaataacaaaagatatatattgcttatttatcattgagaagttgtataaatatgcgtatttatttattattgagaat

SEQ ID NO: 280183 - DNA, 201 bp, Homo sapiens
aaaataatgtcatggtgggtttttgttaacttttattgcatagaatgtttcaaatggcactactgagtttaattctatctcaatcaatgcttagtgtccgstctatgcctgcaattggtttggtgctggcgattccagcagtgagcaggactcagttcctgtcctggtccgagtgacaggattattgtgcagaggggtctt

SEQ ID NO: 280184 - DNA, 201 bp, Homo sapiens
aattctatctcaatcaatgcttagtgtccgctctatgcctgcaattggtttggtgctggcgattccagcagtgagcaggactcagttcctgtcctggtccragtgacaggattattgtgcagaggggtctttggaaacaataagtaggggcatttagtccaactgattcagaaaaagacttgagaagagaagtcgtggacc

SEQ ID NO: 280185 - DNA, 201 bp, Homo sapiens
tgactttgcagaatttataacataggaataatgacggcaccctcctcctggggaggtctgaagcttgtattatagaaacaccccaacaagtgcagtacacrgtgcatccattaatgtgactttctctctggtggattgtatttttgcctgtcattatctctggatctcccccaggtcaagaagaagagagattggccctag

SEQ ID NO: 280186 - DNA, 201 bp, Homo sapiens
gattatacaggaaagttttacttatcactgccttagtttttccccacttatagtaccactgtgattttatgtttttcctgaggcattggcttgttgaagtkatattgcaacagagaatcaaaagatcacttagaaaaagtaacatgttagaaaacatcatgcttagaattaaatgtctaaagtataccagtatagatgata

SEQ ID NO: 280187 - DNA, 201 bp, Homo sapiens
attaatcagcaccctttttctcaccctttgttatcaacatataagcaggctagaaagacagtattttattccaatgtgaaacaaaactgctgatctggagktcttatgttataaattcccacatcataccttcaactatatatatgtcctgaaactagcatattttgagaataaaatgggaaatgacatttaaaggacacc

SEQ ID NO: 280188 - DNA, 201 bp, Homo sapiens
ggagcctcacctcaggggggctacagttttgcacagagcggccccactgttgacgccaacagaggccatggtctgagctccttagctgttcaggagagggmtggggactcaggaacctcagaagggcagagcagggcagagtaattagatcccagggtagcaaatgaaaccccaagtgggcaaatgcaaagtagcagatcc

SEQ ID NO: 280189 - DNA, 201 bp, Homo sapiens
gccaccacattttaaaaaaactaaaacagttaaaactaaaataataaataacaaaagatatatattgcttatttatcattgagaagttgtataaatatgcrtatttatttattattgagaattttataaatatatccacttaatttttatcccagttatggaaggtattatagcaggtggtctcatattcatttttccaca

SEQ ID NO: 280190 - DNA, 201 bp, Homo sapiens
catataaagaattgtaggcctttataaggcctttggtttttattttgagtgagctgaggagcctttagagagttttgagcagaaatgtggcataatctaasttaggttttgaaaagaccactggctgctgtgttgagaagagactaaagaggaagtagggcggaaggttagagactggtaggatgcttctgcaatcactcc

SEQ ID NO: 280191 - DNA, 201 bp, Homo sapiens; identical to SEQ ID NO: 57065

SEQ ID NO: 280192 - DNA, 201 bp, Homo sapiens; identical to SEQ ID NO: 57068

SEQ ID NO: 280193 - DNA, 201 bp, Homo sapiens; identical to SEQ ID NO: 57070

SEQ ID NO: 280194 - DNA, 201 bp, Homo sapiens; identical to SEQ ID NO: 57073

SEQ ID NO: 280195 - DNA, 201 bp, Homo sapiens; identical to SEQ ID NO: 57074

SEQ ID NO: 280196 - DNA, 201 bp, Homo sapiens
tctgtaactgtaaatcccaaagatgcttaacttatatagagttttctcacccctgaatctgttatcacagagtctctgttcctgggttctttgtttgactyagcccctaattattttgatatcactttcaagtattaatagtttggttatgataggtaccatattccctgaagtacttcatgttcgacaatgtgtgtaaaa

SEQ ID NO: 280197 - DNA, 201 bp, Homo sapiens
ggccaacctcttcccatcttccccttcatgttctcctcctcagtctctggtaaccactgttctgctctttgcttctatggtataataatttttttttttttagtgtctacatgtgagtgaaatcatgtagtatttgtctttccatgtctggtttatttcacttaccatgatgcccttcctccaagtctaattcatgttgtt

SEQ ID NO: 280198 - DNA, 201 bp, Homo sapiens
tctcttttccatctgatggtttgcaaatgtttgcaaacagctgtctcatcttccttgaatcttttctacctggggacaaatatctgtcctgactttatttycctctcctctaacatggtttcagctctctctctctctctcccacacattccaatttgtcactactcctcttaaagtgtgacacccagaatggatcccaat

SEQ ID NO: 280199 - DNA, 201 bp, Homo sapiens
tccattctcagtcttgtcagtgtggcttcaaatccaatgttgctcccaccggtttgaaaatctcccttactttctgactgccgttttttttttttttttttggacgtcagtacgaaacagttttggttgtcttgttattgctgagttgttggcttttccagctcctctgacctcagagtagcactctatcttagagttcaa

SEQ ID NO: 280200 - DNA, 201 bp, Homo sapiens
atccattctcagtcttgtcagtgtggcttcaaatccaatgttgctcccaccggtttgaaaatctcccttactttctgactgccgttttttttttttttttttggacgtcagtacgaaacagttttggttgtcttgttattgctgagttgttggcttttccagctcctctgacctcagagtagcactctatcttagagttca

SEQ ID NO: 280201 - DNA, 201 bp, Homo sapiens
tatccattctcagtcttgtcagtgtggcttcaaatccaatgttgctcccaccggtttgaaaatctcccttactttctgactgccgttttttttttttttttttggacgtcagtacgaaacagttttggttgtcttgttattgctgagttgttggcttttccagctcctctgacctcagagtagcactctatcttagagttc

SEQ ID NO: 280202 - DNA, 201 bp, Homo sapiens
caacagccacaaccgttacaccatcacagcttatctctcagccaacatcaccttctacaccggggtcccgaaggcagaattcaagaaggagacgttcgacrtgacgctggagcccttgtcctgtaagctaacaatggtgtggttctttgtgagactcgctgtctggcccctgtcttgctaggtgttaatgcccgttatagc

SEQ ID NO: 280203 - DNA, 201 bp, Homo sapiens
aatgtcatcatttacagactgaatttggtgctgattatgttcaccattactaaaaatattgggaaatgagctatgcttggtgaaacaaagggcattttttwaaaatttggctgattaaatgtagtttagaaacaaaataaacttgcataaacttgcaagtgtttggaaacagtctggtttggtaatagtcactatgtttaa

SEQ ID NO: 280204 - DNA, 201 bp, Homo sapiens
gaccgcctttggaggcagaagagcagttccacccaataactctaatgcagcggaagatgacctgcccacagtggagcttcagggcgtggtgccccggggcrtcaacctgcaaggtatgagcataccccccttccccaccactctgggtccaggcacagccgggccctggcccctcttccctgcaggtaaacatcctctgtc

SEQ ID NO: 280205 - DNA, 201 bp, Homo sapiens
gttgatgagagtggaagataaatgtgggagcctctgtgctcctacttctcaggcccacagctgtagcttctgggggcatctgtggttgcatccatgagacrccttcctgccctggaagcaggaacccaggcttctggcagtgaccctgaggagtgacatctcatgcagcccttatccaggtcttagagcccttccctagtc

SEQ ID NO: 280206 - DNA, 201 bp, Homo sapiens
ctggaatctgtgggataaatgcaaggcctcacttataccctctggggcaactttattgcccataaagggctctccgcatttctttcaaattacaatgctcrtagcttctgcatctcatcatttaagagatgccttattgcagatgcaataaacaacagagaaaataatcttagtgcttttgaaacaacgcaagcacaaaac

SEQ ID NO: 280207 - DNA, 201 bp, Homo sapiens
tacacataaaagtttcttcttgaactaaccttctctaaattgcctgaaggctccctttatttaaggttttatgagagcaagaaaatgaaaaatatgactgygaaaatgaaatgaaaatatgactatgcagatatggaattatgctttcagcaataaggaaaagggagctttgcagattcctaaaataatgtgatgcaaaca

SEQ ID NO: 280208 - DNA, 201 bp, Homo sapiens
cgtcctcaactgatggtttagcgataacttaaaaggtgatgctgcaaatgattctttgctggatttcagaaaataaagaagctattccagcaaaaaaaaaagtttctatttttacctgtattctgtcagggatcacagtatatgtagttttgaagatgaatgttttagagtcagaaagacctggatttatatccaacttcc

SEQ ID NO: 280209 - DNA, 201 bp, Homo sapiens
ttgagatataatgagtgccccaaacaaagtacatgacagtgactggctacactgtgagacttaactgtagtttcatttagtgctgtaaatatcacaaacttcattaaggtggaaaatgggaacagactatgtgttctaattattgctgaaccctgaccattttcccctccatgtccacaaccgagcacgttctctctccag

SEQ ID NO: 280210 - DNA, 201 bp, Homo sapiens
taaattgtagcaaatgcctagagctttcaaaaccattatcagagaggccgggtgcagtggctcacacctgtaatcccagcactttggaaggccaaggtggstggatcacttgaggtcaggagtttgggatgaacctgaccaacatggtgaaaccctgtttctactaaaaataaaaaattagccaggctgtagtggtgcgtg

SEQ ID NO: 280211 - DNA, 201 bp, Homo sapiens
cctgaactcaggaggtggaggttgcagtgagccaagatcgtgccactgcactccagcctgggggacagagcaagacttcatctcaaaaaaaaaaaacactrtagtgttttctttggaaactaaaagctttggcacttttcctattcctagggtagtaaaggtaattttcatggaaaagaatagtcagtgtaaaggactgaa

SEQ ID NO: 280212 - DNA, 201 bp, Homo sapiens
ctcgaacccgggaggcggaggttgcagtgagctgagatcgtgccactgccctccagcctgggtgactgagcgatactccgtctcaaaaaaaaaaaaaaaaraaaagaatggaggctggaaacaaagctgtgtcatctaggaggggcctaggaagaggttttctgcctctgccatctcttgtggggcctctttctcgtcctt

SEQ ID NO: 280213 - DNA, 201 bp, Homo sapiens
tgtggagcatggatctaaatgatccatctcagaaacaggccctctgctggtgcctctcgcccaagttaggaaagtcttttgggggctgtccagaatgaatrgtgtgctttgctttcccattcaaaaagatacacgcgctgacataggccgcttcttaaaacgctgtctcctgtaatctcagcactttgggaggctgaggtt

SEQ ID NO: 280214 - DNA, 201 bp, Homo sapiens
tgcgatgatcttggttcactgcaacctttgcctcctgggttcaagcaatcctcctgcctcagcctcccgagtagctgggattacaggcacatgccaccacrccaggcaaatttttgtatttttagtagagacgggatttcactatgttggccaggctgatctcaaactcctgacctcaggtgatccacccacctcggcctg

SEQ ID NO: 280215 - DNA, 201 bp, Homo sapiens
tggagtgcaatgcgatgatcttggttcactgcaacctttgcctcctgggttcaagcaatcctcctgcctcagcctcccgagtagctgggattacaggcacrtgccaccacgccaggcaaatttttgtatttttagtagagacgggatttcactatgttggccaggctgatctcaaactcctgacctcaggtgatccaccca

SEQ ID NO: 280216 - DNA, 201 bp, Homo sapiens
agaacccactcattctgcaaaagcctccactttctttttttttatttttattttttgagatggaatctcgctctgacacccaggctggagtgcaatgcgaygatcttggttcactgcaacctttgcctcctgggttcaagcaatcctcctgcctcagcctcccgagtagctgggattacaggcacatgccaccacgccagg

SEQ ID NO: 280217 - DNA, 201 bp, Homo sapiens
acttcatccattctatctagagacacgataaactgaccatttgtgctcatctgaggctgtaaccaatagagggccagaacctcactcatctaaacaattawttgcaaggggagccatggaggaagcagggtccaggcttaggtccaaagacagcaatacgagagcgggtcattccaaaaggcaggacctgggggccaaggt

SEQ ID NO: 280218 - DNA, 201 bp, Homo sapiens
caggagatatgtttggaagctgtagagatactccaggctagaagaggaatagaccagagggattttagcccctggaggtatggggctcatttctcttgttscagcttcctctgagcacctgagcaatccttcaacattataggttccaggatgtattaataacaacactttataaattaagccacttaagaaaatgctttt

SEQ ID NO: 280219 - DNA, 201 bp, Homo sapiens
tgagagtggaagataaatgtgggagcctctgtgctcctacttctcaggcccacagctgtagcttctgggggcatctgtggttgcatccatgagacgccttyctgccctggaagcaggaacccaggcttctggcagtgaccctgaggagtgacatctcatgcagcccttatccaggtcttagagcccttccctagtctctgg

SEQ ID NO: 280220 - DNA, 201 bp, Homo sapiens
gagcctccaccaaggagatggtggaggtatgaatatgcttctgtttgaattgatgagtgtgaattacttgagggactttcaggtaaacctgtccaatagayaatatgagtctgaagcttcgggaggaggtttgggttggacaggagataatttggatatcatacacacgtgggcaagctcactcagaaaaaggtaaatcaa

SEQ ID NO: 280221 - DNA, 201 bp, Homo sapiens
gtgagggtaggtagtccttgcttctcgtgaatcctttgctgtgagtcatttggaaagccaatgactgctgtgcagcattcagaatggcagtgtttcttggrtaactactgggctccagacgctgttcttaaagcactttacatggttgcattttcaaccaccaacaaccccacaaggtaaagagtactggcatcactttac

SEQ ID NO: 280222 - DNA, 201 bp, Homo sapiens
ctacctatgagtcctgagggactctgagcaaggaaagcctgcttaccccaggggaccctaggaggggacaccttcagccctgctcccatagctgactctcsatcccctcgtggctactttcacagaggattgtggccgtgggaccaaaccgtgggtgcccttagccaggatagatgatcgtaaactatgtctatgagtgag

SEQ ID NO: 280223 - DNA, 201 bp, Homo sapiens
gggagaacccactcattctgcaaaagcctccactttctttttttttatttttattttttgagatggaatctcgctctgacacccaggctggagtgcaatgmgatgatcttggttcactgcaacctttgcctcctgggttcaagcaatcctcctgcctcagcctcccgagtagctgggattacaggcacatgccaccacgcc

SEQ ID NO: 280224 - DNA, 201 bp, Homo sapiens
agggatgtgaaggacctcttcaaggagaactacaaaccactgctcaaggaaataaaagaggatacaaacaaatggaagaatattccatgctcatgggtagsaagaatcaatatcgtgaaaatggccatactgcccaaggtaatttacagattcaatgccatccccatcaagctaccagtgactttcttcacagaattggaa

SEQ ID NO: 280225 - DNA, 201 bp, Homo sapiens
ccaacttacaagggatgtgaaggacctcttcaaggagaactacaaaccactgctcaaggaaataaaagaggatacaaacaaatggaagaatattccatgckcatgggtaggaagaatcaatatcgtgaaaatggccatactgcccaaggtaatttacagattcaatgccatccccatcaagctaccagtgactttcttcac

SEQ ID NO: 280226 - DNA, 201 bp, Homo sapiens
acctaggaatccaacttacaagggatgtgaaggacctcttcaaggagaactacaaaccactgctcaaggaaataaaagaggatacaaacaaatggaagaayattccatgctcatgggtaggaagaatcaatatcgtgaaaatggccatactgcccaaggtaatttacagattcaatgccatccccatcaagctaccagtga

SEQ ID NO: 280227 - DNA, 201 bp, Homo sapiens
ttcagcaaagtctcaggatacaaaatcaatgtacaaaaatcacaagcattcttatacaccaacaacagacaaacagagagccaaatcatgagtgaactccyattcacaattgcttcaaagagaataaaatacctaggaatccaacttacaagggatgtgaaggacctcttcaaggagaactacaaaccactgctcaaggaa

SEQ ID NO: 280228 - DNA, 201 bp, Homo sapiens
atatctagaaaaccccattgtctcagcccaaaagctccttaagctgataagcaacttcagcaaagtctcaggatacaaaatcaatgtacaaaaatcacaarcattcttatacaccaacaacagacaaacagagagccaaatcatgagtgaactcccattcacaattgcttcaaagagaataaaatacctaggaatccaact

SEQ ID NO: 280229 - DNA, 201 bp, Homo sapiens
gggccaatattcaacattcttaaagaaaagaattttcaacccagaatttcatattcagccaaactaagcttcataagtgaaggagaaataaaatactttayagacaagcaaatgctgagagattttgtcaccaccaggcctgccctaaaagagctcctgaaggaagcgctaaacatggaaaggaacaaccggtaccagccg

SEQ ID NO: 280230 - DNA, 201 bp, Homo sapiens
aacagcggatctctcggcagaaactctacaagccagaagagagtgggggccaatattcaacattcttaaagaaaagaattttcaacccagaatttcatatycagccaaactaagcttcataagtgaaggagaaataaaatactttacagacaagcaaatgctgagagattttgtcaccaccaggcctgccctaaaagagct

SEQ ID NO: 280231 - DNA, 201 bp, Homo sapiens
aaaagcaaggctcaagacctacgtgaagaatgcagaagcctcaggagccgatgcgatcaactggaagaaagggtatcagcgatggaaaatgaaatgaaagmaatgaagcaagatgggaagtttagagaaaaaagaataaaaagaaaccagaaaagcctccaagaaatatgggactatgtgaaaagaccaaatctacgtctc

SEQ ID NO: 280232 - DNA, 201 bp, Homo sapiens
gtaggtctttaagggtccccaggtgattgtgatatagagccatgactgagaactcttcaatcagaagtcctggaagcaaggcacagcacttacgcatctgyaaagagacttccaaatagaagtgctgcccaagacagaggctttcccagcctcttggtcttcaaggtccagagcaagctgctgcagatccatcgcaggtgt

SEQ ID NO: 280233 - DNA, 201 bp, Homo sapiens
aaaactctttcaagaatgaacaaaacctggggtcgcctatggctctgcccccctacttaatgccaacatcaaatacctgttgcgtctacttcctgcttccrctggcacccctccacttaccttcccccgagagtcagtcaaagacaccatcatgcctcccttgagcacttcagcaccctctgactggtttccttgctccac

SEQ ID NO: 280234 - DNA, 201 bp, Homo sapiens
agtgaataagttttgctcttgaaggttctcctgcttacaatcaaagtaatttgcagacttgcctgatttgtatgtttcttcaagtcaagaataattctaakggattactcctgtcccttcagctataagataacagagtgagaacaaaaatggcttgtgaaatcaacctaacagagtatttcttctctcttctcataggtc

SEQ ID NO: 280235 - DNA, 201 bp, Homo sapiens
caagtgtttggaaacagtctggtttggtaatagtcactatgtttaaaccctgatgcagatgatgctgtgtatctggacaatgagaaagaaagagaagagtwtgtcctgaatgacatcggggtaattttttatggagaggtcaatgacatcaagaccagaagctggagctatggtcaggtgagccacttaaaatttgttatt

SEQ ID NO: 280236 - DNA, 201 bp, Homo sapiens
atggaatctggtggtcacagggtactttcttggctccggatgccttgctttgacttccatatgggatctccctgtgttccttacccactgctccagtaccygtgttatcctgcctacctggctttgtgaacagcttccctgactccggagaattacatgcccagtgctcaggcttccccgcctgcatttctaatgtcctgc

SEQ ID NO: 280237 - DNA, 201 bp, Homo sapiens
tgaaaagcaaggctcaagacctacgtgaagaatgcagaagcctcaggagccgatgcgatcaactggaagaaagggtatcagcgatggaaaatgaaatgaawgaaatgaagcaagatgggaagtttagagaaaaaagaataaaaagaaaccagaaaagcctccaagaaatatgggactatgtgaaaagaccaaatctacgtc

SEQ ID NO: 280238 - DNA, 201 bp, Homo sapiens
actctagaaagaagagcgcctctcctcctccaaaggaacgcagttcctcaccagcaaaggaacaaagctggacggagaacgactttgacgagctgagagamgaaggcttcagacgatcaaattactctgagctacgggaggacattcaaaccaaaggcaaagaagttgaaaactttgaaaaaaatttagaagaatgtataa

SEQ ID NO: 280239 - DNA, 201 bp, Homo sapiens
gggaaaaaacagagcagaaaaactggaaactctagaaagaagagcgcctctcctcctccaaaggaacgcagttcctcaccagcaaaggaacaaagctggayggagaacgactttgacgagctgagagaagaaggcttcagacgatcaaattactctgagctacgggaggacattcaaaccaaaggcaaagaagttgaaaac

SEQ ID NO: 280240 - DNA, 201 bp, Homo sapiens
actgcctcctcaagtgggtccctgacccctgacccccgagcagcctaactgggaggcaccccccagcaggggaacactgacaccttacacagcagggtatwccaacagacctgcagctgagggtcctgtctgttagaaggaaaactaacaaacagaaaggacatccacaccaaaaacccatctgtacatcaccatcatcaa

SEQ ID NO: 280241 - DNA, 201 bp, Homo sapiens
gaaggggcagactgcctcctcaagtgggtccctgacccctgacccccgagcagcctaactgggaggcaccccccagcaggggaacactgacaccttacacrgcagggtattccaacagacctgcagctgagggtcctgtctgttagaaggaaaactaacaaacagaaaggacatccacaccaaaaacccatctgtacatca

SEQ ID NO: 280242 - DNA, 201 bp, Homo sapiens
atgcagctggagatctgagaaggggcagactgcctcctcaagtgggtccctgacccctgacccccgagcagcctaactgggaggcaccccccagcaggggmacactgacaccttacacagcagggtattccaacagacctgcagctgagggtcctgtctgttagaaggaaaactaacaaacagaaaggacatccacaccaa

SEQ ID NO: 280243 - DNA, 201 bp, Homo sapiens
cattgcctcactcgggaagcacaaggggtcagggagttccctttcctagtcaaagaaaggggtgacggatggcacctggaaaatcgggtcactcacacccraatactgcgcttttccgacgggcttaaaaaacggcgcaccacgagattatatcccgcacctggctcggagggtcctacgcccacggagtctcgctgattg

SEQ ID NO: 280244 - DNA, 201 bp, Homo sapiens
atgagtgacgcagaagactggtgatttctgcatttccatctgaggtaccgggttcatctcactagggagtgccagacagtgggcacaggtcagtgggtgcrcgcaccgtgcgcgagccaaagcagggtgaggcattgcctcactcgggaagcacaaggggtcagggagttccctttcctagtcaaagaaaggggtgacgga

SEQ ID NO: 280245 - DNA, 201 bp, Homo sapiens
cagcaatccaggtaagacaaaatccacatacacacacccaaccatggtcttaccctggcctttgcaatctatgtcctgccatcccacaccatcacctgtggccagggagggagggttgagttgccaaaggaggaaggggagcctggaggctactctaagagaggaatacagcccacctacagggttgatgggaatgcctgg

SEQ ID NO: 280246 - DNA, 201 bp, Homo sapiens
ctgttggatttggaggctggcaagctgtggacagcaccccccaggaaaatagcgatggtaaaactgtgtcctccctctgggaacttgcttcattgctgatytttgttttgcttttatgcttgcatttgatgtgtgggaaccacgcccattgggaggcaacatctgaagtgtgcttcctgggcacatgtacagtattagcta

SEQ ID NO: 280247 - DNA, 201 bp, Homo sapiens
gtcaggaagaaagtcccctacaagaagggttttttcactctgtgtttattaaatgctggtgatgtgtttagctgtggtctgtcctttcctgtagttttacratgccttggaataccagcaagaattgttaccaattatttctctgcccatgataatgatgccaatttgcaaatggacatcttcctggaagaagatgggaac

SEQ ID NO: 280248 - DNA, 201 bp, Homo sapiens
gtgttttctaaggaactaccactgctggaatgaagcatggatgacaaggcctgaccttcctgttggatttggaggctggcaagctgtggacagcacccccyaggaaaatagcgatggtaaaactgtgtcctccctctgggaacttgcttcattgctgatctttgttttgcttttatgcttgcatttgatgtgtgggaacca

SEQ ID NO: 280249 - DNA, 201 bp, Homo sapiens
tacagagtcaccctcagtgccatgaatcttgcagtatctggacagaattggagatgacaaactcacaccgcccttcctctgtgcaatgcaggcatgtatcrgtgtggccccgcctcggttcaagccatcaagcacggccatgtctgcttccaatttgatgcaccttttgtttttgcagaggtaagcaggaagctggaggaa

SEQ ID NO: 280250 - DNA, 201 bp, Homo sapiens
cagccagaaacagaatgagagtggcaatcgttttattgataagaccctgggtgaacagggctgaaaatcaagaaaggaaaatgggaacgggaggcccgtgrcagctgccactgttgtttggggcattaagatcaagtcctttaaggagggggacccttgaatctctaccagactccagtttggacttccaaggttgttctg

SEQ ID NO: 280251 - DNA, 201 bp, Homo sapiens
  misc_feature (1)...(201): n = A,T,C or G
tgataatgatgccaatttgcaaatggacatcttcctggaagaagatgggaacgtgaattccaaactcaccaaggattcagtgtggtgagtttgattgacantggcattggctgatgtcacattatagtaatgttacacatttaccacaagatagactcaatctgatgtttctgttctattttgaggaccattcaacagcac

SEQ ID NO: 280252 - DNA, 201 bp, Homo sapiens
cctcttcctcctggcagtaggtcacatagccacagttagcccaaaagaagtccagggaagcaagcgatgggcatggtggcatggcattgtcttctctcctrtgagaggtaggacttatcacaaggacagaggagggagaaaaatggttgcttcttagacagtttattatctcagcctcaaataatctttatttaaagtact

SEQ ID NO: 280253 - DNA, 201 bp, Homo sapiens
gtgtcactcaatccacgagagttgtgtgtttcaagaggaaagcatgaccaatgttattaaatataactaggagatgcagtgagataggaacttcccactggagtcaacagttgggggacactggttgaactcgggtagattccaaattttaatggtctaaaagtcaaggagatgtgaggaaatgggtgtagtcaatttgga

SEQ ID NO: 280254 - DNA, 201 bp, Homo sapiens
cggggtttcaccaagttcgccaggatggtctcgatctcctgacctcgtgatctgcctgccttggcctcccaaggtgctaggattacaggcgtgagccaccragcccggccgtcctccatacattttttatctttgagcttgtcatttactgagtcttcacaatgtgccaacagtgtgctctgtgtttgcattagttttatg

SEQ ID NO: 280255 - DNA, 201 bp, Homo sapiens
ctgtcaccaggctgaagtgcagtggcacaatctcagctcactgtaacctccatatcccagattcaagcgattctcctgcctcagcctcccaagtagctggractacaggcacccgccaccacacccagctaatttttgtatttttagtagagacagggtttcatcatgttggcaaggctggtcttgatgtcttgaccttgt

SEQ ID NO: 280256 - DNA, 201 bp, Homo sapiens
ctggtgtgtagtgggtacatagtgaaattaatatctcttgaaccaatcaaaaatgggctgcactcagagaaagatgggagcatgggcaaacagctgacatygaagggcgtctaggcacggaacccgtggtagttgaacctgaaattcatcagtgtcataaacaaagactgctgtaactacctcaccacattattaaatctt

SEQ ID NO: 280257 - DNA, 201 bp, Homo sapiens
aacagacttccctgcattgcattacatgctagcccctgccctatcttttcttctgtcttacaacctagatcacttttttttttttttttttagacagggtytcactctgtcttccaggatggagtgcagtggtgcaatcatggctcactgcagccttgatctcccgggctcaagtgatcctcccactcagcccctcaagta

SEQ ID NO: 280258 - DNA, 201 bp, Homo sapiens
cagaagtgctcagaaagggctttctgctaactaatgatggcaaacgtggtctgtgtgatggggtggcatctactttctgaaaatttttaattttaatttttgttgttttcgttttgttttgttttataacttgtgttttatttttgccaaatttggtttcattccctgcctgttccatttggaggtactacactaaaaaaa

SEQ ID NO: 280259 - DNA, 201 bp, Homo sapiens
ccagaagtgctcagaaagggctttctgctaactaatgatggcaaacgtggtctgtgtgatggggtggcatctactttctgaaaatttttaattttaatttttgttgttttcgttttgttttgttttataacttgtgttttatttttgccaaatttggtttcattccctgcctgttccatttggaggtactacactaaaaaa

SEQ ID NO: 280260 - DNA, 201 bp, Homo sapiens
cccagaagtgctcagaaagggctttctgctaactaatgatggcaaacgtggtctgtgtgatggggtggcatctactttctgaaaatttttaattttaatttttgttgttttcgttttgttttgttttataacttgtgttttatttttgccaaatttggtttcattccctgcctgttccatttggaggtactacactaaaaa

SEQ ID NO: 280261 - DNA, 201 bp, Homo sapiens
acccagaagtgctcagaaagggctttctgctaactaatgatggcaaacgtggtctgtgtgatggggtggcatctactttctgaaaatttttaattttaatttttgttgttttcgttttgttttgttttataacttgtgttttatttttgccaaatttggtttcattccctgcctgttccatttggaggtactacactaaaa

SEQ ID NO: 280262 - DNA, 201 bp, Homo sapiens
gaacccagaagtgctcagaaagggctttctgctaactaatgatggcaaacgtggtctgtgtgatggggtggcatctactttctgaaaatttttaattttaatttttgttgttttcgttttgttttgttttataacttgtgttttatttttgccaaatttggtttcattccctgcctgttccatttggaggtactacactaa

SEQ ID NO: 280263 - DNA, 201 bp, Homo sapiens
ggaacccagaagtgctcagaaagggctttctgctaactaatgatggcaaacgtggtctgtgtgatggggtggcatctactttctgaaaatttttaattttaatttttgttgttttcgttttgttttgttttataacttgtgttttatttttgccaaatttggtttcattccctgcctgttccatttggaggtactacacta

SEQ ID NO: 280264 - DNA, 201 bp, Homo sapiens
tgcttgacaggtctcagtttctgtgacttctactaacaaagagtgtgacccaacaagataacccattccatggtcaggtagctctaacagtaaggaaacakgtttttctaccatttgatcctgccaatgatcctaattctgccatctggactgacagaaagtaaggcccatctcttttccatctgatggtttgcaaatgtt

SEQ ID NO: 280265 - DNA, 201 bp, Homo sapiens
gatgaatggtctccaatgaacagataacgttcaaccagtagagatggatggagagaccccttcagatactaggaagaaaatgttagcaagggctagagggraggtggacggcagtatgtagagcagtgagaagcgtgccttggctggggtggaggctgggagcagggatgagtaagggtaacctgaaaaagatagcttgag

SEQ ID NO: 280266 - DNA, 201 bp, Homo sapiens
ctgtcacaaggatgtgtcactgtagggctttctcacttacgaagtgggtattgattctttgcaggatcctgtgtggtaagtagggcagccattactcatgsacttttacaagttaggacacagggtaaggacagctttcagtgacaaagccacagctagaactccggtctgctgacttcaaatctagacattttctacttt

SEQ ID NO: 280267 - DNA, 201 bp, Homo sapiens
agaggacaggtctgtgcggctgtccatccagtcttcccccaaatgtattgtggggaaattccgcatgtatgttgctgtctggactccctatggcgtacttygaaccagtcgaaacccagaaacagacacgtacattctcttcaatccttggtgtgaaggtaagaggcagacatttagttttctcatttaaaaattcaccta

SEQ ID NO: 280268 - DNA, 201 bp, Homo sapiens
catttgaccagtagttttcatgatgcctctccagtgatcaccagaaatctctgcccaaatggctcaagagacttggcagaggaaggccgagggttgatgakagtggaagataaatgtgggagcctctgtgctcctacttctcaggcccacagctgtagcttctgggggcatctgtggttgcatccatgagacgccttcctg

SEQ ID NO: 280269 - DNA, 201 bp, Homo sapiens
caaagcagctactccattctgtattcccactagcaatacacaaaagttccaacttcatattcttgcaaataacttttattttctgttttttttttttttttaattattattgtagccatcctaatgggtgtgaagtggtatttcatggtgggattaattttcatttctctaatgaccaatgacgttgaacatctttttgtg

SEQ ID NO: 280270 - DNA, 201 bp, Homo sapiens
actgtattcctctagcctgggtgacagagtgagacttggtctcaaaaataaataaataaaaataattaacatccttattaaaatatgcttcacggcctggygaggtggctcacacctgtaatcccagcaatttaggaggctgaggcaggtggatcacaaggtcaggagatcaagaccatcctggctaacacagtaaaaatc

SEQ ID NO: 280271 - DNA, 201 bp, Homo sapiens
atcaggagtttgagaacagcctgaccaacacggtgataacctgtctctactaaaaatacaaaaaaattagctgggcgtggtggtgcatgcctgtaatcccygctacttgggaggctgaggcaggagaatcacttgaacctgggagacagaggttgcagtaagccaagatcatgccactgtattcctctagcctgggtgaca

SEQ ID NO: 280272 - DNA, 201 bp, Homo sapiens
atcccagcactttgggaggccgatgcaggaggatcacttgagatcaggagtttgagaacagcctgaccaacacggtgataacctgtctctactaaaaatasaaaaaaattagctgggcgtggtggtgcatgcctgtaatccccgctacttgggaggctgaggcaggagaatcacttgaacctgggagacagaggttgcagt

SEQ ID NO: 280273 - DNA, 201 bp, Homo sapiens
agaacctgaattacaaacccaagggggctgaccccagagcccactctttttaaaatgacatccttattgactgggcgtggtggctcacacctataatcccwgcactttgggaggccgatgcaggaggatcacttgagatcaggagtttgagaacagcctgaccaacacggtgataacctgtctctactaaaaatacaaaaa

SEQ ID NO: 280274 - DNA, 201 bp, Homo sapiens
caatgccctgatttaagtgctgacatgtattaatttacttctacctcttaacagcatgttaaggtaattactgttagtggcacggtaacttaaccaaggtyccagccaataagtggcagaacctgaattacaaacccaagggggctgaccccagagcccactctttttaaaatgacatccttattgactgggcgtggtggc

SEQ ID NO: 280275 - DNA, 201 bp, Homo sapiens
aaattcagaatgtagaccaaattgcttaaagatgcttaagggtttgtaaaaatatcccatgatgcattgcagttgccaattctggacagttatcagagatkcttattttcaaacattttcttgttaaccatatttctggccaagttggttttaggaaaatcacctggagttagaccatgagccttagcattagaggactga

SEQ ID NO: 280276 - DNA, 201 bp, Homo sapiens
gatctttgttggtttaaagtctgttttatcagagactaggattgcaacccctgcctttttttgttttccatttgcttggtagatcttcctccatccttttrttttgagcctatgtgtgtctctgcacgtgagatgggtttcctgaatacagcacactgaagggtcttgactctttatccaatttgccagtctgtgtctttt

SEQ ID NO: 280277 - DNA, 201 bp, Homo sapiens
atatgcggtgtttggttttttgttcttgtgatagtttactgagaatgatgatttccaatttcatccatgtccctacaaaggacatgaactcatcattttttatggctgcatagtattccatggtgtatatgtgccacatattcttaatccagtctatcatttgtggacatttgggttggttccaagtctttgctattgtga

SEQ ID NO: 280278 - DNA, 201 bp, Homo sapiens
gagtgttatgttccccttcctgtgtccatatgttctcattgttcaattcccacctatgagtgagaatatgcggtgtttggttttttgttcttgtgatagtwtactgagaatgatgatttccaatttcatccatgtccctacaaaggacatgaactcatcattttttatggctgcatagtattccatggtgtatatgtgcca

SEQ ID NO: 280279 - DNA, 201 bp, Homo sapiens
tgtgctcctgagggcccttcagcctgctttgcattcataggcaatttatcctccttaatcactaaatcattaatggggatcaatagcaatgccacatcagwgaaggcaggggtgcatgcggggagaataattgcttgcttagtttttagtttagtggtgctaaccgggcttcgggtccattctgggaggaaacccttctcc

SEQ ID NO: 280280 - DNA, 201 bp, Homo sapiens
ccaaaaactcattgcaattgttaaaaatgacaaaaagatagttatttggcattctccatatctcttccttaaaaacacacagacacacacacacacacacmgacagacacacagacacacacacacagcctttgtagctaagtgcagttcaaagttatctttcccagctccttgattcaggtacctcccatcatcaaataa

SEQ ID NO: 280281 - DNA, 201 bp, Homo sapiens
ggttcctagtgataaaaatcaatcattccttataatagcaaccaccaaaaaaaggtcatagttttagctgctgcatatgcctatactagttcctctctacyttgatatattaatattacagttaatagcagaagtattggagccaagcgttctctgggtcagtgccctgggactaatagagctaacatttatttagtattt

SEQ ID NO: 280282 - DNA, 201 bp, Homo sapiens
tgtctggtgtcctgggaggcagggagggcatttggattaagtttaatcagtaggtacatatggcaagaaaggtattcagataatttgttatctattaaaaygaactaaaatgaatctgtggtgtcacccaccaatgcatgtcacaggagcaaattctggccaagacagcaaattccaccaaggacctactctgtaaattcc

SEQ ID NO: 280283 - DNA, 201 bp, Homo sapiens
ttctgaaggagaaaataaaaaggcaagccaagtcattaatcttaaaattgtcagctgaattattttcaatgagccctgatgtctggtgtcctgggaggcakggagggcatttggattaagtttaatcagtaggtacatatggcaagaaaggtattcagataatttgttatctattaaaatgaactaaaatgaatctgtggt

SEQ ID NO: 280284 - DNA, 201 bp, Homo sapiens
ggtgaacagggctgaaaatcaagaaaggaaaatgggaacgggaggcccgtggcagctgccactgttgtttggggcattaagatcaagtcctttaaggaggrggacccttgaatctctaccagactccagtttggacttccaaggttgttctgttgaaggaggtgggtagtctttggttaaaaatgctaaactattctgaag

SEQ ID NO: 280285 - DNA, 201 bp, Homo sapiens
attgataagaccctgggtgaacagggctgaaaatcaagaaaggaaaatgggaacgggaggcccgtggcagctgccactgttgtttggggcattaagatcargtcctttaaggagggggacccttgaatctctaccagactccagtttggacttccaaggttgttctgttgaaggaggtgggtagtctttggttaaaaatgc

SEQ ID NO: 280286 - DNA, 201 bp, Homo sapiens
gggataatgtgaattagtgttcagccagaaacagaatgagagtggcaatcgttttattgataagaccctgggtgaacagggctgaaaatcaagaaaggaaratgggaacgggaggcccgtggcagctgccactgttgtttggggcattaagatcaagtcctttaaggagggggacccttgaatctctaccagactccagtt

SEQ ID NO: 280287 - DNA, 201 bp, Homo sapiens
gaggaacaggtgccctaaagtcaagcctcactttcttgaaattatgagtaaggcagagtcttgaccaagtcgtgtctgggataatgtgaattagtgttcakccagaaacagaatgagagtggcaatcgttttattgataagaccctgggtgaacagggctgaaaatcaagaaaggaaaatgggaacgggaggcccgtggca

SEQ ID NO: 280288 - DNA, 201 bp, Homo sapiens
ctaaaataataaataacaaaagatatatattgcttatttatcattgagaagttgtataaatatgcgtatttatttattattgagaattttataaatatatmcacttaatttttatcccagttatggaaggtattatagcaggtggtctcatattcatttttccacatttctcaatgcccctgagcaattagagatcagaac

SEQ ID NO: 280289 - DNA, 201 bp, Homo sapiens
ggcatgtgccactatgcccagctagtttttgtatttttagtagagatggggtttcaccatgttggccaggctggtcttgaattcctgacctcaagcaatcyatctgcctcatcctctcaaagggctgggattacatgcctggccaaaaagatcagcattttgattatatttattactttctagaatttaaaatataaatta

SEQ ID NO: 280290 - DNA, 201 bp, Homo sapiens
gtctacccagctctggagtgacactgggcattgtctgcacagaatcctgtgatgtgagccatctctgggtccctctcagccaccggaatagcgcctattcyggtggaggtggcagggggtacaatggacactgttagggttcttagctttggtgtttaatgctctatttttgtgctggttggctccctgccaggaggtggt

SEQ ID NO: 280291 - DNA, 201 bp, Homo sapiens
acacaggccacttcaaattgtgcttgacaggtctcagtttctgtgacttctactaacaaagagtgtgacccaacaagataacccattccatggtcaggtarctctaacagtaaggaaacaggtttttctaccatttgatcctgccaatgatcctaattctgccatctggactgacagaaagtaaggcccatctcttttcca

SEQ ID NO: 280292 - DNA, 201 bp, Homo sapiens
aagaggctgaagatagggttccaatcccttctagattgtagggtttctgctgagaaatttgctgttcatctgataggttttcttttataggttacctgatscttctgtctcacagctcttaagattcttttctttgtcttaactttggataacctaatgacaatgtgcctaggcaaagatctttctgcaatgaatttcctg

SEQ ID NO: 280293 - DNA, 201 bp, Homo sapiens
ttagcagttcttgtagtggtggcttggtaatggtgaattatctcagcatttgtttgtctgaaaaaggctgtatctttctttcatatatgatgcttagtttygctggatacaaaattcttggctgataattgttttgtttgaagaggctgaagatagggttccaatcccttctagattgtagggtttctgctgagaaatttg

SEQ ID NO: 280294 - DNA, 201 bp, Homo sapiens
gttgaaatgtgaggtaccattacattcatcatgctctttgttgcctgtgtactttggtttttttgttttttgtttttgctttttaacttgtatttttgttycataggtcctgtgtgatttatgctttaaagaagttctgttttgatgtgtttccaggatttgcttcaagatttagagctccttttagcagttcttgtagtg

SEQ ID NO: 280295 - DNA, 201 bp, Homo sapiens
ttcagttctgtatcttttaaatatagcatttaggccatttacattcaatgttagtgttgaaatgtgaggtaccattacattcatcatgctctttgttgccygtgtactttggtttttttgttttttgtttttgctttttaacttgtatttttgtttcataggtcctgtgtgatttatgctttaaagaagttctgttttgat

SEQ ID NO: 280296 - DNA, 201 bp, Homo sapiens
ccattcttcagttctgtatcttttaaatatagcatttaggccatttacattcaatgttagtgttgaaatgtgaggtaccattacattcatcatgctctttsttgcctgtgtactttggtttttttgttttttgtttttgctttttaacttgtatttttgtttcataggtcctgtgtgatttatgctttaaagaagttctgt

SEQ ID NO: 280297 - DNA, 201 bp, Homo sapiens
aggttatttggattttctctctttttggttaattttgctaatgatctatcaattttatttatctttttaaataaccagctttttgtttcatttatcttttrtatttttgtttgtttcaattttgtttagttctgctctgatcttggttatttcttttctcctgctgggttagggttttgtttgttcttgtttctccagttc

SEQ ID NO: 280298 - DNA, 201 bp, Homo sapiens
agtccttggggttttcaaggtaaacaatcatatcgtcagcaaacagtgacagtttgacttcctctttacctatttggatgtcctttatttctttctcttawcttattgctctggctaggacttccagtactatgttgaagaggagtggtgacagtgggactccttgtcttattccagttctcagaggaaatggctttcaac

SEQ ID NO: 280299 - DNA, 201 bp, Homo sapiens
cccgggttcataccattttcctgcctcagcctcctgggtagctggggactacaggcgcccgccaccaggcctggctaatttattgtatttttagtagaggyggggtttcaccaagttcgccaggatggtctcgatctcctgacctcgtgatctgcctgccttggcctcccaaggtgctaggattacaggcgtgagccaccg

SEQ ID NO: 280300 - DNA, 201 bp, Homo sapiens
gtaacagttttattaagaaaaattttaattacaaagcaatatctaacccatcctttggtttataaagcagcttaaacctctttttttggagtgaacggtcrtagatacatctgaggacccaggtgctcaatgggcattgtccttggcatttctaaatcaccaaggaactttttcgcatttacccatatggattttaatttt

SEQ ID NO: 280301 - DNA, 201 bp, Homo sapiens
gttcaacctggcttataaagaaaggtattttcaaagtgatgcaaagaatactgcaaggggtgtgcccaattcaaagaaatagcttctttttttttttttttaagtgttagcctagggtactgctaattagaaaagagtgttatcatttcatcaaaggaagggccactgagcttttacatagaaagattttatcagctgcaa

SEQ ID NO: 280302 - DNA, 201 bp, Homo sapiens
atctcattagttcaacctggcttataaagaaaggtattttcaaagtgatgcaaagaatactgcaaggggtgtgcccaattcaaagaaatagcttctttttktttttttttaagtgttagcctagggtactgctaattagaaaagagtgttatcatttcatcaaaggaagggccactgagcttttacatagaaagattttat

SEQ ID NO: 280303 - DNA, 201 bp, Homo sapiens
gtgagccacttaaaatttgttattgtcaaggacatttttacttcatattttttgtcacatgtatccctacaggatcccatatatcgatattagacaagcayaatttcctgctttttaggatctgagactccaaggcagagagcataggagtagggactcataaagacaactgcgtaatttatcagctgaaaccacatatct

SEQ ID NO: 280304 - DNA, 201 bp, Homo sapiens
aaatgtcatcatttacagactgaatttggtgctgattatgttcaccattactaaaaatattgggaaatgagctatgcttggtgaaacaaagggcattttttaaaaatttggctgattaaatgtagtttagaaacaaaataaacttgcataaacttgcaagtgtttggaaacagtctggtttggtaatagtcactatgttta

SEQ ID NO: 280305 - DNA, 201 bp, Homo sapiens
gactcatttaggtgaatgccaaagatgacgaaggtgtcctcgttggatcctgggacaatatctatgcctatggcgtccccccatcggcctggactggaagsgttgacattctattggaataccggagctctgagaatccagtccggtatggccaatgctgggtttttgctggtgtctttaacacatgtaagtatccaactg

SEQ ID NO: 280306 - DNA, 201 bp, Homo sapiens
tttttttggaggaaggggcaaaaatatttcataagtcacgccattgcttcctaggacattcatcctggcagaagatacatatatttaggtttgtcaatagyatctggttcacgttttatcagtctcatccacccgttacgaagttctcttcttaacgaattatttctgcctcaattcgttacttcattagggattgcaaga

SEQ ID NO: 280307 - DNA, 201 bp, Homo sapiens
ttggctattttctctctctctctctctctttttttttttttttttttttgggacagattctagctctgttgcccagcctggagtgcagtagtgctatctcrgcctcctgggctcaagcgattctcctgcctcagcctcccgagtagctaggattacaggcacacaccaccatgcctggcttatatttttatttttagtaga

SEQ ID NO: 280308 - DNA, 201 bp, Homo sapiens
atttacctttgggcaagtccttcaatctttcttctttttcaacatattagtttttggctattttctctctctctctctctctttttttttttttttttttttgggacagattctagctctgttgcccagcctggagtgcagtagtgctatctcggcctcctgggctcaagcgattctcctgcctcagcctcccgagtagct

SEQ ID NO: 280309 - DNA, 201 bp, Homo sapiens
tgttcttcacagctggctcttcctatagacatgtgggaccccctgctgcaggcctgtcccagctgcttggtggaagcagcttttgctacccttctgggctrttgcgcaggtttcatttatgagctcaaccctgaaccttccctgacagcagcaaggcctgtgtgcgtacctaattatgaagtgacggcctgtccctgtgaa

SEQ ID NO: 280310 - DNA, 201 bp, Homo sapiens
aatttacctttgggcaagtccttcaatctttcttctttttcaacatattagtttttggctattttctctctctctctctctctttttttttttttttttttttgggacagattctagctctgttgcccagcctggagtgcagtagtgctatctcggcctcctgggctcaagcgattctcctgcctcagcctcccgagtagc

SEQ ID NO: 280311 - DNA, 201 bp, Homo sapiens
gtcctaacttttggagcaaactcctcataaagcagcatgttctcccatgcttgaagcttagtctggaatctttgggttagagggaatgactgtttggttcrtggctgtatctcacttaaaacagtgcctagggccaggcacagtggctcacgcctgtaatcccagcacattgggaggccaaggcgggtggatctcttgagg

SEQ ID NO: 280312 - DNA, 201 bp, Homo sapiens
aaattggggtccaaagtttaatttacctttgggcaagtccttcaatctttcttctttttcaacatattagtttttggctattttctctctctctctctctytttttttttttttttttttttgggacagattctagctctgttgcccagcctggagtgcagtagtgctatctcggcctcctgggctcaagcgattctcctg

SEQ ID NO: 280313 - DNA, 201 bp, Homo sapiens
gacagagagagcacaggagacacaccctgacatctcccctcctcctgcttccaatcctctctttggccgaacctacctcgaagtcagagagcagaggagcrtgggaacatggcttcctgtggaacctgacagaagattctaggggtgcaggcaataggtctgagaacagccagtctgtcaataggtggagttgctgagaca

SEQ ID NO: 280314 - DNA, 201 bp, Homo sapiens
taaggattgttattaagaagttatttatcattattgttgctacgatttgaaagtagagggggtcgctgtttgtacttacatggcttcctccagagggaatkcccgaattctcagacagctcatttaaagcttccaaaatgacaaatattccacaggtatctgctgcgtcctctcctgtcctgattcctgacttcacatttc

SEQ ID NO: 280315 - DNA, 201 bp, Homo sapiens
acatcccaccccaacacacatatacaaaagccaccccatacaggtgtttctcgtctcctctctccgcaaaggacagtgctgttggtctgtcctgagatttyagcctacaggaatttctgaagccatattcaaggtgggggggcaggaatcagccactttcatattttgcttgtttccctggaaaaccacaagctgttataa

SEQ ID NO: 280316 - DNA, 201 bp, Homo sapiens
tcactctgtgtaggaagaatgctttgcatgctttgttccctctctgcattcaagtctctgctctggtcacctcttcaaagaggccttcgctcacccaactscacctaaaatatcaccatctgccctgttgttttcatcctccaaccttagtgtgtactccatttctcccttctagaatatgagctccatgaaggtagaagc

SEQ ID NO: 280317 - DNA, 201 bp, Homo sapiens
tacaataaaactgaacataaattcctacaagattccatggcttcccttccacttcatcccttgtttatttccctccagccatactgagatttttctcttcrgaaagcatccacacatcctcttgtgtcagcacttttagacatactgctccttttgctaggaaagctcccctcactatctttcactctgtgtaggaagaat

SEQ ID NO: 280318 - DNA, 201 bp, Homo sapiens
attataattactcctttctcacccactgcagaggcgtgtctgacagagggtacaatttgttgctttggcatgggctgcgctccaggggctgagccattttkaagagatgtttgagttgatgaaaagtgtatgaggaatcttttctcaagggtgcctgcagtgggaccccatggggagtgtcatatgagtcgatatgactca

SEQ ID NO: 280319 - DNA, 201 bp, Homo sapiens
aatgttaatatttagaaagcaaaacgaacatcaaaattcagacagcaagatcaggaatttgaaacacacaaaagaccagtgttcatctcatcgtacctgcygtggcagtttacagaagcctttggagaccaagcttactggacttggaattttatcccctcgttttcactttgggatttgaagatttccacaaacctccca

SEQ ID NO: 280320 - DNA, 201 bp, Homo sapiens
gaatgcatactggtaaccattgcactctagtactccaggaggaacaaatagttattattaatgtacaccaggcattgtactggggggaattctaaggttcragtctttaagaaacgtatttctagatgccaggtgacagggcacaaacacactgaacatgaaataacaacaatacttgtcaggtgggccatgtagagagca

SEQ ID NO: 280321 - DNA, 201 bp, Homo sapiens
aataaaatcgaggcaaagagtgattaagtgactttctcacaaccatctagctaataaatagcagtgctaagatttgaagccaggcagatacctgaatgcayactggtaaccattgcactctagtactccaggaggaacaaatagttattattaatgtacaccaggcattgtactggggggaattctaaggttcaagtcttt

SEQ ID NO: 280322 - DNA, 201 bp, Homo sapiens
ataaattggggtccaaagtttaatttacctttgggcaagtccttcaatctttcttctttttcaacatattagtttttggctattttctctctctctctctctctttttttttttttttttttttgggacagattctagctctgttgcccagcctggagtgcagtagtgctatctcggcctcctgggctcaagcgattctcc

SEQ ID NO: 280323 - DNA, 201 bp, Homo sapiens
tttatctgatggaaaagtctcattatagaaataaaaaataataaaagcataaaaagagctcaaagatctacaaattagagacactaacaattaacattttsttgtaatgtcatccatttaaagtattttcagtgcttttcatttttaattggcaattaattgaatatattgttcttttcaaataaacacacatgtacattt

SEQ ID NO: 280324 - DNA, 201 bp, Homo sapiens
tatgatgaaccgctccccccaacacacacacaagcacatacactgtagcccagcagtcccctgcagttttatgcttgtgtgtgtgttaatgcataacaaargattcagcgctatggcctggtaactggaaagtaggtcaaaagagaggggtgagactgtcgcccaagtgaaaaagatagcagaagataagaaggaaaactg

SEQ ID NO: 280325 - DNA, 201 bp, Homo sapiens
atatctcacttaccattcttttcacctctctgtcatacctatggtgacccctgattcatgactcttgtcctccatacatttttttttttttttttttttttgagacggagtctcactctgtcgcccaggctggagtgcagtggcatgatctcggctcactgcaagctctgcctcccgggttcataccattttcctgcctca

SEQ ID NO: 280326 - DNA, 201 bp, Homo sapiens
tcacctggagggtcaccacgcttggagcacatcagaatcacctggagggtcaccacgcttggagcacatcagaatcacctggagggtcaccacgcttggarcacatcagaatcacctggagggcttgttcagccacttctgtgcagcaccctcaggttgagtaggtctgaggcctggcctgagaatttgcatttctaacca

SEQ ID NO: 280327 - DNA, 201 bp, Homo sapiens
tatatctcacttaccattcttttcacctctctgtcatacctatggtgacccctgattcatgactcttgtcctccatacatttttttttttttttttttttttgagacggagtctcactctgtcgcccaggctggagtgcagtggcatgatctcggctcactgcaagctctgcctcccgggttcataccattttcctgcctc

SEQ ID NO: 280328 - DNA, 201 bp, Homo sapiens
cagtgatggaagcagcgagaaccagtccgatctgggcatgtgctgaaggtggagcccgcctgattggctgagagactggatatgtggtgtgagagaaggarggtatggaggaagccaaatgagtgatgaatgtgaaatgtgtgccacatggtagaatcttagtaaatggtaacttccaacatgtttacatttggggaaact

SEQ ID NO: 280329 - DNA, 201 bp, Homo sapiens
gtatatctcacttaccattcttttcacctctctgtcatacctatggtgacccctgattcatgactcttgtcctccatacatttttttttttttttttttttttgagacggagtctcactctgtcgcccaggctggagtgcagtggcatgatctcggctcactgcaagctctgcctcccgggttcataccattttcctgcct

SEQ ID NO: 280330 - DNA, 201 bp, Homo sapiens
cacacacaccccggggttcttgattcattcccctaacctttatttagtgcttgcaagtccaggttctgttttatgctggagacacagcaatgcctattctkactgaatttctgatctcatgggggaaccaaacaaacaagtgaatctatagtatagttatatgggtaatagaaaaatacaaagcaggttaaggaaaacggg

SEQ ID NO: 280331 - DNA, 201 bp, Homo sapiens
ttgcaaatagacaattctggatgtaagcgatgactgtgtcacctaccagctgtgtttcctgagcaaggtacttaagcactctgagctgtctctcctcatcygcaaaggggaaaaacagcacacacaccccggggttcttgattcattcccctaacctttatttagtgcttgcaagtccaggttctgttttatgctggagac

SEQ ID NO: 280332 - DNA, 201 bp, Homo sapiens
agctctccatcaccttccggaacaacagccacaaccgttacaccatcacagcttatctctcagccaacatcaccttctacaccggggtcccgaaggcagarttcaagaaggagacgttcgacgtgacgctggagcccttgtcctgtaagctaacaatggtgtggttctttgtgagactcgctgtctggcccctgtcttgct

SEQ ID NO: 280333 - DNA, 201 bp, Homo sapiens
ggcatgggtgttgggggcaatggcaattgagtgagatagggaagaacggggcaggagccctcaagggtcagctcagcaaacagcaagtgggacaggcccargtggaaggagagatgaggaagacaggtcttattggggggcaggtattcacaaatcagagagaaaagttacattgcaggaggtggaatggcaagaggcaat

SEQ ID NO: 280334 - DNA, 201 bp, Homo sapiens
agcaggaagctggaggaaagtgctgtttttctccccaacctcttaacacatgaaagagtaagctaaaagttgttgtttctaagttttccaggtacatagcrtatgcttcgtgttgacaaaggtaactaggcattattccaacttccaggctattaatgctaaatgcagttcttgtttaacatttttctttccttgatgttt

SEQ ID NO: 280335 - DNA, 201 bp, Homo sapiens
aaatcagcaatgaagttgggaacactggtctttacagagtcaccctcagtgccatgaatcttgcagtatctggacagaattggagatgacaaactcacacygcccttcctctgtgcaatgcaggcatgtatcggtgtggccccgcctcggttcaagccatcaagcacggccatgtctgcttccaatttgatgcaccttttg

SEQ ID NO: 280336 - DNA, 201 bp, Homo sapiens
taaatcagcaatgaagttgggaacactggtctttacagagtcaccctcagtgccatgaatcttgcagtatctggacagaattggagatgacaaactcacaycgcccttcctctgtgcaatgcaggcatgtatcggtgtggccccgcctcggttcaagccatcaagcacggccatgtctgcttccaatttgatgcacctttt

SEQ ID NO: 280337 - DNA, 201 bp, Homo sapiens
catggggacattttacaggtgactaatagcagctaatctcttattaactatatagataggtggttaaaatttaaagcattttagaagagtaacataggccytctgacttcctaaatgcatggtgggcatggccaaaatgcacaggcaatgtccaaattctccagttaaacttgacatatgttcataatgtccaaaaacaaa

SEQ ID NO: 280338 - DNA, 201 bp, Homo sapiens
cattgaagggcgtctaggcacggaacccgtggtagttgaacctgaaattcatcagtgtcataaacaaagactgctgtaactacctcaccacattattaaayctttctttattactatatgaacattttctatagtgctgaggggttaatgtgctctcatttgattctgtactgtcatataatttcaggtcttttcaaggac

SEQ ID NO: 280339 - DNA, 201 bp, Homo sapiens
atttagatcttcttcttaaattattccaatggctttttatagcctaagaataaagcatgaatgtttaatttgatatcaaaggatttcacaatcttatcctyacctatatcataggtcagtgttgaagagtgtggatttcagagctctatcactaactagctgtgacctcagcaaggttcttaaccttcctgggtttcagct

SEQ ID NO: 280340 - DNA, 201 bp, Homo sapiens
ggtatatctcacttaccattcttttcacctctctgtcatacctatggtgacccctgattcatgactcttgtcctccatacatttttttttttttttttttttttgagacggagtctcactctgtcgcccaggctggagtgcagtggcatgatctcggctcactgcaagctctgcctcccgggttcataccattttcctgcc

SEQ ID NO: 280341 - DNA, 201 bp, Homo sapiens
gcagggtcgcctttttaatgtcttgccagagcccagcatccttggggactgggggatgcaagttttggtagaaccttctgccatggcatgggtgttggggrcaatggcaattgagtgagatagggaagaacggggcaggagccctcaagggtcagctcagcaaacagcaagtgggacaggcccaagtggaaggagagatga

SEQ ID NO: 280342 - DNA, 201 bp, Homo sapiens
cccttcatctccaccacaaccactttgcaaaccctgcacaaaacattttcctaaaagcagcacacacacctcgaactgcattagaacttaggtgcaccacygcctgtcaacagatgtccctcaaaaaactgccctccgtgtcagatgagtttgggaaaccttgtgtaaagaaaggcaaagaggtgtccttgctgctgggct

SEQ ID NO: 280343 - DNA, 201 bp, Homo sapiens
gctgtgaagttgcttgtggctggcttcaaggcttcttctcccattcacctcaccttggccagctcagctcctctctgatgtgttcctgatgctcgaatttscctcctgcattttgcctcaatgcatctctggcccgcatccaaagtgatcatcattaatgttctcttctcatggatctattggccagatgatttctgctaa

SEQ ID NO: 280344 - DNA, 201 bp, Homo sapiens
cctgcacccatggcaggctgtgaagttgcttgtggctggcttcaaggcttcttctcccattcacctcaccttggccagctcagctcctctctgatgtgttmctgatgctcgaatttccctcctgcattttgcctcaatgcatctctggcccgcatccaaagtgatcatcattaatgttctcttctcatggatctattggcc

SEQ ID NO: 280345 - DNA, 201 bp, Homo sapiens
atatagtgcctgacacataataagtgtccaataaaagtttcccctattactagtaattctgttattcctgccatactactgctattagtttgggctatgawtagttttctcctggaaaaatacttgctctagcttcccaattccacctcacctcctcaggccctccttccctcagtctagcccctgccttgctgccaaagt

SEQ ID NO: 280346 - DNA, 201 bp, Homo sapiens
tttcctgtagttttacgatgccttggaataccagcaagaattgttaccaattatttctctgcccatgataatgatgccaatttgcaaatggacatcttccyggaagaagatgggaacgtgaattccaaactcaccaaggattcagtgtggtgagtttgattgacaatggcattggctgatgtcacattatagtaatgttac

SEQ ID NO: 280347 - DNA, 201 bp, Homo sapiens
atccacatagatggttgtaagcgacgactcatcctgcttcggggctggagtttgaccccaagtggatagtttcttaatcaagggtggcatacacatttcaractggaactttggaagtgaccaagtagaatgttgttttgagaagaacaccaagactgcatctgaatgtggcgggtagaaggattgatggccgccattggc

SEQ ID NO: 280348 - DNA, 201 bp, Homo sapiens
tggaatccatgaagtgctaaggagtgcagaatttattttaaatagtttagacagtctccctgctcttatttacaaaagtaatttgcactacaaagaagaarcttgctgaattgagaacacttgtgcatagtctcagaaagtcagaatttttgttatctgaactagtgaattttcactgtattttttaaatgcttcattttc

SEQ ID NO: 280349 - DNA, 201 bp, Homo sapiens
ataatgtcatggtgggtttttgttaacttttattgcatagaatgtttcaaatggcactactgagtttaattctatctcaatcaatgcttagtgtccgctcyatgcctgcaattggtttggtgctggcgattccagcagtgagcaggactcagttcctgtcctggtccgagtgacaggattattgtgcagaggggtctttgg

SEQ ID NO: 280350 - DNA, 201 bp, Homo sapiens
caagcgatgggcatggtggcatggcattgtcttctctcctgtgagaggtaggacttatcacaaggacagaggagggagaaaaatggttgcttcttagacartttattatctcagcctcaaataatctttatttaaagtactactaaatcaactagattcgcctttagaatattttcaaaacctgtttggccctatgatacg

SEQ ID NO: 280351 - DNA, 201 bp, Homo sapiens
tgggtttctgcattgatgatcaacgtgtttatttttaagcatctctgtgaagtgactaataatggcatctaagaaagtaggacagtgtttcccagagtgtrttctctatgaacacctgtcatgtgagattctccttgggggaaaaaagttccatcatcaaatacagttggatcatgctgtgttttgtgtctcttctcatag

SEQ ID NO: 280352 - DNA, 201 bp, Homo sapiens
acatgttggctatagttaattatactatactatatatttcaaaattgccaggagagtaaatttcaaatgtttgcaccacaaaaataaatatgggaggtaakcgatatgttattaacttaattatcctgcaatgtgatttgattttatatatatatgtaaaatcatcactttgtaccctataatatatacaattatacaatt

SEQ ID NO: 280353 - DNA, 201 bp, Homo sapiens
gaatcagttggtattttccaacctggagaatcagtagatgaaattaggaaaagtctgtacggaaggaataagtgtttgagatcaaatatacaacatgttgkctatagttaattatactatactatatatttcaaaattgccaggagagtaaatttcaaatgtttgcaccacaaaaataaatatgggaggtaatcgatatgt

SEQ ID NO: 280354 - DNA, 201 bp, Homo sapiens
gggagaaaattatacaaaattatgcaaaaggtagtgggagtcatttaaaattctgctctgcatgtgattttgaaacactaatatgccatggatgtctttcytgcctagtcaatatagatctgcatttttatggctgaatagcattctattctgtttcaaaatacttgatcacatgttggacagttaggctgcttccatgct

SEQ ID NO: 280355 - DNA, 201 bp, Homo sapiens
aaataaataaatagtcctcagtgtttcggagggaacctaatacatgtttattatgcagtattttaaatgttgcagaaaaaataccaaagtaagaagtatcyattttctaactactcagaacatctgtaacatttccttaacccttctgtaatatgtctctttgtgtgtcgtatgcatgtttttaatgctgcataccaaagt

SEQ ID NO: 280356 - DNA, 201 bp, Homo sapiens
acacgtaatcacaccatggggaaaaatgaaaggagaagaaaaaaagaaagctggataatcagcccctaattttctaaaaattgctattaacaaagctgctktacaattctcttgataaatatccaagaaatctgttcttggaagcttaagaagagagtggaaaggctgtactctcaggactaaggaaggactcactcccta

SEQ ID NO: 280357 - DNA, 201 bp, Homo sapiens
gaatgatatttcattgtgtggataaaccaggttttatttatccattcatcagttgtacatttgggttgtttccatttttggctttcatgaataatgttgtwatgaacattcaggtaaaagtttttatgtgaacatatgttttttatttctcatgggcatatatttagagtggaatttctgggttgtatggtaactctatgt

SEQ ID NO: 280358 - DNA, 201 bp, Homo sapiens
gctgaccccagagcccactctttttaaaatgacatccttattgactgggcgtggtggctcacacctataatcccagcactttgggaggccgatgcaggagkatcacttgagatcaggagtttgagaacagcctgaccaacacggtgataacctgtctctactaaaaatacaaaaaaattagctgggcgtggtggtgcatgc

SEQ ID NO: 280359 - DNA, 201 bp, Homo sapiens
gttggaaaaaacattatttgccaccttcaaagaataagagtagctcatgttcacaaaaatacttttttttgcaatgccctgatttaagtgctgacatgtaytaatttacttctacctcttaacagcatgttaaggtaattactgttagtggcacggtaacttaaccaaggtcccagccaataagtggcagaacctgaatta

SEQ ID NO: 280360 - DNA, 201 bp, Homo sapiens
ttcttgttaaccatatttctggccaagttggttttaggaaaatcacctggagttagaccatgagccttagcattagaggactgagaatatacactgaaggyacacaatagtgttggaaaaaacattatttgccaccttcaaagaataagagtagctcatgttcacaaaaatacttttttttgcaatgccctgatttaagtg

SEQ ID NO: 280361 - DNA, 201 bp, Homo sapiens; identical to SEQ ID NO: 57060

SEQ ID NO: 280362 - DNA, 201 bp, Homo sapiens
atattccagatgctgagcctgggaacaaggtctatcccaagggagttggcaaaagctaattcgagtgtcagggcctcagcaaaggcagctgggggattcayataggactgtaattccaggaggaaactagtggcaaaaactgagctgaggctcagaagatcagtcacatagataaggctactatggagggcttggagacaa

SEQ ID NO: 280363 - DNA, 201 bp, Homo sapiens
ccaatttggtggttgaaataggaatttgaattacagaacatgaagattctcaaagtcaaatggcagcaggcagggctatattccagatgctgagcctgggmacaaggtctatcccaagggagttggcaaaagctaattcgagtgtcagggcctcagcaaaggcagctgggggattcatataggactgtaattccaggagga

SEQ ID NO: 280364 - DNA, 201 bp, Homo sapiens
ttgggcttaaactttaagtttctcaaataggacagaagctaaggtctagacgcacagaggacaaaccatgggcagttgcagtttattgtaataataatctyatttgcctgcgtgcattcaagatgataaatggccggtatctcctgatggctcagcacgttactgagaatcgtttatcacaacatccatccccagaaaata

SEQ ID NO: 280365 - DNA, 201 bp, Homo sapiens
tttgggtttcaacaaatgaatgtgtgaggaccacaaacatttagtccgtaacagtcctcaatctctctttttaagttttttttactgacacattgtaattstacatatttatgtggggcaatttgatgtttcgatacatatatatgttgtataatgatcaaatcggagtatttagtgtatccatcaccccatgcatttatc

SEQ ID NO: 280366 - DNA, 201 bp, Homo sapiens
ggctagatttctctttcctatcttgtgaagaatactaatatcaagaaactgtgcacaaagctcaatcaagcctaggtagctaaggttggaaaagagtaacrtcacaaatggaattaaagattttcatcttcttcctcctacatcccagctggggggattaaggtaggtctgtgtaaggagagtgaggccctcagtaaaggg

SEQ ID NO: 280367 - DNA, 201 bp, Homo sapiens
tattgagcacctactacgttccaaacatcatgcaagctgctgggtatacaaagttaaacaaaactccatctctgtcttcacaaagtttccccccaaccctwcctaagtttgcctgagctagaataaacatggccaggaaggtctcttttctttaggaaacatctggaaatatgtatgtaatctgccaatggcaacttagca

SEQ ID NO: 280368 - DNA, 201 bp, Homo sapiens
aaagacttcaagctctccatcaccttccggaacaacagccacaaccgttacaccatcacagcttatctctcagccaacatcaccttctacaccggggtccygaaggcagaattcaagaaggagacgttcgacgtgacgctggagcccttgtcctgtaagctaacaatggtgtggttctttgtgagactcgctgtctggccc

SEQ ID NO: 280369 - DNA, 201 bp, Homo sapiens
tagtcagcatcaggtgacagccttatgatttctttctgattcactcaaaaaacctagcacgatgctggtttcatgtatatcccacaaaattacgccttacrtttactccaaaagaggctttaagtgatgtaggaagcactgaaagaaaagtaaaataaaatcaaggtagaaaagacaccttaacaagtacctagcttccat

SEQ ID NO: 280370 - DNA, 201 bp, Homo sapiens
gcatttaagcaggctcaaatatctgctgtgttaaaaacaaaaattacaaaaatctttttcaccactgtctcttcctcctcgcctccttgccgtcctggagygctgcctggacttgcgtcctgctgtgttccttctccactccttccgcgcacactctgtcctgatttctgctaccagcacttccttgaagttgttctcaag

SEQ ID NO: 280371 - DNA, 201 bp, Homo sapiens
gtcctcatgttcacattcctgccttggttagccatctaagtggtgcacttcttaaagccagggaccaggtagtcagcatcaggtgacagccttatgatttmtttctgattcactcaaaaaacctagcacgatgctggtttcatgtatatcccacaaaattacgccttacatttactccaaaagaggctttaagtgatgtag

SEQ ID NO: 280372 - DNA, 201 bp, Homo sapiens
tttattgagtatgtattgtaaatatccacttgtaggttaatactagatggactgtaccatactccttagaatgttttctatgttgatttttgtttctccartaattgctttaatctctggcaatgcaaactcatttaacacttgcttttatatattgcattcatatatactccaaagacaaacaaatgctttatcagaatt

SEQ ID NO: 280373 - DNA, 201 bp, Homo sapiens; identical to SEQ ID NO: 57082

SEQ ID NO: 280374 - DNA, 201 bp, Homo sapiens
agaacaattgtgttcccccacaaggcatcattaggcaaggatggtccaacctcaatacggtttctttacatccctgtgtttcagctacatccgtggtctcytgtattgtttatctatgtcacttgcaaaaaactaggcttgaatacagttttttaaaagtgatgcttttaaatataagcggtaatcaacttatgaaggaac

SEQ ID NO: 280375 - DNA, 201 bp, Homo sapiens; identical to SEQ ID NO: 57083

SEQ ID NO: 280376 - DNA, 201 bp, Homo sapiens
cagtggggaacacatgaccagaggaaatgagagaagattggaatatattctaaggccttaaaaagatgtcaagaacaattgtgttcccccacaaggcatcmttaggcaaggatggtccaacctcaatacggtttctttacatccctgtgtttcagctacatccgtggtctcctgtattgtttatctatgtcacttgcaaaa

SEQ ID NO: 280377 - DNA, 201 bp, Homo sapiens
ctcttgtcctccatacatttttttttttttttttttttttgagacggagtctcactctgtcgcccaggctggagtgcagtggcatgatctcggctcactgmaagctctgcctcccgggttcataccattttcctgcctcagcctcctgggtagctggggactacaggcgcccgccaccaggcctggctaatttattgtatt

SEQ ID NO: 280378 - DNA, 201 bp, Homo sapiens
attttagagcagaaattaaccagctttcacacctgggacactgccctaatcagtgtataatcctaattctcattatgtcctcagtactcatatggtgtttyacacattgtaggtgcatttttgaaattgagattgttcttctatacattattttatttttatttttatttatttttattattatactttaagttttagggt

SEQ ID NO: 280379 - DNA, 201 bp, Homo sapiens
atgaggacaaagggatggggctttgttcctccatagtgatcagtcactggatgtgagccacccctggaatgaggtgtgaccctggatgaggcagttttctyctgctaaggcaactcccaaggaggcctgaaccaccaaggactattttctgtcatcactcccagcagctgaggataagcctgtcggtcatttccgaaggtg

SEQ ID NO: 280380 - DNA, 201 bp, Homo sapiens
gtgtcctcctctcagcttttccccaccggaatgcacccacccacagggggagcagtgtctgatctattttatttttgttgttttgtcagcatgtaacagtrtgcagggcatagagcaagcactgaataaacagaattgcttggaaaaaatttttaatgcataaaaactccatgctgcaatgggtggtcttaatctataaac

SEQ ID NO: 280381 - DNA, 201 bp, Homo sapiens
gggcagagtaattagatcccagggtagcaaatgaaaccccaagtgggcaaatgcaaagtagcagatcccagaaggagcaatttcggccgcctgtccccagygtgctgatgagttctgaattatgtgtaacctctggggggaaggcagctatgaatcactggacagtttaatgaagacgcttgctcaatgtttagctgcagt

SEQ ID NO: 280382 - DNA, 201 bp, Homo sapiens
agaggtaggcctgatgctgatttaattattattggtcactggtaagaagcaggggctgcctgagcatagggctggtgaggaagggtgagggtgagggtgarggtggaggctaaacaggggctgaggtgggggtgggaatgatttgctgggcatcagctgacctctgtgaggtcagtgcggtgtagactggcgacacatggc

SEQ ID NO: 280383 - DNA, 201 bp, Homo sapiens
gctgtgtggctttgagaaaatgacttcacctctctgagcttcattttcttcatcagtagaatgaaagtaatcttagtagttaccatttcccgatggagtgrctataatgattaaatcaggtcatccaggtagagtgcttaccatagaggtaggcctgatgctgatttaattattattggtcactggtaagaagcaggggct

SEQ ID NO: 280384 - DNA, 201 bp, Homo sapiens; identical to SEQ ID NO: 57093

SEQ ID NO: 280385 - DNA, 201 bp, Homo sapiens
agcacatcagaatcacctggagggtcaccacgcttggagcacatcagaatcacctggagggtcaccacgcttggagcacatcagaatcacctggagggtcsccacgcttggagcacatcagaatcacctggagggtcaccacgcttggagcacatcagaatcacctggagggtcaccacgcttggagcacatcagaatcac

SEQ ID NO: 280386 - DNA, 201 bp, Homo sapiens
aatccatctgaaagtgctgagatgacaggcatgagccaccgcacctgactgacttcaggttttacctgttggcatacttctggggtcttgcgtccctactyctgtgattcttcccttaagtggtgtgtctgcgtgtgcagtggcctgctagcgcttagaagcggagcatgcacagtgcgtttactagtgttgtactcgtga

SEQ ID NO: 280387 - DNA, 201 bp, Homo sapiens
cttgcgtccctactcctgtgattcttcccttaagtggtgtgtctgcgtgtgcagtggcctgctagcgcttagaagcggagcatgcacagtgcgtttactastgttgtactcgtgaccacttgatgcattttttccttaccagttgagtgtccctggaggaaggccacatactggttaaattccgccattttggctcttagt

SEQ ID NO: 280388 - DNA, 201 bp, Homo sapiens
attggagtggagcaaagtggagtgaatcgggagaaaggatggataaggccagtcccttcttggacacagatgtcctgcccacacactggcttaaggtactrttagtagttactgcaacacgtaagtctaggcagacaagtagatagacagagagctagctgctcttagtcagtttgagctgctgtaacagaaatgccatag

SEQ ID NO: 280389 - DNA, 201 bp, Homo sapiens
tatttgggaggcctcaggctcaaaataggttaaatctccagatggtttgtttattgttaatgtctgacattggagtggagcaaagtggagtgaatcgggaraaaggatggataaggccagtcccttcttggacacagatgtcctgcccacacactggcttaaggtactgttagtagttactgcaacacgtaagtctaggca

SEQ ID NO: 280390 - DNA, 201 bp, Homo sapiens
tcaggcaaagtgaaacacgtttcctcttccatacagccccctgctgtatccaactttttccttcccagacagtaaacccacaagctttatctgagtgtacyggaaacttctctatctttacaccttggctatccccctagaattccaccttggtcaaggccaacacatgaaaaaagacactgtgtgtcttagacaaaagat

SEQ ID NO: 280391 - DNA, 201 bp, Homo sapiens
attcatttggtatacatagctcctaaacaaacaaacaagtcttatagccacctggcattttgcggcacattgcgtttatgttggaaaagcatatggttctraagtgtgtggcatacagtaaacacagcttaaggtatagtaataataagagcattctacatagatcgccccataaaagtgtcagcccattttaaagacaag

SEQ ID NO: 280392 - DNA, 201 bp, Homo sapiens
tgccgttttatgagcatttttcattccaaacctttcttgcaagggaagaactattattcttatcttattcccaagttacttagagcttatacagatccatycatttggtatacatagctcctaaacaaacaaacaagtcttatagccacctggcattttgcggcacattgcgtttatgttggaaaagcatatggttctaaa

SEQ ID NO: 280393 - DNA, 201 bp, Homo sapiens
ccatatattttctcccatattatatagtggctaaaggaacatggaatagtaatggctgtgttgtcatctggaagatccagacatccagtaaattccatttytgagccattgacttaatttaataaatatttactggacattggtattgaagtactaagtattggagttaaaagtgggctgaaatataaggtgaataagaca

SEQ ID NO: 280394 - DNA, 201 bp, Homo sapiens
caagggtcctcttctctgggcaatgtccttcctctttacgtccattcttaaaaacgcctcatttccatatattttctcccatattatatagtggctaaagraacatggaatagtaatggctgtgttgtcatctggaagatccagacatccagtaaattccatttttgagccattgacttaatttaataaatatttactgga

SEQ ID NO: 280395 - DNA, 201 bp, Homo sapiens
gatcagatcaggaagattttattcttgactgtagcataagtaagcaagggtcctcttctctgggcaatgtccttcctctttacgtccattcttaaaaacgsctcatttccatatattttctcccatattatatagtggctaaaggaacatggaatagtaatggctgtgttgtcatctggaagatccagacatccagtaaat

SEQ ID NO: 280396 - DNA, 201 bp, Homo sapiens
gtgctggactccctgcctggcacacgatccatgctgtctaggtgcacctgctgttgttgctaccatgaccatcgtctgcccctctcctagttcccctgaayccagctctccaccactgccctccaggagatgcggatttaaatgtaacaaagtttagggagttggctgaaagtttcgtttttcttatagacttaagaaatc

SEQ ID NO: 280397 - DNA, 201 bp, Homo sapiens
tttaagtgtgtttgtgtataattattgcagctaatacaaatcaacaagagctccttggtattatctaatgaaccatctttaatctaattttcccaatgtcyaaaaattatctttttagttagtttatttggattaaggtctgtagattaaatttggttggtatgtcacttaaatcttttcctctagagtaatcctcttcat

SEQ ID NO: 280398 - DNA, 201 bp, Homo sapiens
actgaggattgctggttaaagtgctggactccctgcctggcacacgatccatgctgtctaggtgcacctgctgttgttgctaccatgaccatcgtctgccyctctcctagttcccctgaatccagctctccaccactgccctccaggagatgcggatttaaatgtaacaaagtttagggagttggctgaaagtttcgtttt

SEQ ID NO: 280399 - DNA, 201 bp, Homo sapiens
tattttacctgtacatattttagcgtgtagctttttaaaaatagacatatatacagtatacatagatacatatgtacatatgtgtgtatgtatgtgtttawgtgtgtttgtgtataattattgcagctaatacaaatcaacaagagctccttggtattatctaatgaaccatctttaatctaattttcccaatgtccaaaa

SEQ ID NO: 280400 - DNA, 201 bp, Homo sapiens
tgccccagtggctggccctctgccatttgtaggccatctcagggatgacagctcacgtgattaaagggctaaatgaagccctttttggtggggaaagaggsggcttggactcaaggcagtgcccagtcagaacccgagctccaccatggatagcagtgacagaatcactttaccccaccccccatcacattactgtttcct

SEQ ID NO: 280401 - DNA, 201 bp, Homo sapiens
tgagactgtcgcccaagtgaaaaagatagcagaagataagaaggaaaactgtttccagaaattgtcaaaagacagccaggtgaacaagattgtggcccgakgtggcacaggatgctgggctgaaaattacagcagcatgcacagcacttattgataggagaatgctcagctgtgctcctgagggcccttcagcctgctttg

SEQ ID NO: 280402 - DNA, 201 bp, Homo sapiens
cagaagcctctgtagtagcattttaggtagagtattaagatctgatttttttctactttttagattactatagcagaagtgtggaagataaattggaggamcgagattttgttagggacattagtaagagactcaagggggaaaaaaatctcactaataaatgataggataaatggatgctgcatgagtttgtatgatttt

SEQ ID NO: 280403 - DNA, 201 bp, Homo sapiens
ctttggagggagtgactgatggcaagaatagttgaaagaatcctccagaaagtgctatttgaggcgggtctcaaaaaacgaatagaaattgacccaggggratggaaattgtatacattctagaaaaaaaaaaatagaaaagttcagtggagcatgacattttggaagcacactgatgtctttgtatgacttgataagaag

SEQ ID NO: 280404 - DNA, 201 bp, Homo sapiens
gtcacacagctggaatttcttagaggcaatatgtttccatcaacccaagtacatcaaagcggtcagaaaaagagggatgcccagtgtcctaagatgactgygctatttctgttactttggggtatttttaaagaaaaagcagacacttggcctcaccagtgcaaacacccatgcaccttagaagttataggtggtccagga

SEQ ID NO: 280405 - DNA, 201 bp, Homo sapiens
gggccttctctctctctcacctctgagcctgcagcctcgacaaatcatgaaaggcaaggaggggagtggtaatcacaggttttactaacctgtggctgagrctgtgaaagcttgggagcagcttctggtgttaatttgctgttactttgacatgggcccctgcttttttgatacccagttgagggtgaaatcccaagctgt

SEQ ID NO: 280406 - DNA, 201 bp, Homo sapiens
tgtcacaggagcaaattctggccaagacagcaaattccaccaaggacctactctgtaaattcctaacttcctattagtgggtttttaaaattgtattttcrggaacatagtcccattcatgggactaaaataatactacgttgatgatcaaacgcttagaaacgaaacaattagaaccctgttgggattctactctagttg

SEQ ID NO: 280407 - DNA, 201 bp, Homo sapiens
tttaaatccaaagatgtttttgaaatgtttcttaatgcaggaaaaaatatattggacacacttgagaatgaaatcagggacaccatgtaaagtattctgawgtattgctacaccttcaatatctaaattgattgaggcagggcctctgggaagaaagtgaaaaattcagtctgtcttccacatgttttgtctataccagtg

SEQ ID NO: 280408 - DNA, 201 bp, Homo sapiens
tcattaataaagaatttttacctagctaacattttttaaatcaaaaacaaagggaggggttggaggctggagggaggtcatttaaaaaaatgattacaaawcctatttgttttagctcaaagtctcaacagtctaagacttggtgatctaaatttaaaaaaaaaaagtcatgagttttgttttgttttattttcccatagt

SEQ ID NO: 280409 - DNA, 201 bp, Homo sapiens
ctgcagttttatgcttgtgtgtgtgttaatgcataacaaaggattcagcgctatggcctggtaactggaaagtaggtcaaaagagaggggtgagactgtcrcccaagtgaaaaagatagcagaagataagaaggaaaactgtttccagaaattgtcaaaagacagccaggtgaacaagattgtggcccgaggtggcacagg

SEQ ID NO: 280410 - DNA, 201 bp, Homo sapiens
atatgagattttatctgtttgcttgtttgtttttacataaatgatgcagaaataactgactctccaactggaagaaagtttaaaaattgaccctcatcttrtcccatatacagtagtaaatctcagatggaatgagtattaatgtaaaaaagacaattttttgaggaaatttaacagacttaactaaaaactggaaactct

SEQ ID NO: 280411 - DNA, 201 bp, Homo sapiens
atatttagtaggacataatagagaatccagaaatggatttcagtatatgagttaatatgattgttggtttcatgaagtaagaagaccatatgagattttawctgtttgcttgtttgtttttacataaatgatgcagaaataactgactctccaactggaagaaagtttaaaaattgaccctcatcttgtcccatatacagt

SEQ ID NO: 280412 - DNA, 201 bp, Homo sapiens
ctaaatttcaatttcacgtaaacagaatgggattaataatcatgtctacccccaagaccatagggctgtagagaagattaaataaggtagtgtaagtaaaytgatgaacagaatgcctgcattactaagtaaacactaactaaataaatgtaagttacttgttattattgttgtcattaaccagagtcaggatcacgtgtt

SEQ ID NO: 280413 - DNA, 201 bp, Homo sapiens
tacaaagggaaaaagaagctctgggccaggcatggtgacttatgcctgtaattccaactctttggaaggctgaggcaggagaatcacttgagcccaggagktcaagactagcctgggcaacatagggagaccctggctctacaaaaaaaataaatttaattagccgagcatacacctgtagtcctagctactcgggagcct

SEQ ID NO: 280414 - DNA, 201 bp, Homo sapiens
tatctaagtggaaaaaagttaacaaatttcactgtaatcagaaattagaaagaaatgcctgctatcatcattccctttttaaaaagaagtactttaaaggytttagtaaatgaacaatgtaagagatacatctgctataaatgctggaaactaagaagtaaaactatatatttgctaatactatgattgtgtatgtagaaa

SEQ ID NO: 280415 - DNA, 201 bp, Homo sapiens
tgtaatgtcaatgtaaacattgttgaaatggcaccagtttttggaaaagctcctggactccccacctaaactcttctgactgtaattaaacatgatcaacrttacaccaagagaggtagattcagcagtgcccagaaaaaaactggcaagatgccttgaaactgttacctcttggcctttgttttactatgtaaacacaaa

SEQ ID NO: 280416 - DNA, 201 bp, Homo sapiens
tgcttctaaacgaatgtgcacacaaatcacccagtgatcttgttaaaatgcaaattcttattcaagagttctgggaggggcctgagattctgaattcctamcaagctcccagggaatgccaatattgctgatccatgaatgcctcaagtagcaaggctccacaccattgtaatgtcaatgtaaacattgttgaaatggcac

SEQ ID NO: 280417 - DNA, 201 bp, Homo sapiens
gtcttattcttactcaaatatacatttcctatatgtttgttgactatataagtgattattgaacaactacagagcatccagtctttgctaacacttggtaraactcagaaagacggagattttttttctttgttcccaatgaattgataaaccagcggggaagacagacttctctacaactagacacagcaagtcaaaaag

SEQ ID NO: 280418 - DNA, 201 bp, Homo sapiens
tttcttgaccatctctctccaggcataaggtcttattcttactcaaatatacatttcctatatgtttgttgactatataagtgattattgaacaactacakagcatccagtctttgctaacacttggtaaaactcagaaagacggagattttttttctttgttcccaatgaattgataaaccagcggggaagacagacttc

SEQ ID NO: 280419 - DNA, 201 bp, Homo sapiens
tctgtcttttttctttttgagttggagtctcgctctggtgcccatgccggagtgcagtggcgtgatctcagctcactgcaacctctgcctcccaggttcawgtgattctcttgcctcagcctcctgagtagctgggattacaggtgcccgccaccaggcctagctaatttattttttgtatttttagtagaaacgggattt

SEQ ID NO: 280420 - DNA, 201 bp, Homo sapiens
ctgacctcaagcaatctatctgcctcatcctctcaaagggctgggattacatgcctggccaaaaagatcagcattttgattatatttattactttctagawtttaaaatataaattagaaatctcaggtttttgttgactagctggtaagatggttaaggttaggagctgagccatgttgcctctctgctttactccatag

SEQ ID NO: 280421 - DNA, 201 bp, Homo sapiens
gtatcccatgtacctagatcacagcctggcatgtcataggccctcaataaatattggttgaattaaattgcaaatgtaaacgctttagaagacaacatttrtctggacatggttgtgtgcgtttattcttaaaagtgacttataatctcataaatctgtatgaaatgaacatagatacagcacatgcatataacaggaaac

SEQ ID NO: 280422 - DNA, 201 bp, Homo sapiens
actttctctctggtggattgtatttttgcctgtcattatctctggatctcccccaggtcaagaagaagagagattggccctagaaactgccctgatgtacrgagctaaaaagcccctcaacacagaaggtgtcatgaaatcaaggtccaacgttgacatggactttgaagtggaaaatgctgtgctgggaaaagacttcaa

SEQ ID NO: 280423 - DNA, 201 bp, Homo sapiens
acctagatcacagcctggcatgtcataggccctcaataaatattggttgaattaaattgcaaatgtaaacgctttagaagacaacatttgtctggacatgsttgtgtgcgtttattcttaaaagtgacttataatctcataaatctgtatgaaatgaacatagatacagcacatgcatataacaggaaacatttcttgcga

SEQ ID NO: 280424 - DNA, 201 bp, Homo sapiens
atttcaagatcccatctgtgacaggtataatcattctctgaagaatattttacaacctagggagacaataatttacattttgttcatattagacaaaaagyaggaggacagggaggcagttgctcctccggagatttttttcttttctttaacagtccattttccgatatgtttggaattaggctaaattgtgttaggtag

SEQ ID NO: 280425 - DNA, 201 bp, Homo sapiens
cctggcaccagtgatcctgccctagaaaacctccttcttcttaagggaataactattattatagtctgatcgagctgatacaaatatagcccttgtgttgygaggcttatgtgagaatatatgtgaattatggttgtcagctggggctggttctttgtaatcaacaggggtgcctcaaataaatgaattacaggatccacc

SEQ ID NO: 280426 - DNA, 201 bp, Homo sapiens
aacatcgtacctggcacaggacagctctgcaacaaagatgcatccagcccgatatgtcagtagtgttgatgctgagaagccctgatctagatcatgattastgtttttgccacagccttcaaaccaggcttctctctccacaccccatgtgccagccagcctaaaagtaacttctggttcatgttctagtttgcctgtcat

SEQ ID NO: 280427 - DNA, 201 bp, Homo sapiens
gctactatcagatatacttttgaaggggcttatgcccatccttatatagcataccatggagaagacagatggctccaaaatattttttccagaaagaatawagtgatcatagcaaacacttttgccaataatgtctctgtggcagctccatcttcttcagtttagagagcttttgtaaatgctatctttattttgtatttt

SEQ ID NO: 280428 - DNA, 201 bp, Homo sapiens
tactggtatgggaagggttcttaatctagggttcatgggcccctagaaaaccatgtatggacttcataggtctatagtgcatcccctaaaaatacatgccyatattgtatatatcttgtatttgtcactgtgtatgtctgtgtagaggaaaggtcagtagctactatcagatatacttttgaaggggcttatgcccatcct

SEQ ID NO: 280429 - DNA, 201 bp, Homo sapiens
gaggcttcatgtagagccagtctactggtatgggaagggttcttaatctagggttcatgggcccctagaaaaccatgtatggacttcataggtctatagtrcatcccctaaaaatacatgcccatattgtatatatcttgtatttgtcactgtgtatgtctgtgtagaggaaaggtcagtagctactatcagatatacttt

SEQ ID NO: 280430 - DNA, 201 bp, Homo sapiens
catcagtgacctggaagggtgtatttcactttccacagcgtaggaggcttcatgtagagccagtctactggtatgggaagggttcttaatctagggttcaygggcccctagaaaaccatgtatggacttcataggtctatagtgcatcccctaaaaatacatgcccatattgtatatatcttgtatttgtcactgtgtatg

SEQ ID NO: 280431 - DNA, 201 bp, Homo sapiens
atactaagcattccttctcactgtcatcagtgacctggaagggtgtatttcactttccacagcgtaggaggcttcatgtagagccagtctactggtatggraagggttcttaatctagggttcatgggcccctagaaaaccatgtatggacttcataggtctatagtgcatcccctaaaaatacatgcccatattgtatat

SEQ ID NO: 280432 - DNA, 201 bp, Homo sapiens
aatactggaagcaaactgattaggcatgacatatgaaattacctgagaaggtttaatgtcctgaacatattcagatctgaagcctatctatgatggcccarttgcatgggccagtttctcaaatactaagcattccttctcactgtcatcagtgacctggaagggtgtatttcactttccacagcgtaggaggcttcatgt

SEQ ID NO: 280433 - DNA, 201 bp, Homo sapiens
atcaacacataacgtgaaaacactatgtgttggcagcattttcctcaaaagaagcaaggagagggagacacctccagttacatttcccaagcagaacacastgatgtcgagcattgggtaggtttttacatttagtttggtttgagtgtctaaggctcattatcatcagtagtcagggacaggaagtttacattctcggtg

SEQ ID NO: 280434 - DNA, 201 bp, Homo sapiens
ggtaccatagcatggtgcatcactgaaatcaacacataacgtgaaaacactatgtgttggcagcattttcctcaaaagaagcaaggagagggagacacctycagttacatttcccaagcagaacacagtgatgtcgagcattgggtaggtttttacatttagtttggtttgagtgtctaaggctcattatcatcagtagtc

SEQ ID NO: 280435 - DNA, 201 bp, Homo sapiens
cttgacaccatgggttgcattgtagagagaggtgggtacaggcacagttgtgtgatttcctagtgtcatatgtcaacagtggcaggagctggaatgacatscagcccctgaattaccctgtgctctaagactggtctgtatagtgccaaatattgataacttgggcccacccaaggagaaaatctcatataaataaaagta

SEQ ID NO: 280436 - DNA, 201 bp, Homo sapiens
tagcaatggaaagggcggatttctacagtcctcaaagagatgatttgcttttgaatacttgtgtttctctcctcttagttgctatcatccatgatttctgygcctttttgattgtttcttttttggtggtggcattttgtttttgtagctggtaacctggtatttctaagagttatttggtgacttattcccacttggtct

SEQ ID NO: 280437 - DNA, 201 bp, Homo sapiens
gccatgtgcaagctccagtcttgacaccatgggttgcattgtagagagaggtgggtacaggcacagttgtgtgatttcctagtgtcatatgtcaacagtgkcaggagctggaatgacatccagcccctgaattaccctgtgctctaagactggtctgtatagtgccaaatattgataacttgggcccacccaaggagaaaa

SEQ ID NO: 280438 - DNA, 201 bp, Homo sapiens
gttggcatcagacagtccaggttttgacttttgaactggcccattagtagctaaggaaagctgaggatagtttctgtgtcactgaaaacaatcacacttayctcatggaaatcttagtgtcctttctccagacctgctccctctctttcctgcatttgagggatgagatctacttttagaattacagagggaggaggcatt

SEQ ID NO: 280439 - DNA, 201 bp, Homo sapiens
tgatttgacacttttgaacattacaaggcagtaatttttagaatgcccctccatttgggtttgactgatgtttcctcacttgatgttaaaatcaagtcacrtatctttcacaggaagattgcagaaatgatgctgtgttcttcttggtgcctcctacctggttgcacataacttttacagatcccattactgatgatgtta

SEQ ID NO: 280440 - DNA, 201 bp, Homo sapiens
acggggattgtggtcttaataagaccagaggacttaggagaaaggcagcttggaatagagaggtctagagaattaaacatctttagctcacagcataatgsaaagaaagtgcccttcaggggaacatgtatacaacagggttctgagaagaggtaaaaataaaactgcatcctgcactttctgcttgccgtaatgctgcag

SEQ ID NO: 280441 - DNA, 201 bp, Homo sapiens
cttcctctgcatgcagtttcttttccctatatttatgctcaaacttgcatcattcttgtctctagacgttctatttgctgtaataaatgaaattcttctcmatctaaggttagtttgatctcacttctgaactacaatttgaggccaatgtaccacattctatctactcttcagtactctgcaagagattggagtgaggac

SEQ ID NO: 280442 - DNA, 201 bp, Homo sapiens
cctgtgctaagaaagaggaccagaggagttgattgctaagctccttttcaacaggaacatttgtgctcctccagctcattcttgggctggtttatcacggrgattgtggtcttaataagaccagaggacttaggagaaaggcagcttggaatagagaggtctagagaattaaacatctttagctcacagcataatggaaag

SEQ ID NO: 280443 - DNA, 201 bp, Homo sapiens
ctgctgtgggggatgggggtgagatttctaggtcactggagctgtgtacctaagaggattatggctgcctctgctgagtcatgcaggttgtcagggaagtkgggggaagctggcagtcacaggagtcacccagctgccatgcaaaccaaagggccagtctcactcccaccgtgcccccctcaacagccctaagtccatttc

SEQ ID NO: 280444 - DNA, 201 bp, Homo sapiens
aaaaaaaaaaagaatgtgttttaagggttttgctttatcagatgcataatataaatcaacagtgagttaagagtatccaagacactgacaatatcttgatktgaaataatagactgtttattttaaaagatgtaatggtctcttttttttttttttacagaaaaaccacaactagagtaatgtacttaattccagaaaata

SEQ ID NO: 280445 - DNA, 201 bp, Homo sapiens
cttggtaatggtgaattatctcagcatttgtttgtctgaaaaaggctgtatctttctttcatatatgatgcttagtttcgctggatacaaaattcttggcygataattgttttgtttgaagaggctgaagatagggttccaatcccttctagattgtagggtttctgctgagaaatttgctgttcatctgataggttttct

SEQ ID NO: 280446 - DNA, 201 bp, Homo sapiens
accgtggctcccactagtacatttcagccaaccatcatctttcaatttcttaagcaactatgcactctcttgcctcagtcttcacctatccttctttctcygcctgaagcattcctctccacccccctttccacatggacaactgactcctcttttgctcactgcttatgtctcacttccttcagagaaattccttatttt

SEQ ID NO: 280447 - DNA, 201 bp, Homo sapiens
tccctgtgaaggtctcaggagagaggcttcccaagctgtgaagtgctcaaaccacagcagaaaatagaatttaattgcaccactgataataaaccggatgkatgaaggaaactgataactttcatcttttaggcactattaatttgcaggattatttgttagttatcttctgggtttacttaaagagcagtttaattcccc

SEQ ID NO: 280448 - DNA, 201 bp, Homo sapiens
tgatgtgtgattttcacatacataacatactttctctattgagaaatgtcttgccccaaactgtgcagcttgtaacgtgtagataactatttcttagcctrtactctttcaactattttgtgctgcattttggtgaaaatagacagcctatttcatcattttgaagcaacatttatatagaatgtcatttcagatttttgc

SEQ ID NO: 280449 - DNA, 201 bp, Homo sapiens
tatgatgctacgagagcccctaatgaggagatcactctgaaatccacaaagccttgttttcagctttttattacactttattgctgcaaagaaggagaagraggacctccctccacaagcaagctgcctaatagctgtaaatgcaaacactttttgctattattaaatatagatcggggtgttatgaatgtcatcaggatt

SEQ ID NO: 280450 - DNA, 201 bp, Homo sapiens
tttcacatgaatcactatttgcccatgtttgccactatttctcctatgttttatttttgaagctttataatttgaacttttacattgtggtctatgatccrtcttgagttaccttttggtgttgtgtgaggtagggatcaaatcttattttttccaaatttatccatttgttccaccagcatttgttgaaaagactgttgg

SEQ ID NO: 280451 - DNA, 201 bp, Homo sapiens
tgctggtagcactgggggtgggtcatgagttgcctggccccactaattcacacacaatgttctatttcccctggatttgtcctctgtctgtcctctctccmggtcacatgagctccttggatacagatataatgccttttacatgtcctgtctgattcaatccttctctttcaggtgggggcagtggggggacgatgaact

SEQ ID NO: 280452 - DNA, 201 bp, Homo sapiens
tgatcctacagataaacagaaaataaagttattttccctttgtccatcttttcctccccctctttttgtcccagtatttagaaagatttttttctttccaygcatgaaaaagacagtaatgacataactacttttatatcttgccaagcagctcctcaaggggttaactataaaaccatgttttgttcattttctttcaat

SEQ ID NO: 280453 - DNA, 201 bp, Homo sapiens
ggaagcgctaaacatggaaaggaacaaccagtaccagccactgcaaaatcatgccaaaatgtaaagaccatcaagactaggaagaaactccatcaactaaygagcaaaatcaccagctaacatcataatgacaggatcaaattcacacataacaatattaactttgaatgtaaatggactaaatgctccaattaaaagaca

SEQ ID NO: 280454 - DNA, 201 bp, Homo sapiens
ttctttgctttttggaaaagagatgaggcagctccagtctgtgtctcccttggctttccccagacaccgtaaatgatattggcagcatcccagccctaccrctcatagagcgaaaacctattcctccttctcctgccacgtttaataaactttatctagaacaatttcttgtgcagtggcaaaacacagcacttacataac

SEQ ID NO: 280455 - DNA, 201 bp, Homo sapiens
cagacaagcaaatgctaagagattttgtcaccaccaggcctgccctaaaagagctcctgaaggaagcgctaaacatggaaaggaacaaccagtaccagccrctgcaaaatcatgccaaaatgtaaagaccatcaagactaggaagaaactccatcaactaatgagcaaaatcaccagctaacatcataatgacaggatcaa

SEQ ID NO: 280456 - DNA, 201 bp, Homo sapiens
actgaagaacttggagtctgatgttcaaaggcaggaagcatccagcatgggagaaagatgtaggctgggaggctaggcccatctctccttttcaagttttkctgcctgctttatattcactggaagctgattagcttgtgcccaccagattaagggtggatctgccttccccagcccactgactcaaatgttaatctcttt

SEQ ID NO: 280457 - DNA, 201 bp, Homo sapiens
ataaggaaaagggagctttgcagattcctaaaataatgtgatgcaaacagatattttctccccaaatagtcattgttctcagcattttgtaggtaccatarcatggtgcatcactgaaatcaacacataacgtgaaaacactatgtgttggcagcattttcctcaaaagaagcaaggagagggagacacctccagttacat

SEQ ID NO: 280458 - DNA, 201 bp, Homo sapiens
catatgcttagtggaagatatcttgtgatttctaaaaaagtaatttctttccaaaaagtttatataagagaaagagagtatgtgtgtgttagtaactttcytgtttaccaaagaatcagagtagcagctcattatcatgaattagtataaaggacaggaatgtcaatatcagtaagtgatatgtaacttgaaaaagcatac

SEQ ID NO: 280459 - DNA, 201 bp, Homo sapiens
ggatttcagaaaataaagaagctattccagcaaaaaaaaaagtttctatttttacctgtattctgtcagggatcacagtatatgtagttttgaagatgaawgttttagagtcagaaagacctggatttatatccaacttccgccagattcctaactctgtaggctttttatttatcttctaaatttcaatttcacgtaaac

SEQ ID NO: 280460 - DNA, 201 bp, Homo sapiens
cttagccaggatagatgatcgtaaactatgtctatgagtgagccctcctcatcgaaggtgttcatttccatctctctcttcaggacagctacagaacagtrcacattttagaatgaaaatgaggagtcactggtaactgcggtacctaaaacataatttgctctgtgcatttcatgtttgctatttttttgaatcttaaaa

SEQ ID NO: 280461 - DNA, 201 bp, Homo sapiens
aggagtgcagttgctctgttttaacctgagctaaccagcacttacacagagcctggggtgctcctcttgcaaagacagtgtacatggggcctgtgaaagakgcttaacccacagaaatcgacttcaacaagcagaatatctgcatgaccagcactgattggtggggaattgtatagataacacaagatccatgggaagtat

SEQ ID NO: 280462 - DNA, 201 bp, Homo sapiens
gagtagtgaagaaaagttgcacctacaggcagctaggggcagcaggaagcgagctgtccacatgacagatgtctcttggaaaccatggagccgagcacagytgccattagctgtcagcatggaggtgacagtgaaggccaactcaggaatgggacagaatcagatgccacgagaggaaagactaaaacccagtccacgaaa

SEQ ID NO: 280463 - DNA, 201 bp, Homo sapiens
aagatagactcaatctgatgtttctgttctattttgaggaccattcaacagcacaggcagaaaactctgattgtcaaagaatgttctagcaaatgattagwaatgttactgaagagacagtttgggttcctagtgataaaaatcaatcattccttataatagcaaccaccaaaaaaaggtcatagttttagctgctgcata

SEQ ID NO: 280464 - DNA, 201 bp, Homo sapiens
agggcatagagcaagcactgaataaacagaattgcttggaaaaaatttttaatgcataaaaactccatgctgcaatgggtggtcttaatctataaacaaasctttttcaaagcacattttagagcagaaattaaccagctttcacacctgggacactgccctaatcagtgtataatcctaattctcattatgtcctcagta

SEQ ID NO: 280465 - DNA, 201 bp, Homo sapiens
ttcccttgagatgtatgcatttatttttaaccctggccttttgctaatatcgaaccacaatgccatcattaatccccattaatactttgctctgactatgmcttttgggaactaactcatgactaaacttttttaaccaatcgatgttcgatgtactctttagcattgtaaaaaaatcttgaacttcagctagtaaatcaa

SEQ ID NO: 280466 - DNA, 201 bp, Homo sapiens
gaggtttttaaaaaaatactgaagagacctgaaattgcatgaatgctgagaagacccactattagcaagcaggagcttgaagctgcaagaggaagagtacrtaagagtcacagcaaagccccggagaacaaggcaacgcagaagcctggtttggagatgcagagggaggagggacctttccaacttcagtaacaagaagaa

SEQ ID NO: 280467 - DNA, 201 bp, Homo sapiens
attataactcagacctgtgcttctaaacgaatgtgcacacaaatcacccagtgatcttgttaaaatgcaaattcttattcaagagttctgggaggggcctsagattctgaattcctaacaagctcccagggaatgccaatattgctgatccatgaatgcctcaagtagcaaggctccacaccattgtaatgtcaatgtaaa

SEQ ID NO: 280468 - DNA, 201 bp, Homo sapiens
gagaaaagaaaaaaaagagaagcaattagaaaaaatgaagaaacttgcccacagttatacttctccctttaaattgcattgcttgattgctgctttctttycaatgcatttctgatgtgacagttcccaccaggaaaattgccagagaaagctaaggagaatgcttaactttgtgccatccgaacacttacttccctcaca

SEQ ID NO: 280469 - DNA, 201 bp, Homo sapiens
gccaggaactaggcttggacaggggaagcaaattcatttcctgtttgtggcaaacggagtctggatgatgataagactttttccatctaaactgccttgtkaacccagtaaacaaagcaaaaatcaatatgctagattcatcaatgcttgctggaacacactccatggcaagggacatttcctaggcaaaatggacaatgg

SEQ ID NO: 280470 - DNA, 201 bp, Homo sapiens
ggagggggagaatttgggtgttaaggggtagaggtcctgacctgagacattttgagcaatatttccatttccgtcatacccttgtttatatacacaaaatrttcaatggttttcaaaaacactttcacctctattagctcctttaaaccttagaatacctctgtgaatctttccaaaatctgttccgttttaataatttta

SEQ ID NO: 280471 - DNA, 201 bp, Homo sapiens
aaatacgttacagacaagcaaatgctaagagattttgtcaccaccaggcctgccctaaaagagctcctgaaggaagcgctaaacatggaaaggaacaaccrgtaccagccactgcaaaatcatgccaaaatgtaaagaccatcaagactaggaagaaactccatcaactaatgagcaaaatcaccagctaacatcataatg

SEQ ID NO: 280472 - DNA, 201 bp, Homo sapiens
aacagacttaactaaaaactggaaactctgacactgtagaagaaagcaagaaccatgtacagttatgtgccacatagcaacatttcagtcaatgacagatyatgcataggtgatcttatgagattctgatggagctgaaaaattcctgttacatagtgatgtcatagctatcataatagaatagtgagattacttattttt

SEQ ID NO: 280473 - DNA, 201 bp, Homo sapiens
catttttttcagtggccactcttccagttagcaagctgctcttgtaatactgactgagaaatgcagagaggcaagaagaggaaaaggggggaaatggcggstttttcatttctaatagttctgtagcagtgagtcctgcccatcactgtgtgtgatatatacagtgttctaaggtatactgagtgtatataacgcccttaa

SEQ ID NO: 280474 - DNA, 201 bp, Homo sapiens
gattgtcgtgagcatctagtgagcagtgtctgtgatcaagtctgacccacagcacgtgaccaataagtgttcattgactgggaatgtgcaacttatcataycccagcaaggtcaggaaagcactccagggaatacttgttcctatgaggaatatgtacgacctgtagcccccataaatctgacatctgaacaaaatgctgc

SEQ ID NO: 280475 - DNA, 201 bp, Homo sapiens
ggacgtggattaaatgggatgtccaggacccatgcagtcctggattatatcaatgtacccaacatggagagccagatgttggtacagagaagtagacccartctggctgaagagtagattatttctgaagaaatgttaaactgggtggtatttcaaacaatcaaagactgaaaaaaagaaatacttatattaccaatttcc

SEQ ID NO: 280476 - DNA, 201 bp, Homo sapiens
gtcagaaacttccaggaccgcctttggaggcagaagagcagttccacccaataactctaatgcagcggaagatgacctgcccacagtggagcttcagggcktggtgccccggggcgtcaacctgcaaggtatgagcataccccccttccccaccactctgggtccaggcacagccgggccctggcccctcttccctgcagg

SEQ ID NO: 280477 - DNA, 201 bp, Homo sapiens
tgaggtacagtataggtaaaatcttcctgtcttgctatttgatctttattcctttttaagaaaattctggtattgcctgtggctagcagttctttctaagragactgaactggtaccagactcctcccttgatagtgtaatctactttctgcagccttctgccctctccttgatcctggggtccaccttgtctcagaagag

SEQ ID NO: 280478 - DNA, 201 bp, Homo sapiens
taatgacctgcattctctctcttaggtccgtggcactcaggtagttggttctgacatgactgtgacaattcagtttaccaatcctttaaaagaaaccctgygaaatgtctgggtacacctggatggtcctggagtaacaagaccaatgaagaagatgttccggtaaaccttgggttggggagaccgggcaggcagtgcagg

SEQ ID NO: 280479 - DNA, 201 bp, Homo sapiens
cagaataaccagccaagcatgtttacagtgatgcagggaatcaatccgttctatgactatttccttaactctccagttagttgctatcctgcccagcaaayacagctgagagaagctgcttaataagaaccaaaatactgagctatttgcatacctgaagaactagtgcaattacccattactgcatccatcctgtcagtt

SEQ ID NO: 280480 - DNA, 201 bp, Homo sapiens
cctttgggtaggcaccctggagcacagtcacttgattgtatcttctgccactcaaagaggctattggtgtgtatcctttggccagaataaccagccaagcrtgtttacagtgatgcagggaatcaatccgttctatgactatttccttaactctccagttagttgctatcctgcccagcaaacacagctgagagaagctgc

SEQ ID NO: 280481 - DNA, 201 bp, Homo sapiens
tcctcagtgacatgcaacctttgactatactgcctactgcctgatgcccttgtcttgggtccccaatttctagcctttagcctggtgattctatttatggyccaaatatgacaatctatagatagctaacaaggggaaaagtcatcaaggtgggcagcaaggaggtctggaaaagtgtcccaagcccagtcagggcactct

SEQ ID NO: 280482 - DNA, 201 bp, Homo sapiens
ctaataaatgagggttgtgatttatctagcaacaggggaacagctcagcattaacaattaaaaggtctgtagaggacagagctttttttccttactcttcyccttagctgattgagttcagccctatgctataaatagcccttgtaattaatggctatctgtttgaaaatcagttatcaggaccacagtttaggagccttt

SEQ ID NO: 280483 - DNA, 201 bp, Homo sapiens
gtgggggccaatattcaacattcttaaagaaaagaattttcaaccccgaatttcatatccagccaaactaagcttcataagtgaaggagaaataaaatackttacagacaagcaaatgctaagagattttgtcaccaccaggcctgccctaaaagagctcctgaaggaagcgctaaacatggaaaggaacaaccagtacca

SEQ ID NO: 280484 - DNA, 201 bp, Homo sapiens
gttgctatcatccatgatttctgtgcctttttgattgtttcttttttggtggtggcattttgtttttgtagctggtaacctggtatttctaagagttattyggtgacttattcccacttggtctcagcacactccctttccatcctaagactgttagcacaagttttgcttccttttccaaagcaactgtattcacacttc

SEQ ID NO: 280485 - DNA, 201 bp, Homo sapiens
tactccagaagcatgttgtaaggattaatgagggaataactggaagctctttgaactgcttcgtgatagttccttcctaataagatgacccaattaccagscttattttcaatattgcaactatgtaggaaagctaaattcttatggtattccttaaggaaggataaccttcataaaatgctactataacagcagccagag

SEQ ID NO: 280486 - DNA, 201 bp, Homo sapiens
gctgggaaaagacttcaagctctccatcaccttccggaacaacagccacaaccgttacaccatcacagcttatctctcagccaacatcaccttctacaccrgggtcccgaaggcagaattcaagaaggagacgttcgacgtgacgctggagcccttgtcctgtaagctaacaatggtgtggttctttgtgagactcgctgt

SEQ ID NO: 280487 - DNA, 201 bp, Homo sapiens
tgatttatttagccaacacttactgagcacctcctaatgactgggccctgctctagtgctggagatgtgtagaagaataagaccaacagagctcccaaagkagatttatgcactctacaaatgcatgatggaattgcaagatgaaaacagaaaaactcttatggatctagataaagaagctttagaataaaaagtagcatt

SEQ ID NO: 280488 - DNA, 201 bp, Homo sapiens
gacacggtaccttttgactgtatagtgagaacttaagtttcaaatgaaggctccgagaacataaaaaaccatgaatcttaaagagaaacaaacaagcaaargtttaataagaacttccttgctagatgtcctcatgatttatttagccaacacttactgagcacctcctaatgactgggccctgctctagtgctggagatg

SEQ ID NO: 280489 - DNA, 201 bp, Homo sapiens
aaacctaaatgaactttcttccttctcacttctcacggactcatttaggtgaatgccaaagatgacgaaggtgtcctcgttggatcctgggacaatatctrtgcctatggcgtccccccatcggcctggactggaagcgttgacattctattggaataccggagctctgagaatccagtccggtatggccaatgctgggtt

SEQ ID NO: 280490 - DNA, 201 bp, Homo sapiens
gatccagttcaatatgttatttcaagagaaaaactcccccactttgtgatttgggcttaaactttaagtttctcaaataggacagaagctaaggtctagamgcacagaggacaaaccatgggcagttgcagtttattgtaataataatcttatttgcctgcgtgcattcaagatgataaatggccggtatctcctgatggc

SEQ ID NO: 280491 - DNA, 201 bp, Homo sapiens
ggggtagggaaacttggagaaaagtaaagcagaccctgtctcaagtcttgatgccaggcctgtgtgtgttttctcctactagtcaagaaagaggcggtgcwgatccaagccggcgagtacatgggtcagctgctggaacaagcgtccctgcacttctttgtcacagctcgcatcaatgagaccagggatgttctggccaag

SEQ ID NO: 280492 - DNA, 201 bp, Homo sapiens
attctgttttgttctctgatgtatcccatgtacctagatcacagcctggcatgtcataggccctcaataaatattggttgaattaaattgcaaatgtaaaygctttagaagacaacatttgtctggacatggttgtgtgcgtttattcttaaaagtgacttataatctcataaatctgtatgaaatgaacatagatacagc

SEQ ID NO: 280493 - DNA, 201 bp, Homo sapiens
actcacccagccaggcgtgcacctggggctccccccttctcccccttagcactgtgtctcccgacagcgcgccacactgttctgcacccctggcaatgccrcagcctaccttcggtatttctcactagaggatggctctcgcagccttctccctatcattaaccctttttcgctcttctccctcccttcccccgtcagctc

SEQ ID NO: 280494 - DNA, 201 bp, Homo sapiens
tacatacacgggtagattcaagggctgtttaagaggtaggatagaaaatatttgctcaaggatcggatttgatgattgagggagagaaacaaggaagcctsaagaatgatgcccatgtgtctggtgtaccacctgcgtgcaaagtgatggtattcattgaggtagggaactcctgagatgcaccaggttttccaggaaagt

SEQ ID NO: 280495 - DNA, 201 bp, Homo sapiens
aatgacttttaggggtttttgaaatttttttctaattttgtaggtattatgggagggcaatttagtgtagccttaatgaagttgaataatgcctcctgtaygtagtcctggacttgtattgtctacttgaccaccagtgactcaagaccaagacactttattctgccactggtcaaaccctgagatcatgagagggtgtta

SEQ ID NO: 280496 - DNA, 201 bp, Homo sapiens
gtgtgtggctgactcatgggcaatgaaataaattttgttgaatcagtggtattggggacctcacctctatccccaatactttggacaacccattaagcttsctcatgtcttttccatttgactacagtctggaacattatttctttaaactctcaacctctctgtgtagcttttaatcttccccttcttagccaagtttta

SEQ ID NO: 280497 - DNA, 201 bp, Homo sapiens
cattttgattatatttattactttctagaatttaaaatataaattagaaatctcaggtttttgttgactagctggtaagatggttaaggttaggagctgakccatgttgcctctctgctttactccatagtcctcatgttttgttgggaccatgttttgaagtttattgcattatgctgataatgacttttaggggttttt

SEQ ID NO: 280498 - DNA, 201 bp, Homo sapiens
ggtagacagtttgaaagctgtcactttgaaagagcgagctgccaagtttctagctaccgtatttaaaaaaaaaaaaaaaaaaaaggcggcttagcaatgarctgttccattttgccaggaactaggcttggacaggggaagcaaattcatttcctgtttgtggcaaacggagtctggatgatgataagactttttccatct

SEQ ID NO: 280499 - DNA, 201 bp, Homo sapiens
gggtccagcttgtataggccttgtcagtttcagcttgcaatttatccaaaaagcaaagagaagtagccatataagggctttgtgcaaataatttgatttcrgattttagccctgaaatgctcattctgactgcactgtagagaatggactggaaaggggtacatacacgggtagattcaagggctgtttaagaggtaggat

SEQ ID NO: 280500 - DNA, 201 bp, Homo sapiens
catccagcagggagttttcatggaatctggtggtcacagggtactttcttggctccggatgccttgctttgacttccatatgggatctccctgtgttcctyacccactgctccagtacccgtgttatcctgcctacctggctttgtgaacagcttccctgactccggagaattacatgcccagtgctcaggcttccccgcc

SEQ ID NO: 280501 - DNA, 201 bp, Homo sapiens
atatcatatataaatatattgtttataatatgtaaacaatatatacataaataatatataaaaactatatattatatatgtaaacaatatatttttaaaamccaaactcatgggtttatagttttttcatagtgaaaacaaacaaatatatagtttgcttatatctattatatataaacagtatataatatataaagatat

SEQ ID NO: 280502 - DNA, 201 bp, Homo sapiens
agtccattttccgatatgtttggaattaggctaaattgtgttaggtagacagtttgaaagctgtcactttgaaagagcgagctgccaagtttctagctacmgtatttaaaaaaaaaaaaaaaaaaaaggcggcttagcaatgagctgttccattttgccaggaactaggcttggacaggggaagcaaattcatttcctgtt

SEQ ID NO: 280503 - DNA, 201 bp, Homo sapiens
aacatggtaaagccccatctctactaaaaatacaaaaattaggcgggcatggtggcatgcacctgtagttccagctacttgggaggctgaggcagaagaaycacttgaacccgggaggtggaggttgcactccagcctttgcaacagagcaagacttcatctgaaagatagaaagatgaaagaaagaaagaaagaaagaaa

SEQ ID NO: 280504 - DNA, 201 bp, Homo sapiens
caaaatccaggtcttgttcagctggaaaaaaccagcagcgtccagacatgactgggttttttgtttgtttgtttgagatgtgaagttttgcatgtaaatcraatagagtttgccagaaaattcattgcctgaacaaatatggtctgctccttgggtattgccaagtaggagaaagatggtttgtctggagagactgcagag

SEQ ID NO: 280505 - DNA, 201 bp, Homo sapiens
gagttttggctgggatggctggaactgtgcatcattgcgctgggcatccagcagggagttttcatggaatctggtggtcacagggtactttcttggctccrgatgccttgctttgacttccatatgggatctccctgtgttccttacccactgctccagtacccgtgttatcctgcctacctggctttgtgaacagcttcc

SEQ ID NO: 280506 - DNA, 201 bp, Homo sapiens
ttagcgacacaagcgggggcgaatgtcatttctcaggagttttggctgggatggctggaactgtgcatcattgcgctgggcatccagcagggagttttcayggaatctggtggtcacagggtactttcttggctccggatgccttgctttgacttccatatgggatctccctgtgttccttacccactgctccagtacccg

SEQ ID NO: 280507 - DNA, 201 bp, Homo sapiens
accaaatacttggttgacctgtgggtggctgactcatgggcaatgaaataaattttgttttatacgtataactttatatatatgtaactttatatatatawaaaaagtttgcttatatataatatatatacacatatcatatataaatatattgtttataatatgtaaacaatatatacataaataatatataaaaactat

SEQ ID NO: 280508 - DNA, 201 bp, Homo sapiens
ttgtgttccagaatctctacctcttttaaggtgcagatactttttcactcgtttctccacagcaggtgtttccaccattctgttcagaacaataaaaagakcagcttttttttttttttttttttttgagacaggatctcactctgttgcccaggctggagtgcagtggtacaatcagctcactgcaacctctgcctcccc

SEQ ID NO: 280509 - DNA, 201 bp, Homo sapiens
atgtacatcagcatcatagaattctgaaactactgatgcaacagaatcataaaatgtttaatgagacatatcaatttaattctgctgcttggaacttaaaragccagagttcgtcagcattttgctaacaaatgtcatcatttacagactgaatttggtgctgattatgttcaccattactaaaaatattgggaaatgagc

SEQ ID NO: 280510 - DNA, 201 bp, Homo sapiens
tctcacgtgtcccagatttgttttaaaaatcattttcaattcatctagttttctattaatgttaaaaggttggaaattatattttaattagtgttagagaygtacatcagcatcatagaattctgaaactactgatgcaacagaatcataaaatgtttaatgagacatatcaatttaattctgctgcttggaacttaaaga

SEQ ID NO: 280511 - DNA, 201 bp, Homo sapiens
attaaaaggagatgacctactgcttccctcctgccagtgatgggccacaaaacagacatgacacgtgggccttctcacgtgtcccagatttgttttaaaartcattttcaattcatctagttttctattaatgttaaaaggttggaaattatattttaattagtgttagagatgtacatcagcatcatagaattctgaaac

SEQ ID NO: 280512 - DNA, 201 bp, Homo sapiens
actcccggctaattttttgtatttttagtagagacagggtttcaccgtgttagccaggatggtctcgatctcctgatctcgtgatctgcccctctcgcctyccaaagtactggaattacaggcatgagccaccgcgcccggcccccaagacgcacttttaagagattatacaggaaagttttacttatcactgccttagtt

SEQ ID NO: 280513 - DNA, 201 bp, Homo sapiens
ccaatgtccaaaaattatctttttagttagtttatttggattaaggtctgtagattaaatttggttggtatgtcacttaaatcttttcctctagagtaatyctcttcatctgtttcttcatgccacaaacttatggctgaaactgagtcattttttatgtagaactttccatattctgaattttgctgattccatcccccg

SEQ ID NO: 280514 - DNA, 201 bp, Homo sapiens
cccgggttcaagcggttctcctgcctcagcctcccgagtagctgggactacaggcgcccaccaccactcccggctaattttttgtatttttagtagagacwgggtttcaccgtgttagccaggatggtctcgatctcctgatctcgtgatctgcccctctcgcctcccaaagtactggaattacaggcatgagccaccgcg

SEQ ID NO: 280515 - DNA, 201 bp, Homo sapiens
tccttattttttgccttagcattttcaagtaaattctagtaatcatattattttacctgtacatattttagcgtgtagctttttaaaaatagacatatatrcagtatacatagatacatatgtacatatgtgtgtatgtatgtgtttaagtgtgtttgtgtataattattgcagctaatacaaatcaacaagagctccttg

SEQ ID NO: 280516 - DNA, 201 bp, Homo sapiens
ctgcaagctccacctcccgggttcaagcggttctcctgcctcagcctcccgagtagctgggactacaggcgcccaccaccactcccggctaattttttgtwtttttagtagagacagggtttcaccgtgttagccaggatggtctcgatctcctgatctcgtgatctgcccctctcgcctcccaaagtactggaattacag

SEQ ID NO: 280517 - DNA, 201 bp, Homo sapiens; identical to SEQ ID NO: 57056

SEQ ID NO: 280518 - DNA, 201 bp, Homo sapiens
ggcacaatcagaataccttatcccacaagttagcagacctgggcatgtagagagtactttaaatggagagttatattgttttgtgtttccttccacaaagsaaccagagatgctgttcctggaggaaacttatttagaggtagggacatttgatagggaagagagcatgagagagatggagattctggcttctgtccatgc

SEQ ID NO: 280519 - DNA, 201 bp, Homo sapiens
ttacttaaagagcagtttaattccccagggcacaatcagaataccttatcccacaagttagcagacctgggcatgtagagagtactttaaatggagagttrtattgttttgtgtttccttccacaaaggaaccagagatgctgttcctggaggaaacttatttagaggtagggacatttgatagggaagagagcatgagag

SEQ ID NO: 280520 - DNA, 201 bp, Homo sapiens
cctgtcccagctgcttggtggaagcagcttttgctacccttctgggctattgcgcaggtttcatttatgagctcaaccctgaaccttccctgacagcagcraggcctgtgtgcgtacctaattatgaagtgacggcctgtccctgtgaaggtctcaggagagaggcttcccaagctgtgaagtgctcaaaccacagcagaa

SEQ ID NO: 280521 - DNA, 201 bp, Homo sapiens
aaaatatacagcttgatgatgattttgtatgtgcgtgtgccttgcaaccacaagccagatgaagaaatggaggatttccaacacccctagaaggttccctsttgccttttacagccaataaccccctagactatcaccaagatagtaacttttctgacttttatcaccataggtttgttttgcccatttgaccagtagttt

SEQ ID NO: 280522 - DNA, 201 bp, Homo sapiens
cgtgctaaccatccctgagatcatcatcaaggtcagtcttagcgtctcatcctggaacagagacaaaggcacgcagacttagtgttcatgtgtgcatatgygtgcttgtatgtgtgtgtgtgtgtgaatgaatgtcctgctcaaaaaaaaaaaaaaaaaaaataccagtgctaggatcctcttgttctttgaaagaagtaa

SEQ ID NO: 280523 - DNA, 201 bp, Homo sapiens
ttaacttatttcaagatcccatctgtgacaggtataatcattctctgaagaatattttacaacctagggagacaataatttacattttgttcatattagasaaaaagtaggaggacagggaggcagttgctcctccggagatttttttcttttctttaacagtccattttccgatatgtttggaattaggctaaattgtgt

SEQ ID NO: 280524 - DNA, 201 bp, Homo sapiens
tgctgaaggtggagcccgcctgattggctgagagactggatatgtggtgtgagagaaggaaggtatggaggaagccaaatgagtgatgaatgtgaaatgtktgccacatggtagaatcttagtaaatggtaacttccaacatgtttacatttggggaaactgaagctcgagagatgagtcgatgtgttcaagcccccacac

SEQ ID NO: 280525 - DNA, 201 bp, Homo sapiens
cactgcaagctccacctcccgggttcaagcggttctcctgcctcagcctcccgagtagctgggactacaggcgcccaccaccactcccggctaattttttktatttttagtagagacagggtttcaccgtgttagccaggatggtctcgatctcctgatctcgtgatctgcccctctcgcctcccaaagtactggaattac

SEQ ID NO: 280526 - DNA, 201 bp, Homo sapiens
ggtacccaaaagaaatgtgagaaagagttatttttcctgtttttttttaaataaataaaccagtttctcatggatagcatttatgcttatagttcaataayaatattaccaaaaattgcatggagaattcagttcactagggaattcctagtatataaacctaaacatttaacttatttcaagatcccatctgtgacaggt

SEQ ID NO: 280527 - DNA, 201 bp, Homo sapiens
aatgttcacatccaattggaaacattttgtatgtgttcattttgtatttcagttttatatcttttgacaaagttaatttttcttataaatattttcagatraactcaaaagcagaaagagtagcacaatgaatatctacttatatgactctcagagttaatggttatcaagattttgccacatttgctttatctatccctt

SEQ ID NO: 280528 - DNA, 201 bp, Homo sapiens
agacagactttttttgtttttgttttgagacggagtccggctctgtcgccaggctggagtgcagtggcgcgatctcggctcactgcaagctccacctcccrggttcaagcggttctcctgcctcagcctcccgagtagctgggactacaggcgcccaccaccactcccggctaattttttgtatttttagtagagacaggg

SEQ ID NO: 280529 - DNA, 201 bp, Homo sapiens
gggactaaaagatgaaagagaagatataagcctgggaaaagatggcaggcatcacaccataccaggccttggggatcttgctttcctcctgcagataatgsgggacttgagaaggattctaattagcagaaatacataatcagaattatgctttacaaagtggtagggagggctgggcacggtggctcatgcttgtaaccc

SEQ ID NO: 280530 - DNA, 201 bp, Homo sapiens
aaatataatcatgcagtatgtactccttgtgaggcttcttttatgcttccttactgtattctgagcttcatccatgctgttttttgtttcagtagttcatwcctctttattgctgagtagtagtgtttcattgtatggatgaatcactatttgcccatgtatttacttgtggatggacatttaggccattttccgtttttg

SEQ ID NO: 280531 - DNA, 201 bp, Homo sapiens
tgaatgagcatgcaaagttccaaaacttctgagtagaagtttggttgggttcacattggtcatatagactaatttgggtagaatttatatctttacattastgaatgttcacatccaattggaaacattttgtatgtgttcattttgtatttcagttttatatcttttgacaaagttaatttttcttataaatattttcag

SEQ ID NO: 280532 - DNA, 201 bp, Homo sapiens
cagccttgactatcaacattcaattctcacctgccccaccccacaacaccgtaactactgagtttcttttgcaaaaccctagcatgtcatgaagcacaatytgacatccaccacaccacttccacctgtgattaagtctggtcaccaccacactgtagctggggatttgtggttcacaaaacctggaaacgattttctaca

SEQ ID NO: 280533 - DNA, 201 bp, Homo sapiens
gccctgcctggctgttttctttcacattgttttttccagataagcttttgaatgagcatgcaaagttccaaaacttctgagtagaagtttggttgggttcmcattggtcatatagactaatttgggtagaatttatatctttacattactgaatgttcacatccaattggaaacattttgtatgtgttcattttgtatttc

SEQ ID NO: 280534 - DNA, 201 bp, Homo sapiens
ggaaatacatgcacagagaagcaggggtggcacaacataggaaatctgcccatataatcctatgcacaaattaaaggaaaaaattaggcaatcaaatcagyagtcacagaaaggtacatggtaaaattcagcatccagttttaggaagagtttaaggggaaaaatttagaaaaaaaacacctcaatgataataaagattgc

SEQ ID NO: 280535 - DNA, 201 bp, Homo sapiens
gctaatgacctgcattctctctcttaggtccgtggcactcaggtagttggttctgacatgactgtgacaattcagtttaccaatcctttaaaagaaacccygcgaaatgtctgggtacacctggatggtcctggagtaacaagaccaatgaagaagatgttccggtaaaccttgggttggggagaccgggcaggcagtgca

SEQ ID NO: 280536 - DNA, 201 bp, Homo sapiens
ttaccttctctgggtcgggaggacagtgggaatgtcagagggtgactgaaatccaccccaaattttcttggcccactcttttcttttttaactacccttcyattcccaccagaggaacagtaaaataaatgaggtcattattcttcactacatgcctcttgtaaattgttagtcagcctgcaagggtggttatttacgagg

SEQ ID NO: 280537 - DNA, 201 bp, Homo sapiens
tcagtaggctcagcatttgtttttacatgtttgttataaatccttaccttctctgggtcgggaggacagtgggaatgtcagagggtgactgaaatccaccscaaattttcttggcccactcttttcttttttaactacccttccattcccaccagaggaacagtaaaataaatgaggtcattattcttcactacatgcctc

SEQ ID NO: 280538 - DNA, 201 bp, Homo sapiens
tagtcattgttatttcgaggataccagtcctggcgaactactctactttatactgaaggggctaaaaggaaagaagcaaactcaactgactattgaggaamcatttgcttgtgcttcatagattgattccattccagtgttactagataggcaagcaacgtctctggagtggctatatgaaaccattttaggaaggcagtg

SEQ ID NO: 280539 - DNA, 201 bp, Homo sapiens
tcagccctttaggatatgcacagcttcatgcaccttgggttcccttcataccctctttctttcccctgtctcctcctgttacatccttccctttttcctcytcctgctctgcatttttccctctctcatacgtccattcctttaattcagatatttttgaggcctgttctataccagctctacaccatgcagcagtggtat

SEQ ID NO: 280540 - DNA, 201 bp, Homo sapiens
ttccttgtagagtctcttatatgcttcaaagtgtgctcatagtcagtatctccctagattgtgtgtttggaaggtgtaatccttatctcattcagcctttygtggtgcctggaattgagtcaatgttcagtaaatgtttgctgaactgaactgataatcaccattctgagaggcaaggagacgattattagactcagattt

SEQ ID NO: 280541 - DNA, 201 bp, Homo sapiens
ctagtttctctttgtttttctttctccaaatagtttgaagatggcatcctggacacttgcctgtatgtgatggacagagcacaaatggacctctctggaakagggaatcccatcaaagtcagccgtgtggggtctgcaatggtaagcagcaattactgatacctaaaatctgttacacctgtcatttgcctcagtatatat

SEQ ID NO: 280542 - DNA, 201 bp, Homo sapiens
attccttcttaagcattctaaaatggcacactcatcagcataagcttactcacacactgtgtgtacttttacgcacccagaagtcagaaatcactgcctarcagaagccagtgcaaaagagaagcagacaggaagcagttaacctaatgtgtctgtggtggcagctggctaagcggaagctgttaattattgaataagcac

SEQ ID NO: 280543 - DNA, 201 bp, Homo sapiens
gagtttgagaccagcctgccctacatggcaaaaacttgtctctactaaaaatacaaaaagttagccaggcatggtggtgggtgcctgtaatcccagctacytgggaggctgaggcaggaaaattgcttgaacccaggaggcagaggttgcagtgagctgagactatgccactgcactccagcctgggtggcaagagtgaaa

SEQ ID NO: 280544 - DNA, 201 bp, Homo sapiens
tcacccagtggccactagtggcctctaagaggccttgtatccgcggttaccaatctgcggatgatgactttggctccaggaacaccagccccaagttaaaytcttgtctccatttttttcagtggccactcttccagttagcaagctgctcttgtaatactgactgagaaatgcagagaggcaagaagaggaaaagggggg

SEQ ID NO: 280545 - DNA, 201 bp, Homo sapiens
gtaatactgactgagaaatgcagagaggcaagaagaggaaaaggggggaaatggcgggtttttcatttctaatagttctgtagcagtgagtcctgcccatyactgtgtgtgatatatacagtgttctaaggtatactgagtgtatataacgcccttaagtcatggctttggtaacatttggttaagaattattttggtaaa

SEQ ID NO: 280546 - DNA, 201 bp, Homo sapiens
ttggcaattgctggagacacttttggttgtgatggctggggtgcggggctgctcctggcatgcagtgggtagacaccagggatgttgcttaacatcgtacmtggcacaggacagctctgcaacaaagatgcatccagcccgatatgtcagtagtgttgatgctgagaagccctgatctagatcatgattactgtttttgcc

SEQ ID NO: 280547 - DNA, 201 bp, Homo sapiens
ttaggaagttatttaagagccaactgtcttgtctttcccgagtccgtttgaggaagtccccgaggcgcacagagcaagcccacgcgagggcacctctggasgggagcgcctgcaggtaagccaccgcccctgcaccctatgagccagggcccgctgcgtccaccttctgcacctcggtttcctggttgaaccagcaagcgg

SEQ ID NO: 280548 - DNA, 201 bp, Homo sapiens
aacaagagagcagaacgaggttttatttgctgctaatgacctgcattctctctcttaggtccgtggcactcaggtagttggttctgacatgactgtgacarttcagtttaccaatcctttaaaagaaaccctgcgaaatgtctgggtacacctggatggtcctggagtaacaagaccaatgaagaagatgttccggtaaac

SEQ ID NO: 280549 - DNA, 201 bp, Homo sapiens
caccttctacaccggggtcccgaaggcagaattcaagaaggagacgttcgacgtgacgctggagcccttgtcctgtaagctaacaatggtgtggttctttstgagactcgctgtctggcccctgtcttgctaggtgttaatgcccgttatagctttatatcaaagttaaagttccctccaagatctcagaagtgtgagcct

SEQ ID NO: 280550 - DNA, 201 bp, Homo sapiens
tcttgtctttcccgagtccgtttgaggaagtccccgaggcgcacagagcaagcccacgcgagggcacctctggaggggagcgcctgcaggtaagccaccgmccctgcaccctatgagccagggcccgctgcgtccaccttctgcacctcggtttcctggttgaaccagcaagcggcttgctctgggccctgtggcgccggt

SEQ ID NO: 280551 - DNA, 201 bp, Homo sapiens
ttcaaatggcactactgagtttaattctatctcaatcaatgcttagtgtccgctctatgcctgcaattggtttggtgctggcgattccagcagtgagcagractcagttcctgtcctggtccgagtgacaggattattgtgcagaggggtctttggaaacaataagtaggggcatttagtccaactgattcagaaaaagac

SEQ ID NO: 280552 - DNA, 201 bp, Homo sapiens
gtcttgctcttcctctctgtctgtctctcatgcatacatacacactgtcctgtggatgcacgtctaggtgttagtggcagcaaatgtactggagtcccacrgcaccaaagtatgttagcagcagtgaatccacatggatctacagcagcctcaattcttgcctcctcataaggcaggagagactggggcaagttttagagc

SEQ ID NO: 280553 - DNA, 201 bp, Homo sapiens
aagagagcagaacgaggttttatttgctgctaatgacctgcattctctctcttaggtccgtggcactcaggtagttggttctgacatgactgtgacaattsagtttaccaatcctttaaaagaaaccctgcgaaatgtctgggtacacctggatggtcctggagtaacaagaccaatgaagaagatgttccggtaaacctt

SEQ ID NO: 280554 - DNA, 201 bp, Homo sapiens
actgactgagaaatgcagagaggcaagaagaggaaaaggggggaaatggcgggtttttcatttctaatagttctgtagcagtgagtcctgcccatcactgygtgtgatatatacagtgttctaaggtatactgagtgtatataacgcccttaagtcatggctttggtaacatttggttaagaattattttggtaaaatctg

SEQ ID NO: 280555 - DNA, 201 bp, Homo sapiens
cgaaatgtctgggtacacctggatggtcctggagtaacaagaccaatgaagaagatgttccggtaaaccttgggttggggagaccgggcaggcagtgcagrgctgtgggaagctttctctgtgtgtgtcttttccaaacatagatctgctccccagtgaaaatgtcttggaagctgcctcctccttgccgaccatttctgt

SEQ ID NO: 280556 - DNA, 201 bp, Homo sapiens
aaagtcatttctatgattctaaaatgacccagggaattcaatgatgaatgagaggtacagactcaaagcaattctctaatgtattcaaagtaaacaatacyataaggtcaccttattcaccagggattttcatttctgttcattgaagatttttaaaaaattgacagatatattggaagccagtgggaaaatagaatttat

SEQ ID NO: 280557 - DNA, 201 bp, Homo sapiens
aatgcagagaggcaagaagaggaaaaggggggaaatggcgggtttttcatttctaatagttctgtagcagtgagtcctgcccatcactgtgtgtgatatayacagtgttctaaggtatactgagtgtatataacgcccttaagtcatggctttggtaacatttggttaagaattattttggtaaaatctgtattttaaaat

SEQ ID NO: 280558 - DNA, 201 bp, Homo sapiens
ggagagatgggacactaacaaggtggaccaccacactgacaagtatgaaaacaacaagctgattgtccgcagagggcagtctttctatgtgcagattgacytcagtcgtccatatgaccccagaagggatctcttcagggtggaatacgtcattggtgagtgccatgtgcaagctccagtcttgacaccatgggttgcatt

SEQ ID NO: 280559 - DNA, 201 bp, Homo sapiens
tattgtctctttctatgattcatatcaggaatgaaatttctcagtttggaacagcagaaaaaggcagaagcctccggtgttccttgcaacctttccaattrtaacgcatatcaattagtaggagctctcggggtgacaactttgggagaatccactgatttatattaatgaagagtgttactgtagtccaacagagtaaag

SEQ ID NO: 280560 - DNA, 201 bp, Homo sapiens
aaataaatcaatttaatttaatatgaagaaatcaatatgttcccaatatcttggatgcttttaacagcaaataaataaatatgacctgcttgtattttatyattaaattcatccttagccaatttgctttgtatttatataaggtctttttagcccctttcatacagaatggagtaagtaaccaagactggtgtcctcaga

SEQ ID NO: 280561 - DNA, 201 bp, Homo sapiens
taggctaaattgtgttaggtagacagtttgaaagctgtcactttgaaagagcgagctgccaagtttctagctaccgtatttaaaaaaaaaaaaaaaaaaaaggcggcttagcaatgagctgttccattttgccaggaactaggcttggacaggggaagcaaattcatttcctgtttgtggcaaacggagtctggatgatga

SEQ ID NO: 280562 - DNA, 201 bp, Homo sapiens
agcagcctgcggtcccagctacttgggaagctgaggcaggaggattgcttgggcccaggagttcgaggcagccccgccagcctgtctctaagaagaaagaragacaataagcaataactttaaaactcaagaggcagggccgggcccagtggctcacgcctgtaatcccagcacttcgggagaccaaggcaggcagatcat

SEQ ID NO: 280563 - DNA, 201 bp, Homo sapiens
ggcacctttctcaagactttctgtagcacctagatgttgaagcgaaggtcaaaggagaattttttaaagacaagagagagtgggtgttattttatggtgayggagaggaaccaggaaagagagtttgcagtccagagagaggacggtggttcacagccttggctgcacgttgcaatcatctgggaagctttgaaactatgg

SEQ ID NO: 280564 - DNA, 201 bp, Homo sapiens
gaaggtggaggttacaatgagctgagatggcacccctgcactccagcctgggcaacagagcaagactccgtctccaaacaaaacaaaacaaacaaaaaaaataaaaaaaatggtgcctggcaccttgtaggcactgaaaaactctttcaagaatgaacaaaacctggggtcgcctatggctctgcccccctacttaatgcc

SEQ ID NO: 280565 - DNA, 201 bp, Homo sapiens
tgatcttgaaaaggacggtttcactaaagtgatagagacagaagccagggagatggtcatgggctgtgttgtaaacaggaggcgagaaagtagagacggcrggagatggcacctttctcaagactttctgtagcacctagatgttgaagcgaaggtcaaaggagaattttttaaagacaagagagagtgggtgttatttta

SEQ ID NO: 280566 - DNA, 201 bp, Homo sapiens
gttttcagttcatggaaaggattggaggaaggtgggacaaaaaccagagaccaatttggaagctgtggtctaggacaaagatgatgataaactaaacatgstggtaccagtggagatgagaaggggttagattggagatctattttgtatttagaacaaaaattgcacagggattcaagatgagaagtaaagaaatgggag

SEQ ID NO: 280567 - DNA, 201 bp, Homo sapiens
agtaacttatgtaaccacctccttagaatgttctctctctgacaatatgcctaccaaagactcttttaaagatctttgaaattagtaattagggaggttamaatggagcactgtttgcttgtcttaatgtggaatcctctacatgctttatagaaaacaaatgaagtgaataagttttgctcttgaaggttctcctgctta

SEQ ID NO: 280568 - DNA, 201 bp, Homo sapiens
aacctctttttttggagtgaacggtcgtagatacatctgaggacccaggtgctcaatgggcattgtccttggcatttctaaatcaccaaggaactttttcrcatttacccatatggattttaatttttgaaaaagttcatctatcaaaacaaatcatgattatgtaataataccttgttaccccattcttgtgtcagattt

SEQ ID NO: 280569 - DNA, 201 bp, Homo sapiens
gagctgaaaccagatatggtccttactctcagatcatattaccttagagggccactatcaacacgttattgccaataacacaataattatgtaagattgarttgccatttcctagaaaagaagagagccccaagggaatggagcccagatgaggcaaattattgaaaatggggaataagtgaagaaaggtatcaatcagag

SEQ ID NO: 280570 - DNA, 201 bp, Homo sapiens
ggagcaaagagaacaggcttccctgtccccagttctgtctccacttctgcctagctatgtgatgtgcacacatgacgccctcaccaagcctcagtttcccrtctgtaaaaatttcctcacagaggttttgtaaggaccccaagaaataaaacttatttcctgtcactttatttgcatcactatgtgaactgccttggcaac

SEQ ID NO: 280571 - DNA, 201 bp, Homo sapiens
gtctatgcctgttcctgcctcccgactgataggatctggcagcaactatgggcagagaatttcccccaaggagatgcagctgcttctgcaaaggctgccgytactgcagataaaggctcgttattcactgtgacacacctacatgtaccacctccatccatatttgctccagtgggtcaaggcattaccagtggaggatct

SEQ ID NO: 280572 - DNA, 201 bp, Homo sapiens
gaccctcatgcaggttctctccacctggtcttccttctcttcactcactcagttgttacctcctttgatccacatttctggctcacacaactcttatccayggcagcatattttctcaatgtcccttttcctcatattcctttggactttccagttttattcttctcttgtctcctttcatctccctagatcccttttgcc

SEQ ID NO: 280573 - DNA, 201 bp, Homo sapiens
gaggctgaggcaggagaatcgcttgaacctgggaggtggaggttgcagtgagccgagattgtgccattgcactccagcctgggcgacaagaccaagactcygtttcaaaaaaaaaaaaaaaaaaaagtgtaaggagaaaatggagaacaggagatatgtttggaagctgtagagatactccaggctagaagaggaatagac

SEQ ID NO: 280574 - DNA, 201 bp, Homo sapiens
gcacatcagaatcacctggagggtcaccacgcttggagcacatcagaatcacctggagggtcaccacgcttggagcacatcagaatcacctggagggtcascacgcttggagcacatcagaatcacctggagggtcaccacgcttggagcacatcagaatcacctggagggtcaccacgcttggagcacatcagaatcacc

SEQ ID NO: 280575 - DNA, 201 bp, Homo sapiens
acagtggtgtgatctcagctcactgcaacctcttcctcctaggttcaagcgattctggtgcctcagcctccagagtagctgggaccacagttgcacaccaytacgcccagctaattttatgtatttttggtagaggcagagtttcaccatgttgtccaggctggtttcgcactcctaacctcaagttatccacccacctca

SEQ ID NO: 280576 - DNA, 201 bp, Homo sapiens
gtacattaatcttgtatccagaaactttgctgaattcttttatcagtcctaggagctttctggaggagtccttggggttttcaaggtaaacaatcatatcrtcagcaaacagtgacagtttgacttcctctttacctatttggatgtcctttatttctttctcttaacttattgctctggctaggacttccagtactatgt

SEQ ID NO: 280577 - DNA, 201 bp, Homo sapiens
tgtgtgatatatacagtgttctaaggtatactgagtgtatataacgcccttaagtcatggctttggtaacatttggttaagaattattttggtaaaatctrtattttaaaatgtataaactcatgtaagtttcctctcatacacaccatgatattcaagaaaaaaaaatgaaatatttgaggtaggcacggaaatcccaga

SEQ ID NO: 280578 - DNA, 201 bp, Homo sapiens
caaagcctagagccccatgagttgtgagaattaaatgtaacttcttgctactcaaagtgtggtccatgagccagctgcatcagcattccccaggagtttgwaaaaaatgtagaatctcatgtcccaccccacaccctctgaatcaaaatccatgttttgacaagatcccaagcagactggagtgtacaggagagtttgtgg

SEQ ID NO: 280579 - DNA, 201 bp, Homo sapiens
agctttgttacaagctggctagagggaacttaagatcccagggaaattccatttttccttgagaccccctaagtccaaatcaatacactaagaagaaacgraaaaaatcctaagagtttaagtaggaagaatttttatcaaggtctgtgtgggaggaaattggggcataagttcctctgtggtcaggcattgagctaggta

SEQ ID NO: 280580 - DNA, 201 bp, Homo sapiens
aaaaaggtcatagttttagctgctgcatatgcctatactagttcctctctaccttgatatattaatattacagttaatagcagaagtattggagccaagcrttctctgggtcagtgccctgggactaatagagctaacatttatttagtatttactatgcatcggtcttggtgtatgcatgatcttatccagttcttttta

SEQ ID NO: 280581 - DNA, 201 bp, Homo sapiens
ccagctgaattgctttccccttagccacaatatctcaatcaacacaagtaacgtactttccttgggacattcacctttcttcagattcagaaccagagagsaaaaaagaaatcaccccttcttccttctgcctttactttctagtagaagttatacttaaaaaaaaaaaacaatttgccaggcatggtggctcacacctgt

SEQ ID NO: 280582 - DNA, 201 bp, Homo sapiens
ccgcccagaagcgagggctcctgcccgccgcactcacccagccaggcgtgcacctggggctccccccttctcccccttagcactgtgtctcccgacagcgygccacactgttctgcacccctggcaatgccgcagcctaccttcggtatttctcactagaggatggctctcgcagccttctccctatcattaacccttttt

SEQ ID NO: 280583 - DNA, 201 bp, Homo sapiens
cttcatgcagttcacccagtggccactagtggcctctaagaggccttgtatccgcggttaccaatctgcggatgatgactttggctccaggaacaccagcmccaagttaaactcttgtctccatttttttcagtggccactcttccagttagcaagctgctcttgtaatactgactgagaaatgcagagaggcaagaagag

SEQ ID NO: 280584 - DNA, 201 bp, Homo sapiens
tatctcctggttaccttttgcatttcagatttatatttaattgttctaaaagcaggttttctggcactatatatcaagttttctccaagtcactaagggaygaaatttgctaagcgactaaaccttggaaagaacactcatttttaaaatgccatcttcatgcagttcacccagtggccactagtggcctctaagaggcct

SEQ ID NO: 280585 - DNA, 201 bp, Homo sapiens
gtttcttaatgtcacgagcgttcacctgttcaaggagagatgggacactaacaaggtggaccaccacactgacaagtatgaaaacaacaagctgattgtcygcagagggcagtctttctatgtgcagattgacttcagtcgtccatatgaccccagaagggatctcttcagggtggaatacgtcattggtgagtgccatgt

SEQ ID NO: 280586 - DNA, 201 bp, Homo sapiens
atcagtcattatttacttggcagacatatgtgtccacaacccaagtgacattctgggatatccattagaggcactggcataggaatatgaatgtccagtgrctgtagaatgaatgaacgaacagtcaatcacttgtgaattgaatgactcatagctctagtggcattataatttattattaataacaagctacagatttca

SEQ ID NO: 280587 - DNA, 201 bp, Homo sapiens; identical to SEQ ID NO: 57061

SEQ ID NO: 280588 - DNA, 201 bp, Homo sapiens
tcccagctactcgggaggctgaggcaggagaatcgcttgaacctgggaggtggaggttgcagtgagccgagattgtgccattgcactccagcctgggcgayaagaccaagactctgtttcaaaaaaaaaaaaaaaaaaaagtgtaaggagaaaatggagaacaggagatatgtttggaagctgtagagatactccaggcta

SEQ ID NO: 280589 - DNA, 201 bp, Homo sapiens
aggtgggcagatcaccagatcaggagttcgagaccagcctggccaacatggtgaaaccctgtctctactaaaaatacaaaaattagcctggtgtggtggtkggcgcctgtaatcccagctactcgggaggctgaggcaggagaatcgcttgaacctgggaggtggaggttgcagtgagccgagattgtgccattgcactcc

SEQ ID NO: 280590 - DNA, 201 bp, Homo sapiens
gggaggccgaggtgggcagatcaccagatcaggagttcgagaccagcctggccaacatggtgaaaccctgtctctactaaaaatacaaaaattagcctggkgtggtggtgggcgcctgtaatcccagctactcgggaggctgaggcaggagaatcgcttgaacctgggaggtggaggttgcagtgagccgagattgtgcca

SEQ ID NO: 280591 - DNA, 201 bp, Homo sapiens
cagtaattaaccatgctattatttgaagaaaccctttctccatggtggaaattatatacaaacagctagtcaccaaaagcactgaagaaaaatgtagtagrgggttatttgctcttctgggggcttgtttgttttgcaattcagaaaactaaggttgacacaactgaagtttattccataggatctcaacatttacagtta

SEQ ID NO: 280592 - DNA, 201 bp, Homo sapiens
aatgaatgatttgactttattagtatgaaaagatgtgcctagagagcccacaagaaaatgttctgaagttgtggactcttagccagaaccctgttgcaggkcgacagagctgtgtgtgttttctcaggggctgggcccaggcctcacaggtaaaacagaggctggtgcagagttgttctgaattcctctcaaacacctccc

SEQ ID NO: 280593 - DNA, 201 bp, Homo sapiens
tttctgttaagcagctggttagatctacagactctgtcagattcagctccaagtggcattttttttttggaggaaggggcaaaaatatttcataagtcacrccattgcttcctaggacattcatcctggcagaagatacatatatttaggtttgtcaatagtatctggttcacgttttatcagtctcatccacccgttacg

SEQ ID NO: 280594 - DNA, 201 bp, Homo sapiens
aaaaaaaaaaaaaaaaaagtgtaaggagaaaatggagaacaggagatatgtttggaagctgtagagatactccaggctagaagaggaatagaccagagggrttttagcccctggaggtatggggctcatttctcttgttccagcttcctctgagcacctgagcaatccttcaacattataggttccaggatgtattaataa

SEQ ID NO: 280595 - DNA, 201 bp, Homo sapiens
gccggcggatcacctgaggtcaggagttcaagaccagcctggccaacatggtgaaaccccgtctctattaaattttttaaaaatacaaaaattagcggggyatggtggtgagtgcctgcaatcccagctactcaggaggatgaggtggggaggattgcttgaacccaggaggcagaggttgcagtgagccgagatcgcgcc

SEQ ID NO: 280596 - DNA, 201 bp, Homo sapiens
cccacccagcaagtctacccagctctggagtgacactgggcattgtctgcacagaatcctgtgatgtgagccatctctgggtccctctcagccaccggaayagcgcctattccggtggaggtggcagggggtacaatggacactgttagggttcttagctttggtgtttaatgctctatttttgtgctggttggctccctg

SEQ ID NO: 280597 - DNA, 201 bp, Homo sapiens
atatgaagaaatcaatatgttcccaatatcttggatgcttttaacagcaaataaataaatatgacctgcttgtattttatcattaaattcatccttagccwatttgctttgtatttatataaggtctttttagcccctttcatacagaatggagtaagtaaccaagactggtgtcctcagagtaacaatgacccacattcc

SEQ ID NO: 280598 - DNA, 201 bp, Homo sapiens
accaaatgaacatccccctcctgctgtcaaagagcagtcagtggccaccgctattgacctgagctctaattaggctggttttataatgaggaaaagagtgygattctaattagtaaatttccatctctttctcaataggtatcctccagtcaaagcaatcagctatcctcatcacactggttccattgccaaaaaaataac

SEQ ID NO: 280599 - DNA, 201 bp, Homo sapiens
actgaaggggctaaaaggaaagaagcaaactcaactgactattgaggaaccatttgcttgtgcttcatagattgattccattccagtgttactagataggmaagcaacgtctctggagtggctatatgaaaccattttaggaaggcagtgcgtttggatccttccagaataaaaagctcagactctaaaaatgccattcct

SEQ ID NO: 280600 - DNA, 201 bp, Homo sapiens
ggtaacatttggttaagaattattttggtaaaatctgtattttaaaatgtataaactcatgtaagtttcctctcatacacaccatgatattcaagaaaaaraaatgaaatatttgaggtaggcacggaaatcccagaggtgggaccagccattcagtggtagcgtttgacatctttgcatgattttaggcatctttaatgt

SEQ ID NO: 280601 - DNA, 201 bp, Homo sapiens
tcatttaacagttctattgtattgaattaaaactggaaagcaagcctggccctatttaaaaactgggttctagtagtttttcaggctaatggggtcttatrcctttctaagaatctcctccatcccaccactccttgtcagaattaaatcaaccaattaatgataaacctcctctttgtgcagagtaaacctctctggatt

SEQ ID NO: 280602 - DNA, 201 bp, Homo sapiens; identical to SEQ ID NO: 57087

SEQ ID NO: 280603 - DNA, 201 bp, Homo sapiens
  misc_feature (1)...(201): n = A,T,C or G
cgtggttgtcttttctccagcatgttgttagtgctccacatgtctctggaaccatctctctactctggtggcctctataatggggactcttcacctcttgngggtgtgcctggtttttgaaaatagccaagtctccaggagtcatgactgggtaatccaggggatcaagggggaaccttcactgggcccagaaacaaagtc

SEQ ID NO: 280604 - DNA, 201 bp, Homo sapiens; identical to SEQ ID NO: 57090

SEQ ID NO: 280605 - DNA, 201 bp, Homo sapiens
gggagtggggccaagtgagaacagcctgctagactggaaccccgccggcttggctccccactcctgcgcgcctccccactcctgcgcatcgcctgcctccrtcccaatttggagctgaactcgagccacttctcctccttagacccgcccagaagcgagggctcctgcccgccgcactcacccagccaggcgtgcacctgg

SEQ ID NO: 280606 - DNA, 201 bp, Homo sapiens
caggcttggggaatgggaaatgttggcaaccctgacttcttaagcctattgatagccctattgaaaattgcatgcccaacctctccacctccttatcctcytccatgtggctcaatttccaaagcagttcctacctcctcacccctaagtggatttacttatggctcttcttgggctccaccctaaccctatcagactata

SEQ ID NO: 280607 - DNA, 201 bp, Homo sapiens
atttctctccagagcagcctggtgagctggcaaggcaagctgcttccccagcctcttgcctctgcctgatccctagaaacctgttccgggtacagcagccrgcagctgacctcctctcagccctgtcagtggtgacaaggtccaggtgccagcactggtttggtgatacagacatcattcccctgggccatggcagggaca

SEQ ID NO: 280608 - DNA, 201 bp, Homo sapiens
tgcttccccagcctcttgcctctgcctgatccctagaaacctgttccgggtacagcagccggcagctgacctcctctcagccctgtcagtggtgacaaggyccaggtgccagcactggtttggtgatacagacatcattcccctgggccatggcagggacattcagactcatgtccccgagtggcattgagcagggagtct

SEQ ID NO: 280609 - DNA, 201 bp, Homo sapiens
cctacaagaagggttttttcactctgtgtttattaaatgctggtgatgtgtttagctgtggtctgtcctttcctgtagttttacgatgccttggaataccmgcaagaattgttaccaattatttctctgcccatgataatgatgccaatttgcaaatggacatcttcctggaagaagatgggaacgtgaattccaaactca

SEQ ID NO: 280610 - DNA, 201 bp, Homo sapiens
ttcaatattttcttcatgttcagtcaggatattaattcctagcttgctatgccagagtggtaaaagggggtagggcttcattttcaaaatgaacccagcaragggaacccagaagtgctcagaaagggctttctgctaactaatgatggcaaacgtggtctgtgtgatggggtggcatctactttctgaaaatttttaatt

SEQ ID NO: 280611 - DNA, 201 bp, Homo sapiens
tggaaaccattgcccctctgagatatctgtggtatacatcagcatattaaagtctcacatgaatgcttcagtaaagaatcctgatcagctttggttaggcyagcattttccacactggtttaaacatggagctctaattcttccaatacctgtcaatatcccataaaactagcactatgccatgatggactgactctaacc

SEQ ID NO: 280612 - DNA, 201 bp, Homo sapiens
ctcggttcaagccatcaagcacggccatgtctgcttccaatttgatgcaccttttgtttttgcagaggtaagcaggaagctggaggaaagtgctgtttttytccccaacctcttaacacatgaaagagtaagctaaaagttgttgtttctaagttttccaggtacatagcgtatgcttcgtgttgacaaaggtaactaggc

SEQ ID NO: 280613 - DNA, 201 bp, Homo sapiens
tggtgtcagccactctataagataggtacttcattcccatattaaagataagaaaactgaggctcagatagattaaataacttttctgaggctgcacaatwagtaagtagtgaagcatttccaaaaacatattctgaaaaatgcagatctccaaagaaaaaagtttccatagtcatttacatttggaaaccattgcccctc

SEQ ID NO: 280614 - DNA, 201 bp, Homo sapiens
caataataataaacatttattaagaatgtacttggtgtcagccactctataagataggtacttcattcccatattaaagataagaaaactgaggctcagakagattaaataacttttctgaggctgcacaataagtaagtagtgaagcatttccaaaaacatattctgaaaaatgcagatctccaaagaaaaaagtttcca

SEQ ID NO: 280615 - DNA, 201 bp, Homo sapiens; identical to SEQ ID NO: 280574

SEQ ID NO: 280616 - DNA, 201 bp, Homo sapiens
tttattttgctactatcttatcagatgcagcctatttttttggcatctcctacttggctataaaataatccagtcatttattcaaatagcatacaaaactytggaattattttagctttccttcttaacctcccttatgcatcttgccaaaaataccttcccaaaattatcataaatccagccacttctacaatctctatc

SEQ ID NO: 280617 - DNA, 201 bp, Homo sapiens
tgttccggtaaaccttgggttggggagaccgggcaggcagtgcagggctgtgggaagctttctctgtgtgtgtcttttccaaacatagatctgctccccartgaaaatgtcttggaagctgcctcctccttgccgaccatttctgtagggcgtggagtaaaactagggttggtttgaccagcactttcatcatttaatcct

SEQ ID NO: 280618 - DNA, 201 bp, Homo sapiens
aggctgagacatgagaattgcttgaacccgggaggcagaagttgcagtgagctgaaattgcaccactgaactccagcctgagcaacagagcaggactctgyctcaaaaaaaaaaaaaaaaaaaaaaaagaatgtgttttaagggttttgctttatcagatgcataatataaatcaacagtgagttaagagtatccaagaca

SEQ ID NO: 280619 - DNA, 201 bp, Homo sapiens
gggaggctgaggcagggggattacctgaggtcaggagttcaagaccagcctgaccaatatagtgaaaccccatctctactaaaacaaaaacaaaaacaaamaaattagccaggcatggtggtgtgagcctgtagtcttagcaacttgagaggctgagacatgagaattgcttgaacccgggaggcagaagttgcagtgagc

SEQ ID NO: 280620 - DNA, 201 bp, Homo sapiens
actgagattataaaggtagcaagagcctctgtaaagaaatcatatcccattagccaaaagaaatccagtggtcaaacatagtcctctagaaatagtcagargaagtcattttattattgttattactggaaacagctagaggcaaaaggcatcttcttcgaggccttccaccttgccacttcatccattctatctagagac

SEQ ID NO: 280621 - DNA, 201 bp, Homo sapiens
agtcttggtgccctcatccataatacggttacaatatatacctcacaggcttgttgttgtgaggttcaaactaaatcctttataaaatgtccctgaaacaytgtaggtatgcaacaaatgttggctatctcccccttagtagaaatccgacttcatgtgcactcagaacattctgtgagaaagtaaaattgctctctttaa

SEQ ID NO: 280622 - DNA, 201 bp, Homo sapiens
tccaatacatctctttttgaaggggtagtaagattattctaaatacatatgcctctcctacatataccatctttaatgattgaaagagaaagatagaaaaytcatcctccatgtgtatgaagataaaacctctatatgtgaagtcaatgctgctatacatttatttcgggattaattggagattgtctaaagttgcagtta

SEQ ID NO: 280623 - DNA, 201 bp, Homo sapiens
catacatacacactgtcctgtggatgcacgtctaggtgttagtggcagcaaatgtactggagtcccacagcaccaaagtatgttagcagcagtgaatccayatggatctacagcagcctcaattcttgcctcctcataaggcaggagagactggggcaagttttagagcaggagtgaaagtttattcaaaagctttagaac

SEQ ID NO: 280624 - DNA, 201 bp, Homo sapiens
aggggtagtaagattattctaaatacatatgcctctcctacatataccatctttaatgattgaaagagaaagatagaaaattcatcctccatgtgtatgargataaaacctctatatgtgaagtcaatgctgctatacatttatttcgggattaattggagattgtctaaagttgcagttagttatttgtggagctattaa

SEQ ID NO: 280625 - DNA, 201 bp, Homo sapiens
gaaatttctgccataataaataaatacataaataaataaataaattcaggttgatatttacaagatcaaatgaaagctttctctgggaaaaaaaattaaarcataccaacaagggcacaggctcccttagaggatatgtgctaagtaaagaagctctgacattttctttgtagaattgcttcatgaataatagtctatctt

SEQ ID NO: 280626 - DNA, 201 bp, Homo sapiens
gctgtcccttgggacatgaagttgagtaagttagtccctggcctcaagaaactctcagtgtagaagacaaaataaataaaagatcattgcaattcagtgtrataaagactgtgactgtgatttatgcaaattgcagtgaaataacagaaatcaatgtctagcggtgtggtggagtggggaagaggatgaggagggcttcct

SEQ ID NO: 280627 - DNA, 201 bp, Homo sapiens
gaggaagtccccgaggcgcacagagcaagcccacgcgagggcacctctggaggggagcgcctgcaggtaagccaccgcccctgcaccctatgagccagggmccgctgcgtccaccttctgcacctcggtttcctggttgaaccagcaagcggcttgctctgggccctgtggcgccggtcacaggcagctccacttgcccaa

SEQ ID NO: 280628 - DNA, 201 bp, Homo sapiens
ctccatccatcttccacgaacagagatttgcaaatttagatcttcttcttaaattattccaatggctttttatagcctaagaataaagcatgaatgtttartttgatatcaaaggatttcacaatcttatccttacctatatcataggtcagtgttgaagagtgtggatttcagagctctatcactaactagctgtgacct

SEQ ID NO: 280629 - DNA, 201 bp, Homo sapiens
gaagacaaaataaataaaagatcattgcaattcagtgtaataaagactgtgactgtgatttatgcaaattgcagtgaaataacagaaatcaatgtctagcrgtgtggtggagtggggaagaggatgaggagggcttcctgatgcaaggatattggagccgagacttagaggatgagtatgagtgttcctgacaggcaagcg

SEQ ID NO: 280630 - DNA, 201 bp, Homo sapiens
ccctctgaccaaaggggacgggtggggacttcctggcactgcagggccccttgcctggtactcccagcaactggttgcggtggggagggcagatctagggrtggggatggggaggagaagtgggaatgggaaattgggagtcagaggggcaagtgggagagaagggcgcacctgccgggataacaggccagatgaagtaaa

SEQ ID NO: 280631 - DNA, 201 bp, Homo sapiens
tgtggtggagtggggaagaggatgaggagggcttcctgatgcaaggatattggagccgagacttagaggatgagtatgagtgttcctgacaggcaagcgcrtggaaaagtgtttgcagtagagggaacagtatattgcaagtgaggagggactaaaagatgaaagagaagatataagcctgggaaaagatggcaggcatca

SEQ ID NO: 280632 - DNA, 201 bp, Homo sapiens
agcagccggcagctgacctcctctcagccctgtcagtggtgacaaggtccaggtgccagcactggtttggtgatacagacatcattcccctgggccatggsagggacattcagactcatgtccccgagtggcattgagcagggagtcttttttgtcaataacattcatgcaccaaaatctaattttactcctaagggtgtt

SEQ ID NO: 280633 - DNA, 201 bp, Homo sapiens
actcatgtccccgagtggcattgagcagggagtcttttttgtcaataacattcatgcaccaaaatctaattttactcctaagggtgttctgtgctgggttycactggggataaacacctatttgctgggataggtgagcatggtcatgctggagctgtgtggtcgattcccctcattagaaggagaccaatgcctgaaagc

SEQ ID NO: 280634 - DNA, 201 bp, Homo sapiens
agacacaatggagtactatacagcccttagaagaaggaaaattctgccattctcaacaagggtagaactggagagcactatgctaactgaaataagccagrcacagaaagatgaatactgtatgatctcacttatatgtggaatctgaaaaagtcaatctcagaaacacagtagaaagttgtttaccagaggctggggctt

SEQ ID NO: 280635 - DNA, 201 bp, Homo sapiens
agtggcattgagcagggagtcttttttgtcaataacattcatgcaccaaaatctaattttactcctaagggtgttctgtgctgggtttcactggggataarcacctatttgctgggataggtgagcatggtcatgctggagctgtgtggtcgattcccctcattagaaggagaccaatgcctgaaagcccagattgatgca

SEQ ID NO: 280636 - DNA, 201 bp, Homo sapiens
cagcctagctccacagtctatgctcttactatgctcttctacttctcttaataataataacaacaacaataataataaacatttattaagaatgtacttgstgtcagccactctataagataggtacttcattcccatattaaagataagaaaactgaggctcagatagattaaataacttttctgaggctgcacaataag

SEQ ID NO: 280637 - DNA, 201 bp, Homo sapiens
aaaatggcatgcttccctgggaaggctggaaggccactgctaaaaagcttcccagggacattctttaccttgtgacttccattgctcagattccagcctcrcaccatgccttctcagatacctgactacttaatgattggtcctaagggccaatccaaatgctcagtgctattatgattattattgccatcaatttctgag

SEQ ID NO: 280638 - DNA, 201 bp, Homo sapiens
aaattcaaagcaagcctgtctgctcagaagacaaggagtataaaatggcatgcttccctgggaaggctggaaggccactgctaaaaagcttcccagggacmttctttaccttgtgacttccattgctcagattccagcctcgcaccatgccttctcagatacctgactacttaatgattggtcctaagggccaatccaaat

SEQ ID NO: 280639 - DNA, 201 bp, Homo sapiens; identical to SEQ ID NO: 280574

SEQ ID NO: 280640 - DNA, 201 bp, Homo sapiens
ccatggcctaggtgagacacttcttatttgacaagggatcctatgtggaatgggggccttggacttcagcaccccacatgttccattttgggatgatcccrgcccaaatcaaagccaccattaaaacccattggtccttctttgccatgaaaatcacatcttttccatggcatttcttttacaacagcaaaagaactgttt

SEQ ID NO: 280641 - DNA, 201 bp, Homo sapiens
taagtccctatgaggcactcctacaaataaccccacaggccctaaacagagttaatacaaaatagcgaaggtagatcttgcccttggtaaccctgtcctcwttcaggtccctgctccaaattacttccccttttcctgacaccatttgttcctttggtgccttactcaaatatcccatcaccctgagactgttcttcctgg

SEQ ID NO: 280642 - DNA, 201 bp, Homo sapiens
atctggacagaattggagatgacaaactcacaccgcccttcctctgtgcaatgcaggcatgtatcggtgtggccccgcctcggttcaagccatcaagcacrgccatgtctgcttccaatttgatgcaccttttgtttttgcagaggtaagcaggaagctggaggaaagtgctgtttttctccccaacctcttaacacatga

SEQ ID NO: 280643 - DNA, 201 bp, Homo sapiens
agtccttgcaatgaaagacactggccagggaagctggttggacacacacacatacttgcacattcacaagtatctttcattaaaaggagatgacctactgsttccctcctgccagtgatgggccacaaaacagacatgacacgtgggccttctcacgtgtcccagatttgttttaaaaatcattttcaattcatctagttt

SEQ ID NO: 280644 - DNA, 201 bp, Homo sapiens
ccaggcctgggaataagtaccagactgatgatagacggggaggatgatcctcctgaaattctagccacagggaagaaaagtccttgcaatgaaagacactrgccagggaagctggttggacacacacacatacttgcacattcacaagtatctttcattaaaaggagatgacctactgcttccctcctgccagtgatgggc

SEQ ID NO: 280645 - DNA, 201 bp, Homo sapiens
cgaactgggtggagcccaccacagctcaaggaggccagcctgcctctgtaggctccacctcagggcacagacaaacaaaaagacagcagtaacctctgcasacttaaatgtccctgtctgacagctttgaagagagcagtggttctcccagcacacagctggagatctgagaacaggcagactgcctcctcaagtgggtcc

SEQ ID NO: 280646 - DNA, 201 bp, Homo sapiens
cctcctgccagtgatgggccacaaaacagacatgacacgtgggccttctcacgtgtcccagatttgttttaaaaatcattttcaattcatctagttttctrttaatgttaaaaggttggaaattatattttaattagtgttagagatgtacatcagcatcatagaattctgaaactactgatgcaacagaatcataaaatg

SEQ ID NO: 280647 - DNA, 201 bp, Homo sapiens
tgacaggcaagcgcatggaaaagtgtttgcagtagagggaacagtatattgcaagtgaggagggactaaaagatgaaagagaagatataagcctgggaaargatggcaggcatcacaccataccaggccttggggatcttgctttcctcctgcagataatgggggacttgagaaggattctaattagcagaaatacataat

SEQ ID NO: 280648 - DNA, 201 bp, Homo sapiens
aacgttgacatggactttgaagtggaaaatgctgtgctgggaaaagacttcaagctctccatcaccttccggaacaacagccacaaccgttacaccatcayagcttatctctcagccaacatcaccttctacaccggggtcccgaaggcagaattcaagaaggagacgttcgacgtgacgctggagcccttgtcctgtaag

SEQ ID NO: 280649 - DNA, 201 bp, Homo sapiens
taatatgattgttggtttcatgaagtaagaagaccatatgagattttatctgtttgcttgtttgtttttacataaatgatgcagaaataactgactctccractggaagaaagtttaaaaattgaccctcatcttgtcccatatacagtagtaaatctcagatggaatgagtattaatgtaaaaaagacaattttttgagg

SEQ ID NO: 280650 - DNA, 201 bp, Homo sapiens
ggcattgagcagggagtcttttttgtcaataacattcatgcaccaaaatctaattttactcctaagggtgttctgtgctgggtttcactggggataaacamctatttgctgggataggtgagcatggtcatgctggagctgtgtggtcgattcccctcattagaaggagaccaatgcctgaaagcccagattgatgcagct

SEQ ID NO: 280651 - DNA, 201 bp, Homo sapiens
cattgagcagggagtcttttttgtcaataacattcatgcaccaaaatctaattttactcctaagggtgttctgtgctgggtttcactggggataaacaccyatttgctgggataggtgagcatggtcatgctggagctgtgtggtcgattcccctcattagaaggagaccaatgcctgaaagcccagattgatgcagctct

SEQ ID NO: 280652 - DNA, 201 bp, Homo sapiens
tctgtgctgggtttcactggggataaacacctatttgctgggataggtgagcatggtcatgctggagctgtgtggtcgattcccctcattagaaggagacsaatgcctgaaagcccagattgatgcagctctccatatagcaaagggaaaggggaagtgcagtttatccagcaagccagacacttgcccaggtgttgtgga

SEQ ID NO: 280653 - DNA, 201 bp, Homo sapiens
tttttttttaaaaagaagacagatgtttcctgcgaatcaagaggagaaatgctttctatttacctgtggaaattcaaagcaagcctgtctgctcagaagayaaggagtataaaatggcatgcttccctgggaaggctggaaggccactgctaaaaagcttcccagggacattctttaccttgtgacttccattgctcagat

SEQ ID NO: 280654 - DNA, 201 bp, Homo sapiens
ccaggcactatagcaagataattaagacatggtccagtcttcaaggggattacaatcccatggctaaaaaatcacctatataaagataatacaaagagacratgatacttttttttttttaaaaagaagacagatgtttcctgcgaatcaagaggagaaatgctttctatttacctgtggaaattcaaagcaagcctgtct

SEQ ID NO: 280655 - DNA, 201 bp, Homo sapiens
aacaaaactgctgatctggaggtcttatgttataaattcccacatcataccttcaactatatatatgtcctgaaactagcatattttgagaataaaatggkaaatgacatttaaaggacacctatggttaatcctacagtaaatgagataatttattttgaaatgaatgatcaactctacgctccaaattttcacgtaaaa

SEQ ID NO: 280656 - DNA, 201 bp, Homo sapiens
agcgagtgaatgactaagaagccaaacaaacgacatggtgaggcaacccaggaattaggaacagtagaaaactgccaccacaccaggagctggaggcacayggaggaggaggtcccatcagaacccagaaggcatcagcaggtgctggagccatggaggagactcagactctcacctcaagacagagagagcacaggagac

SEQ ID NO: 280657 - DNA, 201 bp, Homo sapiens
gaatcaaaagatcacttagaaaaagtaacatgttagaaaacatcatgcttagaattaaatgtctaaagtataccagtatagatgatataatttaaaacaaytgatactatcagctgtcataagaaccaaatacttggttgacctgtgggtggctgactcatgggcaatgaaataaattttgttttatacgtataactttat

SEQ ID NO: 280658 - DNA, 201 bp, Homo sapiens
aaagatcacttagaaaaagtaacatgttagaaaacatcatgcttagaattaaatgtctaaagtataccagtatagatgatataatttaaaacaattgataytatcagctgtcataagaaccaaatacttggttgacctgtgggtggctgactcatgggcaatgaaataaattttgttttatacgtataactttatatatat

SEQ ID NO: 280659 - DNA, 201 bp, Homo sapiens
atataaaaagtttgcttatatataatatatatacacatatcatatataaatatattgtttataatatgtaaacaatatatacataaataatatataaaaastatatattatatatgtaaacaatatatttttaaaacccaaactcatgggtttatagttttttcatagtgaaaacaaacaaatatatagtttgcttatatc

SEQ ID NO: 280660 - DNA, 201 bp, Homo sapiens
ggaaaaactataaacccatgagctggggttttgtctttttttttttgacttaggttttctattctcaaaggcattaatcagcaccctttttctcacccttygttatcaacatataagcaggctagaaagacagtattttattccaatgtgaaacaaaactgctgatctggaggtcttatgttataaattcccacatcatac

SEQ ID NO: 280661 - DNA, 201 bp, Homo sapiens
gggttttgtctttttttttttgacttaggttttctattctcaaaggcattaatcagcaccctttttctcaccctttgttatcaacatataagcaggctagraagacagtattttattccaatgtgaaacaaaactgctgatctggaggtcttatgttataaattcccacatcataccttcaactatatatatgtcctgaaa

SEQ ID NO: 280662 - DNA, 201 bp, Homo sapiens
ttgacttaggttttctattctcaaaggcattaatcagcaccctttttctcaccctttgttatcaacatataagcaggctagaaagacagtattttattccratgtgaaacaaaactgctgatctggaggtcttatgttataaattcccacatcataccttcaactatatatatgtcctgaaactagcatattttgagaata

SEQ ID NO: 280663 - DNA, 201 bp, Homo sapiens
cttttctgaggctgcacaataagtaagtagtgaagcatttccaaaaacatattctgaaaaatgcagatctccaaagaaaaaagtttccatagtcatttacrtttggaaaccattgcccctctgagatatctgtggtatacatcagcatattaaagtctcacatgaatgcttcagtaaagaatcctgatcagctttggttag

SEQ ID NO: 280664 - DNA, 201 bp, Homo sapiens
tcccagaaccgttattagagttgtcaatctgatgtctcgtcatccctgaatactttagtgtgtactacctatgagcaaagacattcttctgtgcaaccatmaaaataaggaaattaacactgatatttgatggtagtctaatctttagaacacatttgagtttttctacttgttcagtaatgtaccttatagcaacagaag

SEQ ID NO: 280665 - DNA, 201 bp, Homo sapiens
atgtaatatcagtatattccttccattggtgctggtaaacggagaactgatgaaacccatttctaaggactttggtgtttagctatttttaaaaaaaaaaytttaaagcccctgtgctaagaaagaggaccagaggagttgattgctaagctccttttcaacaggaacatttgtgctcctccagctcattcttgggctggt

SEQ ID NO: 280666 - DNA, 201 bp, Homo sapiens
aagttttccaggtacatagcgtatgcttcgtgttgacaaaggtaactaggcattattccaacttccaggctattaatgctaaatgcagttcttgtttaacrtttttctttccttgatgttttgggattccctactcccaaaagtaaatgctttactaacattagcttagttctctgcacccattaagtatcaactgctcca

SEQ ID NO: 280667 - DNA, 201 bp, Homo sapiens
acatcaagaccagaagctggagctatggtcaggtgagccacttaaaatttgttattgtcaaggacatttttacttcatattttttgtcacatgtatccctrcaggatcccatatatcgatattagacaagcacaatttcctgctttttaggatctgagactccaaggcagagagcataggagtagggactcataaagacaa

SEQ ID NO: 280668 - DNA, 201 bp, Homo sapiens
tacttcatattttttgtcacatgtatccctacaggatcccatatatcgatattagacaagcacaatttcctgctttttaggatctgagactccaaggcagwgagcataggagtagggactcataaagacaactgcgtaatttatcagctgaaaccacatatctctgggtattacagtgttacagaaatgagagattccatg

SEQ ID NO: 280669 - DNA, 201 bp, Homo sapiens
tgcataggtgatcttatgagattctgatggagctgaaaaattcctgttacatagtgatgtcatagctatcataatagaatagtgagattacttatttttttaaatgtactgtagcctaagtttatagtgtttataaagtctacagtagcatgcagtaatgacctaggccttcgcattcactcaccactcacccagggctac

SEQ ID NO: 280670 - DNA, 201 bp, Homo sapiens
tcctgctttttaggatctgagactccaaggcagagagcataggagtagggactcataaagacaactgcgtaatttatcagctgaaaccacatatctctggktattacagtgttacagaaatgagagattccatgaataatgtggcattctattgagaaatgctttggccacttagaacagtgaaatctcattagttcaacc

SEQ ID NO: 280671 - DNA, 201 bp, Homo sapiens
aggccttcgcattcactcaccactcacccagggctacttctggtcctgcacgttccattcatggtaagtgtcctatgcaggtgtaccattttttacttttyatattgtatttttactgtactttttctatgtttatatataaatgtttctatgtttatatataaatacttaccattgtgttacaattgcctgcagtgctgt

SEQ ID NO: 280672 - DNA, 201 bp, Homo sapiens
attcaggataggagaggagatgatcagaagagagaggatgagaaccggggttatggctgcagttgtagacatggacaggagtgacagggtttgagaaatayttaggaggcaaaatctgcaggacttgtgttggggagtctgtgaggggtggaagggaggagggtcaaggtcgacttccaggtggctggcttatgtgactat

SEQ ID NO: 280673 - DNA, 201 bp, Homo sapiens
tatagcaaagggaaaggggaagtgcagtttatccagcaagccagacacttgcccaggtgttgtggactggtgtcattgtgttactgtcacactagatgatwtgatatcaaatagtgaaatcagggaggtatccagtaccatccaagtttgggaaaagaagttcacagaacagaagggcatcttcagtcaggtggtagagtt

SEQ ID NO: 280674 - DNA, 201 bp, Homo sapiens
atatttaattgttctaaaagcaggttttctggcactatatatcaagttttctccaagtcactaagggacgaaatttgctaagcgactaaaccttggaaagmacactcatttttaaaatgccatcttcatgcagttcacccagtggccactagtggcctctaagaggccttgtatccgcggttaccaatctgcggatgatga

SEQ ID NO: 280675 - DNA, 201 bp, Homo sapiens
aaagagtgctttcagatgtacttctctagttttttgctattccccaaagtgcatccttacataattagctttaaaattcctttcatcccttatttttttttaaatctatcattaacacgtagatttttatctctaagtttatttttactaaacttgcatctttttaaatacgacgtattctgaatctaaatcagtatttag

SEQ ID NO: 280676 - DNA, 201 bp, Homo sapiens
tctgagaaggggcagactgcctcctcaagtgggtccctgacccctgacccccgagcagcctaactgggaggcaccccccagcaggggaacactgacacctyacacagcagggtattccaacagacctgcagctgagggtcctgtctgttagaaggaaaactaacaaacagaaaggacatccacaccaaaaacccatctgta

SEQ ID NO: 280677 - DNA, 201 bp, Homo sapiens
gtggaaaatgggaacagactatgtgttctaattattgctgaaccctgaccattttcccctccatgtccacaaccgagcacgttctctctccagcctcctgyactctctgtggctccatcgcactctcgtcaccaagattcacccctgcccacacccacacccttcatggggaggccggggatgggaaccaggaggtgggct

SEQ ID NO: 280678 - DNA, 201 bp, Homo sapiens
tggaaaatgggaacagactatgtgttctaattattgctgaaccctgaccattttcccctccatgtccacaaccgagcacgttctctctccagcctcctgcrctctctgtggctccatcgcactctcgtcaccaagattcacccctgcccacacccacacccttcatggggaggccggggatgggaaccaggaggtgggctt

SEQ ID NO: 280679 - DNA, 201 bp, Homo sapiens
taaagttagttgattattttcttcaacccttgtttttcttgttcatagagtttcttaatgtcacgagcgttcacctgttcaaggagagatgggacactaamaaggtggaccaccacactgacaagtatgaaaacaacaagctgattgtccgcagagggcagtctttctatgtgcagattgacttcagtcgtccatatgacc

SEQ ID NO: 280680 - DNA, 201 bp, Homo sapiens
attctctttttaaaagtggcatctctcatttttaaaagagaaaatcctagatagtgactcctattatcatcaagtaatatatatcaaggccccaaggctamcttgtcacattttactctggcatagaaatctaattccttctctataaagtcaaaaagagagaggtgagttatagatgttttctaatttagtttagggtca

SEQ ID NO: 280681 - DNA, 201 bp, Homo sapiens
tcttaggtccgtggcactcaggtagttggttctgacatgactgtgacaattcagtttaccaatcctttaaaagaaaccctgcgaaatgtctgggtacaccyggatggtcctggagtaacaagaccaatgaagaagatgttccggtaaaccttgggttggggagaccgggcaggcagtgcagggctgtgggaagctttctct

SEQ ID NO: 280682 - DNA, 201 bp, Homo sapiens
aaggctaccttgtcacattttactctggcatagaaatctaattccttctctataaagtcaaaaagagagaggtgagttatagatgttttctaatttagttyagggtcaacttataatcctcgtcctcaactgatggtttagcgataacttaaaaggtgatgctgcaaatgattctttgctggatttcagaaaataaagaag

SEQ ID NO: 280683 - DNA, 201 bp, Homo sapiens
ataaatatgcgtatttatttattattgagaattttataaatatatccacttaatttttatcccagttatggaaggtattatagcaggtggtctcatattcrtttttccacatttctcaatgcccctgagcaattagagatcagaacataatgaacaatctttccctctccagtttcccctctggtttttaatccacccaac

SEQ ID NO: 280684 - DNA, 201 bp, Homo sapiens
caatctttccctctccagtttcccctctggtttttaatccacccaacatccaatctgtagaggaaagcatatgagaacagaattattctcttcagtgtcaygcatcatttttcagaggcatttgcctctctagacccagacgatattacaattaattcagtgaatatttttaaaaatacatttatttcagtatgtcttcat

SEQ ID NO: 280685 - DNA, 201 bp, Homo sapiens
gtacagactcaaagcaattctctaatgtattcaaagtaaacaataccataaggtcaccttattcaccagggattttcatttctgttcattgaagatttttwaaaaattgacagatatattggaagccagtgggaaaatagaatttatctaacagaaagtatcttcatagccacttttgagaaattgcataaatccattcca

SEQ ID NO: 280686 - DNA, 201 bp, Homo sapiens
ttggaggctggagggaggtcatttaaaaaaatgattacaaaacctatttgttttagctcaaagtctcaacagtctaagacttggtgatctaaatttaaaamaaaaaagtcatgagttttgttttgttttattttcccatagtatcaaacaggataagattattttcttagccatttaaatataacccagggaagaaggaat

SEQ ID NO: 280687 - DNA, 201 bp, Homo sapiens
tcaacagtctaagacttggtgatctaaatttaaaaaaaaaaagtcatgagttttgttttgttttattttcccatagtatcaaacaggataagattattttyttagccatttaaatataacccagggaagaaggaatacatatttcttgggagcaatgaaaatcaaaagtatagtcccctagaagcactggtctctgaagtt

SEQ ID NO: 280688 - DNA, 201 bp, Homo sapiens
cttataaagaaaggtattttcaaagtgatgcaaagaatactgcaaggggtgtgcccaattcaaagaaatagcttctttttttttttttttaagtgttagcstagggtactgctaattagaaaagagtgttatcatttcatcaaaggaagggccactgagcttttacatagaaagattttatcagctgcaagttgattgtct

SEQ ID NO: 280689 - DNA, 201 bp, Homo sapiens
taattgttctaaaagcaggttttctggcactatatatcaagttttctccaagtcactaagggacgaaatttgctaagcgactaaaccttggaaagaacackcatttttaaaatgccatcttcatgcagttcacccagtggccactagtggcctctaagaggccttgtatccgcggttaccaatctgcggatgatgactttg

SEQ ID NO: 280690 - DNA, 201 bp, Homo sapiens
gcttctttttttttttttttaagtgttagcctagggtactgctaattagaaaagagtgttatcatttcatcaaaggaagggccactgagcttttacatagraagattttatcagctgcaagttgattgtctagacacaaagtagcaaatggcatttctttaagatgttcagtcattcaaactatttcagtttggtatcttt

SEQ ID NO: 280691 - DNA, 201 bp, Homo sapiens
acacgtgcatggaggttccctgtatggagccatgttttccatccagattgggccaaggatagctgatgggcagtcatggatgttgatggatgggttttccmagggtagctggattgtggtctcgtaaccatgccgactcctggggctgagaagggctatttagtgaaatgaaatactactctgtcacaacttcctcactca

SEQ ID NO: 280692 - DNA, 201 bp, Homo sapiens
tcagaagagagaggatgagaaccggggttatggctgcagttgtagacatggacaggagtgacagggtttgagaaatatttaggaggcaaaatctgcaggayttgtgttggggagtctgtgaggggtggaagggaggagggtcaaggtcgacttccaggtggctggcttatgtgactatgatgacagatgctagcacttcca

SEQ ID NO: 280693 - DNA, 201 bp, Homo sapiens
tggacaggagtgacagggtttgagaaatatttaggaggcaaaatctgcaggacttgtgttggggagtctgtgaggggtggaagggaggagggtcaaggtcracttccaggtggctggcttatgtgactatgatgacagatgctagcacttccaaatgagataaagaatgcctggaattccagagggaaaaaatcgagtgtg

SEQ ID NO: 280694 - DNA, 201 bp, Homo sapiens
accagaagctggagctatggtcaggtgagccacttaaaatttgttattgtcaaggacatttttacttcatattttttgtcacatgtatccctacaggatcycatatatcgatattagacaagcacaatttcctgctttttaggatctgagactccaaggcagagagcataggagtagggactcataaagacaactgcgtaa

SEQ ID NO: 280695 - DNA, 201 bp, Homo sapiens
acatttttacttcatattttttgtcacatgtatccctacaggatcccatatatcgatattagacaagcacaatttcctgctttttaggatctgagactccwaggcagagagcataggagtagggactcataaagacaactgcgtaatttatcagctgaaaccacatatctctgggtattacagtgttacagaaatgagaga

SEQ ID NO: 280696 - DNA, 201 bp, Homo sapiens
tgaacccaggaggcagaggttgcagtgagctgagactatgccactgcactccagcctgggtggcaagagtgaaagtccttctcaaaaaaaaaaaaaaaaaatgagtgccccctcagccagcccctactgtgtgctaagcataaagctttcattatattataaaatctattgtctttttatttcccaaactaaactgcaaag

SEQ ID NO: 280697 - DNA, 201 bp, Homo sapiens
ttgaacccaggaggcagaggttgcagtgagctgagactatgccactgcactccagcctgggtggcaagagtgaaagtccttctcaaaaaaaaaaaaaaaaaatgagtgccccctcagccagcccctactgtgtgctaagcataaagctttcattatattataaaatctattgtctttttatttcccaaactaaactgcaaa

SEQ ID NO: 280698 - DNA, 201 bp, Homo sapiens
cttgaacccaggaggcagaggttgcagtgagctgagactatgccactgcactccagcctgggtggcaagagtgaaagtccttctcaaaaaaaaaaaaaaaaaatgagtgccccctcagccagcccctactgtgtgctaagcataaagctttcattatattataaaatctattgtctttttatttcccaaactaaactgcaa

SEQ ID NO: 280699 - DNA, 201 bp, Homo sapiens
ttagcgataacttaaaaggtgatgctgcaaatgattctttgctggatttcagaaaataaagaagctattccagcaaaaaaaaaagtttctatttttacctstattctgtcagggatcacagtatatgtagttttgaagatgaatgttttagagtcagaaagacctggatttatatccaacttccgccagattcctaactct

SEQ ID NO: 280700 - DNA, 201 bp, Homo sapiens
tgcaaatgattctttgctggatttcagaaaataaagaagctattccagcaaaaaaaaaagtttctatttttacctgtattctgtcagggatcacagtatakgtagttttgaagatgaatgttttagagtcagaaagacctggatttatatccaacttccgccagattcctaactctgtaggctttttatttatcttctaaa

SEQ ID NO: 280701 - DNA, 201 bp, Homo sapiens
agacagaaaggacccaagttctccccatgcctacaatttcactatcccagtgtaattccttccggctcacaacaagataaaatagtgaacaccttacatcygttcgtgtctttggcataaaaaggttatccaatctatgcctgaaaacaggctttggcggtaaatcaagaaaaggcagaaacacacagtggggaagtcaca

SEQ ID NO: 280702 - DNA, 201 bp, Homo sapiens
aggagggtcaaggtcgacttccaggtggctggcttatgtgactatgatgacagatgctagcacttccaaatgagataaagaatgcctggaattccagaggraaaaaatcgagtgtggaaaatgctaatggaggtagtagcttcattgataactcattggcactgttgctgtgcagaggtgctgtatgcctcccatttaatt

SEQ ID NO: 280703 - DNA, 201 bp, Homo sapiens
atttcatcaaaggaagggccactgagcttttacatagaaagattttatcagctgcaagttgattgtctagacacaaagtagcaaatggcatttctttaagrtgttcagtcattcaaactatttcagtttggtatctttaacaatggagcaaatgaatgatattttaccaattttccataaatgaatgcatgtcctgtgatt

SEQ ID NO: 280704 - DNA, 201 bp, Homo sapiens
tagcgacacaagcgggggcgaatgtcatttctcaggagttttggctgggatggctggaactgtgcatcattgcgctgggcatccagcagggagttttcatrgaatctggtggtcacagggtactttcttggctccggatgccttgctttgacttccatatgggatctccctgtgttccttacccactgctccagtacccgt

SEQ ID NO: 280705 - DNA, 201 bp, Homo sapiens
tgttccttacccactgctccagtacccgtgttatcctgcctacctggctttgtgaacagcttccctgactccggagaattacatgcccagtgctcaggctyccccgcctgcatttctaatgtcctgccaagctacaagctagttggcaccccctgttcttggattcctgcctgactccctggtttcaagccatcccctcct

SEQ ID NO: 280706 - DNA, 201 bp, Homo sapiens
taggagtcctactcacacttgtgctgctgcaagtgagaaacttgaccgtcaccttcaatttcaatgttggcaacaacaacaaaagcagccacacacaacayctgtgaatgcccagaccttaactgcagtttgggatggagggtgagagcaggaaggatgcactctgtggtcaccacgcttggagcacatcagaatcacctg

SEQ ID NO: 280707 - DNA, 201 bp, Homo sapiens
gaggcagagcttgcagtgagccaagattgcaccactgcactccagcctgggcaacagtgcaagactccatctcaaaacaaaacaaaataaaacaaacaaamaaaaaaacagtaggtaagctacatttggcccgcagactatagttttctaaccattgctctaaaggatgaatggagattacattgatcattaacaactcag

SEQ ID NO: 280708 - DNA, 201 bp, Homo sapiens
caatgccgcagcctaccttcggtatttctcactagaggatggctctcgcagccttctccctatcattaaccctttttcgctcttctccctcccttcccccstcagctcaccaatgactgtaaatatatttatctatacttatggatacccattcacaccttatgcatccaaacactcctgtctccttctcagaccagacac

SEQ ID NO: 280709 - DNA, 201 bp, Homo sapiens
tgggttcaagcaatcctcctgcctcagcctcccgagtagctgggattacaggcacatgccaccacgccaggcaaatttttgtatttttagtagagacgggrtttcactatgttggccaggctgatctcaaactcctgacctcaggtgatccacccacctcggcctgccaaagtgctggaattataggcgtcagccaccgca

SEQ ID NO: 280710 - DNA, 201 bp, Homo sapiens
cttttctccagcatgttgttagtgctccacatgtctctggaaccatctctctactctggtggcctctataatggggactcttcacctcttgtgggtgtgcmtggtttttgaaaatagccaagtctccaggagtcatgactgggtaatccaggggatcaagggggaaccttcactgggcccagaaacaaagtcccccttcat

SEQ ID NO: 280711 - DNA, 201 bp, Homo sapiens
attgctacaaaggaatatgctttttctaaataggaactatattaaaaagttcaaaataaatatttcagttttggttaacttttcttccccaccctgtcggyacctagtaagttctgtttcgttagtcagcagaaaatggttaagattaaaactgttcaatgcactgattcaaatatctttgggtggccttgaagctgctct

SEQ ID NO: 280712 - DNA, 201 bp, Homo sapiens
tccaaatgagataaagaatgcctggaattccagagggaaaaaatcgagtgtggaaaatgctaatggaggtagtagcttcattgataactcattggcactgktgctgtgcagaggtgctgtatgcctcccatttaattgttcaagcagccctctgggcattggactatggccatctccatttttcccatgagataatggttg

SEQ ID NO: 280713 - DNA, 201 bp, Homo sapiens
aaaggattaagtaatttacccaggtcacacctggaaagtgctgggacctcaatttggacccaagcagcctcttctacttacaatgcttactacctccaccragggagcctccaccaaggagatggtggaggtatgaatatgcttctgtttgaattgatgagtgtgaattacttgagggactttcaggtaaacctgtccaat

SEQ ID NO: 280714 - DNA, 201 bp, Homo sapiens
ccttacccactgctccagtacccgtgttatcctgcctacctggctttgtgaacagcttccctgactccggagaattacatgcccagtgctcaggcttcccygcctgcatttctaatgtcctgccaagctacaagctagttggcaccccctgttcttggattcctgcctgactccctggtttcaagccatcccctcctcagt

SEQ ID NO: 280715 - DNA, 201 bp, Homo sapiens
taaataggaactatattaaaaagttcaaaataaatatttcagttttggttaacttttcttccccaccctgtcggtacctagtaagttctgtttcgttagtsagcagaaaatggttaagattaaaactgttcaatgcactgattcaaatatctttgggtggccttgaagctgctcttagcagagggaaagagacatccagcc

SEQ ID NO: 280716 - DNA, 201 bp, Homo sapiens
cttctacttacaatgcttactacctccaccaagggagcctccaccaaggagatggtggaggtatgaatatgcttctgtttgaattgatgagtgtgaattasttgagggactttcaggtaaacctgtccaatagataatatgagtctgaagcttcgggaggaggtttgggttggacaggagataatttggatatcatacaca

SEQ ID NO: 280717 - DNA, 201 bp, Homo sapiens
ctgcctactgcctgatgcccttgtcttgggtccccaatttctagcctttagcctggtgattctatttatggcccaaatatgacaatctatagatagctaamaaggggaaaagtcatcaaggtgggcagcaaggaggtctggaaaagtgtcccaagcccagtcagggcactcttcgccagcttgcctttgggtaggcaccct

SEQ ID NO: 280718 - DNA, 201 bp, Homo sapiens
ttatggcccaaatatgacaatctatagatagctaacaaggggaaaagtcatcaaggtgggcagcaaggaggtctggaaaagtgtcccaagcccagtcaggkcactcttcgccagcttgcctttgggtaggcaccctggagcacagtcacttgattgtatcttctgccactcaaagaggctattggtgtgtatcctttggcc

SEQ ID NO: 280719 - DNA, 201 bp, Homo sapiens
ggtgcctgcttgattgctgattttatgggagagcagaatgaagcatggtgctttctgaataaaggttggtatgactgagttatgaagtacaggataggagsggaggacatgcgtatttcatttttggtgggttatgtttgaagtgctagtggagttagtctaagtggagattaccactgggccatctaggaaattggtttt

SEQ ID NO: 280720 - DNA, 201 bp, Homo sapiens
ctgtttccttcagttctgctctgatcttagttatttcttgccttctgctagcttttgaatgtgtttgctcttgcttctctagttcttttaattgcgatgtyagggtgtccattttagatctttcctgctttcccttgtgggcatttagtgctataaatttctctctacacactgctttgaatgtgtcccagagattctggt

SEQ ID NO: 280721 - DNA, 201 bp, Homo sapiens
gaagcagttcatctcactgctttttttcacctcagctctgcaatgggctcaagaaagtttatgattgtagattggctggccttttcacttgttaggtgatrctctcttttggaatctctgtgttttgttttcaatgcattgtctaccctttctcttcacttttactctgttgctgttgtgtatcgttttcttagaaatttg

SEQ ID NO: 280722 - DNA, 201 bp, Homo sapiens
caggctgtaagaccatttctgtggacccaggttccaggccagcacccatatgctgagcatctaggtcagctcccatggcttcagggcaggtcctgtgattmtaggtaggcttcagaccaaccactgtagacctaggcttccacatccgctccagcaccagctgagctctgcctacctgctgacccagataccaggccagcc

SEQ ID NO: 280723 - DNA, 201 bp, Homo sapiens
ttgaacatggtttgaacagttggccacatttgattggccaaaactcagtcattggcacaagggtggatacagtctgtttgtctccagctaggttagtttastacatatggagaaacctttaggctgaacttaaaatatgtaaaagaggtagctttaggcttaacttgatttaacaatatcaaacatacataaaccaaaaaa

SEQ ID NO: 280724 - DNA, 201 bp, Homo sapiens
agctgaattaaatttaaaagagtttgagcaaagaacaattcgtgaatcaggcagcctcctgagccagagtaggctcagaggctccagtgcagctgcatggyagaagatttatggacagaaaaaggaaagtggtgcacagaaaatggaagtgaggtccagaaacaactggattggttatagctcagcatttgacttatttga

SEQ ID NO: 280725 - DNA, 201 bp, Homo sapiens
tcccggcgtttcgcccttccccacagacctctgccccggacccatttccgaggcgcgccgcatgcgccgcgcaacccaggccacgagcacgggcgcgtgckcaagtcagcgcgcgcccgctccgacgcgaggaggccccgccctccagccccgccccgctcgctggcctgccctcctcttgctaccctcccggcgcagaga

SEQ ID NO: 280726 - DNA, 201 bp, Homo sapiens
aaacagtgtgagagagctaatgtgagtgagctgctgatgagagagctgctgagtaaaactacctttcacctgcatatgcccctgagtgttctttcagctayctgctcatccacttattcggaccccagcatgagctggaacctgaccccgagcaggacactcatagtccttgacctactttctaggaaataatatataggc

SEQ ID NO: 280727 - DNA, 201 bp, Homo sapiens
atttctgctagatttaagatttccaaatatcagtcatcatttcatttgcaagttacacagagaaaacaaaccatactttaaaataaatgtcttgtatctarcttttatgagtactgactagtaacaaaggaggttgggcattgtggaaaatatggataattgtaactcattgtaaagaacatggctgtgctttggtcaagg

SEQ ID NO: 280728 - DNA, 201 bp, Homo sapiens
ggacattagtgtattttggctgcccagtctctgaacctcccttgtatgtgtggtgaatgcctcactgtgtttgtgttaggagacagggtctgttacagatkaatgatttctttatttacctatgtataactagttctttttatgaaatgtttttgtttttattgtgtcctgagtgtctagaaaggatcaaacaacaaataa

SEQ ID NO: 280729 - DNA, 201 bp, Homo sapiens
gcctgccctcctcttgctaccctcccggcgcagagaaccccggctgctcagcgcgctccgcggtcatggagatccccgggagcctgtgcaagaaagtcaarctgagcaataacgcgcagaactgggtaagctggggacgaaggcgagacggcgaggagcggaggggctgtgggagcagctcgttccggagccgccgcctct

SEQ ID NO: 280730 - DNA, 201 bp, Homo sapiens
cccattgtatggataataacacaactttttttttttttctttcccgagacggagtctcgctctgtcgcctggctggagtgcagtggcacaatcttggctcrctgcaacctccgcatccctggttcaagctgttctcctgcctcaaccttgcgagtagctgggattataggcacgtgtcaccacgcccagctaatttttgcg

SEQ ID NO: 280731 - DNA, 201 bp, Homo sapiens; identical to SEQ ID NO: 57123

SEQ ID NO: 280732 - DNA, 201 bp, Homo sapiens
tgaagaaaaaaatcccattgtatggataataacacaactttttttttttttctttcccgagacggagtctcgctctgtcgcctggctggagtgcagtggcrcaatcttggctcactgcaacctccgcatccctggttcaagctgttctcctgcctcaaccttgcgagtagctgggattataggcacgtgtcaccacgccca

SEQ ID NO: 280733 - DNA, 201 bp, Homo sapiens
ttcacttccccttccaccatgattgtaagtttcctgaggcctccccagctgtgtggaactgtgagtcaattaaacctcttttctttataaattacctggtytcgggcatttcttcatagcaacatggtaatacaggtgccttaatttttgttgtgtgaactgaagctagactttattcatgtgaaggttagagcaagaatt

SEQ ID NO: 280734 - DNA, 201 bp, Homo sapiens
taaactgtactgctatgtagtaagagattaagttgttgatacggtttggctgtgtcctcccaaatctcatcttgaattgtagttcctataatccccacctrtcatggaaaggacccagtgggaggtaattgaatcatgggggtggcttcccccatgctattctcgtgacagtaagttctcacaaggtgtgatggttttata

SEQ ID NO: 280735 - DNA, 201 bp, Homo sapiens
cccggcgtttcgcccttccccacagacctctgccccggacccatttccgaggcgcgccgcatgcgccgcgcaacccaggccacgagcacgggcgcgtgcgyaagtcagcgcgcgcccgctccgacgcgaggaggccccgccctccagccccgccccgctcgctggcctgccctcctcttgctaccctcccggcgcagagaa

SEQ ID NO: 280736 - DNA, 201 bp, Homo sapiens
tggggacgaaggcgagacggcgaggagcggaggggctgtgggagcagctcgttccggagccgccgcctctctcccgcctcctccgcatccatccttccagsagcgcggaggtgggttccggggctgcggcgcctcccggctggggccgtgtgtggttgcgaggcagaggggcgcggcgcagggtggggatctcgccctagc

SEQ ID NO: 280737 - DNA, 201 bp, Homo sapiens
tgataaaacctgcttttaaaaaagccgtgaagtataacacagtcattgaatttaagccaatggccaaattatttcaggctcaacttttcaacttaataaamctatagtgaatacttgacagatgtcaaactccggagaaaatctaactttcttaacatgtgccctaccatggcttctttgctcagaattcgttgttcttag

SEQ ID NO: 280738 - DNA, 201 bp, Homo sapiens
tccaaagtgctggaatttcaggcgtgagccacctcctctggccgtaaagtttctcttggttaaggagagtggttatcaaagtattagatcatcactgttaycattttctgggaacattttagaaatacagattcatgggccccacagcaaactgactgaatttgaaactctgcagatgaagcagtctcattttagcaagct

SEQ ID NO: 280739 - DNA, 201 bp, Homo sapiens
tcactgcaacctctgcctcctgggctcaagcgattcctggcccaagcaatcctcatgcctcagcctcctgtagctgggactacaggaatgcgccaccacayctggctaattttttgtatttttagtagagactgggtttcaccatgttggccaggctggtcttgagctcctgaggtcaggtgatctgcctgctttgttttg

SEQ ID NO: 280740 - DNA, 201 bp, Homo sapiens
tactgttatcatcctctattacaattagcatttgcattttatagatgacaaaactgaggcacagagatgtcatggagcttgttagtgctggacccatttttaaacctgttgcatttgagggacagccttagtagagatagtctatagaggaaatatgagccatgtatataattcaacatttactagataccacattaaaaa

SEQ ID NO: 280741 - DNA, 201 bp, Homo sapiens
tgtagttgggattaagaaatgggagaggcatgggcatttcattgaccttagaaagatttattatttcttgaatacttttaaaatacttgagcagatcaaasacaacactatctgggttggaaagaatgtttattaaagaaataaactgctcatacctgtgtccagctagtgtgaaatgcttgttctatgtaagtgcaataa

SEQ ID NO: 280742 - DNA, 201 bp, Homo sapiens
ttttgtatactgaatctatcttttttttaacttgaaatttgccatatcagcgttagaaagttggccctctgtatctggagttctatatctgtgggttccayatttgtggatacaaacaaccatggattgagaatattcaggaaaattaatacaacaatgaaaaagaatacaattttaaaaagaatacaattatatacttat

SEQ ID NO: 280743 - DNA, 201 bp, Homo sapiens
tcgttttgattgtagttttgtttgagttttttgtatactgaatctatcttttttttaacttgaaatttgccatatcagcgttagaaagttggccctctgtrtctggagttctatatctgtgggttccacatttgtggatacaaacaaccatggattgagaatattcaggaaaattaatacaacaatgaaaaagaatacaat

SEQ ID NO: 280744 - DNA, 201 bp, Homo sapiens
ctttgacacagaggtgggtaaatgatgtgcttaccttggtgcacccatactctttctatacctgcaaattcaaggttctgtatcagggaacagcattcacygtagatttggggaggcttttttaagccttaaaattggaagcatcctgcagttgtgctcctaattaattcccacccactgcagagatggtttggccctaag

SEQ ID NO: 280745 - DNA, 201 bp, Homo sapiens
ttttatgacactagtttaggcagtgatttttttttttttttggatatgactccaaaagtacaagcaacaaacatgaaaatagacaaatgggagtacatcarataaaaattgtctccacagcaaagggtgcaatcaacagagtgaagagacaacctacagaatgggagaatatatttgcaaaccatacatctgataaggggt

SEQ ID NO: 280746 - DNA, 201 bp, Homo sapiens
ttaaaaatttacatgtaagatcagaaagtctaaaactgctagaggaaagtaggaaaaaagttttatgacactagtttaggcagtgatttttttttttttttggatatgactccaaaagtacaagcaacaaacatgaaaatagacaaatgggagtacatcagataaaaattgtctccacagcaaagggtgcaatcaacagag

SEQ ID NO: 280747 - DNA, 201 bp, Homo sapiens
taccaggtaggtaacttgggactttccttcctaatttatttattttatccaaacattgtagctgaatatatagaaataatgtaaatcgatactgctctgaygtttttctttgtatttactgatcagatatcattatttgcaggccactgagacatcccaggaggttttatgcttcatcatctctgccttctaggtttcttt

SEQ ID NO: 280748 - DNA, 201 bp, Homo sapiens
tcatggggcgttccctatgatcagttgacagaggaagagaaaatcagggcctggttcatagatggttctacatgatatgtaggcaccacccgaaagtggayagctgcagcactacagccccttcctaggacatccctgaaggacagcaatgaagggaaatcttcccaatgggcggaacttcgagcagcgcacctggctgtg

SEQ ID NO: 280749 - DNA, 201 bp, Homo sapiens
ggtgaccatgagttgtgagtaagtaccaaagttgtcattctgttctctgtatttggaagtggggaatagggatgcatttcttgtattggtccgttttcacrctgctgataaagacatacttgagactgggaaggaaaacaggtttaattggacttaaagttccacatggctggggaagccccagaatcatggtgggaggtg

SEQ ID NO: 280750 - DNA, 201 bp, Homo sapiens
atattatttcttacaatttcatgtgactctacaatggtctcaataaaaatttcaaaactaatttttttctggttctaaaaattggtaatattcaatagtgkttttttgttcagtgacaaatttgaaatgagatttatattcacaagtactatgttcagtatttttttttcattaagtttgtctaatatgaacagaaggaac

SEQ ID NO: 280751 - DNA, 201 bp, Homo sapiens
gagactgtcacagaaactcccaggagctctctcagagatagattttggcattcagtttctggccctgaaaacaaaaagatacagtgggaaggaaaatggtrgttattctgggttcttctgtatttgaacctgggaatgctttggcaattaggtcaggttccatctgctgtagtagcattagttccatgggcaaggctgacc

SEQ ID NO: 280752 - DNA, 201 bp, Homo sapiens
attaatttagcctttcagattgaaacttctttaaaagttttcaatttatgctagttaaattagatttagtgttttcttgaaaaaaaaaaatctagttttarattagtggttgccaggagctggggagtagagggcagaggggcaatgcaggtatgactataaaagggcaacccgtgagatgggtgtggttttggaagtgtt

SEQ ID NO: 280753 - DNA, 201 bp, Homo sapiens
catttgaataaatatctttcaaaaaacaaagtagtagcacaaattgaccacagtattcagtaaagctaaattcccctttttgccacagtataaagtcactyattaaggtctatgaatggtgctatattgaaccaatacattttcctttacatgtacctatttatcctttcatatttcaccaaatatttactgagctcctag

SEQ ID NO: 280754 - DNA, 201 bp, Homo sapiens
ggtaaagaggtaggttagatttaacagattgcctttctgaagaaattaaaaatgctggattaaatgaaacattttcataaaagtattgtggatctgacaaratgatgataagaactgtgaggccaaaaccagtaagcgaatgctgaaaattcacataagctgagcgttgaagctgcttttgccctggtaaaactaacaaac

SEQ ID NO: 280755 - DNA, 201 bp, Homo sapiens
atgttatcaaaatcttgactttcggatatcttatacccagttttctttcacataagcagagcaaagtagtataatactgtttaaaaaggtaatcactgtgyactcacatgcctgctttgtcactgactttgaaatactggaagcttgaaagtttgtgactgacaagataaacagagaagcacacttactaagccaggggtc

SEQ ID NO: 280756 - DNA, 201 bp, Homo sapiens
cgaatgtttattttggcattggttaggtatcagaagaattttgtattgaagttgtgaggctaaaatccatttaaaaatattgttgggtgtgaattttgaaragggaagagttttatgaaatgcttctaatgaaaaagttattttgactcaaaaacaaaatatgaaaaaatttcccttcttgaaaagaaagtggttatagcc

SEQ ID NO: 280757 - DNA, 201 bp, Homo sapiens
tagaaaaagcagttctaaaatttgtatggaaccacaaaagaccccagataaccaaagcaatcttgagcaaagataacaaagcgggaggtattaacattacktaactttaaaacacactctgaagctatagtaatcaaaacagcatgatacagaaacaaacatataaaccatacaacagagcagaaagcccagatataaata

SEQ ID NO: 280758 - DNA, 201 bp, Homo sapiens
tatctaacttttatgagtactgactagtaacaaaggaggttgggcattgtggaaaatatggataattgtaactcattgtaaagaacatggctgtgctttgrtcaaggataggtcgaggcaaacgtccagaatgactcagcgagtttacagcgcaggtatataactccacttgttatcacagccatgtagccataacatgag

SEQ ID NO: 280759 - DNA, 201 bp, Homo sapiens
gaataagaccttgtccacaatgctcttgggtctcttacagtttgtactctataactgggagtgtgtttgtattagtccagtttcttgtttactttctcaaytgttgactacattcccctgttgttgactacattcccctgagtagaggttgataaaatgttccttaggttaatgtgtgtgttgtgtgtgtgtctgtatgca

SEQ ID NO: 280760 - DNA, 201 bp, Homo sapiens
atacatctaaatttgttgagatttcctaccgataatgattttataaaaagcatatgcatttattatccacttactatttctaagtacatagtcataaaagsaaagttacctaaaatgaaacttttattctaggtccagtggcattgcagagcacggatggttgcaggagccaacttttacattgttggacgagaccctgct

SEQ ID NO: 280761 - DNA, 201 bp, Homo sapiens
atattgttaagaataattttattgtgtatcttagctctgatgatatcattagctgtctttcccaatacaactgcgtagttaagcatgatgagaatggaaaytataatttatcattttcgagtcttagagaattttaagttgtatcatttatgtatactttaaaaaaagggagattaaaaataagtatttggactagaagtt

SEQ ID NO: 280762 - DNA, 201 bp, Homo sapiens
cacattgttggcacataagccaaagcctcatggggaaaaggagggctggagctgccttgtgaatatgaacaggtcctggagggtaatagctcctcctttcrgatgcagggaaaggaagtagtaaaattgtaagaaatttgaggtggtgtggagattggaaggcatgaatttgtatcgaactcgatgatcattaattcttca

SEQ ID NO: 280763 - DNA, 201 bp, Homo sapiens
tttgaagaccagaaagaagaaaaggttgatttacaaaggaaacattgttccaaaggacagagtggagagggcttagagggagctgcaagggtggttactasagagttgggagttaggagcagaaaagttaagtttggggagtgttagagaggagaagtggctgcagggggcttgcatttggcaaagaagtaaactagcctc

SEQ ID NO: 280764 - DNA, 201 bp, Homo sapiens
cagaaaatccagccatgattgttcagtcctgtaacttgatagtattatatttttccatttgaggtatacaaagttgttaacttttcttagatatttagagygcccacattttccttgtgataacatgatgatctccttatgggtggattctagagagggacctgtggaggatgtaagtttctaggacataaggacctttgg

SEQ ID NO: 280765 - DNA, 201 bp, Homo sapiens
cttatattatgtatttatgtgttcacttatttatatcaacactcctatcccatcttaatgcatgttagttttttgtcttatgaccctctgccacccacttytaagacccattcttaatttgttacatttgaataaatatctttcaaaaaacaaagtagtagcacaaattgaccacagtattcagtaaagctaaattcccct

SEQ ID NO: 280766 - DNA, 201 bp, Homo sapiens
cagtcttgtactttaccagtaattttgccacagaaaaatacctaacagaaaatccagccatgattgttcagtcctgtaacttgatagtattatatttttcmatttgaggtatacaaagttgttaacttttcttagatatttagagtgcccacattttccttgtgataacatgatgatctccttatgggtggattctagaga

SEQ ID NO: 280767 - DNA, 201 bp, Homo sapiens
cccaaacttcagtaactaacatttcttatattatgtatttatgtgttcacttatttatatcaacactcctatcccatcttaatgcatgttagttttttgtyttatgaccctctgccacccacttctaagacccattcttaatttgttacatttgaataaatatctttcaaaaaacaaagtagtagcacaaattgaccacag

SEQ ID NO: 280768 - DNA, 201 bp, Homo sapiens
ttgtgggtgtgtagtgaggtcttccttgatttgggaagcatatgagagaatgtaaacttgagagaaaagggactggatttagttttggacatgcttagttyttggcacctgtgatatatccaggtggacataggaagaatttggacatgtgtgtttaatttcaggacagaggtcagggttcaagcttcagtgttgatgtat

SEQ ID NO: 280769 - DNA, 201 bp, Homo sapiens
agaaacaatataaaataatacagcaatttaaaaatagtataaataacaaatatagtataacatctatttatataacatttacattgtactaggtattatargtaatctagagatgatttaaagtatataaaagaatgaacataggttatatgcaaatagtacaccattttatgtaagggacttgcacatcctcacattttg

SEQ ID NO: 280770 - DNA, 201 bp, Homo sapiens
tatttttcgtcctatcaaagaagaaattcccttttgcttctctgaattgcttgttgcctagttagcacttttaaaaagctggtctaatcgaatatgaaccktcaaaagatatacttgaagggccatctgctgaccccagctcttgtccatgtgagcaacttgtaatggtggctctgatggccatgtatgtggagtgagaaa

SEQ ID NO: 280771 - DNA, 201 bp, Homo sapiens
caggcgggtggattacgaggtcaggagatcaagaccatcctggctaacacggtgaaaccccgtctctactaaaaaaaaatacaaaaaaaaaattagccagrcgtggtggcaggcacctgtagtcccagctactcgggaggctgaggcaggagaatggcgtgaacctgggaggtggagcttgcagtgagctgatatcgtgcc

SEQ ID NO: 280772 - DNA, 201 bp, Homo sapiens
tctctttctctaaagccctgatggggtttgaccactcttgtaaagtatcagtaccagagaaaaagtaaaaagagcaaatgagacagttcctgaatgagtaytttccctaatgcatatgtagagcagtccaggtctccccatacaagtgcccttgatgtcctccagtggaagaaaaataggtcccagccatttgtgctcact

SEQ ID NO: 280773 - DNA, 201 bp, Homo sapiens
ctgccaccgcgcccggctatttttttttatttttagtagagatggggtttcactgtgttagccaggatggtctcgatctgaccttgtgatccacctgcctyggcctcccaaagtgctgggattacaggcatgagccaccgcgcccggcccagagtatactttaaataatgtactgttagtgtcatttttaaaaaacactct

SEQ ID NO: 280774 - DNA, 201 bp, Homo sapiens
gacatcatctttcctcattctgtcctaactgtgggttttggagtttgaaccccctcttaatctgcaaaatcctgtaataaacctctttcatctagtgtatyttataaacctctttcatctagtgtatcttactggatatattagacatacaactttaaaaaaatttctttgtctgaatatattataaatgtttagcctttg

SEQ ID NO: 280775 - DNA, 201 bp, Homo sapiens
gagtagctgggactcccagcgcctgccaccgcgcccggctatttttttttatttttagtagagatggggtttcactgtgttagccaggatggtctcgatckgaccttgtgatccacctgcctcggcctcccaaagtgctgggattacaggcatgagccaccgcgcccggcccagagtatactttaaataatgtactgttag

SEQ ID NO: 280776 - DNA, 201 bp, Homo sapiens
ctcggctcactgcaagctctgcctccctgtttcacgccattctcctgcctcagcctctcgagtagctgggactcccagcgcctgccaccgcgcccggctawttttttttatttttagtagagatggggtttcactgtgttagccaggatggtctcgatctgaccttgtgatccacctgcctcggcctcccaaagtgctggg

SEQ ID NO: 280777 - DNA, 201 bp, Homo sapiens; identical to SEQ ID NO: 57117

SEQ ID NO: 280778 - DNA, 201 bp, Homo sapiens
agcaatcctcatgcctcagcctcctgtagctgggactacaggaatgcgccaccacatctggctaattttttgtatttttagtagagactgggtttcaccawgttggccaggctggtcttgagctcctgaggtcaggtgatctgcctgctttgttttggcctccaaagtgctggaatttcaggcgtgagccacctcctctgg

SEQ ID NO: 280779 - DNA, 201 bp, Homo sapiens
ctggttctaaaaattggtaatattcaatagtggttttttgttcagtgacaaatttgaaatgagatttatattcacaagtactatgttcagtatttttttttcattaagtttgtctaatatgaacagaaggaacaaatgctttttaaaaatctaagtttctaaaattatgaaataattttctttttttcctctcctttagcc

SEQ ID NO: 280780 - DNA, 201 bp, Homo sapiens
tgaatgcttgctgagtcctagttggccatctaggttggttcccatgtttgagagacgaggatggatgaatttaaggtaagcaatatatgccatagctataygtgctctgtgcttactggtttgagggcttttgtgtgtttttgtatgtgtgaagatgagaaaaactatcaacactacctctgttgtgtcttgtcaattaag

SEQ ID NO: 280781 - DNA, 201 bp, Homo sapiens
tgtctttctcttggaagtcagcattcaaattctttatcagggaaaattccgaagtcatgcttcccacatatgatatatccttatcagcacatatacatccrggagtgggttggcttgcaaagtaaggaggtatttgcccactgggcttcttttatgtgtggagtgtatttcttagaaggcctgcaagcctttttggttgta

SEQ ID NO: 280782 - DNA, 201 bp, Homo sapiens
tcccactagataatgggacattgggcttaattacttcttggatgtgggatactatctgcttgagagtattggttgaggggaacatagcactcacagccttyttttatgctactttttggttttattttgagagattttcttcattaagataccctttggtgaactctaaattcttgaatcaaacatttaaattgtactcct

SEQ ID NO: 280783 - DNA, 201 bp, Homo sapiens
tatatggtaacacatataccataggaaaaatctaaatagtggttaatactaaaattatatgtgattgtgtaatttattttgtgatctatttactatccttrtttatgtttagtttaagcaaatagtagttcatttgtcttaaaacttgttatctgatggcagaagaagcctgcagagcttcaatttggccacagataattc

SEQ ID NO: 280784 - DNA, 201 bp, Homo sapiens
aggcatagcagtgggaaagcagcaaagaggcctggtattttaaatactgaaaaggacctatggttaagggaaagtttttatatgatttgttagttcattakgctgaaaatttttttagagacaagatctcactctgtcactcagcctggagtgtagtgactattcacaggcacaattgtagtgtgttacagcctggaaccc

SEQ ID NO: 280785 - DNA, 201 bp, Homo sapiens
ggacatgtgtgtttaatttcaggacagaggtcagggttcaagcttcagtgttgatgtatgtgttgtagtttatactgtgaaggcacttgagagaaacgctyaagaactgtgtaaggtgagcagtgggctgtgatgggagtgtgggcaactccagtgttaagggatgggtgaaataggaggagcccaggaggagtctgccta

SEQ ID NO: 280786 - DNA, 201 bp, Homo sapiens
ggttggtgtaatatttagaagtaacatctgaaggactttgtgactgaattaatgtatgggaaagggaaggaaccactcttaggattgtgggtgtgtagtgwggtcttccttgatttgggaagcatatgagagaatgtaaacttgagagaaaagggactggatttagttttggacatgcttagtttttggcacctgtgatat

SEQ ID NO: 280787 - DNA, 201 bp, Homo sapiens
tacctgttatggagagctatcagccgacacctgggtatctgagagtgtgtgctgatctgctttgtggcccccttgtttgtatagtgtggagcaaaatcttygttgacctcatctataaaagcactgataatgaggtttggactatgtttagggcatctgaaaatccatgaaaatatttggattgaaacatgcaatacagga

SEQ ID NO: 280788 - DNA, 201 bp, Homo sapiens
agttagaatagtaagatcatagcttaattgctattccagacactaaacttgtaaagctgatgagatgattttaatatactggaaaaagatctatgatcatwtgtagtgagtattctgagaaccctgagaaagcaaggggcctcatcagcctgagcatgcagggaaggcttcctggaggaggtcaccatggagatgtgctgt

SEQ ID NO: 280789 - DNA, 201 bp, Homo sapiens
aaaataccactaggaaaagaaatagaaggaaaaatgcaaaaaaagtggatcgtggaatcattagtgagaaaattgataaacagaataaatggagaatatgrgtaagtggattgtgaataaaaatattcattagggagtggtacagagtggcatatggatgtgttggggaaaaattagaggtagtagttgataagcatatac

SEQ ID NO: 280790 - DNA, 201 bp, Homo sapiens
gcaccatttattaaatagagaatcctttcccactgcttgtttttgtcaggtttgtcaaagataagatggttgcaggtatgcatatgttatttttaaaaacycaattcattgactgttgatattgatagtagctgtagtggtaataatattaacatttattgaacacttaactgtgttctggtaactgctagagtgctttta

SEQ ID NO: 280791 - DNA, 201 bp, Homo sapiens
gagtttcacatttaagcctttaatccatcttgagttaatttttgcctatggtgtaaggaaggggtccagtttcaatcttctgcatatggcaagccagttcyagcaccatttattaaatagagaatcctttcccactgcttgtttttgtcaggtttgtcaaagataagatggttgcaggtatgcatatgttatttttaaaaa

SEQ ID NO: 280792 - DNA, 201 bp, Homo sapiens
tctagggtttttatagttttgagtttcacatttaagcctttaatccatcttgagttaatttttgcctatggtgtaaggaaggggtccagtttcaatcttcygcatatggcaagccagttctagcaccatttattaaatagagaatcctttcccactgcttgtttttgtcaggtttgtcaaagataagatggttgcaggtat

SEQ ID NO: 280793 - DNA, 201 bp, Homo sapiens
ttgctaaactgtttgcagatgctggcttagtgtgcatcacaagtttcatatcaccttacactcaggtatgtggtttttgtgccattgcctttctgcttacrtttattgagaatatggtatcaggcaaagcacatactttaaacattgatatgtgctttgaggctaactctactcctccccagctaccatctctttgttcct

SEQ ID NO: 280794 - DNA, 201 bp, Homo sapiens
cttgtttgactgccctggagagtttttgttgggaagtggaggtaagggtcaatagggaggctggggctccgtgatgctcttgtgtttggctgcagagaagwcttgattctatgggggatttttgatggggctagaattttaaattttctgatccttgtaaatttttctctccctcatggaacacccgtcatctcttcctct

SEQ ID NO: 280795 - DNA, 201 bp, Homo sapiens
ttcttcccatttcctcattcttaattccagacagttaaattgttacatttttattgcccaggtttatagcacttaatgggtcaatagttggtagcttcccrtcagttattttactatgacatgttcactcatgagctctttatttgaatggtctttaattgtctgtatttcattgttaaataatttttgcaagatggcctt

SEQ ID NO: 280796 - DNA, 201 bp, Homo sapiens
aaaattttgtggaaaggtgatagcatttgatgtagtgagaaaacagttattaattatgcacagatgaggttgtcttttgtttgattaatggatgttactcrgcgccaggttttatgtaattaatgaatttgttttgttttttatttgattaaataccaatgtaagacaatgcttaggagaaaagaaacaaactttatgaag

SEQ ID NO: 280797 - DNA, 201 bp, Homo sapiens
cccggctggggccgtgtgtggttgcgaggcagaggggcgcggcgcagggtggggatctcgccctagcttggcgcagcgtgcggtccgagccaccgttcgtkggaagaacgccccccctccccagcgcctccgctcaggtaagacccccaggaaaatccttcacccgtgaactggcgcttgctgaaacctccgggtgctgaa

SEQ ID NO: 280798 - DNA, 201 bp, Homo sapiens
tatggaaccacaaaagaccccagataaccaaagcaatcttgagcaaagataacaaagcgggaggtattaacattacttaactttaaaacacactctgaagytatagtaatcaaaacagcatgatacagaaacaaacatataaaccatacaacagagcagaaagcccagatataaatacatgcatttatatttaattgattt

SEQ ID NO: 280799 - DNA, 201 bp, Homo sapiens
aaattatttgaaagagttcattaaccttttatgataaaaactctcaacaaattaggaaaagaaggaatgtacttcaacgtaataagggctacatagttcargcccacaactgacatcatactcaatggtaaaacaggaaaagttgaaagctttccctctaagatcaggagcacaacaagggtgcccactcttaccacttct

SEQ ID NO: 280800 - DNA, 201 bp, Homo sapiens
cttcctaatttatttattttatccaaacattgtagctgaatatatagaaataatgtaaatcgatactgctctgatgtttttctttgtatttactgatcagrtatcattatttgcaggccactgagacatcccaggaggttttatgcttcatcatctctgccttctaggtttctttttaactgacttctgcactcttattct

SEQ ID NO: 280801 - DNA, 201 bp, Homo sapiens
aatgaaataaatgggctgtaggtttgtagtatatatttttgaactcttttgctagctgtattttttaatattaatggtaatgattttaaattcatgcatascattctaacctaagaatgacctaagctttccgagatagacaagccttgaatgacttacgtgtggggtaaggtcaggggtataagataggaatagcgtatc

SEQ ID NO: 280802 - DNA, 201 bp, Homo sapiens
atctgacaagatgatgataagaactgtgaggccaaaaccagtaagcgaatgctgaaaattcacataagctgagcgttgaagctgcttttgccctggtaaamctaacaaacttgagagtattgattttcaatgcctcatagtgtagatggggatagaaaatacaactctgcccatgatcaaggtggagagcccaacaggaga

SEQ ID NO: 280803 - DNA, 201 bp, Homo sapiens
gatggggtttcactgtgttagccaggatggtctcgatctgaccttgtgatccacctgcctcggcctcccaaagtgctgggattacaggcatgagccaccgygcccggcccagagtatactttaaataatgtactgttagtgtcatttttaaaaaacactctaactgtaggcatccttcaaggctttttcagatatactttc

SEQ ID NO: 280804 - DNA, 201 bp, Homo sapiens
taaacagcatgggggaaactgcacccatgatctaatcaccttccaccaggttcctcccctgacatgtggggattataattcaagatggaatttgtgtgggracacagagccaaactatatcaaacatacgtgaggggacttcaaaaagtttgtggaaaatggaattaaaacataaaaataaaaaatgtaaactttatttct

SEQ ID NO: 280805 - DNA, 201 bp, Homo sapiens
ttcaaatataccttatatgtatagcctggaggtaactgtatacaatattttacataattttgtgcatgaaacaatttgtgtacattgagccatcagaaagyaaaggtgtcagagatggaattttccacttttgtcatgttggtgctcaaaaattttcagattttggagtattttggattgtggattggggtgctcaacttg

SEQ ID NO: 280806 - DNA, 201 bp, Homo sapiens
ccttggggatgggactcaattctaaacatgaaattcatttatgtttcaaatataccttatatgtatagcctggaggtaactgtatacaatattttacataattttgtgcatgaaacaatttgtgtacattgagccatcagaaagcaaaggtgtcagagatggaattttccacttttgtcatgttggtgctcaaaaattttc

SEQ ID NO: 280807 - DNA, 201 bp, Homo sapiens
tactgatgacaggttttgtggtactcatgtcagagaaaggtaaacccagaaaagtaatttcccaacattctggaaattagaagtagaaataaaacttgaawctagtttcatggtttcaggaattttgttttgaagtctgtaaggacaatattgttatttctctgcctactgtgtctgctatagcttactgagcataactag

SEQ ID NO: 280808 - DNA, 201 bp, Homo sapiens
gtaaacattaaataatatttataaaacattttgtacagtgactggtatattaggaagagcttggtaagtgttacctattttaatttcttcttctcaccctrttgaaggacctcatgaaatactttccagtgctttatcaccatggttgccttcctctgttttcttagaataataatcagtgggagggcagagagcctcttg

SEQ ID NO: 280809 - DNA, 201 bp, Homo sapiens
tatctcggctcactgcaagctctgcctccctgtttcacgccattctcctgcctcagcctctcgagtagctgggactcccagcgcctgccaccgcgcccggstatttttttttatttttagtagagatggggtttcactgtgttagccaggatggtctcgatctgaccttgtgatccacctgcctcggcctcccaaagtgct

SEQ ID NO: 280810 - DNA, 201 bp, Homo sapiens
agcaagtccttccctggcctcagattcaactctcctcactacccgaaagagcatggtctagtggaaataatacaagacggttgtcgaggagtccaggcacrgtttgggttctgggttgccaccagctggtttgccatctcacattagacttcttgagacctctctatactatgtttgagtgcacagtaggtggtgtaggta

SEQ ID NO: 280811 - DNA, 201 bp, Homo sapiens
gccctgatttgggatatcctttggtgtttaatataatataaagctaatataaagaaattgaaagtacctattttatgagtgcctatgcatgtgtcactcartgaatagctgctttgcatgcatgcgttaggttaccccacaacttggtgaggaaggttttattcttgttttaccagtgagattactgaagctcagagagga

SEQ ID NO: 280812 - DNA, 201 bp, Homo sapiens
tttaagatatgccctctttagtgtgggttcattagaaataatctgccccattagtgcatctacagagagaacatagaagcagctggtggagctttcttccktcaccattattttttaatgccctcctgtattatttaccctcagtaaacacaatagatagcttttggctatgggtgcctgctggaagcttaattgcagaag

SEQ ID NO: 280813 - DNA, 201 bp, Homo sapiens
aaggattttttctaccaatggaccttttctaccaaaaggatgccttaaaatttttttaagaaaaaaagaataaaaagaaattgtagtaaaccttgaactgytttaccacaaaaggtgattaaaactttaaaatataaattgattattaagggaagtaaaaaagttttgagtacagttctgcccttttatggtaggccattg

SEQ ID NO: 280814 - DNA, 201 bp, Homo sapiens
gttttggcaccagtcaagtggaaagtttgctcaactttaattttacagtcagaatcgtgtaagccaaaccaactgagatgtctatggtgttggcttttgtytctactatcaaaattgttggtcctgggcatgggcaagattaatttcttccttgaaaatttatgtggtctgccactatgggcatcatctccaacatcattt

SEQ ID NO: 280815 - DNA, 201 bp, Homo sapiens
agaggtggagaagaaaggagaacttgcacggaccttcaaattcctgatttggatgagacaaatggatggatggtagcactggtaatggagacaaggtagayggagataggaggattccagttagtctgttcttgggggtgtggaggatggggcagcctatcaagttggctcttgtagaatatttgcatttgtagaatatca

SEQ ID NO: 280816 - DNA, 201 bp, Homo sapiens
ccattctttttttttttttttttttgagacggagtctcgttctttcgcccaggccggactgcagtggtgctatctcagctcactgcaagctccgcctcccrggttcacgccattctcctgcctcagcctcccgagtagctgtgactacagacacccgccaccacacccggctaattttttgtatttttagtagagatgggg

SEQ ID NO: 280817 - DNA, 201 bp, Homo sapiens
ggcattcttataccttctggtgggaatcttgcagctctcggaaaagggggaggtctataatacctgttatggagagctatcagccgacacctgggtatctragagtgtgtgctgatctgctttgtggcccccttgtttgtatagtgtggagcaaaatcttcgttgacctcatctataaaagcactgataatgaggtttgga

SEQ ID NO: 280818 - DNA, 201 bp, Homo sapiens
gtgaacccaggaggcggagcttgcactgagccgagatcgtcactgcactccagcctgggcgacacagcgagactccatctcaaaaaaaaaaaaaaaaaaaatgtctagaatattgtagaaattttagatcttgtgaatattttttgcaaaatttagacatcttttaattttttttccaacttgtgtaatgtatacaaaatc

SEQ ID NO: 280819 - DNA, 201 bp, Homo sapiens
tcagatgctgctggttgtcagctgggagcttagcgggctgagagtggctggtacacctgcttgggatcacgttagcatggtggtctcaagggatttagtcrctggcttctcccagtaatgtgaccaaagaaaagctgcatagcattttgtgacctagccttggtagtcacacatcatcgtgtcactatttcactacattct

SEQ ID NO: 280820 - DNA, 201 bp, Homo sapiens
gacattgatttttcttgtgactgattaaatgagtcacactagtttatattcatatcatatatgtatagcattccagagtaaaactcttagacatgtttcaraggggagtggaacatttgttaaaatcctggttcctcactgggaagttggaaaggccagaattggagctaacagtgaatctaagaggtagaactagaccgg

SEQ ID NO: 280821 - DNA, 201 bp, Homo sapiens
ctagagtcttgtcttttggcttagtcatagcaggctggtgagtgactgaattgatacagattttgaagtagctttaaaaacgatggatgctttcacttctrtgaattatatttaaaattttgatacattttgccacattgcccactaaaattttatcccagtttactctcctaccagcagtatgggagggtgtttatttcc

SEQ ID NO: 280822 - DNA, 201 bp, Homo sapiens; identical to SEQ ID NO: 57114

SEQ ID NO: 280823 - DNA, 201 bp, Homo sapiens
tctgtctttctttcttaatatacccattagcagggtttctcaatctcaggagtattggccttttgggccagataattctttgttctggagaggctgtcctrtgcattataggatgtttgccctggggagggggaagaggatggcaaaaatcatctctgttgagaaattgagttgattttccagtacactttaggacagccc

SEQ ID NO: 280824 - DNA, 201 bp, Homo sapiens
ggttcatatactttggaatacatttaagcaatgtgagttaggaaccctatgaaccaaattaggtaaaatatgagctacattttaagaaatgtatttctttrggtttattttaaatgatgtgtagataacatatcttgttaattttgttggtaaatttgaaccttaataaaatgatccaccatttacttggaaaaagtaaaa

SEQ ID NO: 280825 - DNA, 201 bp, Homo sapiens
atctcatcttgaattgtagttcctataatccccacctgtcatggaaaggacccagtgggaggtaattgaatcatgggggtggcttcccccatgctattctsgtgacagtaagttctcacaaggtgtgatggttttataaggggcttccccttttgcttggttctcattctctctcctgccaccatgtgaagaaggatgtgt

SEQ ID NO: 280826 - DNA, 201 bp, Homo sapiens; identical to SEQ ID NO: 57115

SEQ ID NO: 280827 - DNA, 201 bp, Homo sapiens
cggtgaactccagaatgctcctggtaggcattcagagttctgtgttcagactctgcctcaccacctagcagttgtgtttgtggggaaattacttttctctytaaggctcatggacaattgttgaggatattgatggtacctaaagcataacattttactttaaaaagtgaaataagatgtgtaaggcactttaaactgtac

SEQ ID NO: 280828 - DNA, 201 bp, Homo sapiens
aagtttgtagtatgtacagaaaatgcataccacaaatatcagaggacatgcaatattagcctagtgacaggattgttagtcatttagttctaaatgtagtraatattaaatggccttgcaatgaattattccatttctgctagatttaagatttccaaatatcagtcatcatttcatttgcaagttacacagagaaaacaa

SEQ ID NO: 280829 - DNA, 201 bp, Homo sapiens
attagtaacatgaaagtataaaactcactggtaaaagtaagtccacggtcaagttcagaataaatactgtaattgtcgtgtgacaataatttatatctccrgtatgaatgttaaaagacaattaacaatagtgacaataatttgttaagggatgtcttcactgttgagttctaccaaacatttaaagaaagattaatgcca

SEQ ID NO: 280830 - DNA, 201 bp, Homo sapiens
aggaatacactgtttatcagtttagggtgggtgataggatggatgaaagatgttgaagtccacaattatgcttagtatttggtatatgctttgtgtctttwtacatttcacttaaaaatgcacaattctttataaaatgatgaaaaattcacaaaatatgaaattctctaagtagcatcacagagaagttgattttcctta

SEQ ID NO: 280831 - DNA, 201 bp, Homo sapiens
agcaccagctgagctctgcctacctgctgacccagataccaggccagcctccctgaggactccagcagcaagcctgcctgtgcaccatgccagatggcctycccagattggacaggctgactggtgaagtgcttcccaaataaagccagtctacaaagactggaatcagtccctacctcttcattgtacagatattgatat

SEQ ID NO: 280832 - DNA, 201 bp, Homo sapiens
aggtgatcagacatcattgggggatggtgcagcttgaagagtttggtcagctatggaggatgggggatttctgctaaaattggactcttgaagacgtgccygaggatagggcccagttgaaagagggttcagaaggagcctgcctagtttgatcaaggagagaaatcttgtcggtggtaatcgtttctgtgacatatcttt

SEQ ID NO: 280833 - DNA, 201 bp, Homo sapiens
agagccaggttggcccacacagccctgggcttcaggtctgccccagtacaaggccattccctgtagccccaccctccaggctggctgctgcaaccccatayttaagagatccaaggtttcaggaccatcccaatacatctcagcactataccagctcccattgacccaggctgtaagaccatttctgtggacccaggttcc

SEQ ID NO: 280834 - DNA, 201 bp, Homo sapiens
tttctcaaaacattctcataataagtagatgttattgttctttggccctccagaaagtcaacaagcaaaatgccttgagcatcccaaaaaactgtttccaygacctttgctcttgactggttcacttttgctttgactggaccacttctgcctcttagtagtcattgcttggttgtgctttattttcaggattgtgctcgt

SEQ ID NO: 280835 - DNA, 201 bp, Homo sapiens
caaaatgtatgtgtagttcacttaatgcacatcgtattgtccttccaggaaaaattgactctgaacttttattttctacttgatgaagtaataggctttgyacagactgctaaactatcatttgtcgtgtaatgtacctatggatggagaccagatcaaagggaagacagaaaaatgacagtgataaccatatctgggata

SEQ ID NO: 280836 - DNA, 201 bp, Homo sapiens
ctgcagtggagttttgccgtaggggagagagattgggctcagttccaaatacagtaaggaaaagtgggaatttatggtgagggagcagggtgggggtcggkggatggaaaattactaagaggaaacattaagaattagggagtattctgactaaaacgatttaacagggttcttgctgaaggcaggcaggccaaggtgatc

SEQ ID NO: 280837 - DNA, 201 bp, Homo sapiens
aaatatttttctctttaattcttttagtttattttaagctgtaccctagtgaaaaaagatcagcaaatgtataccatattaatgcttgggaataaaatacrgtataaaagttaagatttttttccctcgagttttttctctcactttttgtttttagcagtcatctttagggaacttgtctttttcaaacagtaggtttct

SEQ ID NO: 280838 - DNA, 201 bp, Homo sapiens
gggagtgatttttctttttggtgttaagcggtagtagagagaatgttctcagggagactattgcagtggctatagagacttctgcagtggagttttgccgwaggggagagagattgggctcagttccaaatacagtaaggaaaagtgggaatttatggtgagggagcagggtgggggtcggtggatggaaaattactaaga

SEQ ID NO: 280839 - DNA, 201 bp, Homo sapiens
gaacaattcaagtgtgaggtatggaattgcactcttactattgcactttctaaactatgttggtaaatagataagtacctggtatgcaggagattaccagsagagagaaaatgaaaacaaaacaataaaagatgatttggttatttatgtgtagtggttatcatttataccttattttaatatggaacagtgatggtttta

SEQ ID NO: 280840 - DNA, 201 bp, Homo sapiens
tgtcctcccctgctttttcattttctcgaacaaggcagtgtggaaattttgtaccacacagtgaatcaggtgtacactagggattccattattctgtttcyggagtgttaagccctgccttacactccagagtgttaccccctttgatttcttagaattcatacttcccatcactctcattcctcgtcttccttgagttgc

SEQ ID NO: 280841 - DNA, 201 bp, Homo sapiens
ctgctattttttttttctacttatctgtgtgtttatgtattcaggtatttttactctgttcccaagaacaggaaatttccagagtgagtggatactttgarattttagttttgggcagttttgcaccctggcttctggtagcatgtccagcagtattagcctccccttagcgtagttgcttcttcagatttgaagtgtcaa

SEQ ID NO: 280842 - DNA, 201 bp, Homo sapiens
cagatctagatgaagctttgtgatggctgctattttttttttctacttatctgtgtgtttatgtattcaggtatttttactctgttcccaagaacaggaartttccagagtgagtggatactttgagattttagttttgggcagttttgcaccctggcttctggtagcatgtccagcagtattagcctccccttagcgtag

SEQ ID NO: 280843 - DNA, 201 bp, Homo sapiens
aaagttgtccatatacctgtgggaatagtaaagaaaaaccaagaaattgacttgctcttggagctgcctcttacttcagtctgataaagcgtcagatataatgaatatcattttctatccaattgaatctttctccaatgggaccagttttcatctgcccttggggatgtgttagttgggctgagggaaatttgggacact

SEQ ID NO: 280844 - DNA, 201 bp, Homo sapiens
cgggggtaagggtgatattagttaaacacaaaggagagtttagtgtgtgccaggaacagtttgaaatgttttacctatattagcccattgagtttttgttrcatttctgagggtgaatattatgagagacagtggttaaaagcaggaccctggagctgactgcctgggctgaaatctggactccactatttattaactatg

SEQ ID NO: 280845 - DNA, 201 bp, Homo sapiens
aagtgttgggaataaaaattactattttttttactccagaaacattgacgaaacttgtttgactgccctggagagtttttgttgggaagtggaggtaaggktcaatagggaggctggggctccgtgatgctcttgtgtttggctgcagagaagacttgattctatgggggatttttgatggggctagaattttaaattttc

SEQ ID NO: 280846 - DNA, 201 bp, Homo sapiens
acataatttctttcagaatagtgtgtggtagtacagtgttaataaatctgagaaagctttatagcgttgctgaattacaaactacattttaagtgtgtaartggagacatcagaagaatgttttaagtaaagttgaggatggtacatgagaaagctgaggcagaagcagatctatgtttggctctgaagtggatagtggat

SEQ ID NO: 280847 - DNA, 201 bp, Homo sapiens
tcttgttaaacagtttgttttacttatgtaattctataccaaaatgttgtacccaaaaacagtttgattcttttaatttttccttttttttttttttttttaacttgggagatcgttgctcattctccctgaccttatagcttgttctgtctttcgtttttctgtgccaggtaccagttgaatactgtcactggatctaca

SEQ ID NO: 280848 - DNA, 201 bp, Homo sapiens
acaggaagggcctttgataaaattcaacatctatgttaaaaactctcaataaactaggtattgatggaacatatctcaaaataataagagctattcatgayaaacccatagccaatatcatactgaatggacaaaagccggaagcattccctttgaaaaccggcacaagacaaggatgctgtctctcaccactcctagtca

SEQ ID NO: 280849 - DNA, 201 bp, Homo sapiens
caactaactgcatggatggattattttatatattcattcacatgcagattctccacaccctcagaaggcaacctgacatctttattgagaaaattaagacyattttgcattaaccaccacatctttttctaacaccaaatcatttctgtctctctccactcccccaccaccttctgtttcctcttttcatcactcctgacc

SEQ ID NO: 280850 - DNA, 201 bp, Homo sapiens
ggacttaactgtagtctgtcaaagaagaccagagctgtacagtgattaaagtaataaaaacagaactttattcaggaaatattgcaacaggagaataaagmcctcagtatagaactgggctcaactctgaatatagcatggacaggtggggattgatagcaaaggacagggtggaggtaagtggatggaaaattactgaga

SEQ ID NO: 280851 - DNA, 201 bp, Homo sapiens
tgactcatgatattggtaatatctgtctatgtttctattgttgagaggagaaaataggatcaatgtaaatcatttaacacattgcctggctcatgacaagrtgtggtaattaatataattggtgtcctttaaaaaactactttgctgcaaattctctgcatttctaggattctagccccacatccaaggaactgtctatat

SEQ ID NO: 280852 - DNA, 201 bp, Homo sapiens
gacctactgcctaacaggcttcatgtcagagcgtgtgtcctagccctgatttgggatatcctttggtgtttaatataatataaagctaatataaagaaatwgaaagtacctattttatgagtgcctatgcatgtgtcactcaatgaatagctgctttgcatgcatgcgttaggttaccccacaacttggtgaggaaggttt

SEQ ID NO: 280853 - DNA, 201 bp, Homo sapiens
gaagaatgagaatgaatgactatgaatttacatgtcagattctagaatccagaaagacagtagctttttctaaatggaatgtattttcaattcattggttytcaaatttcttcaattggcagagcatctggaaggcacactgctattctttgcacctcctcacatgcctatttctaagtatggtagcattggggttaggcc

SEQ ID NO: 280854 - DNA, 201 bp, Homo sapiens
tgacttctttttttttttttgagacatggtctcactctactgcccaggctgccaggctggagtgcagtggcatgatctcagttcactgcaacctctgcctyctgggctcaagcgattcctggcccaagcaatcctcatgcctcagcctcctgtagctgggactacaggaatgcgccaccacatctggctaattttttgtat

SEQ ID NO: 280855 - DNA, 201 bp, Homo sapiens
ccctttttttttttttttcctaacaagaccacagaacagaaggtacttaattctatacaccttttttttttagaatacagtactttatggtcactttttttgtgagtcacttgatggaccaaggctcttcttatttattgtgtatcaagtgacctcagccagtattttccttttgaagtttaaatggtcttagctggccag

SEQ ID NO: 280856 - DNA, 201 bp, Homo sapiens
agggtgaacaattcaagtgtgaggtatggaattgcactcttactattgcactttctaaactatgttggtaaatagataagtacctggtatgcaggagattmccaggagagagaaaatgaaaacaaaacaataaaagatgatttggttatttatgtgtagtggttatcatttataccttattttaatatggaacagtgatgg

SEQ ID NO: 280857 - DNA, 201 bp, Homo sapiens
agatcttaaatataaaaagcctttgccctctttttttacttcatattcttagtgataagaacattggaaataactgacctatagactcctgttgctttttrtatctcgttggttttgaagatgttatgcccctaaagctttgtgattatgtaaatatttaattttaagtgtctcgtgaaagtgtatcatactcttcctcac

SEQ ID NO: 280858 - DNA, 201 bp, Homo sapiens
agattttgttaatcttggaaagattccttgcttcctggctcagcaagatgttccaggctcaccttataccttctagccctatgattggattcagccttttytccagccagccctagttcctttttggagaccataagctgtgtgcttgggtgcactgtaaaggtaccaaactgtcagataaaatgcagctttacagataaa

SEQ ID NO: 280859 - DNA, 201 bp, Homo sapiens
catatatgtatagcattccagagtaaaactcttagacatgtttcaaaggggagtggaacatttgttaaaatcctggttcctcactgggaagttggaaaggycagaattggagctaacagtgaatctaagaggtagaactagaccgggaaccaagtgtcaagttgattgtaagaactgacagcagtggtcaggcagaggggt

SEQ ID NO: 280860 - DNA, 201 bp, Homo sapiens
ctaacagtcaggaccctcagctgcaggtctgttggagtttgctggaggtccactccagaccctgtttgcctgggtatcagcagcggaggctgcagaacagyggatattggtgagcagtaaatgttgctgcctgatcgttcctctggaagttttttctcagaggagtacctggctgtgtgaggtgtcagtctgcccctactg

SEQ ID NO: 280861 - DNA, 201 bp, Homo sapiens
cattcaatccctaacagataccatctagaattgaattccagtagagacaagtagtagccaccatcaaaggttttggaaaaaaaaaaatttcttcatgaatmcaattttttttcctgtgaattgattttgcagtggaacacattggcaaacatactctgggaataaatagtaggctgcattttactgtactccactcagcca

SEQ ID NO: 280862 - DNA, 201 bp, Homo sapiens
ctgtatttcctgaatttgaatgttggcctgccttgctagattggggaagttctcctggataatatcctgcagagtgtcattctccctgtcactttcagctmcaccaatcagaagtagatttggtcttttcacatagtcccatatttcttggaggctttgttcatttctttttattctttttttctctaaacttctcttctc

SEQ ID NO: 280863 - DNA, 201 bp, Homo sapiens
  misc_feature (1)...(201): n = A,T,C or G
agaaatttgaggtggtgtggagattggaaggcatgaatttgtatcgaactcgatgatcattaattcttcaaaaggttaggattggagaacacagtgtgggntgacccagagctacaaattgttctgttaataaatgtatgataataacgaaaagaatgtttttgttacttgaaaaggtgtaattattcgcattgcttttgt

SEQ ID NO: 280864 - DNA, 201 bp, Homo sapiens
atatgaaattctgagttgaaaattcttttctttaagaatgttgaatattggcccccactctcttctggcttatagagcttctgctgagagatcagctgttrgtctgatgggcttccctttttgggtaacccgacctttctctctggctgcccttaacattttttccttcatttcaactttggtgaatctgacaattgtgtg

SEQ ID NO: 280865 - DNA, 201 bp, Homo sapiens
tagttcttttaattgcgatgtcagggtgtccattttagatctttcctgctttcccttgtgggcatttagtgctataaatttctctctacacactgctttgmatgtgtcccagagattctggtatgttgtgtctttgttctcgttggtttcaaagaacatctttatttctgccttcatttcattatgtacccaatagtcgtt

SEQ ID NO: 280866 - DNA, 201 bp, Homo sapiens
ttacaaaactgagttttagatttcagaattttagataagcaattgtggacctgtaccacaaatgtatttagagtgtgttgatttactttgaaagtaatttkggggatccctgtagtctgttttatatacttttagcttatatatgtcttgaaaactgaacttatttcattaggaagcatcagattttgcaggtgtttatag

SEQ ID NO: 280867 - DNA, 201 bp, Homo sapiens
tatttcttgccttctgctagcttttgaatgtgtttgctcttgcttctctagttcttttaattgcgatgtcagggtgtccattttagatctttcctgctttyccttgtgggcatttagtgctataaatttctctctacacactgctttgaatgtgtcccagagattctggtatgttgtgtctttgttctcgttggtttcaaa

SEQ ID NO: 280868 - DNA, 201 bp, Homo sapiens
tgtgaggtattaattgactatgtaggaaattctatttgtctcatctcactaaatactgaatctatttttgtgaaggataaataatgctaagacctgtgacrtgaaagtgtcaaaggtaagatgtttttgagaatgtggatatatgttactaacagctataccctcggtttatgaagttttaatgaggattatcagttgaat

SEQ ID NO: 280869 - DNA, 201 bp, Homo sapiens
gctttgttattccaggtcccttcacaaaaacccacaaaaacaaacattaagcacacacacaactctagtaaccctagaaccattgtcttgtttagctgctrtattgatttaggaaaatcagaaatgtctgttcttggagctttaccgtagagaggcagatagaaaccttgggtgggagggaagaaaggaattactaattac

SEQ ID NO: 280870 - DNA, 201 bp, Homo sapiens
gcttctgctgtcgtttcactagtaagcgaattcaacgagtgattttccaaaatcagattctctagggcatgatgattgtgttagagatcaaggcctagaaygtttgtttcgtttctccccaacatttctattatgtattttgtatcgtaaaactgcttcttaaccttcctatattataaataccttcttatgttaatttaa

SEQ ID NO: 280871 - DNA, 201 bp, Homo sapiens
ccccgccccgctcgctggcctgccctcctcttgctaccctcccggcgcagagaaccccggctgctcagcgcgctccgcggtcatggagatccccgggagcytgtgcaagaaagtcaagctgagcaataacgcgcagaactgggtaagctggggacgaaggcgagacggcgaggagcggaggggctgtgggagcagctcgtt

SEQ ID NO: 280872 - DNA, 201 bp, Homo sapiens
ttaagaaaaattgcgtatcctttggaaagtaatctgttagaaacatgctattcttaactctggaaattctcttttcagatgctgtctttgcatttcaactrcgcaacccagtgcacaatggacatgccctgttaatgcaggatacccataagcaacttctagagaggggctaccggcgccctgtcctcctcctccaccctc

SEQ ID NO: 280873 - DNA, 201 bp, Homo sapiens
agaatataaagttggccttatagaatattgactttaataaaatttattacacttaaataaatgcagattttggtgtgaagatataaagaaataagccactkaagtgggacttaaattttaattgttcaattcattattctcagtatttttaattcagaaaaattgaaaatatcatatatctaatctgccagatttctggaa

SEQ ID NO: 280874 - DNA, 201 bp, Homo sapiens
ctctgccccggacccatttccgaggcgcgccgcatgcgccgcgcaacccaggccacgagcacgggcgcgtgcgcaagtcagcgcgcgcccgctccgacgcsaggaggccccgccctccagccccgccccgctcgctggcctgccctcctcttgctaccctcccggcgcagagaaccccggctgctcagcgcgctccgcggt

SEQ ID NO: 280875 - DNA, 201 bp, Homo sapiens
caagaaagtcaagctgagcaataacgcgcagaactgggtaagctggggacgaaggcgagacggcgaggagcggaggggctgtgggagcagctcgttccggrgccgccgcctctctcccgcctcctccgcatccatccttccagcagcgcggaggtgggttccggggctgcggcgcctcccggctggggccgtgtgtggttg

SEQ ID NO: 280876 - DNA, 201 bp, Homo sapiens
tcaaacatttactaaaaaaatagtttctgtgcctgatgttcttttataaacactttgagaatataaagttggccttatagaatattgactttaataaaatktattacacttaaataaatgcagattttggtgtgaagatataaagaaataagccacttaagtgggacttaaattttaattgttcaattcattattctcagt

SEQ ID NO: 280877 - DNA, 201 bp, Homo sapiens
ctgaggcatgatctcttgagtccaggagtttgaggctgcagtgagctatgcagcctctgcactccagcctgggtggcagagcaagactcttgtttctgggraaaaaaagtattactacatagttatccttctaactttacacatggaatctgtttggactgtttaattttaggcttgtctggagcgggaaagactactgtg

SEQ ID NO: 280878 - DNA, 201 bp, Homo sapiens
ataataactatcttattgatttgctgtaaacattaaataatatttataaaacattttgtacagtgactggtatattaggaagagcttggtaagtgttaccyattttaatttcttcttctcaccctgttgaaggacctcatgaaatactttccagtgctttatcaccatggttgccttcctctgttttcttagaataataat

SEQ ID NO: 280879 - DNA, 201 bp, Homo sapiens
tgttgcccaggctggagtgcagtggcttccctttttttttttttttcctaacaagaccacagaacagaaggtacttaattctatacaccttttttttttaraatacagtactttatggtcactttttttgtgagtcacttgatggaccaaggctcttcttatttattgtgtatcaagtgacctcagccagtattttccttt

SEQ ID NO: 280880 - DNA, 201 bp, Homo sapiens
atggaatctgtttggactgtttaattttaggcttgtctggagcgggaaagactactgtgagcatggccttggaggagtacctggtttgtcatggtattccrtgctacactctggatggtgacaatattcgtcaaggtctcaataaaaatcttggctttagtcctgaagacagagaagagaatgttcgacgcatcgcagaag

SEQ ID NO: 280881 - DNA, 201 bp, Homo sapiens
atttgttgatgctcctctgcatgtttgtgaacagagggatgtcaaaggactctacaaaaaagcccgggcaggagaaattaaaggtcagtaatattttcttyccagtttcactttgcttagatattttatgttcccatatctaggattgatattttctaagagattggagtgacttggagctccttgaggagagaatgtagt

SEQ ID NO: 280882 - DNA, 201 bp, Homo sapiens
gtttttggatacaacatatgttagatgttagactgtcaaagtcaaacaacgttctgggtaccccgtgttacattttaaaattaaattaatacttataaatktataatatctctagacttacaggttacggaattcacctctcattaatagtagagtgtgggtcatttactgatcccctgctcaggaggactcctagggcct

SEQ ID NO: 280883 - DNA, 201 bp, Homo sapiens
caatgaatccagtccagcagtgtcatgtataggtgaagacgcccattctttccttccctcactctgtcctccacactgtggtagtgctgtcaccagtcttrtggtaatagtgtggaggagtaagtgaaggaatattgtcatgtcctgctggagttgaaggaactatattccttttaacatgtatttattctcttagggaac

SEQ ID NO: 280884 - DNA, 201 bp, Homo sapiens
ggtgaacagaaacatgtttaatggaggacttgctgtgaccatgttatttaaatttttgccaaaatttgaattcatatctggaactgatgttagtaaattarttgttggcactgttgaaagggtcttatcaaggacttattcataattagggactttcatattacatctgtttttcactcttctttgtgagccaaacatttt

SEQ ID NO: 280885 - DNA, 201 bp, Homo sapiens
cagtttggctaacaggtatggtcaagagagagaaagcagtttattttaaaagcagtgcatataggtaaccttggactaggcgtaagcatatttaaattttragctctgttcttgtatttggagcatcacgacatataactgacatagttgcttaataatatttcttgttatttttttttttgttcttttataggattgctg

SEQ ID NO: 280886 - DNA, 201 bp, Homo sapiens
gaaaaaaaaaaactgttttatctttttctttgcttttggcatgttacatagacttttgtgtgtttgcaaggaatatgtgtttgccttttaaaggactcatrtaaactagaattttttttttcttttttttctagggaatgcagagagcaaccaatgtcacctaccaagcccatcatgtcagcaggaacaagagaggtcagg

SEQ ID NO: 280887 - DNA, 201 bp, Homo sapiens
aaggactcatgtaaactagaattttttttttcttttttttctagggaatgcagagagcaaccaatgtcacctaccaagcccatcatgtcagcaggaacaaragaggtcaggtggtggggaccagaggtggctttcgtggttgcacagtttggctaacaggtatggtcaagagagagaaagcagtttattttaaaagcagtg

SEQ ID NO: 280888 - DNA, 201 bp, Homo sapiens
ttgcacctgtagaagtagagagtgaatggtgtttatcagggactgcgaggtttggggtcgagtgggggtcgaggaggatggttggaggagatgttggtcaragggtacaaaattttatttagatacaaggattaagttcaaaagatgtataacatggtgatgataataacaatgtatttctgaaaatgctgctgtggacat

SEQ ID NO: 280889 - DNA, 201 bp, Homo sapiens
tgtcatagatagctcttattattttgagatacgtcccatcaatacctaatttattgagagttttagcgtgacgcattgttgaattgtgtcaaaggcctttyctgcatctcttgagagaatcatatggtttttgtctttggttctgtttatatgctggattatgtttattgatttgtgtatgttgaaccagccttgcatccc

SEQ ID NO: 280890 - DNA, 201 bp, Homo sapiens
gtggaatactattgagtcttaaaaattatacaaatccttttgtttgttaccacatggatgataaaatgttaagtgaaataagccaggcacagaaagggaartaccatatgatctcacttacatgtggaatctaaaaaagttgcacctgtagaagtagagagtgaatggtgtttatcagggactgcgaggtttggggtcgag

SEQ ID NO: 280891 - DNA, 201 bp, Homo sapiens
gaatgcttccagtttttgcccattcagtatgatattggctgtgggtttgtcatagatagctcttattattttgagatacgtcccatcaatacctaatttaytgagagttttagcgtgacgcattgttgaattgtgtcaaaggccttttctgcatctcttgagagaatcatatggtttttgtctttggttctgtttatatgc

SEQ ID NO: 280892 - DNA, 201 bp, Homo sapiens
attagtttttgaaaattcttggccattatcatgtgaaatatttcttttgcctttttcactcttcttctgggactctagttacacatatgttgaataatatrttgtcccacagtttttagatgctctgtttctttcatcccttttctgttaacattttagctttgataatttctgatttttatgtttgctgattccttagct

SEQ ID NO: 280893 - DNA, 201 bp, Homo sapiens
aatcgtttccccatttcttatttttgtcatgtttgtcaaagatcagatggttgtagatatgtggcattatttctgagggctctgttctgttccattggtctatatctctgttttggtaccagtactatgctgttttggttactgtagccttgtagtatagtttgaagtcaggtagtgtgatgcctccagctttgttctttt

SEQ ID NO: 280894 - DNA, 201 bp, Homo sapiens
ctttctaaatatggctagccagttttcccagcaccatttattaaatagggaatcgtttccccatttcttatttttgtcatgtttgtcaaagatcagatggktgtagatatgtggcattatttctgagggctctgttctgttccattggtctatatctctgttttggtaccagtactatgctgttttggttactgtagcctt

SEQ ID NO: 280895 - DNA, 201 bp, Homo sapiens
gctgtgtgcttcatgttcttttgtgctctgcaggaggtgtcattaacttgtcagtacctatagttctgactgcgactcatgaagataaagagaggctggayggctgtacagcatttgctctgatgtatgagggccgccgtgtggccattcttcgcaatccagagttttttgagcacaggaaagaggagcgctgtgccagac

SEQ ID NO: 280896 - DNA, 201 bp, Homo sapiens
ctttctcaactgttgactacattcccctgttgttgactacattcccctgagtagaggttgataaaatgttccttaggttaatgtgtgtgttgtgtgtgtgkctgtatgcatacactgatacttaggtttgccatggtgctggagttcctgattatagagttgcttatttttttaaaaagcttttacttgtaaatgatgctt

SEQ ID NO: 280897 - DNA, 201 bp, Homo sapiens
ttcttgtttactttctcaactgttgactacattcccctgttgttgactacattcccctgagtagaggttgataaaatgttccttaggttaatgtgtgtgttgtgtgtgtgtctgtatgcatacactgatacttaggtttgccatggtgctggagttcctgattatagagttgcttatttttttaaaaagcttttacttgta

SEQ ID NO: 280898 - DNA, 201 bp, Homo sapiens
tccagttgaaaaatccaattgttgtggcatttttttcccccatcagcctggaagttgccatttcttactctgagatggatcagttactcatagcataccartaacaagacaggaaaaccccaatcctgaattgttttgaaatcagattaagtaattagttcaaatggagggagtgatttttctttttggtgttaagcggta

SEQ ID NO: 280899 - DNA, 201 bp, Homo sapiens
ttagtccagtttcttgtttactttctcaactgttgactacattcccctgttgttgactacattcccctgagtagaggttgataaaatgttccttaggttamtgtgtgtgttgtgtgtgtgtctgtatgcatacactgatacttaggtttgccatggtgctggagttcctgattatagagttgcttatttttttaaaaagct

SEQ ID NO: 280900 - DNA, 201 bp, Homo sapiens
cacccgtgaactggcgcttgctgaaacctccgggtgctgaaacctgcggctgcagaaacaggagcttcctgcataccttggagtggcctgaagatctgcaragaaggcggaggcgggcgccttcgacgcgttcttggtttttcttggctctgccagtgcggttggcccaggtttgggtccatctccgtgtctttccatttc

SEQ ID NO: 280901 - DNA, 201 bp, Homo sapiens
gcaggagaaattaaaggtcagtaatattttcttcccagtttcactttgcttagatattttatgttcccatatctaggattgatattttctaagagattggygtgacttggagctccttgaggagagaatgtagtcttattacactgttctatctctcaggcatagcagcagtgcctggtgctggactaaatgagtcttgtt

SEQ ID NO: 280902 - DNA, 201 bp, Homo sapiens
ggcaggagaaattaaaggtcagtaatattttcttcccagtttcactttgcttagatattttatgttcccatatctaggattgatattttctaagagattgragtgacttggagctccttgaggagagaatgtagtcttattacactgttctatctctcaggcatagcagcagtgcctggtgctggactaaatgagtcttgt

SEQ ID NO: 280903 - DNA, 201 bp, Homo sapiens
gttttattttgagagattttcttcattaagataccctttggtgaactctaaattcttgaatcaaacatttaaattgtactcctgttgttatataggatatygtacctgtggatgcatcttatgaagtaaaagaactatatgtgccagaaaataaacttcatttggcaaaaacagatgcggaaacattaccagcactgaaaa

SEQ ID NO: 280904 - DNA, 201 bp, Homo sapiens
tatttgctgagtttgcagttgtctttggatactcagcttggaaagagtagagtctgggtcgctctgcactgtgccacgacacgacagtccttgctggcaaygcctctagatgaagcggcctgtggcttgtcctacatgtgttcacggaatgctgatatcttcatttccttccttgtcacacatatatgctcagaaaaactt

SEQ ID NO: 280905 - DNA, 201 bp, Homo sapiens
cagttttgtgaaaaattctaatatctttatatttgttcaaggggcccatctcttattcctttatttccaccccccaccttcttaagcagtttgagtaaaaraaagactgttagtttatgataatcccaagggaggaggggagatcaaactgctttgttattccaggtcccttcacaaaaacccacaaaaacaaacattaag

SEQ ID NO: 280906 - DNA, 201 bp, Homo sapiens
ggcattggtcttttatttcccccatccccaggtttaacagagaattgatctttctaccctgggaagatgatactaaaaaaattgcctgatgaaaagggaarcttaaacttctaccaataacagcaataagacgaatgatagtgaggtctagatctgtgttgtccggttcacgatccacttgtggcaactgaaatttaatga

SEQ ID NO: 280907 - DNA, 201 bp, Homo sapiens
gagttctgtgttcagactctgcctcaccacctagcagttgtgtttgtggggaaattacttttctctctaaggctcatggacaattgttgaggatattgatrgtacctaaagcataacattttactttaaaaagtgaaataagatgtgtaaggcactttaaactgtactgctatgtagtaagagattaagttgttgatacgg

SEQ ID NO: 280908 - DNA, 201 bp, Homo sapiens
gaacccagttggcacaaagctttgtagtcaacatcttactttaatttggaagtgtttttagtcatgagaatagaaagtagttcattgctgccatactttaraatatgaatttaccagttttgtgaaaaattctaatatctttatatttgttcaaggggcccatctcttattcctttatttccaccccccaccttcttaagc

SEQ ID NO: 280909 - DNA, 201 bp, Homo sapiens
aggatgcagtggtaaaaagacagaaaagtgtcctgtttcatggatattacattctacctgggagacagttaattaaaccaaataaatgaatgaaataattytcccttttaccaattctatctttcccaaacagcttgtctccttatatgtggatgtttttcgtagaaggccagcagcacattctggatttagctgaatact

SEQ ID NO: 280910 - DNA, 201 bp, Homo sapiens
ggctgtacagcatttgctctgatgtatgagggccgccgtgtggccattcttcgcaatccagagttttttgagcacaggaaagaggagcgctgtgccagacrgtggggaacgacatgcaagaaccacccctatattaaggtgctgaaaaaacctcgctgcattttatcttgatttgccaatgatgtttgtgctgaaatgtgg

SEQ ID NO: 280911 - DNA, 201 bp, Homo sapiens
tccttcacccgtgaactggcgcttgctgaaacctccgggtgctgaaacctgcggctgcagaaacaggagcttcctgcataccttggagtggcctgaagatstgcaaagaaggcggaggcgggcgccttcgacgcgttcttggtttttcttggctctgccagtgcggttggcccaggtttgggtccatctccgtgtctttcc

SEQ ID NO: 280912 - DNA, 201 bp, Homo sapiens
aacattaccagcactgaaaattaataaagtaagttcttcgttgcttttcacactaagtgatacagccttatatacagtagtttgttaaatttgtgacttayagcagtatttgaggccaggggtggtattagctggggggcaaagatgttgtggtatatgtcacaatttctaaggatggggaatgtgtttaatttgtgcaac

SEQ ID NO: 280913 - DNA, 201 bp, Homo sapiens
tcttctgaagtgaattgtacctggaattgtttaatggtcttcagtaagatacagtatttatttcattgtccaagaaaaatgtttttagtatgctgtacaaygggtaatataggatgatgggtcctttggttaccatgggtactttacataaagttaagaattctctgtcattttctgggttgccttctctttcactgtggc

SEQ ID NO: 280914 - DNA, 201 bp, Homo sapiens
cagaagtaaaagaaacttaacaaggaagaatcagctggttaagcctaacatcaccaaatatatactgtgtacttccaatatatcaatgtcatttatcgcakcaaataatggaacaacggaacttttatcatgttcacttcatttaaaaaatgtttctggatctttatatgccagtatgccatgtgctgaggatccataaat

SEQ ID NO: 280915 - DNA, 201 bp, Homo sapiens
ccagcttctacctccggttctatcccggcgtttcgcccttccccacagacctctgccccggacccatttccgaggcgcgccgcatgcgccgcgcaacccakgccacgagcacgggcgcgtgcgcaagtcagcgcgcgcccgctccgacgcgaggaggccccgccctccagccccgccccgctcgctggcctgccctcctct

SEQ ID NO: 280916 - DNA, 201 bp, Homo sapiens
tgatctcacttacatgtggaatctaaaaaagttgcacctgtagaagtagagagtgaatggtgtttatcagggactgcgaggtttggggtcgagtgggggtygaggaggatggttggaggagatgttggtcagagggtacaaaattttatttagatacaaggattaagttcaaaagatgtataacatggtgatgataataac

SEQ ID NO: 280917 - DNA, 201 bp, Homo sapiens
tccagaaaggtgggacaactcaaagccaggtggtgcggggagcttctaggctataggtgagtttaaatgttttctggttgacaattggttgagtttgtctraagaactgggattgatagaaagggaattgttcaggttaagataaagattgtggagaccaaagttcttttgaggtcttacagtggctacccttagagacaa

SEQ ID NO: 280918 - DNA, 201 bp, Homo sapiens
tggatgagaaggtggagtgggagtggaatgttgaacacacatttgccaatgctttggcgacaaaaagagttgaactcttgtaaaatatttgaagagattcsagaccatcctcgctaacacggtgaaaccccgtctctactaaaaatacaaaaaattagtcagcatggtggcgggcgcctgtagtcccagctactcaggagg

SEQ ID NO: 280919 - DNA, 201 bp, Homo sapiens
gggcaggagaaattaaaggtcagtaatattttcttcccagtttcactttgcttagatattttatgttcccatatctaggattgatattttctaagagattdgagtgacttggagctccttgaggagagaatgtagtcttattacactgttctatctctcaggcatagcagcagtgcctggtgctggactaaatgagtcttg

SEQ ID NO: 280920 - DNA, 201 bp, Homo sapiens
aactgtgagtcaattaaacctcttttctttataaattacctggtctcgggcatttcttcatagcaacatggtaatacaggtgccttaatttttgttgtgtraactgaagctagactttattcatgtgaaggttagagcaagaattatctatttatacctaagttctgctgtagactgctgtagactgtgttatgaacttaa

SEQ ID NO: 280921 - DNA, 201 bp, Homo sapiens
tcattagtatgtagataaatttgtatgacagagaagagattttgcttgaaagagaagagattgagagcttattcttggagatttgttttttttttttttttgaaacatgaagtatggtaatctggtgagagtggaagtaggtgaggattgtcagagggaccataaggaagatggcaaatgctaaaatgagctgtgtggaaa

SEQ ID NO: 280922 - DNA, 201 bp, Homo sapiens
atcattagtatgtagataaatttgtatgacagagaagagattttgcttgaaagagaagagattgagagcttattcttggagatttgttttttttttttttttgaaacatgaagtatggtaatctggtgagagtggaagtaggtgaggattgtcagagggaccataaggaagatggcaaatgctaaaatgagctgtgtggaa

SEQ ID NO: 280923 - DNA, 201 bp, Homo sapiens
ggagaaaaggatcattagtatgtagataaatttgtatgacagagaagagattttgcttgaaagagaagagattgagagcttattcttggagatttgttttktttttttttttgaaacatgaagtatggtaatctggtgagagtggaagtaggtgaggattgtcagagggaccataaggaagatggcaaatgctaaaatgag

SEQ ID NO: 280924 - DNA, 201 bp, Homo sapiens
ttcaatgctattcccatcagactaccatttgatattcttacagaattagaaaaaaactactttaaatttcatatggaaccaaaaaaaagccctctcttctrttttttttttattccagttagccttctgtactaccatgaattctttcaagagcattggtacattagactttagtattttatctcttgttttagaactatc

SEQ ID NO: 280925 - DNA, 201 bp, Homo sapiens
gaaaactgtgaaacattgatgaaaaaaattgaagacagaaataaaaggaaacattgtatgtattcatggattgaaagaattaatattgttaaaatgtccayactacttaaagtgatctacagattcaatgcaatccctataaaaattccaaggattcttcacagaaatagaaaaagcagttctaaaatttgtatggaacca

SEQ ID NO: 280926 - DNA, 201 bp, Homo sapiens
gttccggagccgccgcctctctcccgcctcctccgcatccatccttccagcagcgcggaggtgggttccggggctgcggcgcctcccggctggggccgtgkgtggttgcgaggcagaggggcgcggcgcagggtggggatctcgccctagcttggcgcagcgtgcggtccgagccaccgttcgtgggaagaacgccccccc

SEQ ID NO: 280927 - DNA, 201 bp, Homo sapiens
tcaggtgatccgcctgcctcggcctctgaagtgctgggattagtggtgtgagccaccatgcccagctaacatatgcaaattaataaaggtgatgcaccacmctaacagaatgtagggcaaaaaacctatgatcatctcaatagatgcagaaaaattatttgaaagagttcattaaccttttatgataaaaactctcaacaa

SEQ ID NO: 280928 - DNA, 201 bp, Homo sapiens
aggggggaagtgccacacttttgaactatcaaatcttgtgagaactcactatcacgagagcagcatgggtgaaagcacccccatgatctgatcacctcctwccatgtcgctccctccacacatggagattacagttcgagatgagatttgtgtggggacacatagccaaaccatatcacgattttttctcaaactcttcca

SEQ ID NO: 280929 - DNA, 201 bp, Homo sapiens
gctgtaaaacatttaaaacatttggccagggtgacatgggcacagaaggggcagacaggaggtcggcagccaggtctgtggaggagtagccagaggtgcargaggccgcgtcagcgtcctcccaatcagcctctgctgagggagtgccgcgcgcggcgagccgcgcactccccttgcctttctcccggcggctggtactcg

SEQ ID NO: 280930 - DNA, 201 bp, Homo sapiens
gacaagaagggagaactacagagcagagcagctcaggaagtgaactgttacataagaacaacagaatttgttgcttacagactgcatggagtgaatacacrcagacaaaggcagagagaagaagaatgagaatgaatgactatgaatttacatgtcagattctagaatccagaaagacagtagctttttctaaatggaatg

SEQ ID NO: 280931 - DNA, 201 bp, Homo sapiens
ccccaggaaacttataatcatggcggaaggtgaagaggaagcagggcacatcttacatggtggcaggagagagagaacaaggggggaagtgccacactttkgaactatcaaatcttgtgagaactcactatcacgagagcagcatgggtgaaagcacccccatgatctgatcacctccttccatgtcgctccctccacaca

SEQ ID NO: 280932 - DNA, 201 bp, Homo sapiens
tttctcccagtctggcttatcttctcaatcttttgagaattactttattttgaataacaaagtattggacacatgtatgaaaagccctccatcagtgccarttttgcatggttgtagaggttacctgacagatttggcttaaaacaaattaaagtgattaaacacatttagtaattattcttagggatatgtcaagtgttg

SEQ ID NO: 280933 - DNA, 201 bp, Homo sapiens
aattaaagtgcctgcctcaggattgtgcagaggattctatgagttgatacatgcagagtgcttaaacagttcctggcatgtagcaagcatactctaattaytgagtattctttttatgttaagtccattgaaagacagtattgcagggatttgggtcaagttgttgacctctcttaggcctcgatttcctctgtaaagaag

SEQ ID NO: 280934 - DNA, 201 bp, Homo sapiens
accctgggagccagaggttgcagtgagctgagattgtgccattgcactccagcctgggtgacagagcaagactctatctcaaaaaaaaaaaagaaaaaaaatgcatgtttgactatgcccctccctcaggcagaagatgttttaatgattcttccctctcccccaggaggggcctttggtgctatggtctattctcatctt

SEQ ID NO: 280935 - DNA, 201 bp, Homo sapiens
gccagaactagggccacaggcatctccatggcatggaggggaatgcaggctggagctcttggtcaggatcatacttaatgtcccaggtgtttttccaataycctactccttcatctgccctcatgtctccctgcaggaaggacattccccaagaagggccaaacgtgtgtggtgcactacacaggtaagtctcaccccctc

SEQ ID NO: 280936 - DNA, 201 bp, Homo sapiens
agcacctggagaggacaggtgaggctctgcaggtaaactgggaaatgaaccattttactggagctcttaaaagatgatgcagaaaatcatgatgcagtatrctaatgagtctggacattggcctatgagagccactaaagctgttaaacagaagagcaataataagatcaaggtcacatcagttgttttcagactttcagt

SEQ ID NO: 280937 - DNA, 201 bp, Homo sapiens
ataaatgaagttatttatccaaagtagattaagtcacatgaaacctgaagaaactaaggaatgagaaaggaaagtcggtatataaatggagtgtgtgaatrtgtgcatgtgtgtttgcatatctgtgtgcatatttgtacaagtatgtatctgtgtgaatgtatgtagatctgtgtatgtaaatattttcttagcatctat

SEQ ID NO: 280938 - DNA, 201 bp, Homo sapiens
tgtctcactttcccaagtccttgtattactgggtctgggtgtgcaaggaatagccatttctttatttcttgaaatttaattaataccaaagcccccattgyctgcagggtttgatgggcaaacttcatatcagatattattaatatgaacagctcccctccccaggaaattggataacttcttggctccaggccatcttcc

SEQ ID NO: 280939 - DNA, 201 bp, Homo sapiens
ggaaggccaactctttccctcttctaccagcaagggccatccatggtgccagcttctaggtgagtcaaacaccttcagtccccttccttctgttgcaggtrtggtggagcccctgtccctgctgggtctgtctgatatttggaaatccctcctagagctccccgcagactttctctccatcctgcagtatcattagagaag

SEQ ID NO: 280940 - DNA, 201 bp, Homo sapiens
agtcagcaattactggtgtcctccctccctcccccagctctgctcctacagatccaggacgcctagcgagggtaggaacctcttctgtgcttccgcaacgstctgaactgcacggcactgagcgcatctaattaaagtgatggtttcattagatagcaacacagcgagaccccgtttctacaaaaaataaaaataaaaaat

SEQ ID NO: 280941 - DNA, 201 bp, Homo sapiens
ctgcactccagcctgggtgacaaattgagattctgtctcaaataaataaataaataaataaaaatagaaatgaagaaaataggtggattccaaagatatgkaggacttagtgataggcagtatgtgggggtgaggcagaaggaagtgtccagatttcctgcttgggcaacaggatggatggggaggatcggaagaggagca

SEQ ID NO: 280942 - DNA, 201 bp, Homo sapiens
gcaaacaggaagtcatcaaaggttttgaagagggtgcagcccaggtaggatgaggattcgcattaaaggggatctggggagttggggatctgggatcagcwctctgccctccacctccaccttcacccactcacagaccactactgctttgactctacagccagggcatggcaacgccatctggtgtcccctcctggcttt

SEQ ID NO: 280943 - DNA, 201 bp, Homo sapiens; identical to SEQ ID NO: 57127

SEQ ID NO: 280944 - DNA, 201 bp, Homo sapiens
tttgtctccatggattggttttgcctatttttgaacttcatcttaatggaaccacagcgtaggtactcttttgtgtttggcttatttcactcactattatrtctgcgagatatatccagaatggtttattcctctacagtattttaacgtacaagtatgttgcaatttatgtatcctctctaccgttgatgaacatttggg

SEQ ID NO: 280945 - DNA, 201 bp, Homo sapiens
ctttttacattacctaaaggcacaccatgcattacaaaaactaataatgcattcataaaagcattcaaaagaaaattacagctgtagctcctttcttatcytcccacccttagaaatgactctactctcttacactgctttcaaaaaacactcagatataattaaaagcagaattgatgctctttgtacattgaagtgatt

SEQ ID NO: 280946 - DNA, 201 bp, Homo sapiens
ccccttcttgcataaccatagtacaattatcaaaaccaggacattcacactgatacaaattacttacttattcaaatttttgattattcaaaattcaaaastagatttaaatttcaccaattgtcccactaatgctgagtgggttctcaacaactgctgtgatgagccctggttcaagctgttctttcttggtctgtctgt

SEQ ID NO: 280947 - DNA, 201 bp, Homo sapiens; identical to SEQ ID NO: 57125

SEQ ID NO: 280948 - DNA, 201 bp, Homo sapiens
gagacggtgtttcaccatattggccaggctgatctcaaactcctgacctcaggtgatctgcctgcctcggcctctcaaagtgctgggattacaggaatgasccaccacaccaggctttgttttggttttggcctactctggtgagcgttcagtaccatttcattgtgggtttttttgttttttttttttgagacaaggtct

SEQ ID NO: 280949 - DNA, 201 bp, Homo sapiens
gcagtactgtctgacagctttccaaagtcgttgtgccagtttccactctaggcagctgtgtaggagactgccagttaccctgtgtcctccccaacacttgktattgtcaggttttggttttgttttgttttttctttttttgagacagagtctatgttgcccaggctggagagaaatggcatgatcttggctcactgcaac

SEQ ID NO: 280950 - DNA, 201 bp, Homo sapiens
cctccaccttcacccactcacagaccactactgctttgactctacagccagggcatggcaacgccatctggtgtcccctcctggctttgcgtccccacccytctccttgccagcatacctcttttgtgtccctgggggctctcatcccaagcacatccccctaggcttgctcagaactagctgagagagccaggcacggtg

SEQ ID NO: 280951 - DNA, 201 bp, Homo sapiens; identical to SEQ ID NO: 57126

SEQ ID NO: 280952 - DNA, 201 bp, Homo sapiens
gaggtgggtcaaaggagacacccactaaaagaactcccccaaagtgcaaacacatactggctagcacctggagaggacaggtgaggctctgcaggtaaackgggaaatgaaccattttactggagctcttaaaagatgatgcagaaaatcatgatgcagtatgctaatgagtctggacattggcctatgagagccactaaa

SEQ ID NO: 280953 - DNA, 201 bp, Homo sapiens
gcacatccccctaggcttgctcagaactagctgagagagccaggcacggtggctcacacctgtaatcccagcactttgggaggccgaatggggtggatcasttgaggccaggagttcaagactagcctcaccaacatggtgtaaccccgtccctgctgaaaatacaggcgtggtggtgcatgcctgtaatcccagctactt

SEQ ID NO: 280954 - DNA, 201 bp, Homo sapiens
ctcacacctgtaatcccagcactttgggaggctgaggtgggcagatcacctgaggtcaggagttcgagaccagcctggccaacatagcaaaaccccatctytactaaaaatataaaaaaattagcaggcatagtggcaggtacctgtagtcccagctactcaggaagctgaggcaggagaatcccttgaacccgggaggcg

SEQ ID NO: 280955 - DNA, 201 bp, Homo sapiens
tgtatgcaaggtaggcatttggattctgctctggggagctattgaagtattttgagcaggggagtaatagaatcagatttgtgtttaaagaaaaaaaaaaatcagtctggatgccaagtggacaatgaaatggaggcgagtaaaagaggatcaaaaagaccagttaggaggttgttcctgtgtacaggtgagataagctgg

SEQ ID NO: 280956 - DNA, 201 bp, Homo sapiens
gcagccttgacctcctgggttcaaggactcctcccatgtcagcctcccaagtagctgggagtacaggaacatgctaccatgcctggctaatttttttttgktttttttttgtgtgtgtgtgatggagttttgctatcgttgcccaggctggagtgcaatggcacgatttcagctcaccacaacctctgcctcccaggttca

SEQ ID NO: 280957 - DNA, 201 bp, Homo sapiens
aatcacttgaccctgggagccagaggttgcagtgagctgagattgtgccattgcactccagcctgggtgacagagcaagactctatctcaaaaaaaaaaaagaaaaaaaatgcatgtttgactatgcccctccctcaggcagaagatgttttaatgattcttccctctcccccaggaggggcctttggtgctatggtctat

SEQ ID NO: 280958 - DNA, 201 bp, Homo sapiens
ggaaaaaaaggtggtagttgtcattcgtgggatttagtccaaatgaaaatgtagaaaacatttattttggtggatctgtgttgatgccatatttctccttragaagcttcaactgttcctccttcttctttgtgtccatcttctgaaatgcctggaaatgtggtaagcaccaaaattaaattaccaatctacagccaaatg

SEQ ID NO: 280959 - DNA, 201 bp, Homo sapiens
gcatagaaccagcatccccaaaagtccccctgatgccttctcccagtcatttcacctccctagaggtagctatcattgtttttctttttttttttttttttgtcattgttgttgttgttttgagacagggtctcactctgtgactcaggctgagtgcagtggtgatcacagctcattgcagcctcgacctctcgggctcaa

SEQ ID NO: 280960 - DNA, 201 bp, Homo sapiens
tccagccgtctgccattggtcactgcttcagtgcctctctccttcccccaggtgaccccctccgcttccacgcccattatatcgctcagtgctgggccccygaggacaccatcccactccaagacctggttgctgctgggcgccttggaaccagcgtcagaaagaccctgctcctctgttctccgcagcctgatggtaagg

SEQ ID NO: 280961 - DNA, 201 bp, Homo sapiens
gacttcctggtctatcctggtgagtatgggttggggcctctggttgctgtgcctttccatacgatcccaatgtattctgcgtttttcttttttttttttttgtcttaatagaggtggggtctcttgttgcttaggctggtccctattcctgggctcaagcaatccttccacctcggccccccaaagtgctggaattatagg

SEQ ID NO: 280962 - DNA, 201 bp, Homo sapiens
ctgtttcggtaactgctttgcctcccggctcccgcaggaggatgctggtggtggaggtggcgaacggccgctccctggtgtggggagccgaggcggtgcargccctccgggagcgcctgggtgtggggggccgcacggtaggcgccctgccccgcgggccccgccagaactcgcgcctgggcctcccgctgctgctgatgc

SEQ ID NO: 280963 - DNA, 201 bp, Homo sapiens; identical to SEQ ID NO: 57141

SEQ ID NO: 280964 - DNA, 201 bp, Homo sapiens
tcgagaacggagagctgaggccactgtgggcggagccacatgtttcggctttcttcggaggtagtcgagtccttagggtcactgttccgatgtgggcgggsccacagactcggccggatgtgggtggggccacaagcttcggtttacttcgtagatagttgggtacaagtgacgctaggatgataggcggagtcaacaggt

SEQ ID NO: 280965 - DNA, 201 bp, Homo sapiens
agggggcggggctttcggctgtggggttcggtcgtagggcgggaactccccaactggggtgcgctggcgctcggagggggcggggccacaggccgcgaggstgccgggagccgatgacgcccgaacgccgaacctattgcgtccgggaggaggcggggctacggattcggccgagccgagaacacccgaacgtcaaattgc

SEQ ID NO: 280966 - DNA, 201 bp, Homo sapiens
gtccacctctctccatgacatggatgtagcggactgggacaaacacacagggaccagacgcagaaggcaggggagaaagaaaagcagatgaaggccggatrcggtggctcacgcctgtaatcccagcactttggaaggctgaggtgggcagatcacaaggtcaggagttcgagatcagcctgaccaacatggagaaacccc

SEQ ID NO: 280967 - DNA, 201 bp, Homo sapiens; identical to SEQ ID NO: 57133

SEQ ID NO: 280968 - DNA, 201 bp, Homo sapiens
ccgatgacgcccgaacgccgaacctattgcgtccgggaggaggcggggctacggattcggccgagccgagaacacccgaacgtcaaattgctggcgttcgrgaagggggcggggctgcggattcggtggagccgaggacgcccgaacgccgaacttcctgtgctcgggagggggcagggttttgtactgtgggagtctgag

SEQ ID NO: 280969 - DNA, 201 bp, Homo sapiens
gagttttaccatgttggccaggatggtctcaaactcctaacctcaggtgatctacccgcgtcagcctcccaaagtgctgggattacaggcgtgagccacccgcagctggcctagaatgagtatttctatttgtttatttatttttgagatggagttttgctcttgttgcccaggctggagtgcaatggtacgatctcagct

SEQ ID NO: 280970 - DNA, 201 bp, Homo sapiens
gtggatgtagggaccgaatgagtatgattgaaacagtgggagaagaggctcagccacatagaaacacacaccaacagagaatgaggttaagagaagcttcrggtgaagaccctgcaatcctccactttttctttatttccgaggtccagggctcaagaagagagaggtggatatgaatgaatatgaacggtggccaggcca

SEQ ID NO: 280971 - DNA, 201 bp, Homo sapiens; identical to SEQ ID NO: 57145

SEQ ID NO: 280972 - DNA, 201 bp, Homo sapiens
cagcaggtggtgaacggcggctgagcgaggccccgccccctgaggcctaggggcggggcttcgccgagaccccggaggctttgggtgcgctgcagcggtcygcggcgcgcagctgtttcggtaactgctttgcctcccggctcccgcaggaggatgctggtggtggaggtggcgaacggccgctccctggtgtggggagcc

SEQ ID NO: 280973 - DNA, 201 bp, Homo sapiens
tcccatctcccctctttcttgccattcccagtaaacagacttcatagaatctcaatttcctgtaagtttagattaatttaaaatatgacactgggccaggygtggtggctcacacctgtaatcccagcactttgggaggctgaggtgggcagatgagtttgagatcagcctggccaatatggtgaaaccccatctctacta

SEQ ID NO: 280974 - DNA, 201 bp, Homo sapiens
tcggccggatgtgggtggggccacaagcttcggtttacttcgtagatagttgggtacaagtgacgctaggatgataggcggagtcaacaggttcgccagayacccatgagtatttacaagggggcggggcgaaagcgacttgccctcaaaggggcggaaccccgagggccggcgtgcgcctacgggaccgggccagggtga

SEQ ID NO: 280975 - DNA, 201 bp, Homo sapiens
gttctatcggtggacagtgggacattctgaagggaggcaaggaggcggactgagcgctcccaattggggtgagcccgcccgagcggagagtggacggcggstgtccagggggcggggctttcggctgtggggttcggtcgtagggcgggaactccccaactggggtgcgctggcgctcggagggggcggggccacaggccg

SEQ ID NO: 280976 - DNA, 201 bp, Homo sapiens; identical to SEQ ID NO: 57132

SEQ ID NO: 280977 - DNA, 201 bp, Homo sapiens; identical to SEQ ID NO: 57139

SEQ ID NO: 280978 - DNA, 201 bp, Homo sapiens; identical to SEQ ID NO: 57134

SEQ ID NO: 280979 - DNA, 201 bp, Homo sapiens
agatacccatgagtatttacaagggggcggggcgaaagcgacttgccctcaaaggggcggaaccccgagggccggcgtgcgcctacgggaccgggccaggrtgacgatcctcaagttcccaagtagaggagaggaagcggcagagggaggtgcgctcagtggggcggagccaaggtggcccccgcgggaggagggcggggc

SEQ ID NO: 280980 - DNA, 201 bp, Homo sapiens
ccattggtcactgcttcagtgcctctctccttcccccaggtgaccccctccgcttccacgcccattatatcgctcagtgctgggcccctgaggacaccatmccactccaagacctggttgctgctgggcgccttggaaccagcgtcagaaagaccctgctcctctgttctccgcagcctgatggtaaggtggtctacacct

SEQ ID NO: 280981 - DNA, 201 bp, Homo sapiens
tctggcacaccgcaagcacccaatggcacctactgttaccctatgtgggttatttcctcaccccaggaggagctgggaggtgaagacctgcccaagggcaygtgaatggggaatgctgtgcccagggcagcaagtgaggtgacgtcccacccccagggtgtgttggaggtaaaatcccggggagccactgaagggggaggt

SEQ ID NO: 280982 - DNA, 201 bp, Homo sapiens
aaagtgctggaattataggcccagctgcatttttcttttttgtctcactttctcttagcctctgaaattcatagacagacaggaaacatttgggagctccygaactcattgggcaagcagtttaacgacttttattaaatgattactgtgatccagaagattcacttagaagtagttagacatcaggctgggcgcaatggc

SEQ ID NO: 280983 - DNA, 201 bp, Homo sapiens
aatgtaaatttaaaaatgcttcaagacttttgtctaatacatattattcaaaaatttgaaactgttatttttgccaaatgcttcagctattattgcaattwttttttataatcacaaaagatgttactatactggcatttgtttttaaaaagctgtcgatattcaaccagcatgccttggactttattgtgggaagaccct

SEQ ID NO: 280984 - DNA, 201 bp, Homo sapiens
attgcaccactgcattccagcgtgggcaacagagggagactctgtctcaaaaaaaaaataaaataaggaaatataaaagaatatggaggcattaatatagkcattgtttatgttggcattttgatgtctatattattttttaaaacatttaataattttataataatttctaatttatgatttggtaccgtgtcttgtaca

SEQ ID NO: 280985 - DNA, 201 bp, Homo sapiens
aaatagcactaggacttattggtacatgcaacaaacaatatatttatgctctgagaggacacagataatggactttcacctacaggatatgtaactgctayctataaagaaagtaaggatgtagtcacaagctgtccataacaataagattattaggaataaatacatgtgatggggaagaaaaggaaacttttagaaatg

SEQ ID NO: 280986 - DNA, 201 bp, Homo sapiens
aaaggaaacttttagaaatgaaagtttatacttgccaaaataaaaaaaaaggtagtcagcagattaaacagttgaagatagaattagtgaactagaaaaaratgcatagaaataatggaatattgcactgagaaagaaggagatggaaaatcaggtgcaagaaggtgagatccatgttgggtaggtgtgggagtggtccag

SEQ ID NO: 280987 - DNA, 201 bp, Homo sapiens
ggaaacttttagaaatgaaagtttatacttgccaaaataaaaaaaaaggtagtcagcagattaaacagttgaagatagaattagtgaactagaaaaaaatrcatagaaataatggaatattgcactgagaaagaaggagatggaaaatcaggtgcaagaaggtgagatccatgttgggtaggtgtgggagtggtccaggct

SEQ ID NO: 280988 - DNA, 201 bp, Homo sapiens
cagtctctcttataacaattccatgaacttctggggtcctgcaagtgacatgccaattataagagtcactgaactcaagaaagccaaaccatggtatcccyatcaggcatttatagttcatttatggttctccccagtcgagatataatttaccaggcaaggatcatttgtatcataagcagtgttgcctagcaatatagt

SEQ ID NO: 280989 - DNA, 201 bp, Homo sapiens
tgagccaccacgcctggccttgaatttttacagcttatccatagttaagaattagctatacactgttaaattagcttgaacttatttgtttctctgcccctgtgaatctcctatataaaatgttcacatacttcagttagcatgaatcagaaatggggacctaaaacggaaaaagacagcttagtactggttgagttgatg

SEQ ID NO: 280990 - DNA, 201 bp, Homo sapiens
caacttccacagatgcctaggacatggacacaatgcagcagagttctttgctagggcatagtatggatgacctttactacagttcctgataacttccttawttccatgtgagacctcatcagcctggccttcactgtctacatttctgtcagcattttggtcacagccacttaaggctctaagatgttccacgctttccct

SEQ ID NO: 280991 - DNA, 201 bp, Homo sapiens
gatgacctttactacagttcctgataacttccttaattccatgtgagacctcatcagcctggccttcactgtctacatttctgtcagcattttggtcacarccacttaaggctctaagatgttccacgctttccctcaccttcctgtcttcttctgagacctccaaacactttcagcctctgtctggtacccagctccaaa

SEQ ID NO: 280992 - DNA, 201 bp, Homo sapiens; identical to SEQ ID NO: 57178

SEQ ID NO: 280993 - DNA, 201 bp, Homo sapiens
ggcaatgcttcctctggttttacattggttcttcattgaatggtactcggggaaaaagaggttagcacatttctatgaacatatctggctggactaatgtkggaataattatcactcagaagaccttattaagtaattatgcttcttctgttttaaaagtggtaaacatgtttttctttatcttcagattattcttaactg

SEQ ID NO: 280994 - DNA, 201 bp, Homo sapiens
ttattgtgggaagaccctattatttaaaaatggctcaactgaaatatatggagaatgtggggtaagtcttatgtttgtatcttatttcattttgtaaaatctatttgcttttgaaatattttcacatacaacattttttgttattatactcattaatttataaaagaatatggaggaccaggcgcagtggctcatgcctgt

SEQ ID NO: 280995 - DNA, 201 bp, Homo sapiens; identical to SEQ ID NO: 57180

SEQ ID NO: 280996 - DNA, 201 bp, Homo sapiens
aagtagaaaactcaaaatcacctatagactagatattagaaataacaagacagtttaataaaaaggttgactataagataaatatatgaaactatttcctrtattccatgtacagtacaagtactgtgacatagctcagaccattaagttacataggatttatctgagcacttgacaagccaattttaaaatttatatgga

SEQ ID NO: 280997 - DNA, 201 bp, Homo sapiens
accgattcacagatcccagaaggaaaacacatcccaagcagaataaacagaaattcacacctgcatgcatcataattaaactgcagagtactgaaaacaaragagaagccatatggaagagaaccaaggcacacctgttaacagccttggttgtgcttccagctaacagccagcacttactgcagccatgtgagttagtcc

SEQ ID NO: 280998 - DNA, 201 bp, Homo sapiens
gccatgtgagttagtccttttaaatgctgcagcatggtcaagcctctagaccagtgcttcccaaattgacaccatgtggagcagaaagaactgcccagttsagcccagtcacatcacaaaatagtgagaaatgatcagtggttcttgtttcaagccactaagtattgaggtagtttgctatgcaatgatacataatggaaa

SEQ ID NO: 280999 - DNA, 201 bp, Homo sapiens
tggtaaaatgggaataatgatccttataaggtgtcgtgaggattaaattaatccacacattctagataccatataacttacatataggaggcactttatartaaatggcattattacagtgtttggattagtgttttttctttttttctccccaaataagtgtaatttctgttagaatgttttgttttcaaaatattaaat

SEQ ID NO: 281000 - DNA, 201 bp, Homo sapiens
tatggcaaattattttatagatatatatatatagctataatttatatataaaatactatataaaacactgataatgtcctttttgttgattcattgattcrtagagcttaactctaagcattaattaccctcttgtcatataactctcctaaggccttgcataacttaacgtggtcctatttggaaaacttaataaatgaa

SEQ ID NO: 281001 - DNA, 201 bp, Homo sapiens
cttaacgtggtcctatttggaaaacttaataaatgaattgaatattatatttaaataagatataatgtaatcttatttaaaacaaaatcagacttatttascgatagtctcatttatgttatttattgtaatatttataaagcctattacagtaggagggtcagaaaatataagattagaagagaaatggcaaacaggtac

SEQ ID NO: 281002 - DNA, 201 bp, Homo sapiens
atagtatcttatagcattgggtttaggcatattatttatttacctaagcattctaaatataaatgtatggtcagactgggctaagcacttccgaaggttgyagggctaccacaagtcatagtaattttttttttttttttttgcaagtcaacaaaaagcaatagcacacaattaccagaaacctttggaacactagtgcat

SEQ ID NO: 281003 - DNA, 201 bp, Homo sapiens
ggtagtcccgactactttcctacacggctggcctcgggctcggctctttgtaggcggccttcggttggcggcgcaggctcgccccttgaccccgcccgccytcgggccgggctccgcactcctgcggggttggggtggtctgtccgcaacgggctactaggggaggcgcgctgtctgcggcgaaatgccaggtctttgttg

SEQ ID NO: 281004 - DNA, 201 bp, Homo sapiens
tttctacagctttttttttctgattataaaaattacattaaaaatgggacattcaaaaacagaataaaagcacacacagaataaaataatctgtaattctrttccttgagatgattctgctacaaattttatctttccagttttatttctgcatgtgtatgcattttaaggaatattaaggctatactatgacatgctatc

SEQ ID NO: 281005 - DNA, 201 bp, Homo sapiens
gctttttttttctgattataaaaattacattaaaaatgggacattcaaaaacagaataaaagcacacacagaataaaataatctgtaattctattccttgwgatgattctgctacaaattttatctttccagttttatttctgcatgtgtatgcattttaaggaatattaaggctatactatgacatgctatcttgtaagt

SEQ ID NO: 281006 - DNA, 201 bp, Homo sapiens
tataagtgattcaataaaaatccttgtacagtaggtttttttatgtatccctggttgtttcccttggataaatttctacaggtaaaattgctgaatcaaawgggataaacagttttaggatttttggtacatatttccagactgcctaagaaagcaaccattgtacccttgctagccgtgtatgacagcctgtttggccag

SEQ ID NO: 281007 - DNA, 201 bp, Homo sapiens
tgggttcaattgattctcctgcctcagcctcccaagtagctgggactacaggcatgtgccaccacacccagctaatttttgtatttttttttagtagagayggggtttcaccatgttggccacattgatctcgatctcctgacctcatgatctgcccacctctctttgcatttgaagttcatgaccaaattaaaatatttt

SEQ ID NO: 281008 - DNA, 201 bp, Homo sapiens
tttacattcactggatgccttaataaggcaaggttcttcaaagctggcccaaggatagtttttacaattttttatggttaaaaaatcaaaagacttatatwtctagatgtgagtatgaaacgtatgttttattgtccataaagtttttattggaacacagccgtgcccattcatgtatgtattctctatggctgctttccc

SEQ ID NO: 281009 - DNA, 201 bp, Homo sapiens; identical to SEQ ID NO: 57182

SEQ ID NO: 281010 - DNA, 201 bp, Homo sapiens
ggtatgcccaagaggacagagaacgaatgcacagaaatattgtcagccttgcacagaatctcctgaactttatgattggctctatcttggatttatggcartgcttcctctggttttacattggttcttcattgaatggtactcggggaaaaagaggttagcacatttctatgaacatatctggctggactaatgttggaa

SEQ ID NO: 281011 - DNA, 201 bp, Homo sapiens
agggctgaaactatttactatcttgccctttccagaaaaagcttgctggccactgcctcagaaccttaggttgtaagtctcacagaactggttgagaaagratttgactctaaggaaaattactatttgaatttatttgatggtttattgagaaaatttgtttcatttccaacataataccaatgcttatctttcagatta

SEQ ID NO: 281012 - DNA, 201 bp, Homo sapiens
agagaaaactcaaccaagagaaaataagttgtaaactattttggagtggttactgctgatgccactttttctattaccttagtgagagagtgagtgggggraaacatctaggaatcatagtgacttttaggtaagataatagtggaggaactagacagaatatttttatagtgattattcagttgttttcatctgtagatg

SEQ ID NO: 281013 - DNA, 201 bp, Homo sapiens
atatattagtaactgttatacatattacatttaaatgattgcttttaaatacgttaatggctctgatttaagaactctttgttctaaggccaaactctagmggaagcagaagtataaagtgtctcagtactcttccatcctatacttgctaatctagggactatgaactgtctcagactacccatgacagttgatctgtgc

SEQ ID NO: 281014 - DNA, 201 bp, Homo sapiens
gtaattttgagtagaaaaaaaatctcagaagacttccattagtgtgatatcattcaaaaataagcaaaactaaccagaatagttgtgaagcagaaatacarttgggataaaaactttctggaaaaaagtggtaaaagcagtttggtacatggttgcctctaagggagagacagaggtatggatggggaggaacaaagaagt

SEQ ID NO: 281015 - DNA, 201 bp, Homo sapiens
gaaggccactattataaagaactccttttaaaaaattgtgtatgtctttattttcagaatatttttggccaaaaaagtatcttttgacacatttgtagtcrctgggtagaatagaacatcatatcataacgtttatattttcaaatattctaaaggaactaagctattggttaaaaccatgaagaacaaatgagaagtagt

SEQ ID NO: 281016 - DNA, 201 bp, Homo sapiens
caattgggataaaaactttctggaaaaaagtggtaaaagcagtttggtacatggttgcctctaagggagagacagaggtatggatggggaggaacaaagawgtagttacaaattgttgacagtgttctagttattgggtaggagatgagcttataatattataattactatactttctaacaaacacgttacataccatct

SEQ ID NO: 281017 - DNA, 201 bp, Homo sapiens
gggaggaacaaagaagtagttacaaattgttgacagtgttctagttattgggtaggagatgagcttataatattataattactatactttctaacaaacaygttacataccatcttttatgtgcatattaagattaaaatgatacacagataactaagaaatttttagcaacaatttggcaagatactaaagatgcagggt

SEQ ID NO: 281018 - DNA, 201 bp, Homo sapiens
tcagactgggctaagcacttccgaaggttgtagggctaccacaagtcatagtaattttttttttttttttttgcaagtcaacaaaaagcaatagcacacarttaccagaaacctttggaacactagtgcattgacaaatgaaggctgtttttcccaatgtatatatagcctagtttcttacaaattgaaaaataccacagg

SEQ ID NO: 281019 - DNA, 201 bp, Homo sapiens
agcttctatcattataacttactgcaaaaaaataacttttacattactaaaactttaagaatgagttatggaaaatgagcagttattactcttatagcagkaattagctttagtttgtcaaatttaaactatccccacatgtaggcagcatggattgaaagaggggaagagtggaatgggatgaggtcttctggtggaagg

SEQ ID NO: 281020 - DNA, 201 bp, Homo sapiens
ctgggttcaagcgattctcctgcctcagcctccccagtagctgggactacaggcgcgcgccaccacgtcaggctaatttttgtatttttagtagagacggrgtttcaccattttggccaggctggtctggaactcctgacctcatgatctgcccacctcgacctcccaaagtgctgggattacaggcgtgagccacctcac

SEQ ID NO: 281021 - DNA, 201 bp, Homo sapiens; identical to SEQ ID NO: 57184

SEQ ID NO: 281022 - DNA, 201 bp, Homo sapiens
cctgccaccacgcccggccaatttttttgtatctttagtagagacggggtttcactgtgttagccaggatggtcttgatttcctgacctcgtgatccaccygccccggcctcccaaagtgctgggattacaggcgtgagccaccacgcccagccaaggagagctggtattttaagagataactggcttcaggttttacaaa

SEQ ID NO: 281023 - DNA, 201 bp, Homo sapiens
aagttagatcctaccttacgttaggcacagaaatctcttctaggtgaattaaagataaatgtgaaaagcaaaaccttaaaatttttagaagaaaatttgggtgtgtgtgtgtgtgtgtgtgtgagatacacacacatctcagggtgtggaaggactttttaaaacatttaaactgctaagtagaaaaaaaaataaaagcct

SEQ ID NO: 281024 - DNA, 201 bp, Homo sapiens
ttagatcctaccttacgttaggcacagaaatctcttctaggtgaattaaagataaatgtgaaaagcaaaaccttaaaatttttagaagaaaatttgggtgtgtgtgtgtgtgtgtgtgtgagatacacacacatctcagggtgtggaaggactttttaaaacatttaaactgctaagtagaaaaaaaaataaaagcctggt

SEQ ID NO: 281025 - DNA, 201 bp, Homo sapiens
agatcctaccttacgttaggcacagaaatctcttctaggtgaattaaagataaatgtgaaaagcaaaaccttaaaatttttagaagaaaatttgggtgtgtgtgtgtgtgtgtgtgtgagatacacacacatctcagggtgtggaaggactttttaaaacatttaaactgctaagtagaaaaaaaaataaaagcctggtgt

SEQ ID NO: 281026 - DNA, 201 bp, Homo sapiens
gatcctaccttacgttaggcacagaaatctcttctaggtgaattaaagataaatgtgaaaagcaaaaccttaaaatttttagaagaaaatttgggtgtgtktgtgtgtgtgtgtgtgagatacacacacatctcagggtgtggaaggactttttaaaacatttaaactgctaagtagaaaaaaaaataaaagcctggtgta

SEQ ID NO: 281027 - DNA, 201 bp, Homo sapiens
ctatgaaataaaaagttataaatgtcaaataagtcattcagttctttagtaagttggaatcaggcctgtatagataattcagtttctagctgctgaatccygagttaacatttgaaattgttccaaatgggttctactgcaatgataagtagtttcataaactgaagtcatttacaaataatgtatgaaaaaaattcaaag

SEQ ID NO: 281028 - DNA, 201 bp, Homo sapiens
tccttaagatagtttgtttaatcctttttttttttttttttttttttttttgtgatggaatctcactctatcaccaggctggagtacagtggcatgatctyggttcactgcaacctccgcctcctgggttcaattgattctcctgcctcagcctcccaagtagctgggactacaggcatgtgccaccacacccagctaatt

SEQ ID NO: 281029 - DNA, 201 bp, Homo sapiens
cagttctttagtaagttggaatcaggcctgtatagataattcagtttctagctgctgaatcctgagttaacatttgaaattgttccaaatgggttctactrcaatgataagtagtttcataaactgaagtcatttacaaataatgtatgaaaaaaattcaaagtttttttctcaatttgtccatttattttagtgtgttat

SEQ ID NO: 281030 - DNA, 201 bp, Homo sapiens; identical to SEQ ID NO: 57179

SEQ ID NO: 281031 - DNA, 201 bp, Homo sapiens
tcccgagtagctgggactacaggcgcctgccaccacgcccggccaatttttttgtatctttagtagagacggggtttcactgtgttagccaggatggtctygatttcctgacctcgtgatccacccgccccggcctcccaaagtgctgggattacaggcgtgagccaccacgcccagccaaggagagctggtattttaaga

SEQ ID NO: 281032 - DNA, 201 bp, Homo sapiens
cagccttgatgaaattttcacttatcctccacaaaaatgataaaagctaggacaatgtaggaaactttttataaaggtaatttgcatacctctgttatgarattatgttctctctgcttttcccatgtgaaaatgtgttctgttatgaacataggtgataatgataattgtgtgtctacatgtgggtgcttaatgtcctga

SEQ ID NO: 281033 - DNA, 201 bp, Homo sapiens
ctttctgactggtacacgatgctttacaacccaagtccagattacgttaccacagtacactgtactcatgaagccgtctacccactgtaagtgtttatttygacttaagatcattgtttttttttaaatctctgaggattattatagattttatggcgtttggagacaaaaacaggtgtgggtttgagttctgggtctgcc

SEQ ID NO: 281034 - DNA, 201 bp, Homo sapiens; identical to SEQ ID NO: 57181

SEQ ID NO: 281035 - DNA, 201 bp, Homo sapiens; identical to SEQ ID NO: 57187

SEQ ID NO: 281036 - DNA, 201 bp, Homo sapiens
ataaagtggagtttcccttctagttcgtatctttgagaagaaactatagtgtttccaggagtgaatgatggcatagactaggacttaagagacatgatgaygtagctttcgtctgggtgcctctactgagtgcttatatgaccttaggagcctcactttcctcatctataaagtggagtggctagactgagtgatttctta

SEQ ID NO: 281037 - DNA, 201 bp, Homo sapiens
aacttaaatatttaaactgaaatgggatgtcttatagaatgatttgggggggtgttaatgttgtaaaataatatctgtacacaaaatattggttttatatrttataggtatgcccaagaggacagagaacgaatgcacagaaatattgtcagccttgcacagaatctcctgaactttatgattggctctatcttggattta

SEQ ID NO: 281038 - DNA, 201 bp, Homo sapiens
ttaaaagaaaatcagagtgttcatgtgtcatttctgcccccttactattcatgcagcaggctccaggaatgttagaggttaaggaggttgggtttctgtayctcctatttcccacctgtagatccatagcaacagtggatcagggcaggaagcaagcacataaagtggagtttcccttctagttcgtatctttgagaagaa

SEQ ID NO: 281039 - DNA, 201 bp, Homo sapiens
cggggtttcactgtgttagccaggatggtcttgatttcctgacctcgtgatccacccgccccggcctcccaaagtgctgggattacaggcgtgagccaccrcgcccagccaaggagagctggtattttaagagataactggcttcaggttttacaaaaataatgagaaaccgattcacagatcccagaaggaaaacacatc

SEQ ID NO: 281040 - DNA, 201 bp, Homo sapiens
ataagagaaagttagtaactaacctgttgcaaattacgttttaatgtgtttattagcacatttagatattttgtatttcattcttctaatttctgcatagyatacaggtgtattaaggattaaaagaaaatcagagtgttcatgtgtcatttctgcccccttactattcatgcagcaggctccaggaatgttagaggttaa

SEQ ID NO: 281041 - DNA, 201 bp, Homo sapiens
caaaattggttatgattacaagctatttattgttatggaacacattctttgtaatttaatttaatactaataatctagtatgatgtagttaaaaatgatayagctgtaacctaatacaaaaactcatattaacatattaaatcagcacacatttactaagcactgcattttatgtttggaagatcagggaaggagatataa

SEQ ID NO: 281042 - DNA, 201 bp, Homo sapiens
gatagagtaaatatgctttttaaacctcttttaggctctttcatttaaaaatgatcaagattaaaaacatttttaaaacatttttgatgttacaaattctytattttattttacagatataccattgtatttatctattacgcattctgcttggtattaatgatgctgctccgacctcttctggtgaagaagattgcatgt

SEQ ID NO: 281043 - DNA, 201 bp, Homo sapiens
gcagttggtggaggccttttatgtaagtttgatgggtaaagtcaatgaaatatatttattattgtatgtagtaatatttcctctagatttaattttggagmtttttccttaagatagtttgtttaatcctttttttttttttttttttttttttttgtgatggaatctcactctatcaccaggctggagtacagtggcatg

SEQ ID NO: 281044 - DNA, 201 bp, Homo sapiens
taggaaaattagttttggcacttttatcaactctagggaaagatttgagggagaaaatagttggatatttggatatttgaataaaatgagatttttgtttttttttttttttgttttttttttttttttttgcggagtctcactctgtcgcttaggcatgagtgcagtggtgcagtcttggctcactgcaacttccacctc

SEQ ID NO: 281045 - DNA, 201 bp, Homo sapiens
tttttttagtagagatggggtttcaccatgttggccacattgatctcgatctcctgacctcatgatctgcccacctctctttgcatttgaagttcatgacsaaattaaaatattttaaaaatctaagtatgtaataagaaataaaaactggtttttatttaggaatttatgaaaattagtcttgataatgtatactgttta

SEQ ID NO: 281046 - DNA, 201 bp, Homo sapiens
tagggaaagatttgagggagaaaatagttggatatttggatatttgaataaaatgagatttttgtttttttttttttttgttttttttttttttttttgcrgagtctcactctgtcgcttaggcatgagtgcagtggtgcagtcttggctcactgcaacttccacctctcgggttcaagtgattctcctgcctcagcttcc

SEQ ID NO: 281047 - DNA, 201 bp, Homo sapiens
tactttcctacacggctggcctcgggctcggctctttgtaggcggccttcggttggcggcgcaggctcgccccttgaccccgcccgccctcgggccgggcyccgcactcctgcggggttggggtggtctgtccgcaacgggctactaggggaggcgcgctgtctgcggcgaaatgccaggtctttgttgtttggtccgaaa

SEQ ID NO: 281048 - DNA, 201 bp, Homo sapiens
gcttcctgagtagctgggattacaggtgcatgccaccacacctggctaatttttgtgtttttagtagacggggtttcaccatgttgatcaggctggtctcraactcctgacctcataacccacccacctcggcctcccacagtgctgagattacaggggtgagccaccacgcctggccttgaatttttacagcttatccat

SEQ ID NO: 281049 - DNA, 201 bp, Homo sapiens
ttcactgtgttagccaggatggtcttgatttcctgacctcgtgatccacccgccccggcctcccaaagtgctgggattacaggcgtgagccaccacgcccrgccaaggagagctggtattttaagagataactggcttcaggttttacaaaaataatgagaaaccgattcacagatcccagaaggaaaacacatcccaagc

SEQ ID NO: 281050 - DNA, 201 bp, Homo sapiens
ctctatcttggatttatggcaatgcttcctctggttttacattggttcttcattgaatggtactcggggaaaaagaggttagcacatttctatgaacatayctggctggactaatgttggaataattatcactcagaagaccttattaagtaattatgcttcttctgttttaaaagtggtaaacatgtttttctttatctt

SEQ ID NO: 281051 - DNA, 201 bp, Homo sapiens
ttgacaattcaatatcagaatagtccatatgatatgatatagtacaactaattgttttagtaatctttggctgattgatgccacttggtagcttttggctygttaactttatgaaaagttgtgtactggactatatatttccctgggaaattagcaaaatagtgaagtagtcaggcccaactatccagcatgaaggagaaa

SEQ ID NO: 281052 - DNA, 201 bp, Homo sapiens
gcagtgtcacagtgtaaaaggagaaatgtaaatttaaaaatgcttcaagacttttgtctaatacatattattcaaaaatttgaaactgttatttttgccaratgcttcagctattattgcaatttttttttataatcacaaaagatgttactatactggcatttgtttttaaaaagctgtcgatattcaaccagcatgcct

SEQ ID NO: 281053 - DNA, 201 bp, Homo sapiens
ctgagtgcttatatgaccttaggagcctcactttcctcatctataaagtggagtggctagactgagtgatttcttaagtcttttttagctcaaacattttatgattctgagattataaataatacattttatattaagttatattaaattacccagctgacttagcctgataatctgtatttctcttttctttcttttaca

SEQ ID NO: 281054 - DNA, 201 bp, Homo sapiens
tgggtttgagttctgggtctgccagcggctttattaccttgaacatgtaaacagcctcttgtaacttcagttttctctttggtaaaatgggaataatgatmcttataaggtgtcgtgaggattaaattaatccacacattctagataccatataacttacatataggaggcactttatagtaaatggcattattacagtgt

SEQ ID NO: 281055 - DNA, 201 bp, Homo sapiens
actgcattccagcgtgggcaacagagggagactctgtctcaaaaaaaaaataaaataaggaaatataaaagaatatggaggcattaatatagtcattgttyatgttggcattttgatgtctatattattttttaaaacatttaataattttataataatttctaatttatgatttggtaccgtgtcttgtacagtaagttg

SEQ ID NO: 281056 - DNA, 201 bp, Homo sapiens
ttctttgtaatttaatttaatactaataatctagtatgatgtagttaaaaatgatatagctgtaacctaatacaaaaactcatattaacatattaaatcarcacacatttactaagcactgcattttatgtttggaagatcagggaaggagatataaaaataactgacatggcttatagtcataatcttgtggagaaaaca

SEQ ID NO: 281057 - DNA, 201 bp, Homo sapiens
ggaaaaatagagactatgaaggagagctgctatttttttttttttttttttgagacgagtcttgctctgttgcccaggctggagtgcggtggtgcgacctyggctcactgcaagcttcgcctcccaggttcacgtcattctcctgcctcagcctcccgagtagctgggactacaggcgcctgccaccacgcccggccaatt

SEQ ID NO: 281058 - DNA, 201 bp, Homo sapiens
tagtcaggcccaactatccagcatgaaggagaaatgtcatttcacataattttcccatgtagcaaacatataattattgaaatgttgaaacttattaacastattttgagaaaaaccataaaaatgttttatatttagaactaattttaaactttattttacaatggcaacattaatagtcatcagtaattgtgcattcca

SEQ ID NO: 281059 - DNA, 201 bp, Homo sapiens
ggaggaacttcggagctgtcgcccgggttaccgggaggcggagccgccgagctcgctgtggcccggatgttcggtgcagctgccagatccgctgatctagygcttctcgaaaaaaaccttcaggcggcccatgggtgagtggtcgccaagatcccgggaagcgtttctggtagtcccgactactttcctacacggctggcc

SEQ ID NO: 281060 - DNA, 201 bp, Homo sapiens; identical to SEQ ID NO: 57186

SEQ ID NO: 281061 - DNA, 201 bp, Homo sapiens
caggccttggattttgagaaactttagattattgatattcacgtgtatttattaagcatctactagatgtaaagcccatacagaagtttccaattccttamcttctgcattcttgaaaaacctgaaatattcattttcatgtattaatttagaacattgtgattacaattggttacaaaaaaaataagcgcccattaaaga

SEQ ID NO: 281062 - DNA, 201 bp, Homo sapiens
attgtttgtttttcttcctcagcacccttaccaacagtcattgtagaacagcttgcctgccttgttttattattatacaaaacagtgatttttaaaattawgagatattatatagtatcttatagcattgggtttaggcatattatttatttacctaagcattctaaatataaatgtatggtcagactgggctaagcactt

SEQ ID NO: 281063 - DNA, 201 bp, Homo sapiens
actttagattattgatattcacgtgtatttattaagcatctactagatgtaaagcccatacagaagtttccaattccttaccttctgcattcttgaaaaayctgaaatattcattttcatgtattaatttagaacattgtgattacaattggttacaaaaaaaataagcgcccattaaagaggccagtgggtttaaaaagc

SEQ ID NO: 281064 - DNA, 201 bp, Homo sapiens
atcccccaaacaccccttttctgattttatttaactagatcgacattctggtcaacaatggtggaatgtcccagcgttctctgtgcatggataccagcttkgatgtctacagaaagctaatagagcttaactacttagggacggtgtccttgacaaaatgtgttctgcctcacatgatcgagaggaagcaaggaaagattg

SEQ ID NO: 281065 - DNA, 201 bp, Homo sapiens
ttggtgtttattttgcctggtctaattatatatgcatgtcagaaataggtacttcccacaggatgattagtcctggtctcatatccttactgggaaaaatmttgactgtattctctctggtttcattggaagaagaaaatctagtcaaggcagaggcaaggagagaagcttgatttggactgcataacttacgatgtataa

SEQ ID NO: 281066 - DNA, 201 bp, Homo sapiens
tatatttaaagctgttgaagtcagtttaagtagaatgtttcactgttggaatcatgagatgcaatagctacatggtcatcatggtttcatgaaaatttgargctttggttctttaggacatcttttttctgctgcaaagtgcagacaattgcagacagtgatgaagcggaatgctatactgatgatttcctcatatttagt

SEQ ID NO: 281067 - DNA, 201 bp, Homo sapiens
ctacatggtcatcatggtttcatgaaaatttgaagctttggttctttaggacatcttttttctgctgcaaagtgcagacaattgcagacagtgatgaagcrgaatgctatactgatgatttcctcatatttagtaacaggcatcagtcacttcctgtggagcagttgggcaagcctcaggcaggcagatgagggagggcgg

SEQ ID NO: 281068 - DNA, 201 bp, Homo sapiens
tgagcaaaactcaggtttttgttaacagtaacctcaataggagtcaactgtgaagtggctgccagaaaagatcaggcaaccttgggttgcatttgtagacytcagtgtctgaagcaacaactgcaaacaacagatgtctcctgactagctgcttgtatgtgccggcctctgtgctggggcactggggacactgcagtgact

SEQ ID NO: 281069 - DNA, 201 bp, Homo sapiens
atcagtcacttcctgtggagcagttgggcaagcctcaggcaggcagatgagggagggcggccacccatctgtttggcaccacgtgtctcataagatatgcyggatgctttcagtaaacacagatgagctgtctggcctgccctccaagactcattattttattactggatttgatcctatgataaaatgtggcaggttgag

SEQ ID NO: 281070 - DNA, 201 bp, Homo sapiens
atagtaaaaagtaaagagctttctctgacccttgtgccctagctacctagtgtgcttctctcgaggcagccaccatttcctgcctcctctgtatccgtctrgagaaattctgtgcatttccaagcatatatctcacatggtgatttttttttttttttaatagagagacaaggtcttgctttgtcacccagcctggagtgc

SEQ ID NO: 281071 - DNA, 201 bp, Homo sapiens
taatcccatcttcctcacctttgccccaaaaatttgcactttagactactttggggaataaatagaaacctgacctcagtgattctcagtggaggacatayaccccttttggagtggggagaggaggactggtatgaagagcatatatcagaatctatagggatagttctttttacctatccagtgcatgcctaccataaa

SEQ ID NO: 281072 - DNA, 201 bp, Homo sapiens
aataaatagaaacctgacctcagtgattctcagtggaggacatataccccttttggagtggggagaggaggactggtatgaagagcatatatcagaatctwtagggatagttctttttacctatccagtgcatgcctaccataaaaatcattgatgggaagacccctcactatcaaagggggtgaaccatttatacctgga

SEQ ID NO: 281073 - DNA, 201 bp, Homo sapiens
ataaatagaaacctgacctcagtgattctcagtggaggacatataccccttttggagtggggagaggaggactggtatgaagagcatatatcagaatctayagggatagttctttttacctatccagtgcatgcctaccataaaaatcattgatgggaagacccctcactatcaaagggggtgaaccatttatacctggaa

SEQ ID NO: 281074 - DNA, 201 bp, Homo sapiens
acactacctgtcctttactcacacattttagaacatattttgataaatcatgagatatgtgtctgtatttatttgcctttttcctttttttttttttttgyctgttagggtttttttaatggccttcgaacagaacttgccacatacccaggtataatagtttctaacatttgcccaggacctgtgcaatcaaatattgtg

SEQ ID NO: 281075 - DNA, 201 bp, Homo sapiens
ctgtgcccagctggctgcttttatttattttaatgacaattattaactttcacaaaaagtcacctaaaacgggaatttaattccacaggtaaattcagggytttattttatctttttaattgctgacttctggaaatataccattgttccattgattctttaagttaacaaaataaccaaccatccataggaattccatca

SEQ ID NO: 281076 - DNA, 201 bp, Homo sapiens
cttaatagtttgatttttattacaaaagtgataattgtcattaagcacattagggtgatgcaattctaattaaaagcaaagaatcttcatcttttagttarcctgcactatattatctagtaagcatatggtttctgttaggctttttgaaatattacaaatagtttataaactcccattagtacctatggagactcctaa

SEQ ID NO: 281077 - DNA, 201 bp, Homo sapiens
tgggttcttatccatgacatacatgtatctgatcatagaaattaggaagaatccttactcattttattaaagtatcagatattaaaatcatatgggataaracttattatataggataaaagaacaggaatggaattagctttaaaaaatacaacttgaggtaatactttcatattcacataaagggcaacagtgttaata

SEQ ID NO: 281078 - DNA, 201 bp, Homo sapiens
agcaaggagcttgactgaactatggcatgacttccacacaaatttttgtctttatttagagaatggcaatttaaaagaaaaagatatacttgttttgcccyttgacctgaccgacactggttcccatgaagcggctaccaaagctgttctccaggagtttggtagagtaagtagcatcttatattgatatagtcttgcttt

SEQ ID NO: 281079 - DNA, 201 bp, Homo sapiens
agctttttgtctgatataaccactagtcctcttcctgaccaccgagaggaactttcacagggccacccagaaatgagtttgttgccaagtcctgttgcagkgtgggtgttagtgggagtagcaaggagcttgactgaactatggcatgacttccacacaaatttttgtctttatttagagaatggcaatttaaaagaaaaa

SEQ ID NO: 281080 - DNA, 201 bp, Homo sapiens
gggttttgccaggctggtctctaactcctgacctcaggtgatctgcccacctcggcctcccaaagtgctgggattacaggcatgagccacagtgcctgccyggccacaaataattttaaagagttatcttccatatatctcaattctacataatctgactcattgtttttatttattagggcaagtcagtgtaggtatgat

SEQ ID NO: 281081 - DNA, 201 bp, Homo sapiens
ttatcttataactgaaaatatctaccattttttttctttgagacagggtctcgccctgtcacccaggctggagtctgcagtggcgtgatcatggctcactsccatctctacctcccaggctcaagcaatcctcccaccccagcctcctgagtagctgagactataggcgcacaccaccatgcctggctaggttttgtagtt

SEQ ID NO: 281082 - DNA, 201 bp, Homo sapiens
attatatatatttaaggtatacattgtgatgatctaatatacactgtaaaatgattaccacaatcaagctaattaatacatgtcacccagttacctttttktgtgtgtggtgagaacacttaaaatcttcttagcaaatttcaaatatgctatacagtattattaactgtagtcaccatgcggtatattagatccttagaa

SEQ ID NO: 281083 - DNA, 201 bp, Homo sapiens
tccaccgtggccaggttgcaggatttctgagtaagggtgctgtgagcttttggggcagggcaattctttgttgggtatgtctttacatagtgcccagatckttagcactctgatgacaccctggctagctggcactatggccactgttcatccaacacatttccaaaagcatctaagggatgtgaaaacatcctcaatcaa

SEQ ID NO: 281084 - DNA, 201 bp, Homo sapiens
gacaaaaaaccaaacactgcatgttctcactcataggtgggaattgaacaatgagaacacttggacacaggaaggggaacatcacacagtggggcctgtcwtggggtggggggagtggggacggatagcattaggagatatgcctaatgtaaatgaccagttaatgggtgcagcacaccaacgtggcacatgtatacatat

SEQ ID NO: 281085 - DNA, 201 bp, Homo sapiens
atgaacctagaaaccatcattctcagcaaactattgcaaggacaaaaaaccaaacactgcatgttctcactcataggtgggaattgaacaatgagaacacytggacacaggaaggggaacatcacacagtggggcctgtcatggggtggggggagtggggacggatagcattaggagatatgcctaatgtaaatgaccagt

SEQ ID NO: 281086 - DNA, 201 bp, Homo sapiens
tgatggactggattaagaaaatgtggcacatatacaccatggaatactatgcatccataaaaaaggatgagttcatgtcctttgtaggggcatggatgaasctagaaaccatcattctcagcaaactattgcaaggacaaaaaaccaaacactgcatgttctcactcataggtgggaattgaacaatgagaacacttggac

SEQ ID NO: 281087 - DNA, 201 bp, Homo sapiens
aagtctagaaggtctagtctgttttacacaagtcattcagtaggcaatcatattacatttttaattagccacataccctcttattacccaaaaagataaatgtttgctaaaatgaattaatactgttaaaatagaaatataaatggaaaaagttgaattcattctttctgatactttctgtgaagtactaatcccatcttc

SEQ ID NO: 281088 - DNA, 201 bp, Homo sapiens
  misc_feature (1)...(201): n = A,T,C or G
atgccaacctgggcctggtggataaccaacaagatggggaagaaaaggattgagaactttaagagtggtgtggtaagaccaatttctaagtttcttaatantatgtaccaatcttgcaggaaggtacagaattttccagtgtttaaaaaactttctggctgggtgcagtggctcatgtctgtaatcccagcactttgggag

SEQ ID NO: 281089 - DNA, 201 bp, Homo sapiens
taagtctagaaggtctagtctgttttacacaagtcattcagtaggcaatcatattacatttttaattagccacataccctcttattacccaaaaagataaatgtttgctaaaatgaattaatactgttaaaatagaaatataaatggaaaaagttgaattcattctttctgatactttctgtgaagtactaatcccatctt

SEQ ID NO: 281090 - DNA, 201 bp, Homo sapiens
  misc_feature (1)...(201): n = A,T,C or G
gaattttccagtgtttaaaaaactttctggctgggtgcagtggctcatgtctgtaatcccagcactttgggaggccaaggcagatcacttgaggccagganttcaagaccaacctggccaacatagtgaaaccccatctctactaaaaatacaaaaagtagctgggcatggtggtgcatgcctgtaatcccagctactcgg

SEQ ID NO: 281091 - DNA, 201 bp, Homo sapiens; identical to SEQ ID NO: 57200

SEQ ID NO: 281092 - DNA, 201 bp, Homo sapiens
  misc_feature (1)...(201): n = A,T,C or G
gctactcgggaggctgaggcatgagaattgcttgaaccgaggaggcggaggttgcagtgagccaggatggtgccactgcactccagcccgggtgatagagngagactctatttcaaaatcaaaaaacctttctaaccctccaccaatctcatgatataaagaaaaataaataaaaaatattttatccccatgcatatattt

SEQ ID NO: 281093 - DNA, 201 bp, Homo sapiens
aaaaaaaaaaaaaatctggtaatacagtggtttgtgcccctccaaagcttaaccccacccgagaaaatattattccttagtatttcatttttctggttggrttttcttgggtatagcatgtgcagcactgacattgagttcacgaaaaatacacaacatggacgccacagcagtgctacaaaactatggcaagtgattggg

SEQ ID NO: 281094 - DNA, 201 bp, Homo sapiens
gagcgagactctatttcaaaatcaaaaaacctttctaaccctccaccaatctcatgatataaagaaaaataaataaaaaatattttatccccatgcatatmttttggtttactataaattattactagtcttggagagagaagtttcttacaaggtaaaatcaaatcaaagattgccatgtttttcttctatacatattgt

SEQ ID NO: 281095 - DNA, 201 bp, Homo sapiens
tctatttcaaaatcaaaaaacctttctaaccctccaccaatctcatgatataaagaaaaataaataaaaaatattttatccccatgcatatattttggttkactataaattattactagtcttggagagagaagtttcttacaaggtaaaatcaaatcaaagattgccatgtttttcttctatacatattgtttgaccagt

SEQ ID NO: 281096 - DNA, 201 bp, Homo sapiens
cctcattcccgaagtactcagcacatctaagatgtgcctattcccctgtctaaggaaatatgctgattatcattctttcagcactcattctttatagcaaytagtcagggaatactattaaccatttctgagaaattgtgaccctcaaaagaatttaatttatagacagtacaggaaatgtaatgaagtaaaccaaaaatt

SEQ ID NO: 281097 - DNA, 201 bp, Homo sapiens
gaccatcaaaagtgaccattactaaaaggagggaaggcagggtaccattctattacatctggaattaaaaatgaaggttaccagttatagaaaagactttyggactttattcaaagcattttaataatacttagagaagattgatttattaaatgctagcaactctcattttaacattaacttccgaacttcaaggaggtt

SEQ ID NO: 281098 - DNA, 201 bp, Homo sapiens
gtcacccagttacctttttttgtgtgtggtgagaacacttaaaatcttcttagcaaatttcaaatatgctatacagtattattaactgtagtcaccatgckgtatattagatccttagaatctgtaaattataataacataagttatttatcttataactgaaaatatctaccattttttttctttgagacagggtctcgc

SEQ ID NO: 281099 - DNA, 201 bp, Homo sapiens
ggtgagaacacttaaaatcttcttagcaaatttcaaatatgctatacagtattattaactgtagtcaccatgcggtatattagatccttagaatctgtaarttataataacataagttatttatcttataactgaaaatatctaccattttttttctttgagacagggtctcgccctgtcacccaggctggagtctgcagt

SEQ ID NO: 281100 - DNA, 201 bp, Homo sapiens
tgtgtaccttttgaccaagatctccccatttcctccatcttctggctcctggcaaccatcattctactctgcttttgagtatgactttttagattccacakaagtgaaatcacatagtacttgtttttctgtatcttgcttatatcacttagcattaacgtccattcattatccatgttttcacaaatgccaggagttcca

SEQ ID NO: 281101 - DNA, 201 bp, Homo sapiens
atttttgataaataacatatattttagtaaataagtcacccaggaactttgcataacagtgactttacgggttcagagagacagtgaatatcatctcctgmagtgctaataagtttttcattggagaaaagaataaaccatttgtcattgctttagtactgtaacatttgtagtcttttaagaggaacataattggagaag

SEQ ID NO: 281102 - DNA, 201 bp, Homo sapiens
tttcctgattttaacttttctgatctaaaatcggaaatgtgatgttaagtgatacgatatttgatatttttgataaataacatatattttagtaaataagkcacccaggaactttgcataacagtgactttacgggttcagagagacagtgaatatcatctcctgaagtgctaataagtttttcattggagaaaagaataa

SEQ ID NO: 281103 - DNA, 201 bp, Homo sapiens
tagtcaatgaatgaataaatgattatctgaatagatgttatgttgttcttgataaagtcctataggaaggtggcccaattgtgccttttcacaaaagtacrttatatgacaggaaagcattgtagcccagacatagtatttgggatgtttccatccttagttgagattttttttttttttttttttttttccgacagagtc

SEQ ID NO: 281104 - DNA, 201 bp, Homo sapiens
agtcctttctagcttaaagttatgtgaaatcgcttggataaattcacttaatttttaacttttcttagactataggcaataatggagaccagtcccacaaratgacaaccagtcgttgtgtgcggctgatgttaatcagcatggccaatgatttgaaagaagtttggatctcagaacaacctttcttgttagtaacatatt

SEQ ID NO: 281105 - DNA, 201 bp, Homo sapiens
ttactagttatatattggcattatatattggtgttgtatcactgtatatcatagtttttgccttagaagtgcttttatgtgaattattcacaaaactcctsccattatgaaaattgtttatggaatttcatttgctaaatgcattgtcttaatagtttgatttttattacaaaagtgataattgtcattaagcacattagg

SEQ ID NO: 281106 - DNA, 201 bp, Homo sapiens
ttaagtctagaaggtctagtctgttttacacaagtcattcagtaggcaatcatattacatttttaattagccacataccctcttattacccaaaaagataaatgtttgctaaaatgaattaatactgttaaaatagaaatataaatggaaaaagttgaattcattctttctgatactttctgtgaagtactaatcccatct

SEQ ID NO: 281107 - DNA, 201 bp, Homo sapiens
tttaagtctagaaggtctagtctgttttacacaagtcattcagtaggcaatcatattacatttttaattagccacataccctcttattacccaaaaagataaatgtttgctaaaatgaattaatactgttaaaatagaaatataaatggaaaaagttgaattcattctttctgatactttctgtgaagtactaatcccatc

SEQ ID NO: 281108 - DNA, 201 bp, Homo sapiens
tcactgcaatctccgcctcccaggtttaagggattctcctgcctcagcctcctgagtagctgggattacaggcatgcaccatcacgcccagctaatttttrtattttttagtagagatggggtttcaccatgttggtcaggctggtcttgaactcctgacctcatggtccaccctcctcagcctcccaaagtgcagggatt

SEQ ID NO: 281109 - DNA, 201 bp, Homo sapiens
ttacttttttctttttgagatgaagtctcactttgttgcccaggctggagtacaatggtgtgatcttggctcattgcaacttccgcctcacaggttcaagygattcttgtacctcagcctcctgagtagctggggccacagacgtgcaccaccacacccagctaatttttgtatttttaatggagacggggtttcaccatg

SEQ ID NO: 281110 - DNA, 201 bp, Homo sapiens
ttttttttttttagttaagaaggagatgctttcttagaatatttcaaattttaactctatacatcatgccttcatatttagtggtattgtttaaggctttyttttttttttctaatcttggatttatgagcgtaattcattgcttattttcttccttccatttacattccttccatagaatgggagctgactgatatggtg

SEQ ID NO: 281111 - DNA, 201 bp, Homo sapiens
catatgtaaatgtgtatatcatgaaatagtggacagtgtgggctttggagctagatatacctgggcttatatcccggctctgccagggttcttgggtgttkattcagtagttatttatggagccttttcaatattccagtctttgctaagcactgaggccacagcaatgaacaaggtagacagggtcctacccttaatgga

SEQ ID NO: 281112 - DNA, 201 bp, Homo sapiens
atgttggccaggctgggcttgaactcctgatctcaggtgatcctcctgcctcggcctcccaaagtgctgggattacaggcgtgagccactgtacctggccraaaagaagtttttgacaacaaaaaattatcttcccagattgacaattcagtttcaatgaaaaatcttcatttttatagtctctttttgttttcaattgat

SEQ ID NO: 281113 - DNA, 201 bp, Homo sapiens
ttggcttgcttggtgtcctctctcctcttttgctacagagaggcagaaggttaaagttatgggagttttccattcaattagcaagcttttttttttttttkgggttcatctctgagtctggcactgtattggtctctgatcataaaccctcatagcccctctgtttgttggggtcagcatttcagagctgataactgttta

SEQ ID NO: 281114 - DNA, 201 bp, Homo sapiens
ctggagtgcagtggtatgatcttggctcactgcaacctctatctcctgggttcaagtgattctcctgcttcagcctccctagtagctgggattacaggtgygtgccaccacgcatgggtaagttttgtatttttagtagacctggggtttcgccatgttggccaggctagtctcaaacccctgacctcaggtgatccaccc

SEQ ID NO: 281115 - DNA, 201 bp, Homo sapiens
ttttaaagttatttttgtataatgcttttgttatggaagatggcaattgcttacgcacaactgccttcatcttagctgacctgaatgggccttagctgccmtgaatgggccttagctgccatgaatgggcctgaccccagaccatcaaaagtgaccattactaaaaggagggaaggcagggtaccattctattacatctgg

SEQ ID NO: 281116 - DNA, 201 bp, Homo sapiens
aaaagcactatattgtgtaggactcttggttgcaagtgacagaaattcaatttaaactagttgaaaaaaaactagttgagttaaaaaaaggaaagaagttrttgacacaaatatcaatgggaagaatacagaatgggtcatagaactaggggagaagcctcaaaaactagggatttaacagtgaccaagctctcctcattc

SEQ ID NO: 281117 - DNA, 201 bp, Homo sapiens
acgtccattcattatccatgttttcacaaatgccaggagttccattgttttatggctgaaaaatattccattgtggaataatattccatatatatatatayacacacagacacacacacacattttctttatccattcattcactaatggacacttaggttgtttccatatcttggctattatgaataatgctaaaatgaa

SEQ ID NO: 281118 - DNA, 201 bp, Homo sapiens
catataaagaaaggtcagcagcaattccataaaacagaagggcttcaattctgtattttcttttgctttttgtgtcagttgtttgaaaaacactagaagcygacatgaaattttctgtgtattgtctaagaaacttggttttctgattttagcttgagattttcttccgtaaccgcatctcctctgacagggagatcttga

SEQ ID NO: 281119 - DNA, 201 bp, Homo sapiens
cccactgtagtagtacttccagaaatgtccatatgaaggatattttgttttgtttagagaatatctaactgtaaaatataaacatcatttagcaaatctcrcattttttttacatctaggtttttctaaaaaaatgacagcctttttcttcctaccaccatctttgaaatattgcttattatatagtcttactactttgtc

SEQ ID NO: 281120 - DNA, 201 bp, Homo sapiens
agcatacggctttgttaaaagagatcacgctcctcactgctctcatgccccatctcagcagacagcaatccaagactgcttagggttcggaattacaaaamcaaattccctgctaaggctaaagttgatctgaacaaaagtaagggcaaggcaaagagaatagacattagacagggacctgaaaggatccagaaatgggac

SEQ ID NO: 281121 - DNA, 201 bp, Homo sapiens
tctgctggttacagtgatcaaccctgatacaacctgggagggaaatacatggtggtttgcacacaggaggtgagcattgttggatccatctgggggatttytggccatccctctatgtggagagaacagtatgtacaaggccttgaggtgggctggtattccagaaagccttaactgattaactctactcacctctgctga

SEQ ID NO: 281122 - DNA, 201 bp, Homo sapiens
tgtcactctttattataagctgggcattctgtcatttctcaaagcaatttttaggacataatacctcattctttatagtctgtactcttcctctctcccaytattttatattttatatatatgtatatatataaattttcttattgataagcgtctaagttaagaaaatgctagcatagcttatttcaagctaatagtact

SEQ ID NO: 281123 - DNA, 201 bp, Homo sapiens
atatggtggtgtgggtgactggagcctcgagtggaattggtgaggagctggcttaccagttgtctaaactaggagtttctcttgtgctgtcagccagaagrgtgcatgagctggaaagggtgaaaagaagatgcctaggtaagcggatctgaaatagcagcggtgcttcctagaaataaatcagtccaaactcaaatacag

SEQ ID NO: 281124 - DNA, 201 bp, Homo sapiens
tctgaagcaacaactgcaaacaacagatgtctcctgactagctgcttgtatgtgccggcctctgtgctggggcactggggacactgcagtgactgaatcasccacagtccaggccctcatagaccctaccttctgggggacaagggaagtgatttttgacatctcatcctgctctgcactgtccagaccctaccgaatcct

SEQ ID NO: 281125 - DNA, 201 bp, Homo sapiens
aggacataatacctcattctttatagtctgtactcttcctctctcccactattttatattttatatatatgtatatatataaattttcttattgataagcrtctaagttaagaaaatgctagcatagcttatttcaagctaatagtacttgttaactagaatttgcttctttagtctgtatgtctggaactttgtttttat

SEQ ID NO: 281126 - DNA, 201 bp, Homo sapiens
ttagaacatattttgataaatcatgagatatgtgtctgtatttatttgcctttttcctttttttttttttttgtctgttagggtttttttaatggccttcraacagaacttgccacatacccaggtataatagtttctaacatttgcccaggacctgtgcaatcaaatattgtggagaattccctagctggagaagtcaca

SEQ ID NO: 281127 - DNA, 201 bp, Homo sapiens
  misc_feature (1)...(201): n = A,T,C or G
gtcattatagagaatttagcattgcagtccaatgctatttatacctcctctaaaccagagatgatgctaaactcattagaagtacttttgtgtacatctanaattttggctatgatttttaaattctaatttaagcagtttctgaacttttgtaaagattcttaatagtgaatcataatgatacagctcctcaaaacagaa

SEQ ID NO: 281128 - DNA, 201 bp, Homo sapiens
aataggagtaggtactgatccatgtttctgtccctcttttacaggatgcagactcttcttattttaaaatctttaagacaaaacatgactgaaaagagcayctgtacttttcaagccactggagggagaaatggaaaacatgaaaacagcaatcttcttatgcttctgaataatcaaagactaatttgtgattttactttt

SEQ ID NO: 281129 - DNA, 201 bp, Homo sapiens
ctgtccctcttttacaggatgcagactcttcttattttaaaatctttaagacaaaacatgactgaaaagagcacctgtacttttcaagccactggagggaraaatggaaaacatgaaaacagcaatcttcttatgcttctgaataatcaaagactaatttgtgattttactttttaatagatatgactttgcttccaacat

SEQ ID NO: 281130 - DNA, 201 bp, Homo sapiens
ttttatttatttatttttggtagacacagggtttcctcatgttgcccaggctggtctcggacacttgaattcaagcaatctgccggccccgccgggtgtgscgcatgagggcgcgggccgcccaaggaccgcgagtggggccgcgagtgctgagcccggcgcgcccgagccgctcctcctcccggcctgctccctgggcgg

SEQ ID NO: 281131 - DNA, 201 bp, Homo sapiens; identical to SEQ ID NO: 57192

SEQ ID NO: 281132 - DNA, 201 bp, Homo sapiens
tacccttaatggaatctatggtctagtgggacaaattaatctctgtaaacctcagttaccttttctgtaaaactgagataataatacctttccatacagtkctggtgaggcttttagtagacaatgtgctaagtacataggaagtaatgtaaaaatgttaagccattagaattggtaactctgttttcctggctggagaag

SEQ ID NO: 281133 - DNA, 201 bp, Homo sapiens; identical to SEQ ID NO: 57194

SEQ ID NO: 281134 - DNA, 201 bp, Homo sapiens
ttaccttttctgtaaaactgagataataatacctttccatacagtgctggtgaggcttttagtagacaatgtgctaagtacataggaagtaatgtaaaaaygttaagccattagaattggtaactctgttttcctggctggagaagttaggagacatacgttattaagtgactgttctatgttttgctgtagtaaagtcca

SEQ ID NO: 281135 - DNA, 201 bp, Homo sapiens
catgaggttataaggcttaccttgaagtaaagtctggaaaagtcatgaaggttctgtaatatacaaatactgtgttgataactgttactagtatgatttgyattaatgcttttttttttttttagttaagaaggagatgctttcttagaatatttcaaattttaactctatacatcatgccttcatatttagtggtattgt

SEQ ID NO: 281136 - DNA, 201 bp, Homo sapiens
gccgatcttggaggatctggatttttaaagttatttttgtataatgcttttgttatggaagatggcaattgcttacgcacaactgccttcatcttagctgmcctgaatgggccttagctgccatgaatgggccttagctgccatgaatgggcctgaccccagaccatcaaaagtgaccattactaaaaggagggaaggcag

SEQ ID NO: 281137 - DNA, 201 bp, Homo sapiens
aatatgtatcaagcactgcattgtgccatgtactacaacagaccctggggatataaagataataagatgtggtctctgccctcaaaaagtgtatcatctakttaacatgttactcttcaccttatccttattcctactaaatcttcatggaaaattgggggtccacttctcctttcttctacatacacttcaggatgtact

SEQ ID NO: 281138 - DNA, 201 bp, Homo sapiens
agaccctggggatataaagataataagatgtggtctctgccctcaaaaagtgtatcatctatttaacatgttactcttcaccttatccttattcctactamatcttcatggaaaattgggggtccacttctcctttcttctacatacacttcaggatgtactttttcctccccatttctgtgacttcttttccttgcccct

SEQ ID NO: 281139 - DNA, 201 bp, Homo sapiens
tctacatacacttcaggatgtactttttcctccccatttctgtgacttcttttccttgccccttgtagttggtgtttattttgcctggtctaattatataygcatgtcagaaataggtacttcccacaggatgattagtcctggtctcatatccttactgggaaaaatcttgactgtattctctctggtttcattggaaga

SEQ ID NO: 281140 - DNA, 201 bp, Homo sapiens
attatcattctttcagcactcattctttatagcaattagtcagggaatactattaaccatttctgagaaattgtgaccctcaaaagaatttaatttatagmcagtacaggaaatgtaatgaagtaaaccaaaaattatagatgattatgcagcaaaagattattgctgaggatggtttttactgttagcctttgatatact

SEQ ID NO: 281141 - DNA, 201 bp, Homo sapiens
gcaggatattcagcttccttaatgatcaaagattttctttataattgacacataaaaattatatatatttaaggtatacattgtgatgatctaatatacastgtaaaatgattaccacaatcaagctaattaatacatgtcacccagttacctttttttgtgtgtggtgagaacacttaaaatcttcttagcaaatttcaa

SEQ ID NO: 281142 - DNA, 201 bp, Homo sapiens
ttttatttaactagatcgacattctggtcaacaatggtggaatgtcccagcgttctctgtgcatggataccagcttggatgtctacagaaagctaatagakcttaactacttagggacggtgtccttgacaaaatgtgttctgcctcacatgatcgagaggaagcaaggaaagattgttactgtgaatagcatcctgggta

SEQ ID NO: 281143 - DNA, 201 bp, Homo sapiens
ttccacacaaatttttgtctttatttagagaatggcaatttaaaagaaaaagatatacttgttttgccccttgacctgaccgacactggttcccatgaagyggctaccaaagctgttctccaggagtttggtagagtaagtagcatcttatattgatatagtcttgctttgaagtaactgcagaagagattcccatccgtg

SEQ ID NO: 281144 - DNA, 201 bp, Homo sapiens; identical to SEQ ID NO: 57199

SEQ ID NO: 281145 - DNA, 201 bp, Homo sapiens
ggccaggttccaggtcagttttgttttattcatcactgaatctccagtgcctgcctagcattgtgcctgctgatgtctgttcaactactccagccaatgartggtagaagaggtatatataaattaaaatctttaaagattcatctgtatggcatttttttctttctttctttctttcttttggagatggagtcttactgt

SEQ ID NO: 281146 - DNA, 201 bp, Homo sapiens
cagcccactaatggcatgcaaccacagtttgaaaaacactgatttcaacagtgcttctgctgctcggattgtaaatatgaacttctgattcgcattgatgkgagagtttttcctctttttgctggtaactttccctaggacctgaggcagattcccaaatctcagtcctctattttttgttggtgggcagagccaaagtgg

SEQ ID NO: 281147 - DNA, 201 bp, Homo sapiens
ctggagtgcaatggtgtgatctctgctcaccacaacctccgcctcccaggttcaagcgattctcctgtctcagcctctggagtagctgggattacaggcaygcaccaccacacctggctaattttgtatttttggtagagacagggtttctccatgttggtcaggctggtcttgaactcccaacctcaggtgatccaccca

SEQ ID NO: 281148 - DNA, 201 bp, Homo sapiens
cctcccgaggagtagctgggactacaggcgcctgccaccatgcccggctaattttttttttttttttttttttgtatttttagtagagacggggtttcacygtgttagccagaatggtctccatctcctgacctcgggtgatccacccgcctcggcctcccaaagtgctgggattacaggcgtgagccaccgtgcccagcc

SEQ ID NO: 281149 - DNA, 201 bp, Homo sapiens
gcaatggtgtgatctctgctcaccacaacctccgcctcccaggttcaagcgattctcctgtctcagcctctggagtagctgggattacaggcatgcaccamcacacctggctaattttgtatttttggtagagacagggtttctccatgttggtcaggctggtcttgaactcccaacctcaggtgatccacccacctcggc

SEQ ID NO: 281150 - DNA, 201 bp, Homo sapiens
gacagcattaaattttactcttaaaaacttcagcaacttaagagcgttcattcagctgtctgtagtatttatatatgcagttttgatgatatttttcttgrtcatttaacggtgaatatctgtgggcaataagtcttgtacagtgcattgacatttaatcataaatatgtattaactattttatttttgtatgtgtgtgtc

SEQ ID NO: 281151 - DNA, 201 bp, Homo sapiens
ttctcctgtctcagcctctggagtagctgggattacaggcatgcaccaccacacctggctaattttgtatttttggtagagacagggtttctccatgttgstcaggctggtcttgaactcccaacctcaggtgatccacccacctcggccacccaaagtgctgggattataggtgtgagtcactgcacctggccaacagca

SEQ ID NO: 281152 - DNA, 201 bp, Homo sapiens
caggacagggacataagtatcagcctctagactaagcttgtccaacctgcagcccaacacaaatttgtaaactttcttaaaacattatgagatttttttgkgattttttttttttttttttttttttttttagctcatcagctatggttagtgttagtgtattttatatgtggcccaggacaattcttcttcttcccatgt

SEQ ID NO: 281153 - DNA, 201 bp, Homo sapiens
tataaaagtaatacgtgggccaggagaagtggcttacacctgtaatcccagcactttgggaggctgaggcaggtggatcacttgagatcaggagtttgagrccagcctggctaacatggtgaaaccctgtctctcctaaaaatacaaaaattagccgggtgtggtggcacaggcctgtaatcccagctacttgggaggctg

SEQ ID NO: 281154 - DNA, 201 bp, Homo sapiens
tctttttctctttttttttctttgaaatggagtttcgctctcgttgcccagtctggagtgcgatggcacaatctcggctcactgcaacctccgcctcctgsgttcaagctattctcctgcctcagcctcccgagtagctgggattataggcataagccaccacgcccggctaattttttgtatttttagtagaaacagggt

SEQ ID NO: 281155 - DNA, 201 bp, Homo sapiens
ttctttttttttttgaggcggtgtctcgctctgtttcccagtctggagttcagtggcacgatctcagctcactgcaacctccgcctcctgggttcaagccrttctcctgtctcagcctcccaagtagctgggattacaggcgcttgccaccacacacgcctaattttttgtatttttagtagagatggggtttcaccatat

SEQ ID NO: 281156 - DNA, 201 bp, Homo sapiens
aaatggagtttcgctctcgttgcccagtctggagtgcgatggcacaatctcggctcactgcaacctccgcctcctgggttcaagctattctcctgcctcakcctcccgagtagctgggattataggcataagccaccacgcccggctaattttttgtatttttagtagaaacagggtttctccatgttggtcaggctggtc

SEQ ID NO: 281157 - DNA, 201 bp, Homo sapiens
gggttcaagccattctcctgtctcagcctcccaagtagctgggattacaggcgcttgccaccacacacgcctaattttttgtatttttagtagagatgggrtttcaccatattggccaggcttgtctcgaactccttgtgatccacccaccttggtctcccaaagtgctgggattacgggcatttgccactgcacctggcc

SEQ ID NO: 281158 - DNA, 201 bp, Homo sapiens
tcgctctcgttgcccagtctggagtgcgatggcacaatctcggctcactgcaacctccgcctcctgggttcaagctattctcctgcctcagcctcccgagyagctgggattataggcataagccaccacgcccggctaattttttgtatttttagtagaaacagggtttctccatgttggtcaggctggtctctaactccc

SEQ ID NO: 281159 - DNA, 201 bp, Homo sapiens
ccttggtctcccaaagtgctgggattacgggcatttgccactgcacctggcctggaatagatgttttaaaatgagatctcaggccaggcgtggtgactcaygcctgtaatcccagcactttggaaggctgaggcaggcacattgcttgagcccaggagttcaaaaccagcctgcgcaacatggcaacaccccatctctacc

SEQ ID NO: 281160 - DNA, 201 bp, Homo sapiens
cctcctgggttcaagctattctcctgcctcagcctcccgagtagctgggattataggcataagccaccacgcccggctaattttttgtatttttagtagaracagggtttctccatgttggtcaggctggtctctaactcccaacctcaggtgattcaccctcctcggccttccaaagtgctgggattacaggcgtgagcc

SEQ ID NO: 281161 - DNA, 201 bp, Homo sapiens
actttggaaggctgaggcaggcacattgcttgagcccaggagttcaaaaccagcctgcgcaacatggcaacaccccatctctaccaaaaaaaaaaaaaaawtttagccaggcatggtggtgcattcctgtagtcccagctacttgggaggctgaggcgggaggatcatctgagcctggaggtccaggctgtggtgagccat

SEQ ID NO: 281162 - DNA, 201 bp, Homo sapiens
taattgaaagataatattacttacagtatgagctagctgtatggtgaaataaactttctccatgtttggatccgcaggcctacaagactatgaaagaggaygaaaaaagatacaatgaaagaatttcagggttagggctgacaccagaacagaaacagaaaaaggccgcgttatctggtgagtattcccttaagtcttgct

SEQ ID NO: 281163 - DNA, 201 bp, Homo sapiens
ttgtatttttagtagaaacagggtttctccatgttggtcaggctggtctctaactcccaacctcaggtgattcaccctcctcggccttccaaagtgctggsattacaggcgtgagccactgcacctggtcttttttcttttctttttttttttttttgagacggagtctcactctgttgccaggctggagtgcagtggtgc

SEQ ID NO: 281164 - DNA, 201 bp, Homo sapiens
cagctctcagggttcaggttcctcaattgcagcacattgcctgatgggctgttctggaaggaagtcatagaagtattcttagaatatgttttatggggccrggtgtggtggctcacgcatgtaatcccagcactttgggaggccaaggtgggtggatcacaaggtcaggagttcaagaccagcctggccaacatagtgaaa

SEQ ID NO: 281165 - DNA, 201 bp, Homo sapiens
ggagttcaaaaccagcctgcgcaacatggcaacaccccatctctaccaaaaaaaaaaaaaaaatttagccaggcatggtggtgcattcctgtagtcccagytacttgggaggctgaggcgggaggatcatctgagcctggaggtccaggctgtggtgagccatgatcgcaccactgcactccagcccaggcaatagagtga

SEQ ID NO: 281166 - DNA, 201 bp, Homo sapiens
tgattcaccctcctcggccttccaaagtgctgggattacaggcgtgagccactgcacctggtcttttttcttttctttttttttttttttgagacggagtmtcactctgttgccaggctggagtgcagtggtgcgatctcggctcactgcaacctccgcctcccgggttcaagcgattctcctgcctcagcctcccgagta

SEQ ID NO: 281167 - DNA, 201 bp, Homo sapiens
cagaggccgaggtgggcggatcacgaggccaggagtttgagaccagcctgaccaacatggtgaaaccccgtctctactaaaaatacaaaaattagctggakgtggtggtgcatgcctgtaatcccagctactcggtaggctgaggcaggagaattgcttggacccaggaggtggaggttgcagtgagccgagatcacacca

SEQ ID NO: 281168 - DNA, 201 bp, Homo sapiens
ttccaaagtgctgggattacaggcgtgagccactgcacctggtcttttttcttttctttttttttttttttgagacggagtctcactctgttgccaggctsgagtgcagtggtgcgatctcggctcactgcaacctccgcctcccgggttcaagcgattctcctgcctcagcctcccgagtagctgggactacaagcatgc

SEQ ID NO: 281169 - DNA, 201 bp, Homo sapiens
ggcgtgagccactgcacctggtcttttttcttttctttttttttttttttgagacggagtctcactctgttgccaggctggagtgcagtggtgcgatctcrgctcactgcaacctccgcctcccgggttcaagcgattctcctgcctcagcctcccgagtagctgggactacaagcatgccccaccacacctgcccagcta

SEQ ID NO: 281170 - DNA, 201 bp, Homo sapiens
cgtgagccactgcacctggtcttttttcttttctttttttttttttttgagacggagtctcactctgttgccaggctggagtgcagtggtgcgatctcggmtcactgcaacctccgcctcccgggttcaagcgattctcctgcctcagcctcccgagtagctgggactacaagcatgccccaccacacctgcccagctaat

SEQ ID NO: 281171 - DNA, 201 bp, Homo sapiens
gaatgaatggagatggcaccagcacttccggcaaaataggtcagaggccgaggtgggcggatcacgaggccaggagtttgagaccagcctgaccaacatgrtgaaaccccgtctctactaaaaatacaaaaattagctggacgtggtggtgcatgcctgtaatcccagctactcggtaggctgaggcaggagaattgcttg

SEQ ID NO: 281172 - DNA, 201 bp, Homo sapiens
gactacaagcatgccccaccacacctgcccagctaatttttaacggggtttcaccatgttggccaggatggtctcgatctcttgacctcgtgatctgcccrcctaggcctcccaaagtgctgggattacaggcgtgagccaccacgcctgacctacattttttaaacggctgaaaaaaaaaagaatttcgtgacacatgaa

SEQ ID NO: 281173 - DNA, 201 bp, Homo sapiens
ttaatatgtttaactatgaattgctgccctttaccttgctaggtgtcactatgtggtatatgccccatatacttaagaccagataattcaaagttccaaawtatacatggtccccaggatttcagatgagagaccacagatccacattgggcttgtttttacccgtctgtggcctaacgttatgaaagcaagggggaaatt

SEQ ID NO: 281174 - DNA, 201 bp, Homo sapiens
gattgtgccactgcactccagcttggggacagagtgagaccctgtctcaaaaaaaaaaagtccatttacttttaaatgcttttttcttttttttttggcarattgagacaaaagctgctgaactttcctaaatctacactgttagtattatcagtttgtgaaaagcaagcagaaggagaataaacatgagtatgatattaa

SEQ ID NO: 281175 - DNA, 201 bp, Homo sapiens
catggtgaaacctcgtatctacaaaaaatagaaaaattagctgggcgttggtggctcacgcctgtagtcccagctacacaggaggctgaggctggtgaatsgcttgagcccaggaagcataggttgcagtgagccgagattgtgccactgcactccagcttggggacagagtgagaccctgtctcaaaaaaaaaaagtcca

SEQ ID NO: 281176 - DNA, 201 bp, Homo sapiens
ttctagaaatgttctaactttttgagggagttactgcatgtcttagctttcttctagatcatgtttccaaaagttgcctgctcatgtgaatcgagtagagraccagttcctaaccttctccaggagataattctgggaatctgtattttaacaagccccttgacattcatatgatcagacaagtttggtatatactgtttt

SEQ ID NO: 281177 - DNA, 201 bp, Homo sapiens
gggcaatttgttctgcttttttcaaaagcacccccttattcttgaacattgtatgataatccccaattgacctcctggattttctccctttgttgctaacrgaaggtgaaactgagcctgatattttcctggtgatcactaggaaattgatgggaagggcaaaagcctactgatgtatactttctaaatgttttagaagta

SEQ ID NO: 281178 - DNA, 201 bp, Homo sapiens
accagttaataagttacattttctagaaatgttctaactttttgagggagttactgcatgtcttagctttcttctagatcatgtttccaaaagttgcctgstcatgtgaatcgagtagagaaccagttcctaaccttctccaggagataattctgggaatctgtattttaacaagccccttgacattcatatgatcagaca

SEQ ID NO: 281179 - DNA, 201 bp, Homo sapiens
aaaaaaaaaggagtgtcagaaagcattccagtcctaaaagatgaaggctggtctggtatggttgctcatgcctctaatcccagcactttgggaggccaagrccgggggattgcttgagcccagaagttcgagaccaacctggacaacatagcaagagctcgtctgaattttttaaataaaaagtttttaaaagttaaaaaa

SEQ ID NO: 281180 - DNA, 201 bp, Homo sapiens
ctgcatatgtgtagaagttgaaaccatgagagtaggtgaagcctcccagggagaactgatctggtgagaagaggaggaaggcaaggatagagccctggggmaccccaatttttaggaagcaggcttaagaagaacccacaaaggagactaggaaagaacttaaagagcagtatgaggaaacctgaggacaggagccaaggt

SEQ ID NO: 281181 - DNA, 201 bp, Homo sapiens
cattttctgttctataatattttgtttggtcaccaaacagtgctgcccatgttatcaaactgatcaccgactccctgactttaggttcaaatgtttgaacrtttttctctatttggaatccttctcacctctttaaaaaggaaactgagctccttgtgggcaaggatcctggcttcctggacactgccaaatgtgacttcg

SEQ ID NO: 281182 - DNA, 201 bp, Homo sapiens
gtggctcacatctgtaatccctgcactttgggaggccaaggcgggcagattacttgaggtcaggagttcaagaccagcctggccaacatggtaaaaccccrtctctactaaaaatacaaaaattagccagggtggtagtgggtgcctgtaatcccagctactcaggaggctgaggctggagaatcacttgaacccaggagg

SEQ ID NO: 281183 - DNA, 201 bp, Homo sapiens
aggtcaggagttcaagaccagcctggccaacatggtaaaaccccgtctctactaaaaatacaaaaattagccagggtggtagtgggtgcctgtaatcccakctactcaggaggctgaggctggagaatcacttgaacccaggagggagaggttgcaatgaactgagttcgcacccattgcactccagcctgggcaacgagt

SEQ ID NO: 281184 - DNA, 201 bp, Homo sapiens
cagcctggccaacatggtaaaaccccgtctctactaaaaatacaaaaattagccagggtggtagtgggtgcctgtaatcccagctactcaggaggctgagrctggagaatcacttgaacccaggagggagaggttgcaatgaactgagttcgcacccattgcactccagcctgggcaacgagtgaaactccgtctcaaaaa

SEQ ID NO: 281185 - DNA, 201 bp, Homo sapiens
tgcacctggtcttttttcttttctttttttttttttttgagacggagtctcactctgttgccaggctggagtgcagtggtgcgatctcggctcactgcaayctccgcctcccgggttcaagcgattctcctgcctcagcctcccgagtagctgggactacaagcatgccccaccacacctgcccagctaatttttaacggg

SEQ ID NO: 281186 - DNA, 201 bp, Homo sapiens
gggtggtagtgggtgcctgtaatcccagctactcaggaggctgaggctggagaatcacttgaacccaggagggagaggttgcaatgaactgagttcgcacycattgcactccagcctgggcaacgagtgaaactccgtctcaaaaaaaaaaaaatgcagtgtcatggagaatatgtgctaccgtgtcattccttacagtcc

SEQ ID NO: 281187 - DNA, 201 bp, Homo sapiens
tttttgagacggagtctcactctgttgccaggctggagtgcagtggtgcgatctcggctcactgcaacctccgcctcccgggttcaagcgattctcctgcytcagcctcccgagtagctgggactacaagcatgccccaccacacctgcccagctaatttttaacggggtttcaccatgttggccaggatggtctcgatct

SEQ ID NO: 281188 - DNA, 201 bp, Homo sapiens
gctactcaggaggctgaggctggagaatcacttgaacccaggagggagaggttgcaatgaactgagttcgcacccattgcactccagcctgggcaacgagygaaactccgtctcaaaaaaaaaaaaatgcagtgtcatggagaatatgtgctaccgtgtcattccttacagtcccttgacagaacaccctcttctctcttc

SEQ ID NO: 281189 - DNA, 201 bp, Homo sapiens
tgagacggagtctcactctgttgccaggctggagtgcagtggtgcgatctcggctcactgcaacctccgcctcccgggttcaagcgattctcctgcctcakcctcccgagtagctgggactacaagcatgccccaccacacctgcccagctaatttttaacggggtttcaccatgttggccaggatggtctcgatctcttg

SEQ ID NO: 281190 - DNA, 201 bp, Homo sapiens
cgcgcacccatcctctgaatgttcaggagagcggctcctattggctgccgcagtcggttgtgtttggctggccaatggggaaggcccgccgcgggagaggrccacacagaggctaggagaagggggggaagctagtggtggcagttccagcaaaaggggactttgtttacggggctagccattactggcccaggtggagga

SEQ ID NO: 281191 - DNA, 201 bp, Homo sapiens
acggagtctcactctgttgccaggctggagtgcagtggtgcgatctcggctcactgcaacctccgcctcccgggttcaagcgattctcctgcctcagcctsccgagtagctgggactacaagcatgccccaccacacctgcccagctaatttttaacggggtttcaccatgttggccaggatggtctcgatctcttgacct

SEQ ID NO: 281192 - DNA, 201 bp, Homo sapiens
atctcggctaactgatacgtccgcctcccgggttcatgccattttcctgcctcagcctcccgaggagtagctgggactacaggcgcctgccaccatgcccrgctaattttttttttttttttttttttgtatttttagtagagacggggtttcaccgtgttagccagaatggtctccatctcctgacctcgggtgatccac

SEQ ID NO: 281193 - DNA, 201 bp, Homo sapiens
aggtcagaggccgaggtgggcggatcacgaggccaggagtttgagaccagcctgaccaacatggtgaaaccccgtctctactaaaaatacaaaaattagcyggacgtggtggtgcatgcctgtaatcccagctactcggtaggctgaggcaggagaattgcttggacccaggaggtggaggttgcagtgagccgagatcac

SEQ ID NO: 281194 - DNA, 201 bp, Homo sapiens
gctaactgatacgtccgcctcccgggttcatgccattttcctgcctcagcctcccgaggagtagctgggactacaggcgcctgccaccatgcccggctaattttttttttttttttttttttgtatttttagtagagacggggtttcaccgtgttagccagaatggtctccatctcctgacctcgggtgatccacccgcct

SEQ ID NO: 281195 - DNA, 201 bp, Homo sapiens
tgcagtggcatgatctcggctcactgcaacctctgcctcccaggttcaagcgattctcctgcctcagcctccccagtagctgggaccacaggcatatgccrccacacctggccaatttttgtatttttagtagagacggggtttcgccatgttggccaggctggtctcaaactcgtggcctcagtgatctgcctgcctcag

SEQ ID NO: 281196 - DNA, 201 bp, Homo sapiens
tacgtccgcctcccgggttcatgccattttcctgcctcagcctcccgaggagtagctgggactacaggcgcctgccaccatgcccggctaatttttttttkttttttttttttgtatttttagtagagacggggtttcaccgtgttagccagaatggtctccatctcctgacctcgggtgatccacccgcctcggcctccc

SEQ ID NO: 281197 - DNA, 201 bp, Homo sapiens
gccattttcctgcctcagcctcccgaggagtagctgggactacaggcgcctgccaccatgcccggctaattttttttttttttttttttttgtatttttartagagacggggtttcaccgtgttagccagaatggtctccatctcctgacctcgggtgatccacccgcctcggcctcccaaagtgctgggattacaggcgt

SEQ ID NO: 281198 - DNA, 201 bp, Homo sapiens
ccattttcctgcctcagcctcccgaggagtagctgggactacaggcgcctgccaccatgcccggctaattttttttttttttttttttttgtatttttagkagagacggggtttcaccgtgttagccagaatggtctccatctcctgacctcgggtgatccacccgcctcggcctcccaaagtgctgggattacaggcgtg

SEQ ID NO: 281199 - DNA, 201 bp, Homo sapiens
ctttaggtgaagatcaacttggcctgtattgtcacttctttttttatttttattttttgagatggagtcttgctgctctgtcaccaggctggagtgcagtrgcgcaatctcagctcactgcaacctccacctcccgggttcaagcaattcccctgcctcagcttctcaagtagctgggattacaagcacgtaccaccacac

SEQ ID NO: 281200 - DNA, 201 bp, Homo sapiens
gggaggctgaggcaggagaatggcgtgaacccgggaggcagagcttgcagtgagccgagatcccgccactgcactccagcctgggcaacagagcgagactscgtctcaaaaaaaaaaaaaaaaaaaaaaaaaaagtctccaataaactctggtactgtatgttaaaaaagaacaacacacaactggtcataatggtaaaat

SEQ ID NO: 281201 - DNA, 201 bp, Homo sapiens
gaatggcatcttccagttaataagtttattagctgagctagcagatatatttacagctaacccttttatcatatatgtgggtcgcccatttctaaaacccyacattatactactcagcattaaaactacccagataaggatttcctcttagttggctaatccaaaatcatccttatgaataccaattttcattgtattatg

SEQ ID NO: 281202 - DNA, 201 bp, Homo sapiens
gtattccttctccctaaagtcattcgcgggttcagaatttgtttgaaatcgactttactgggggtacaatttacatacgataaagtgcacccatttgtttmttttaagactttacctctccccctacatatttcataagctaaggtaacactgacacatgtcactagcactgactcgtgagttattgctaatgccatcaag

SEQ ID NO: 281203 - DNA, 201 bp, Homo sapiens
cgggcatagtggcgggcgcctgtagtcccagctacttgggaggctgaggcaggagaatggcgtgaacccgggaggcagagcttgcagtgagccgagatccmgccactgcactccagcctgggcaacagagcgagactccgtctcaaaaaaaaaaaaaaaaaaaaaaaaaaagtctccaataaactctggtactgtatgtta

SEQ ID NO: 281204 - DNA, 201 bp, Homo sapiens
tcctgcctcagcctcccgaggagtagctgggactacaggcgcctgccaccatgcccggctaattttttttttttttttttttttgtatttttagtagagayggggtttcaccgtgttagccagaatggtctccatctcctgacctcgggtgatccacccgcctcggcctcccaaagtgctgggattacaggcgtgagccac

SEQ ID NO: 281205 - DNA, 201 bp, Homo sapiens
tttttttgtatttttagtagagacggggtttcaccgtgttagccagaatggtctccatctcctgacctcgggtgatccacccgcctcggcctcccaaagtrctgggattacaggcgtgagccaccgtgcccagcctaaactgtcgacttttaaaaatttttaccatgatctgcagtgagaaatacatttcttttacaaccc

SEQ ID NO: 281206 - DNA, 201 bp, Homo sapiens
ttagtagagacggggtttcaccgtgttagccagaatggtctccatctcctgacctcgggtgatccacccgcctcggcctcccaaagtgctgggattacagrcgtgagccaccgtgcccagcctaaactgtcgacttttaaaaatttttaccatgatctgcagtgagaaatacatttcttttacaacccattttatgactac

SEQ ID NO: 281207 - DNA, 201 bp, Homo sapiens
cttgggaggctgaggcaggagaatggcgtgaacccgggaggcagagcttgcagtgagccgagatcccgccactgcactccagcctgggcaacagagcgagrctccgtctcaaaaaaaaaaaaaaaaaaaaaaaaaaagtctccaataaactctggtactgtatgttaaaaaagaacaacacacaactggtcataatggtaa

SEQ ID NO: 281208 - DNA, 201 bp, Homo sapiens
aacatggcccctgtttatttctcttttcattcatgttgaccagagtaagccatctttttaggtaaaacttttcttttttttcttttcttttttcttttcttttctcttctcttctcttctcttcccttttttggaaaagctttcccctctaggttttttttgttgtgtttttgtttttgagacagagtctcgctctgtcgc

SEQ ID NO: 281209 - DNA, 201 bp, Homo sapiens
acatggcccctgtttatttctcttttcattcatgttgaccagagtaagccatctttttaggtaaaacttttcttttttttcttttcttttttcttttcttttctcttctcttctcttctcttcccttttttggaaaagctttcccctctaggttttttttgttgtgtttttgtttttgagacagagtctcgctctgtcgcc

SEQ ID NO: 281210 - DNA, 201 bp, Homo sapiens
catggcccctgtttatttctcttttcattcatgttgaccagagtaagccatctttttaggtaaaacttttcttttttttcttttcttttttcttttcttttctcttctcttctcttctcttcccttttttggaaaagctttcccctctaggttttttttgttgtgtttttgtttttgagacagagtctcgctctgtcgccc

SEQ ID NO: 281211 - DNA, 201 bp, Homo sapiens
atggcccctgtttatttctcttttcattcatgttgaccagagtaagccatctttttaggtaaaacttttcttttttttcttttcttttttcttttcttttctcttctcttctcttctcttcccttttttggaaaagctttcccctctaggttttttttgttgtgtttttgtttttgagacagagtctcgctctgtcgccca

SEQ ID NO: 281212 - DNA, 201 bp, Homo sapiens
ggcccctgtttatttctcttttcattcatgttgaccagagtaagccatctttttaggtaaaacttttcttttttttcttttcttttttcttttcttttctcttctcttctcttctcttcccttttttggaaaagctttcccctctaggttttttttgttgtgtttttgtttttgagacagagtctcgctctgtcgcccagg

SEQ ID NO: 281213 - DNA, 201 bp, Homo sapiens
ttcttttcttttctcttctcttctcttctcttcccttttttggaaaagctttcccctctaggttttttttgttgtgtttttgtttttgagacagagtctcrctctgtcgcccaggctggagtgcagtggtgcaatctcggctcactgcagccgccacctcaggggttcaggtggttctcgtgtctcagcctccctagtagc

SEQ ID NO: 281214 - DNA, 201 bp, Homo sapiens
aaaagtctccaataggccgggcgcggtggctcacgcctgtaatcccagcactttgggaggccgaggcgggcagatcacgaggtcaggagatcgagaccatyccggctaaaacggtgaaaccccgtctctactaaaaatacaaaaaattagccgggcatagtggcgggcgcctgtagtcccagctacttgggaggctgaggc

SEQ ID NO: 281215 - DNA, 201 bp, Homo sapiens
gattgagacaagtgcaaggtgatttttttttaacagtggcaaagaatcatctgagacttcaagaagattcatccagtctgttctgttgctttcagcttcaraaggagaggaagttcctcaagacaaggcgccaagtcatgttcctttcctgctaattggtggaggcacagctgcttttgctgcagccagatccatccgggc

SEQ ID NO: 281216 - DNA, 201 bp, Homo sapiens
ctacttgggaggctgaggcaggagaatggcgtgaacccgggaggcagagcttgcagtgagccgagatcccgccactgcactccagcctgggcaacagagcragactccgtctcaaaaaaaaaaaaaaaaaaaaaaaaaaagtctccaataaactctggtactgtatgttaaaaaagaacaacacacaactggtcataatgg

SEQ ID NO: 281217 - DNA, 201 bp, Homo sapiens
ttttctcttctcttctcttctcttcccttttttggaaaagctttcccctctaggttttttttgttgtgtttttgtttttgagacagagtctcgctctgtcmcccaggctggagtgcagtggtgcaatctcggctcactgcagccgccacctcaggggttcaggtggttctcgtgtctcagcctccctagtagctgggatta

SEQ ID NO: 281218 - DNA, 201 bp, Homo sapiens
agcctctggagtagctgggattacaggcatgcaccaccacacctggctaattttgtatttttggtagagacagggtttctccatgttggtcaggctggtcytgaactcccaacctcaggtgatccacccacctcggccacccaaagtgctgggattataggtgtgagtcactgcacctggccaacagcaatactttctttc

SEQ ID NO: 281219 - DNA, 201 bp, Homo sapiens
aatatgttttatggggccgggtgtggtggctcacgcatgtaatcccagcactttgggaggccaaggtgggtggatcacaaggtcaggagttcaagaccagmctggccaacatagtgaaaccccacctctactaaaaatacaaaaattagctgggcatggtggcgtgtgcctgtagtcccagctactcaggaggctgaggca

SEQ ID NO: 281220 - DNA, 201 bp, Homo sapiens
ctttgggaggccaaggtgggtggatcacaaggtcaggagttcaagaccagcctggccaacatagtgaaaccccacctctactaaaaatacaaaaattagcygggcatggtggcgtgtgcctgtagtcccagctactcaggaggctgaggcagcagaatcgcttgaacccaggaggcagaggttgtagtaagccgagatcac

SEQ ID NO: 281221 - DNA, 201 bp, Homo sapiens
aggccaaggtgggtggatcacaaggtcaggagttcaagaccagcctggccaacatagtgaaaccccacctctactaaaaatacaaaaattagctgggcatrgtggcgtgtgcctgtagtcccagctactcaggaggctgaggcagcagaatcgcttgaacccaggaggcagaggttgtagtaagccgagatcacgccactg

SEQ ID NO: 281222 - DNA, 201 bp, Homo sapiens
ggccaaggtgggtggatcacaaggtcaggagttcaagaccagcctggccaacatagtgaaaccccacctctactaaaaatacaaaaattagctgggcatgrtggcgtgtgcctgtagtcccagctactcaggaggctgaggcagcagaatcgcttgaacccaggaggcagaggttgtagtaagccgagatcacgccactgc

SEQ ID NO: 281223 - DNA, 201 bp, Homo sapiens
tgggtggatcacaaggtcaggagttcaagaccagcctggccaacatagtgaaaccccacctctactaaaaatacaaaaattagctgggcatggtggcgtgygcctgtagtcccagctactcaggaggctgaggcagcagaatcgcttgaacccaggaggcagaggttgtagtaagccgagatcacgccactgcactccagc

SEQ ID NO: 281224 - DNA, 201 bp, Homo sapiens
ttgggaggctgaggcaggagaatggcgtgaacccgggaggcagagcttgcagtgagccgagatcccgccactgcactccagcctgggcaacagagcgagahtccgtctcaaaaaaaaaaaaaaaaaaaaaaaaaaagtctccaataaactctggtactgtatgttaaaaaagaacaacacacaactggtcataatggtaaa

SEQ ID NO: 281225 - DNA, 201 bp, Homo sapiens
acctccacctcctgggttcaagcaattcccatgcctcaacctcccaagtagctgggactacaggcgtgcatcacctcacccagctaatttttgtatttttrgtagagatggggtttcaccatgttggccaggctggtctcaaactcctcacctcaggtggtctgcccacctcagcctcccaaagtgctgggattacaggtg

SEQ ID NO: 281226 - DNA, 201 bp, Homo sapiens
tgtaatcccagcactttgggaggccgaggcgggcagatcacgaggtcaggagatcgagaccatcccggctaaaacggtgaaaccccgtctctactaaaaayacaaaaaattagccgggcatagtggcgggcgcctgtagtcccagctacttgggaggctgaggcaggagaatggcgtgaacccgggaggcagagcttgcag

SEQ ID NO: 281227 - DNA, 201 bp, Homo sapiens
ctaaaacggtgaaaccccgtctctactaaaaatacaaaaaattagccgggcatagtggcgggcgcctgtagtcccagctacttgggaggctgaggcaggasaatggcgtgaacccgggaggcagagcttgcagtgagccgagatcccgccactgcactccagcctgggcaacagagcgagactccgtctcaaaaaaaaaaa

SEQ ID NO: 281228 - DNA, 201 bp, Homo sapiens
tttgggaggccgaggcgggcagatcacgaggtcaggagatcgagaccatcccggctaaaacggtgaaaccccgtctctactaaaaatacaaaaaattagcygggcatagtggcgggcgcctgtagtcccagctacttgggaggctgaggcaggagaatggcgtgaacccgggaggcagagcttgcagtgagccgagatccc

SEQ ID NO: 281229 - DNA, 201 bp, Homo sapiens
ctactaaaaatacaaaaaattagccgggcatagtggcgggcgcctgtagtcccagctacttgggaggctgaggcaggagaatggcgtgaacccgggaggcrgagcttgcagtgagccgagatcccgccactgcactccagcctgggcaacagagcgagactccgtctcaaaaaaaaaaaaaaaaaaaaaaaaaaagtctcc

SEQ ID NO: 281230 - DNA, 201 bp, Homo sapiens
gaaagggatacttgcttttcctctcccatcaggatgctgtgaagattgttaagattagcgtaggtcatatgttttgctagctttatgtggaggattgagayaagtgcaaggtgatttttttttaacagtggcaaagaatcatctgagacttcaagaagattcatccagtctgttctgttgctttcagcttcagaaggagag

SEQ ID NO: 281231 - DNA, 201 bp, Homo sapiens
ctatgtaagtagaaaagcagcgtgtataaagaagctgccaaacagctcccattaatagactcgatagtattctgctttaaaacttttgcaactaattcccmtttctccttttggaaaaattttcaaaaagccttctcttaagtgcctgctgcctaatatcttatgggagccaattctggaatgactgaaatttaatctcat

SEQ ID NO: 281232 - DNA, 201 bp, Homo sapiens
gttccggtgtggaggcctggcggcgggtgctttgaagcagaagctggtgcccttggtgcggaccgtgtgcgtccgaagcccgaggcagaggaaccggctcycaggtgactgacccattccaggcaacctccaagtccgagggcctggcgccttaggctccctgtgccttgcagccctctacccccgcgtccccgcgagaaa

SEQ ID NO: 281233 - DNA, 201 bp, Homo sapiens
ctaggaccataacacagagttatggtttggttttattatgagccagttagcttcatacagaagggaaaaaagtccatcttatgtccacacattctaccctyaggtagccatctggcagaagtgtcctgtttagtttttcaccaaactgatccttttgtaaaacattaaaagagaaaaaaattattttaagtgttctgtctg

SEQ ID NO: 281234 - DNA, 201 bp, Homo sapiens
gctctgtgcttgttgcacagaaattgagataacctgaattttttttttttttttttgagacggagtctcgctttgtcgcccaggctggagtgcagtggcgsgatctcggctcactgcaatctccgcctcccggattcacgccattcttctgcctcagcctccagagtagctgggactacaggcacccgccaccacgcccgg

SEQ ID NO: 281235 - DNA, 201 bp, Homo sapiens
attacaggcatgagccactggcctctagggtctgatttctgactccacagacaagcagtgccagtcgaggtttggccctcaatagctggtctgtgataagstgggccacaccacagtgtggtgcaaggctagtcccaccctgggaagaagaggcaggctttgcccaaagagcagtcatctagagcccacccatttgacttc

SEQ ID NO: 281236 - DNA, 201 bp, Homo sapiens
ctgtggtaattgactgaattatttcttttttgcctcaggtagaaactgaccacatagtggcagctgtgggcctggagcccaatgttgagttggccaagackggtggcctggaaatagactcagattttggtggcttccgggtaaatgcagagctacaagcacgctctaacatctgggtggtaagtgtgctacagcatgacc

SEQ ID NO: 281237 - DNA, 201 bp, Homo sapiens
tataggaacccccttgacataagccctatcacctggcctgtaaaatgtttccaccattctccagtcagctaagttcatctaggtgttctgaatcagatgcyccaaattcctggaagtgctgaaaatgaaccatgggtgtaggttcttgcagctctccaaaactgcctgtgtactgataattggttttaccgtggaggagac

SEQ ID NO: 281238 - DNA, 201 bp, Homo sapiens
ttttttttttgagatggagtttcactctttttgcccaggctggagtgcagtggcccgatctcatctcactgcaacctccgcctcctgggttcaagcaattstcccgcctcagcctctggagtagctaggattacaggtgtgtgccaccatgcctggctaattttgtatgtttagtagagacagggtttcaccatgttggcc

SEQ ID NO: 281239 - DNA, 201 bp, Homo sapiens
tctcccgcctcagcctctggagtagctaggattacaggtgtgtgccaccatgcctggctaattttgtatgtttagtagagacagggtttcaccatgttggycaggctggtctcaaacccctgacctcaggtgatccgcctgcttcggcctcccaaagtgctgggattacaggtgggagccaccacgcccagccgaaagctg

SEQ ID NO: 281240 - DNA, 201 bp, Homo sapiens
ggtgtgtgccaccatgcctggctaattttgtatgtttagtagagacagggtttcaccatgttggccaggctggtctcaaacccctgacctcaggtgatccrcctgcttcggcctcccaaagtgctgggattacaggtgggagccaccacgcccagccgaaagctgttttttaaatgaggaaattcttctagtctgttttgt

SEQ ID NO: 281241 - DNA, 201 bp, Homo sapiens
ccgaggcctcagaaattactattcctcccagcaccccggcagttccacaggctcccgtccagggggaggactacggcaaaggtgtcatcttctacctcagrgacaaagtggtcgtggggattgtgctatggaacatctttaaccgaatgccaatagcaaggaaggtaggtgcctgtcataactcttagaggaagatgggaa

SEQ ID NO: 281242 - DNA, 201 bp, Homo sapiens
ccaccatgcctggctaattttgtatgtttagtagagacagggtttcaccatgttggccaggctggtctcaaacccctgacctcaggtgatccgcctgcttyggcctcccaaagtgctgggattacaggtgggagccaccacgcccagccgaaagctgttttttaaatgaggaaattcttctagtctgttttgttccccttt

SEQ ID NO: 281243 - DNA, 201 bp, Homo sapiens
ggacagactatctaggcttgtcctgtgtttttttttttttttttttcttcaaacagagtcttgctctgttgcccaggctggagtgcagtgacacaatctcrgctcactgcaacctctgtctcctgggttcaagtgattctcctgcctcagcctcccgagtagctgggattacaggcacctgccaccacgcccagctaattt

SEQ ID NO: 281244 - DNA, 201 bp, Homo sapiens
ttaggtgaagatcaacttggcctgtattgtcacttctttttttatttttattttttgagatggagtcttgctgctctgtcaccaggctggagtgcagtggkgcaatctcagctcactgcaacctccacctcccgggttcaagcaattcccctgcctcagcttctcaagtagctgggattacaagcacgtaccaccacaccc

SEQ ID NO: 281245 - DNA, 201 bp, Homo sapiens
taggtgaagatcaacttggcctgtattgtcacttctttttttatttttattttttgagatggagtcttgctgctctgtcaccaggctggagtgcagtggcrcaatctcagctcactgcaacctccacctcccgggttcaagcaattcccctgcctcagcttctcaagtagctgggattacaagcacgtaccaccacacccg

SEQ ID NO: 281246 - DNA, 201 bp, Homo sapiens
tttaaactaatgccttatcaatggatgtcatctttgagggttttgtgtattgaaatgatggtgctctgtgcttgttgcacagaaattgagataacctgaattttttttttttttttttgagacggagtctcgctttgtcgcccaggctggagtgcagtggcgcgatctcggctcactgcaatctccgcctcccggattcac

SEQ ID NO: 281247 - DNA, 201 bp, Homo sapiens
ggtgaagatcaacttggcctgtattgtcacttctttttttatttttattttttgagatggagtcttgctgctctgtcaccaggctggagtgcagtggcgcsatctcagctcactgcaacctccacctcccgggttcaagcaattcccctgcctcagcttctcaagtagctgggattacaagcacgtaccaccacacccggc

SEQ ID NO: 281248 - DNA, 201 bp, Homo sapiens
atggatgtcatctttgagggttttgtgtattgaaatgatggtgctctgtgcttgttgcacagaaattgagataacctgaattttttttttttttttttgaracggagtctcgctttgtcgcccaggctggagtgcagtggcgcgatctcggctcactgcaatctccgcctcccggattcacgccattcttctgcctcagcc

SEQ ID NO: 281249 - DNA, 201 bp, Homo sapiens
tctttttttatttttattttttgagatggagtcttgctgctctgtcaccaggctggagtgcagtggcgcaatctcagctcactgcaacctccacctcccgrgttcaagcaattcccctgcctcagcttctcaagtagctgggattacaagcacgtaccaccacacccggctaattttttgtattttatagtagagatgggg

SEQ ID NO: 281250 - DNA, 201 bp, Homo sapiens
ggatgtcatctttgagggttttgtgtattgaaatgatggtgctctgtgcttgttgcacagaaattgagataacctgaattttttttttttttttttgagayggagtctcgctttgtcgcccaggctggagtgcagtggcgcgatctcggctcactgcaatctccgcctcccggattcacgccattcttctgcctcagcctc

SEQ ID NO: 281251 - DNA, 201 bp, Homo sapiens
acacacacacacacacacacacatattttgagagacagggtctggctctgtcacccatgctggagtgcagtggccgaatcatagctcactgcagcctcaamctcctgggctcaagtgatcctcccacctcagcctcccgagtagctaggactacaggtgcgtaccaccatgtgccttttattaattaaaaaaatttttttc

SEQ ID NO: 281252 - DNA, 201 bp, Homo sapiens
gtcatctttgagggttttgtgtattgaaatgatggtgctctgtgcttgttgcacagaaattgagataacctgaattttttttttttttttttgagacggartctcgctttgtcgcccaggctggagtgcagtggcgcgatctcggctcactgcaatctccgcctcccggattcacgccattcttctgcctcagcctccaga

SEQ ID NO: 281253 - DNA, 201 bp, Homo sapiens
tattttgagagacagggtctggctctgtcacccatgctggagtgcagtggccgaatcatagctcactgcagcctcaaactcctgggctcaagtgatcctcycacctcagcctcccgagtagctaggactacaggtgcgtaccaccatgtgccttttattaattaaaaaaatttttttctagagacgagatgttgctatgtt

SEQ ID NO: 281254 - DNA, 201 bp, Homo sapiens
attgaaatgatggtgctctgtgcttgttgcacagaaattgagataacctgaattttttttttttttttttgagacggagtctcgctttgtcgcccaggctkgagtgcagtggcgcgatctcggctcactgcaatctccgcctcccggattcacgccattcttctgcctcagcctccagagtagctgggactacaggcaccc

SEQ ID NO: 281255 - DNA, 201 bp, Homo sapiens
aaatgatggtgctctgtgcttgttgcacagaaattgagataacctgaattttttttttttttttttgagacggagtctcgctttgtcgcccaggctggagwgcagtggcgcgatctcggctcactgcaatctccgcctcccggattcacgccattcttctgcctcagcctccagagtagctgggactacaggcacccgcca

SEQ ID NO: 281256 - DNA, 201 bp, Homo sapiens
tgcttgttgcacagaaattgagataacctgaattttttttttttttttttgagacggagtctcgctttgtcgcccaggctggagtgcagtggcgcgatctyggctcactgcaatctccgcctcccggattcacgccattcttctgcctcagcctccagagtagctgggactacaggcacccgccaccacgcccggctaatt

SEQ ID NO: 281257 - DNA, 201 bp, Homo sapiens
accccgtctctactaaaaatacaaaaaattagccgggcatagtggcgggcgcctgtagtcccagctacttgggaggctgaggcaggagaatggcgtgaacycgggaggcagagcttgcagtgagccgagatcccgccactgcactccagcctgggcaacagagcgagactccgtctcaaaaaaaaaaaaaaaaaaaaaaaa

SEQ ID NO: 281258 - DNA, 201 bp, Homo sapiens
agctacttgggaggctgaggcaggagaatggcgtgaacccgggaggcagagcttgcagtgagccgagatcccgccactgcactccagcctgggcaacagarcgagactccgtctcaaaaaaaaaaaaaaaaaaaaaaaaaaagtctccaataaactctggtactgtatgttaaaaaagaacaacacacaactggtcataat

SEQ ID NO: 281259 - DNA, 201 bp, Homo sapiens
cagtgtacagtactttttttttttgagacagattctcactctgtcgcccaggctggagtacggtggcatgatctcagctcgctgcaacctctgcctcccakgttcaagcgattctcctgcctcagcctcccaagtagctgcatgcgccaccatgcctggctattttttttttttgtctttttagtagagatggggttttac

SEQ ID NO: 281260 - DNA, 201 bp, Homo sapiens
gtggcatgatctcagctcgctgcaacctctgcctcccaggttcaagcgattctcctgcctcagcctcccaagtagctgcatgcgccaccatgcctggctattttttttttttgtctttttagtagagatggggttttaccatgtaggccaggttggtctcgaactcctgacctcaggtgatccacccacctcggcttccca

SEQ ID NO: 281261 - DNA, 201 bp, Homo sapiens
cgaccaagcacaggatttttctcagccatgtattcatgccctactccagacgcaaaactcctttcatttccgaacttccctcacccctccagacctctttrcacacacctgctgtggcctcggcccacaacacttgactcccctcctctcctctcaggaagttcactatctctgaagactttcccagccttccaagcctca

SEQ ID NO: 281262 - DNA, 201 bp, Homo sapiens
ggaatctgggaagaaaagaaccgtaaaatgcactgtgagatttggcggttcagatacctttgggaggctgaggcaggtggatcacttgaggtctggagttmgagaccagcctggccaacatggtgaaaacacatctctactaaaaatacaaaaattagccaggtgtggtggcgcacacctgtaatcccagctactcaggag

SEQ ID NO: 281263 - DNA, 201 bp, Homo sapiens
tttagtggtctgagatttggcaaaatcaggtatcctggtcaaagcatagattcaaatattgtgggtatctgtcctagacagtggacagtggctagctcaaygacactgctgttttgtgtgtctctgggaagacctttctaaggaagaaaacaagaaaacctgaactttttagattgcgtttttatttttctttctttcagt

SEQ ID NO: 281264 - DNA, 201 bp, Homo sapiens
gcagtggcgcgatctcggctcactgcaatctccgcctcccggattcacgccattcttctgcctcagcctccagagtagctgggactacaggcacccgccamcacgcccggctaattttttttttttttttttgtatttttagtagagacaaggtttcaccatgttaaccaggatggtctcgatctcctgacctcgtgatcc

SEQ ID NO: 281265 - DNA, 201 bp, Homo sapiens
tgagatttggcggttcagatacctttgggaggctgaggcaggtggatcacttgaggtctggagttagagaccagcctggccaacatggtgaaaacacatcyctactaaaaatacaaaaattagccaggtgtggtggcgcacacctgtaatcccagctactcaggaggctgaagcacgagaatcgcttgaacccaggaggcg

SEQ ID NO: 281266 - DNA, 201 bp, Homo sapiens
acaaggtttcaccatgttaaccaggatggtctcgatctcctgacctcgtgatccgcccacctcggcctcccaaagcgctgggattacaggcgtgagccacygcgcccggcgataacctgaattttttcatccacactggcctttcaaactttgagtagttgttttgcttaagtctcacaacttttaccagcattctaaagt

SEQ ID NO: 281267 - DNA, 201 bp, Homo sapiens
gaggctgaggcaggtggatcacttgaggtctggagttagagaccagcctggccaacatggtgaaaacacatctctactaaaaatacaaaaattagccaggygtggtggcgcacacctgtaatcccagctactcaggaggctgaagcacgagaatcgcttgaacccaggaggcggaggttgcagtgagccaagattgcatca

SEQ ID NO: 281268 - DNA, 201 bp, Homo sapiens
tttctttttcatgtagtagcatctaccgtgtgtttttgcacaggtgggaaagagcaaggttcgtttatacaccatttctccctccaccttacctttaaacttttttttttttttttttttgaggcggagtctcgctcagtttcccagagtgcagtggcacgatcttggctcactgcaacctctgcctgctgggttcaagca

SEQ ID NO: 281269 - DNA, 201 bp, Homo sapiens
ctgaggcaggtggatcacttgaggtctggagttagagaccagcctggccaacatggtgaaaacacatctctactaaaaatacaaaaattagccaggtgtgrtggcgcacacctgtaatcccagctactcaggaggctgaagcacgagaatcgcttgaacccaggaggcggaggttgcagtgagccaagattgcatcagtgc

SEQ ID NO: 281270 - DNA, 201 bp, Homo sapiens
taccgtgtgtttttgcacaggtgggaaagagcaaggttcgtttatacaccatttctccctccaccttacctttaaacttttttttttttttttttttgagrcggagtctcgctcagtttcccagagtgcagtggcacgatcttggctcactgcaacctctgcctgctgggttcaagcaattctcctgcgtcagcctcccaa

SEQ ID NO: 281271 - DNA, 201 bp, Homo sapiens
tttacttctcttcctgtattcctaggattgacttttgcttcctgctgtaactactctgtttcttcttcccagctcgagccttgggcacagaagtgattcarctcttccccgagaaaggaaatatgggaaagatcctccccgaatacctcagcaactggaccatggaaaaagtcagacgaggtagagagactgtttctatat

SEQ ID NO: 281272 - DNA, 201 bp, Homo sapiens
ggcaggtggatcacttgaggtctggagttagagaccagcctggccaacatggtgaaaacacatctctactaaaaatacaaaaattagccaggtgtggtggygcacacctgtaatcccagctactcaggaggctgaagcacgagaatcgcttgaacccaggaggcggaggttgcagtgagccaagattgcatcagtgcactc

SEQ ID NO: 281273 - DNA, 201 bp, Homo sapiens
cagcctggccaacatggtgaaaacacatctctactaaaaatacaaaaattagccaggtgtggtggcgcacacctgtaatcccagctactcaggaggctgargcacgagaatcgcttgaacccaggaggcggaggttgcagtgagccaagattgcatcagtgcactccagcctgggtgacagaacaagactccatttcaaaa

SEQ ID NO: 281274 - DNA, 201 bp, Homo sapiens
gtctcgctcagtttcccagagtgcagtggcacgatcttggctcactgcaacctctgcctgctgggttcaagcaattctcctgcgtcagcctcccaagtagytgggactacaggcatgcaccaccacgccgggctaattttttgtatttttagtagagacggggtttcaccatgctggccaggctggtctcaaactcctgac

SEQ ID NO: 281275 - DNA, 201 bp, Homo sapiens
tatcggtgggggcttccttggtagcgaactggcctgtgctcttggcagaaagggtgagtattgaggagtgaccttgattttctttctctagtcttatatarcttttctgtgaatcccagagatgtgtttggcaggatcagtaggaagagtttaattaaggtttatttatttatttttttttgagatggagtctcgctctgt

SEQ ID NO: 281276 - DNA, 201 bp, Homo sapiens
ttattgggctgacaactttttttgtttttgtttttgtttgtttttgttgttgtggttttggggtttttttgttttgttttgtttttgagacagaatcttgmtctgttgcccaggctggagtgcagtggcatgatctcggctcactgcaacctctgcctcccaggttcaagcgattctcctgcctcagcctccccagtagct

SEQ ID NO: 281277 - DNA, 201 bp, Homo sapiens
cctctgcctgctgggttcaagcaattctcctgcgtcagcctcccaagtagctgggactacaggcatgcaccaccacgccgggctaattttttgtatttttmgtagagacggggtttcaccatgctggccaggctggtctcaaactcctgaccttgtgatccacctgcttcagcctcccaaacctttaaactttaaacctgc

SEQ ID NO: 281278 - DNA, 201 bp, Homo sapiens
gtttttgtttgtttttgttgttgtggttttggggtttttttgttttgttttgtttttgagacagaatcttgctctgttgcccaggctggagtgcagtggcrtgatctcggctcactgcaacctctgcctcccaggttcaagcgattctcctgcctcagcctccccagtagctgggaccacaggcatatgccgccacacctg

SEQ ID NO: 281279 - DNA, 201 bp, Homo sapiens
ccttttggaaattaatggactaaactgatgtgatcctgcagattggagactttagaagcttggagaagatttcacgggaagtcaaatcaattacgattatyggtgggggcttccttggtagcgaactggcctgtgctcttggcagaaagggtgagtattgaggagtgaccttgattttctttctctagtcttatatagctt

SEQ ID NO: 281280 - DNA, 201 bp, Homo sapiens
tgctgggttcaagcaattctcctgcgtcagcctcccaagtagctgggactacaggcatgcaccaccacgccgggctaattttttgtatttttagtagagayggggtttcaccatgctggccaggctggtctcaaactcctgaccttgtgatccacctgcttcagcctcccaaacctttaaactttaaacctgccttgcaac

SEQ ID NO: 281281 - DNA, 201 bp, Homo sapiens
tctcctgcgtcagcctcccaagtagctgggactacaggcatgcaccaccacgccgggctaattttttgtatttttagtagagacggggtttcaccatgctrgccaggctggtctcaaactcctgaccttgtgatccacctgcttcagcctcccaaacctttaaactttaaacctgccttgcaactatctcgttgacatctg

SEQ ID NO: 281282 - DNA, 201 bp, Homo sapiens
tcccaagtagctgggactacaggcatgcaccaccacgccgggctaattttttgtatttttagtagagacggggtttcaccatgctggccaggctggtctcraactcctgaccttgtgatccacctgcttcagcctcccaaacctttaaactttaaacctgccttgcaactatctcgttgacatctgtcaccattgtcaggt

SEQ ID NO: 281283 - DNA, 201 bp, Homo sapiens
aagtagctgggactacaggcatgcaccaccacgccgggctaattttttgtatttttagtagagacggggtttcaccatgctggccaggctggtctcaaacycctgaccttgtgatccacctgcttcagcctcccaaacctttaaactttaaacctgccttgcaactatctcgttgacatctgtcaccattgtcaggttcat

SEQ ID NO: 281284 - DNA, 201 bp, Homo sapiens
ggaagtcatagaagtattcttagaatatgttttatggggccgggtgtggtggctcacgcatgtaatcccagcactttgggaggccaaggtgggtggatcasaaggtcaggagttcaagaccagcctggccaacatagtgaaaccccacctctactaaaaatacaaaaattagctgggcatggtggcgtgtgcctgtagtcc

SEQ ID NO: 281285 - DNA, 201 bp, Homo sapiens
tttgtatttttagtagagatggggtttcaccatgttggccaggctggtctcaaactcctcacctcaggtggtctgcccacctcagcctcccaaagtgctgkgattacaggtgtgagtcaccatgcccggccaaaagcattgtaatgttaagtcattcttgcctaccttttctttaaaaagtctccaataggccgggcgcgg

SEQ ID NO: 281286 - DNA, 201 bp, Homo sapiens
aacataatacttttgtatataataagtactccataaatatttgtcgaatgaatgaatactgagtgacaaaaagaaatctaagaaaacatttctaggtgagwggcagtcacatccaaaaactggtttctacatatagaaaagaatattctgcaaatcatggttattaaatatcctgtctgttaaggaaagaacaggaagtag

SEQ ID NO: 281287 - DNA, 201 bp, Homo sapiens
atgtgtgaactgcttgattcagaagaccaggtatggcctcatctgcaagctagtggcagatgaaatgaacagtgtgcatgcctgcaggggtagagctcttscggttctacttattggcagcagctactggcataacccctggtgggcatgcacataagccttcagatggatctgctgttccctttgctcaaacttgaatcc

SEQ ID NO: 281288 - DNA, 201 bp, Homo sapiens
  misc_feature (1)...(201): n = A,T,C or G
ctcagattttggtggcttccgggtaaatgcagagctacaagcacgctctaacatctgggtggtaagtgtgctacagcatgaccaggcataattcattctcnctagcctgtgaacaagtctgcccggtggtgtgctaaagctcatcaacagcctaaccaaatagggtcagagtgtttggaggctgagggtacagaatagaaa

SEQ ID NO: 281289 - DNA, 201 bp, Homo sapiens
tttttgtttgtttttgttgttgtggttttggggtttttttgttttgttttgtttttgagacagaatcttgctctgttgcccaggctggagtgcagtggcaygatctcggctcactgcaacctctgcctcccaggttcaagcgattctcctgcctcagcctccccagtagctgggaccacaggcatatgccgccacacctgg

SEQ ID NO: 281290 - DNA, 201 bp, Homo sapiens
ggagtgcagtggcgcgatctcggctcactgcaatctccgcctcccggattcacgccattcttctgcctcagcctccagagtagctgggactacaggcaccygccaccacgcccggctaattttttttttttttttttgtatttttagtagagacaaggtttcaccatgttaaccaggatggtctcgatctcctgacctcgt

SEQ ID NO: 281291 - DNA, 201 bp, Homo sapiens
ttgtggttttggggtttttttgttttgttttgtttttgagacagaatcttgctctgttgcccaggctggagtgcagtggcatgatctcggctcactgcaamctctgcctcccaggttcaagcgattctcctgcctcagcctccccagtagctgggaccacaggcatatgccgccacacctggccaatttttgtatttttag

SEQ ID NO: 281292 - DNA, 201 bp, Homo sapiens
taaataaattttaaataatttgcctaaactcacatagctagtaagtggtagagagagaatttgagcccgggtctgtctgagccacagaattggaacccagmtattctgattccagagcctaagctattaataacatcagtgtacagtgtacagtactttttttttttgagacagattctcactctgtcgcccaggctggag

SEQ ID NO: 281293 - DNA, 201 bp, Homo sapiens
ttttgttttgtttttgagacagaatcttgctctgttgcccaggctggagtgcagtggcatgatctcggctcactgcaacctctgcctcccaggttcaagcrattctcctgcctcagcctccccagtagctgggaccacaggcatatgccgccacacctggccaatttttgtatttttagtagagacggggtttcgccatgt

SEQ ID NO: 281294 - DNA, 201 bp, Homo sapiens
gtggccgaatcatagctcactgcagcctcaaactcctgggctcaagtgatcctcccacctcagcctcccgagtagctaggactacaggtgcgtaccaccaygtgccttttattaattaaaaaaatttttttctagagacgagatgttgctatgttgcccaatctggtctcaaactcctggcctcaagtgatcctcccaact

SEQ ID NO: 281295 - DNA, 201 bp, Homo sapiens
atttttcagggataagatttgtcctgtctttttttttttttcgagactgaatctcgctctatcacccaggctggagtgcggtggtgcgatcttggctcacygcaacctccgcctcccgggttcaagcgattcttgtgcctcagccttccaagtagctagaattacaggcatgtgccaccacgaccggctaatttttttttt

SEQ ID NO: 281296 - DNA, 201 bp, Homo sapiens
gactacaggcatgcaccaccacgccgggctaattttttgtatttttagtagagacggggtttcaccatgctggccaggctggtctcaaactcctgaccttktgatccacctgcttcagcctcccaaacctttaaactttaaacctgccttgcaactatctcgttgacatctgtcaccattgtcaggttcatttccattata

SEQ ID NO: 281297 - DNA, 201 bp, Homo sapiens
ttctttctctagtcttatatagcttttctgtgaatcccagagatgtgtttggcaggatcagtaggaagagtttaattaaggtttatttatttatttttttytgagatggagtctcgctctgtcacccaggctggagtgcagtggcgcgatctcggctcactgcaagctccgcttcccgggttcaggccattctcctgcctc

SEQ ID NO: 281298 - DNA, 201 bp, Homo sapiens
tagctaggcgtggtggctcacgcctgtaatcccagcactttggtatgccaaggtgggcagatcacttgaggttggaagttcaagaccagcctgaccaacakggagaaaccccgtctctactaaaaatcaaaaattagccaagcgtggtggcacatgcctgtaatccctgctactcgggaggctgaggcaggagaattgctt

SEQ ID NO: 281299 - DNA, 201 bp, Homo sapiens
atatagcttttctgtgaatcccagagatgtgtttggcaggatcagtaggaagagtttaattaaggtttatttatttatttttttttgagatggagtctcgytctgtcacccaggctggagtgcagtggcgcgatctcggctcactgcaagctccgcttcccgggttcaggccattctcctgcctcagcctcccgagtagct

SEQ ID NO: 281300 - DNA, 201 bp, Homo sapiens
accaacatggagaaaccccgtctctactaaaaatcaaaaattagccaagcgtggtggcacatgcctgtaatccctgctactcgggaggctgaggcaggagwattgcttgaacccgggaagtggaggttgcggtgaaccgagatcacaccactgcactccagcctggacgacagagcgagaatctgtctcaaaaaaaaaaaa

SEQ ID NO: 281301 - DNA, 201 bp, Homo sapiens
ttatgatcatcacatcattacatagctctgcatagttttacgtcaaaataacctttgtattattttggaggagtaagagtcaaggagttgctggacacttyacattttgtcattataaaaaatatttcatagtccaaaattttttagttctttgggggagagaaactcattaaaatttttttttctgattttcttctgagc

SEQ ID NO: 281302 - DNA, 201 bp, Homo sapiens
tgaatcccagagatgtgtttggcaggatcagtaggaagagtttaattaaggtttatttatttatttttttttgagatggagtctcgctctgtcacccaggytggagtgcagtggcgcgatctcggctcactgcaagctccgcttcccgggttcaggccattctcctgcctcagcctcccgagtagctgggactacaggcgc

SEQ ID NO: 281303 - DNA, 201 bp, Homo sapiens
aaaaaaaaaaaaaaaaggctgataaatagttgttggatcccttgtaaagaatcatttatctacaatggacagactatctaggcttgtcctgtgtttttttktttttttttttcttcaaacagagtcttgctctgttgcccaggctggagtgcagtgacacaatctcagctcactgcaacctctgtctcctgggttcaagtg

SEQ ID NO: 281304 - DNA, 201 bp, Homo sapiens
agtttaattaaggtttatttatttatttttttttgagatggagtctcgctctgtcacccaggctggagtgcagtggcgcgatctcggctcactgcaagctycgcttcccgggttcaggccattctcctgcctcagcctcccgagtagctgggactacaggcgcctgtaaccacgcctggctaattttttgtatttttagta

SEQ ID NO: 281305 - DNA, 201 bp, Homo sapiens
gacagaaagcctgctgtgaggcaagctgaaggcaaacaaagccttggtatcctatcctgttgttgccgccatggtgctaagtgaagagggctccacctttrtgtggtggagggagtattgtttgggctggctcctgcttgttgggctaaagggttttccttctcttatttccaggaggtactccaagaagtctgtctgcca

SEQ ID NO: 281306 - DNA, 201 bp, Homo sapiens
aaaaaaaaaaaaaaaggctgataaatagttgttggatcccttgtaaagaatcatttatctacaatggacagactatctaggcttgtcctgtgttttttttkttttttttttcttcaaacagagtcttgctctgttgcccaggctggagtgcagtgacacaatctcagctcactgcaacctctgtctcctgggttcaagtga

SEQ ID NO: 281307 - DNA, 201 bp, Homo sapiens
actcttgttgcccaggctggagtgcaatggtgtgatctctgctcaccacaacctccgcctcccaggttcaagcgattctcctgtctcagcctctggagtarctgggattacaggcatgcaccaccacacctggctaattttgtatttttggtagagacagggtttctccatgttggtcaggctggtcttgaactcccaacc

SEQ ID NO: 281308 - DNA, 201 bp, Homo sapiens
cttgctctaatgttgcctgccttctcattgccaatttccaacatatgactgcctaaaaaaactgggtaccagaaactgtggttcccatgattacttggatrtggtttcttaaggatcgctttaggtcaagaactcattcttcttattgggctgacaactttttttgtttttgtttttgtttgtttttgttgttgtggtttt

SEQ ID NO: 281309 - DNA, 201 bp, Homo sapiens
ttttttttttttcttcaaacagagtcttgctctgttgcccaggctggagtgcagtgacacaatctcagctcactgcaacctctgtctcctgggttcaagtkattctcctgcctcagcctcccgagtagctgggattacaggcacctgccaccacgcccagctaatttttgtatttttagtggagacggggtttcactgtat

SEQ ID NO: 281310 - DNA, 201 bp, Homo sapiens
caggctggagtgcaatggtgtgatctctgctcaccacaacctccgcctcccaggttcaagcgattctcctgtctcagcctctggagtagctgggattacasgcatgcaccaccacacctggctaattttgtatttttggtagagacagggtttctccatgttggtcaggctggtcttgaactcccaacctcaggtgatcca

SEQ ID NO: 281311 - DNA, 201 bp, Homo sapiens
agtcttgctctgttgcccaggctggagtgcagtgacacaatctcagctcactgcaacctctgtctcctgggttcaagtgattctcctgcctcagcctcccragtagctgggattacaggcacctgccaccacgcccagctaatttttgtatttttagtggagacggggtttcactgtattggccaggctggtctcgaactc

SEQ ID NO: 281312 - DNA, 201 bp, Homo sapiens
gctctgttgcccaggctggagtgcagtgacacaatctcagctcactgcaacctctgtctcctgggttcaagtgattctcctgcctcagcctcccgagtagvtgggattacaggcacctgccaccacgcccagctaatttttgtatttttagtggagacggggtttcactgtattggccaggctggtctcgaactcctgacc

SEQ ID NO: 281313 - DNA, 201 bp, Homo sapiens
gcccaggctggagtgcagtgacacaatctcagctcactgcaacctctgtctcctgggttcaagtgattctcctgcctcagcctcccgagtagctgggattrcaggcacctgccaccacgcccagctaatttttgtatttttagtggagacggggtttcactgtattggccaggctggtctcgaactcctgacctcgtgatc

SEQ ID NO: 281314 - DNA, 201 bp, Homo sapiens
acctgccaccacgcccagctaatttttgtatttttagtggagacggggtttcactgtattggccaggctggtctcgaactcctgacctcgtgatccgcccrcctcggcctcccaaagtgctgggattacaagtgtgagccaccgcacctggctgtcctgtgttttctccatgctggaaaaatcagtttgaccctcaggaaa

SEQ ID NO: 281315 - DNA, 201 bp, Homo sapiens
cagttttggaccattaagtatgaagtggaatatctgcgtgaaggtgtcttctgggcagttggacatatgactgccacgcccaggggacttgggctcagatrgagagctgagaatcatctgcatatgtgtagaagttgaaaccatgagagtaggtgaagcctcccagggagaactgatctggtgagaagaggaggaaggcaa

SEQ ID NO: 281316 - DNA, 201 bp, Homo sapiens
aagagcagaagaaaagaaactttttaacggcactctctttgacagcctagcaagcatttagaatttcaggagtagagtaggaaggctgtaaggaagagccygtgttagaatttttgcacgacagacttggagatacaggtccagaagctttttccttttgatggacaacttagatctcaattctagtaccatgttctttgg

SEQ ID NO: 281317 - DNA, 201 bp, Homo sapiens
cactgcccccagccatcacttctttatacttgcctagacatgtcctacaagagcagaagaaaagaaactttttaacggcactctctttgacagcctagcargcatttagaatttcaggagtagagtaggaaggctgtaaggaagagcccgtgttagaatttttgcacgacagacttggagatacaggtccagaagcttttt

SEQ ID NO: 281318 - DNA, 201 bp, Homo sapiens
gccatcctgtaaaagaatttgtcctatccttatcttgtgtgtgtgtgtgtgagacagagtctcactctgtcgcacaagctggagtgcagtggggcgatctyggctcactgcaacctccgcctcccgggttcaagctattctcgtacctcagcttcccaagtagctggaattataggcacgcaccaccacacttggctaatt

SEQ ID NO: 281319 - DNA, 201 bp, Homo sapiens
tgtgtgtgtgagacagagtctcactctgtcgcacaagctggagtgcagtggggcgatctcggctcactgcaacctccgcctcccgggttcaagctattctygtacctcagcttcccaagtagctggaattataggcacgcaccaccacacttggctaatttttgtatttttagcagagttggggttttgccattggccagg

SEQ ID NO: 281320 - DNA, 201 bp, Homo sapiens
agatacgttagtgtggggggacactctgaatttcccctaggccgtcacatgtgggctggacttcccaggaacacatttcttggtaattcacaactcccttycggagaagaaacttggcctgtgggtaacagaccccaacccaatagctcttgggcctctcctggaaagacacagctttctctcagccaggctgcatgaatt

SEQ ID NO: 281321 - DNA, 201 bp, Homo sapiens
cactctgtcgcacaagctggagtgcagtggggcgatctcggctcactgcaacctccgcctcccgggttcaagctattctcgtacctcagcttcccaagtasctggaattataggcacgcaccaccacacttggctaatttttgtatttttagcagagttggggttttgccattggccaggctggtctcgaactcctggcct

SEQ ID NO: 281322 - DNA, 201 bp, Homo sapiens
tgggaggctgaggcagccggattgcctgagctcaggagttgcaaccagtctgggcaacacagtgaaaccctgtctcgactgaaatacatgccggcttggcrgcgtgtgcctgtagtcccagctactagggaggttgaggcaggagaatttcttgagtccgggagacagaggttgcagtgagccgagactgagccactgcac

SEQ ID NO: 281323 - DNA, 201 bp, Homo sapiens
taccagtcactgcctgatccaggcatgagctgcctgtgtcccccgacatcatcctcctggcaccatcctctgctcttcctggccttcttcactgggagccwtcgggatcatccctccagatcaagttcttccagccccacctccctcccaccctgtgcacccagggaaattcatctcttctgggtcccaaccttggcctcg

SEQ ID NO: 281324 - DNA, 201 bp, Homo sapiens
ggattgcctgagctcaggagttgcaaccagtctgggcaacacagtgaaaccctgtctcgactgaaatacatgccggcttggcggcgtgtgcctgtagtccyagctactagggaggttgaggcaggagaatttcttgagtccgggagacagaggttgcagtgagccgagactgagccactgcactgcagcctgggcgacaga

SEQ ID NO: 281325 - DNA, 201 bp, Homo sapiens
ccagtctgggcaacacagtgaaaccctgtctcgactgaaatacatgccggcttggcggcgtgtgcctgtagtcccagctactagggaggttgaggcaggakaatttcttgagtccgggagacagaggttgcagtgagccgagactgagccactgcactgcagcctgggcgacagagcaagactccatcttaaaaaaaaaaa

SEQ ID NO: 281326 - DNA, 201 bp, Homo sapiens
gttctagtaagcacgttcatttcattacctacaaacgcatagaaaaatccaacataatcccacactgatgagaagaagagagggttgtttgtcaggtgggrtagtttcacttgacttgaaggtctcaccccgcccctcgtctttaccatagcatacgcttctagatgcttctgctgcattgtcaaccagactctaccagaa

SEQ ID NO: 281327 - DNA, 201 bp, Homo sapiens
tgcgtgcatgtctgtttataatagaactacttatactcctttgggtatgtgtccagtaatacgattgctgggtcaaatggtatttctgcctctaggtcttkgaggagtcaccacactgtcttccacaaccaacagtgtaaaaacattcctttttctccacaacttcactagcatctgttattttttgactttttagtaatt

SEQ ID NO: 281328 - DNA, 201 bp, Homo sapiens
aaccatcagatcttgtgagacttatttactaccacgagaacagtatgagagaaactgccccccaagattcaattgtctccctctgggtccctcccacaacmcatgggaattatgggagtataattcaagatgagatttgggtgaggacacagccaaaccatatcatcgttcaactagaaaatatatatatatacacacaca

SEQ ID NO: 281329 - DNA, 201 bp, Homo sapiens
gtctctctggaggccccctgcttcaccctcttctgatgccctgaggatggaggggtaggagcaaagttcttccctccctttttccactccaaccctcctgyccaccctcgagaggtttctttgtttgcttttatttgtttttgagacaagatcttgctctgtcactcaggctggaatgcggtggcccaatcctggctcact

SEQ ID NO: 281330 - DNA, 201 bp, Homo sapiens
atgcatggatacacagagaagccctaaattcatgcaacaaacatttattaattgccaactgtatacctactaattggctggcaactggtggcgccaccacraagcacagtgggtaccactgttctcccaaggcctgtgaccaaacttaagactcggagccaccaggaagtgcagagatgcagtttactcaacagagcatgc

SEQ ID NO: 281331 - DNA, 201 bp, Homo sapiens
ttatggggaggctccttagaaaaaaaaatcattttaggcactttttactatacatgtactgataattattttaaagagctttttttgtaggaagtatgttmttttattcatctaaatttggtgcactaaaaatacaggtgatgtgatgtgaactgttggccatttaagcaggttcattatctcacatctttggcccttcct

SEQ ID NO: 281332 - DNA, 201 bp, Homo sapiens
gtgatctccagaaggaagtgagtgaccagccaggcatgggctctcctgagtgaggcaggctggtgagtcccactgtgtgctgggaggccatgcttcagcartatgtccatctgacatgaacagttcacttggatatcagtggaagccataatgtcttagcttgtcgacctctgacctgctatcttttaggatgatgtttta

SEQ ID NO: 281333 - DNA, 201 bp, Homo sapiens
ggtgagaaaccctatttgtgggtagcttgccctggtccacactgcaccaggacctggacccaggcatagcactgcgccaccctgccacccgtggtccagcrgggccctgaggcaggtcactccacttcaaaggaaggagtcattcatggtggatgtccaggcgtggcctgtgctactaagagtgagggctttttgcaaaag

SEQ ID NO: 281334 - DNA, 201 bp, Homo sapiens
tttatttggagatttgtgtgattaaacaaaaatgtattacagatctgaatggagagtcaaattaagtgtgtgggtctagtggagagattatctatccaaaygcatttttgtaattccgtactctggtccaaaagttaatgtaaaaagccaatcgaattgattaatactaaaaatggaacaactgcaaactagaactaattt

SEQ ID NO: 281335 - DNA, 201 bp, Homo sapiens
ccaaacgcatttttgtaattccgtactctggtccaaaagttaatgtaaaaagccaatcgaattgattaatactaaaaatggaacaactgcaaactagaacwaatttgagaaccctcctactttcatcctcagagtttgtctaataaggacttttggacgactgaatacatagcatgtaagaaagtgttagaaatggctaca

SEQ ID NO: 281336 - DNA, 201 bp, Homo sapiens
tttttatggctgcatagtattccatggtgtatatgtgccacatttttttaatccagcctatcattgatggacatttgggttggttccaagtctttgctgtygtgaatagtgccgcaataaacatacgtgtgcatgtgtctttatagcagcatgatttataatcctttgggtatatacccagtaatgggatggcttggtcaa

SEQ ID NO: 281337 - DNA, 201 bp, Homo sapiens
gctgccttttgttcagctgtgccctgcccccagaggtggagtctacagaggcaggcaggcctccttgagctgcggtgggctccacccagtttgagcttccyggccactttgtttacctactcaagcctcagcaatggcaggcgcccctcccccagcctggctgccacctcgcagttcgatctcatactgctgtgctagcag

SEQ ID NO: 281338 - DNA, 201 bp, Homo sapiens
aacatagtacagcaggttataaaatcttattttgaagtggctatgactaaagacagtggggcataaaccagttacctgtgggtcacatgtgacttgccgaygtgttttgtttcatatatgggttttgttgttgtttgtagtaccaacatttaagaattgagagatctcacacaaagatccaaattcaaatttctagcttct

SEQ ID NO: 281339 - DNA, 201 bp, Homo sapiens
gcctttcagggaatctttcagctgctccatcaccatccttttctttctttctttctttctttctttctttctttctttctttctttctttctttctttctttctttctttttctttctttctttctttctttccttctttccttctttccttctttctttctttctttctttttctttctcttgtttcttttcattctttc

SEQ ID NO: 281340 - DNA, 201 bp, Homo sapiens
ggcctttcagggaatctttcagctgctccatcaccatccttttctttctttctttctttctttctttctttctttctttctttctttctttctttctttctttctttctttttctttctttctttctttctttccttctttccttctttccttctttctttctttctttctttttctttctcttgtttcttttcattcttt

SEQ ID NO: 281341 - DNA, 201 bp, Homo sapiens
tggcctttcagggaatctttcagctgctccatcaccatccttttctttctttctttctttctttctttctttctttctttctttctttctttctttctttctttctttctttttctttctttctttctttctttccttctttccttctttccttctttctttctttctttctttttctttctcttgtttcttttcattctt

SEQ ID NO: 281342 - DNA, 201 bp, Homo sapiens
cttggagaagatgggcttgaataatgagaagcacgcaggatgtcatttgagagttgtggatggaaagagccttctgttcaggaggattgcaatgaggggamatagaattctgagatcggttctgtgtatttcctcccctagaatggaggaaaggagactgggagcagaagagatgatggtaattagaaaacagatgtgtgt

SEQ ID NO: 281343 - DNA, 201 bp, Homo sapiens
tattatatataaattatatgtaatatataatgtatatattgtatgttatatattatatataaaatatatacattatattgtatacattatattatattatwttatatatacattatatattatatatataatgtatatataatatataatgtatatattatatagatacaccactaactctggctttagttttaaaaacta

SEQ ID NO: 281344 - DNA, 201 bp, Homo sapiens
tgtatatattgtacgttatatattatatataaattatatgtaatatataatgtatatattgtatgttatatattatatataaaatatatacattatattgyatacattatattatattatattatatatacattatatattatatatataatgtatatataatatataatgtatatattatatagatacaccactaactct

SEQ ID NO: 281345 - DNA, 201 bp, Homo sapiens
tcataacacacacacacacacctgtggagaagacagtatgtcataatgcagtcaaatgctctaccactgagttatccccccatctttttttttttttttttgagacagagtttcacttttgttgtccaggctggaatgcaatggcacgatctcggctcactgcaacctctgcctcctgggttcaggccattctcctgcctc

SEQ ID NO: 281346 - DNA, 201 bp, Homo sapiens
accacacctggcctaggtatatttagatacacaagtacatactattctgttacagttgcctgcaatatattctgtacagtcacatgctgtccaggtctgtmgcctaggagcaataggctataccatctagcctaggtgtagagtaggctgtaccatctaggtttatgcaggttcacgctttggtgtttgtacaatgatgaa

SEQ ID NO: 281347 - DNA, 201 bp, Homo sapiens
agaaaggtttatgttaatcattttctccttttggctttatcttgttctatggtgtgtgtgtgtgtgtgtgtgtgtgtgtgtgtgtgtgtgtgtgtgtgtggtgtggtgtggtgtgtggtgtgtgtgtgtctaatacacagtctgagataaagggcaaactaaatcctggtgacacataagatgaacactctccataaaaga

SEQ ID NO: 281348 - DNA, 201 bp, Homo sapiens
tgaagaagaaaggtttatgttaatcattttctccttttggctttatcttgttctatggtgtgtgtgtgtgtgtgtgtgtgtgtgtgtgtgtgtgtgtgtgtgtgtggtgtggtgtggtgtgtggtgtgtgtgtgtctaatacacagtctgagataaagggcaaactaaatcctggtgacacataagatgaacactctccat

SEQ ID NO: 281349 - DNA, 201 bp, Homo sapiens
ctgcatacacagctgctatctaatagctgacagatcactggatccagaggcagatctgctggagaccagcctgggaacctccgggcctcccttgtcagccmtctgacgggcacttctgtcatcttaacatggggttgacagttccttgcaggtccacacgagagcaccaaaggacccagggcagcaggcaacatctgctag

SEQ ID NO: 281350 - DNA, 201 bp, Homo sapiens
actccgttctttgtgcaaggagaggtcttatcctaaattagactcctttgaagaagaaaggtttatgttaatcattttctccttttggctttatcttgttstatggtgtgtgtgtgtgtgtgtgtgtgtgtgtgtgtgtgtgtgtgtgtgtgtggtgtggtgtggtgtgtggtgtgtgtgtgtctaatacacagtctgaga

SEQ ID NO: 281351 - DNA, 201 bp, Homo sapiens
aagctggaacttcttaagaggcctttgacattacttttttttgagatggagtcttactctgtcgcccaggctggagtgcagcggtgcaatctcagctcacygtaacctcagttcaagcgattctcctgcctcagcctcccgagtagctggaattacaggcatgcaccaccacacctggctaatttttctatttttagtgga

SEQ ID NO: 281352 - DNA, 201 bp, Homo sapiens
tgcccgttcctgcgtctccactcctttgtaggttgtatctgagtacatgcacatctctccctcaggatctgcgcaacagttaaaggtgcacgcgttagtgraacctcgcaacacatcagtgaccagggttacagttcgctgactactgaatctggactggaacctttttcaattcagtgcttttctgactccaccactctg

SEQ ID NO: 281353 - DNA, 201 bp, Homo sapiens
caacagttaaaggtgcacgcgttagtgaaacctcgcaacacatcagtgaccagggttacagttcgctgactactgaatctggactggaacctttttcaatycagtgcttttctgactccaccactctgactccctcaagtgcagtggttctcaacagaggtgactttgttctccaggtgacatttggcattgcctggggac

SEQ ID NO: 281354 - DNA, 201 bp, Homo sapiens
aacagatgttcacgggaagatgaggttaaacaggacttccacatccacgtgggtttctccacttaattttgatcataaaagccatagagaagttgaaaggsctcttagaagagtggacagaagccgccaagcacaagtgcagtagggctaccttgtgtatgcaaaaggaagacaagtcccacttggaaatatgccttcagg

SEQ ID NO: 281355 - DNA, 201 bp, Homo sapiens
gtgcagtggttctcaacagaggtgactttgttctccaggtgacatttggcattgcctggggacttgagattattactggcatctagtgggtagaggccagygttgttgctaaatgtcctgcaatgcacaggacagttcccgcaggaacaattatctggccccaaatgtcaggagtgctgaggttgagaaactctgctgaat

SEQ ID NO: 281356 - DNA, 201 bp, Homo sapiens
aaatgtcctgcaatgcacaggacagttcccgcaggaacaattatctggccccaaatgtcaggagtgctgaggttgagaaactctgctgaatgtatggatgrgcattggtcaccaagatagaggagaagaattcaatattgctcttccattatattttcctaggatgtggactctatgttttagacaatcttccgtattaaa

SEQ ID NO: 281357 - DNA, 201 bp, Homo sapiens
aggatgctgtatctaagcttgcacacttactttaggaaactcaaatggaaaccccactctcaaatagtctaatctaattacctttggttctggaaagcagyatccaagaggaaagagattgtaaaatcctcagaggaagcggggaaagtgggtctgagaagaggggacgagagcctaggagtcagcaggtagctcaaagga

SEQ ID NO: 281358 - DNA, 201 bp, Homo sapiens
tggctgcttctgctcaacattatatttgtgaatcattcatattgtttcttttggctgcagtttgttcaatttcactgctttacagagttccattgtttgcrtataccaccttccattttactgttgattgatggacttttgggttgtctctggtttggcactattctgaatagtgctgctgtgaacattgttttggttaac

SEQ ID NO: 281359 - DNA, 201 bp, Homo sapiens
aatcattcatattgtttcttttggctgcagtttgttcaatttcactgctttacagagttccattgtttgcatataccaccttccattttactgttgattgrtggacttttgggttgtctctggtttggcactattctgaatagtgctgctgtgaacattgttttggttaacatcagcgcatatttctgttggggagtacct

SEQ ID NO: 281360 - DNA, 201 bp, Homo sapiens
gagttccattgtttgcatataccaccttccattttactgttgattgatggacttttgggttgtctctggtttggcactattctgaatagtgctgctgtgawcattgttttggttaacatcagcgcatatttctgttggggagtacctaggaatggaaatactgatttgtatggtatgtttctgttcagctttcatagacac

SEQ ID NO: 281361 - DNA, 201 bp, Homo sapiens
ctgccaaacagttttctggagtggttgtaccaacacacacttacacttctatattttccagtgctgatcacaagatttctccaagatactttcaactttcmtgaattatttgatgctgtcatattgggaataatttttatctctgttagttgaatatcaaattgatgttctagaaaactcttgagtcattacctacatttt

SEQ ID NO: 281362 - DNA, 201 bp, Homo sapiens
ccaatttgaactaaaaaaattgttactagctaaacacccacacctaaacacctacacccacacatgtatatcagatacagtagcttctaccgactcataaatttcatcaaccatatttgggagttgtgtccagtcttaatctgccttgccagtatagtctctggaaaaacatcctacagctgtttggtttatttgtagatt

SEQ ID NO: 281363 - DNA, 201 bp, Homo sapiens
aggcgggcggatcatgaggtcaggagatggagactatcgtggctaacacggtgaaaccccatctctactaaaaatacaaaaaattagccgggtgtggtggygggcacctgtagtcccagctactcgggaggctgaggcaggagaatggcgtgaacccgggaggtggagcttccagtgagccgagatcacgccactgcagtc

SEQ ID NO: 281364 - DNA, 201 bp, Homo sapiens
ggcatttccacttttattttcccaataattttaaagccagtttgtttattaaggatttacttaactcatatgaaaaagaaacgaaataattaaagtaaagttggcattatgtctcacttatccagaaattctttatctgccatcctgccatcagacacatagccataaactcagaagtagtgtaaaggaccagaaagccac

SEQ ID NO: 281365 - DNA, 201 bp, Homo sapiens
aggcatttccacttttattttcccaataattttaaagccagtttgtttattaaggatttacttaactcatatgaaaaagaaacgaaataattaaagtaaagttggcattatgtctcacttatccagaaattctttatctgccatcctgccatcagacacatagccataaactcagaagtagtgtaaaggaccagaaagcca

SEQ ID NO: 281366 - DNA, 201 bp, Homo sapiens
aaggcatttccacttttattttcccaataattttaaagccagtttgtttattaaggatttacttaactcatatgaaaaagaaacgaaataattaaagtaaagttggcattatgtctcacttatccagaaattctttatctgccatcctgccatcagacacatagccataaactcagaagtagtgtaaaggaccagaaagcc

SEQ ID NO: 281367 - DNA, 201 bp, Homo sapiens
aaaggcatttccacttttattttcccaataattttaaagccagtttgtttattaaggatttacttaactcatatgaaaaagaaacgaaataattaaagtaaagttggcattatgtctcacttatccagaaattctttatctgccatcctgccatcagacacatagccataaactcagaagtagtgtaaaggaccagaaagc

SEQ ID NO: 281368 - DNA, 201 bp, Homo sapiens
aaaaggcatttccacttttattttcccaataattttaaagccagtttgtttattaaggatttacttaactcatatgaaaaagaaacgaaataattaaagtaaagttggcattatgtctcacttatccagaaattctttatctgccatcctgccatcagacacatagccataaactcagaagtagtgtaaaggaccagaaag

SEQ ID NO: 281369 - DNA, 201 bp, Homo sapiens
agtagagacggggtttcaccatgttggccagactagtcttgaactcctgacctcaggtgatccacctgcctcggcctcccaaaatgctgggattacaggcrtgagccaccgcgcccgacctccaggcaaacatttaagacagggggtttttttttggctgtaagaaagagatgccaatctgtccctactcctaaggagcaa

SEQ ID NO: 281370 - DNA, 201 bp, Homo sapiens
ccgctaccacacccagctaattttttgtattttttttttttttttttagtagagacggggtttcaccatggtctcgatctcctgacctcatgatccgcccrtctcggcctcccaaagtgctgggattacaggcgtgagccaccgcgcctggccttttttttgtatttttagtagagacggggtttcaccatgttggccaga

SEQ ID NO: 281371 - DNA, 201 bp, Homo sapiens
ctcagaaacaaggaagaagtacaatgggcagaactagggcacaggaatagggtcatgctagctgatcacgtgccttttgtgtgtgtgagagagacagagtrtcactctgttgcccaggccggaatgcagtggtgcgatcacagctcactgcagccttgacctccagggtcaagtgatcctcccatttcaacctcctgagta

SEQ ID NO: 281372 - DNA, 201 bp, Homo sapiens
tgggttcacaccattctcctgcctcagcctcctgagtagctgggactacaggcgcccgctaccacacccagctaattttttgtattttttttttttttttttagtagagacggggtttcaccatggtctcgatctcctgacctcatgatccgcccgtctcggcctcccaaagtgctgggattacaggcgtgagccaccgcg

SEQ ID NO: 281373 - DNA, 201 bp, Homo sapiens
ttactgaccctgctcccatcatcacagctcagtccctgactttctgttctgcctctctgtgattacatcgggcccacctagataatccaggataatctccygaagtctcttttgccatgcaaggtaatacattcacaggttctgggagttaggccataaacatcattgagggccattattctacctaccaataaataaggg

SEQ ID NO: 281374 - DNA, 201 bp, Homo sapiens
ataattgtgctctttcactggtttttattttaatgcctgacttgaggtcaagaattatgtgtagaaagagcacagacagaacaaaatcataagttaataaygccgttatattactggaaaaattaagcatgcagagctagttatagcagtataatattttgggaaaatatttaaattatcgtatgctccttaggttttaaa

SEQ ID NO: 281375 - DNA, 201 bp, Homo sapiens
aataagaggaaaataacatgattggaagcgtggaggtgagaaagcatagaagcactcagagtgaggagagctggggcttgggccagcccacgtcagcccckgcctgcggacccagcctcttggagccaggctcactcaccctgcctttaagacggccctaccagaggcaggagaaggatccgcagcctcagctttctgtgg

SEQ ID NO: 281376 - DNA, 201 bp, Homo sapiens
acgagtgttctccttatttttaccctcggtttgtttggaatggttgggggttcacttttatatattcagaaacacttgttttaatactttgttctttgtaktcctcttctttctaatagttactcatagcttcaattctcaaaacacaaaacaattttaccaacccatcattatgtatttctctacttgctttggtctgac

SEQ ID NO: 281377 - DNA, 201 bp, Homo sapiens
atgctatcctcaggaaaatatttatagtttagttaatcttgtttaggcctaaagtaactgtggtttaatcactgaacaaacaagataggacagcgtggtgkataattgaaccaaaattcccattgagatgcatgggggcagactgctcccatgtggtttcacagcccaagaaactgaagggtagttttgaatcctcatcct

SEQ ID NO: 281378 - DNA, 201 bp, Homo sapiens
agtagagacggggtttcaccatcttggctgggctggtctcctgacctcaggtgatccaccggccacttccaaagtgctaggattataggcatgagccaccrcgcccaaccttctccgataattcttaatagtttagaaagcactgtcagctgggtgttgtggcatgcacctgtagccccagctactcaggaggctgaggtg

SEQ ID NO: 281379 - DNA, 201 bp, Homo sapiens
gataattcttaatagtttagaaagcactgtcagctgggtgttgtggcatgcacctgtagccccagctactcaggaggctgaggtgggaggagcacttgaayccaggagttcgaggctgcagtcagctatgatcacaccactgcaccctagcctgggcagcagaatgaaaccctgtctctaaaaatgaacgaacaaaaacca

SEQ ID NO: 281380 - DNA, 201 bp, Homo sapiens
ttcccagaggaggtgatatttgcattgagttttgaaagacaacgaggagttgttcataggaaggagggaaggaaggcagttcagacaagaagaacaatatrtgagaaggccagtgtgatgattttgagaacaccattcaacatgtctagagcctaggggatgaagagatgggtgctaggagggtaggagtggtggcaaatg

SEQ ID NO: 281381 - DNA, 201 bp, Homo sapiens
gcaagagattgaggtggaggctgggggcagatatacaagtaatccagcccagagaagaaaagagcctgcaccgagcaggcacatgatggagggcagaacasgacattagagaatgagaatctcctggacttggtagattgaatgtggactcagggtgagtctaaccacacagctcagctttgagcttccctcagagccaag

SEQ ID NO: 281382 - DNA, 201 bp, Homo sapiens
cctggaattatttattgccttcatttatttgcctagatttatttgtacctatcaaaaatttcgtatgtgccaaaattttcgtatgtgccattagatctgcygcattcagtattacttttggtattatttaaatattaattaccagataagtatgtcagttccatcccaacctgccctcccttcccgcagaggccctctcct

SEQ ID NO: 281383 - DNA, 201 bp, Homo sapiens
tcacaaggtgaagtgccacagcaggccatctgcaagctgaggaacagggaagccaatccaagtcccaaaacctcagaagtaaggaagcctacagtacagcyttcagtctgtggccaaaggcctgagagcccctggaaaatcactgatgtaacaagagtccaaaagctgaagaacttgggtctgatgttcgagggcaggaag

SEQ ID NO: 281384 - DNA, 201 bp, Homo sapiens
caaaagtgagctaatgttttgaagtgtcagttatttacttcggttctgtctggtagaaaatacacaagttgtctcatttaatcatgaaggtaactctcttmggcattttgcaggtaagaaaattgaggctctaagaggtgaagtaatttgcagaagccactggaaagtggctgattccagattccagacccagctctgtct

SEQ ID NO: 281385 - DNA, 201 bp, Homo sapiens
ctcatgaatcccatcaagatgctatgaataaagactgtgaatatcaataagtttgaaaacattccatgctcatgttcagggtcatatttttccctgtcttmtatgttcctctttgtggctataaacccaaacttatgtgttgtgtgttttttctatgacaattatggatatgacttatttactatatgctctatgaggtat

SEQ ID NO: 281386 - DNA, 201 bp, Homo sapiens
gaggcaggctggtgagtcccactgtgtgctgggaggccatgcttcagcaatatgtccatctgacatgaacagttcacttggatatcagtggaagccataakgtcttagcttgtcgacctctgacctgctatcttttaggatgatgttttagttatctgtagcaatataacaatatgagaaggcacttagcagcttaaagca

SEQ ID NO: 281387 - DNA, 201 bp, Homo sapiens
gaaatccagccactcacagatactgctttatttactaaaaagggaccattagcattttaaataccttttcatgcaaatctctatgcatatatacatataaygtatatctctatgcatacagatacaactgtttgagaatttaactatgctaagcagactgttggcaaacttttctgctcagccaggcgacctttatggtca

SEQ ID NO: 281388 - DNA, 201 bp, Homo sapiens
cacttccctaccccctgcatacccaaaatactggggtgatattttagatttccagtcctccagatacataaggacaaaaatgtgcaaccttttgcatcatrtaacaaagttctttctttcttccctaacagatatcacacatgatgaagtctgatagctagtgtcgggtagttgacagaaaaacaaacaaaaaggtttttt

SEQ ID NO: 281389 - DNA, 201 bp, Homo sapiens
ggagtgcagtggtgcaatctcggctcactgcaagctctgccttctgggttcacaccattctcctgcctcagcctcctgagtagctgggactacaggcgccygctaccacacccagctaattttttgtattttttttttttttttttagtagagacggggtttcaccatggtctcgatctcctgacctcatgatccgcccgt

SEQ ID NO: 281390 - DNA, 201 bp, Homo sapiens
tcctaatgctatccctccccccttgccccaccccacaacaggcccgggcgtgtgatgttccccaccctgtgtccatgtgttctcattgttcagttcccacmtatgagtgagaacatgtggtgtttggttttctgtccttgcaacagtttgctcagaatgatcgtttccagcttcatccatgtctctacaaaggacgtgaac

SEQ ID NO: 281391 - DNA, 201 bp, Homo sapiens
aaaaaggggaaaatcctttattctaccatcttagatccaatcatttaaatttttttaaatttattttcttcccatctatctttaaaatataagtttttttwaaaaaaaaactagggttgtagtcatattatatatatataattttatcccgactttctcagataagcatttttcctatagttacatattctttgtaaacat

SEQ ID NO: 281392 - DNA, 201 bp, Homo sapiens
ggctggagtgcagtggtgcaatctcggctcactgcaagctctgccttctgggttcacaccattctcctgcctcagcctcctgagtagctgggactacaggygcccgctaccacacccagctaattttttgtattttttttttttttttttagtagagacggggtttcaccatggtctcgatctcctgacctcatgatccgc

SEQ ID NO: 281393 - DNA, 201 bp, Homo sapiens
gacatagaatccagctaaatgggattcttaacctctgagggacacaactgagaggcagagaggcatagaacaagagacagttgctttcattataccttttktcttttttttttttgacatgtacatattactttgacaaacatttttgaatttttttcaatagcacatatacatcaaataagattttaagaccaaaataga

SEQ ID NO: 281394 - DNA, 201 bp, Homo sapiens
aaatcatggctaacttcatgcattcaactactgttttttaaacattccaaaaagtgatcaagacgtcattccaggcaagctttttttttttttttttttttgagatggagtctcactctgttgcccaggctggagtgcagtggtgtggtcttggctcactgtaacctccacctcccaggttcaagcgattctcctgcctca

SEQ ID NO: 281395 - DNA, 201 bp, Homo sapiens
ctgaatgattttaggaacttcaagttccagtagagagaatgaatgaatgacttctcttaactggacttctatcacaaaatcatggctaacttcatgcattyaactactgttttttaaacattccaaaaagtgatcaagacgtcattccaggcaagctttttttttttttttttttttgagatggagtctcactctgttgcc

SEQ ID NO: 281396 - DNA, 201 bp, Homo sapiens
gaagcactcagagtgaggagagctggggcttgggccagcccacgtcagcccctgcctgcggacccagcctcttggagccaggctcactcaccctgcctttmagacggccctaccagaggcaggagaaggatccgcagcctcagctttctgtggcgcaacctggcactgagtcactcataccaatctcagcgccagtggcca

SEQ ID NO: 281397 - DNA, 201 bp, Homo sapiens
gaccaccacctgcagtccactcacagtgggcgtttcttgcactcatcctataccatattttatgaattttattttaagttccaggatacctgtgcaggacrtgcagttttgttacatagggaaacatgtgccatggtggtttgctgcacccatcaacccatcacctaggtattaagcccaacatgcattagctatttatct

SEQ ID NO: 281398 - DNA, 201 bp, Homo sapiens
tcctgggggcagtttcccccatactgttctcgtggtagtgaataagtctcgtgagatctgatggtttgataaggggaaacccctttcgcttggctctcatkctctcatctgccaccatgtaagatgtgcctttcaccttccgccctgattgtgaggcctccccagccacgtggaactgtgagtctattaaacctctttttc

SEQ ID NO: 281399 - DNA, 201 bp, Homo sapiens
tgaagtgtggcatgaggactctactggcttcagcttttctggtggcagtagaattgcccatctagtgcctactgatctgagtggacttgacttcttggccrtgtctctgtttggagttaaagaggaacgattttccttgtgcattattttgaaaatcacctttgaagtcactagttagagttgttttcaaatgcaaatgtc

SEQ ID NO: 281400 - DNA, 201 bp, Homo sapiens
ttgacctccagggtcaagtgatcctcccatttcaacctcctgagtagctgggactacagtaggcatgaaccactatacctccagctgatttttttttttttaacttttttgtagagacaactttttgttgcccaggctggtgatcagatgtcttgagtctcagcatgctggcctagagcaatgattctcagatctagaacc

SEQ ID NO: 281401 - DNA, 201 bp, Homo sapiens
ccagggttttgaaaattacattaatttatgcccaggtataacccccccatcataaatcctgaaaaatgtgcaggaagactgtgacaggccattctaagagygtaacaagggctacatctttcagcaccagactgatgtttatgtatgtgactacttggaagatgttttacttaatgtaccatgttcttaaattggctctat

SEQ ID NO: 281402 - DNA, 201 bp, Homo sapiens
tgaatgaaaaaatgaattagaaaaagggaaaatgaaggcaggaaaaaattgagcttccttacagaatgttctctaatatttttattatatgcaggtacatyttaggatatatacatttagtgaaccaacataaaccccagttcatatcctctgaagatgagaacagacactggggaacacactatactaatagtcatttat

SEQ ID NO: 281403 - DNA, 201 bp, Homo sapiens
tttgaagttgtgggaaacctccaaataaaaaatgtatcagtttataattgagagtgatgacctctcttcggatttccaacttgaaatgcttcattcagcaktcttcagagagtcaccacttacaagaaattttgctcatagaaagaagtgacaaaaaataaaaaatcattttcacaactattaacttcctattgctgctgt

SEQ ID NO: 281404 - DNA, 201 bp, Homo sapiens
gctattggcttcagatttagttatcacttatagaatcccttctgagtgccaggcattgtattttctattttcacttagcagacatttatatagtgcttatyggaagcaagacactgtgctaagtgcccgacaaataagaagtcatataatcctaacagtaaccctcagagatgagaacaattgttatcccctattttaaaa

SEQ ID NO: 281405 - DNA, 201 bp, Homo sapiens
gatgaatgaaaaaatgaattagaaaaagggaaaatgaaggcaggaaaaaattgagcttccttacagaatgttctctaatatttttattatatgcaggtacrtcttaggatatatacatttagtgaaccaacataaaccccagttcatatcctctgaagatgagaacagacactggggaacacactatactaatagtcattt

SEQ ID NO: 281406 - DNA, 201 bp, Homo sapiens
aaccctcagagatgagaacaattgttatcccctattttaaaaataaggaaaactagctgagtgcggtggctcatgcatgtggtcccagctactcggcaggytgaggcaagaagattgtttgagccaaggagtttaaggctgcagagagctatgattgtgccactgcattccagcctgcacagagtacagccctatctctta

SEQ ID NO: 281407 - DNA, 201 bp, Homo sapiens
ggatgaatgaaaaaatgaattagaaaaagggaaaatgaaggcaggaaaaaattgagcttccttacagaatgttctctaatatttttattatatgcaggtayatcttaggatatatacatttagtgaaccaacataaaccccagttcatatcctctgaagatgagaacagacactggggaacacactatactaatagtcatt

SEQ ID NO: 281408 - DNA, 201 bp, Homo sapiens
gccaccgtgcctggccaagttccctcttcttatggaacttacattcttggagggggaaggtaataagtaaacatatgaataagatcttttcagatgttcayaaatgccttgaggagattaaatcagtatcatatgatagagagcaactagggatagagtgaaggaaggtgactcattaaataggtgaccaggtcaggccac

SEQ ID NO: 281409 - DNA, 201 bp, Homo sapiens
aatggatgaatgaaaaaatgaattagaaaaagggaaaatgaaggcaggaaaaaattgagcttccttacagaatgttctctaatatttttattatatgcagstacatcttaggatatatacatttagtgaaccaacataaaccccagttcatatcctctgaagatgagaacagacactggggaacacactatactaatagtc

SEQ ID NO: 281410 - DNA, 201 bp, Homo sapiens
acgcttccaggttattttaatgcctggtccctgtttctcacttcacacagcaaagttttagagcaccttagagatctcaaataactttgtgcagaaatttcttactggattagtggagccagtaaggacttgcaatgccattggcttttatgggcccctcagcttgccaatcattagggaaattgcccaactggaaactaa

SEQ ID NO: 281411 - DNA, 201 bp, Homo sapiens
taggtaaggactcaaaactcctgaagtattatattctttgatttgtttttcaacttgcttcttaaaattaacaagcaatgccaagacagtattgtatttcyatcttttctttgtcataactgtcagaacaaatagcccatagaaaagcatgagaaaaagccttcatctcaaatcgttaataacaagaaaagaaagtatagg

SEQ ID NO: 281412 - DNA, 201 bp, Homo sapiens
cacatcatcttgcacttatagctaaaaggtgtcagacacctaacattgtcttagcaatcttctgtggttccagatactgtgtgcatcttacaggctggagytgggggacaccgatgcttaatgggaaaactaatgactttatacagatcttataaaactctgctattgtcggggggcaggcatttagtagattaagtttgt

SEQ ID NO: 281413 - DNA, 201 bp, Homo sapiens
tcagctttaggagatttgatgatcttataagacaaccttttttaaaaagtcagtgtcctcccatttagaaatagttgatgaactcctgggagaccagcaakccctactgccagaaaatttagttcctatgttgcttgctcgatcccagagccagaccatttacctagctctggccagatagaagtggctgcttgtacagaa

SEQ ID NO: 281414 - DNA, 201 bp, Homo sapiens
aaaacagacattaaacaagtattgggagagatgatcaggctgtgggaacaatacgtgcataggtcaagggtcccaagtactgcaagaatctcatatggatragaacaggggtgtgatatgaaagctggagaggtgggcaatagatcaatcatcaaagcccttaaaaagatattctaaatatttgaagctttatgctaaaga

SEQ ID NO: 281415 - DNA, 201 bp, Homo sapiens
aggcaaatttattcaataaatatgtgtgttctgactgctccacctacctgtggttccctgtctctctccctctccttggacctccctattccctgagacayaacaatattgaaattaggtcagttaataaccccacaatggcctctaagtgttgaagtgaaaggaaaagttgcacatttcttaccttaaatagaaagctag

SEQ ID NO: 281416 - DNA, 201 bp, Homo sapiens
taaaaatatgagtactcaggggttgacgtttagaacaataaataatttttactgctccatcaagaacatccttaagataaactggtgtttttattgtcgtragtatggtggtgaagaataccatgacctgtggaacagtttggtccaccgtctgcattcttgtgaatgagccacctgtttatgatcatagccttgctccat

SEQ ID NO: 281417 - DNA, 201 bp, Homo sapiens
agctgggactacaggtgcatgccaccacgcccagctaatttgtgtatttttagtagagacagggtttcaccatgttggcctggatggtctcgatctcttgrcctcgtgatccacctgcctcgtcctcccaaagtgctgggattacaggcatgagccaccatacccggctcttttagttatttttaaatgtacaattaaatt

SEQ ID NO: 281418 - DNA, 201 bp, Homo sapiens
gatcacctgaggtcgggaattcgagaccagcctgaccaacatggagaaaccccatctctactaaaaatacaaaattagccaggcatggtggtgcatgcctrtaatctcagctactcaggaggctgaggcaggagaatcacttgaacccgggaggtagaggttgtagtgagccaagattgcgccattgcactccagcctgga

SEQ ID NO: 281419 - DNA, 201 bp, Homo sapiens
atcatataacattatgatgaattcctgagctaatttggaaattatacatatttatatttcggttgttattatagcagtagtgcactgatcatttgattccraaagtaatttccttctacaaatttacccttgacattctaaaatgtatattcagatttaatggaaaaaaagatgtgttataaaacaaggcagtgtttttga

SEQ ID NO: 281420 - DNA, 201 bp, Homo sapiens
gtagatgcgagaatgcctaatgaggaggtagagaactagtgcggcccacattgcccacatctcttcttaccatgctgaggaacttttgtcatgcgtatccrcgcatctcaattttgaggtaatgcttaactctaccagggaaagaatttagtgtagacataactgttaagacagctacaaagccagtgtccttaaaacaaa

SEQ ID NO: 281421 - DNA, 201 bp, Homo sapiens
gaatggatgaatgaaaaaatgaattagaaaaagggaaaatgaaggcaggaaaaaattgagcttccttacagaatgttctctaatatttttattatatgcakgtacatcttaggatatatacatttagtgaaccaacataaaccccagttcatatcctctgaagatgagaacagacactggggaacacactatactaatagt

SEQ ID NO: 281422 - DNA, 201 bp, Homo sapiens
ggtcacacaagtccctgttctcataaagcttgtacactagctgaaagagaaagacggtaaacaagtaaatgagtgtgctattttagacagggtattcagagtgggcatctataaagaagttccatttgaatagagactgaatgaagagggtggggaagagcttttctggaagaggatagagccagttcaaaaggcccctca

SEQ ID NO: 281423 - DNA, 201 bp, Homo sapiens
ttatgatcatagccttgctccatccacacaaatgtcaacaccatcaacaggcaaagaacaccttaggattcttatgaaaaccagttggttcttgtggaccscttaaagagttttagagtcccgaggccgatcgcggtggctcacgcctgtaatcccagcactttgagaggccgaggcgggcagatcacgaggtcaggagat

SEQ ID NO: 281424 - DNA, 201 bp, Homo sapiens
agagccagttcaaaaggcccctcattgacaagaggctggagtgctctgaaccacagagaaggctgtggtggctagtggtgcatggagggggaggtggggcstgggtgatgcagggccttacagaccatggcgaggagctgactcttttgtgtgtagagaaattgagtttaagcagagggctaccatgatctagtagataag

SEQ ID NO: 281425 - DNA, 201 bp, Homo sapiens
ctcactgcaacctctgcatcctgggttcaagtgattctcctgcctcagccctccaagtaggtggggctacaggcgtgcaccaccacacctggctaattttyttatttttagtagagtcagggttgctccatgttggccaggctggtctcgaacacttgacctcaaatgatccgcccaactcggcctcccaaagtgctggga

SEQ ID NO: 281426 - DNA, 201 bp, Homo sapiens
atagttctctaggcacaggcagctatttttctgaattctttgactcatataacctctttactaaatccaacatagatcttacatcctattcatgcacgctstcagtggagttcagaagtacattaattaaggtctaacaaattgttcatcatgttcacatttaaaagggtcctaaaatagcccaatcatgggcatgctggg

SEQ ID NO: 281427 - DNA, 201 bp, Homo sapiens
gttcttctggaggagaagcatgctatgtcttcacactgaaaaaggcagaagggcaagcgagtgaactccctccgtcaagccttttttgtttttttttttttgagatggagtcttacactgtcacccaggctagaatgccatggtgcaattttggctcactgcaacctctgcatcctgggttcaagtgattctcctgcctca

SEQ ID NO: 281428 - DNA, 201 bp, Homo sapiens
actgtttactttcttgagctcaatgaaaaccgaatgctaatctactgaaaagtgagcaaactagaacaaattgatcattgtatataagaaaatacatgcartgcaattaccctttattctaaccgtatgtcccttgtacttttttgacatcattttttttccttctaggaaatgatggggattgttgatcagtacttggga

SEQ ID NO: 281429 - DNA, 201 bp, Homo sapiens
ggttgatagttgcagcaaaccaccatgggacgtgtatacctgtgtaacaaacctgcacgttcagcatatgtattccagaacttaaggtaaaaatttttttwaaaaaaaattggtttctcatagaagtcagataattgaagtaaaagttaaattgctaattgccaaatttcgctcatttctacttttattctactagagtat

SEQ ID NO: 281430 - DNA, 201 bp, Homo sapiens
atccagtcacctcccaccaggccactccgacactggggatgacaattagacatgagatttgggtggggacacagatccaaacaaatcagccccaaagtatrtttagaccacccccacattcatgagcatgaactttggaagaagatatttctggattcaacactgacgctgccactttctagctgtgtgacagtggatgaa

SEQ ID NO: 281431 - DNA, 201 bp, Homo sapiens
aggttgatagttgcagcaaaccaccatgggacgtgtatacctgtgtaacaaacctgcacgttcagcatatgtattccagaacttaaggtaaaaattttttwaaaaaaaaattggtttctcatagaagtcagataattgaagtaaaagttaaattgctaattgccaaatttcgctcatttctacttttattctactagagta

SEQ ID NO: 281432 - DNA, 201 bp, Homo sapiens
caggttgatagttgcagcaaaccaccatgggacgtgtatacctgtgtaacaaacctgcacgttcagcatatgtattccagaacttaaggtaaaaatttttwtaaaaaaaaattggtttctcatagaagtcagataattgaagtaaaagttaaattgctaattgccaaatttcgctcatttctacttttattctactagagt

SEQ ID NO: 281433 - DNA, 201 bp, Homo sapiens
aattttctggtatgagagaagattacagttgggtttaaaggcttcagtgccgtggcctctgcagcatcatgtgcagtgtccacagacccgagaagctgacrtttcccctccttggcttcacttcacctgggacgtgggtacctggtgcaagcagcgggcagcagcaatgataagttctgttggtgacaaacaggatgtgga

SEQ ID NO: 281434 - DNA, 201 bp, Homo sapiens
ggagagcattaggacaaatacctaatacatgcggggcttaaaacctagatgacaggttgatagttgcagcaaaccaccatgggacgtgtatacctgtgtarcaaacctgcacgttcagcatatgtattccagaacttaaggtaaaaatttttttaaaaaaaaattggtttctcatagaagtcagataattgaagtaaaagt

SEQ ID NO: 281435 - DNA, 201 bp, Homo sapiens
gaactcgggaggtggagcttgcagtgagccaagatcgcgccactgtactccagcctggatgacagagtgagaatctgtctcaaaaaaaaaaaaaaaaaaaagaaaagaaaatcagcttgttcagccgtccgctacccccaccccacattcatacccagaataccctgtgtgttgggtttactttgagctttagattaaggt

SEQ ID NO: 281436 - DNA, 201 bp, Homo sapiens
gaggccagggcgggcggatcatgaggtcaggagatcgagcccatcctggctaacatggtgaaaccccgtctctactaaagatacaaaaaaattagccggaygaggtggcgggtgccagtagtcccagctactcgggaggctgaggcaggagaatggtgtgaactcgggaggtggagcttgcagtgagccaagatcgcgcca

SEQ ID NO: 281437 - DNA, 201 bp, Homo sapiens
ctctctggaactggaggcagtgactggagtttcctctgagaccagccggccctttagactcaaaagatgagagtcacccatcaccatccatctggtggaarcattacaggagcaagtggataaaagacgattttgctgtaagatcagaacggaaaaagacgagcccacaaagaaaatctagagggaggaaagcatatggtt

SEQ ID NO: 281438 - DNA, 201 bp, Homo sapiens
atccccagacaccaagtactgccctgcttgaccacctatgttcccctgggcccaccagcatggactctccttctgttaccagtcactgcctgatccaggcmtgagctgcctgtgtcccccgacatcatcctcctggcaccatcctctgctcttcctggccttcttcactgggagccttcgggatcatccctccagatcaag

SEQ ID NO: 281439 - DNA, 201 bp, Homo sapiens
gacccgagaagctgacatttcccctccttggcttcacttcacctgggacgtgggtacctggtgcaagcagcgggcagcagcaatgataagttctgttggtracaaacaggatgtggatatcatttcatatacattgacatcccaaaccccatagataaggagagctgttctaaccgcctcaaagataataaaatcgctatc

SEQ ID NO: 281440 - DNA, 201 bp, Homo sapiens
accccatagataaggagagctgttctaaccgcctcaaagataataaaatcgctatccatatctgttttttcctgtgtgccacacactatgctaagcacttygcatgcaaaatttaatctctataaatgatataagagaggaagtaatttttaaatccttactttacagataagggagctggattttagagggacaggctaa

SEQ ID NO: 281441 - DNA, 201 bp, Homo sapiens
acacaaattttaaccttcagtataccagaaaaaaatagtcatcaccatttaccatttgggttcaaaggacacttaattttttaaaatcaatgcagtgaacyttttcacatctactttatccgttttcttccagtaacctttgtatacttagctaccttcagcacctgaacgttttcaaactgtatataaagtaaattttgg

SEQ ID NO: 281442 - DNA, 201 bp, Homo sapiens
ctgaacgttttcaaactgtatataaagtaaattttggtatacagacttgaaaaggtgaaagaataccatcccacattcatttagcaaaacaggatggtccrggttcttttcacaaaatattatttgagggaatccttcctcttgaacgactgactgtataagaatagcatgttttctttttgtccttagaaatatattgtt

SEQ ID NO: 281443 - DNA, 201 bp, Homo sapiens
ttctgtgactgatagattcttaagtctaagtgacatgcattcatccaagtgtttactatgcatcaaatttgtcttgggctctgtgctgggtgctgaggctstcaggccacagaatgcacagtctatgccctccgggagtttagtccagtcaaaggacaggctggcaaacagattcatacagtaagtatgctaagtgggctg

SEQ ID NO: 281444 - DNA, 201 bp, Homo sapiens
catgcattcatccaagtgtttactatgcatcaaatttgtcttgggctctgtgctgggtgctgaggctgtcaggccacagaatgcacagtctatgccctccrggagtttagtccagtcaaaggacaggctggcaaacagattcatacagtaagtatgctaagtgggctgctggatgctatgatgaggatgcacactcaacac

SEQ ID NO: 281445 - DNA, 201 bp, Homo sapiens
cttcagtgaaatattttgatgattttatttttatttttattttcttcctttgatgatatattttaaaagtggcttttccctttttttttttttttttttttagtttttatggcgaaaccctaatctatttctttataggttatgaggccgggcgcagtggctcacgcctgtaatcccagcactttgggaggccgaggcagg

SEQ ID NO: 281446 - DNA, 201 bp, Homo sapiens
aaataggtttaattggacttacagttccacgtggctggggaggcctcagaatcatggcaggagtcgaaaggcacttcttacatggtggcggcaagagaaaatgaggaagatgcaaaagcggaaatccctgataaaaccatcatatcttgtgagacttattcgctaccacgagaacagtatgggggaaaccaccccatgatt

SEQ ID NO: 281447 - DNA, 201 bp, Homo sapiens
gccacagggattagttcacacagccctgcagacgtctagtcttggagccctacacacagaaactgagtccgctaatagaaacttggtggaaaaaaaaaaaagaaaaacaaggaagaagcagcaaggcctgcaaaaataaaataagtttttcctttccttccagttgcagccatgagattttctctgtaattgagacccagg

SEQ ID NO: 281448 - DNA, 201 bp, Homo sapiens
ctacttgggaggctgaggcaggataatggcctgaacctgggaggtggagcttgcagtgagccgagattgcgccactgcactctagcctgggcgacagagcragactccatcccaaaaaaaaaaaaaaaaaaaaaaaggtgcactcattcatttttacagcagatttctctgttttttgttcattcactttgatgaatattt

SEQ ID NO: 281449 - DNA, 201 bp, Homo sapiens
cttccatcaaggggttattgtgaggattaagtatgattgtgtgtacaagtgcttagctcagtgcttgctacacattagttcccattaactgtagctgttastataaaaatataccacaaagcattaggctcagccaggactgtcaccatctcgcaccatatcagttaactaatcgtgcaaatatgtcctggttcttttcac

SEQ ID NO: 281450 - DNA, 201 bp, Homo sapiens
tccctttttatcagaaatagggacagaaacactaacatttcacaaaaattcttatttgcaaaagtcaatgtagcaactgttttgcaagagaattccaaatraagtacatttcagcatttgctattagtttttaaacagctttgttgagatataattcatataccatataattcacccatttaaagtttttaatagtttaat

SEQ ID NO: 281451 - DNA, 201 bp, Homo sapiens
taatcccacactgatgagaagaagagagggttgtttgtcaggtggggtagtttcacttgacttgaaggtctcaccccgcccctcgtctttaccatagcatrcgcttctagatgcttctgctgcattgtcaaccagactctaccagaactgtttttcaaaacatgtgttcctaggattttacctccctgcattttttgctat

SEQ ID NO: 281452 - DNA, 201 bp, Homo sapiens
agtcccagctactcagagaggctgaggcaggagaatggcgtgaacccgggaggcggagcttgcagtgaaccgagatcgagctactgcactccagcctgggygacagagcgagactccatctcaaaaaaaaaaaaaaaaaaaagagtgggatacataacctttaacttaatatggcttggtaaattagatcctatatatgct

SEQ ID NO: 281453 - DNA, 201 bp, Homo sapiens
ggaagaggctggaacagagcctgaggaggactggtctttataagacaggctgggaaagaggagggcgtagagaagatggaaagggagtgatcagagagagrtgagggtgccaggaaaacactgttgcagatgcaggggtttcaaaatggagtgtgtggcccacagtgtgatggggtcatgctgtgaggcgccctctgagct

SEQ ID NO: 281454 - DNA, 201 bp, Homo sapiens
acagaaaattttagtaggtttcaaaaatatatataatcaaaataagaagctctaaaataactgcagtcaattagatgctgcttggcctcagtttgaataaytggcaacactctctgaaatggtctgcctctatgtctctacccaaatctcatcttgaattgtagttcccataatccccacatgttgtgggaggaaccctgt

SEQ ID NO: 281455 - DNA, 201 bp, Homo sapiens
ctgataacctgacttccaattgaaagaagcaatcaaacctagaaatacacaattacttcactagtatttggcaagggctcttcaacacctgacaagttccrgtaattcatccatcccactaattacatatatgtaccccttcctgcttcttctcttctgcttcctggagatagtctttaaatgacacattttttgcacagc

SEQ ID NO: 281456 - DNA, 201 bp, Homo sapiens
gcaggtacatcttaggatatatacatttagtgaaccaacataaaccccagttcatatcctctgaagatgagaacagacactggggaacacactatactaayagtcatttattttttctgggatttttttgtttgctttttataacattatggaaaattttaaatactcacaaaagagaatagtccagtgaagctccatttc

SEQ ID NO: 281457 - DNA, 201 bp, Homo sapiens
ttttgtttctgagttacttcacttaggacaatggtcttcagctccattcctgttgctgcaaaagacatctgtatatagaccacattttctttatccagtcmtctgttgatggacagttagtttcattccctgactttgctgttgtgaatagtgctatgataaacatacaagggcaggtgtttatttgatagaatgattctt

SEQ ID NO: 281458 - DNA, 201 bp, Homo sapiens
tgtttacgatcagttggttgtaggtatgtggctttatttctgggttctctactgtcttctattgctctatatgtctgtttttgtaccagtaccatgctgtyttggttactatcatcttgtagtataatttgaattcagataatgctatccctccagctttgttctttttgcttaggattgctttgactattcagggtcttt

SEQ ID NO: 281459 - DNA, 201 bp, Homo sapiens
tgcaagttctcatttatttgtgggagctaaaaattaagataattgaactcatggagatagagtagaagattggttgccagagactggaaagggtaatggcrgtggcggggagaagtggggaggattaaggggtacaaaaacatagttggacagaattaataagacctagtatttgctagcacaacagtgtgactctggtca

SEQ ID NO: 281460 - DNA, 201 bp, Homo sapiens
tgtctcacttatccagaaattctttatctgccatcctgccatcagacacatagccataaactcagaagtagtgtaaaggaccagaaagccactacggtagrtgccacagatattaaatatccaacatcgcaagctgtgcttacaacagggagagcaacgtgcttctctgcctgatgctgatgcttcctggatggctgtatt

SEQ ID NO: 281461 - DNA, 201 bp, Homo sapiens
gcatttatgccctaaaactagatttcaggtcttaagctggcttaaattatctcttgaaaaatggagattatatacagctttgaaaaatagggaatttttttccccagaagacatggcatgtgattgccaaaaaaacacataaccatctttggttaagaggtgacaccatctttctgagcattgctctaaatacaagaaagg

SEQ ID NO: 281462 - DNA, 201 bp, Homo sapiens
ccacctcctgggttcaggtgattcttgtgcctcagcctcccgagtagctgggattacaggtgtgcactatcatgcccagctaatttttatattttcagtasagatggggtttcaccatgttggccaggctggtctcaaactcctgacctcaaggagtttgagacctgacctgcctgtcttggcctcccaaagtgctgggat

SEQ ID NO: 281463 - DNA, 201 bp, Homo sapiens
cttcactcttacttcgcgctcatcacatttcttaaaccatttatgtggaagtgtttggcccagctggctgctttctcagatttcaactttcagtggagatycatgtccaagttcagacacagtcctaaatttatcaattttatgagcatgtaatgtgtctactcttgcccaagaagaacataatgaattcatttcttcctc

SEQ ID NO: 281464 - DNA, 201 bp, Homo sapiens
tgtgatatatttgtacaacttctagcataatctgtgtattgtgtagttgaaacatttctgattcctgtggtcaaagtgacctagaatatatttcataacttcattattccagatttctattaaattgtaaggcagttttaaaaacgcatggcaaaggtaaagataaggtagaaaaaacaaatatataattttaatgtgaaa

SEQ ID NO: 281465 - DNA, 201 bp, Homo sapiens
gatttcaactttcagtggagatccatgtccaagttcagacacagtcctaaatttatcaattttatgagcatgtaatgtgtctactcttgcccaagaagaayataatgaattcatttcttcctccacaaatgtttagtgctattaagcacatctttcatttttttaattaaaaaattctgtgaagccacagttttaaaaata

SEQ ID NO: 281466 - DNA, 201 bp, Homo sapiens
gaagaatgtagccgccctttgagaaaagccagaaatccagctttccatgtgaaatagaccaagccttacaacaactgaatccatttctaaaaaaaaaaaaataccccacgggccaaacaacacattgcctgccagtccgatcttgggctgcctttttgccaccctgtcttaaagggaggagctctgtattcgtctctttct

SEQ ID NO: 281467 - DNA, 201 bp, Homo sapiens
tatgagcatgtaatgtgtctactcttgcccaagaagaacataatgaattcatttcttcctccacaaatgtttagtgctattaagcacatctttcatttttytaattaaaaaattctgtgaagccacagttttaaaaatatgtagtttatgtaattgttcttttagtatcttccccaccccaatccccaggggccagttatc

SEQ ID NO: 281468 - DNA, 201 bp, Homo sapiens
actttctcttcctggttccttttactgtgttccctgcttccaaaaatccaagcaaagtgtgtgcattagaaacccttcattctctttcatcaaaggaaccwagcggtttctgcatttttaaacaacaagaaagtaaatcatgaacttttacttggctacatagatcaaagattctcttgaaggtccaagtgatctcaaatt

SEQ ID NO: 281469 - DNA, 201 bp, Homo sapiens
tattgagctaagtacagttgcaaagagagagaacaaaacaaagagagagtgagaaagagagagagagagaaaggggagggaaaggggaggaggaggaccartgggagggaggaaggggaaaaatcatagaaatacattgaagtcttggccttcccatagccttacaggctagtgagttcatcaggttagcgtaattggtga

SEQ ID NO: 281470 - DNA, 201 bp, Homo sapiens
gtaggtaatgaagtgtgatttcaggagagggcctcctccctgccaaaggaggagcatgtgtgtgtgtgtgtgtgtgtgtgtgtgtgtgtgtgtgtgtgtgkatgtgcgcgcgcgtgtgtctgtgtgtaagagagggagagagagaagtaccctaggcctgcaaatgccacacagactatgaggagtagagaaaaagaatcc

SEQ ID NO: 281471 - DNA, 201 bp, Homo sapiens
agtagatattaggtaagcaactagcagaatctgctatagggggttgtcatttcaaaatattctatatagttagtaataggtttgaaaaaatgtttttttttcatattgaaggtgaggactctatggggatgaaagaaagcaattaacaatacaataatggggtatatttaccttctgaatttaaaatattctctgaagaca

SEQ ID NO: 281472 - DNA, 201 bp, Homo sapiens
accatgttagccagaatggtctcgatctcctgacctcatgatctgcccgcctcggcctcccaaagtgctgggattacaggcgtgagccaccgcacccagcytacctaattcttttcttattttttattagattgtatgatcatttctttgttttaaaaattatgcatgcttctattatgttttaatttggaaagtacagaa

SEQ ID NO: 281473 - DNA, 201 bp, Homo sapiens
tgtaggtaatgaagtgtgatttcaggagagggcctcctccctgccaaaggaggagcatgtgtgtgtgtgtgtgtgtgtgtgtgtgtgtgtgtgtgtgtgtgtatgtgcgcgcgcgtgtgtctgtgtgtaagagagggagagagagaagtaccctaggcctgcaaatgccacacagactatgaggagtagagaaaaagaatc

SEQ ID NO: 281474 - DNA, 201 bp, Homo sapiens
agctttttcaacagataaggaacacctttaaaaagaaagggacgaatgcagatgaaggacttgcaactcacaatgacttttaaactttctacaaaaaaaaagaaagaagaaaaagagaaaaaacctttaaagtttatagtagtaggttttttccaaaggttgccaatgtgtaggttgtttgcaaacattgcccagtggaag

SEQ ID NO: 281475 - DNA, 201 bp, Homo sapiens
ttcatcagtccttgtatgtttaatcaaagtcgtgcatgcacgtaacacacagagtttacagaaccaaagtgcttgttgaaaaacagtggtccccgatggcrccctgcacgtcactttctgctcttttatctggttctttagtattaacttcatatccctggttaacctgttatgttgctgcttccggatttcactcagctt

SEQ ID NO: 281476 - DNA, 201 bp, Homo sapiens
gagtgacggtgtcagcaactggctttaacatcatcagggctagatgtaggtaatgaagtgtgatttcaggagagggcctcctccctgccaaaggaggagcrtgtgtgtgtgtgtgtgtgtgtgtgtgtgtgtgtgtgtgtgtgtgtatgtgcgcgcgcgtgtgtctgtgtgtaagagagggagagagagaagtaccctagg

SEQ ID NO: 281477 - DNA, 201 bp, Homo sapiens
cctgacaaccactagcatactgcctgtctctatgattttgcctacaggattctgagcatttcatataagtggaatcatacaatatacaatatgtggcctttatgtctgacttctcttactcagcataatgttttcgaggtctgtccatgtaggaggtatcagttcatttctttctatggcagaatactattccttatttgc

SEQ ID NO: 281478 - DNA, 201 bp, Homo sapiens
ggctgcatttgcaagttttaatatgtctataacatttttatagtatatcagtatccatatcaaacatttaactctgttactctgcttttcttttcttttcytttttttttttttttttttttttttgaaatggggtctcgctatgtcgctgcagtgcggtggcgtgatcttagctcactgcaacctctgcctcccgggttc

SEQ ID NO: 281479 - DNA, 201 bp, Homo sapiens
aaggaaatgtcagagtcagttagaagctgggagaacccctctatctctccatagtgtgctcagtgtcagagccgtgtgtgtgtgtgtgtgtgtgtgtgtgkacacttctgttggtaggggctacaagtagatgactatcaacacctgcttctatagccacagtgaattcccagtccagcagggaagaaggtatgtctttaa

SEQ ID NO: 281480 - DNA, 201 bp, Homo sapiens
tttatttgtttttcattgagtgattacagatggcacctaataaagtcttcatgctgtgatatcttgaagccattgatttatgtttggtaagtgtggacacwccaactctagtcaacctccctcccattacataccacaaggaatgttaaaatgacatttgcctatttgctttttctagtgactgatgaggatcctttctga

SEQ ID NO: 281481 - DNA, 201 bp, Homo sapiens
aaaggaaatgtcagagtcagttagaagctgggagaacccctctatctctccatagtgtgctcagtgtcagagccgtgtgtgtgtgtgtgtgtgtgtgtgtgtacacttctgttggtaggggctacaagtagatgactatcaacacctgcttctatagccacagtgaattcccagtccagcagggaagaaggtatgtcttta

SEQ ID NO: 281482 - DNA, 201 bp, Homo sapiens
ttccagcagggagtagtttataggtcatataatgtcatttcagtcatgcagatatctagcaagaaaaagtatcaacaatgatatatctttatctatatgawcacttaagtactttttgttcaaaatttaatggtacttgtattctggactttactggtgaaatttttatgatgttgtttattgaaaaacagtagtatcatc

SEQ ID NO: 281483 - DNA, 201 bp, Homo sapiens
acctggcaaattctagccagtagttttttaaaaactcaccttgtctctctctctctctctctctctcacacacacacacacacacacacacacacacacacgtggccctttcttgtatacagaagctataaaatgtgtgtagatttctagccctgaaatactaaagttctataattctgtacttaactctttaataatctt

SEQ ID NO: 281484 - DNA, 201 bp, Homo sapiens
aagattataactttttatattcatggcatacttcaaatattggaacttttggcaacatgcaacactaataatagactcaaagcaacaccattaagacaaastcactgctatgatgtaacagtgtctcacagggtctgtaagaagaaccctcaggaataatgctgtttgatgtctgacttaaactgtgcattgtcctttacc

SEQ ID NO: 281485 - DNA, 201 bp, Homo sapiens
cacctggcaaattctagccagtagttttttaaaaactcaccttgtctctctctctctctctctctctcacacacacacacacacacacacacacacacacacgtggccctttcttgtatacagaagctataaaatgtgtgtagatttctagccctgaaatactaaagttctataattctgtacttaactctttaataatct

SEQ ID NO: 281486 - DNA, 201 bp, Homo sapiens
ctttttggcaactgtcctttggatttcatcagttcacctggcaaattctagccagtagttttttaaaaactcaccttgtctctctctctctctctctctcwcacacacacacacacacacacacacacacacacacgtggccctttcttgtatacagaagctataaaatgtgtgtagatttctagccctgaaatactaaag

SEQ ID NO: 281487 - DNA, 201 bp, Homo sapiens
tcttccactctctggctttgaaaactgttcatgataagaaagaggaagagaaagagcccctcctaaatattatatgtttaatcaggtttgttatggttatygttgtttctgagacaggatctcactctgtcaccaggctggagtgcagtggcatgatcttggctcactgcagcctctgcctcccaggttcaagtgattctc

SEQ ID NO: 281488 - DNA, 201 bp, Homo sapiens
tggttatcgttgtttctgagacaggatctcactctgtcaccaggctggagtgcagtggcatgatcttggctcactgcagcctctgcctcccaggttcaagygattctcctccctcagcctcccaagtagctgggactacaggcacttgccaccatgcccagctaatttttgtatttttagtaaagatggggttttgccatg

SEQ ID NO: 281489 - DNA, 201 bp, Homo sapiens
tactgccgaacaaccctatttattcactcgacatgttcatttcctcaacttctcaaggtaagacattttccagtttaatggttctttcattttcttctaaygaacagttactttagaaatctacctttatttacaaggcagtgcaattgcccttgaaaagacatttttaatccgtttatttttgctacggagggatcaaaa

SEQ ID NO: 281490 - DNA, 201 bp, Homo sapiens
aactgttgctgcagtacggttagggtaaggaaattaccttacttaacagctggtaagtcaccagctgttgctgctggttatggtgccttgctgtgcagtcygtgagctaacttatttagtgagagattttcctgccaatttgctataaccttgagggagaaaaactgaaatctcccacagaggcaggaatttattttgcaa

SEQ ID NO: 281491 - DNA, 201 bp, Homo sapiens
attatgaatctcctacccaaaatgagcctacagaccatacattctaaggaacatggaaaaaaaatccaataccaagaaaggcaggcagcaaaatctagtaytggaatatgaatacactccagatggctttaaggaacaacctgacaaagtctttaaaataagtgtgcctaggatgtttgaaaagacaaaagaatgaatagc

SEQ ID NO: 281492 - DNA, 201 bp, Homo sapiens
tgaaacccttgtacctgggagaaggcatacaatgttggtaactgataaagttgggccaggaagccacagtctagagtgcatttggaggagaaaatacagckgaataagactccaggtttatttggaaatgccagggacgatggataaagcaagaggctgacagcagaaggatgaactggagatgtctatatggaagagaag

SEQ ID NO: 281493 - DNA, 201 bp, Homo sapiens
atatctttaaaataattaagtaaaatgaaaaatatggttattgaagtaaaaatttaatagataagttctaagctaaataaagttaaagagaatattaattratttagaaaatagtcaagaggaattcaccaagaatggaattcagaaacagatagacagatagagcagttaagagacatggaaaaaatattgtaaagtttc

SEQ ID NO: 281494 - DNA, 201 bp, Homo sapiens
ttgtaaagtttcaacaggcatctgataggagatccagaaaaaagagaatagaaaaatgttagggaagaaatatttgaagcaattaaaggacaaaatattcyaaaattggagatgattctttttttttttttttttgagacagagtcttgctctgtcacccaggctggggtgcagtggcatgatctcgactcactgcaagct

SEQ ID NO: 281495 - DNA, 201 bp, Homo sapiens
gctcagggatccaggctgtttccatcttgtggcattaccgtctcaacacaggacctccaatgttactgtggcacagagcagagaggaactagaggggcacrtagggagacttttcagcccttcagcccagaagtgacccgtgtcactttttttttttttttttttgagacagagttttgctcttgtcaccctgactggagt

SEQ ID NO: 281496 - DNA, 201 bp, Homo sapiens
tttatttgcctagatttatttgtacctatcaaaaatttcgtatgtgccaaaattttcgtatgtgccattagatctgccgcattcagtattacttttggtaytatttaaatattaattaccagataagtatgtcagttccatcccaacctgccctcccttcccgcagaggccctctcctctttccacccagagctctttaag

SEQ ID NO: 281497 - DNA, 201 bp, Homo sapiens
atgcctgggtcccacacccgaaagttctggtttaataggtctagggtgcagcctgggctttgggattttttttttttttaagcttcagaagtgaggccaaygtgtagctgaggttgagaactactgaggaattaacaacgtatccgttcctgactgtattagcaggagctgttttcactgagagaagcaccccctgaatgc

SEQ ID NO: 281498 - DNA, 201 bp, Homo sapiens
gttaccgaagagagagatcctgttgccacacaacagagggacatgagagcaacaaagaaaaacagtaaggaagtctgctgtctctcaaacaatgtgccccyatttctacaggaaacttctcagcctaactaaccgttaggctaacaatatgatacagtttggctgtgtccctaccaaaatctcatcttgaattgtagctcc

SEQ ID NO: 281499 - DNA, 201 bp, Homo sapiens
gcttccaggttattttaatgcctggtccctgtttctcacttcacacagcaaagttttagagcaccttagagatctcaaataactttgtgcagaaatttcttactggattagtggagccagtaaggacttgcaatgccattggcttttatgggcccctcagcttgccaatcattagggaaattgcccaactggaaactaata

SEQ ID NO: 281500 - DNA, 201 bp, Homo sapiens
agacaccagaactccctctcttcagcatgtgaggacacagtgagaaggtggccatctgcaagccaggaagagagccctcaccaggaattgaatctgctggscctttgatcttggacttccccacctccagaatgatgagaagtaaatatctgttgtgtaagccacccggtctatggtattttgttatagcagcccatgctg

SEQ ID NO: 281501 - DNA, 201 bp, Homo sapiens
cgcttccaggttattttaatgcctggtccctgtttctcacttcacacagcaaagttttagagcaccttagagatctcaaataactttgtgcagaaatttcttactggattagtggagccagtaaggacttgcaatgccattggcttttatgggcccctcagcttgccaatcattagggaaattgcccaactggaaactaat

SEQ ID NO: 281502 - DNA, 201 bp, Homo sapiens
ccaaagcattcactgggtgctcctgctcagattccccatcttgtaaggctttccttgaagcctccacctcctgcagctgccctaggcagaagctcaatatkgggaaggcatcagcagcaggagtttgaagatcctggtccaagtcccggctcctactcctcctagtcctcatcctggcaaagccaagtactctctctctga

SEQ ID NO: 281503 - DNA, 201 bp, Homo sapiens
tttgggggagccacaaactgcacccatataagaaggcaaatttattcaataaatatgtgtgttctgactgctccacctacctgtggttccctgtctctctycctctccttggacctccctattccctgagacataacaatattgaaattaggtcagttaataaccccacaatggcctctaagtgttgaagtgaaaggaaaa

SEQ ID NO: 281504 - DNA, 201 bp, Homo sapiens
ctctttttggcaactgtcctttggatttcatcagttcacctggcaaattctagccagtagttttttaaaaactcaccttgtctctctctctctctctctcwctcacacacacacacacacacacacacacacacacacgtggccctttcttgtatacagaagctataaaatgtgtgtagatttctagccctgaaatactaa

SEQ ID NO: 281505 - DNA, 201 bp, Homo sapiens
agctcaaagctatcattcattcaaaattaaggattacaaggatgtgttttcatatattgttttgtattatgctacatttcactttttattggaaataatatttatcttgtaattttctctttgagaataagtatattttggtaaaattcctcttcagttcactttgtgagaaattcaaatttaataggcagtaattgaact

SEQ ID NO: 281506 - DNA, 201 bp, Homo sapiens
ggctttccttgaagcctccacctcctgcagctgccctaggcagaagctcaatattgggaaggcatcagcagcaggagtttgaagatcctggtccaagtccyggctcctactcctcctagtcctcatcctggcaaagccaagtactctctctctgagttttgtttttctcacttataaaataggaagtaatgatttcccagt

SEQ ID NO: 281507 - DNA, 201 bp, Homo sapiens
acctctttttggcaactgtcctttggatttcatcagttcacctggcaaattctagccagtagttttttaaaaactcaccttgtctctctctctctctctcwctctcacacacacacacacacacacacacacacacacacgtggccctttcttgtatacagaagctataaaatgtgtgtagatttctagccctgaaatact

SEQ ID NO: 281508 - DNA, 201 bp, Homo sapiens
tagctcaaagctatcattcattcaaaattaaggattacaaggatgtgttttcatatattgttttgtattatgctacatttcactttttattggaaataatatttatcttgtaattttctctttgagaataagtatattttggtaaaattcctcttcagttcactttgtgagaaattcaaatttaataggcagtaattgaac

SEQ ID NO: 281509 - DNA, 201 bp, Homo sapiens
aggtggatgcttcttgcccagagtcacttacctgcctggctttgatcttcatgcttctgccgtttctttcttcctcttcaaaaccagatgtcttcctcccmttggccaaaaagaatataccagtgaagtggtatgtcagggcattaataatgagaagtgtgcagactgtagtttatgaggatttcaggttctttgatttag

SEQ ID NO: 281510 - DNA, 201 bp, Homo sapiens
atatagttgcttataatgggccactttagatttttgcaaggtatatttgtatcatctctgattcacaattcgagggattgccaaaaaaaaaggggtagggwttttcttgcatagttactgttttggttggcacagaatgcagcctcctcacccaccctctttttgattatagccaatgattacataacattttcagatcag

SEQ ID NO: 281511 - DNA, 201 bp, Homo sapiens
taacctctttttggcaactgtcctttggatttcatcagttcacctggcaaattctagccagtagttttttaaaaactcaccttgtctctctctctctctcwctctctcacacacacacacacacacacacacacacacacacgtggccctttcttgtatacagaagctataaaatgtgtgtagatttctagccctgaaata

SEQ ID NO: 281512 - DNA, 201 bp, Homo sapiens
atagctcaaagctatcattcattcaaaattaaggattacaaggatgtgttttcatatattgttttgtattatgctacatttcactttttattggaaataatatttatcttgtaattttctctttgagaataagtatattttggtaaaattcctcttcagttcactttgtgagaaattcaaatttaataggcagtaattgaa

SEQ ID NO: 281513 - DNA, 201 bp, Homo sapiens
atagggttgttgagagaattaattgaaagaaaccatctaaaatgcttagcacaggcctagtctatcctggattaatgaaagtctagtcagttgttggcatrgtatgagttagtgggtttgatgtgcacacataaatgcctgtgcaaatactgaggaagggttctaggagtcacagcaacaagcagagtttgagttatgtaa

SEQ ID NO: 281514 - DNA, 201 bp, Homo sapiens
ttctctggagaactgcatccaaatccctatcccagactctgcttctagggaagctaacctaaggcatcatcacaatgcttccccccaaccccaaggaatcrtagttcttacaaagatgaattactttgaaagtttagatagaatataataaatcagcaaatcaagaataaaccatctgccatatttttgaaattatctttt

SEQ ID NO: 281515 - DNA, 201 bp, Homo sapiens
atcgcttgaacctggggggcagaggttgtagtgagccgagatggggccactgcattccagcctgggcaatagagtgagactgtctccaaaaaaaaaaaaaagagagagagagacacagtaaagaataaatatgtttaattgaaactttaagcatgtttaaaacatacttaagttggcaaaatatttgcaacaatgatatca

SEQ ID NO: 281516 - DNA, 201 bp, Homo sapiens
tatagctcaaagctatcattcattcaaaattaaggattacaaggatgtgttttcatatattgttttgtattatgctacatttcactttttattggaaataatatttatcttgtaattttctctttgagaataagtatattttggtaaaattcctcttcagttcactttgtgagaaattcaaatttaataggcagtaattga

SEQ ID NO: 281517 - DNA, 201 bp, Homo sapiens
aaagtgctaacgaatttcatgacctaatttaaattccccagtgtggctaattggggaactgtgttttactgatctgaattgctaatttttatagatattaytttaacagctgtccatttgtaatttatgtcagggtgtttccagggcttttttttttttttttttttttttttgacagagtcttgctctgtcacccagcct

SEQ ID NO: 281518 - DNA, 201 bp, Homo sapiens
cgggattcacctgggatagtctgacattacttaaccccaacttgtccttcagatctcaggagagtcttccctgagttgccttgtgaaactctttcctagcrctccatcatctccctggcttgattatgcacttcgtgcggccagagaatatgtctggggtttgtctccactgtatcctcaaggcctacaatgacctggcac

SEQ ID NO: 281519 - DNA, 201 bp, Homo sapiens
aaggtgtaaattagttagctaaatgtttagggaaaaaatagtctccttatatcatgggccttaataaattccagatggtctaaagagttcattttttttttaatgaaaatatgaaaggaatagaggaaaatatagttgactgttttttggggggatggggttttgctaaggatttactaagcataaaagcagtaaaacaca

SEQ ID NO: 281520 - DNA, 201 bp, Homo sapiens
ttatagctcaaagctatcattcattcaaaattaaggattacaaggatgtgttttcatatattgttttgtattatgctacatttcactttttattggaaataatatttatcttgtaattttctctttgagaataagtatattttggtaaaattcctcttcagttcactttgtgagaaattcaaatttaataggcagtaattg

SEQ ID NO: 281521 - DNA, 201 bp, Homo sapiens
accccaacttgtccttcagatctcaggagagtcttccctgagttgccttgtgaaactctttcctagcactccatcatctccctggcttgattatgcacttygtgcggccagagaatatgtctggggtttgtctccactgtatcctcaaggcctacaatgacctggcacataaggaccccgtaaatgtttgttaagtgaata

SEQ ID NO: 281522 - DNA, 201 bp, Homo sapiens
ggaagtgtgtttcaggggggagaagtcaagctggaattttatcatttgttttccaatgagtattaaaaacatttgtctttaaggtttatgtgagaatatcwtatactggaaatgtgatttcatattattttgaaatcagagttcagattcataaaatcaatatttaatgggaaacatgaaattgtaattactaagcacttt

SEQ ID NO: 281523 - DNA, 201 bp, Homo sapiens
tctgaattgctaatttttatagatattattttaacagctgtccatttgtaatttatgtcagggtgtttccagggcttttttttttttttttttttttttttgacagagtcttgctctgtcacccagccttgagtgcagtggcacgatcttggctcactgcaacctccgtctcgcaggttcaagcaattctcctacctcagc

SEQ ID NO: 281524 - DNA, 201 bp, Homo sapiens
aagaataaataaaggtgtaaattagttagctaaatgtttagggaaaaaatagtctccttatatcatgggccttaataaattccagatggtctaaagagttyattttttttttaatgaaaatatgaaaggaatagaggaaaatatagttgactgttttttggggggatggggttttgctaaggatttactaagcataaaagc

SEQ ID NO: 281525 - DNA, 201 bp, Homo sapiens
aaattgtaattactaagcactttttcggtgtgcttactatttttatatgtaaatatatatataaatatatatatacttcattttatgaaccatctatatgkttcataaaatgaaactatactggcaaaatatataaaattctaatttttgcatataatatttttccagtatataaaccatgtatatatggatatggttcat

SEQ ID NO: 281526 - DNA, 201 bp, Homo sapiens
atctgaattgctaatttttatagatattattttaacagctgtccatttgtaatttatgtcagggtgtttccagggcttttttttttttttttttttttttttgacagagtcttgctctgtcacccagccttgagtgcagtggcacgatcttggctcactgcaacctccgtctcgcaggttcaagcaattctcctacctcag

SEQ ID NO: 281527 - DNA, 201 bp, Homo sapiens
taaaacttgaatcaatttcatgagggttttgctaaacatttccctctgttcagcctgagacttctaccagttcttaaatctcaagcaatattagcatattmttttaaaatgtcaatgttttttcatttcaaaaaaaaactcttgtcagtgtctgacttctgttgacatacagtagcttatttgtggcctccattatggtat

SEQ ID NO: 281528 - DNA, 201 bp, Homo sapiens
accatccttttctttctttctttctttctttctttctttctttctttctttctttctttctttctttctttctttctttttctttctttctttctttcttyccttctttccttctttccttctttctttctttctttctttttctttctcttgtttcttttcattctttctttcttttttctggagacagggtctcactct

SEQ ID NO: 281529 - DNA, 201 bp, Homo sapiens
cctttcagggaatctttcagctgctccatcaccatccttttctttctttctttctttctttctttctttctttctttctttctttctttctttctttctttctttctttttctttctttctttctttctttccttctttccttctttccttctttctttctttctttctttttctttctcttgtttcttttcattctttct

SEQ ID NO: 281530 - DNA, 201 bp, Homo sapiens
tcaacagagcatgcactctctaaaatggcccagccctgtgtgtgcctggccagtggagcaggatgctgggaggcaaaaaataagttttctcatgaaatctrtgaattctcttcatcttctcaaggcgtgcctgtgtaattcaatcatgaattttacttaaactgtgtggcatttgatagagccttgcagagactacaagac

SEQ ID NO: 281531 - DNA, 201 bp, Homo sapiens
taccatgtgagatttcagaaaatcagggttagagagagaaatgttaaagagcacacaatcttctctgatgttaaaacacacacacacacacacacacatasacagacacacatcacctgcaagttattgagaacattattagcaacaaattccttgtaagctagaaaacagcaaagcaaaaagttacttgaggaattactt

SEQ ID NO: 281532 - DNA, 201 bp, Homo sapiens
cacctctggaggctgcacacagggaggagaggtggaaggaagagctgctggctgagaagctgctgtcatcatcctgtgggggtgaagagggggtgtgggartaagggtgagagaggcctcaggaaggactctctggaactggaggcagtgactggagtttcctctgagaccagccggccctttagactcaaaagatgagag

SEQ ID NO: 281533 - DNA, 201 bp, Homo sapiens
gggattataggcgtaagccaccgcgcctggcctggagatgtgatccttcatactaaaagtacactgggagtactgaacagattaaacaaatttaaatattyacacaagtattttagagtgaaactgaagatatcaaggaaaaggaagcaaagcagatgaccaatgaaggaatcatagttaggctcatagcagacttcttgt

SEQ ID NO: 281534 - DNA, 201 bp, Homo sapiens
ttaattaaatgtaagtgattctttgatttcttggtgaggaaataatgtttacaatctttgacccatttcaatgctagaaaaaaaaatcatacaggtacatraaaactattataaggatgttcctcacaggatagtttaccattgcacaataaaaagacaactgtaaaaatagaagaatagctaaatacattttgatatacc

SEQ ID NO: 281535 - DNA, 201 bp, Homo sapiens
gttgtatgaccattgaatgcttgaattatagctcaaagctatcattcattcaaaattaaggattacaaggatgtgttttcatatattgttttgtattatgytacatttcactttttattggaaataatatttatcttgtaattttctctttgagaataagtatattttggtaaaattcctcttcagttcactttgtgagaa

SEQ ID NO: 281536 - DNA, 201 bp, Homo sapiens
tggctgctaaaggatgtaataggtagtttcatttgcctttggtcctgagcaatctgaacaacagaattccaaaagtcccattcatatagagagatgcccgwgcgcttcctaccgctcagatacggtcatggtttccttttaatggtggtaatggcaccaaaagtagatgtttgattttttaatattcttccacatatatgt

SEQ ID NO: 281537 - DNA, 201 bp, Homo sapiens
tcaggatctacattattcatgcatcgttgtttaacgtccttctagcagcaaggatgtgtgctggcagaccacctccactttcacttagaaaattgccagcyagtgctcctgccttctaagtgattactttgctttgctcgaagtatctatatgaagataaatcttttgctaggtagcaattcctcaagcactgtccccccc

SEQ ID NO: 281538 - DNA, 201 bp, Homo sapiens
ataaaaaggggagaaaaattctgtctttaaaactcagtatcgtaaaaggtcatttgattataagtgaaaatgacaataaaatggtgaggatttctggaatragtttcccagaatagagagtacctctctttttaaggctattcacatttggagaggaaattgaaagttgatgtaattttccaacagcattcagaatacggg

SEQ ID NO: 281539 - DNA, 201 bp, Homo sapiens
gatctgaattgctaatttttatagatattattttaacagctgtccatttgtaatttatgtcagggtgtttccagggcttttttttttttttttttttttttttgacagagtcttgctctgtcacccagccttgagtgcagtggcacgatcttggctcactgcaacctccgtctcgcaggttcaagcaattctcctacctca

SEQ ID NO: 281540 - DNA, 201 bp, Homo sapiens
ttctactcagctttctttccttccttcagaaccctgttcagggtgtgaaggacaagttaagccatctccgtctctctcatactgcagcccacctgttcttyaggtcataaccacagactcacatctttaaagaaagttagcaaatcaactcagaacccttacatgggtctttctctcctgctgtctcatcaatcagagcaa

SEQ ID NO: 281541 - DNA, 201 bp, Homo sapiens
tcattaatttcataaatcagcatatgccttttacttttatgtgcaaagcccaggtgttaaagctcgagtaactctttgtttggaatggtgggtttcgtatytggcccatcccaaatgggcttattgtgcctcacaatatttctttccttccctaagtcctttggtccttcatctttatcaaggactcacagtctctcttgg

SEQ ID NO: 281542 - DNA, 201 bp, Homo sapiens
atgtcagttccatcccaacctgccctcccttcccgcagaggccctctcctctttccacccagagctctttaagctccatcgcagcctgccctcccttcccscagaggccctctcctctttccacccagagctctttaagctctatcccagcctgccctcccttcccccagaggccctctcctctttccaccaagaaagctc

SEQ ID NO: 281543 - DNA, 201 bp, Homo sapiens
cttaaacttttcatagtccttcagatcatttggcactttggaaattttaaatttcctctgctgtgtcttgaaaagtggtgaatgattggaacacccagatyatgaaggaggttagaacacaggttttataacttcaaaacatttttcacattcttatctctactgaaaaactttatggagcctgtgaatagaggctttaac

SEQ ID NO: 281544 - DNA, 201 bp, Homo sapiens
tttatatatataataaaataagaaaattagcaaaaattatttccaatatgaatattatttagtggttattgactcttatttacaatttagtaatgcttttyttttttgagacagtctcactctgtcacccaggctggagtgcagtgacacaatcttggttcactgcagcctccacctaccaggttcaagcgattctcctgc

SEQ ID NO: 281545 - DNA, 201 bp, Homo sapiens
ctctctgagaggtagagcctcagagctcacaccctgggaggccagctccttgttctgtaggactcccagaacattatctgcgatttctgtcaacctgttcytccctagatcacttggcccaagggagagaaccactagaccttttcctagggacccaaacagcttctgaaatctgatcttgtccttctttatccttatcct

SEQ ID NO: 281546 - DNA, 201 bp, Homo sapiens
ccttttttgtctttttcttctttttttgagacaggatcttcctctgttgcctaggttggagtgcagtggttgggatctcagctcgctgcagcctctacctyccaggttcaaaccatcctcctccctcagtctcccaagtagctgggactacaggcacaagccaccacgcctgactaatttttgtaattttttttttgtaga

SEQ ID NO: 281547 - DNA, 201 bp, Homo sapiens
cactccagcctgggtgacacagcgagggtctatttcaaaacataaaataaaataaattggaatactctatctatgcgtcttttatgtggcaccttgtgtgsctttcctgagttcaaataagccactgaaaaaatacctcagtgaaagtttcaatccatgagttgtttcttttcatctcaaggctgcttatcagaggacata

SEQ ID NO: 281548 - DNA, 201 bp, Homo sapiens
cccccaaaagagggagagttactttgtcaaagcctagaaaatacctctcttatgagtctggtcagttcctccattagctgcagagagtgagaagcattagyccctttactgatacattggatagacaactggaaaaatacatctgattaagcctctgccacattgcctaattggaatggagagaggcaacactgctctcat

SEQ ID NO: 281549 - DNA, 201 bp, Homo sapiens
gacagcctaatattttggagttgatgttcttgaatccagtaagatcattcttattttatatatataataaaataagaaaattagcaaaaattatttccaayatgaatattatttagtggttattgactcttatttacaatttagtaatgcttttcttttttgagacagtctcactctgtcacccaggctggagtgcagtga

SEQ ID NO: 281550 - DNA, 201 bp, Homo sapiens
ttcaatccatgagttgtttcttttcatctcaaggctgcttatcagaggacataaaacagcattaactgtgacagaagaaaaggacgaaggccgagcaggcycatatccctgcgtaagtcctgaaccatgcttcgttaaagtctgtactttgaagagtttcaggccttgttgttaatcaataactctagccatgtagtgtgc

SEQ ID NO: 281551 - DNA, 201 bp, Homo sapiens
gcagaggttacagcgagccgagatcgtgccactgcactccagcctgggcgacagagcgagacttcatctcaaaaaacaaacaaacaaaaaggcatttccayttttattttcccaataattttaaagccagtttgtttattaaggatttacttaactcatatgaaaaagaaacgaaataattaaagtaaagttggcattatg

SEQ ID NO: 281552 - DNA, 201 bp, Homo sapiens
gctggccctttgatcttggacttccccacctccagaatgatgagaagtaaatatctgttgtgtaagccacccggtctatggtattttgttatagcagcccrtgctgactaagacactgtccctcactggcaactaatcatcaccttgtactcgagcgaggcctgaagtgcagatgggcttgtcaggaaactcctgtcacca

SEQ ID NO: 281553 - DNA, 201 bp, Homo sapiens
gttgcctcagggctctgcaagttgtagtaacttaatcatcttagcagctcccaatatagcatatagctacctaatccttttttttttttttttttttttttgagatggagtctcgctctgtcgcccaggctggagtgcagtggcaggatctcggctcactgcaagctccgcctcccgggttcacaccattctcctgcctca

SEQ ID NO: 281554 - DNA, 201 bp, Homo sapiens
gaatcttgtgaaaatgcagtaggtctggagaggggcccaagatttggcatttctgacacgcttccaggttattttaatgcctggtccctgtttctcacttyacacagcaaagttttagagcaccttagagatctcaaataactttgtgcagaaatttcttactggattagtggagccagtaaggacttgcaatgccattgg

SEQ ID NO: 281555 - DNA, 201 bp, Homo sapiens
catatgaaaaagaaacgaaataattaaagtaaagttggcattatgtctcacttatccagaaattctttatctgccatcctgccatcagacacatagccatraactcagaagtagtgtaaaggaccagaaagccactacggtagatgccacagatattaaatatccaacatcgcaagctgtgcttacaacagggagagcaac

SEQ ID NO: 281556 - DNA, 201 bp, Homo sapiens
gatccccacagtagtttggtacatagttgccatgcacataattactgcatggctattattaggaaaattgtgtgggtaaaatccatcctgctatttggctstgtttgaaccttgatgcccatctgctaagcaatgtggggtcaaaataagtaccagggtagttctggccttggcctttttggatgtgggctcaactctctt

SEQ ID NO: 281557 - DNA, 201 bp, Homo sapiens
ggtaactcagtttgctataacttagagcaagcctagttcccagtcccccaccccaccccacaccctattttcgttggagttttacttttattttacttttwaaatttttttaaaatttttttgagactgagtctcacactgtcgtccaggctggagtatagtggtatgatctcggctcactgcaacctccacctcctgggt

SEQ ID NO: 281558 - DNA, 201 bp, Homo sapiens
tttctgacacgcttccaggttattttaatgcctggtccctgtttctcacttcacacagcaaagttttagagcaccttagagatctcaaataactttgtgcrgaaatttcttactggattagtggagccagtaaggacttgcaatgccattggcttttatgggcccctcagcttgccaatcattagggaaattgcccaactg

SEQ ID NO: 281559 - DNA, 201 bp, Homo sapiens
aaggacacttcccatctcaactagagtgtgtcatcagtgattcatgctagacatgagcatggaatgggagaatgatggtatctggccatctgccactttcmaatccattaagcctcactaaaaagtcttgtttgactcctctggttctggctcagatttttttacaaggttggaaaaaagccttttacaaggaagagtgta

SEQ ID NO: 281560 - DNA, 201 bp, Homo sapiens
gctgccatgtgagatgtgcctttcaccttcagccatgatcgtgaggcctccttagccatgtggaactgtgactccgtcaaacctctttcttttgtaaattrcccagtcttgggtatgtctttatcagcagtgtgaaaatggactaatacacaaaactaccacaagttcctaagaaagattacatttttttccccttttaat

SEQ ID NO: 281561 - DNA, 201 bp, Homo sapiens
cttcacacagcaaagttttagagcaccttagagatctcaaataactttgtgcagaaatttcttactggattagtggagccagtaaggacttgcaatgccaktggcttttatgggcccctcagcttgccaatcattagggaaattgcccaactggaaactaatagcttaagcaaggaaaatcccgtccctggccaggacagc

SEQ ID NO: 281562 - DNA, 201 bp, Homo sapiens
atttttttttctttctttgtatagttctgtatatttaaaagtaatccaggaaatgattaagggtagctatttatttaattccaaattttcagtgatctttragaaaatgcatacatgcatactttctatattgtttaattagtgcatgtatctgcactctgttttttcaagccattttgtacacacatgcttagagaaaac

SEQ ID NO: 281563 - DNA, 201 bp, Homo sapiens
attaagtattatgccttttaggcattatttgatttgatttaagaaacattgaaaccatttttagaagcttatcaggataatttcagtgctttttttttttyttttttttttgagatggagtctcgctctattgccaggctggagtgtagtggcgcgatcttggctcactgcaacctccgcctcccggattcaagcaattct

SEQ ID NO: 281564 - DNA, 201 bp, Homo sapiens
aaaatattaagtctactagaaaatataagagttttattgactattgtctttaaatttttttaaaattatggaacagtttaaatgtacaaaaatgaaagtayaggttacaaagccctatatacattaatcttctagctgcactggttaccaacttatggtgctaggggctaaatgtgtctccccaagattcatatgttgaag

SEQ ID NO: 281565 - DNA, 201 bp, Homo sapiens
tttacagataagggagctggattttagagggacaggctaacttgccaaaggtcacacactaagtaagcattggacttgggattccagcccagggctgtgtrtgtagctccagtgctcatgtttttaaccatttcaaaattactaatttaagtagaaatacaataattttctaccttatttctaaatttttgcacttttaaa

SEQ ID NO: 281566 - DNA, 201 bp, Homo sapiens
gtccacaccccccctttgccatttatatgagataaaatataactgtttcattttcatgtctgtaaaaatcttttcggcctttccaggaacccatctggatkcatttacacgatgcactttccatcatttcaaaatttattaaattttatagcaccttccatgttatgggcgctcaataaattgccatcaccaagttaaatg

SEQ ID NO: 281567 - DNA, 201 bp, Homo sapiens
gaaatttactcctgtattagtccattcctgcattgctataaagaaatacccgagactgggtaatttaaaaaattccacaggctgtataggaagcatgatasaggcatctactcagcttctggggaggcttcaggaaactttcaatcatggtggaaggcagagaggaagcaggcgcatcttacgtggccagagcaggaacaa

SEQ ID NO: 281568 - DNA, 201 bp, Homo sapiens
taatgacacagtttgcattgatgatgaagtccccagaacagagggcaggaggagccacctgtatgaggagtgtgtggggaggagctgtcctttacagcccrctgtaaggatcatgctgtacaaataaacctaactgtgtgggtggtcctttctctgcccccttctgcttttagagacttagaagagctgccaaagtaccta

SEQ ID NO: 281569 - DNA, 201 bp, Homo sapiens
gctctgtaagctcttaaccctgcagctgacccagtcagcttctggctgtactaggggttgatgcggttcactgtggttgtttgtagacctcagaaaagcaygatgattatttacagatttccagaatctctactggattctttgcttttcctttctcacaaggaaactttccaggatacagagcacaacaggatctgaatg

SEQ ID NO: 281570 - DNA, 201 bp, Homo sapiens
tctagttagccatttgtctaatcttttttcaaggtttttagcttctttgcgatgggttcgagcatcctcctttagctcggagaagtttgttattactgatygtctgaagccttcttctctcaactcgccaaagtcattctccgtccagctttgttccgttgctaccaaggagctgcattcctctggaggagaagaggcact

SEQ ID NO: 281571 - DNA, 201 bp, Homo sapiens
tgtgcctggccagtggagcaggatgctgggaggcaaaaaataagttttctcatgaaatctgtgaattctcttcatcttctcaaggcgtgcctgtgtaattmaatcatgaattttacttaaactgtgtggcatttgatagagccttgcagagactacaagacatctgactgctgtattttctcttctaggatatcaatgagt

SEQ ID NO: 281572 - DNA, 201 bp, Homo sapiens
agtgcttactgtgatgccttatgtacagtagatgccttaattcataatgtaattaaagaatcttggcattcattggttggagattccagtttgaattgttkaaacacaatgagtgaatcattttgaactaccctaaattaagaatctctgaaataaaattgcagtagaccatatcgtggcatgatagaactatggccaatg

SEQ ID NO: 281573 - DNA, 201 bp, Homo sapiens
tcacttgaggtcaggagttcaagaccagcctgatcaacatggtgaaaccctgtctctactaaaaatataaaaattagctgggcatggtggtgagcacctgyaatcccagctactcgggaggccgaggcaggagaatcgtctgaaccttggagacggaggttgcagtgagccgagatcatgccaatgcactccagcctgggt

SEQ ID NO: 281574 - DNA, 201 bp, Homo sapiens
atgcctgataatgacattatagaccgaattacagcaacttaaatttctttctagcaaatgatgccatgttttttaaaagatacttttggcacttagaaaayagatcatagtatttaatgctattgaatatagtatttaatgtatttaatataatattgaatatagtatttaatagaacatagtatttaatgctattgtaca

SEQ ID NO: 281575 - DNA, 201 bp, Homo sapiens
agagagagatcctgttgccacacaacagagggacatgagagcaacaaagaaaaacagtaaggaagtctgctgtctctcaaacaatgtgcccctatttctayaggaaacttctcagcctaactaaccgttaggctaacaatatgatacagtttggctgtgtccctaccaaaatctcatcttgaattgtagctcccataattc

SEQ ID NO: 281576 - DNA, 201 bp, Homo sapiens
tgtgtatgttgacgtttccttttactgggaactccttacatccctctcttctgggtccaggatcagccatagaattggagagggttgagcggccctggctstagaggaaagaagactccagaagctggagaagaattcgggatctgacaggaagttcaaggtgacctctgggagccttctgagaagaaaaagggcatgcaa

SEQ ID NO: 281577 - DNA, 201 bp, Homo sapiens
ttacccgaaactcgattctacctttgataaatgaaatatggcagtggtccccaacctttttggcaccagggaccagttgtgtggaagataatttttccatrgattggggggtgggtggggaggatggtttcaggatgaaactgttccacctcagatggtcaggcattagattctcacagggaacgtgcaaccattaatata

SEQ ID NO: 281578 - DNA, 201 bp, Homo sapiens
gtagccagaagcaagctgaacattaaaactttgggactctgaccacagtattgaacattatggctgaccatcatggggttaaaaggttaggaagagagtgraccagtagccatatatttttagcctgcttagaattatagttgcctttggaaatttttggtaaactcccatagatcaggattagaataaaggccataaata

SEQ ID NO: 281579 - DNA, 201 bp, Homo sapiens
actacagaaagttatttctcacagttctggagggtggaaggtcaaaaggtcaagatgctggccgattcagtgtctggtgactgcctgattcctggttcacwgatggtgccttctcacatggtggagggggcatggcaattctctggggtctttttttataagagcactaatcccgtttatgcctcaggacctaatcacttc

SEQ ID NO: 281580 - DNA, 201 bp, Homo sapiens
ttttcttaaacggtctgctggacccatatggtagttgcaaggtagaatgagttttattctctttctttttttaaaaaaaagtattttctctttttctttgkaatatctctaagaaagaataaagttataaaatattaatccatacaaatagctagaactgcttcaaatttataaaacctaaaaaactaaaagtgggtccaa

SEQ ID NO: 281581 - DNA, 201 bp, Homo sapiens
gaataggaggctaggaacaaggcaggaatgaaaacaatcagaagcaagaagccaaatggaagaacaggattcgtcatcaaggtcttttaacatgggatccyatggagttgataaaaggaaaaaaaaatcatacctcaattagtcataatatttcaaggcagaaaagaaacatagaggttatctcatctcagccagtcattt

SEQ ID NO: 281582 - DNA, 201 bp, Homo sapiens
agatggtgccttctcacatggtggagggggcatggcaattctctggggtctttttttataagagcactaatcccgtttatgcctcaggacctaatcacttycccaaagtcccacctcttatactatcacattagggattagcttccggcatatgaattttgggaagacacaaacattcaaatgatagcagattaaattgga

SEQ ID NO: 281583 - DNA, 201 bp, Homo sapiens
caccgtgtgacaggcacattttccaccatttgggaaacatcattgaatagaatgagaattcctactgccatgacactaacactgcagtgacatccgtagckccaaaactcttgatcttcatcatgtgctttcattcatcagacgtgtattcgttcagccaaacagacatgagcatctactttatgccaagctcagtggtga

SEQ ID NO: 281584 - DNA, 201 bp, Homo sapiens
atagggacagaataatagctaaaattgattgagtacttactgcgtgccacacactgttttgggtagtttacatttaaacatcacaggccataatattggcrttattactagccattttacggatggataaactaaggcacagagaggttaagtaatttgccgaaagggatgctgcaggtaagagctagaactgggatttgc

SEQ ID NO: 281585 - DNA, 201 bp, Homo sapiens
tatgtgtccaggaatttatccatttcttctagattttctagtttatttgcgtagaggtgtttatagtattctctgatggtagtttgtatttctgtgggatyggtgatgatatcccctttatcattttttattgtgtctatttgattcttctctcttttcttctttattagtcttgctagcggtctatcaattttgttgatc

SEQ ID NO: 281586 - DNA, 201 bp, Homo sapiens
ctaatacttcttacatttgcaaaagtaatcacgactgtgactcgaatcggactggaaaatctattgacttagagatagaaagatattaggaatctcttacrttactttttcttattcacctactgacaacttatacagactttgtaacttttctgatgaaagggtatccaggtggataattacgtattttatgctcttaaa

SEQ ID NO: 281587 - DNA, 201 bp, Homo sapiens
tgcagtgacatccgtagctccaaaactcttgatcttcatcatgtgctttcattcatcagacgtgtattcgttcagccaaacagacatgagcatctactttrtgccaagctcagtggtgagggctacagcttcaaaaacagaatatggactatgctctcgaggaattgtctaaggagagaggcacacacagctagggttcta

SEQ ID NO: 281588 - DNA, 201 bp, Homo sapiens
aaacatcacaggccataatattggcgttattactagccattttacggatggataaactaaggcacagagaggttaagtaatttgccgaaagggatgctgcrggtaagagctagaactgggatttgcactctggcactatgctgtattgtaatagatccaccgtaacacatatcctcccgtgagtatattttgcaaattgtg

SEQ ID NO: 281589 - DNA, 201 bp, Homo sapiens
gattacgtttattgatttgcatatgttgaaccagccttgcatcccagggatgaagcccacttgatcatagtggataagctttttgaggtgctgttggattyggtttgccagtattttattgaggatttttgcattgatgttcatcagggatattggtctaaaattctctgtttttgttgtgtctctgcccggctttggtat

SEQ ID NO: 281590 - DNA, 201 bp, Homo sapiens
taaattaaataacctaaccagtaaaaagtgctaatagagctgatgtaatgtatttacagctcttacttacctggctcttaaatgacttgggtgtgtttgtrtttgtgggtaagtgggtatatgtgcacatgtggacacacactgagagtggtgtgtttccccacatctgtctacatcaccagagaggtagagataatttcc

SEQ ID NO: 281591 - DNA, 201 bp, Homo sapiens
gagaggttaagtaatttgccgaaagggatgctgcaggtaagagctagaactgggatttgcactctggcactatgctgtattgtaatagatccaccgtaacrcatatcctcccgtgagtatattttgcaaattgtgaagggaagcaaggggagggagaatggggcattggctctaagttgcttcattatagagagtgaaacg

SEQ ID NO: 281592 - DNA, 201 bp, Homo sapiens
gttactgtagccttgtcatttagtttgaagtcaggtagaatgatgcctccagctttgttcttttggcttaggattgtcttggcaatgcaggctcttttttsgttccacatgaactttaaagtagtttttttccaattctgtgaagaaagtcattggtagcttaatggggatggcattgaatctacaaattaccttgggcag

SEQ ID NO: 281593 - DNA, 201 bp, Homo sapiens
actatttgtctgcaagcaattttcgtgtcacttataaataatcaaaaaacggaatccatgttaggtttaaagaaaggatttaggaatctgagcacggcttwgactgatacaaggagataacagaaaaagctgaaatagaggaaggaaatgagagtggaggactaataatagcaggaaaatttgaagatatagttaatgttc

SEQ ID NO: 281594 - DNA, 201 bp, Homo sapiens
tatgatgatccaaactcataatgggtgttccccatcaatattggttgaatctgagtctctgtttctcctggcacaaaatagcactcctgtttctgaccgcracataaccctctggcaatgtcattaaccttattaaatttggcagctctgtggaaaacgaaggtcaaaaaagctgtcattgtttatataaactgttcattt

SEQ ID NO: 281595 - DNA, 201 bp, Homo sapiens
gctagaactgggatttgcactctggcactatgctgtattgtaatagatccaccgtaacacatatcctcccgtgagtatattttgcaaattgtgaagggaarcaaggggagggagaatggggcattggctctaagttgcttcattatagagagtgaaacggggagaagagattgtctggggttcacagtgttagtgcagaca

SEQ ID NO: 281596 - DNA, 201 bp, Homo sapiens
ctcagaatgatcgtttccagcttcatccatgtctctacaaaggacgtgaactcatcctttttttatggctgcatagtattccatggtgtatatgtgccacrtttttttaatccagcctatcattgatggacatttgggttggttccaagtctttgctgttgtgaatagtgccgcaataaacatacgtgtgcatgtgtcttt

SEQ ID NO: 281597 - DNA, 201 bp, Homo sapiens
tcattgcagcctccaccgcctggattcaagcgattctgcctcaacctcctaagtagctgggattgcacgcatgcaccaccacgcccagttaatttttgtakttttagtagagacagggtttcgccatgttggccaggctggtcttgaattcctgacctcaggtgatccacctgcctcggcctcccaaaagaatattaattg

SEQ ID NO: 281598 - DNA, 201 bp, Homo sapiens
agagaacgctcatggagtgaggtcttcacttcttcatggttaatccgacagtatgtgctcacctaacgagggcttcttcccttcccaaggaatgctactartaagtatagatttttaaagcataattgttttgtggctgaaataacaacaattatttgaaaaaaaatcctaacaacttcctctagagctgctattatggca

SEQ ID NO: 281599 - DNA, 201 bp, Homo sapiens
gatgctaatagtatattgagggttaagatatattactgatatctacacttacatacaaaagcatttttatatataaaatattatgtttgcatataaagtaytagtattcaaaattccgttgtaaaatgggttcattagaaggcggcttacaattattatgctgatccagcaatctccaaatgaatgagaagtagtaatatg

SEQ ID NO: 281600 - DNA, 201 bp, Homo sapiens
tacgtattacgacactgtactcaaaatctgaggcctgcacaacctgggaagcggtgtgctcaaacgcaaggtgctggggctatgtgggggcaggggtcagyttcagggtagggctgaggcatctcccacaggggatgtgactcaaaactgctctcagaagtggaggacatgaaggagcggcagaaaggaggacgggagctc

SEQ ID NO: 281601 - DNA, 201 bp, Homo sapiens
agatagagggtgggtctgcctctccagtccactgactcaaatggcaacaccctcacagacatacccaggaacaacatttgcatctttctttttttttttttaattatactttaagttctagggtacatgtgcacaatgtgcaggtttgttacatatgtattcatgtgctatattggtgcgctgcacccattaactcgtcat

SEQ ID NO: 281602 - DNA, 201 bp, Homo sapiens
ctgcaatgatagaaaaatagtataagcatgttttttaaaattgtggaacctgaccaggcgcagtggctcatgcctgtaatctcagcactttgtgaggccarggcggacggattgctcgagttcgggagttggagaccagcctgggcaacacggcgaaatctgtctctccaaaatatacaaaaattagccaggcatggtggc

SEQ ID NO: 281603 - DNA, 201 bp, Homo sapiens
tctacacttacatacaaaagcatttttatatataaaatattatgtttgcatataaagtactagtattcaaaattccgttgtaaaatgggttcattagaagrcggcttacaattattatgctgatccagcaatctccaaatgaatgagaagtagtaatatgaactgagataatatttgtatagtgctttgcagtgtctggca

SEQ ID NO: 281604 - DNA, 201 bp, Homo sapiens
ctgcacaacctgggaagcggtgtgctcaaacgcaaggtgctggggctatgtgggggcaggggtcagcttcagggtagggctgaggcatctcccacaggggmtgtgactcaaaactgctctcagaagtggaggacatgaaggagcggcagaaaggaggacgggagctcagatgggtggcaagttctagggcctaaggttgcc

SEQ ID NO: 281605 - DNA, 201 bp, Homo sapiens
acacatttcctcctttgtatgttggtgatcaattctaactttttacaacctagtcaaattgcttacagctgaaaaatatggggttttgttttgttttgttkcgttttgagacggagtttcactctgtcacccaggctggagtgcagtaacgcgatcttggctcactacaacctccacctcctgggttcaagcgattctccc

SEQ ID NO: 281606 - DNA, 201 bp, Homo sapiens
cacattttaaaaataaaacaatttattaccatttagttacatcttacaggaaaacccttagataccagtaggtaaccattagatttttctaggtgaaagtmaatcatttctgaggaagcattctctttaccaaagcagcattatttccaataaggaagccactcattcatttagtccttggtttattaaacagttactgag

SEQ ID NO: 281607 - DNA, 201 bp, Homo sapiens
gaggcctcctaaaagttttccatctcttgattgaaacacacacagaatctatactctcagacgtgcacacacagcacatacggcaaatcttcatgatcttrtagtaagtatgaaagacccaactccatgcagagtatttaagataagcccaataagcctggtctccctggtgaggatttctgaccaaacagaagaaatgtt

SEQ ID NO: 281608 - DNA, 201 bp, Homo sapiens
ctacacttacatacaaaagcatttttatatataaaatattatgtttgcatataaagtactagtattcaaaattccgttgtaaaatgggttcattagaaggmggcttacaattattatgctgatccagcaatctccaaatgaatgagaagtagtaatatgaactgagataatatttgtatagtgctttgcagtgtctggcag

SEQ ID NO: 281609 - DNA, 201 bp, Homo sapiens
ggctatgtgggggcaggggtcagcttcagggtagggctgaggcatctcccacaggggatgtgactcaaaactgctctcagaagtggaggacatgaaggagyggcagaaaggaggacgggagctcagatgggtggcaagttctagggcctaaggttgccctcagcttcctgggctaagatccgccaggtagaccgtggaact

SEQ ID NO: 281610 - DNA, 201 bp, Homo sapiens
tgcttgaacctgggaggtggaggttgcagtgagccgagatcgcaccactgcactccagcctggtgacagagtgagactccatctcaaaaaaaaaaaaaaaatgattacactattctaataggtttgaaagttttgagaaactttcaaactctgtttcttatacacagagagagagacatatgacaagaaattgattacagg

SEQ ID NO: 281611 - DNA, 201 bp, Homo sapiens
aggagaagtgggtggttatagatttccactcaatttggaaattaacagcctgtggtgtagcaaaaaggtgcaaggctgagaatcagaaagcccactttccrgtgcttggactgaaatgtcctggctgtacagccttgagctggtcttgtgacctctggggcccttggtatctgtaagtaaaatgggtactgggaagattga

SEQ ID NO: 281612 - DNA, 201 bp, Homo sapiens
gaggtgacgttgatgctgctacacctatggttttcaaatcacactgtgaggcagagtcacttgggaagattttgcaactaccaatgcttggatcccaccaraaatggattatcagcttctctgatatcagcttctcctccaacatttggaggatcccaaatgtggtatttttgaagaagtttcccagatgatgctatggta

SEQ ID NO: 281613 - DNA, 201 bp, Homo sapiens
gagaaataggaacacttttacactgttggtgggactgtaaactagttcaacccttgtggaagtcagtgtggcgattcctcagggatctagaactagaaatrccatttgacccagccatcccattactgggtatatacccaaaggactacaaatcatgctgctataaagacacatgcacacgtatgtttattgcggcactat

SEQ ID NO: 281614 - DNA, 201 bp, Homo sapiens
gaaaaaaatggtgtttgacgttgatggaaattcaaaaatatatatggaactgaaacattaacttagctaaaataaaagcaatctgtgtttgagatgaagcrttccttaacttattcatcacccatataaataaataaatataaataagttgacatatttcttccatcctgttgacagctggaaataaaagtgcctgcagtt

SEQ ID NO: 281615 - DNA, 201 bp, Homo sapiens
taatggctggggtaaatatcacacccagcacaaattcattagctgcaagacggtggcttctacatagctatttgtgtttgtggtgaaccttccttatcatkgcatgtcttaagcttggctaagtatttgcaagcgttctgtcaccataacataatgttcttcaacagagtggctaagaaaagcaaataccactacctctcc

SEQ ID NO: 281616 - DNA, 201 bp, Homo sapiens
ggaaccactggagccaggtttctcccagaccctcagccccatgtgaatccaaaccctgtttcaaaaggaatgtccatgggaaaatggggtttgatttacaygttcagttttcaggctacatttgctagaatgcacctcttttgtatgtgcaagaatgccaataggtgctctgaaagctgaattctttagctattcgtcata

SEQ ID NO: 281617 - DNA, 201 bp, Homo sapiens
gggagtcactaaagccgaggggagccctccagctcactgctccgacaacttagagggcaagtgccgaaacagaagtggctggtgttgactgcatgtttacsgtggctgccaactgaggggctgcccctgatgaggccgagtgagtgaggcccacactgcatgtggctgggaaaggtttcaaaccatgacttcttacctttg

SEQ ID NO: 281618 - DNA, 201 bp, Homo sapiens
ggcaatcattaaaaagttaggaaacaacaggtgctggagaggatgtggagaaataggaacacttttacactgttggtgggactgtaaactagttcaacccwtgtggaagtcagtgtggcgattcctcagggatctagaactagaaataccatttgacccagccatcccattactgggtatatacccaaaggactacaaatc

SEQ ID NO: 281619 - DNA, 201 bp, Homo sapiens
gtgccgaaacagaagtggctggtgttgactgcatgtttacggtggctgccaactgaggggctgcccctgatgaggccgagtgagtgaggcccacactgcaygtggctgggaaaggtttcaaaccatgacttcttacctttgttcaaaccagatgcaaggaatccgaggatgatgtctgggtactgatttaattagcagcaa

SEQ ID NO: 281620 - DNA, 201 bp, Homo sapiens
tggcaatcattaaaaagttaggaaacaacaggtgctggagaggatgtggagaaataggaacacttttacactgttggtgggactgtaaactagttcaaccmttgtggaagtcagtgtggcgattcctcagggatctagaactagaaataccatttgacccagccatcccattactgggtatatacccaaaggactacaaat

SEQ ID NO: 281621 - DNA, 201 bp, Homo sapiens
ctcagttaatttgttgtgtagacaagaaggggctttccaacccatcctttctcatctgtgttttgagggagagtcagatggtcatatgcacacatctgttrtatgtaactgtcttacaccaatcattattttatttacaagatctagctatttgagagagattgcaaaaactggttttagctgcttgtgtttcaagtcaga

SEQ ID NO: 281622 - DNA, 201 bp, Homo sapiens
caccgacggtacttcctctcccactgccgagtgctccacttgaccgtgactttcggcacacctgttgcctgagaaagtgtgctttatccccgtgtgctggraatctctggctgtaatctaacctgagatgagtaagtcagtttcttagacagggcgcttcttaaaacagcaaggcctctcagttgatcaccactcagctcc

SEQ ID NO: 281623 - DNA, 201 bp, Homo sapiens
tgcacctgccagcctggctgcccgtccttgttacccccgccttttccaacagtgatgtaacggaaggactaattcatggcacaagagggatcttcaggacsccgggccagtgtcacactcagtgactgttctgagttcagttcttgagtggagctggttgtcaaatactttaaatatcaccctagcataactctctcagct

SEQ ID NO: 281624 - DNA, 201 bp, Homo sapiens
aattggcagctgcaacagtatcatgtacagaaagttggtatcaatttgagagggaaggagtgttctctgctggaggacagggaggagacagagccatcttmtctgtttttcccacattttaaaatgcattgccaaagtcaattttaggatgcagttgggttaaattagtagctagaagataaaacccagtagccagaagca

SEQ ID NO: 281625 - DNA, 201 bp, Homo sapiens
ctctcgttatgagtgaagttgagcatcttctcacatgtttaagaggcatttgtattttcctttctcatcttatcattgcccattttgctaacattctgatytctagaaacttttcagaaaattacagaaatttgcccactatttttgatataaattgcaagtattgttttcctagttagtaatctcttttaactttctttg

SEQ ID NO: 281626 - DNA, 201 bp, Homo sapiens
caccttgtctctctctctctctctctctctcacacacacacacacacacacacacacacacacacgtggccctttcttgtatacagaagctataaaatgtktgtagatttctagccctgaaatactaaagttctataattctgtacttaactctttaataatcttgacattttatctaccatatgaactacggtacaaaca

SEQ ID NO: 281627 - DNA, 201 bp, Homo sapiens
ttgtctgcagacaatgtgctttttaaagaattggcctgctggtgcttttgatgtaaattttatagggccatcatctttagatttttctttatcaaacaaartactctcttttttattattcttacttgcattctcatgatgattaaaatatcacaggaaatgtgtgtggttgagtccatatttcctaactatattttatga

SEQ ID NO: 281628 - DNA, 201 bp, Homo sapiens
tttttattattcttacttgcattctcatgatgattaaaatatcacaggaaatgtgtgtggttgagtccatatttcctaactatattttatgattaggctcygccagatggctcctaccatacataataaaatgtcagaggtgcagcggtaacctcgttatggtgtgcatttgaactcagtcctagcaccgtgctaggtccc

SEQ ID NO: 281629 - DNA, 201 bp, Homo sapiens
gtctttatcagcagtgtgaaaatggactaatacacaaaactaccacaagttcctaagaaagattacatttttttccccttttaataacttctttagatttrgagacacattgacagaaagaggttccatgttctatagtaaagaaaccatgatgtccattccttgctttgagcttaaagatgaaaacccaaatatattata

SEQ ID NO: 281630 - DNA, 201 bp, Homo sapiens
tatgtctttctcctccagatacctctaccatggggtgcacctccacctcctctccaacaaggctgtcaagggttctgctacctcctcactgccactgagcrccttccaacatggctgccaccaccagaggtcttgccagctcacagctgtaatagttcctgctcccactacctgctccagcccagccaaaggaaatgtcag

SEQ ID NO: 281631 - DNA, 201 bp, Homo sapiens
cagcctcccaaagtgctaggattacaggcatgagctattgcatctcgcctggttttaatttttacattttttaatgaattttgagtctcacgttgttgccsaggttggtcttgaactcctggccttcagtcatcctcctgcctcagcttcccaaagtgctgggattgtagctgtgagccaccttgcctgtttcttcctcta

SEQ ID NO: 281632 - DNA, 201 bp, Homo sapiens
ttaagagatggtgtgttatttttaataaatctctgtaccctgaccgtgttcccatcaggagcgtcagaaggacaaacagcagctaagtgagcctctaccarcgagtgttatagacccctttataagctctcctcattaggcatttctggcacctaaaatagatggctggagaggtaattagatgcagttacttgcaaaagt

SEQ ID NO: 281633 - DNA, 201 bp, Homo sapiens
aattactatttgataattactatttaaaaatttcaaagcacttttcattttctccctagctgtgctttataatttgcccaagggggtctgttttgtttttkttttttttttctgtcatgtgtttgaataaatagcaaattgttgctgctttttccagggaagatgcaaaagagctgtgtcatatttctttgtgtaagcagt

SEQ ID NO: 281634 - DNA, 201 bp, Homo sapiens
ggtgcagggctgtatgggaatggaggtggcaggcgtttgccaaccctggggagtacaccgacggtacttcctctcccactgccgagtgctccacttgaccktgactttcggcacacctgttgcctgagaaagtgtgctttatccccgtgtgctgggaatctctggctgtaatctaacctgagatgagtaagtcagtttctt

SEQ ID NO: 281635 - DNA, 201 bp, Homo sapiens
ggttggtctcaaactcctgaccagggtctcattttagctaagtgtaattgtatatgttttgtggcatttggctcgagtcaaatcaattttaaatctgccaraaaagtttgttttaactagtttttattcctagtaaaaataggctctcattactaattattttgagtaggtatatatagtatatttttaattggtgatata

SEQ ID NO: 281636 - DNA, 201 bp, Homo sapiens
gacaaacagcagctaagtgagcctctaccagcgagtgttatagacccctttataagctctcctcattaggcatttctggcacctaaaatagatggctggaraggtaattagatgcagttacttgcaaaagtctcagaggcattttcttgatagtacacaagaggagtctattaattagttctaacaaggaaggtttaaata

SEQ ID NO: 281637 - DNA, 201 bp, Homo sapiens
aacaaatatttattaaatgcctaccaagtacaaagcacttttctgggttctaaggtacagcagagaacaagagatacaaggtccctctttttttttttttctctcctttttttgagacagggtctcactttatcacccaggctggagtgcagtggtgcaaatacaacttgctgcagcctcaacctccacctccctgggctc

SEQ ID NO: 281638 - DNA, 201 bp, Homo sapiens
tgtgtttcagggatataagcaaaatgctagagtctcttcctaattatttttagttacagttttaagaataataggctttggctgggtgcggtggctcatgyctgtaatcccagcactttgggaggccgaggcgggtggatcacaaggtcaggagatcgagaccatcacctgacccaggatgagggattggccagtagggtg

SEQ ID NO: 281639 - DNA, 201 bp, Homo sapiens
tctggatcctcaggttctgtgtctgtggattcagtcaaccaatgatcaaaaatattcagaaaaacacaataaaaaataataatataacaataaaaataatmcaattaaaaaattacagtataactattaatacatagcatttacattgtatttagtactataagtaatctagagattatttaaggtatactggaggatgta

SEQ ID NO: 281640 - DNA, 201 bp, Homo sapiens
agttttaagaataataggctttggctgggtgcggtggctcatgcctgtaatcccagcactttgggaggccgaggcgggtggatcacaaggtcaggagatcragaccatcacctgacccaggatgagggattggccagtagggtgtgctcagaattttagcccctccccactcctgggggcctttgtccagggcaggactta

SEQ ID NO: 281641 - DNA, 201 bp, Homo sapiens
atggtttttgctaggaggtttactcattatttattttcactaccgctgagtcaaattcaatgggggtagatggtattttctttctttttttttttttttttattatactctaagttttagggtacatgtgcacattgtgcaggttagttacatatgtatacatgtgccatgctggtgcgctgcacccactaacgtgtcatc

SEQ ID NO: 281642 - DNA, 201 bp, Homo sapiens
tcctgtgtggatctagatagtagcttgatctgtacgaaaccccagagaagaaaaagtaatagaccaacatgaaaaaatgagacaaagaactgtcctgtggycatatcaccatctgtggagtgcccagagtgacggtgtcagcaactggctttaacatcatcagggctagatgtaggtaatgaagtgtgatttcaggagagg

SEQ ID NO: 281643 - DNA, 201 bp, Homo sapiens
ccagatgtccctactcattggtcccttatcaccttgtacttatctctgacatagcccttttcacaaagaaatccctaggagacaatcagcagcttctccawcactgcatcctcgggcacacagtaggaagttagcagctgtgagttcagggaatgaaaggggagttggggagaagaggacactgaagacggttttgccagc

SEQ ID NO: 281644 - DNA, 201 bp, Homo sapiens
aatcttttttttaaatattatattgttcagcccagtgtgtatacatatccatcctcaccccaattctgctgctggatataaattggcagctgcaacagtakcatgtacagaaagttggtatcaatttgagagggaaggagtgttctctgctggaggacagggaggagacagagccatcttatctgtttttcccacatttta

SEQ ID NO: 281645 - DNA, 201 bp, Homo sapiens
aaaaacacattgcaaaatgtaattggtaataattaaagatataggagaaatggtcatggttagttaaattttaaagatgataaaactaaataaacaatatrgcacagatgtgttttacaatgaataggcataaataagaaaaagactagaaggaaatgtactactacagtaataactgtggcttgattaaaagttatttta

SEQ ID NO: 281646 - DNA, 201 bp, Homo sapiens
aaactcctgaccagggtctcattttagctaagtgtaattgtatatgttttgtggcatttggctcgagtcaaatcaattttaaatctgccagaaaagtttgktttaactagtttttattcctagtaaaaataggctctcattactaattattttgagtaggtatatatagtatatttttaattggtgatatattggaatacc

SEQ ID NO: 281647 - DNA, 201 bp, Homo sapiens
ttgcttaagtcctaaggggagaggagactggcacttggctttggctgtcctcctgtgcattgcatttgagcagagcaatgcccttgtcccaattgtatccycagatacgttagtgtggggggacactctgaatttcccctaggccgtcacatgtgggctggacttcccaggaacacatttcttggtaattcacaactccct

SEQ ID NO: 281648 - DNA, 201 bp, Homo sapiens
catctcactgcaacctccacctcctgggttcaagcaattctcctgcctcagcctcccaagtagctgggactacaggcacacaccactggctttttttttttggtattttagtagagatggggtttcaccatgttgcccagcagtctggtcttgaactcctgacctcaagtgatctgcctgcctcggcctcccaaagtgctg

SEQ ID NO: 281649 - DNA, 201 bp, Homo sapiens
tgggattacaggcctaagccaccgcacccggcctacccctgcttttcaaagtcatagccatgatacccagggatttttccctcacatggtcctggtgtctrctgacattagcttatcaatttcaaactttccttaagcaaaacaaatgggcctcctatacaaatgggaaggttgcagtttcatctcattttttcttagagt

SEQ ID NO: 281650 - DNA, 201 bp, Homo sapiens
ggtatgagttaggtgtgcaaaaatgtaacattatgggttaaataaccttatttaacccataccttacatgatttaaggtattactaaacatgcatcctaargtaaataaacccagcacaggaactgcccatttccactgatgatagaaaggtgtctgtttctaatcgtttagtctcagcttctcaggggtctccccttctc

SEQ ID NO: 281651 - DNA, 201 bp, Homo sapiens
aaaagaaggagactgatttgtgacctgactacttgcccccataaaaaagtccagaagagcccaccgattaaagcatataagatgaaggcaggacagcaackgtctgaggggagcagatgtttaaggtgcttccagcaatctgagttgagcggtttacaattctcaggcaaaagcaggcacaagctttttcaacagataagg

SEQ ID NO: 281652 - DNA, 201 bp, Homo sapiens
gaaaaaaagatgtgggctcagctttacaggaactgggaggaccagtttctttgctggcctaaatatacattttgagaaatcaaagggacgcttttttttttcttttgtccatgcatatagtataattgcggcttagtttgaaagtagcccgtgctttactgtttataacctgaaccatgtctattcaaagtgaattttgag

SEQ ID NO: 281653 - DNA, 201 bp, Homo sapiens
ccagatactgtgtgcatcttacaggctggagctgggggacaccgatgcttaatgggaaaactaatgactttatacagatcttataaaactctgctattgtsggggggcaggcatttagtagattaagtttgtaatctaagagaggaaactgggcaggaaagacaagagtgaggtgaagcaccaccgtggaccagaaaaagg

SEQ ID NO: 281654 - DNA, 201 bp, Homo sapiens
attacatgtagtttagaattgtatcctagtgcaactgttattatgtgaacatgattaccaaatcttggaaagaaaagattggctcaaatatgaaaaatagrggaatgcataagaatccagagaaatcctttgctaacatattgtcagtatttgataaatttttgtcctaacaccaggctgaaatggaagctcaactcaggt

SEQ ID NO: 281655 - DNA, 201 bp, Homo sapiens
cttaaagccagagtgcttactgtgatgccttatgtacagtagatgccttaattcataatgtaattaaagaatcttggcattcattggttggagattccagyttgaattgttgaaacacaatgagtgaatcattttgaactaccctaaattaagaatctctgaaataaaattgcagtagaccatatcgtggcatgatagaac

SEQ ID NO: 281656 - DNA, 201 bp, Homo sapiens
agcactttttcggtgtgcttactatttttatatgtaaatatatatataaatatatatatacttcattttatgaaccatctatatggttcataaaatgaaamtatactggcaaaatatataaaattctaatttttgcatataatatttttccagtatataaaccatgtatatatggatatggttcataaaatgaaaatatac

SEQ ID NO: 281657 - DNA, 201 bp, Homo sapiens
ttctctcagctaaaaagtacaagaattggggctcatatctagtgcctttttggacagttggtcacagaagcttagaaacattggcacaagtattgtcaggyggagcctggccgtgacctctgtgaaatggctgtcatgagcttggcagggtgggaataatggctctcctgccaccatctgtcacccctgtccaagacacca

SEQ ID NO: 281658 - DNA, 201 bp, Homo sapiens
cagaggttttccctgactcccagaactccttcagtgtggctgaggaggccctacctgctcctcttgcttctccatcattcctcactttgttctggctctggccacacaggccttcttgattttcccctgctacgtcctgctgcaggacctttgcacatgcgggattcacctgggatagtctgacattacttaaccccaact

SEQ ID NO: 281659 - DNA, 201 bp, Homo sapiens
atggtgctgtatgaaattgagaactaattatctcataaacattctaagtggatataaggaattatgtgctcagttgcaaccactaatttatcgaagcacckggtctaaatacctcagggaatgcacagaagcctgatggttgaaaagccttcaaagcattctctcagctaaaaagtacaagaattggggctcatatctagt

SEQ ID NO: 281660 - DNA, 201 bp, Homo sapiens
tttggttggcacagaatgcagcctcctcacccaccctctttttgattatagccaatgattacataacattttcagatcagattttttttttttttttttttggaaagcttttggagacacgtggctctggaggaatcctcatggaatcttaaaaccctgagggaattcaagaagaaaactattccacttgcttgcctctgg

SEQ ID NO: 281661 - DNA, 201 bp, Homo sapiens
gtagtctaccagaaataagtacggttaccaactactgaaatcaatttaatagtaatttggtcttgttagtctgttaaaaagaattattggccttcagatayttccacaaagccctttgttactcatgaatcccatcaagatgctatgaataaagactgtgaatatcaataagtttgaaaacattccatgctcatgttcagg

SEQ ID NO: 281662 - DNA, 201 bp, Homo sapiens
agtaaattagcaaaacttcctcctggggataattttttaaatatcctttgatctaaacattctttagaaaatttatcttaaggaaataatcatagatgtgkttaaatatctagctacagacatgattgttacagtgttgattgcaataatgattaattataagcaacctaaacatcaagaaaagcaaggagtaattaaata

SEQ ID NO: 281663 - DNA, 201 bp, Homo sapiens
ttagaagctgcatccaatggaagcatctatatgaaccacacttttgagtagcaaggatctagagttcttgtgcagatctctctctctctctctctctctcwctcacacacacacacacacacacacacacacactttcaaaagtattttatttatataaatgtttttgatcattgaattaaaagaaaataatgcaacattg

SEQ ID NO: 281664 - DNA, 201 bp, Homo sapiens
ccacaacacatgggaattatgggagtataattcaagatgagatttgggtgaggacacagccaaaccatatcatcgttcaactagaaaatatatatatatayacacacacacacttagtgaaagttattttattaattagccaggataaaccttatttaaactatttagatatgagtcactttgaggaaaggttattatatg

SEQ ID NO: 281665 - DNA, 201 bp, Homo sapiens
tggatagtgattcctctgatggatctgggcaaagtacattgaaaatcctctggtaagaattcaccattctggattccattaagaacatttgtcattcatgkaagaaggtcagaatatcagtattcacaggagtttggaagaagttgggatgacatcgagggggtcaagacttgagtggagaagtaactgcagatgtggtgg

SEQ ID NO: 281666 - DNA, 201 bp, Homo sapiens
catggatagtgattcctctgatggatctgggcaaagtacattgaaaatcctctggtaagaattcaccattctggattccattaagaacatttgtcattcatggaagaaggtcagaatatcagtattcacaggagtttggaagaagttgggatgacatcgagggggtcaagacttgagtggagaagtaactgcagatgtggt

SEQ ID NO: 281667 - DNA, 201 bp, Homo sapiens
ctccctattccctgagacataacaatattgaaattaggtcagttaataaccccacaatggcctctaagtgttgaagtgaaaggaaaagttgcacatttctyaccttaaatagaaagctagaaatgattaagcttagtgaggaaggcatgttgaaagctgaaatagaccgaaagctgagataaactgaaggctgggtctcta

SEQ ID NO: 281668 - DNA, 201 bp, Homo sapiens
cataaggatttcctggagtacagagccctagttccaaatttttttccaaggccactcagaaagggttgttaagcttctttgttttctgttttaaacaagaatttcagaagcaagatgtggagattttgcctattagagatttttttcttggtcttattttcttttatatcaagtgatttgactaaaggactgaaagtcctg

SEQ ID NO: 281669 - DNA, 201 bp, Homo sapiens
ttgcctcatggtcacaggattgcttctgcaactctaggcgtggtgtctgtgttccagggaggagaatagaatggaaagtcaaggcagaggactgaaaaacratgccagaggaatctgtctgtcattaaaaattgcccaagaggccaactcagcagtgttcatttataactcattcatttgttgaatgaatggacagaactc

SEQ ID NO: 281670 - DNA, 201 bp, Homo sapiens
gctggttccttcttccctcttactgagcagcctgcttggggttggctgggcctggtggagaacttaccttgggtgggcccttctgacctttttttttttttgagttggagtcttgctgtgtcacccacgctggagtgcagtggcacaatcttggctcactgcaacctctgcctcctgggttcaagcgattctcatgcctca

SEQ ID NO: 281671 - DNA, 201 bp, Homo sapiens
tttgtttttatgggtattttgaggggtagaaaacaagaattattttattttgccctgttcagacaaaaatatcatgttagctttttaaatagtatatagtrcaattggaactcaatcttaagacatttttgcttaatgaaaatgctaccatgacagatcttttttttttttcctaacaggatgtatatgattctcttttca

SEQ ID NO: 281672 - DNA, 201 bp, Homo sapiens
acaataatggggtatatttaccttctgaatttaaaatattctctgaagacattactgctggagcatggtaagaattcatccatcattcagttgtccttacrtccccgttatgtattgagctaagtacagttgcaaagagagagaacaaaacaaagagagagtgagaaagagagagagagagaaaggggagggaaaggggag

SEQ ID NO: 281673 - DNA, 201 bp, Homo sapiens
gagaaactgctagagctgaatttggttgctgggcaggcttctatcttttttttttttttttaatagatgcagggagtataagtgcatgctttttacatggstatattgcataatggtgaggtttgggttcctagtgtacccattacccaaatagtgaacactgtacacaaaaggtaatttttcaatcatcaagccttttct

SEQ ID NO: 281674 - DNA, 201 bp, Homo sapiens
agcactcatttgaacactatttgtataagcagctagatggtgatcatttgtttagttcctgtgaattgtggtcctttttaatgtctacaaaattcaaggcrccacagacatttaaaggccaacaagatggaccagtagaggtatattttctgtttaggaaattacattttcttctgtgaatttgcctttaacgggatgttt

SEQ ID NO: 281675 - DNA, 201 bp, Homo sapiens; identical to SEQ ID NO: 57249

SEQ ID NO: 281676 - DNA, 201 bp, Homo sapiens
agagagaacaaaacaaagagagagtgagaaagagagagagagagaaaggggagggaaaggggaggaggaggaccagtgggagggaggaaggggaaaaatcrtagaaatacattgaagtcttggccttcccatagccttacaggctagtgagttcatcaggttagcgtaattggtgaaaaaacaattatataaaccatcata

SEQ ID NO: 281677 - DNA, 201 bp, Homo sapiens
atagaacaaaacttgattaatgaacactttttaaaagtctttttagggtcctattattattttagttgtttagatataaaaatattttatgacatattcaytgttaaatttatagtgaattgacattcagtgacatttgtttttaaagttgtttattgaaatatgtagtctaccagaaataagtacggttaccaactactg

SEQ ID NO: 281678 - DNA, 201 bp, Homo sapiens
aaacaaagagagagtgagaaagagagagagagagaaaggggagggaaaggggaggaggaggaccagtgggagggaggaaggggaaaaatcatagaaatacrttgaagtcttggccttcccatagccttacaggctagtgagttcatcaggttagcgtaattggtgaaaaaacaattatataaaccatcataccactaattg

SEQ ID NO: 281679 - DNA, 201 bp, Homo sapiens
tggttctgaggtcattttacaaattaagtgagatattgcgtgaaaggcaccaccaaattaagagccctgggatgaaaaaaaatgagaaagatagaagacawtgtgctcaatgacatccccattccaaaacagaactggattgtgagatgtcctatcatatggtgtcacttgagagctgccaaggatatgatgccaaaatgt

SEQ ID NO: 281680 - DNA, 201 bp, Homo sapiens
tgtacactggaagtttagaccaaaccaatggaacatgagaaattttctcagggccttctaggtaggattttcagatcttaaaggaagcacccaggaaagayagtctcttcttgccccagactttgtaattctgcatgggatggctggaactgcagcagccatcatgaaacataagaaaagctagtctgaggacaatgctgg

SEQ ID NO: 281681 - DNA, 201 bp, Homo sapiens
gaagggtggtgtgggggagggtttctagcagggaatggatgcttaagccagtggtgggacatagatgttacatagttttcctcagtgctataaagaaacaygaaacaaatagcttctccagcaaccagagccaacagactgtcacttctctaaacatttaagctgctttcctgcagttctattttcaaagtaaatgatcta

SEQ ID NO: 281682 - DNA, 201 bp, Homo sapiens
aatgagaataatggactctttccccactaacatccagagaagatcattctaaatcgagtggttggcccatgccaacaatatctgctataaattatgaaacytccaatcaataatcaatacttctcctctatttgtataatagcaaatgagttttgaggttggactcagagtataaattgttaactaaaacaaaataggata

SEQ ID NO: 281683 - DNA, 201 bp, Homo sapiens
cttatttttctaatattcatgtttatgttgaattcctcatgcagaaactgatgcattgcttttaccccagagctttcactgacgtttgatggaattagctstgcaaacactgctgacatgatgtgccctcctgttttggttccttctgtactaaacatgatttttacaatgaacttgagctctgtgtatgagagaaaaaga

SEQ ID NO: 281684 - DNA, 201 bp, Homo sapiens
aggaaggagagagaggctaatctgctcctgtcagttccacttaagccttctggggacttgagtcatggctgagtaatggctgatgatactggttgtgatcrccgactgttgaaaaacagtgtattcaatgaggttggatacatgcaagacataaaaaaggaaagaggatctctgtcacagaagtcaaactaaaaattctct

SEQ ID NO: 281685 - DNA, 201 bp, Homo sapiens
aggtgcttccagcaatctgagttgagcggtttacaattctcaggcaaaagcaggcacaagctttttcaacagataaggaacacctttaaaaagaaagggaygaatgcagatgaaggacttgcaactcacaatgacttttaaactttctacaaaaaaaaagaaagaagaaaaagagaaaaaacctttaaagtttatagtagt

SEQ ID NO: 281686 - DNA, 201 bp, Homo sapiens
tgttcatatcatgtaggtgtgtattggtatttagagaaatgatagaagtaccgtcactgtgaggatgttaagccctcctttatctcaagttattatcgtasacccagctgcagaaatgacacaggatgttttgttcttatagacgcgttctttttaaataacaaactttcaaactattagttggaagcttgccacaaacta

SEQ ID NO: 281687 - DNA, 201 bp, Homo sapiens
gcggacccagcctcttggagccaggctcactcaccctgcctttaagacggccctaccagaggcaggagaaggatccgcagcctcagctttctgtggcgcawcctggcactgagtcactcataccaatctcagcgccagtggccaagccgctgctgccggagggcctgtgtcaccctccccccgtttccctgccctcttccc

SEQ ID NO: 281688 - DNA, 201 bp, Homo sapiens
gtgactggcctgttgaggttcatagccaaggaagagacctggagctgggatgttctaccttttgtccccttgtccatgccccttgctcttctggagggaasccctctcctccagggtagcccctgcacaccaggccttcagtttagtcatggagatcctttccacagtgacacagagtgttggtgacaatctctggtcatg

SEQ ID NO: 281689 - DNA, 201 bp, Homo sapiens
gattggtggagaatgcccggcagggctgaggaaggagggtgggcacctgagcaacctgggcctggccacactcacccctgcagccttgccagcctggcccrgggattgtggtgtggtcacctcttagcaggtggagggaggagttcctgtgtggaagatctgcttgaaggaggaaatgttgatataacccccgagtgtgga

SEQ ID NO: 281690 - DNA, 201 bp, Homo sapiens
ggaaacttgaccccaggggttgatggttgatctttataaaaacgaccttgtggtcagtttgttcttttatgcttaaattgtcaaggtccctgtccaccccrggaattaatgtggtgatgtggaaagagcactagacaaaggatttcaaaactgtctttgggcccttggctcgtggccttagctctctgacattctttgctt

SEQ ID NO: 281691 - DNA, 201 bp, Homo sapiens
cgtggtcgcgggcgcctgtagtcccagctactagggaggctgaggcaggagaatgtcatgaacccaggaggcggagcttgcagtgagccgagatcgcaccrctgcactccagcccgggcgacagagcgagactccatcccaaaataaataaataaataaaaataaaaaaataaaagaatgcggcgtacgcggtggttcacg

SEQ ID NO: 281692 - DNA, 201 bp, Homo sapiens
agcacgttcatttcattacctacaaacgcatagaaaaatccaacataatcccacactgatgagaagaagagagggttgtttgtcaggtggggtagtttcasttgacttgaaggtctcaccccgcccctcgtctttaccatagcatacgcttctagatgcttctgctgcattgtcaaccagactctaccagaactgtttttc

SEQ ID NO: 281693 - DNA, 201 bp, Homo sapiens
tcattgatttttattgccaagcagtattccatttcatgaatatatcacggtttatttattcattgtcctattgttgggcatttggatggtttccagtttgrggctattgtgaataaggccactgtgaatattcttcatctatgtacaagaatgtacaaaaatctttttgaggacatatgctttcatttctgttgggtaaat

SEQ ID NO: 281694 - DNA, 201 bp, Homo sapiens
cggtgttaagtcatgtgagcctccaaggcttcagtgtcttcatctctacaatgaaggagtttcattagatccatgattctcagctgtttccgttccttaggaccctcatccatagcagtgtttccatagggtcttgactgtccctatgggaatacatctcagtggccaggagagggagaaagggcatggcattggaagtcc

SEQ ID NO: 281695 - DNA, 201 bp, Homo sapiens
aatcccacactgatgagaagaagagagggttgtttgtcaggtggggtagtttcacttgacttgaaggtctcaccccgcccctcgtctttaccatagcataygcttctagatgcttctgctgcattgtcaaccagactctaccagaactgtttttcaaaacatgtgttcctaggattttacctccctgcattttttgctata

SEQ ID NO: 281696 - DNA, 201 bp, Homo sapiens
ccacagcagaagttcttaacctgaagtccaccacatggttttcagggaatttttatttgatttgatatatattttttcctaaatgtgagatggggtctcaytgtgttgcccaggcttgtctcaaactcctggactcacgtgctcctctttccttggtctcccaaagtgctaggattatagacatgagccaccacacctggc

SEQ ID NO: 281697 - DNA, 201 bp, Homo sapiens
aaactctgctattgtcggggggcaggcatttagtagattaagtttgtaatctaagagaggaaactgggcaggaaagacaagagtgaggtgaagcaccaccrtggaccagaaaaaggcttgaaattagaagcctttggcaaaagtgtgaaactttgccactttacattgttcagtgggtcagaaattgtcaaagattttctt

SEQ ID NO: 281698 - DNA, 201 bp, Homo sapiens
gtatatcttctttggaaaaatgtctattcacattttgctgattttttttttttttttgagattggaggctcgctctgttgcccaggctggagtgcagtggygcgatctcagctcactgcaagctctgcctcccaggtacacgccattctcctgcctcagcctcccaagtagctgggactacaggcggccgccaccatgcct

SEQ ID NO: 281699 - DNA, 201 bp, Homo sapiens
cttgctcctctccatcttcctaagatggtcatacccacatttgagatgcatggtcctgctgacgttgctgtgactatatacattttgttggctgctgatcwgagtagtacatcatgattttgtttcatttcttgcacaacttaattgtttttcctggaattatttattgccttcatttatttgcctagatttatttgtacc

SEQ ID NO: 281700 - DNA, 201 bp, Homo sapiens
acccgtcacttccatcaaaagtcgtgactggctctccttctcccatccttctctcctttctgacctcctgcctggcagagttttcagaacagcatgtaaarcatggttactcaccgagcgtgtctgggacaaatacctggacatgcctacctgggtcactgggtggcctgttcctccaccacccccagatctgaaggctgg

SEQ ID NO: 281701 - DNA, 201 bp, Homo sapiens
aacagtagcttgacctgcagctgtactggtgggtgtccatgatggacaatgaaaacgcatcttatttgatggattgtagctgctagaattattaggagttrctgctttttttttgttttttggaaagaagacttgaccacaaattaattttgtcataaatatatttatttgtattacatagaaactcggctttaagcaaac

SEQ ID NO: 281702 - DNA, 201 bp, Homo sapiens
tgtattggtatttagagaaatgatagaagtaccgtcactgtgaggatgttaagccctcctttatctcaagttattatcgtagacccagctgcagaaatgayacaggatgttttgttcttatagacgcgttctttttaaataacaaactttcaaactattagttggaagcttgccacaaactaataaaacaattagaattaa

SEQ ID NO: 281703 - DNA, 201 bp, Homo sapiens
tttaaaaaatgaattacccaatagcctaaaggtaaataacatctttggttattagtaaaaagaatcagatagatactaagcctgctactgtgctgattacscaaacaattcaggagaaattaagtgatttcacctaagttttctaggtaagtgcctcagttattcacttaaactgtccaagaggcacctgtactcttgtaa

SEQ ID NO: 281704 - DNA, 201 bp, Homo sapiens
ttatagaaaatcctaaagaatccacacaaaaaaactattggaattaataaatgagttcagcaagattgtggaatataagatcaatatagaaaaatcaatcrtatttttaccaatcagtccaaaatgaaactaagagaagaattctatttataatgacatcaaaaagaataaattcaacaacagcagtataaggcatgagca

SEQ ID NO: 281705 - DNA, 201 bp, Homo sapiens
catggaattgtttcaagtgggaacaggggaagagaagaaagccaaaggttcagatttggcatagctcttggagaagatgggcttgaataatgagaagcacrcaggatgtcatttgagagttgtggatggaaagagccttctgttcaggaggattgcaatgaggggaaatagaattctgagatcggttctgtgtatttcctc

SEQ ID NO: 281706 - DNA, 201 bp, Homo sapiens
tcaacccctgctatcagaagtgacattattccccaaaggaaacattaactagagggtccttgtgtttctgaaaaggccaaaggagaactgctacttctacrccggcaacgcattcattgtacctttttgcttatgctatgatttctgcttcgtttttaggcgtattgttgttattcctgtcttgtttcatttgccataaca

SEQ ID NO: 281707 - DNA, 201 bp, Homo sapiens
atttgtaaattatatacctgatatatgtgcagattatctaaaatatgtaaataactccttcaactcaacaataaaaacaaacaaaagcaaacaaaaaaaamccccacttcaaaaatgggcaaaggacttgaatagacatttctctaaagaagatatacaaacaaacagcatttgttggacacatgcttgtcaaaaagcaca

SEQ ID NO: 281708 - DNA, 201 bp, Homo sapiens
aatcagtccttttttttttttttttttttttttttttgccatctttccagaaagtgcatttcaaataaaaggtgatgaacatttttaaagcagaccttcaraaacaaatctatcttattttctttttgtttatttatttttatttttttgagactaagtatcactctgtcacccaggctgaagtgcaatggcgcgatctca

SEQ ID NO: 281709 - DNA, 201 bp, Homo sapiens
taatttttcacttgtgagaacacaatgtatatgtaagtttatttaaggctcaatggagcaagactttgatggatctgggcataaaagtatgggtaggaaakattatctgcagcaactcaattcaaaattaagggctaagggcttcagagatcactttaagtcacacattgatttcattttctctctctctcatgctgtttc

SEQ ID NO: 281710 - DNA, 201 bp, Homo sapiens
atgaaaaaatgctcatcatcactggccatcagagaaatgcaaatcaaaaccacaatgagataccatctcacaccagttagaatggcaatcattaaaaagtyaggaaacaacaggtgctggagaggatgtggagaaataggaacacttttacactgttggtgggactgtaaactagttcaacccttgtggaagtcagtgtgg

SEQ ID NO: 281711 - DNA, 201 bp, Homo sapiens
gacctcaggtgatccgcccgcctgaacctcccaaagtgctggcattacaggcaggatgcttttttgacacccccacttctactcagctttctttccttccktcagaaccctgttcagggtgtgaaggacaagttaagccatctccgtctctctcatactgcagcccacctgttctttaggtcataaccacagactcacatc

SEQ ID NO: 281712 - DNA, 201 bp, Homo sapiens
aatgaccatctttttattttctctgatgacttcaaatagcatttggtcagataaagcagctgtatttgaagattctcttggtttcacattttagtgaaatygttgtgttaattagtgttaagcagcacattaaattcctcagagcagttagggctcattcagtgtctgtttaggctctttatgtacaaagcacattctagg

SEQ ID NO: 281713 - DNA, 201 bp, Homo sapiens
ggagggggaggtgttttcagatgaggaccctgagattctaaaggttgtgggatttgccacagtcacctctcaggtaagggcgcaactgcgaccgactgttwcgggtttcctgccttcacagtctgggttctttccaccacagcgcgatagaaccctgtcattgcaccagtaattgtttgctttctctggacttgttttggg

SEQ ID NO: 281714 - DNA, 201 bp, Homo sapiens
tggaaagggtaaaggaatcctaggatttgcaggaaccccaaagaggatgaggactctctcattttacaggtgtgggaacgggcctgggattcggggtgggktaaagtccctgccaggaggagaatccagacctcctgattccacttcggtgctgtttgcccactcagaccttatgttcctgaagggtaaagggagaagagg

SEQ ID NO: 281715 - DNA, 201 bp, Homo sapiens
ttttttgtcattctgaacctactcttatttggattttggacctccaggagtagttgtctgtgtttcttggccttgttcctctcattttttcttttctttgkcttttttgctctactgtctagaagagttttgaaactgtcttccactccttctgttgcatttcttccttgctgttctcatatgtttcatttacaagagctt

SEQ ID NO: 281716 - DNA, 201 bp, Homo sapiens
ggagtacagagccctagttccaaatttttttccaaggccactcagaaagggttgttaagcttctttgttttctgttttaaacaagaatttcagaagcaagrtgtggagattttgcctattagagatttttttcttggtcttattttcttttatatcaagtgatttgactaaaggactgaaagtcctgagtgaggatccagg

SEQ ID NO: 281717 - DNA, 201 bp, Homo sapiens
cattctcctgcctcagcctcctgagtagctgggactacaggcgcccgctaccacacccagctaattttttgtattttttttttttttttttagtagagacrgggtttcaccatggtctcgatctcctgacctcatgatccgcccgtctcggcctcccaaagtgctgggattacaggcgtgagccaccgcgcctggcctttt

SEQ ID NO: 281718 - DNA, 201 bp, Homo sapiens
ggatgaaaagggtttacatgtcacagaacctaggacagggtcagtccctccctccttaaaaatcagtccttttttttttttttttttttttttttttgccmtctttccagaaagtgcatttcaaataaaaggtgatgaacatttttaaagcagaccttcagaaacaaatctatcttattttctttttgtttatttattttt

SEQ ID NO: 281719 - DNA, 201 bp, Homo sapiens
taggaaactaatgcagttagaagtcctcttcctccccatttccaggggaagacctggagggtccgttcgcattcaaaatctgcccacgttcaaagcagctrtgaggagcaaaccttggattaggacaaagagccttcaaagatgaacactgtcctctggattgcctttctttgttgtagaaaggaattggggggaaaaaga

SEQ ID NO: 281720 - DNA, 201 bp, Homo sapiens
acattgttaaattgtgttttgcttcagctcatttgtgtaactagtgggtgccttacaggtcatccttcagactcctgatgagtgaataccagagttttgayttcatgctgtatttttgccagagtgtggaaggaaatttaagttaagggttccataagaactctataaaccagggaatatccatgaagggatacttccatt

SEQ ID NO: 281721 - DNA, 201 bp, Homo sapiens
tggtttgtaccgtgctatactatgaaatgtcctcacagcccctcaacaggtacctggaacaggtatcatcctccccacttcctgcatgataataaaatgcytatcaggaaacaccgtttgcttattacgtgtcattggcaccttagcataggaggtcatctttcaataagttaacctagagggaaggggagatgttgtcta

SEQ ID NO: 281722 - DNA, 201 bp, Homo sapiens
cccccagcatgaggcaggaggagcgctacctggtaagtcctgtcgcatgcaaaaggcggtctccccactgcctgaggagtgggccctccaccagggaaggytcactcttcccttcccaggccttctccttggcgcctccatggagcgtggcgcagagagggtgcttccgcaggaaggaggtcttggcgagagaaactggtt

SEQ ID NO: 281723 - DNA, 201 bp, Homo sapiens
tacaataattgtaatgataaactgaaattttaaccttcaccttagctataagaatagaggtatagcctcctttcccataaggatttcctggagtacagagmcctagttccaaatttttttccaaggccactcagaaagggttgttaagcttctttgttttctgttttaaacaagaatttcagaagcaagatgtggagattt

SEQ ID NO: 281724 - DNA, 201 bp, Homo sapiens
ctggagggaacccctctcctccagggtagcccctgcacaccaggccttcagtttagtcatggagatcctttccacagtgacacagagtgttggtgacaatytctggtcatggtgaaatgcgccgctgttcagatgcctcttcatcgcttgttctctcccacaactggagaccatgaccagaacaaagagagtttctcttct

SEQ ID NO: 281725 - DNA, 201 bp, Homo sapiens
tgtctttcataagattttttagctctgttttaaaaaacaaaaaggaacacctaagacctgtgaacaatgacccgccccagattagctagagttcatatctkcagagaagacagatattataaaatgttctgttaggaacccatttcagaagagtctatgccaagttatttaacagaaattctagagtgttcaatgtgtgtt

SEQ ID NO: 281726 - DNA, 201 bp, Homo sapiens
agcagctccaggtggggtcaggggcagcaatgagggagcaattacaaagacattgaagactcattgctgtgcttccagttgcttgccgcctagttagcaamagaagacccaaacttgaaaagcttaataccaagaaggagatattaataatagctcagtgcagccatataggacttgtcattggctgggatgtgttaaatt

SEQ ID NO: 281727 - DNA, 201 bp, Homo sapiens
gacttggatttcaatcctggctttacctcttgtgtggataaggctttaagcaaccaatgcagccttttgtgcctcagtttcttaacctctacagtagggayaataatacttatccatggctgggcacggtggctcacacctgtaatcctagcactttggcaggccaaggcgggtggatcacctgaggtcaggagttcaaga

SEQ ID NO: 281728 - DNA, 201 bp, Homo sapiens
aaaagaagaaaatttatattccataaaccttctttgttctccagacttttgtgctaaccaatctgttccttccattttgaaaggttatgtatagatcaaawctcggtgggaatggtgaatagattgcagccagtaaataaaaaacaggatttagggtttggaaagacttggatttcaatcctggctttacctcttgtgtgg

SEQ ID NO: 281729 - DNA, 201 bp, Homo sapiens
tggaccttagagtcaaaccaaagagaggagcctggtccctttccatgccacagggattagttcacacagccctgcagacgtctagtcttggagccctacasacagaaactgagtccgctaatagaaacttggtggaaaaaaaaaaaagaaaaacaaggaagaagcagcaaggcctgcaaaaataaaataagtttttccttt

SEQ ID NO: 281730 - DNA, 201 bp, Homo sapiens
gatccctaaggcatggttaatcgggcctctgtttaatcaagaaggtgggccaggcatggtggctcacgcctgtaatcccagcactctgggaggccgaggcrgtggatcacctgaggtcaggagttcgagaccagcctggccaacatggtgaaaccctgtctctactaaaaacacaaaaattagatgggcgtggtggtgcac

SEQ ID NO: 281731 - DNA, 201 bp, Homo sapiens
agaaaagcaaaagttaccagcatattgagaaggcacataattttactatttctatttctgttgaaactgaggattacgtgttggatacagcacctacaacytgcattgtttttcttcattgtttcattgaactttttggacctaaaaatatactactgagtgggtatgattccctgttttatgggtgagacacctaagaca

SEQ ID NO: 281732 - DNA, 201 bp, Homo sapiens
atcacctcaacagcagagcatgggcaatggctgctgggcaagtgttggactttcgcacagctcatcatgcaaacctgtgatgacatcattgcatttatgcyctaaaactagatttcaggtcttaagctggcttaaattatctcttgaaaaatggagattatatacagctttgaaaaatagggaatttttttccccagaaga

SEQ ID NO: 281733 - DNA, 201 bp, Homo sapiens
tttatgagaaaatgtgctccaagtttcaaactactgacttacaaatgaactttggaatattatccatttctaagaccagattatctattccatttcattcrtacaaaaaggcacctctctgggccacagtcaaattcacacatgcattgctctctggagggtagttgtgatcatacacacacacacacacacacacacaca

SEQ ID NO: 281734 - DNA, 201 bp, Homo sapiens
ttgtagtcagttgttctcacctataaatggtagaattctgaaaatttgttcccatagaatcattgtcctctagagttaataacaattccacttcaggtgcrgtatgacttaaacaggctcttgtgggctggcctgggactttatccaccgtgtagagaatttcttttatgagaaaatgtgctccaagtttcaaactactga

SEQ ID NO: 281735 - DNA, 201 bp, Homo sapiens
cagttgtttgactcaaaagagggtgttgtttgtgtctcagcggggcgcaggcagctgtgaggagcccactgtcccctccttgccggccacccctcccctcsgaggcccttccctgcacaccgcatgcccacagggtcttggttgctggcctgaaatgagtctgctgatttaccacgtcattccagatctcagtgctctaaa

SEQ ID NO: 281736 - DNA, 201 bp, Homo sapiens
aaaaagacaaagattatcatattaacacccctcggccccgcatgcacctgtaacctacgtgtcctttttgataacccaccacttccagagtggcttcattstcaaccacctgtgtcaccagagtaaattcaagtgtgtcctttcttgaggtttctggactggatgttgtcttgtgtcctttcccatgggtgtggtttccct

SEQ ID NO: 281737 - DNA, 201 bp, Homo sapiens
gttaaattaaggcaatcacattcagcctcccaagaagggagcctataaaactgagaagccaaagctaatccagtcctttcccattctaattaaagaggctkaagggcttgtctcacctaacactgtctcatcttcatgccacttcctcaaataaaggagtcagtgagaagttaccaattcacatggtaaataacaaactct

SEQ ID NO: 281738 - DNA, 201 bp, Homo sapiens
tgcctttttaactgcctgaaagaaaggaattataaataaatacattattgcaattttattataattattaaatttggtgttcttttgaatctaactcttayggcctgcttatctatgggattacacttaaatataatatcatcatactcagttcccagatgcctcataaaacacagttgctagattttagttcccactgca

SEQ ID NO: 281739 - DNA, 201 bp, Homo sapiens
ccattttatcttgggggaaagtagaactgttttaagacagtaacatagccaaccatacttgttctaaagccactatgttttgtgtcttttataatacagakatcaaattgcccactcctttgcaaacttccattaaaaaatcactcagtatcaagtttaaatagccattaccagcacgaatagttaaagaatcattaccaa

SEQ ID NO: 281740 - DNA, 201 bp, Homo sapiens
gtctctactaaaaatacaaaaaaattagctgggcatggtggcacgtgcctgtagtcccagctattcgggaggcggaggcaggagaatcacttgaacccagraggcagaggttgcagtgagtcaagattgcaccactgcactccagcctggagacagagcgagactttgtctcaataaataaataataaataagtaaataaa

SEQ ID NO: 281741 - DNA, 201 bp, Homo sapiens
aagaactctataaaccagggaatatccatgaagggatacttccattaggactgatgaaggactgtatgtacttgcccttgtctagttagctaaaattagcratatatacatctcaaagagtcataccaccgagctataaataatgctgacatcttcaccatcaaaatgagaagattttattttaatattcttccctcttca

SEQ ID NO: 281742 - DNA, 201 bp, Homo sapiens
ataacaagctgatactgtttgtatatttgtccccacccaaatctcattttgaattgtaatccccagtattggaggtggggcctggtgggaagtgatcagakcattgacgcaaatttttcatgaatggtttagcagcgactccttggtgctgacctcatgatagtgagtgagttctcaggagatctggccatttaaaagtgt

SEQ ID NO: 281743 - DNA, 201 bp, Homo sapiens
gcaccaaaggaggtgacatttgtttcttagtgcatttgtttctaggtcagttaacatcttaaatgcccaaattctgaatgtcagtaagttcgatttctacrtctaaacaaggccagggcaagaaagtggaataagaagaatgagtttctcctgagccttccatcagacctagtggcacaggtcatcagctaaatacacaat

SEQ ID NO: 281744 - DNA, 201 bp, Homo sapiens
atagttaagcagatcaacctatgaagagcgagaagccaaaggagatgtttcatgataaggtaactagatggtatttttccattagctgcttgacctctttmacgtgacaccagtgtgttttcctggataaaattacaatcccagatattcagacgttcagattcatattttccatcttagcccacgaaagctttactttgg

SEQ ID NO: 281745 - DNA, 201 bp, Homo sapiens
agactagggcattaaattaaaaagtaagccatgagactattaccaaaataaaaggaaagcaagagggatttgcctttgtccttgttcagagaaactgaaarcaaacttggattgcattaacagaagtatctgttctaccaactgcaaaagtgccaaaggagatcatataggtccccaactctgtcatgagtccttccaggt

SEQ ID NO: 281746 - DNA, 201 bp, Homo sapiens
gccttcctttttgaagaagctggctgagttccaaaagaaatccaagtcctgaatttctattacttctaacaaactgcattagcatgttaccaacacttatwaactgacttaaaagaagactagggcattaaattaaaaagtaagccatgagactattaccaaaataaaaggaaagcaagagggatttgcctttgtccttgt

SEQ ID NO: 281747 - DNA, 201 bp, Homo sapiens
tgcatcatgcatcaattacctggtttactccctttattcaaaaaacaggctgggtgcggtggctcatgcctgtaagtccagcactttgggaggtcaaagcrggtgaatcacttgaggccaggagtttgagaccagcctggctaacatgacgaaaccctgactctactaaaaatacaaaaggtagcccagcatggtggcgtg

SEQ ID NO: 281748 - DNA, 201 bp, Homo sapiens
agctttatctaggagcaccaccagaggtgtggggagctcgtgtctgtgaggcttcctggaggaggtgttacctcagttgagtcttgcaggatgagtacaasgtccaagcagagagggtgtaatttgaaatagcttgatacagaggaggaactaaaggcagtgaagggtgctggggtataaagtttgaggcaggaggtagca

SEQ ID NO: 281749 - DNA, 201 bp, Homo sapiens
gcactgcagattcccaaggaacacccaggcccacagatgttcatgggtcacagaattgtgaactgaccacttgtgcattttggatttcaacttgtaaacayggggattccctttttacaaaaagaaaaaggagaggatgaaaaatcaccatgcaaaggaaagttgagagctaagtttttccttttggaatcttggcatgcg

SEQ ID NO: 281750 - DNA, 201 bp, Homo sapiens
ttttgttccattaatgtgtatctttatatacagaacactattctatatatttatatatatacacactgttgtaacctattgtataattacataatacatakttttattatgtaatatgcaatagtataattatataatatagagtgactatttatatatacattttattatctggcagggtccagtctttcctctttactc

SEQ ID NO: 281751 - DNA, 201 bp, Homo sapiens
atacaccaacatacttttatatctaccatatttttatattctttatatctttcattttaaaatatttatttggtgtggcaggtttatggtagctttttatygtcctctttttgcttggccatattttatataataaacaggaactggttttataatagaagtatttgaagacaaagaataagatttgatgccatgagatct

SEQ ID NO: 281752 - DNA, 201 bp, Homo sapiens
acaatgagtaactgcggatgctatttatgtcaagaatcaaaagtttgttctgaggcaggtgttctctatatggggtccacagatccccacaaaaagttcaygggtaaattacagaggatctctgaatgatagtggcaaaaaatacatcatagttttaccaacttaaagtttgcaaatgttcgtttttgaatgtaggcaaca

SEQ ID NO: 281753 - DNA, 201 bp, Homo sapiens
cgctagtcaagagtttcactgtggtctttacagtcctactttgtttcctcataaaggaaagcacactctctaagaccccacagcttttctttctgtccccmccaccaggctcttttcctttttcccgttttccttgccctgctcactgcagtttctctttcagggccaagatgaatcctcaagtccttgcatttccaggac

SEQ ID NO: 281754 - DNA, 201 bp, Homo sapiens
ccctggccactctcagtttattgggaaattgtttatcctcccagcttgtctagaaaataaaatatgcatgctgcttggaagcagggaggtatgcagaagcytccagatctccagactcttctctcactgcgtcttggggcctgagagcttagctctgcaaagaacaacccaggaagggtcaggatggacagggcactgcag

SEQ ID NO: 281755 - DNA, 201 bp, Homo sapiens
agcatggaaatctgcatatgctacacatcagtcctttgtttgtttgcttgtttctgaaaagatggttgttaggcatttgccggtacaccactgatttgaarccaggtcatctgatgctacagctgactctccaacctctatgctacagacaattggcttcatgattccctgacacatttctgatgcaaaaaattcctgaaa

SEQ ID NO: 281756 - DNA, 201 bp, Homo sapiens
aagggcttcttcaagatgcagataccaagatgagattggatgtgcaagagatttattgggggaaatgcctgtgaagggaaaaggaggcaggaagagccatsaaacccatagtagatctgattcctataaagaacaggggaaggactattgggtaaggagagcctcagaacacagtgtagttttaagaaagtttcagtcagg

SEQ ID NO: 281757 - DNA, 201 bp, Homo sapiens
aggaagaggtaggtcctcagaacctaaagcgcaaggagattccacattactcttctcttaaaaaacaaatactattgagcacataccatatacacaacctraagggcttcttcaagatgcagataccaagatgagattggatgtgcaagagatttattgggggaaatgcctgtgaagggaaaaggaggcaggaagagccat

SEQ ID NO: 281758 - DNA, 201 bp, Homo sapiens
tgagaccaagaggaatggataaagacatgtctatgtaataagatcaacaattgtttcatgagtaattggctatggagctaaaggatgaagaggcgttcagratgattctaggtttctagttggagtaagctgatgcaaggtactgctgagggtagggaataacgggacggatgtgcaggaaaaataaattctgctttggat

SEQ ID NO: 281759 - DNA, 201 bp, Homo sapiens
ggctataggtgtgcactaccctagcgaatggggccttgctgtgtttcccaggctggtcctgactcctggccttgagccatctttctgccttggcctcccaragtgctgggattacaggcatgagccactgcactcagccaagattttcatttagaaaatcttgcaaggggaggatgtttggagtagagcaaaataaactat

SEQ ID NO: 281760 - DNA, 201 bp, Homo sapiens
cctatcgccaccacccccacatcacacagtgtacacatgcatgtgtacaaacacacgataacatcgatgccagtggctgaaatttgacttgttcttttttwaaaaaattaaactgttcttcctgggttttttcctttaactataaataaacccggtgggtctggcattttgttaccaacatcttttcaggaacctacccat

SEQ ID NO: 281761 - DNA, 201 bp, Homo sapiens
tcagcctgagttctatactaaataataaaagcttggcctatttataataaagaacagttattctttaaggaaaggacattgagttgggagttaggaggaayttctagttctttgtctgccatgggtctgcccatatgaccaggggcaaatccagttttcaagtggatggtctttaagatcttattattctaataccagtgt

SEQ ID NO: 281762 - DNA, 201 bp, Homo sapiens
ccaatctacttctgaagacagcctagtgcaacctcattccttgtccagaaaaggaggacgtagtcttcaaggtgaccaaatcaccataggagaccctatcrccaccacccccacatcacacagtgtacacatgcatgtgtacaaacacacgataacatcgatgccagtggctgaaatttgacttgttctttttttaaaaaa

SEQ ID NO: 281763 - DNA, 201 bp, Homo sapiens
tcctgggttcaagtgattctcctgcctcagccctccaagtaggtggggctacaggcgtgcaccaccacacctggctaatttttttatttttagtagagtcrgggttgctccatgttggccaggctggtctcgaacacttgacctcaaatgatccgcccaactcggcctcccaaagtgctgggattactggcatgaaccact

SEQ ID NO: 281764 - DNA, 201 bp, Homo sapiens
cgccacctagcatccagacatagaactctatgacctaatattaacccattaccttctcccttcctagcgacttgaaaactcatgtgtccaatccttttacyttgtgttttaaatactttccatgactagcactacattagtattcattttcaacacgtttccattacaaatgtaaacactggagccacagtagggaattta

SEQ ID NO: 281765 - DNA, 201 bp, Homo sapiens
tagcatccaggtccggcattgacccattctttccttgctgaaattgtgtgtgtgtgtgtgtgtgtgtgtgtgtgtgtgtgtgtgtgtgtgtgtgaattcasagaagaggcaaattaatgtggcttagagtgttgaaaaatggacttaagaaagaaaatggggataggaatggctaaaatttggataggtggaaagatggga

SEQ ID NO: 281766 - DNA, 201 bp, Homo sapiens
tccttgaaaagaatgttgatgcttgattgcacgatgtttccctttaaagttttggccttgagaacttcaaagtgatgacactgttcttcctgccatgcccrctcttagctctgtgtggtcagtaagcagcgactcttatttttcttttatttttggaaactaagttggagtgagggcataaaccccctcacttgaattgtt

SEQ ID NO: 281767 - DNA, 201 bp, Homo sapiens
tccccacaaaaagttcatgggtaaattacagaggatctctgaatgatagtggcaaaaaatacatcatagttttaccaacttaaagtttgcaaatgttcgtktttgaatgtaggcaacaaacagtggcaatattaacagtacctgtcatgccaccaatagaactcataaattttttttaatttttatttttattattatact

SEQ ID NO: 281768 - DNA, 201 bp, Homo sapiens
atttgggaggaggagccaacgtgagagtcctcttccagttacatcaccatccatcctgaggtctggaacacacaccattcacaggatgcaaaacccagcayaggggttgtggacctgagaacctagatgagggtatttttatcttcatgcttttgaatacagataaaccacctataaaaagcttagcccagaggacccact

SEQ ID NO: 281769 - DNA, 201 bp, Homo sapiens; identical to SEQ ID NO: 57248

SEQ ID NO: 281770 - DNA, 201 bp, Homo sapiens
ctcctccatgttggccagagtccatattcattttgggcatcaaccctaacagaaatttatacataatctatcattagtcctgatgactttacttcttaaayacctcttaagtgttattacttctgtccaactcctctattaacaccattatagaagccacaaaattatctcccgtaggtttctgtagtagtcttctaacta

SEQ ID NO: 281771 - DNA, 201 bp, Homo sapiens
ggattataggcgtaagccaccgcgcctggcctggagatgtgatccttcatactaaaagtacactgggagtactgaacagattaaacaaatttaaatattcrcacaagtattttagagtgaaactgaagatatcaaggaaaaggaagcaaagcagatgaccaatgaaggaatcatagttaggctcatagcagacttcttgtc

SEQ ID NO: 281772 - DNA, 201 bp, Homo sapiens
tgagggcttctgtctgcttctaagatggttcttctggaggagaagcatgctatgtcttcacactgaaaaaggcagaagggcaagcgagtgaactccctccrtcaagccttttttgtttttttttttttgagatggagtcttacactgtcacccaggctagaatgccatggtgcaattttggctcactgcaacctctgcatc

SEQ ID NO: 281773 - DNA, 201 bp, Homo sapiens
cccacctaggcctcccaaagtgctgggattaaaggcatgagtcaccacacctggccggaaagaccacctttgtcttttttctctccacctcctatccatcrttcaaattctcatctgcagtctctcatgatcccagcctttgagatgttctcccttttctagaattccagttgcccatgtgctttacaccatttctttttc

SEQ ID NO: 281774 - DNA, 201 bp, Homo sapiens
tcctcctccctcagtctcccaagtagctgggactacaggcacaagccaccacgcctgactaatttttgtaattttttttttgtagaaatgaggtctcactrtgttacccaggctggtctcaaactcctaagctcaagtgatcctcccacctaggcctcccaaagtgctgggattaaaggcatgagtcaccacacctggccg

SEQ ID NO: 281775 - DNA, 201 bp, Homo sapiens
tcctcagtgaccacatttaacaaattgtaataaatgcagactagaaccataattcacagttttgcaatacaaaggaaagatgaaaaacaactggaggcttmaagtcctgtgagatacccattttaccttgctttaattacggcagcagatgtaaatttgatttgccccaagcctaggtggtctttggctagggctcattca

SEQ ID NO: 281776 - DNA, 201 bp, Homo sapiens
tttcccatgggtgtggtttccctggcagtcagttcctcagtgaccacatttaacaaattgtaataaatgcagactagaaccataattcacagttttgcaayacaaaggaaagatgaaaaacaactggaggcttaaagtcctgtgagatacccattttaccttgctttaattacggcagcagatgtaaatttgatttgcccc

SEQ ID NO: 281777 - DNA, 201 bp, Homo sapiens
gcattgaatctgcaggtgtggcttttagaaggttcagagagtggaattagggaagccagcccagcaccccacctgtgtgccttcctgagggccaggctggygtccccagcatttaatagacgtgcagggcctctattcattcccaatagataatgacaaccaaaataatcaaggaattgacacgctttgctggaaatgcct

SEQ ID NO: 281778 - DNA, 201 bp, Homo sapiens
tcctgagggccaggctggcgtccccagcatttaatagacgtgcagggcctctattcattcccaatagataatgacaaccaaaataatcaaggaattgacaygctttgctggaaatgcctgataatgacattatagaccgaattacagcaacttaaatttctttctagcaaatgatgccatgttttttaaaagatacttttg

SEQ ID NO: 281779 - DNA, 201 bp, Homo sapiens
agctggtaagtcaccagctgttgctgctggttatggtgccttgctgtgcagtccgtgagctaacttatttagtgagagattttcctgccaatttgctatarccttgagggagaaaaactgaaatctcccacagaggcaggaatttattttgcaaaaaatgaggcatttttaatatttgtagacattttaacatgtgaaaat

SEQ ID NO: 281780 - DNA, 201 bp, Homo sapiens
aaagataagattccattttgaagttacagggatttgcaatcagtatttctaaggtcttagatgtttgccattaagttttcctttgcattgattttatttcmgtttctccatctgtacatgattcatggtgtatgtgcttgaggtgggtggaactcgcccttgttggacaattttcagcataagaaggcaagtgggcagcac

SEQ ID NO: 281781 - DNA, 201 bp, Homo sapiens
gaataagactccaggtttatttggaaatgccagggacgatggataaagcaagaggctgacagcagaaggatgaactggagatgtctatatggaagagaagmcctttatttcatccctacctgggaaagcccagcacccagcagccgtctattgggtgaaaaattgattcattcccaaagtatttgaatgtttcctgagaaa

SEQ ID NO: 281782 - DNA, 201 bp, Homo sapiens
cgcccttcacctgcacaccatgtcatcatacgtttttatctttgccaggctgagagatgagaaattatgtgtcagtaggataagttgcatttctctcgttwtgagtgaagttgagcatcttctcacatgtttaagaggcatttgtattttcctttctcatcttatcattgcccattttgctaacattctgatttctagaaa

SEQ ID NO: 281783 - DNA, 201 bp, Homo sapiens
atgacaaagaatttattcttaaagatattaagatataagaagtcttataaatcagtaaaaaaaagactaattccccattgaaaaattacaagtaaaattcyggataatctaaaaaatgctcagcctcatctataatttttgaactgcaaattaaagcaatatgtcacttttaaggtattaaactggcagagacttcagaaa

SEQ ID NO: 281784 - DNA, 201 bp, Homo sapiens
gacaatatttacaaatatgacaaagaatttattcttaaagatattaagatataagaagtcttataaatcagtaaaaaaaagactaattccccattgaaaarttacaagtaaaattccggataatctaaaaaatgctcagcctcatctataatttttgaactgcaaattaaagcaatatgtcacttttaaggtattaaactg

SEQ ID NO: 281785 - DNA, 201 bp, Homo sapiens
aaaatattttagcatctggacatctttttatttaggttgacgaggcacttggagtccattgccatctcttcaaagagacatgtgacattctttaaatgcargccaattcatacaaagacatgtaaatgctaaattaaaagatgtgggtgagtagaactacattttaaatgcagtcaggaaatgttctctgaatgcagtcag

SEQ ID NO: 281786 - DNA, 201 bp, Homo sapiens
ggagaggcggacagaggagaggtgggtgctgtctttaggggtagaagaagatgcagcagaagtaaggctctggggacagcaggaggggactgttccaagtkaagtgacactttagaaagtgtgtaaaagcctgagagcaagaggctcactctggtgaaccgcctatttggcaggagcggagggcttagggaggtgaggagc

SEQ ID NO: 281787 - DNA, 201 bp, Homo sapiens
agggctgtactggaggtttcttgtgggaggaaatgtaaattataagaactgataaaaacagactcctgtgatcagaggcagagcgtatgaccatttaaagstatcattccacataacctggtggaaaaggacatcttcgtttcctgtgctgttaggtgtcagtttgggggaaacgtgttccccaggttatgcacagatggc

SEQ ID NO: 281788 - DNA, 201 bp, Homo sapiens
catcaagaaagaacgcttagacattaaaatatgattgtcatgatcaaaaattcagtggaaggacatggaagatcaaaaaatctcttagaagagcaaaaagrcagagtaagaaaagatgaaagagtaacgattataaaagatcattcaagtttcaaaagccaattggaaaactagaattaaagaatgcagaaaatgaaggag

SEQ ID NO: 281789 - DNA, 201 bp, Homo sapiens
taggtctaccatgtgagatttcagaaaatcagggttagagagagaaatgttaaagagcacacaatcttctctgatgttaaaacacacacacacacacacayacatagacagacacacatcacctgcaagttattgagaacattattagcaacaaattccttgtaagctagaaaacagcaaagcaaaaagttacttgaggaa

SEQ ID NO: 281790 - DNA, 201 bp, Homo sapiens
cacacacacacacatagacagacacacatcacctgcaagttattgagaacattattagcaacaaattccttgtaagctagaaaacagcaaagcaaaaagtwacttgaggaattacttcagcaaaacgagggagtaaaacaagcaagtcagacatagaatccagctaaatgggattcttaacctctgagggacacaactgag

SEQ ID NO: 281791 - DNA, 201 bp, Homo sapiens
tttttttaaatttattttcttcccatctatctttaaaatataagtttttttaaaaaaaaaactagggttgtagtcatattatatatatataattttatccygactttctcagataagcatttttcctatagttacatattctttgtaaacattttaaatgactgcagttatttacaatgacatgtactacaagttccctaa

SEQ ID NO: 281792 - DNA, 201 bp, Homo sapiens
gaaagtcatatacacgcgcactctccctctccgaggagtaacgagaaaggcacgccagagccgaatgctccgccaggctgatgcaagccatccaggagcayggaggaccaggaagccccagcttcagagatacgctgcgaaatacatttgtcctgggtgtatctaaagcaggagtcacaggtgattttaggaccaaaggcc

SEQ ID NO: 281793 - DNA, 201 bp, Homo sapiens
ctgtcccaaccagctgagactgtcctttgagcaaaagaaacctcaggcattgcctctatttctaaggcattgtttttcttaaataaataaaatgaagaagkgctttggattgtctgctttttaagtgtttcagtaaatatctatgttttccaaatacgtgacggtaagaaagttacgctcttggtcttcaactagttcaaa

SEQ ID NO: 281794 - DNA, 201 bp, Homo sapiens
taagaaagttagaaccaaaggacagcagaaaatgccaaaaaaccaacaatacagaaacacgtcttatgaacactactcttcaaatattaatgtaagagttragaggaatgctctagcttcttccgttctgtcaagcttctgttgccatcctgtaaatcatttcatataatgcagttttcacacactcacacaaataataag

SEQ ID NO: 281795 - DNA, 201 bp, Homo sapiens
aaatccatgattagagtagagaaaactgagatacagagaagttagtgtctcagccagggccagacgactacaccagacccacggctttccactcaccttcrgtatttgatcaactacctaaggcttcagtgaaatattttgatgattttatttttatttttattttcttcctttgatgatatattttaaaagtggcttttc

SEQ ID NO: 281796 - DNA, 201 bp, Homo sapiens
ccttactgcagagcacctgacccggaactgtttgaattacaatatagaggaagtgccgtctcacccagcaaggcagtcagaacctaccaatcaactgaaayattcaccgagggccaattgtgtccctgtgggttctgttctagccattggaaatactaaatccaatacagagtggcccccatcctcaagaaacctacagcc

SEQ ID NO: 281797 - DNA, 201 bp, Homo sapiens
aatttcctcaactccagaaatcacttttccataattaagagcatagattctagagccagattgcctggacccatatcctagttcagctacaagttatgaamcttattcctgcctcagtttccccaagtgtaaatgaggataattattttttctactccattgacgtgttatggggcttcagcaagctggttacatgaggta

SEQ ID NO: 281798 - DNA, 201 bp, Homo sapiens
atcactctgcttcgggaagaccttgttcttgggccaagatttagtggattcatctaatcctttcatggaaggaattaaaatggaacacctggctatttgcwttatttttatctgaagccacttgccatcacttgaggataattatgttgaattttgtttcattcttgatatcccacacaaaatttcctcaactccagaaat

SEQ ID NO: 281799 - DNA, 201 bp, Homo sapiens
ttctcacagcaaatgtttccatctctcctgccttgggacagaccggagagcagagcacagctgtctcttctgcttgtgttttgtgatggatggtgggcggrggggagtctagtcctgggcagaggagatggaagtgcccactgcagggggtgtgaggacagaagccagacctccccaccatgctggcccccactggacctt

SEQ ID NO: 281800 - DNA, 201 bp, Homo sapiens
aaaaaagagttcagaacaaatagtggtcttggtcaggagaaaatgagttcgggtttggatacattatttttatcagtgtttctcatgtttttcctattctrtgtgaactcctgtcttcagatttaaatagttgattatatgaactgaaattgtagaatgggagaattttattgctaatcagattatcctaggctttgtggt

SEQ ID NO: 281801 - DNA, 201 bp, Homo sapiens
tacatgtcacagaacctaggacagggtcagtccctccctccttaaaaatcagtccttttttttttttttttttttttttttttgccatctttccagaaagkgcatttcaaataaaaggtgatgaacatttttaaagcagaccttcagaaacaaatctatcttattttctttttgtttatttatttttatttttttgagact

SEQ ID NO: 281802 - DNA, 201 bp, Homo sapiens
ggacagggtcagtccctccctccttaaaaatcagtccttttttttttttttttttttttttttttgccatctttccagaaagtgcatttcaaataaaaggkgatgaacatttttaaagcagaccttcagaaacaaatctatcttattttctttttgtttatttatttttatttttttgagactaagtatcactctgtcacc

SEQ ID NO: 281803 - DNA, 201 bp, Homo sapiens
cattaaattgtattgttgttttgactgacatagcacattacatgtttctgtatttttcttcctctctgttttctctgtgagttagccagagtcactatttwaaaaaaaaaaaaaaaaaactatcagaatcaccaggaatggtgtttttgaatataagattaagtaaaaaggaatgaaatgctgaaggtataataaagatgg

SEQ ID NO: 281804 - DNA, 201 bp, Homo sapiens
tgagtcacccctgacatccttaaacctcattcatgaacacttcttgcttcataggtcaaatctttacaaccaaacagattgcaatgcaacaaattttaaayatttatgtctgaacagtgtaaaacacaaattagaagccatggccagtatcttaattgggttggcagatcacagtatggtggccatattctgtgatggcct

SEQ ID NO: 281805 - DNA, 201 bp, Homo sapiens
agctgctatctaatagctgacagatcactggatccagaggcagatctgctggagaccagcctgggaacctccgggcctcccttgtcagccctctgacgggyacttctgtcatcttaacatggggttgacagttccttgcaggtccacacgagagcaccaaaggacccagggcagcaggcaacatctgctagttagtgctga

SEQ ID NO: 281806 - DNA, 201 bp, Homo sapiens
ttgtgtatgtactctatgatgcttgcacaaccacgaaatcacctaatgatgcatttctcagaatgtacccctgacattaagcaatgcgtgactgtaaaccrtttgattttctaagcctcacgtgtttgatgctggggaggtatttaaaattctggtttttgtttccagcagctgtggtcttctgataacaatgcaaatctt

SEQ ID NO: 281807 - DNA, 201 bp, Homo sapiens
tttgccttgctgataactgcaaataaataattcagatgaccacccaccaaaacaccaagacatttgggggtttatgtgtttcctacagaatattttccttwtaaatttcatggtcaaggagcacaagaatgaagtagtacctcattttattccatttttaaattctgcagcacctgtttcaatatttttgtatatcccaat

SEQ ID NO: 281808 - DNA, 201 bp, Homo sapiens
cgtgtactagttggagttaattcattgaacaaatatttatcgagcacttatatatgtgtcagcccctgtgttagacatgaaggaacaaggcagacttgggytttctgtcatgtttgagacaaacctggagttccagactcttattttattgttcttgttgctactgcggttcacatgtgaatgactggttttgtttccagt

SEQ ID NO: 281809 - DNA, 201 bp, Homo sapiens
aagctctcttggccacttgccctgcctcccttccattggcaggtagtcacctccttaaccctcccggaacctccccttctgtcttacttacattgacttakttcagtggttctcacacttttgtgccttagcatcccttggaaggcttggcaaaacacagactgctggcaccccttcccccagagttccttctaattcaga

SEQ ID NO: 281810 - DNA, 201 bp, Homo sapiens
ggtcatgttcaaaaccaagcccatttccccccttatctgcagccaaatcttttcctcccccagcattgcccatctccatgaatggataccatcacgtattyggttgtcctagccaggaatctgggaaggaagctctcttggccacttgccctgcctcccttccattggcaggtagtcacctccttaaccctcccggaacct

SEQ ID NO: 281811 - DNA, 201 bp, Homo sapiens
gcctcagtttcttaacctctacagtagggataataatacttatccatggctgggcacggtggctcacacctgtaatcctagcactttggcaggccaaggcrggtggatcacctgaggtcaggagttcaagaccagcctgaccaacatggtgaaaccctgtctctactaaaaatacaaaaattagctgggcgtggtggcagg

SEQ ID NO: 281812 - DNA, 201 bp, Homo sapiens
tatcaagtttaaatagccattaccagcacgaatagttaaagaatcattaccaatcagcaaaaaatattttaaggttataccttgtaggttccatattaggrtctccaaagaaaagaatgatctttggtggcatttaaggatattgcattttatgtataagattgtacatacagtaggggcaggttctctttgattacctta

SEQ ID NO: 281813 - DNA, 201 bp, Homo sapiens
ttgtattgcttttattaaagtttcaacgtgcataaacagaaaaaatattattttaatatatattcaagaaataatttgtggtatgaatagctccttttttkgtaatttattagaggaatgaagggggaaatggtttagaagactagtggaaattgtagtcagttgttctcacctataaatggtagaattctgaaaatttgt

SEQ ID NO: 281814 - DNA, 201 bp, Homo sapiens
tttcttatccagaaaccaaggtgtgcattatagtatacatttcagatctcactttaggaagccatgctttaaacagtaaaacagaatgagcactttgatgwataaaatattttagcatctggacatctttttatttaggttgacgaggcacttggagtccattgccatctcttcaaagagacatgtgacattctttaaatg

SEQ ID NO: 281815 - DNA, 201 bp, Homo sapiens
tgccactctttaagacttgttactattttaagatgccactggaaacacagaggccctgcaaaaagatggacattgggtccaccaagtatccagacaggggyggggttggatggtccaggagtacacaggtgacctcctggggagccaaggtatttcccccaaggtgggtgagaaagcaggacattttcaggtgaaacagat

SEQ ID NO: 281816 - DNA, 201 bp, Homo sapiens
cagccttggccacttgtggaggctttaaaaactactgatgcctgggtcccacacccgaaagttctggtttaataggtctagggtgcagcctgggctttggrattttttttttttttaagcttcagaagtgaggccaacgtgtagctgaggttgagaactactgaggaattaacaacgtatccgttcctgactgtattagca

SEQ ID NO: 281817 - DNA, 201 bp, Homo sapiens
ggcgctcagcgctgcacccctactggggcaggtggctaacatttattaaggcggtggttctcagccttggccacttgtggaggctttaaaaactactgatkcctgggtcccacacccgaaagttctggtttaataggtctagggtgcagcctgggctttgggattttttttttttttaagcttcagaagtgaggccaacgt

SEQ ID NO: 281818 - DNA, 201 bp, Homo sapiens
ataattcatggatagttaacacttaacctattttagagatgtcacaaagattgctgtgacttgtatgtggaatatgaatttagctaatttttgaacagcagattatagtacaatggttatattttgtctttatatttgctcactagaatggagccgatgagctcagcaggagaaaacatttgggtttattatgttccttat

SEQ ID NO: 281819 - DNA, 201 bp, Homo sapiens
agaacaacccaggaagggtcaggatggacagggcactgcagtctctgcaccaagtggtgtgccctacatggccctgagacttcagaagactcgggtcttargctcactgcagactgtgtaacgtgaataacaaaaaaaaaatttctactgcacatgagtaagctgcagaagactttgtgccttgaagcttccttccagatg

SEQ ID NO: 281820 - DNA, 201 bp, Homo sapiens
ggcttcagtgtcttcatctctacaatgaaggagtttcattagatccatgattctcagctgtttccgttccttaggaccctcatccatagcagtgtttccayagggtcttgactgtccctatgggaatacatctcagtggccaggagagggagaaagggcatggcattggaagtccttttaaaaaagtccctgagctcacgc

SEQ ID NO: 281821 - DNA, 201 bp, Homo sapiens
gtttaatcaaagtcgtgcatgcacgtaacacacagagtttacagaaccaaagtgcttgttgaaaaacagtggtccccgatggcgccctgcacgtcactttytgctcttttatctggttctttagtattaacttcatatccctggttaacctgttatgttgctgcttccggatttcactcagctttaggcattgtctgtgca

SEQ ID NO: 281822 - DNA, 201 bp, Homo sapiens
ttccgtcgctttggagactggagaggggaacaaaatcacatgatccgcacccccagcatgaggcaggaggagcgctacctggtaagtcctgtcgcatgcaraaggcggtctccccactgcctgaggagtgggccctccaccagggaaggttcactcttcccttcccaggccttctccttggcgcctccatggagcgtggcg

SEQ ID NO: 281823 - DNA, 201 bp, Homo sapiens
gatgaaaaatcaccatgcaaaggaaagttgagagctaagtttttccttttggaatcttggcatgcgcatttagctatcttcaatctggctttcaccagacrctgtgtgctttgagcaggggtggagcagtctgccctgtgccgctctgccagaacattcagacttgacctgtcacaggcctcttattccagtcaggagcag

SEQ ID NO: 281824 - DNA, 201 bp, Homo sapiens
agtctacagaggcaggcaggcctccttgagctgcggtgggctccacccagtttgagcttcccggccactttgtttacctactcaagcctcagcaatggcargcgcccctcccccagcctggctgccacctcgcagttcgatctcatactgctgtgctagcagcgagtgaggctccatgggcgtgggaccctccgagccagg

SEQ ID NO: 281825 - DNA, 201 bp, Homo sapiens
gataattgtatataagttgaagttttatatacagaaattttcttgataacagaaacatttcttgataattgtatataagttgaagttttataattcaaatygtaggttcagagctggaagggaatcccagcatttgggaggctgaggcaggcagatcacaaggtcaggagttcgagaccagcctggccagcatggcgaaac

SEQ ID NO: 281826 - DNA, 201 bp, Homo sapiens
tcaagcctcagcaatggcaggcgcccctcccccagcctggctgccacctcgcagttcgatctcatactgctgtgctagcagcgagtgaggctccatgggcrtgggaccctccgagccaggcgtgggatgtaatctcctggtgtgccatttgctaagaccattggaaaatcgcagtattagggtgggagtgacctgattttc

SEQ ID NO: 281827 - DNA, 201 bp, Homo sapiens
atggatagtgattcctctgatggatctgggcaaagtacattgaaaatcctctggtaagaattcaccattctggattccattaagaacatttgtcattcatkgaagaaggtcagaatatcagtattcacaggagtttggaagaagttgggatgacatcgagggggtcaagacttgagtggagaagtaactgcagatgtggtg

SEQ ID NO: 281828 - DNA, 201 bp, Homo sapiens
catgggcgtgggaccctccgagccaggcgtgggatgtaatctcctggtgtgccatttgctaagaccattggaaaatcgcagtattagggtgggagtgaccygattttccaggtgccatgcgtcacagcttcccttggctaggaaagggaattccctgaccccttgcacttcccgggtgaggcgatgccccgccctgcttcg

SEQ ID NO: 281829 - DNA, 201 bp, Homo sapiens
atcccagcactttgggaggccgaggcgggcggatcacgaggtcagaagttcgagaccacggtgaaaccctgtctctactaaaaaatacaaaaaattagccrggcgtggtggcgggcgcctgtagtcccagctactcagagaggctgaggcaggagaatggcgtgaacccgggaggcggagcttgcagtgaaccgagatcga

SEQ ID NO: 281830 - DNA, 201 bp, Homo sapiens
attcgctaaggagccttatgtaaaacttgataaatgttgcacttataccgctggtccactgggaataagtgggaataaaaagagtcggatattggccaggygcggaggctcacgcttgtaatcccagcactttgggaggccgaggcgggcggatcacgaggtcagaagttcgagaccacggtgaaaccctgtctctactaa

SEQ ID NO: 281831 - DNA, 201 bp, Homo sapiens
gactgtcaccatctcgcaccatatcagttaactaatcgtgcaaatatgtcctggttcttttcacttgtacttgaaggacacaatatcacattttattgatrtataatattttacatatttatgggatatgtatgatatttttttccatgcatagaatgtgcaatgatcaaatcagggtgtttagggtatccatcaccttga

SEQ ID NO: 281832 - DNA, 201 bp, Homo sapiens
ttttggcaactgtcctttggatttcatcagttcacctggcaaattctagccagtagttttttaaaaactcaccttgtctctctctctctctctctctctcwcacacacacacacacacacacacacacacacacgtggccctttcttgtatacagaagctataaaatgtgtgtagatttctagccctgaaatactaaagtt

SEQ ID NO: 281833 - DNA, 201 bp, Homo sapiens
caggaaaaaattgagcttccttacagaatgttctctaatatttttattatatgcaggtacatcttaggatatatacatttagtgaaccaacataaaccccrgttcatatcctctgaagatgagaacagacactggggaacacactatactaatagtcatttattttttctgggatttttttgtttgctttttataacatta

SEQ ID NO: 281834 - DNA, 201 bp, Homo sapiens
gcaggaaaaaattgagcttccttacagaatgttctctaatatttttattatatgcaggtacatcttaggatatatacatttagtgaaccaacataaacccyagttcatatcctctgaagatgagaacagacactggggaacacactatactaatagtcatttattttttctgggatttttttgtttgctttttataacatt

SEQ ID NO: 281835 - DNA, 201 bp, Homo sapiens
ggaactttaaaaataccaaataccatggacttgtcccagaataattaaaatcagaatcgctaaggctgggccctgacagcaacatttcttaaaagcaggcragtagaatgtgcagagagggctaaaccttgagtgagaagatggtgaggcagtgaaggcggctctaatactgctactgctacttgtagtagtgcagctagt

SEQ ID NO: 281836 - DNA, 201 bp, Homo sapiens
attcttgaaaactatcccgagtgctccaaccccaggttattttacatcattccgtacttttgtggacagcatcccagatgcaggtaagggctaaagcaggstcatggcatgcacgtacgcacaacaagggcaagaaccccaccagcctggtactcggtgggaatcttttgtatccctagtctctcaaccttctggaattca

SEQ ID NO: 281837 - DNA, 201 bp, Homo sapiens
tggtaaactcaagtgcttgagtactctcaattgtgttttttgcagattctgtttatttccgttgaatttgttattgtaattgtgtaatttacttaattggyatataaactgaagaagtatgaggggattattgtttttaagaaaaagcataaattatatttctctcattcccaatttgaactaaaaaaattgttactagct

SEQ ID NO: 281838 - DNA, 201 bp, Homo sapiens
agactcataaataaatatcacacatgtcagtgaaaaccaaaagcttttttctgtcatcaagatttcaggattctttttttttttttttttttccagctttmagtgcctatcctttttgtctgggaaggctgatttctttagctcttttctttctctgggaataatgcattcgcattgctatcgtagttatccttgcagcgg

SEQ ID NO: 281839 - DNA, 201 bp, Homo sapiens
actttaggaggccgaggcaagtggatcacttgaggtcaggagttcgagaccagcctgaccaaaaccccatctatactaaaaaatacaaaaatcagctgggygtggtggcggatgcctgtaatcccagctactcaggacgctgaggcaggagaatcgcttgaacctggggggcagaggttgtagtgagccgagatggggcca

SEQ ID NO: 281840 - DNA, 201 bp, Homo sapiens
tcgaggtcacatgaagttgagtgaccacatcctgtggcacattcccacttgctcttctagtttatttttaatacagaccaagagtaaaaatatatacacaycccatttcagatgcaaattgaagccagactttgtttctacatatctgtgaaatggagtaagctaactaatgggaaaaaagattatgcctaatacttagac

SEQ ID NO: 281841 - DNA, 201 bp, Homo sapiens
gtttacatgtattggtggacaacacataagaagtgcgtagggtcagagaaatgccactcgaggtcattatttccactcaattgctcactggggaaaaaacraacatgagttctattctgtaatcagtactgctggcaacagtactgatcactaagcactgtgagaagcacatttcagtacaatactcttgttgtcctaagt

SEQ ID NO: 281842 - DNA, 201 bp, Homo sapiens
gatgtgtggacaggctttctggctataagcagtagcattagctatttggggctcagaaacccgtgcatttgaaatttgtcattttttgtgaaactgggttkttattttgagagttgctcctgtgttccttatttttccatgagttcaccttcatggtatactaaacttcatttttacttaagatgcaatgctacatagaaa

SEQ ID NO: 281843 - DNA, 201 bp, Homo sapiens
tcaaaccatcctcctccctcagtctcccaagtagctgggactacaggcacaagccaccacgcctgactaatttttgtaattttttttttgtagaaatgagktctcactgtgttacccaggctggtctcaaactcctaagctcaagtgatcctcccacctaggcctcccaaagtgctgggattaaaggcatgagtcaccaca

SEQ ID NO: 281844 - DNA, 201 bp, Homo sapiens
ctattcttgtccttatgctgataacctaagttgaaaggccttttttgtctttttcttctttttttgagacaggatcttcctctgttgcctaggttggagtkcagtggttgggatctcagctcgctgcagcctctacctcccaggttcaaaccatcctcctccctcagtctcccaagtagctgggactacaggcacaagcca

SEQ ID NO: 281845 - DNA, 201 bp, Homo sapiens
tttttttttgccatctttccagaaagtgcatttcaaataaaaggtgatgaacatttttaaagcagaccttcagaaacaaatctatcttattttctttttgkttatttatttttatttttttgagactaagtatcactctgtcacccaggctgaagtgcaatggcgcgatctcagctcactgcaatctctgcctctcggctt

SEQ ID NO: 281846 - DNA, 201 bp, Homo sapiens
gtctgaatttttaacctgtgtccccagtgactctaagttacaggccaaatacgtattacgacactgtactcaaaatctgaggcctgcacaacctgggaagyggtgtgctcaaacgcaaggtgctggggctatgtgggggcaggggtcagcttcagggtagggctgaggcatctcccacaggggatgtgactcaaaactgct

SEQ ID NO: 281847 - DNA, 201 bp, Homo sapiens
tattgtcctacatgtttatattgtcctgtagtctatactttcattcacttgaaaatttatccaagacttttcaggatagcacacacagatccttctcattytttccaggtatccagtatttcagtgtgtgaatgtaccataatttctcttaaaaccaatcccccgttcgtgaacatgtaaattctgccatattttgttgta

SEQ ID NO: 281848 - DNA, 201 bp, Homo sapiens
gcatacattgtaataaaagctaacacttcaaaaaaggaataaggaaaaattcagtatattctcatcttcctttatgccaaccaccagaaaaaactgctttsaatcgtgtgctgtgtctccttccagatccttttgtgtttatgtaaacatgttgatttttatattgtcctacatgtttatattgtcctgtagtctatactt

SEQ ID NO: 281849 - DNA, 201 bp, Homo sapiens
ggaggtggagcttccagtgagccgagatcacgccactgcagtccagcctgggggacagcaagactctgtctcaaaaaaaaaaacaaaaaaagtaagatgcrtacattgtaataaaagctaacacttcaaaaaaggaataaggaaaaattcagtatattctcatcttcctttatgccaaccaccagaaaaaactgctttcaa

SEQ ID NO: 281850 - DNA, 201 bp, Homo sapiens
ctttactccgtccttctttgtgaaatctcgacctcagcagatgaacactgtcctggccagaatcaccctaggctctgcttctcacccagctcctggccccstccctgttgccactgctgcagagggaggccaccagggttattgggtccctcggactaaaggctcaggttccaaggggaggccaactaccagaggacaccc

SEQ ID NO: 281851 - DNA, 201 bp, Homo sapiens
ccctttagactcaaaagatgagagtcacccatcaccatccatctggtggaagcattacaggagcaagtggataaaagacgattttgctgtaagatcagaayggaaaaagacgagcccacaaagaaaatctagagggaggaaagcatatggtttttaaaatagtacagtttagaatacattgcaacacaaatggattaattt

SEQ ID NO: 281852 - DNA, 201 bp, Homo sapiens
ccaataacacgtgctttggatatcagattaatctggggcaggaaacacttgcaaagtggaatccacccaagagaaaaaggccaatatgccagcatcaaagkcttagtgttttgttttgctttacaaagtgagcacatagtgagcacacattgctgaaacaatcaatgtctcaactgtatgccaaattctgtaagttgataa

SEQ ID NO: 281853 - DNA, 201 bp, Homo sapiens
tctcagagtcaccagagtttctttcaaatgcagattcctggccctgcatatcaaatgccctggaagtctggccagggaaatcacagtttgtatcaggtgcyccattgttatccctgttgcactgtcaataggagtcctccaaggagagcaaggaagtgcagactggggcacctctggaggctgcacacagggaggagaggt

SEQ ID NO: 281854 - DNA, 201 bp, Homo sapiens
taagctacctggtttgtggcaacttgttatcataggaaactaatgcagttagaagtcctcttcctccccatttccaggggaagacctggagggtccgttcrcattcaaaatctgcccacgttcaaagcagctatgaggagcaaaccttggattaggacaaagagccttcaaagatgaacactgtcctctggattgcctttc

SEQ ID NO: 281855 - DNA, 201 bp, Homo sapiens
atattgtttgcctaagtataatagggcatgtgcgttggttcctggcatcagccatggaagattagcttactttcaccaactcagaatcagtcccagtggcyatcacaaaagaccacacaactcccagagtgtctataagtagatacaaaaccacatgtgttattagtcttgatcttagaccatattattattagctttgct

SEQ ID NO: 281856 - DNA, 201 bp, Homo sapiens
ctggctgccatccagtttatcagaaaaaaatttcatattcctgctttttttctgggaagcaaagaattttcagattttcacaggcatccgcatcccctagracagtgagcattccagtctgtgtggaaggccagtgctgtggcctccttttctgagggctggccctaccacgggagaggaagcactctggtgggagccttg

SEQ ID NO: 281857 - DNA, 201 bp, Homo sapiens
gcctggctaattttttttttttttttaattttaatagacccaaggtctagctatgttgcccagccaggtcttgaactcctgggcttaagcgatcctcccgyctcagcctcccaaagtgctaggattacaggcatgagctattgcatctcgcctggttttaatttttacattttttaatgaattttgagtctcacgttgttg

SEQ ID NO: 281858 - DNA, 201 bp, Homo sapiens
cggctaatttttgtagtttttagtagagatggggtttcaccatcttgaccaggctggccttgaactcctgacctcgtgatccacctgcctcggcctcccaragtgctgggattacaggagtgagccactgtggccagccgaaaaatatgttttgattaatattatgtaaggtaaataggggaaacgttcacaaagatgatt

SEQ ID NO: 281859 - DNA, 201 bp, Homo sapiens
aaaattgggagcataatctctttaaatcagcagaagtttacctaatacagaagctttcactataactgtattttcattatctgggattggagcagcaaaayactcttgattttctaagcagtagccataagaagaagaatataaaaatgggtaaaaatattactggtatgtgaacatcttctcatccgttcttattgcttc

SEQ ID NO: 281860 - DNA, 201 bp, Homo sapiens
tgtgagacttatttactaccacgagaacagtatgagagaaactgccccccaagattcaattgtctccctctgggtccctcccacaacacatgggaattatkggagtataattcaagatgagatttgggtgaggacacagccaaaccatatcatcgttcaactagaaaatatatatatatacacacacacacacttagtgaa

SEQ ID NO: 281861 - DNA, 201 bp, Homo sapiens
ggtatatatgtaccacattttctttatccagtctgccattgatgggcatttaggttcattctatgtctttgctattgtgaatagtcagcaccattttttckgataacatatgcttacttagtgcctctgtatcatattttggtaattcttgcaatattttcaactttttcattattattatatctgttatggggatctgtg

SEQ ID NO: 281862 - DNA, 201 bp, Homo sapiens
agcatgagaaaaagccttcatctcaaatcgttaataacaagaaaagaaagtataggagctcccttatccaacaccatttgatggaatcattcttgaccccytgtcctcctgagaaaaagcaccagatcattcatgaccttctcaccactgcttcatttaggactatgaagacagtatcatagggtataatgaaacagttat

SEQ ID NO: 281863 - DNA, 201 bp, Homo sapiens
tttaatgaatggtggaaagctttttctaatgaagagcaactgttgtcatctccagatgagggagagcatcttattcctgctgaagccactcccttttccartcttggagcttccatgaaagtggatttcttatgctgtcattttcaccctgctggttacacatcaagttctcaaaaatgtcaaattgggctgctgccctaa

SEQ ID NO: 281864 - DNA, 201 bp, Homo sapiens
gtagtcccagctactcgggaggctgaggcaggagaatggtgtgaactcgggaggtggagcttgcagtgagccaagatcgcgccactgtactccagcctggrtgacagagtgagaatctgtctcaaaaaaaaaaaaaaaaaaaagaaaagaaaatcagcttgttcagccgtccgctacccccaccccacattcatacccaga

SEQ ID NO: 281865 - DNA, 201 bp, Homo sapiens
gaggctattttggtccccttgctagcacagattttgattcaacatctctgagcttcattgttttgtaaggattaaacatgcctgttagattgtcttctacraggctctgaataaatggtaattattttatattattgatgatggtgatggtatgaacatttttattattatcatcatttttattatcgttagagagtgtgt

SEQ ID NO: 281866 - DNA, 201 bp, Homo sapiens
cctggcaggcacctgtgggcattggtaattgctgtcccagctctggagcctgtattcagcagggggtgggggcagagtggggacagactgcacacaacacrgtgcccagcagatgttgggaacccagtaagagcagcgttgaaggatgctacattcactgagtgttataccttgagtgttgaaagtgctgagatcgccata

SEQ ID NO: 281867 - DNA, 201 bp, Homo sapiens
ccagttggaaggactgggaaggccctggatggggctacatctgggctggtccttgagggaaacaggatttggacttatgcaagtgaaggtgggaggtagarggggtaaactctcagcatcttgctgcatttcaaatatgaatgtctgattttaaataaatttttatatccataaagggagcctggtgaatgggcccttgag

SEQ ID NO: 281868 - DNA, 201 bp, Homo sapiens
ttttagaaggttcagagagtggaattagggaagccagcccagcaccccacctgtgtgccttcctgagggccaggctggcgtccccagcatttaatagacgygcagggcctctattcattcccaatagataatgacaaccaaaataatcaaggaattgacacgctttgctggaaatgcctgataatgacattatagaccgaa

SEQ ID NO: 281869 - DNA, 201 bp, Homo sapiens
ttgtctgctgccatgtgagatgtgcctttcaccttcagccatgatcgtgaggcctccttagccatgtggaactgtgactccgtcaaacctctttcttttgyaaattacccagtcttgggtatgtctttatcagcagtgtgaaaatggactaatacacaaaactaccacaagttcctaagaaagattacatttttttcccct

SEQ ID NO: 281870 - DNA, 201 bp, Homo sapiens
tataacaaataattctcttgttttgtaaatttatttacatacttttctatgatccccaatttatccttgaactcttcttcagttgtgtaaatctccctggmgccttcacacacattaggtgttgtgtcagtgtggagttgatgaagtctctcctggggtcttcttgcctgctcccatcagaacggcttgctcgctcaacct

SEQ ID NO: 281871 - DNA, 201 bp, Homo sapiens
gcagcctttgctgtctccctccctgcttttggagtccccgtgtctgttctcatcttcagaggatatgaactggggtttatgttggttcactaaatgtatawatcctaagatgtacctgcatataataaaaatagggaacattctataagaaagctgtgagagaaatctcaaataccagcataataaaggggcttgatttcg

SEQ ID NO: 281872 - DNA, 201 bp, Homo sapiens
ttataaaatgttctgttaggaacccatttcagaagagtctatgccaagttatttaacagaaattctagagtgttcaatgtgtgttatgtttttaatttcartgaagaccatgttatctatttacaaggatctaggctcccctgtgcaaaggacccaacctggcaaaggactttcaaaagagtcagtttgaaaagtaatacc

SEQ ID NO: 281873 - DNA, 201 bp, Homo sapiens
tgtataaacccattatgctgtaactttaaagaatattcccaaagtttttctggcctgaaattaataaccatttatatagcaaatcaactcaatccattatrtagaccaacattttgcaagtgattgaagactagtaaaatgtgattggtatttctcagatagttttgtagtcaaggtatttatatgattacacttgctgtc

SEQ ID NO: 281874 - DNA, 201 bp, Homo sapiens
aaacatgtgccatggtggtttgctgcacccatcaacccatcacctaggtattaagcccaacatgcattagctatttatcttgatgctctccctcccccaaycccactgacacgccccagtatgtgttcccctccctatgtccatgtgttctcattgttcagctcccacttataagtgagaacatgtagtgtttggttttct

SEQ ID NO: 281875 - DNA, 201 bp, Homo sapiens
cttttctcctcccaaactataaagccattagccattccctccaaaacacctgccagtttcctgtgagatcggttgttaagtttgggtgcctcagtcagcakgaggagtagtaggctctaggcctggacattgaccattatgctctaccacactgtgaagaaaggtgtgagaagcagtaatagccctctcacctgtccacac

SEQ ID NO: 281876 - DNA, 201 bp, Homo sapiens
ttctcctgcctcagcttcccaagcagctgggattacaggctcccactaccatgcccagctaatttttgtatttttggtagagacgggatttcaccatgttsatcaggctggtcttgaactcctgacctcaggtgagccacctgcctcggcctccgaaagtgctgggattactggcgtgatccaccgcgcccggcctagtat

SEQ ID NO: 281877 - DNA, 201 bp, Homo sapiens
gggaaatcacagtttgtatcaggtgccccattgttatccctgttgcactgtcaataggagtcctccaaggagagcaaggaagtgcagactggggcacctcyggaggctgcacacagggaggagaggtggaaggaagagctgctggctgagaagctgctgtcatcatcctgtgggggtgaagagggggtgtgggaataaggg

SEQ ID NO: 281878 - DNA, 201 bp, Homo sapiens
aaaagcaggaaatgttggaaagtcaggattcccactgtgggaagctgtcaaaatattaataaggtatttcaaagactttgggcagccacaaacgataaacrtccattacatgtagtttagaattgtatcctagtgcaactgttattatgtgaacatgattaccaaatcttggaaagaaaagattggctcaaatatgaaaaa

SEQ ID NO: 281879 - DNA, 201 bp, Homo sapiens
tacatagttttcctcagtgctataaagaaacacgaaacaaatagcttctccagcaaccagagccaacagactgtcacttctctaaacatttaagctgctthcctgcagttctattttcaaagtaaatgatctattcagctgtttgcttttgttgtttgttttggcaggaaatttgaatagggacagaataatagctaaaat

SEQ ID NO: 281880 - DNA, 201 bp, Homo sapiens
caagaacaggcaatagtttgggacaacgttcatctgagctctgagtgtggtgtttaatcttcagtcccttcctctgtgacatgagttttgatcttctctgrttaatgaaattttaggggaggtgactgaaggcaattttgttcctctttggcaggtccaatttctaggtagataagggaacttcagagaacagcttcatcc

SEQ ID NO: 281881 - DNA, 201 bp, Homo sapiens
atacaatcgtcacagggtcctgaggtgacatacatcctcagcttacgaagatgatgggattaagagattaaagtaaagacaggcataggaaatcatgagartattgattggggaagtgataaatgtccatgaaatcttcacaatttatgttcagagattgtagtaaagacaggcataagaaattataaaagtattaatttg

SEQ ID NO: 281882 - DNA, 201 bp, Homo sapiens
attggggaagtgataaatgtccatgaaatcttcacaatttatgttcagagattgtagtaaagacaggcataagaaattataaaagtattaatttggggaamtaatacatgtccatgaaatcttcacaatttatgttcttctgccttcagcctgtccctccgttcggggtccctgacttcctgcagcatcttgcctaattgc

SEQ ID NO: 281883 - DNA, 201 bp, Homo sapiens
attcgatcttagagaatcatagggacaatacctccttcaatatttttttttccccagaaatggggacatgttcttcatgaggctgcactatacattggctstttataaaagtgaaagcataatatcaaaccacagctcagtggtggtatttccctggggagctgaacctttacagtttaggtgtcctacttttcattggtt

SEQ ID NO: 281884 - DNA, 201 bp, Homo sapiens
gtgtgtgtgtgtgtgtgtgtgtgtgtgtgtgtgtgtgtgtgtgtgtggtgtggtgtggtgtgtggtgtgtgtgtgtctaatacacagtctgagataaaggrcaaactaaatcctggtgacacataagatgaacactctccataaaagatattatggcttccaactttgttactgtctgctcagtcatttgctctgagagag

SEQ ID NO: 281885 - DNA, 201 bp, Homo sapiens
tacttttcattggttttatgtgtttagaaaggagagagaatagaatattgagtttgtgcctggtggtttctctttatcggtttctgcagccttatttttgkcaggaacaggatagcagtcagttgaaggatgctatgtgcccaaggtataacaaatcagtgtgaatcgcactgggtgggtgattaaggagccaggcgatgt

SEQ ID NO: 281886 - DNA, 201 bp, Homo sapiens
tgaacctgggaggcagaggttgcagtgagcagagattgcaccactgcactccagcctaggtgacagtgtgagactccatctaaaaaaaaaaaaaaaaaaamcaggcctgatggcatgtgcctgtggtcccagctactgggcaggctgaagtgggaggatcacctgagccttggggaggtcgaggctgcagtgagctatgat

SEQ ID NO: 281887 - DNA, 201 bp, Homo sapiens
ttttttgttttttgagacggagtctcgctctgtcacccaggctggagtgcaatgacacaatctcagctcactgcaacctacgcatcccgggttccagtgaytctcctgcctcagcctcccgagtagctgggattatgggcacctgccaccacacccagctactttttgtaccttttaaatagagatggggtttcaccatgt

SEQ ID NO: 281888 - DNA, 201 bp, Homo sapiens
atggtagtgtgctcactgatttcattgacgttgcagttttcaattttgaggatatttgctagaaaatgataacaaatatgtagaagaaaacttttaaatastatgctacagaaataattcaaattttaatccatcaataaaaatatcagcctgagttctatactaaataataaaagcttggcctatttataataaagaaca

SEQ ID NO: 281889 - DNA, 201 bp, Homo sapiens
ggagtgcaatgacacaatctcagctcactgcaacctacgcatcccgggttccagtgactctcctgcctcagcctcccgagtagctgggattatgggcaccygccaccacacccagctactttttgtaccttttaaatagagatggggtttcaccatgttgtccaggctggtctcgaactcctgaccttaggtgatctacct

SEQ ID NO: 281890 - DNA, 201 bp, Homo sapiens
aattgattgagtacttactgcgtgccacacactgttttgggtagtttacatttaaacatcacaggccataatattggcgttattactagccattttacggrtggataaactaaggcacagagaggttaagtaatttgccgaaagggatgctgcaggtaagagctagaactgggatttgcactctggcactatgctgtattg

SEQ ID NO: 281891 - DNA, 201 bp, Homo sapiens
gctccatccacattcctgcaagaacttgatctcattcttttttacagctgcatagtattccatggtatatatgtaccacattttctttatccagtctgccrttgatgggcatttaggttcattctatgtctttgctattgtgaatagtcagcaccattttttcagataacatatgcttacttagtgcctctgtatcatatt

SEQ ID NO: 281892 - DNA, 201 bp, Homo sapiens
attgtgagttttatttgattgtcatgtctttttagtttcctttaaagaatgactgagaaatggttccttattcttttatgaccttgaaaaccttgaaaatwtttacgaatatgggccatttattttgtataatgtccctcaatttgggtttgtttgatgtttcctcataattcaatataggttatgcatttttgcctggca

SEQ ID NO: 281893 - DNA, 201 bp, Homo sapiens
aagactgtcaaatgtttttcctttgttttttaatgcttcatcagttgctttaaatcttgctacattttagttttccttatatgtaaatcataactcttgtrtagtgtttttgttttttttcctggaatttgatttatcctctgtgcccgttttcacccacgcttcaagttgggaaaagaaacatatttttcttaccatgac

SEQ ID NO: 281894 - DNA, 201 bp, Homo sapiens
atagagaatagatctgccatcactgaaggttcttttggattgcagtagatcttgatgcttggctgtattacattctggttaatgagatcttaggctgtagkaggggaaagattcgattgtgctgttacaaaaatatttttattaatattatatttagctttggttaaatgctttcagggtggcagtgtaaaactaaagatt

SEQ ID NO: 281895 - DNA, 201 bp, Homo sapiens
tactcccatgctccaactccaatcctgttctgcaggctggtcttatttgcctcttcatatgccttgtgcatgagggtacattgttcagttgctataaaaaragaccaaaccacaataccttaaacaaaataagtttctctctcccatagcagtccaaacagttcaagactaatatggtggttccatggtgctgaagaccta

SEQ ID NO: 281896 - DNA, 201 bp, Homo sapiens
gataatttttaacttttttgtagacatacggtctcaactgtgttgtccaggcttatttcaaactcctggtctcaagttatccttccactttggcctttcaragcactcggattataggtataagtcaccatgccttgccaggactccttaaatgagtcagtgtcctgaagaacagagcaaagtggtaggtggagggagata

SEQ ID NO: 281897 - DNA, 201 bp, Homo sapiens
agtttcgggttttcagattattgatgctcaacctgtatatactatgtatttatttttaagacggagtctcgctctgtcacccaggctggagtgtggtggcrtgatcttggctaactgcagcctccatctctgggttcaagcaattctcctgcctcagcctcccaagtagataggactacaggcatctgacaccatgcctgg

SEQ ID NO: 281898 - DNA, 201 bp, Homo sapiens; identical to SEQ ID NO: 57258

SEQ ID NO: 281899 - DNA, 201 bp, Homo sapiens
tcttgctatgtcgcccaggctggtctcaaactcctgagctcaagcaatcctcctgcctgtgcctctcaaagtgctgggattacaagcacgagccaccatamctggcctcttgaccatttcttaattgggttatttgtcttttcattgttaaaactgtattttatataaatgcattaaaatttttaattgtgttaaaataca

SEQ ID NO: 281900 - DNA, 201 bp, Homo sapiens
gtctgcccttattttggtttaacatatatatctttgggaaagggagggtgagacttggttggcacaaaggctttttttgtttgtttgtttgttttttttttagagagactttcagcttcaattcagtactttgtaaggattttttcttcattatcagccactctgtttttatgtttttaaattatttttatagcactggat

SEQ ID NO: 281901 - DNA, 201 bp, Homo sapiens
taagaactaggacaacagtagaattgggaaaatccctctggagtttatgacctgataatcaggttttttttgtttgtttgttttttgttttttgttttttktttttgaggtggagttttgctcttgtcacccaggctggagtgcagtggcccaatttcagctcactgcaacctccgcctcccgggttcaagtgattctcct

SEQ ID NO: 281902 - DNA, 201 bp, Homo sapiens
aatgttgcatggtctgcccttattttggtttaacatatatatctttgggaaagggagggtgagacttggttggcacaaaggctttttttgtttgtttgtttgttttttttttagagagactttcagcttcaattcagtactttgtaaggattttttcttcattatcagccactctgtttttatgtttttaaattattttta

SEQ ID NO: 281903 - DNA, 201 bp, Homo sapiens
aacattgtagtttgttagagatgtaaaggaatccaaggaacatatcctttgagaaataacatctaaatactatgtatcaattaaaagttattaaggtatartgaaagatccattttattttttttccccattgattggcagaggaaggtacatattttaaaataatctctggtacttagagaatatgctttaccgtaactt

SEQ ID NO: 281904 - DNA, 201 bp, Homo sapiens
aaaatgtgaaaaatgttgcatggtctgcccttattttggtttaacatatatatctttgggaaagggagggtgagacttggttggcacaaaggctttttttgtttgtttgtttgttttttttttagagagactttcagcttcaattcagtactttgtaaggattttttcttcattatcagccactctgtttttatgttttta

SEQ ID NO: 281905 - DNA, 201 bp, Homo sapiens
acaaaacaaaaagagcatgttctggaagttgtatccataatttctacgtatgttccattgacaagaacttaattgtaagagttcacataatcacagggagrctaattgggaatgcacccaaataattctatcactatatactggattatagaggatgcaggtaaaaaagtgtgtgtgtgtgtgtgtgtgtgtgtgtataca

SEQ ID NO: 281906 - DNA, 201 bp, Homo sapiens
cactttctttttttaaatcgaaatatagcgtccccgttttgttgggagactacaagggccgcagtctataataaactcactggtcagaatttatagcattmttcgctactatgcagtaatcatatcttgtcacatggtatttttaattgtcctgtgttacttagcttttcatgtgtttgtcttatttctcaactcgatttg

SEQ ID NO: 281907 - DNA, 201 bp, Homo sapiens
aggcctcagtttccccaccgggccctgggacatgtctgagggtcccagggaaatccagtcactcaggagcctgagatatttagcatcgtagctgggccccrtctcccaggggactcatttcccagcaccctctccactgtccctgcccagaatgagcctggtttctaaacattcctgcagatttaccaggatgaaggtaaa

SEQ ID NO: 281908 - DNA, 201 bp, Homo sapiens
acccaaatattagtcaactgggttgggcgaggtaggacggatgaagcccaccgtctaacaatctggacatctataggagcagatccgccgctcgaaacagstgacccagcgacgactgcggaaccactagcagcgtctgcacagatcgaccccgccatcccgccgtcccgctcggtgaccggagacacagccgggaacgcg

SEQ ID NO: 281909 - DNA, 201 bp, Homo sapiens; identical to SEQ ID NO: 57253

SEQ ID NO: 281910 - DNA, 201 bp, Homo sapiens
actaggacaacagtagaattgggaaaatccctctggagtttatgacctgataatcaggttttttttgtttgtttgttttttgttttttgttttttttttttgaggtggagttttgctcttgtcacccaggctggagtgcagtggcccaatttcagctcactgcaacctccgcctcccgggttcaagtgattctcctgcctt

SEQ ID NO: 281911 - DNA, 201 bp, Homo sapiens; identical to SEQ ID NO: 57256

SEQ ID NO: 281912 - DNA, 201 bp, Homo sapiens
catattggacagcacaggtctctagaaatgaaaaaatacaattattttatgattatggactggtaatgtgctcgtgaaacaaattagcttaatttgaaacygtgagcctgcttaatccagggaatgtgactatttaaataatgtttatattagagtttacttcctactcgtattgagataatttcaagccatggtaaaatt

SEQ ID NO: 281913 - DNA, 201 bp, Homo sapiens
tctctttggcattggctgttttctttttttttttttttttaatttaaatgtggtatgtttattcagttctttttttttatttttatttttttttattgatyattcttgggtgtttctcgcagagggggatttggcagggtcataggacaatagtggagggaaggtcagcagataaacaagtgaacaaaggtctctggtttt

SEQ ID NO: 281914 - DNA, 201 bp, Homo sapiens
gatttttagtaggcatttgaatatgcaagaattatgatttgtagtttttatatcctaaaagcatttacttttgtaaataatgaaattattttctatctacmgcaccagttcttagccactagtaggtgttgctagtagaaaagagcatttattctttccctttttttttttttgagacagagcctctttctgtcgcccaag

SEQ ID NO: 281915 - DNA, 201 bp, Homo sapiens
ccagcatatcagctaaatcagttttatgctttagaataatgttttagaaaaagtctatagcagtcttgccctatagagtgcttggtgatgttctctatatygtccagtgtggtagctactagctacatgtggcatttaacatttgaaatgtggacaactgaagaaccgaaattcaattttttaaaaaattaacttaatgaa

SEQ ID NO: 281916 - DNA, 201 bp, Homo sapiens
ggaggtggaggtgcagtaagccttgattgcaccactgcactccagcctgggcaacaacaacaacaacaaaaacctactgaggcacagtgtggggggtgggsttagcatggagagggggtcaggcttagccccgacaactcagaattctacttccttgtacaggcctcagtttccccaccgggccctgggacatgtctgagg

SEQ ID NO: 281917 - DNA, 201 bp, Homo sapiens
acttttagtgactggaataagtagttgttaatttttttttaattgttccatggaatagggcattttcgttctatctttctctttggcattggctgttttctttttttttttttttttaatttaaatgtggtatgtttattcagttctttttttttatttttatttttttttattgatcattcttgggtgtttctcgcagag

SEQ ID NO: 281918 - DNA, 201 bp, Homo sapiens
tcatggcttatattataaccactcttaagtaacttagaacagtgactaaaacttgagcatgcttcaaaatctcctgaatcacctggagagcttttcaaaayacagattgccggagcttgagaatttgtatttctaacagatttgtaagtggtgccactgctggtccagggaccacattttgagaaccagtgacatggagaa

SEQ ID NO: 281919 - DNA, 201 bp, Homo sapiens
gtcgagatttttagtaggcatttgaatatgcaagaattatgatttgtagtttttatatcctaaaagcatttacttttgtaaataatgaaattattttctatctacagcaccagttcttagccactagtaggtgttgctagtagaaaagagcatttattctttccctttttttttttttgagacagagcctctttctgtcgc

SEQ ID NO: 281920 - DNA, 201 bp, Homo sapiens
agtcgagatttttagtaggcatttgaatatgcaagaattatgatttgtagtttttatatcctaaaagcatttacttttgtaaataatgaaattattttctatctacagcaccagttcttagccactagtaggtgttgctagtagaaaagagcatttattctttccctttttttttttttgagacagagcctctttctgtcg

SEQ ID NO: 281921 - DNA, 201 bp, Homo sapiens
cacattttggaatatttacatatacataatgagatatcttgggaatgggaccaagtctaaacataaaactcatttatgttatacctcttatacacatagcstgaaggtaattttgtataatatttcaaataattttgtgcatggaataaagttgtgattgcattttgactgtgacttgccacatgaggtcaggtgtgaaat

SEQ ID NO: 281922 - DNA, 201 bp, Homo sapiens
aacagatctcctgttaaggactggtaatcagaaaggcatcagactgcaaacagcattagaattcgtaagtcagagtaccaaaccatcaaattctgagttgmaaattatttccaacctcgaattctgtatgcacacacatcaccaagatagttttaggtttgcaaatctccatctctttcttttaatacattccatgcacta

SEQ ID NO: 281923 - DNA, 201 bp, Homo sapiens
aattggtggcatcaagaccttgaaaatcataggtaaaacatgggtctgaaaagagggaatgctgcttgagactctgcatgaggaataatcagcactaatcyctacgtaagaaattttctaaaaactgatggacataattctaacacaaagaatttttaaaataagaaaaaagaacaaccatatcatttatattcagaatat

SEQ ID NO: 281924 - DNA, 201 bp, Homo sapiens
tgaagatagaaagcagatggaataatagctgacccaggagggtagaggaagtagaaactaaagagactacagagtgaaatattatgcatacgcagtttgcwctgcaaaactctgaaaaggcttaggaattggtggcatcaagaccttgaaaatcataggtaaaacatgggtctgaaaagagggaatgctgcttgagactct

SEQ ID NO: 281925 - DNA, 201 bp, Homo sapiens
actttacacaacccaatgagaaaggagagtatgaagtagcagagggaattggttccactgtgtttcaatctattctggattactataaaataggaattacytgttgtcctgatggcataactgttcctgaattgagagaagcatgggactatctatgtatgtcttttgaatgtagtactattaaggtactatatcttaagt

SEQ ID NO: 281926 - DNA, 201 bp, Homo sapiens
agatggtgtttgtatttgagaatgcaaaagaaggagctctgaatataagaacataagaacaaatagcaccaatagtgagtaacactatatttgttgtagayccatccgtttctactgcacagccaaatacagtgttgggcaggatgtttgtttggatctggccgagaacacaactttacacaacccaatgagaaaggagag

SEQ ID NO: 281927 - DNA, 201 bp, Homo sapiens
agacaagagcgagacttcgtctcaaaaaaaaaaaaaagaaatgttaacttctccaacacgacagcgccatgttgcatgagaaaaagatcacagttcctctygtccaagcagtccttgttctccaaaagcctctccagatggttccattagcagtactgggaacagcagtagaaacactagtcagtcaagtttagataatag

SEQ ID NO: 281928 - DNA, 201 bp, Homo sapiens
ataatttttacatcatcgtaaagtcgagaaatcatatgttgaaccactgttaagtcagggaccatcttaacctccatgttgtggagtattgtgaaactgtwaaaagaactctgcaagtacaaatatgacaaagtcttcaagaaatgcagtataatacttacaggtggttttttgggtgggaaaaataagaatgaaacagta

SEQ ID NO: 281929 - DNA, 201 bp, Homo sapiens
gaggtataactgagataccatacagtttattttagactgcatttttattccttccttcctctcactggcagttgctggtacagtgctgcacctggctgagygaatggtttcttttggagctgataaagctgccttatgaaatcagctgacaggtatattatacctacagatgatgccttttctctcagagcgcttgggttg

SEQ ID NO: 281930 - DNA, 201 bp, Homo sapiens
cctcctaggttcaagtaattctcttgcctcagcctccctagtagctgggattacaggcacccgccaccacacctggctaacttttttttttttttttttttgagacggactctcacctgtggcccaggctggagtgcagtggcgccatcttggctcactgcaagctccgcctcctgggttcacgccattctcctgcctcag

SEQ ID NO: 281931 - DNA, 201 bp, Homo sapiens
ggtcttgaactcctgaccttgtgatccacccgcctcagcctcccaaagtgctgggattataggtgtgagccactgggcccagtctttttttttttttttttgagacggagtttcgttcttgtgcccaggctggagtgcaatattgtcatctctgctcactgcaacctccacctcctaggttcaagtaattctcttgcctca

SEQ ID NO: 281932 - DNA, 201 bp, Homo sapiens
cccaggctagagtgcagtggcacaatctcggctcactgcaacctcccacttccgggttcatgccattctcctgcctcagcctccccaggagctgggactayaggtgcccaccacgatgcccggctaattttttatatttttagtagagacggggtttcatggtcttagccaggatggtctcgatctcctgaccctcgtgat

SEQ ID NO: 281933 - DNA, 201 bp, Homo sapiens
gaattggtaatgaacatcattttcttttttgaacatcttattcttaatacagggtctgtagaaggagttttgttttgttttgttttgttttgttttgttttgttttgtttttgagatggagtctcgctctgtcgcccaggctagagtgcagtggcacaatctcggctcactgcaacctcccacttccgggttcatgccatt

SEQ ID NO: 281934 - DNA, 201 bp, Homo sapiens
tgaattggtaatgaacatcattttcttttttgaacatcttattcttaatacagggtctgtagaaggagttttgttttgttttgttttgttttgttttgttttgttttgtttttgagatggagtctcgctctgtcgcccaggctagagtgcagtggcacaatctcggctcactgcaacctcccacttccgggttcatgccat

SEQ ID NO: 281935 - DNA, 201 bp, Homo sapiens
gtgaattggtaatgaacatcattttcttttttgaacatcttattcttaatacagggtctgtagaaggagttttgttttgttttgttttgttttgttttgttttgttttgtttttgagatggagtctcgctctgtcgcccaggctagagtgcagtggcacaatctcggctcactgcaacctcccacttccgggttcatgcca

SEQ ID NO: 281936 - DNA, 201 bp, Homo sapiens
tgtgaattggtaatgaacatcattttcttttttgaacatcttattcttaatacagggtctgtagaaggagttttgttttgttttgttttgttttgttttgttttgttttgtttttgagatggagtctcgctctgtcgcccaggctagagtgcagtggcacaatctcggctcactgcaacctcccacttccgggttcatgcc

SEQ ID NO: 281937 - DNA, 201 bp, Homo sapiens
atgtgaattggtaatgaacatcattttcttttttgaacatcttattcttaatacagggtctgtagaaggagttttgttttgttttgttttgttttgttttgttttgttttgtttttgagatggagtctcgctctgtcgcccaggctagagtgcagtggcacaatctcggctcactgcaacctcccacttccgggttcatgc

SEQ ID NO: 281938 - DNA, 201 bp, Homo sapiens
tcaagcaattctcccacctcagcctcctgagtatttatgactacatggttgtgccatgatccccagctaattaaattttttttttttttttttttttttttgtggagacagggcctatgttgccttgcctggtctcaagctatcctccctgttggcctccccaggctttgagattataggcatgggccgctgcacctggcc

SEQ ID NO: 281939 - DNA, 201 bp, Homo sapiens
cactgcactccagcctgggcaacaacaacaacaacaaaaacctactgaggcacagtgtggggggtgggcttagcatggagagggggtcaggcttagccccracaactcagaattctacttccttgtacaggcctcagtttccccaccgggccctgggacatgtctgagggtcccagggaaatccagtcactcaggagcctg

SEQ ID NO: 281940 - DNA, 201 bp, Homo sapiens
ctgttgtcctgatggcataactgttcctgaattgagagaagcatgggactatctatgtatgtcttttgaatgtagtactattaaggtactatatcttaagytaacttaaataggtgctgctgccaaagtattcctccagtaaaattcatatagtttgctgcccataaggagcaaaaaatatttatcttgggcttatttgaa

SEQ ID NO: 281941 - DNA, 201 bp, Homo sapiens; identical to SEQ ID NO: 57251

SEQ ID NO: 281942 - DNA, 201 bp, Homo sapiens
ccacgcccggctaattttttgtatttttagcagagacagggtttcatcatgttgggcaggctggtcttgaactcctgaccttaggtcatctgcccgcctcrgcctctcaaagtgctgggattacaggtgtgagccaccatgcccggcccaaatgtttttaaatctttgacataatttctgacttacagaaatattatgcag

SEQ ID NO: 281943 - DNA, 201 bp, Homo sapiens
gcagtggcacgatctcaactcactgcagcctctgcctcccaggctcaagtgatcctcacaccacatcagcctcctaagtagctgggacttaggaggcacaygctaccacacctggctagtttttgtattcttttgtagagatggggttttgccatgttgctcaggctggtctcaaactcctgggctcaagcagtctacctg

SEQ ID NO: 281944 - DNA, 201 bp, Homo sapiens
cttctcttgtgtctcaccagctttccacctttcttactgaggaataatccagagctaattgcggtgctctgatgagggtgagatcccatttttgctgaggmgatgtggcagaaactgtatttttaaaaatgagaattagtggacatgtggaattctagtaccaagtaaagatccaaacttgaatgtagacttgagtctttt

SEQ ID NO: 281945 - DNA, 201 bp, Homo sapiens
accactgcactccagcctgggcaacaacaacaacaacaaaaacctactgaggcacagtgtggggggtgggcttagcatggagagggggtcaggcttagccycgacaactcagaattctacttccttgtacaggcctcagtttccccaccgggccctgggacatgtctgagggtcccagggaaatccagtcactcaggagcc

SEQ ID NO: 281946 - DNA, 201 bp, Homo sapiens
ctcaagcaattctcccacctcagcctcctgagtatttatgactacatggttgtgccatgatccccagctaattaaattttttttttttttttttttttttttgtggagacagggcctatgttgccttgcctggtctcaagctatcctccctgttggcctccccaggctttgagattataggcatgggccgctgcacctggc

SEQ ID NO: 281947 - DNA, 201 bp, Homo sapiens
tgggaaaaataagaatgaaacagtataaaagttgagtcccaaagggtatttagaatattctgtaatgtatgaaaatcacatatgcacacatacatgcacayatatgtttttctttgggaatgaaaactaaaaataatttcttctaagataggaattagcttatttaggatatatgggtggaattgagatctgattttcact

SEQ ID NO: 281948 - DNA, 201 bp, Homo sapiens
aaaaaatatgccttgaaagtagagtgatctattggtgaccacatttactgagtggttgaggttgacatgtccggtggtgtggtggtccaatattatatacktcttaatgtgatgctcttagggagttgcatagcaagacttgcgtgtgttcttgctagacgtctttgatctgaatctaaccctgaggaagcagagacatct

SEQ ID NO: 281949 - DNA, 201 bp, Homo sapiens
ggagaatcacttgaacccaggaggcaggttgcagtgagccgagatcacgccactgcactccagcctgggcaacagaggaagactccttctcaaaaaaaaaraaaaagaaattcattcatgttgggtatatcagtaattcactcttttttttttttctgctgctcttcaactcaggctcaagtgatcctcctaccttggcct

SEQ ID NO: 281950 - DNA, 201 bp, Homo sapiens
cctcccaccttagcctcctgagtagctgggactataggcacataccaccaccctttactttttaaaaacattttctgtagagatgaggactcactgtgttrcccaagctagttctgaaccctggagctcaagcgatcctcccacctcagcctcccaaagtgttagcattacaggtgtgagccactgggccgggctttcttt

SEQ ID NO: 281951 - DNA, 201 bp, Homo sapiens
tgcttgaacccgggaggtggaggttgccgtgagtggagatcgcgccactgaactccagcctgggcaacaagagtgaaactctgtctcaaaaaaaaaataawtttttttttttttttactatctggtttatcagtatgaaatggtatgctttgattccttctattacctgtacagcagtcagtgatctaattatactttccc

SEQ ID NO: 281952 - DNA, 201 bp, Homo sapiens
ctgttaaaagaactctgcaagtacaaatatgacaaagtcttcaagaaatgcagtataatacttacaggtggttttttgggtgggaaaaataagaatgaaayagtataaaagttgagtcccaaagggtatttagaatattctgtaatgtatgaaaatcacatatgcacacatacatgcacatatatgtttttctttgggaat

SEQ ID NO: 281953 - DNA, 201 bp, Homo sapiens
atgcatacatttgtgtttgtgtgtatcctgttaataagtgaaagaccggtaagcccaaaagaaaatgtgtaaaggacaggattgatagttcatcgtggccrggcgtggtggctcacatctgtaatcccagcactttgggaggccaaagtgggcgaatcaccagaggttgggagtttgagaccagcctcaccaacatggaga

SEQ ID NO: 281954 - DNA, 201 bp, Homo sapiens
gggtagatcacgagatcagaagatcgagaccatcctggctaacacagtgaaaccccgtctctactaaaaatacaaaaaattagccagtcgtggtggcgggygcctgtagtcccagctactctggaggctgaggcaggaaaacggcgtgaacccgggaggcggagcttgcagtgagccgagatcgcgccactgcactccagc

SEQ ID NO: 281955 - DNA, 201 bp, Homo sapiens
tcctgagtagctgggactacaggtgcccgccaccatgccctgctagttttttgtattttttagtagagacggggtttcaccatgttagccaggatggtctygatctcgtgaccttgtgatccgcccgcctcggcctcccaaagtgctgggattacaggcgtgagccaccccacccagccttaactttttgtatttttaata

SEQ ID NO: 281956 - DNA, 201 bp, Homo sapiens
tctatgatataaatatctatgatatatatatctatgatatagatacctatgatataaatatctatgatatatatatctatgatatatatatctatgatatwtatatcatagattaccaatgacagaaaaattatttaataacttagtaaatatataatagtttggtttaagcatcttttagaacatgggatcctgggcaaa

SEQ ID NO: 281957 - DNA, 201 bp, Homo sapiens
ggcagaggaaggtacatattttaaaataatctctggtacttagagaatatgctttaccgtaacttgccatcacataaaattcttccttaattatattgtgmattttttttttcttttttgagacggagttttgctcttgttgcccaggctagagtgcaatggcgcgatctcggctcacgacaacctccaccttgtgggttc

SEQ ID NO: 281958 - DNA, 201 bp, Homo sapiens
aaaggctgattttcttaattttttctatgtgcattcattatgtatctatatatttgttgggaacggttttccctatttttcatttatatatgtatagaatratgtattaatttatcactatagattaatggatgggtatttttatcaaccaagatctggtagtaaatgtgtttactgctattggatctgattttttttttt

SEQ ID NO: 281959 - DNA, 201 bp, Homo sapiens
ttcttagggtttaaatgtcagtatttgaatgagtacttttgttttattttgtaggaaagaacaatagcttttcttttctttttcttttctttttttttttygagatggagtctcacactgttgcccaggctggtgtgcagtggcgcgatcttggcttgctgcaacctccgcctcctgggttcaagtgattctcctgcctca

SEQ ID NO: 281960 - DNA, 201 bp, Homo sapiens
acagactttgtatacctattacatatgaaaacttatttttaaaaaacaatctgaagtaaaaacaagccaaaaatatatcaactctcaacttactgaaattyttcctttcttagctgactctacaggagaagaaatttttagctgccgtactttagagggactgttttactagatgagcacgttaccctttggcatgattat

SEQ ID NO: 281961 - DNA, 201 bp, Homo sapiens
actttgtatacctattacatatgaaaacttatttttaaaaaacaatctgaagtaaaaacaagccaaaaatatatcaactctcaacttactgaaattcttcytttcttagctgactctacaggagaagaaatttttagctgccgtactttagagggactgttttactagatgagcacgttaccctttggcatgattatattt

SEQ ID NO: 281962 - DNA, 201 bp, Homo sapiens
gttgtttccttatagtatatcttttcatttattcttggtaaagaatgtataagactaaatgttagtatcatagagttaataaaatctaataaataattaarttatgtataattatatactagtagaaatatatacagttattaacctaatgaatatatttagcatagtatatagcaattttaaagagcctttctaaaaatt

SEQ ID NO: 281963 - DNA, 201 bp, Homo sapiens
gtgagccaagatcttgccactgcactccagcctgggcaacaagggaggaaactccgcctcaaaaaaaaaatttttttttgaattttctctaagaatttaayagtcatccctttttttcataaatgcccattaaatgtccgttatatgcctaaatctgtgctagacagacaaaggtaattgagagaaattaggagtactgtt

SEQ ID NO: 281964 - DNA, 201 bp, Homo sapiens
aatcgcgtgaacccgggacggggaggttgcagtgagccaagatcttgccactgcactccagcctgggcaacaagggaggaaactccgcctcaaaaaaaaawtttttttttgaattttctctaagaatttaacagtcatccctttttttcataaatgcccattaaatgtccgttatatgcctaaatctgtgctagacagaca

SEQ ID NO: 281965 - DNA, 201 bp, Homo sapiens
tatttagtagacagttaattaatggagataatattttaaatagtataatggacattttatagaaatctcaagttgaatattatttcacattttatgtggaraattcattagggagtggttaagtataagagccattaagctgcatagctccttgagaaagacttactttgagtgatctagcagttttaatctgttgggaat

SEQ ID NO: 281966 - DNA, 201 bp, Homo sapiens; identical to SEQ ID NO: 57254

SEQ ID NO: 281967 - DNA, 201 bp, Homo sapiens
tttagcccaatgagctactgaattgttttctcttttccaggttggatgtactggaaaagtcataggaattgatcacattaaagagctagtagatgactcartaaataatgtcaggaaggacgatccaacacttctgtcttcagggagagtacagcttgttggtaagtatcagaaaactttaaaaatttcttcagaggattt

SEQ ID NO: 281968 - DNA, 201 bp, Homo sapiens
ctataggagcagatccgccgctcgaaacagctgacccagcgacgactgcggaaccactagcagcgtctgcacagatcgaccccgccatcccgccgtcccgytcggtgaccggagacacagccgggaacgcgactgatcaggctaccgagccgggccgcagggcgaaagcggtgcggtccgaggcctcagaaagggacacgc

SEQ ID NO: 281969 - DNA, 201 bp, Homo sapiens; identical to SEQ ID NO: 57257

SEQ ID NO: 281970 - DNA, 201 bp, Homo sapiens
tgaggtggagttttgctcttgtcacccaggctggagtgcagtggcccaatttcagctcactgcaacctccgcctcccgggttcaagtgattctcctgcctyagcctcccgagtagctgggataacaggcgcccgccaccacgcccagctaatttttgtatttttagtagagacggggtttcaccatgttggccaggctggt

SEQ ID NO: 281971 - DNA, 201 bp, Homo sapiens
aaatttttttttgtagagacagggcctcactttgttaccccaggttggtcgtgaactcctgggctctagtgatcctcttgctttggccttctaaaatgttrgattacaggcataagccaccatgcccagcctcatcttcacttatacttagtaaattgcaaattagcactataatgaggtaccagttttcacctatcagat

SEQ ID NO: 281972 - DNA, 201 bp, Homo sapiens
cagaaaagcctaatggtaattgcacatttacccctaattagcctgtacatgcaaagtaaaacatcaaattacttttctgtttgttagaaatattttagagygctggtaatctatgatatatatatatatctatgatatctatgatatatatatgaatctatgatatatatatctatgatatctatgatatatatatctatg

SEQ ID NO: 281973 - DNA, 201 bp, Homo sapiens
acacttaaaaaaaatcagctttattgaggtataagttatataaaaattcaccagttgtaagaatacaatttgaaaaatgtgacaaacagaaagtgtaaccmccaacttcattatgatgtggaacatgggtcagcaaactacaggccacagacaaaatttggcctgctgcctggttttataaatttttattggaacacagcc

SEQ ID NO: 281974 - DNA, 201 bp, Homo sapiens
ttgtgtgtacagcattctctgagttcctgcatattcaaaatggtttttttccttcctatggcctcgatatttgaaggacagcttggctgggtataaaatcrttggcttacacttaaaaaaaatcagctttattgaggtataagttatataaaaattcaccagttgtaagaatacaatttgaaaaatgtgacaaacagaaag

SEQ ID NO: 281975 - DNA, 201 bp, Homo sapiens
ttactctgcttttaaaactttaaaaaaaaatgctttcaggctagggacaggggctcacacctgtaatctcagctgaggtgggaggatcacttgaggccagmaatttgagaccagcctgggcaacatggcaagacccactctctaaaaaaaaacttttaaaaattagccgagtgtggtggcatgcacatgtaggcctaggtg

SEQ ID NO: 281976 - DNA, 201 bp, Homo sapiens; identical to SEQ ID NO: 57255

SEQ ID NO: 281977 - DNA, 201 bp, Homo sapiens
acccccacttacttgtgaaattatgagctctttatttcttcttcccttcaaatttatcttaacaactttttcaaaacttttaactttaatttttattgccracaagttgctaggatagtacaaataactcctaaatctcttcatccagagtcatcaattattatcatttttctacatttctttcccctctttctatatata

SEQ ID NO: 281978 - DNA, 201 bp, Homo sapiens
attgttatttggaagaatatattaagaggaagcagacttatgatttgtcatttaatagataatccaatactataggataaaggcagcttattggagaaatrattttaaaaatattttcttgcacaatttacaaaatttagtttaaaaaaattgtccagtaatttacccccacttacttgtgaaattatgagctctttattt

SEQ ID NO: 281979 - DNA, 201 bp, Homo sapiens
taagtaaaagctgttctatgagaattataacattgttatttggaagaatatattaagaggaagcagacttatgatttgtcatttaatagataatccaataytataggataaaggcagcttattggagaaatgattttaaaaatattttcttgcacaatttacaaaatttagtttaaaaaaattgtccagtaatttaccccc

SEQ ID NO: 281980 - DNA, 201 bp, Homo sapiens
actcgcggtagggagccaggcattgaagtggtcagaattacatttcagaaagataactctagctgttatgtagagactagcctgggaagggacaaaagtcragtcagaaacaggaagtggttatagcaattcaaggatgaaatgatggtctgcattaaggcagtgttagtaaggatagagagaagtgggtggatagctaca

SEQ ID NO: 281981 - DNA, 201 bp, Homo sapiens
ggaggtggaggttgcattgagcctacattgtgccactgtactctaacctggcgacagagtaagactctgtctcaaaaaaaaaaaaaaaaaattgagcaaayttacatgttcgcactatcagaaaaaaaaaaaatttctccaggtgtaccaggaggactttctaatttttctgttgtagatgcttttctttggccatttgtt

SEQ ID NO: 281982 - DNA, 201 bp, Homo sapiens
tcatggagcttacagtaacgtaggagatgcaaagaccaagatgaataggcagttatagggtagtgttcagactcgcggtagggagccaggcattgaagtgrtcagaattacatttcagaaagataactctagctgttatgtagagactagcctgggaagggacaaaagtcgagtcagaaacaggaagtggttatagcaatt

SEQ ID NO: 281983 - DNA, 201 bp, Homo sapiens
gcatttgatgtcagtgtgtcccataattgtggtgttaactttgatcatctgattaaggtagtgttgacccagtttttccactggagaacttttttctgaastccattgtaaaattactatttttccttttgtgattaataattatctggggcaaaccctttgagattatgtaaatatcctgtttatttttcaaatgttagt

SEQ ID NO: 281984 - DNA, 201 bp, Homo sapiens
gtggctcatgcctgtaatcccagcactttgggaggcctaggtgggcggatcacttgaggtcaggagtttgagactagcctggccaacatggtgaaaccccrtctctattaaaaatacaaaatcagctgggcgtgatggcacaggcctgtaatcccagctactcgggaggctgagccaggagaattgcttaaaccctggagg

SEQ ID NO: 281985 - DNA, 201 bp, Homo sapiens; identical to SEQ ID NO: 57289

SEQ ID NO: 281986 - DNA, 201 bp, Homo sapiens
actggctatcgacgagaattgactctctgcagccaccgtctccgtcctaaagtcccatccaatcagggttccgcgggaagaggcggtgctgagaggcgcgyactgtgcttgctttttgcagtacctgctgcggccgctttcggcatggaggaaatttatgcgaagtttgtgtcccagaaaatcagcaaaacccgctggcga

SEQ ID NO: 281987 - DNA, 201 bp, Homo sapiens
ctgggattacaggtgctcaccaccacacccagctaatttttgtatttttagtagagatggggtttcactgtgttggccaggctggtcttgaactgacctcrtgatccacctgcctcagcctcccaaaatgctgggattacaggcttgagccactgctcccggctgatttttgtattagtagagacgacagggtttcaccat

SEQ ID NO: 281988 - DNA, 201 bp, Homo sapiens
tcgctgggtcagctgtttcgagcggcggatctgctcctatagatgtccagattgttagacggtgggcttcatccgtcctacctcgcccaacccagttgacyaatatttgggtcggtggagcccgaataatacaataagaataaaacccaacgacaaaggccctctctaacccgagtacaccggcctctggctttgtgacaa

SEQ ID NO: 281989 - DNA, 201 bp, Homo sapiens; identical to SEQ ID NO: 57292

SEQ ID NO: 281990 - DNA, 201 bp, Homo sapiens
cgcgttcccggctgtgtctccggtcaccgagcgggacggcgggatggcggggtcgatctgtgcagacgctgctagtggttccgcagtcgtcgctgggtcasctgtttcgagcggcggatctgctcctatagatgtccagattgttagacggtgggcttcatccgtcctacctcgcccaacccagttgactaatatttgggt

SEQ ID NO: 281991 - DNA, 201 bp, Homo sapiens
ttactgccgtcgccgccgctgccgccactgcgcgctcccggcatcccccgcggcacgcatgcgctctgtgacgccgcgcggcttagggtgcggccgggtgrggccgagggcgggggaggcgtgtggcccagccgcccgcccctgtggctgctaccgctgccaggggactgcagggaggccgggctgagtcagcgccacttc

SEQ ID NO: 281992 - DNA, 201 bp, Homo sapiens
cgccgctgccgccactgcgcgctcccggcatcccccgcggcacgcatgcgctctgtgacgccgcgcggcttagggtgcggccgggtggggccgagggcggrggaggcgtgtggcccagccgcccgcccctgtggctgctaccgctgccaggggactgcagggaggccgggctgagtcagcgccacttccgctgctgcgtgt

SEQ ID NO: 281993 - DNA, 201 bp, Homo sapiens
gtcgggagttcgagaccagcctgaccaacatggagaaacccagtctctactaaacatacaaaattagctgggtgtggtggcacatttctaatcccagctayttgggaggctgaggcaggagaatagcttgaatccgagaggtggagattgcggtgagccgagatcgcgccattgcagtccagcctgggcaacgagcaaaaa

SEQ ID NO: 281994 - DNA, 201 bp, Homo sapiens
acttgggaggctgaggcaggagaattgctcaaacccgggaggcagaggttgcagtgacccaagatcgtgccacttcactccagcctgggcaaaagagcaaracgccatctcaaaaaatatacatatataaggagataaagtttcccattttccaatacagtttcacatttgaacagccctaattgatacaactttatggca

SEQ ID NO: 281995 - DNA, 201 bp, Homo sapiens
gcaaaactggtttctttttgtttttttgcttttgattgagacggagtctcactctgtagcccaggctggaatgcagtggcatgatcttggctcattgcaasctccacctcccaggtcccggttcaagcaattctgccgcagcctcccgagtagctggaattacaggcacgcaccaccatgcccagctaatatttttgtatt

SEQ ID NO: 281996 - DNA, 201 bp, Homo sapiens
aaggtaataggaggggtgctgggagaacaaataggaagaaaagggaaaacccagaaatagtaattgttagtacccctgctacttgactgttgaaaatgctktaaaagtttgttctgaattaggagaaaaggcgctccctcaaccaggctgaaactaccaccagtgttgttgccagaaacctggagcaggaaggagctgctt

SEQ ID NO: 281997 - DNA, 201 bp, Homo sapiens
gtttgttctgaattaggagaaaaggcgctccctcaaccaggctgaaactaccaccagtgttgttgccagaaacctggagcaggaaggagctgcttctcccytccgccttccagtcacccaccattaatacctgctattggcaaggcccatctggatggcagatggcaaagcagcctggaaagtggagtttaccaacttcta

SEQ ID NO: 281998 - DNA, 201 bp, Homo sapiens
gtccaagagcaatgtaaaatgtaggggcagtaaaagataaacagaaaaactaaggggaaaaaaattctaaaacttcttcagaaaaattctggagcggagarcatgtgtggagcatgcatgcatgtccatgctataacttcatctacagagaaacaaacagtttcatctaaggattaactaagtatgtacttcgtttttact

SEQ ID NO: 281999 - DNA, 201 bp, Homo sapiens
gcgggagacagccttaacccacgggcgcgggcgagtcgtatgggcaggggcaggcgggagcgacgtggggcgacgctcacgaacgatcagagctgcgggcsacgcaacgaagcccggaggccgcaggctgcgcgctccctcgcagcagccgggcgggcaaaagcccccagtcctcggcccccgcgcaagcgacgccgggaa

SEQ ID NO: 282000 - DNA, 201 bp, Homo sapiens; identical to SEQ ID NO: 57301

SEQ ID NO: 282001 - DNA, 201 bp, Homo sapiens
tcccagctacttgggaggctgaggcaggagaattgctcaaacccgggaggcagaggttgcagtgacccaagatcgtgccacttcactccagcctgggcaaragagcaaaacgccatctcaaaaaatatacatatataaggagataaagtttcccattttccaatacagtttcacatttgaacagccctaattgatacaact

SEQ ID NO: 282002 - DNA, 201 bp, Homo sapiens
cccagctacttgggaggctgaggcaggagaattgctcaaacccgggaggcagaggttgcagtgacccaagatcgtgccacttcactccagcctgggcaaargagcaaaacgccatctcaaaaaatatacatatataaggagataaagtttcccattttccaatacagtttcacatttgaacagccctaattgatacaactt

SEQ ID NO: 282003 - DNA, 201 bp, Homo sapiens
tacttgggaggctgaggcaggagaattgctcaaacccgggaggcagaggttgcagtgacccaagatcgtgccacttcactccagcctgggcaaaagagcaraacgccatctcaaaaaatatacatatataaggagataaagtttcccattttccaatacagtttcacatttgaacagccctaattgatacaactttatggc

SEQ ID NO: 282004 - DNA, 201 bp, Homo sapiens
ttatttatttttttttttgagacagagtctctctctgtcacccaggctggagtgcagtggtgcgatctctgctcactgcaacctgcatctctctggttcargcaattctcacacctcagcctttcaagtagctgggattacaggcgcgtgccaccacacctagcaaatttttgtatttttagtagagacgggattttgcca

SEQ ID NO: 282005 - DNA, 201 bp, Homo sapiens
ggggccgagggcgggggaggcgtgtggcccagccgcccgcccctgtggctgctaccgctgccaggggactgcagggaggccgggctgagtcagcgccactkccgctgctgcgtgtccctttctgaggcctcggaccgcaccgctttcgccctgcggcccggctcggtagcctgatcagtcgcgttcccggctgtgtctccg

SEQ ID NO: 282006 - DNA, 201 bp, Homo sapiens
aaaaaaaaaattaaccgggcgtggtggcaggcatctataatcccagctacttgggaggctgaggcaggagaattgctcaaacccgggaggcagaggttgcrgtgacccaagatcgtgccacttcactccagcctgggcaaaagagcaaaacgccatctcaaaaaatatacatatataaggagataaagtttcccattttcc

SEQ ID NO: 282007 - DNA, 201 bp, Homo sapiens; identical to SEQ ID NO: 57290

SEQ ID NO: 282008 - DNA, 201 bp, Homo sapiens; identical to SEQ ID NO: 57291

SEQ ID NO: 282009 - DNA, 201 bp, Homo sapiens
attgtgggtgaatgtgtctaggaaaaaatattgtttattcatgaaaatactttgtatggcagtttggcctttcagcttcattaacacattttatttccttwgcactcataggctctttgctttttaaaattgttataagatttgctactaattgagttaaataaacaaatggacttcctccctgctaatatttctgaatct

SEQ ID NO: 282010 - DNA, 201 bp, Homo sapiens
gggagaggtttgggatagtaggttggcactttattcgaggtacttccacgagtatttaaggatttttgaatcgttttctatgcgcagtgacctgcaactgyttaggtgtggtttcaaggtggtttctactgcattgtttttgttctgtttttgcacttaaattttacactgcacaattattgaacacaagaaaatactgac

SEQ ID NO: 282011 - DNA, 201 bp, Homo sapiens
agtctgaggcaggagaatcgcttgaacccgggcgcagaggttgcagtgagccgagagtgcgccagcttgggcaacaagagcgaaactctgtctcaaaaaawaataataataaataaataaataaataaataaataaaataaaaaagaaagctatctagctctaggaaagatacattttttttttttggagacgaagtctta

SEQ ID NO: 282012 - DNA, 201 bp, Homo sapiens
tgcttcagccagacttctctgaggaaattttttaactgtcgaccactctagaccttttaaatcagaatctctaggaattgagcccatgaatccattttgtrtgtgtgtgttttgtttgtttgtttgtttagatggagtcacgctctgtcaccaggctggagtgcaatggcacgacctcagctcactgcaacctccacctcc

SEQ ID NO: 282013 - DNA, 201 bp, Homo sapiens
gcctcccaaagtgctaggattacaggcatgagcgacagccgtgggccagatatgtatattttagatgtaggttaattcccataagaatacaaagagttgcytttgaacatccaactgcttgatccctaaaagtcattactgtagtttgagataaatgtggggcattattaaacaatattccttttgtatctaattcagtgt

SEQ ID NO: 282014 - DNA, 201 bp, Homo sapiens; identical to SEQ ID NO: 57296

SEQ ID NO: 282015 - DNA, 201 bp, Homo sapiens
actctgcagtcccacctgggtgacagagggagaccctgtttcaaaaaaagaaaaatcattgtactcctttcatccatcagagtaattgagcacttaccatrtactaagtaaatactgccaggcacggtggctcatgcctgttaccccagcactttgggagggtgatgcaggcggatcacaaggtcaagcgatcaagatcat

SEQ ID NO: 282016 - DNA, 201 bp, Homo sapiens; identical to SEQ ID NO: 57297

SEQ ID NO: 282017 - DNA, 201 bp, Homo sapiens
tgtaatgcaaaatcacagaagttacatcttttaggtggaaaactaagtgtattggttctgaactatgcttcagccagacttctctgaggaaattttttaaytgtcgaccactctagaccttttaaatcagaatctctaggaattgagcccatgaatccattttgtatgtgtgtgttttgtttgtttgtttgtttagatgga

SEQ ID NO: 282018 - DNA, 201 bp, Homo sapiens; identical to SEQ ID NO: 57299

SEQ ID NO: 282019 - DNA, 201 bp, Homo sapiens
ccatgttggtcaggctggtcttgaactcctgacctgaggtgatctgcccagctcggcctcctaaagtgctgggattacaggcatgagccgccgtgcctggttttttttttttttttttttttaaagagacagggtctggttctgtcgcccaggctggagtgcagtggtgcagtcacggctcactacagccttgacttccag

SEQ ID NO: 282020 - DNA, 201 bp, Homo sapiens; identical to SEQ ID NO: 57298

SEQ ID NO: 282021 - DNA, 201 bp, Homo sapiens
gtcctattgtatgttaacacactgatgatgtgagcctgtgagatgagccaatcaccagttgttatgttcgaatctgctttgtgttgggacgctttaatgtcagggtttcactaaataaatgaattttcatatactgaactgaaatttgcttctatctgtcttatctcgggagccacacacacaaaattcctctcatcacat

SEQ ID NO: 282022 - DNA, 201 bp, Homo sapiens
gtgtgtgttttttttttttttttttttttggagacagggtctctctctgttgcctaggccagagtgcagtagtggtgtgatcatagctcattgcagccttraactcctggacttacacgattctcccaaagtgctgggcatagccattatgcccatgcccagccttatgtacttattttcttaggataattttttagaagt

SEQ ID NO: 282023 - DNA, 201 bp, Homo sapiens
agtttggctcaatagaatggaagttctaggtcagggactagtgggaagtaagattgggtttagaggagcttgaacaactctctcagaaatgcagggtaacratcttaagagttaaaaagaaatgtatgaaaactcagccttccatttagaaaacagttcaaggctgggcctggtgggtcatgcctgtaattctagcacttt

SEQ ID NO: 282024 - DNA, 201 bp, Homo sapiens
tgttaggattacaagcatgagccactgtgcctggctactattttcatttatttccttgcccagtacgcaaatttagttggcttctttttcctttcttttcttttttttttttttttctcagacagtgtctcactttgtcgcccaggctggagtgcagtggtgcgagctcggctcactgcaacctccgcctcccaggttcaa

SEQ ID NO: 282025 - DNA, 201 bp, Homo sapiens
accccgtctccactaaaaatgcaaaaaaaaaattaaccgggcgtggtggcaggcatctataatcccagctacttgggaggctgaggcaggagaattgctcraacccgggaggcagaggttgcagtgacccaagatcgtgccacttcactccagcctgggcaaaagagcaaaacgccatctcaaaaaatatacatatataag

SEQ ID NO: 282026 - DNA, 201 bp, Homo sapiens
gtatttgtaaccataagagaaagtatattttaacagcattacatttcatgccaattgacaagttttgccaattttaataagaaactaagctttatgtaatrtaacaccgtaatttatgaatttgttcattgtcactgcctttattcatgaaactgtcaaatagagtgtctttcaagggttgcaggatcttagagatagaaa

SEQ ID NO: 282027 - DNA, 201 bp, Homo sapiens; identical to SEQ ID NO: 57320

SEQ ID NO: 282028 - DNA, 201 bp, Homo sapiens
atttgaggatattcttatactctgagctttgagaatttacgtggctctgtctagaagtcagttattttttccctcattcatctgcccagtcctttcaaacygaagactagtatttatcagctctgggatattatattgcagtgtgctttaggaatttctgcttgcaaaatgcttcaggaatttttgcctctttgttctttt

SEQ ID NO: 282029 - DNA, 201 bp, Homo sapiens
ggcccatgttctagaattaagtgctgagcttgtctgtctttctcacggatgccgcattggttactcttcaccacagactttagcagatcaggtaagttcartgtctgtgacttgaaatactaaaaaatcatagtgaattgtaatgcatttttttcagtcagtatgacagtatattgcgagagcgatggttcattttaaaat

SEQ ID NO: 282030 - DNA, 201 bp, Homo sapiens
ccgtcagaaactgatgtgggagggtggtgcacaggaagaagtactatggtacagtgacaaagataactttgtcataattttgcctaaaaagagaaataagwctcgtagtcatgttatataggttaactgtgcgatgaagtaaagggaatgtcatgaactacttgggaaacccagtgtcttgaatcccgaaacttagaactc

SEQ ID NO: 282031 - DNA, 201 bp, Homo sapiens
gctttttggcactagggacccagtttcgtggaagacagtttttccatggacaggggtcgaggaggcagtggggtgggggatagttttgggatgaaactgcwccacctcagatcatcaggcattagattctcataaggagcggacaatctagaacccttgcatgccgaattcctgctcctgtgagaatctgatgcagctgct

SEQ ID NO: 282032 - DNA, 201 bp, Homo sapiens
  misc_feature (1)...(201): n = A,T,C or G
gaaattgcaaagataattatgacatattaaatgatagattttaaataggtagacatttatagaaatgactgtaattactgttgaggatcagctaggtttgngtaggtgaagaagtggttttggagcttcagtgcatttatgtgtgctcagtagggtacttaggatatttgaggagggaaaaggccgtcagaaactgatgtg

SEQ ID NO: 282033 - DNA, 201 bp, Homo sapiens
agctttttggcactagggacccagtttcgtggaagacagtttttccatggacaggggtcgaggaggcagtggggtgggggatagttttgggatgaaactgyaccacctcagatcatcaggcattagattctcataaggagcggacaatctagaacccttgcatgccgaattcctgctcctgtgagaatctgatgcagctgc

SEQ ID NO: 282034 - DNA, 201 bp, Homo sapiens
aactttcccttaaaacttttaaggccttgttcatagttgcctaccttcctgtgtttctgagacatctgatgccattatgattcttacttctttataacagygatctccaagctttttggcactagggacccagtttcgtggaagacagtttttccatggacaggggtcgaggaggcagtggggtgggggatagttttggga

SEQ ID NO: 282035 - DNA, 201 bp, Homo sapiens
gaaaagttacatgataaaaattttgtttgctagcgtgataggttggtgtttccagaaaaactcaccggaaacttttcatgtgaggtttagaagtaaaatasttccaggaaaaagttggcattcggctctgattaactagaatatgagtagtaatgcttgtcttttttatgtttgttttgacaggttttgacacaagggcgc

SEQ ID NO: 282036 - DNA, 201 bp, Homo sapiens
gatattcactccccgccccacccctgagatggagtttcactcttgtcgcccaggctggagtgcaatggtgcgatcttggtttactgcaacctccgcttccygggttcaagcgattctcctgcctcaccctcctaagtagctgggattacaggcatgcgccaccacccctagctaattttgtatttttagtagagatggggt

SEQ ID NO: 282037 - DNA, 201 bp, Homo sapiens
tgactttaaaaaaaaaagtttatttattattttactttaagttctgggatacatgtgcagaacgtgcaggtttacatgtatacgtaggtacacacgtggcwtgttggtttgctgcacctttcaacccatcatctaagttttaagccccacatgcattaggtatttgtcctaatgttctccctccccttaccccacccacct

SEQ ID NO: 282038 - DNA, 201 bp, Homo sapiens
ggatatttttcaaatgattccttcagattttcttgtcagacaggcacttatctgcacacaataatgattctgtctttttcagtattcataactgtcgtttrttttttcattgcattggctaaagtgcagtgctgttcagaagacatgccttgagagccgtaaatgtaagccatatatgtagttttacatttctagtaggca

SEQ ID NO: 282039 - DNA, 201 bp, Homo sapiens
ttaaattacattggctcactactgtaatcccagtactcaggaggcagagatgggaggattgcttgaggccaggagttttgagacagcctgggcaacatagkgataacccgtctctaccaacaaaaaaaaaagatataaaagtaaaaatagaattgaagaattaaaaatcttcatttatgtgaaaatttgaatggagaggtg

SEQ ID NO: 282040 - DNA, 201 bp, Homo sapiens
ttatagtgatttccttgaccttgtcttctccaccctagacaaaaggctgcaattgcctgttttcctaatgcagctgatgcacttctcatagtttttgccahgttaaagtgatttgtcaggctctaccactgactaggaattttcttttttttcagtactatggtgtcattcttagaatgcaaagtgtcgggtctggagctg

SEQ ID NO: 282041 - DNA, 201 bp, Homo sapiens
aaagtcccatgactatttctggttttaaaattctgtattaacaattcgtgttttgatatggaatagggcaaatatgcattaaatatgctgtttctcaaagktttttcttctagataaatgttagaattaatatatcacataagcatacaaaacaaacacgtaagaaaaatcctagtaggattttcattgggattgcatttg

SEQ ID NO: 282042 - DNA, 201 bp, Homo sapiens
atgaggcagaactgtttctctgcattctatattgagatgtacaattgtttaacaaataattacaaaagaaaatgagtgccatgagagagtgccctaagggrtcagcggatgggtagagaagttcaggctggggctagggccagtggaggtttgggtatcagagaatgcctaatcaatttagatgctaagagataactaggc

SEQ ID NO: 282043 - DNA, 201 bp, Homo sapiens
tgcactccagcctgggcaacagagggagacgctgtctcaaaaaaaaaaaaaaaattaggatttatcgtgtttcaatttttttgaaatacgtataaagcacwttgaaagtgagttgacatggtgaaattctcagataattaccaagggtctactcttgttagttttaaataccttttgtaatatgaccctgataatgattca

SEQ ID NO: 282044 - DNA, 201 bp, Homo sapiens
ctcaaaaaaataaaataaaataaaaaacaaatttagttaaatgctttacttgaaaaccgatctcatgctatctacaacattttcattgctaactccccccrtatatttcctgtgttccagcgatctcaggctacttgtgattactcactgtatgctcacccatgcctccctgttaggcaggagtgaaggaggaataagagc

SEQ ID NO: 282045 - DNA, 201 bp, Homo sapiens
ccttgaggtcctttattcagcttactacaactacttagagtcttctgaaatttctcttttcttgtacagttcccttcgcgtttacaaataattgttattaytgcctgcagttattgtctgcttgaacaaaaatacatgcatcaactcagtttatagtgatttccttgaccttgtcttctccaccctagacaaaaggctgca

SEQ ID NO: 282046 - DNA, 201 bp, Homo sapiens
ttcttctttttcaagattgtttggctgttctgggtgcttttaatatccatgtgaattttaaaatcagcttacttatttctgtctaaaagccagcttttatwcagctgagatcttttttaagctaaccttagatttaatgaactagttatttaggtccaaaagaaaaggctgggcatggtggcccacgcctgtaatcccagc

SEQ ID NO: 282047 - DNA, 201 bp, Homo sapiens
gtatagtattgttttgtgtattcttaaactttatatagatggtactgcatgtattcttgttcagcatactgtttattttatccccactcaaaatcacttakcagtgtggtttcatgaattgagtttcaactcaattcatcagtgtgggttcatgtagatttaggtcatttatttttactgtgacaagttagtacattttag

SEQ ID NO: 282048 - DNA, 201 bp, Homo sapiens
tttcttattttgtagtcttcaaaaattaaaaaaggaagcaaaggggatacatccatgttgaaaccaacactgatggcagcagttccggtaagaagtgaccyttatttaatattgagtattaaagaagtatcacccgctacaaagcattagtgctagtgaaaaatatattgttgacaaggtagtttatgtaggatttattcc

SEQ ID NO: 282049 - DNA, 201 bp, Homo sapiens
gtgaattgtaatgcatttttttcagtcagtatgacagtatattgcgagagcgatggttcattttaaaatgagctttagccttttaagtgcttcttagactrtaagtacattaaaataatttataataggctttttgatctaagaataccattgaattttaaaaataaggatcactttatatggatcactttttcttatttt

SEQ ID NO: 282050 - DNA, 201 bp, Homo sapiens
cttgtaatggaacttgaatctcttggattaatttaacaccttattttttaaaatgagaattaaattttctatattctaccccttgcttttgctcttctttrtctggaaaagagtctccacctcattttctgacacttgtattgactccttaatttcagctgctattaatttcaaagaactttttcttatttttattccttc

SEQ ID NO: 282051 - DNA, 201 bp, Homo sapiens
caggaaagcgatggattgtttcaggccaggcccactgcttgctgtactttaatgtcattgctgcttatcgccttctctgcagccttgttgacactcctgamaacaagtgtttgtctttggcttctagggcactgtttcctgttcctttacctttcttgttggttcttctggcatctgcccttaatcctttatcctacaatt

SEQ ID NO: 282052 - DNA, 201 bp, Homo sapiens
taaagtcagtgaaatgagtagttttcaacgtaatctgtttattctggcctataattacaaaatggaacagatttcaaaaggacgtaatactccactgtgcracaggtaagtaaagactctctacctccttctttctcctcttgataatttaatcatttagttcacattaatagcccaattaattgagatagttataagaaa

SEQ ID NO: 282053 - DNA, 201 bp, Homo sapiens
agaaaatttttggaaggccaaaaatctcatatcagaatgaccagtatatacttattaatggaagctcaggaattcctgaagaatagcttttctgttggtaratatgtactaactggttgagtaatatatgctaatgtaatttaaaaaattatgtgattgtgaaggcaggaaagcgatggattgtttcaggccaggcccact

SEQ ID NO: 282054 - DNA, 201 bp, Homo sapiens
ctgccaccctctcccaataatttctctgttgccatgtttacccccttaaacacaccctctcactgccaccatgtaattactaaacatggatcttactggcsacaaccatttaatgtctcctagaagctcagttcagggtgcccctgttaacattgttcccctcttcaccttcatcgtcagttgttttcctcctcctccttg

SEQ ID NO: 282055 - DNA, 201 bp, Homo sapiens
acctgtctatttttattatttacttggtatcgaagtatttttgtgaattctccctctggttggatatttttcaaatgattccttcagattttcttgtcagrcaggcacttatctgcacacaataatgattctgtctttttcagtattcataactgtcgtttattttttcattgcattggctaaagtgcagtgctgttcaga

SEQ ID NO: 282056 - DNA, 201 bp, Homo sapiens
tcttgtttcaaagatgtttctgaagaactattattgttttcattttacttattacgtagatgcaagtaagaattatggcaaaaacttgagaaatgtactawtaagtgaataatgtcaataaattaggagtgatcataactttattttgcagaagtaaaattataaaatttattttatgaaattgtggatttttgaatgatt

SEQ ID NO: 282057 - DNA, 201 bp, Homo sapiens
aaaaaaaaaaaaaaaacctcaatgtaggccaaaaaatacgactctacaggcctcacggcctgtgcttcaccaatatgtgacttctgcttttaaggaatagytggggatatctcagccttaggataaataatcatttttggtaatttagaaaaatgaagcagtgtattagctactgttctcaaatatcctttttttcattta

SEQ ID NO: 282058 - DNA, 201 bp, Homo sapiens
tgaatagtttccacagtggattttagtctgggtggccaggagagttgtagtttgatgataccttctttcatgtttatcaacctattttgtttccccaaatkagttctgagagttaagggtgctgatgagttgctcctgaaagtgtattagaagggtattataggggacaggtggtgtgacatgggaatcttttgcacagac

SEQ ID NO: 282059 - DNA, 201 bp, Homo sapiens
gaagctagaaaggcagtaggctttgtgaacgaaattatagctgaaaagaatgacaaatagctgacatttattgagcttttattacatgccacgcactgttyggagagctttatgtacagtgtcttcacactgttaacagtcctctggggtgggggttattcccattttacagcgggagaaactgcagattggacgacttag

SEQ ID NO: 282060 - DNA, 201 bp, Homo sapiens
gattagagaggtgttttatactgcacatcggtgaggcctaataagaaagtagaatagacgtaaaccattgttttcatcatcctttaagacagggatttcaractcaagaaccaggcagctacctatttaaatgagtcaagtgggccctaatgtaagacaatgtgatgggtaaggattgattctgagggaacaggagcaggc

SEQ ID NO: 282061 - DNA, 201 bp, Homo sapiens
atttcaacagattaatgagcaactgaactgccatattttgaagtgggagaacagtttgcctgagtcaggtatccatccctttaggttctcgattggccctkggcccacggtgagtgagctctctttgcttggtgcatcatcgctccacctagttcaagttctggcggcttcctgattttgattctcttgggaaatgaggcc

SEQ ID NO: 282062 - DNA, 201 bp, Homo sapiens
cttcatttgccgatgtaacttttctttaaattattttaaaatgattttgaactaacgcctttctttttcttcctcctagattctcgctgaagtctgttaaytctactttttgagtacttatgaataaccacgtgtcttcaaaaccatctaccatgaagctaaaacataccatcaaccctattcttttatattttatacatt

SEQ ID NO: 282063 - DNA, 201 bp, Homo sapiens; identical to SEQ ID NO: 57322

SEQ ID NO: 282064 - DNA, 201 bp, Homo sapiens
attctccagaattatgccaaagttttgattctgaggttagctcaaatgacacatcagttttctaacatcagttaggaaaacaggtccctctaggtatactktcatcttgtctttaaagaaagttttaaggaaaaatataaacattaattattaatgttttaaaggtagtatttatttgaaatttaaaatattttacattca

SEQ ID NO: 282065 - DNA, 201 bp, Homo sapiens
tgtattttaaaatatttatttatttatttatttatttatttatttatttatttattttgagatggagtctcgctctgtcagcaggctggagtgcaatggcrccatctcggctcactgcaacctccgcctcctaggttcaagcaattctcctgcctcagcctcccaagtagctggggactataggcgtgcaccaccacgccc

SEQ ID NO: 282066 - DNA, 201 bp, Homo sapiens; identical to SEQ ID NO: 57327

SEQ ID NO: 282067 - DNA, 201 bp, Homo sapiens
aaaaaataattctatgcaaacgtaactttctggttcatcataacatttggacgatattctggtttcttctgtaaattattattttgattacattaaaaaawttttttttgttttatcaggttattcttggacagtataattggctttcctatgaagatgtctttgttcgagcctttaattttggaaatggattacagatgt

SEQ ID NO: 282068 - DNA, 201 bp, Homo sapiens
cttttagtaaatttgtaattttgaagggttatattttaaactagtaatttttattttacttctgaagcattaagtaattacaagttttcagaattgtttgraagttaaaaagggagacttttaattatattacagtaaaaagaggtttctttggtctctagacaactcccagaaatatctgggctattctatatgggggaa

SEQ ID NO: 282069 - DNA, 201 bp, Homo sapiens
gtttttttggggtatgggatattttctgcaaatatataggagaagagtagtaaggtgtttgtgaggcagaataatggtggattccaagtactatgatcatygatatcaatttttagaatgtattagatgcatctggagtcaataatttatctggagaagtttttatatcaaactgataggtaatattaaaaaccacttagc

SEQ ID NO: 282070 - DNA, 201 bp, Homo sapiens
catggctgcagtggaggccctgggagccaaggccagcatgggtatgttacacttttctaattccttacctgtgctttctggtgaccacattctccagaatkatgccaaagttttgattctgaggttagctcaaatgacacatcagttttctaacatcagttaggaaaacaggtccctctaggtatactgtcatcttgtctt

SEQ ID NO: 282071 - DNA, 201 bp, Homo sapiens
tttctggcagatagttgtggattctactttaactcttctggttggcaacccactagatgtaaagaccatttcctccttggatgatttcttctgttcttcaraagaaccctgtattattatttgtttaagccactgtttcttgtgcctcagtactttgcttcagcaacgcttataattcctgagtgcttttaagtaggacgg

SEQ ID NO: 282072 - DNA, 201 bp, Homo sapiens
ccagttccagggtttccatggctcccttcctcactttattcaggcctttgctaaacgaaactctacagagacggtctccaggcttttccatccaaatagcrtctattgtcatcttctcaccttgtcttgcttcagttttcttcataggttaatctgtttgtatatctcaatagaatatatctcccatacgtgcagggactt

SEQ ID NO: 282073 - DNA, 201 bp, Homo sapiens
gatcttttttttcacagataataacatactcctgttcaaaacaacattgctttacatccagaacgtaatccagagttcttcccgtggcctttgaggtcctrtgtgtggtccctgatagccacttgaccattgtttcttgccactcttcctcttgctcactctgttccagccacactccttgctggtctttagatatgctga

SEQ ID NO: 282074 - DNA, 201 bp, Homo sapiens
caaatggttcacatcgtgttttaatgcaggactctgagtgtaaccaagttagtcaccattctgaagcagtgaatagtttttagcaaacacctagatactcwagtccaaagctacctttatttcttagttgaattactgggataatcttgtctccctgataccttttttccccttgtaaagttagttagccacacagcagcc

SEQ ID NO: 282075 - DNA, 201 bp, Homo sapiens
caaccatgacctatttctctttgttcttctgctgtgccacctctatagcttctcagctgttgtccttaggctggtactcttctgatttcaaatggttcacrtcgtgttttaatgcaggactctgagtgtaaccaagttagtcaccattctgaagcagtgaatagtttttagcaaacacctagatactctagtccaaagcta

SEQ ID NO: 282076 - DNA, 201 bp, Homo sapiens
ttgaaaaataatgaacgtgatgaatgttggtgtatttctaggatatagtttctttggtcccacgcctgcggcacatcatcactgttgatggaaagccaccracctggtccgagttccccaagggcatcattgtgcataccatggctgcagtggaggccctgggagccaaggccagcatgggtatgttacacttttctaatt

SEQ ID NO: 282077 - DNA, 201 bp, Homo sapiens
taatagtaacagttttttacaggtatggtaagagtttaataagttaacacttgccgtgtccttagcatgtagtaagcactaataaaggttagttaccctcrttatcattatcatgattattacaactatccagatctcttgaatatttttactctgtggctcccctcagaataattttttcatagtgatcttcagttgcag

SEQ ID NO: 282078 - DNA, 201 bp, Homo sapiens
caggcattctttgattaatgaatctttagatcattttctatttttggttttttgccactgaaacagtactgccatgtctcccaggtgtgtgtgtgtgtgtktccaagttttatgttcagactatattactactagttgcagttaactactcatccccaaatctgtaaatatgtcttcctgtgaccctgacactactctgtc

SEQ ID NO: 282079 - DNA, 201 bp, Homo sapiens
gcctcccgagtagttgggattacaggcatgcgccaccacgtccggctaattttgtgtttttagtagagacaaggtttctccatgttggtcaggctggtctygaactcccagcctcaggtgatccgcccacctcggcctcccaaagtgctgggattacaggcatgagccacagcgcccaaccagcacagctttttatggcac

SEQ ID NO: 282080 - DNA, 201 bp, Homo sapiens
caactcttgaaggagagtccaaataactgcaactatggaatgaaaaactcagagctcctcttttactggagggccagagggatgttgcttaacctcctctrtatatggcccattaattttgccacttaaacaaatttcatacatcattttcctcaaaacatgaaggagatgccaagcaagttgatgtcagtaattcctaga

SEQ ID NO: 282081 - DNA, 201 bp, Homo sapiens
ttcaggcattctttgattaatgaatctttagatcattttctatttttggttttttgccactgaaacagtactgccatgtctcccaggtgtgtgtgtgtgtstgtccaagttttatgttcagactatattactactagttgcagttaactactcatccccaaatctgtaaatatgtcttcctgtgaccctgacactactctg

SEQ ID NO: 282082 - DNA, 201 bp, Homo sapiens
gggtggccaggagagttgtagtttgatgataccttctttcatgtttatcaacctattttgtttccccaaattagttctgagagttaagggtgctgatgagttgctcctgaaagtgtattagaagggtattataggggacaggtggtgtgacatgggaatcttttgcacagacttgattttgttttctggcatttttctggg

SEQ ID NO: 282083 - DNA, 201 bp, Homo sapiens
tagtctgatttatgtaataatattatcttcaatctgataaaatctgcctctgatttcctcctaattagttggtccacatgcaagcatatagtctgcaaggrcctgtccatttcagaatcgcctctgtaaaccagatgccttaacatggtgcatgcatggcccccagaggaggtgttcagtaactggttttgagtgaatttg

SEQ ID NO: 282084 - DNA, 201 bp, Homo sapiens
gcggaatgacccgtagtaacctcgccccgccccgggccgccagcgccgcgctccccggcccgaattcgataggcccagccccgcacgcgccaccgctcgckggccaatgggtggcagcctctctgcataggcaacgagtgccggccgggggtgagcgtcccaggcggttccgctcaacagacgctgctgtggctgcgccgg

SEQ ID NO: 282085 - DNA, 201 bp, Homo sapiens
ggagatgatagctgaactaggttttccaagatgaactggagttttcccaggtcaacagggagccaggaaatagaatgttttaccttgattttggatcctctgtgtgtgtgtgtgtgtgtgtgtgtgtgtacacagatgtgtacgcattggagatgttataacgctaccaaagaatattgttagaaaaattaaaaattgctt

SEQ ID NO: 282086 - DNA, 201 bp, Homo sapiens
gataggtacgatgaaggaaaagtattgtgtgaatgaggattatgagcaagattgtgatgtagatggaaatctagtctagggagctgttttttgaattgatrtggtgagattttgctagaggacagtcttgaaatctgagcctgcaattatgtacataatgcaagagtttgggaagttgtcagcaacaataattcttttcat

SEQ ID NO: 282087 - DNA, 201 bp, Homo sapiens
gagatgatagctgaactaggttttccaagatgaactggagttttcccaggtcaacagggagccaggaaatagaatgttttaccttgattttggatcctctgtgtgtgtgtgtgtgtgtgtgtgtgtgtacacagatgtgtacgcattggagatgttataacgctaccaaagaatattgttagaaaaattaaaaattgctta

SEQ ID NO: 282088 - DNA, 201 bp, Homo sapiens
aagttgtcattctgtctgccttcagggtacttaaagcttaaatagtcctctaatactttctcccactcaaaatgaactgtaagggggagtaagactctttkatgtgagatttgggcttgaatattggatttagattttttttaggaaagctaggccaagggtgataggcttttaaaacaacgagcatcataatgactcaaa

SEQ ID NO: 282089 - DNA, 201 bp, Homo sapiens
caaatgctgttctaatttttatctcagccttgcaaaataggtacttttttttttttgagacggagtctcgctctgtccccctggctggagtgcagtggcaygatctcggctcactgtaagctccgcttcccgggttcacgccattctcctgcctcagcctcctgagtagctgggactacaggtgcccaccaccatgcccgg

SEQ ID NO: 282090 - DNA, 201 bp, Homo sapiens
accattctttgtccattatacttaacagtacaaaactgtaatgggcacttttcctcgaaggctctttttagtaatctttactttagttaactttctttgctttttttttttttaaataaaaatatcttaaaatatagaaatatcttgaacatattttacagatatatattattttacttgtaattccatgcatgactgcag

SEQ ID NO: 282091 - DNA, 201 bp, Homo sapiens
ccattatacttaacagtacaaaactgtaatgggcacttttcctcgaaggctctttttagtaatctttactttagttaactttctttgcttttttttttttkaaataaaaatatcttaaaatatagaaatatcttgaacatattttacagatatatattattttacttgtaattccatgcatgactgcagggataattcacg

SEQ ID NO: 282092 - DNA, 201 bp, Homo sapiens
ggagtcttgttgctttgggaccacagatgtgaatgttattattattatttttgcttctctgctttatctgtggcattactgctcttgtggcattccccccsacccccgactcccttgtttttggtgaacataatagtcaccgtaaaaaagatgtataattctagggaaaaacttaagtagggcaaatgctcaacagggaaa

SEQ ID NO: 282093 - DNA, 201 bp, Homo sapiens
taatttcaaatagctttatgaaataattatatttgctgtctttcttagataagtcaagaacataatgtgtttcttttgagctccttcagggagagtaagtttaatttattcttccactagaaagaaagatactgtgctttattcactgctgcacacccagtgcccagcgtataggagacactcacatttgttgaatgaatg

SEQ ID NO: 282094 - DNA, 201 bp, Homo sapiens
ctattagatacctgtctaaatgtaattttttttttttttaaatgagatggggtttcgctctgttgcccaggctggagtgcagtagcacgatcatagctcamtgcatcttcagatctcctgggctcaagtcatcctcccacctcagcctcctgagtaactggtactacaagcgtatgccactatacccagcttatatttttt

SEQ ID NO: 282095 - DNA, 201 bp, Homo sapiens
taattgcaaatttttataatcttgtaagataatgttatgtaattcaacttgtcagtattattctagtgctattagctatattaattacataaagacattgrtgtaaggggactcaaaaattcataggtttgggtagaaaatgagaactagacagtgatttcatcactataaatttagttgttacttagcgtcccctgaggc

SEQ ID NO: 282096 - DNA, 201 bp, Homo sapiens
tactgtcatcttgtctttaaagaaagttttaaggaaaaatataaacattaattattaatgttttaaaggtagtatttatttgaaatttaaaatattttacwttcagttttcatttcttttttatggtgatagttttgggtggtttaaagttagtttataaataatgacatttatcttgtcctatgtgaattacctgtaagt

SEQ ID NO: 282097 - DNA, 201 bp, Homo sapiens
tggaacctgtgtcagcatcacctgattccagtgttcccagcagtaaatgcattgcactaacgtcgtcttgaaatgaacagtgaaatgatttcaggacaacyttaaaatacatgtatacctgaaatagaacaaagctgcaaagactaaaaatagaaacagaaaagagtacaagctggctcatatactttgtgagccatcaga

SEQ ID NO: 282098 - DNA, 201 bp, Homo sapiens
atgcctgtagtcccaactgtttgggaggctgaggagagagaatcgcttgagtccaagagtttgaggctgcagtgagctataatcttgtactgtactctatyctgggtgagatcctgtctttaaaaaaaaaaaaaaaaaggtattattacccacctgccacacaatggctgttcccctctgcccggagtgctctttcttacc

SEQ ID NO: 282099 - DNA, 201 bp, Homo sapiens
agttttttaatatttgttgaacgaatgcttagaaaaataagtcagtcctactgacgacatacggtttttcaaaactacatctgccccttaatctcctttamatgttttcctttcttcccttcctttctcccttcatttgctgctatcatgaatctccttagtattaggcaatatgttagtaacacaatagtgagcaagcat

SEQ ID NO: 282100 - DNA, 201 bp, Homo sapiens
aatttcaaatagctttatgaaataattatatttgctgtctttcttagataagtcaagaacataatgtgtttcttttgagctccttcagggagagtaagtttaatttattcttccactagaaagaaagatactgtgctttattcactgctgcacacccagtgcccagcgtataggagacactcacatttgttgaatgaatga

SEQ ID NO: 282101 - DNA, 201 bp, Homo sapiens
atttcaaatagctttatgaaataattatatttgctgtctttcttagataagtcaagaacataatgtgtttcttttgagctccttcagggagagtaagtttaatttattcttccactagaaagaaagatactgtgctttattcactgctgcacacccagtgcccagcgtataggagacactcacatttgttgaatgaatgaa

SEQ ID NO: 282102 - DNA, 201 bp, Homo sapiens
tttcaaatagctttatgaaataattatatttgctgtctttcttagataagtcaagaacataatgtgtttcttttgagctccttcagggagagtaagtttaatttattcttccactagaaagaaagatactgtgctttattcactgctgcacacccagtgcccagcgtataggagacactcacatttgttgaatgaatgaat

SEQ ID NO: 282103 - DNA, 201 bp, Homo sapiens
acccaagtaatcattcttaaaaaaaacaacaacacacatttaggactgggaacagtgactcacacctgtaatttcgacactttgggaggccaaggcgggtrgatcacctgaggtcaggagttcaagactatcctggtcaacatgggtgaaaccctgtctctacaaaaaataccaaaattagccgggcatggtggcgggcgc

SEQ ID NO: 282104 - DNA, 201 bp, Homo sapiens
ttttctttttatttctggaactccttgtaatggaacttgaatctcttggattaatttaacaccttattttttaaaatgagaattaaattttctatattctrccccttgcttttgctcttctttatctggaaaagagtctccacctcattttctgacacttgtattgactccttaatttcagctgctattaatttcaaagaa

SEQ ID NO: 282105 - DNA, 201 bp, Homo sapiens
ggagtatcacaggagcccaggaggccgtgattgtgccactgcactccagtatgagcaacagagtgagaccctgtctcaaaatctcaaaaccaaccaaccawccaaccctcagctcaggcctcacttgcaagaattttttccaaatccccaggttggagagtcttaacacttagcgctaccattgtagtaccaatgtattga

SEQ ID NO: 282106 - DNA, 201 bp, Homo sapiens
ataaaaaaaaaattagccaggcgtggtggtgggtgcctggagtcccagctactcaggaggctgagacaggagaatggcgtgaacccgggaggcggagcttrcagtgagcagagttcacgccactgcactccagcctgggtgacagagcgagactctgtctcccaaaaaaaaaaaaaacaaaaaaaaacctgtctattttta

SEQ ID NO: 282107 - DNA, 201 bp, Homo sapiens
agacaggagaatggcgtgaacccgggaggcggagcttgcagtgagcagagttcacgccactgcactccagcctgggtgacagagcgagactctgtctcccaaaaaaaaaaaaaacaaaaaaaaacctgtctatttttattatttacttggtatcgaagtatttttgtgaattctccctctggttggatatttttcaaatga

SEQ ID NO: 282108 - DNA, 201 bp, Homo sapiens
ctacctgctgtcaggtctgtggcctgggggttgagaattcctgccttacaggaagggtgaccatatatcctgatttgtctggaatacctccagatcactgtttttttttttttttttttttgaagacagattctcgctctgtcgcccaggctggctggagtgcagtggcatgatcttggcttactgcaagctctgcctcct

SEQ ID NO: 282109 - DNA, 201 bp, Homo sapiens
tttgaaatggtgatacattacatgggaaaagattagagaggtgttttatactgcacatcggtgaggcctaataagaaagtagaatagacgtaaaccattgytttcatcatcctttaagacagggatttcaaactcaagaaccaggcagctacctatttaaatgagtcaagtgggccctaatgtaagacaatgtgatgggta

SEQ ID NO: 282110 - DNA, 201 bp, Homo sapiens
tgaagacagattctcgctctgtcgcccaggctggctggagtgcagtggcatgatcttggcttactgcaagctctgcctcctggcttcaagtgattccgctrcctcagcctcctgagtagctgggattacaggcagatgccaccatgcctggctaatttttggtatttttagtagcaatggggtttcactgtgttagccagg

SEQ ID NO: 282111 - DNA, 201 bp, Homo sapiens
gtttgatcttgataggatacatctttttgaaaaattcacaaaaggttttttccttcttgctgaatcacatccacagttgaagagtacttcttttaaaatgvcttaatattgctagaaatgttaatctaatgctaagtgaatatgtaaggcagctgttattattaactatgttaaactcatttttatacatttaggaaatca

SEQ ID NO: 282112 - DNA, 201 bp, Homo sapiens
caagtgattccgctacctcagcctcctgagtagctgggattacaggcagatgccaccatgcctggctaatttttggtatttttagtagcaatggggtttcrctgtgttagccaggatgggctcgatctcctgaccttgtgatctgcctgccttggctttccaaagtgctgggattacaggcatgagccaccacacctggcc

SEQ ID NO: 282113 - DNA, 201 bp, Homo sapiens
gggtttctccttattggtcatgctggtctcgaactcccgacctcaggtgatctgcctgcctcggcctcccaaagtgctgagattacaggcgtgagccaccrtgcccagccagccttttgtttttttaggaagatttgaggatattcttatactctgagctttgagaatttacgtggctctgtctagaagtcagttattttt

SEQ ID NO: 282114 - DNA, 201 bp, Homo sapiens
ggtggccatttaccgttttgaagacctccatgtagaggcaagagctcaaaccatgggtatgggtgagattgcctgtggggaggctatagaataagaagagraggaggcctgggatggagctgggcagaggaggttgagcttgtcaaggagacaagagtggccaggaaggtcagaggacagccagaaacagatgttcctgca

SEQ ID NO: 282115 - DNA, 201 bp, Homo sapiens
ccaggctggagtgcagtggcaccatctcagctcactgcaacctctgtctcctgggttcacgcaattctcctgcctcagcctcctgagtagctgggattacrggtgtgcgccaccacgcccagctagttttcgtatttttagtagagtcggggtttcaccatgttggccaggctggtctcgaactcctgacctcaagtgatg

SEQ ID NO: 282116 - DNA, 201 bp, Homo sapiens
atagcctctcttatgcctttgagaatattacatagacatattttaaaatttcccacatttcctacattgtctgtttccactgaggcactttttgtctgctrtttgtctctttctttgatagtgatggtttttcacaaatatctggtgattaagaactttatcttctgtctggattttgaatttttaaatggttttcctgtt

SEQ ID NO: 282117 - DNA, 201 bp, Homo sapiens
attgtatgtatattgcacattttctttatccattcatctgtgtttggacatttgggttgtttctaccttttgggtattgtgaataatgctgtgatgaacayagatgtgcaaatatggctttgagattctgctttgaattattttggatatatacccagaaatgagattgttagatcctatggcaattattaatactatatt

SEQ ID NO: 282118 - DNA, 201 bp, Homo sapiens
tgcaaaacggagacactatacccattacactaattccccttccctctctcccccttccctccacctttttactttatgtttctaaaattttgattacttgwggtacttcatacatgtggaatcatacggtatttattcttttgtgactgtcttatttagtgtatcttcagggtttattcatattgtaccatgtgataggat

SEQ ID NO: 282119 - DNA, 201 bp, Homo sapiens
taaagtatacttcacagtaatggacctagcaagcaaaatgcagcacagacaaggaaaacttcctggtgcaatatcgaaagtcaaatagccaaacaaaaacycccaaacgttgcatggtctttttgtgagcaaagaatgtggtactgtatatttttataagataaagttaggacattttgaaaaaccatttcagacggttgt

SEQ ID NO: 282120 - DNA, 201 bp, Homo sapiens
ccaaccaaccaaccctcagctcaggcctcacttgcaagaattttttccaaatccccaggttggagagtcttaacacttagcgctaccattgtagtaccaaygtattgaagtaatacgtttttgcattatgcatgtctccagataggttgtgaacttgcagatggcattgaatatcttcttcacctgcctggtactaatgga

SEQ ID NO: 282121 - DNA, 201 bp, Homo sapiens
ggagtgcagtggcatgatctcggcttaacgcaacctctgcctcctgggttcaagtgattctcctgcctcagcctccagagtagctgggactatatgtgcaygccaccacacctggctaatttttgtaattttagtggagttggggtttcatcttgttggtcaggctggtcttgaactcctgacctcaggtgatccacccgt

SEQ ID NO: 282122 - DNA, 201 bp, Homo sapiens
tttacatgtatacgtaggtacacacgtggcttgttggtttgctgcacctttcaacccatcatctaagttttaagccccacatgcattaggtatttgtcctaatgttctccctccccttaccccacccacctacaggcccaagtgtatgatgttcccctccctatatccatgtgttctcattcttcaactcccacttatgag

SEQ ID NO: 282123 - DNA, 201 bp, Homo sapiens
aaagtcaaatataaataatcagtagtttcgtagtttctttctataattatagtttctttagtatccaacttaaattcttagttcacttaaaaatgacgtayaatttaaagttgtggaggaaacattattttaagtcattaaagtatacttcacagtaatggacctagcaagcaaaatgcagcacagacaaggaaaacttcc

SEQ ID NO: 282124 - DNA, 201 bp, Homo sapiens
tttttttttgtatgtttggaactgttatatttttcctctggcctttgaattttctttaattttattttttatttcaccctgggggaaagagaggtgggtasatttgtttgtttgtttgtttatttttgagacagagtcttggtctgtggcccaggctgaggtgcagtggcgcaatcttggctcactgcaacctctgcctcc

SEQ ID NO: 282125 - DNA, 201 bp, Homo sapiens
acacctggctaatttttatattttttaatagagacggggtttctccatgttggccaggctgaccttgaactcctggcctcaagtgatctgcccacttcagyctcccaaagtgttgggattacaggcgtgagccattgtacctggccgaaaagaggtatatttaaaagtgaatttgttacttcaactaacacaaccttcact

SEQ ID NO: 282126 - DNA, 201 bp, Homo sapiens
gtcccagctactcaggaggctgaggcaggagaatcgcttgaacctgggaggcagagcttgcagtgagccgagatcgcatcactgctctccagccaggcaayggacgggactctctctcaaaaaagaataaaaaaataaataaataaaaagagaaagataatgttacaggacaggggtcctgatctaaacctgaagggaagg

SEQ ID NO: 282127 - DNA, 201 bp, Homo sapiens
ggcctctctgaagtttcacagtttgtgtatatttggatgactcacaggaatcttaaacccgtattttcaagactgtatttattttctttctaccaaccatscaaccactgaccacctattttacttcttgtatttctgtcttggtggaaggcaccaagatcattttctctccttgtattgttacagctctaattcatgact

SEQ ID NO: 282128 - DNA, 201 bp, Homo sapiens
gatacagaattcgttgttgggaaggactggggaaacagctgtaacatttgccaccctcagaagctgctggtcctgtgtcacaccaccttagcctcttgatygaggaaggtaaagaattactttcactgatttttatctaatttctttgccttttgtttctgctgccttcacattgtcttctacagatagttattttctaaa

SEQ ID NO: 282129 - DNA, 201 bp, Homo sapiens; identical to SEQ ID NO: 57331

SEQ ID NO: 282130 - DNA, 201 bp, Homo sapiens; identical to SEQ ID NO: 57332

SEQ ID NO: 282131 - DNA, 201 bp, Homo sapiens
  misc_feature (1)...(201): n = A,T,C or G
gacattcatggttcacttgttggttgtgcattttgatggatacgcaaaaagtggggaagttacaccatttgctaagaacttaaataccttttcttcttttntttttttttaatcatcttagcaagtctggaaaagtttgaaattccagtaaaaattcgtttgagtcctgaaccgtggacccctgaaactggtctggtgaca

SEQ ID NO: 282132 - DNA, 201 bp, Homo sapiens
tttctatatttcagttatcattcttatgtcattggatttgttgtgccaaatcaaaaggaactaactgaactagctcgaaagaaaggacttaaagggacttsggaggagctgtgtaacagttgtgaaatggaaaatgaggtacttaaagtgctttccgaagctgctatttcaggtgagtattcggttaaactgatactaaaa

SEQ ID NO: 282133 - DNA, 201 bp, Homo sapiens; identical to SEQ ID NO: 57333

SEQ ID NO: 282134 - DNA, 201 bp, Homo sapiens
aaatggatatgccagtgccaagtatggcacatgcattttaaaaaaaatgaggagttatttactacttgtcactgtaataataactgcagtcaacacagttyaccattttgttccttatctgttatcctttctatatttcagttatcattcttatgtcattggatttgttgtgccaaatcaaaaggaactaactgaactagc

SEQ ID NO: 282135 - DNA, 201 bp, Homo sapiens
aatactgataagccacaccccaggggtgaaattcttattgggggccaaagtgtgacaatggggtactacaaaaatgaagcaaaaacaaaagctgatttctytgaagatgaaaatggacaaaggtggctctgtactggggatattggagagtttgaacccgatggatgcttaaagattattggtaagtcatctaatattttt

SEQ ID NO: 282136 - DNA, 201 bp, Homo sapiens
ttgatctatctgtctgtccttttgccagtaccacaccatcttaattacttttcctttatagtaaattttaaaattaagacatataagtcatccaagtttgttcttctttttcaagattgtttggctgttctgggtgcttttaatatccatgtgaattttaaaatcagcttacttatttctgtctaaaagccagcttttata

SEQ ID NO: 282137 - DNA, 201 bp, Homo sapiens
tgatctatctgtctgtccttttgccagtaccacaccatcttaattacttttcctttatagtaaattttaaaattaagacatataagtcatccaagtttgttcttctttttcaagattgtttggctgttctgggtgcttttaatatccatgtgaattttaaaatcagcttacttatttctgtctaaaagccagcttttatac

SEQ ID NO: 282138 - DNA, 201 bp, Homo sapiens
gatctatctgtctgtccttttgccagtaccacaccatcttaattacttttcctttatagtaaattttaaaattaagacatataagtcatccaagtttgttcttctttttcaagattgtttggctgttctgggtgcttttaatatccatgtgaattttaaaatcagcttacttatttctgtctaaaagccagcttttataca

SEQ ID NO: 282139 - DNA, 201 bp, Homo sapiens
tgggaggctgaggagagagaatcgcttgagtccaagagtttgaggctgcagtgagctataatcttgtactgtactctatcctgggtgagatcctgtctttaaaaaaaaaaaaaaaaaggtattattacccacctgccacacaatggctgttcccctctgcccggagtgctctttcttacccaaataggcacatggtacgct

SEQ ID NO: 282140 - DNA, 201 bp, Homo sapiens
aaaaaaacctcaatgtaggccaaaaaatacgactctacaggcctcacggcctgtgcttcaccaatatgtgacttctgcttttaaggaatagttggggatayctcagccttaggataaataatcatttttggtaatttagaaaaatgaagcagtgtattagctactgttctcaaatatcctttttttcatttaattcctagt

SEQ ID NO: 282141 - DNA, 201 bp, Homo sapiens
acctcatgactgatttttccctatttattttgagtggctctgtataccattttcatgtattacttcatttttctgtttttcagttatgttctctgttttcrtatatttttggaagctagttctaagtcatgttttgtaggaaataagcaatcttaaatacatgcataggggatttctttcttctgaggatccttaatttct

SEQ ID NO: 282142 - DNA, 201 bp, Homo sapiens
agaatgtttgtctttagatatttttgcttgagaataaacggtactgccacttgtttgtgctcttttcttgacatacactgtaaatctgacattcagtgtgycatcctatttgtatatgttctttttcacattgtaaagccaagtggccaacaattaagaatttgaagtcttagaaatcagttataattccttcacaatgtg

SEQ ID NO: 282143 - DNA, 201 bp, Homo sapiens
ctggcctcaagcgatcctcctgcctgagctttcagagttactgggattacaggcatgagccatcatgcctggctctaactcgttttcaatgacagaatatrtattctattttgttcctatatcatattttatttaactcattttcctcttgatggggacttgttaaatagtttattgttttacttatgtttgtattttgag

SEQ ID NO: 282144 - DNA, 201 bp, Homo sapiens
aataacgtgctgtgtgggtgtgtagcctaggagccgtaggctagataatgcagcctagatgtatatatagtaggctataccatcgacattcgtgtaagatrtgctatgatgttcccatgatggcaaaactgccaagtgtgtgatgcatttctcagaacatatccctgtcattaagagatgcgtgactatattggataccct

SEQ ID NO: 282145 - DNA, 201 bp, Homo sapiens
atttttactgccttttctatgtttagatacacttaaatacacaaatacttaactattgtgttacaattacctatggtattcagtacaataacgtgctgtgygggtgtgtagcctaggagccgtaggctagataatgcagcctagatgtatatatagtaggctataccatcgacattcgtgtaagatatgctatgatgttcc

SEQ ID NO: 282146 - DNA, 201 bp, Homo sapiens
tccctctggtgtctgtctgtgatattgtggcctcactggtgctgtagttggccatggtactggagctctacctagtgtctgtgatactgcagcctctggtkcatgttaatctttgttcttgacagctcccaacctggtgccctgttcctgttatttagattcaggaaagacagaagcaagtttcttgcaccccagaagtca

SEQ ID NO: 282147 - DNA, 201 bp, Homo sapiens
ttgtctattgtgacaatttttgtcttaaagtctgttttatttaagtatggccatcccctttaggttcttattttcatggaatatctatttccatccttcastttaggttacgcatgcccttggatctaatgtatgtttcttgtggatggcatatacttgagtcttgttttatattcagttggtcaatctgtatcttttaat

SEQ ID NO: 282148 - DNA, 201 bp, Homo sapiens
tttcaccatgttagtcaggatggtcttgatcttctgaccttgtgatccgcccgcctcgccctcccaaagtactgggattacaggctgggagctactgcgcygactgcaaaataggttcttttatcattctaatttttacagctgaggaaactgaagcacagagcaatttaagtgacttgcacgattgtgtgctaaatgtgt

SEQ ID NO: 282149 - DNA, 201 bp, Homo sapiens
atactgtgttccttaatgactattgatttacattcccaccaacggtattaagggtttccatttctccacatcctcaccaacatttgtatatttttttctamtatccattctaacagatgtgaagtgatatctcattgtggttttgatttgcatttctctttttattagttatgttgggcatcttatatatacttgttggcc

SEQ ID NO: 282150 - DNA, 201 bp, Homo sapiens
tagtatatggaagagtaaacttatcagtcccccattcaagccttgctacacaaattaaccactcccaccaaactgatgtacatgtatcttgaatgttcttktctctgcaacctttgctttctgggttaccctttctcttatgtcagctgttcttcaaggccttgctcagttttctggccacactagcccatagtgatcagg

SEQ ID NO: 282151 - DNA, 201 bp, Homo sapiens
aaaatgaggtacttaaagtgctttccgaagctgctatttcaggtgagtattcggttaaactgatactaaaaactgagatgggaagagagtacttacatgcwttcaacctgttttaaggtttagggttcattactttctgctcagaaaccatttctaccgttagtatatggaagagtaaacttatcagtcccccattcaagc

SEQ ID NO: 282152 - DNA, 201 bp, Homo sapiens
cggcactccaggcaggtcttggggctcctatgtaagctgtgttaagctgcagcctaaacacacagcctccccacctcatgatgatgaagaggcagctgggracctgtctacgacagttgacatgaattattatgggaaaataaaatctgttatcaggaaaactaatttagaaacagatgttgggggtacagcccaagttag

SEQ ID NO: 282153 - DNA, 201 bp, Homo sapiens
ctctaggaggtccagccattgttcatgcattaaatgaaacagaggtgaccaacatcattactagtaaagaactcttacaaacaaagttgaaggtgaggackctagttactttctaactgtctgatactttagaattttcagtgtcatgagccctattattgatacttagttcttttatgacttttaagtccttaatctttg

SEQ ID NO: 282154 - DNA, 201 bp, Homo sapiens
ttatgtaatttcagcatttctgagaatgtttgtctttagatatttttgcttgagaataaacggtactgccacttgtttgtgctcttttcttgacatacacygtaaatctgacattcagtgtgccatcctatttgtatatgttctttttcacattgtaaagccaagtggccaacaattaagaatttgaagtcttagaaatca

SEQ ID NO: 282155 - DNA, 201 bp, Homo sapiens
gtcagttctgctgtacctgaaatgtgggcccattgttgctggcgattccacacttacatctaaaatttcctgattttttaagaatgacaataactaatttaaaaaaaaaaaaaaaacctcaatgtaggccaaaaaatacgactctacaggcctcacggcctgtgcttcaccaatatgtgacttctgcttttaaggaatagt

SEQ ID NO: 282156 - DNA, 201 bp, Homo sapiens
tctttgtaaaaatgttccgagaactcttcctatctgttacttgtgggaatggcctccttctcattgcagccattagctgactcttttccttgtaaggcttcccctgatctttctctctgtccctgttttctgctttacgtctcactgcagtgtcccatggagggaggtgaagaaaataaaaccttccttcctgctgccttg

SEQ ID NO: 282157 - DNA, 201 bp, Homo sapiens
tgtaactttcttttaaaatgtgtacatggcagtattcataacagtttttcatagttgaaattcatcatgaaatgtcagattgaagtttatttagcaacgarctctgccaaagcattggaaaatattatgaatcaaacagtaaaactggcggttgcatgaaatggatatgccagtgccaagtatggcacatgcattttaaaa

SEQ ID NO: 282158 - DNA, 201 bp, Homo sapiens
catttctcagaacatatccctgtcattaagagatgcgtgactatattggataccctattagatacctgtctaaatgtaattttttttttttttaaatgagrtggggtttcgctctgttgcccaggctggagtgcagtagcacgatcatagctcactgcatcttcagatctcctgggctcaagtcatcctcccacctcagcc

SEQ ID NO: 282159 - DNA, 201 bp, Homo sapiens
aagtgacattcatggttcacttgttggttgtgcattttgatggatacgcaaaaagtggggaagttacaccatttgctaagaacttaaataccttttcttcttttttttttttttaatcatcttagcaagtctggaaaagtttgaaattccagtaaaaattcgtttgagtcctgaaccgtggacccctgaaactggtctggt

SEQ ID NO: 282160 - DNA, 201 bp, Homo sapiens; identical to SEQ ID NO: 57321

SEQ ID NO: 282161 - DNA, 201 bp, Homo sapiens; identical to SEQ ID NO: 57323

SEQ ID NO: 282162 - DNA, 201 bp, Homo sapiens; identical to SEQ ID NO: 57324

SEQ ID NO: 282163 - DNA, 201 bp, Homo sapiens; identical to SEQ ID NO: 57325

SEQ ID NO: 282164 - DNA, 201 bp, Homo sapiens
atgtccatagacatttcctacctgtatggaccttctttgtaaaaatgttccgagaactcttcctatctgttacttgtgggaatggcctccttctcattgcmgccattagctgactcttttccttgtaaggcttcccctgatctttctctctgtccctgttttctgctttacgtctcactgcagtgtcccatggagggaggt

SEQ ID NO: 282165 - DNA, 201 bp, Homo sapiens
gccacttaaacaaatttcatacatcattttcctcaaaacatgaaggagatgccaagcaagttgatgtcagtaattcctagaaactaaaaacattttaactygacaacagaatatgtaaatttcctcacgtttaaatagagtagttgtgtatcttgttttatctgaaaccatcctgatttatacttgttgctgtgacattaa

SEQ ID NO: 282166 - DNA, 201 bp, Homo sapiens; identical to SEQ ID NO: 57326

SEQ ID NO: 282167 - DNA, 201 bp, Homo sapiens
tgttagtcatgtcatgaaatagacgtaaaattgaaggttgattttctttttttttttgagatgaggtctggcttcgtggcccaggccggagtgcagtggcrtgatcttaacttatcgcacttttcatctcctggtctcaagtcatcctcccacttgattccgcctcttgagtagctggtactacaagtgtgtgccaccata

SEQ ID NO: 282168 - DNA, 201 bp, Homo sapiens
tttagatcattttctatttttggttttttgccactgaaacagtactgccatgtctcccaggtgtgtgtgtgtgtgtgtccaagttttatgttcagactatrttactactagttgcagttaactactcatccccaaatctgtaaatatgtcttcctgtgaccctgacactactctgtcgtgattcttagtgatttcaatatc

SEQ ID NO: 282169 - DNA, 201 bp, Homo sapiens
caaaaattagctgggcgtgatggagcacgcctgtagtctcagctactcgggaggctgaggcaggagaatcacttgaacccggaggcgaaggttgtagtgarccgagatcgcgccactgcactccagcctgggtgacagagtgagactcggtctcaaaaaaaaaaaaaaaaaaaaaaaaaatggaactcaaatattgttgag

SEQ ID NO: 282170 - DNA, 201 bp, Homo sapiens
gtctaaaagccagcttttatacagctgagatcttttttaagctaaccttagatttaatgaactagttatttaggtccaaaagaaaaggctgggcatggtgrcccacgcctgtaatcccagcactttgggaggccaaggtgggcggatcacaaggtcaagagatcgagaccatcctggccaacatggtgaaaccccatcttt

SEQ ID NO: 282171 - DNA, 201 bp, Homo sapiens
gggtttgtgataaaggaataattttcttaattactatattaagataacattgcaaaaatcaatgttatctttaaagcaaaattaggaatgcctttgttctscagatatcgggatatctggacactcccaagtctggatctgttttttaaacattattaatttgttcccttaactggaaacacccggaggctcggaatgcct

SEQ ID NO: 282172 - DNA, 201 bp, Homo sapiens
acctttggatagctgaggccttttaaaactagattggaaacctagaagctgtgaaagaaaaattgacagatttagctgttcaagtttacttttacttttgraagataatgttctaacacggtgaaatcccatctctactaaaaaatacaaaaattagctgggcgtggtggcaggcgactgtcgtcccagctactcaggagg

SEQ ID NO: 282173 - DNA, 201 bp, Homo sapiens
attaatgaatctttagatcattttctatttttggttttttgccactgaaacagtactgccatgtctcccaggtgtgtgtgtgtgtgtgtccaagttttatsttcagactatattactactagttgcagttaactactcatccccaaatctgtaaatatgtcttcctgtgaccctgacactactctgtcgtgattcttagtg

SEQ ID NO: 282174 - DNA, 201 bp, Homo sapiens
aatttagctttcaccgtcatacgatatagaaaaataaacactgttgaattaaagatctagatgtaaaaattaggtaaacactggaaaaaatacaggagacygatagtttaacctttggatagctgaggccttttaaaactagattggaaacctagaagctgtgaaagaaaaattgacagatttagctgttcaagtttactt

SEQ ID NO: 282175 - DNA, 201 bp, Homo sapiens
taagtgttggggctctctgcctgctctgcaagttgagttttcagattccttttcatgatggtggtggatgtgaggggcataaaatgtctgcttgctctgtyagtagggtgtgaatataataccattgttgacttcttccctccttagacagtgtacatgtcttagattctgagagtgactcctgttttctttgttcagtcc

SEQ ID NO: 282176 - DNA, 201 bp, Homo sapiens
aagtctctgtagagtgtgtatgactgtcacctaacttttgtggaaaggagactctcaaaagtagtgtattaaaggatacttttttctccccaacaataagrtattaactatagaatttattaagagagtatagggtcattaaaaagtttggacatgccttggagagacatgtaggttaatatcctaccttacctgctagct

SEQ ID NO: 282177 - DNA, 201 bp, Homo sapiens; identical to SEQ ID NO: 57329

SEQ ID NO: 282178 - DNA, 201 bp, Homo sapiens
gagtaaatgaacgcagcctttatagtatactttttgagttttggaaataccttattttttataatagagtttattttttagagcagttttaggtgtacagmaaaattgagaggaaggtgcagagatttctcatataccccttcccctacacaggcatagcctccctctttatcaacatccccctacctccccagagtgcta

SEQ ID NO: 282179 - DNA, 201 bp, Homo sapiens
cctgttccttgcctctttcagttctagtggctgctggcattccctattatcagtccaatctttcaggccagcatcttcaaatctctctgctccatcttcaygtcaccatctccttcatgtgtgtccaatctccttctgcctctctatttataaggacatttgtgagggcatttagggaccactgggtaatctagggtcttt

SEQ ID NO: 282180 - DNA, 201 bp, Homo sapiens
actgcaaacctgatgttcacacaaaattttttccccaaaagtttggcaattggaagcatctctggccatgccagggtccaccctgatcttggagtcatctrggtggatgctcacactgatatcaacactccactgacaaccacaagtggaaacttgcatggacaacctgtatctttcctcctgaaggaactaaaaggaaag

SEQ ID NO: 282181 - DNA, 201 bp, Homo sapiens
atctctggccatgccagggtccaccctgatcttggagtcatctgggtggatgctcacactgatatcaacactccactgacaaccacaagtggaaacttgcwtggacaacctgtatctttcctcctgaaggaactaaaaggaaaggtaaaagactggttggtactctagtgcaatagaatactttttagtagacattcagga

SEQ ID NO: 282182 - DNA, 201 bp, Homo sapiens
ataaattacattattacaatttgttgttgtagggctactctcaggattagatataatggaagtgaacccatccctggggaagacaccagaagaagtaactygaacagtgaacacagcagttgcaataaccttggcttgtttcggacttgctcgggagggtaatcacaagcctattgactaccttaacccacctaagtaaat

SEQ ID NO: 282183 - DNA, 201 bp, Homo sapiens
ataagataaattgtgtgtgcaagaacgggggttggggtggatggtaggggagccgggggaacagcaaatggaaggcaaggtgcagcaggaagtatgctacyagcaagaggacccctatttgtgaaataaaataaaataaaacagtaataatgataataacaacagcgcctagtgtgggcgcagtgtgtatatatacataca

SEQ ID NO: 282184 - DNA, 201 bp, Homo sapiens
tgcagagtttctccatcactctgtcttgttttcctaactacctactcatgtcgcaagactcagcttaaacagcatttatttcttgcagcctttactgacayaccctgtccccaacagtgttaagggcatcctgtttttgttactaggacattttatatcatcactgaagcagctatgtattgaaactggagttaaatgccc

SEQ ID NO: 282185 - DNA, 201 bp, Homo sapiens
ttatgtgcctcacttggaaggggaaaaaaagaacaaaaaaagaaagaaaatcctactgcgggttggcaactctaaaaggattttaatggatttatgaaacycccagatttccttacagccacgagctgtgaatccacacatgccagcaacattgaatacacttttttttctgcctgggcacacttattctagtaaagagag

SEQ ID NO: 282186 - DNA, 201 bp, Homo sapiens
cctgccctttgctgacatccctaatgacagtccctttcaaattgtgaagaatccaaggtctgtgggaaaagcaagcgagcagctggctggcaaggtggcasaagtcaagaagaacggaagaatcagcctggtgctgggcggagaccacaggtcttgttgaataactgtgtctatgggaatctggcacaaaggaagtaacca

SEQ ID NO: 282187 - DNA, 201 bp, Homo sapiens; identical to SEQ ID NO: 57397

SEQ ID NO: 282188 - DNA, 201 bp, Homo sapiens
attggaagcatctctggccatgccagggtccaccctgatcttggagtcatctgggtggatgctcacactgatatcaacactccactgacaaccacaagtgkaaacttgcatggacaacctgtatctttcctcctgaaggaactaaaaggaaaggtaaaagactggttggtactctagtgcaatagaatactttttagtaga

SEQ ID NO: 282189 - DNA, 201 bp, Homo sapiens
agatatgctttactgaccaactctatgagagaaaattaaacatcaagacacacacacacacacatgcccacacacatatatttatatacatgtacatacayatgtatgtatccaggcaattaaatctcaattgacttgctgttaaaaataaatacaaataaaactatattgagttaggttcatagaacctaaatgttttat

SEQ ID NO: 282190 - DNA, 201 bp, Homo sapiens
aattttagagtgtgatgtgaaggattatggggacctgccctttgctgacatccctaatgacagtccctttcaaattgtgaagaatccaaggtctgtgggawaagcaagcgagcagctggctggcaaggtggcagaagtcaagaagaacggaagaatcagcctggtgctgggcggagaccacaggtcttgttgaataactgt

SEQ ID NO: 282191 - DNA, 201 bp, Homo sapiens
ggaagagtgttagtttccctaatgtcaaaacggcaagggtagaacttcccatcatactgttaagcaggccaaaacttgaaattactgggttggtctttgtttgtagttttcagctcccagatgatgactttttctgttgcctgctttctccccaagagctctagcttacttatgtgagtacatgcacgtaggtctctttca

SEQ ID NO: 282192 - DNA, 201 bp, Homo sapiens
gttacagttcaactgattaaataatgaaaagggttcctgctgtgagcatctgatggtcatgataatgtctgaagtactttattttttaattgttcagccaygaggaggggtggaagaaggccctacagtattgagaaaggctggtctgcttgagaaacttaaagaacaaggtaatttttaagttgaaaaatgatcagcctg

SEQ ID NO: 282193 - DNA, 201 bp, Homo sapiens
acacaaaattttttccccaaaagtttggcaattggaagcatctctggccatgccagggtccaccctgatcttggagtcatctgggtggatgctcacactgrtatcaacactccactgacaaccacaagtggaaacttgcatggacaacctgtatctttcctcctgaaggaactaaaaggaaaggtaaaagactggttggta

SEQ ID NO: 282194 - DNA, 201 bp, Homo sapiens
acaagcataatttggtcacgtgttgtatcaggtgaaatttcttggaggcgttactaaatcagattcacacagacatgtaacaaataccatatttaatggcyaattagttcagaacaccgaactgaatcacagttttacatgacactctctacttttcaagcctaattcaaggccttttagggagcacacccagtccttagg

SEQ ID NO: 282195 - DNA, 201 bp, Homo sapiens
aggatggaatttttcaaactcattgacccgcacagttaaaattagtgagttttagtgaacaagaattacacttcgtaaatctttaaaaaaaaaaaaaaaaagacaaatacagacacccagtagagaacagaatgcttgggtaatggacttgtcccttaactgacaagcataatttggtcacgtgttgtatcaggtgaaatt

SEQ ID NO: 282196 - DNA, 201 bp, Homo sapiens
ttataaattacattattacaatttgttgttgtagggctactctcaggattagatataatggaagtgaacccatccctggggaagacaccagaagaagtaastcgaacagtgaacacagcagttgcaataaccttggcttgtttcggacttgctcgggagggtaatcacaagcctattgactaccttaacccacctaagtaa

SEQ ID NO: 282197 - DNA, 201 bp, Homo sapiens
agagtgttagtttccctaatgtcaaaacggcaagggtagaacttcccatcatactgttaagcaggccaaaacttgaaattactgggttggtctttgtttgtagttttcagctcccagatgatgactttttctgttgcctgctttctccccaagagctctagcttacttatgtgagtacatgcacgtaggtctctttcatgt

SEQ ID NO: 282198 - DNA, 201 bp, Homo sapiens; identical to SEQ ID NO: 57391

SEQ ID NO: 282199 - DNA, 201 bp, Homo sapiens
aagagtgttagtttccctaatgtcaaaacggcaagggtagaacttcccatcatactgttaagcaggccaaaacttgaaattactgggttggtctttgtttgtagttttcagctcccagatgatgactttttctgttgcctgctttctccccaagagctctagcttacttatgtgagtacatgcacgtaggtctctttcatg

SEQ ID NO: 282200 - DNA, 201 bp, Homo sapiens
tctacaaaacaggtagttaacaatctgaggtaatagagaagcaagtgtacacttgactaatatatatttatacctccttgacctgaaaaccaagtcccagytgacactttcagaatgtccatcagtcacatgatgcaataactaaagtgttttccatcggttactacctttttctgttagtggataatctttcaagtctgt

SEQ ID NO: 282201 - DNA, 201 bp, Homo sapiens
gtaaaagactggttggtactctagtgcaatagaatactttttagtagacattcaggaggtggaagggaaatgagaaactccatgttatcttattcttggtrtaatctcaaatcattttctctgcagccaataagcaaagggttggttgataaaaggcagtgaggctctctatctctgccttgcaaactgacttaatatata

SEQ ID NO: 282202 - DNA, 201 bp, Homo sapiens
acatccctaatgacagtccctttcaaattgtgaagaatccaaggtctgtgggaaaagcaagcgagcagctggctggcaaggtggcagaagtcaagaagaayggaagaatcagcctggtgctgggcggagaccacaggtcttgttgaataactgtgtctatgggaatctggcacaaaggaagtaaccaaggccataagaaga

SEQ ID NO: 282203 - DNA, 201 bp, Homo sapiens
gaagagtgttagtttccctaatgtcaaaacggcaagggtagaacttcccatcatactgttaagcaggccaaaacttgaaattactgggttggtctttgtttgtagttttcagctcccagatgatgactttttctgttgcctgctttctccccaagagctctagcttacttatgtgagtacatgcacgtaggtctctttcat

SEQ ID NO: 282204 - DNA, 201 bp, Homo sapiens
tacagccgcaccagtgtgtgatactggtaacatgacgtcaagcaaaagcagacatgggtctaccttcccaagatttacagacctttcaggtttttcctttrcttatacttgtgaatatatgcctattttatacaattgagatcatcctacacagactgatttataatctactttttaatttagtaactcaaaactttttaa

SEQ ID NO: 282205 - DNA, 201 bp, Homo sapiens
gacagtccctttcaaattgtgaagaatccaaggtctgtgggaaaagcaagcgagcagctggctggcaaggtggcagaagtcaagaagaacggaagaatcascctggtgctgggcggagaccacaggtcttgttgaataactgtgtctatgggaatctggcacaaaggaagtaaccaaggccataagaagagagaaaattta

SEQ ID NO: 282206 - DNA, 201 bp, Homo sapiens
acagccgcaccagtgtgtgatactggtaacatgacgtcaagcaaaagcagacatgggtctaccttcccaagatttacagacctttcaggtttttcctttgyttatacttgtgaatatatgcctattttatacaattgagatcatcctacacagactgatttataatctactttttaatttagtaactcaaaactttttaat

SEQ ID NO: 282207 - DNA, 201 bp, Homo sapiens
ttttggaatccaaagacctgaatatgaacataggctctgccacttattagctgtgtgccagtctgaaaaccatataacctttgtgattctagttctttctrtttggcataaaagtcattcagtctaccttgctgtgaagattaaaagagatgatgtaaattcctggctctgtaggagctcaaaaaatgatagttacagttc

SEQ ID NO: 282208 - DNA, 201 bp, Homo sapiens
gactgttgactgtcattctttggtttagtgggtggagccagctgtcctcattagataaaggttgtttattcaacccaagtataaatggaaaaaaaagatgygccctctgtcactgagggttgactgactggagagctcaagtgcagcaaagagaagtgtcagagcatgagcgccaagtccagaaccatagggattattgga

SEQ ID NO: 282209 - DNA, 201 bp, Homo sapiens
accacaggtcttgttgaataactgtgtctatgggaatctggcacaaaggaagtaaccaaggccataagaagagagaaaatttagaaatatagacagaaaakcattgacctatattttatatcaaattttctgcctttaaaaaaattttataggttacttttattatagaaacagacttcgctcaatttgaagtcttacaat

SEQ ID NO: 282210 - DNA, 201 bp, Homo sapiens
caggaggactgcctgagtccaggagtttgagaccagcctgggcaacatagtgagacctcatatctactaaaaacaaacaaacaaacaaacaaacaaacaaaaatagctgggtgtggtgttgtgtgtctgtttaaaattaaaaattaaatttaaaaaatttaaattaaaaatgagctggccatggtaatgccagctactcag

SEQ ID NO: 282211 - DNA, 201 bp, Homo sapiens
tcaggaggactgcctgagtccaggagtttgagaccagcctgggcaacatagtgagacctcatatctactaaaaacaaacaaacaaacaaacaaacaaacaaaaatagctgggtgtggtgttgtgtgtctgtttaaaattaaaaattaaatttaaaaaatttaaattaaaaatgagctggccatggtaatgccagctactca

SEQ ID NO: 282212 - DNA, 201 bp, Homo sapiens
gtcaggaggactgcctgagtccaggagtttgagaccagcctgggcaacatagtgagacctcatatctactaaaaacaaacaaacaaacaaacaaacaaacaaaaatagctgggtgtggtgttgtgtgtctgtttaaaattaaaaattaaatttaaaaaatttaaattaaaaatgagctggccatggtaatgccagctactc

SEQ ID NO: 282213 - DNA, 201 bp, Homo sapiens
agtcaggaggactgcctgagtccaggagtttgagaccagcctgggcaacatagtgagacctcatatctactaaaaacaaacaaacaaacaaacaaacaaacaaaaatagctgggtgtggtgttgtgtgtctgtttaaaattaaaaattaaatttaaaaaatttaaattaaaaatgagctggccatggtaatgccagctact

SEQ ID NO: 282214 - DNA, 201 bp, Homo sapiens
aagtcaggaggactgcctgagtccaggagtttgagaccagcctgggcaacatagtgagacctcatatctactaaaaacaaacaaacaaacaaacaaacaamcaaaaatagctgggtgtggtgttgtgtgtctgtttaaaattaaaaattaaatttaaaaaatttaaattaaaaatgagctggccatggtaatgccagctac

SEQ ID NO: 282215 - DNA, 201 bp, Homo sapiens
ttgcagtgaaccaagatcatgccactgcactccagcctgggtgacagagtgaggtgagaccttgtctcaaaaaaataaataaaataaataaataaataaataaataaataaaataaacctacctgactggggaaaaatacttttgatttatatgctcccatatccccaagtcaaattaggacattggtcaaagagattgga

SEQ ID NO: 282216 - DNA, 201 bp, Homo sapiens
gatgaataagtcattaattaattcagtgacgtatgttttctaggatccctctggctgttgtgctgagaacagaaggggtcaagggagtgggggagtaaaartggaagcagggtgacgcatgcaggagtccagacaaaagacgggtgattttgctcaggttggtagcaacagaggtaatgagaagtagttggattttggata

SEQ ID NO: 282217 - DNA, 201 bp, Homo sapiens
ctgctgactgattagggtggtagttgctgaaggctgggatgactggcaatctcttaaaataaggcaataaggaagtttgcttcatttttttgtttgttttgagatggagtctcgttctgtcactcaggctggagtgcagtggcatgatcttggctcactgcaacctctgcctcctggttcaagtgattcttgtgcctcagc

SEQ ID NO: 282218 - DNA, 201 bp, Homo sapiens
gctgctgactgattagggtggtagttgctgaaggctgggatgactggcaatctcttaaaataaggcaataaggaagtttgcttcatttttttgtttgttttgagatggagtctcgttctgtcactcaggctggagtgcagtggcatgatcttggctcactgcaacctctgcctcctggttcaagtgattcttgtgcctcag

SEQ ID NO: 282219 - DNA, 201 bp, Homo sapiens
tggaacctgattgtataggtgaacttaaaaggaactggtatcatgtaaacctatgatgccacatgctgcctgcaattttcaagataatttctagttttatrttaatagaagtaaaggatgaactgtatcttgtatactttaaagcgctgaacaggtgctgagacatgttgcattgcttcttaaatttgtgcctaaacgtta

SEQ ID NO: 282220 - DNA, 201 bp, Homo sapiens
tgtttggaaattgaaaatgttaagagagcagttgggagatcatgtttccaataagattagccaaggttagagtctcattatgctggcagcggaaaataatmggggatccagtgacttcattgttggaacctgattgtataggtgaacttaaaaggaactggtatcatgtaaacctatgatgccacatgctgcctgcaattt

SEQ ID NO: 282221 - DNA, 201 bp, Homo sapiens
catgggaatagagtggaacagactggttttagctcatttttgcttctgtaaattggatgaacatgcgaagcaaactgagaatttaaaaaccatgccgtatkaactttctctataattgatattaaatggttttttttctgcaaacccatagacaataacttgcgacctttgtacagacttttggtgtactcgagtgttgag

SEQ ID NO: 282222 - DNA, 201 bp, Homo sapiens; identical to SEQ ID NO: 57446

SEQ ID NO: 282223 - DNA, 201 bp, Homo sapiens
acatagttgaaaagtttggagtacagaagtgctactacttagagggaaaaagtatagataaatcatgttttcgacattaaaacaaggctaagtgggatagytgtgtggttgttgtaggagtgactggatctaagccaagtattatgggaaaaaaatgtttatgagaatgattcctagacacaaggattttgtgtataaagt

SEQ ID NO: 282224 - DNA, 201 bp, Homo sapiens
gcacatttgtatatattcctcaccacaggagaaataaaaagtctaattagcattcttaatgctcatcagaataaagacatatgcacttatgttagcatccragtaaatattacatatttctaaggctaatgtagcatattgacctttttgagtatgtattttacttttatcatatttgaaaattaattatgataccattat

SEQ ID NO: 282225 - DNA, 201 bp, Homo sapiens; identical to SEQ ID NO: 57445

SEQ ID NO: 282226 - DNA, 201 bp, Homo sapiens
aagcgattctcctgcctcagcctcccaagtagctgggattacaggcatgtgccaccacattgcccagctaattttgtatatttagtagagatggggtttcrccatgttggtcaggctggtgttgaactctcgacctcaggtgatacacctgcctcagcctcccaaagtgctgggattacaggtgtgagccaccgctcccag

SEQ ID NO: 282227 - DNA, 201 bp, Homo sapiens
tcttatatttagactcaaaattaaattgcagaagtgctaagcctctagcagtaagtattaaaaagtccattttagaaagaactgatgatttttttttttttactactgtctatgttagcagtcaggcacagctgaaacatactgtgttaggctgttttaatacaagtactttatccagcacaaaaggttaaaaagcccatc

SEQ ID NO: 282228 - DNA, 201 bp, Homo sapiens
ttaaggaagaaaacttttcgatttcctttgaaaaatagaacacaaaactggcttgtaaatgtttttagaatgatgaataagtcattaattaattcagtgaygtatgttttctaggatccctctggctgttgtgctgagaacagaaggggtcaagggagtgggggagtaaaaatggaagcagggtgacgcatgcaggagtcc

SEQ ID NO: 282229 - DNA, 201 bp, Homo sapiens
agaaccaaacagaacaatcccaaatctggagaaacatggtgattaaggggtatttttagttgcacgaaagagatcaagagagctttaaaaaaaaaaaaaaagagtgagttaatggtagggagaggttggtcaaataaagggcacatgtccttgctttacctgagggactggcattatggagacttgctcccttagttttgg

SEQ ID NO: 282230 - DNA, 201 bp, Homo sapiens
ctgggaggtggaggttgcagtgagccgagaccgtgcctccagcctgggtgacagagcaagactctgtctcaaaaataataataataataataataataaawttgctgttactcgagcagtctctctggaacaattcaacctttcctatattttggaattcaggtgaccaaatcagaaccaaacagaacaatcccaaatctg

SEQ ID NO: 282231 - DNA, 201 bp, Homo sapiens
aggacgtaatggctcatgcctgtaatcccagcactttgggaggctgaggcgggcggatcagttgagctcaggagttcgagaccagcctggccaacatggtraaaccccgtctctactaaaaatacaaaaattagctgggcatggtggtgcacacctgtagtcccagctacttgggaggctgaggtaggagaatagcttgaa

SEQ ID NO: 282232 - DNA, 201 bp, Homo sapiens
caaatggaaattttgttactgacaggtaactgtgagtgttctaacgctgcagaatagggagcagtgaggcatagctgagagagtaacatgggtgggtatgrgtaagtgtaatggggagatttataacacagaaaatatttgtaggcagaaatggattttggaactatctatacagcagtcattatcatttatacctattta

SEQ ID NO: 282233 - DNA, 201 bp, Homo sapiens; identical to SEQ ID NO: 57443

SEQ ID NO: 282234 - DNA, 201 bp, Homo sapiens
agcctggccaacatggtgaaaccccatctctaacaaaaaatacaaaaattagccaggcgcctatagtcccagttactcagaaggctgaggtggaagaatcrcttgaacccaggaggcagaggttgcagtgaaccaagatcatgccactgcactccagcctgggtgacagagtgaggtgagaccttgtctcaaaaaaataaa

SEQ ID NO: 282235 - DNA, 201 bp, Homo sapiens
acctttcctatattttggaattcaggtgaccaaatcagaaccaaacagaacaatcccaaatctggagaaacatggtgattaaggggtatttttagttgcamgaaagagatcaagagagctttaaaaaaaaaaaaaaagagtgagttaatggtagggagaggttggtcaaataaagggcacatgtccttgctttacctgagg

SEQ ID NO: 282236 - DNA, 201 bp, Homo sapiens
tgcatttcattgacagtaatccatccaaatgccttttgcagcttaacattggtatcccttccctgacaaagtgttgcaaccaacacgacaggtgctatgaracctgtggcaaaagcaagaatgactgtgatgaagaattccagtattgcctctccaagatctgccgagatgtacagaaaacactaggactaactcagcatg

SEQ ID NO: 282237 - DNA, 201 bp, Homo sapiens
aaaaaacaaacaaacaaaataagacaattgagacacatgtctttaaagccataggcccatatcggttgtctgagggtggtaatctttgcttctcatggaamagggtgaggtgccagaaatctctagactggcagatgggagggagggagaatgtacaaggtgtctaaaaagttggaaacataggataaacattatgtttta

SEQ ID NO: 282238 - DNA, 201 bp, Homo sapiens
tcaagagaaggagctattgcttaagtcaaaaatggaaattaatgaatagtctttccatgcagttgtacacagtggatttggtttgtatccgcttacaaatyttagaggacaatggccgcaacacatcatggtgttttgatgttactctgattttgtttcttccattattgagtttttgctttatttgtaaaaactggcacc

SEQ ID NO: 282239 - DNA, 201 bp, Homo sapiens
aaaagcaagaatgactgtgatgaagaattccagtattgcctctccaagatctgccgagatgtacagaaaacactaggactaactcagcatgttcagggtawggatgatctggtggcttggggatgagtgtactttttaaagttgtatcaaatgctctatgttttagtataggatttaccaatagaaatctttcacatatat

SEQ ID NO: 282240 - DNA, 201 bp, Homo sapiens
catatagcatagccctgttaataggaacacaggtagaggatatgagcactggtgctggttaagtgggtggatgttcaagttctcctgattgcctgcttttytcagtaaagtaggaatccaggtcatcagctgacagagaagatggggaatggggatgttggagatttgaggaaaatataaaagtgaacagactagaaaaat

SEQ ID NO: 282241 - DNA, 201 bp, Homo sapiens
ggctgctgactgattagggtggtagttgctgaaggctgggatgactggcaatctcttaaaataaggcaataaggaagtttgcttcatttttttgtttgttttgagatggagtctcgttctgtcactcaggctggagtgcagtggcatgatcttggctcactgcaacctctgcctcctggttcaagtgattcttgtgcctca

SEQ ID NO: 282242 - DNA, 201 bp, Homo sapiens
gggctgctgactgattagggtggtagttgctgaaggctgggatgactggcaatctcttaaaataaggcaataaggaagtttgcttcatttttttgtttgttttgagatggagtctcgttctgtcactcaggctggagtgcagtggcatgatcttggctcactgcaacctctgcctcctggttcaagtgattcttgtgcctc

SEQ ID NO: 282243 - DNA, 201 bp, Homo sapiens
agggctgctgactgattagggtggtagttgctgaaggctgggatgactggcaatctcttaaaataaggcaataaggaagtttgcttcatttttttgtttgttttgagatggagtctcgttctgtcactcaggctggagtgcagtggcatgatcttggctcactgcaacctctgcctcctggttcaagtgattcttgtgcct

SEQ ID NO: 282244 - DNA, 201 bp, Homo sapiens
tagggactggaggtggaggcaggggtgggaggtagggaagggagcagcctccagaactcacttgttctctttccagttccgctcactgttcttcggctccwtcctggcccctgtacgctccccccagggccccagccctgtgctggcggaagacagtgagggtgaaggctgaaccaagaacctgaagcctgtacccagagg

SEQ ID NO: 282245 - DNA, 201 bp, Homo sapiens
ggggcagcatgaagtgcctggtcacgggcggcaacgtgaagggtgagtgcaggtcggcctggcagcggcggtgcagcagccgcggagccgccagcctaacycccttccgctcttctccccgcagtgctcggcaaggccgtccactccctgtcccgcatcggggacgagctctacctggaacccttggaggacggggtgagg

SEQ ID NO: 282246 - DNA, 201 bp, Homo sapiens
  misc_feature (1)...(201): n = A,T,C or G
ggccgtggccgcagggtcatcctgcgcagctaccacgaggaggaggcaggtgagggggctggacgtggcctgggacagcagagtggcaggtgggagagggncggggcccaggttactcctgttcttccccaacagacagcactgccaaagccatggtgactgagatgtgccttggagaggaggatttccagcagctgcagg

SEQ ID NO: 282247 - DNA, 201 bp, Homo sapiens
caggacctgctgcgctgtaagatcctgatgaaggtgaggcccttccctcagcagtggcactactccaccccaggaatctccaccagctgtgcctctgcccyggggtactcagtagatgctaagtggggagagagacacgtgcaagcccaatccatgcaaaacacagggagggccatggtaaaagcatcacagcggggacct

SEQ ID NO: 282248 - DNA, 201 bp, Homo sapiens
  misc_feature (1)...(201): n = A,T,C or G
tttcccagagttacatgctgggcccatgatgggtgtgggcctgcatgggacaggagagcttgttgcagagatgtgatgctaggctgaggtgtcttatcccntgcagtctttcctgtctgtcttccgctcactggcgatgctggagaagacggtggaaaaatgctgcatctccctgaatggccggagcagccgcctggtggt

SEQ ID NO: 282249 - DNA, 201 bp, Homo sapiens
  misc_feature (1)...(201): n = A,T,C or G
ccagtgcccgaggtgacgtgggagcccttttcccagagttacatgctgggcccatgatgggtgtgggcctgcatgggacaggagagcttgttgcagagatntgatgctaggctgaggtgtcttatcccatgcagtctttcctgtctgtcttccgctcactggcgatgctggagaagacggtggaaaaatgctgcatctccc

SEQ ID NO: 282250 - DNA, 201 bp, Homo sapiens
agggagcacatttctggcctgccaccaaatctcttgtctggcttgagtaaccttgaaggtctgcccataacctgtggctcagaggctcagaccccttctcyggcctgggcatccttccagaggtgttccccattcaacggcagcctcttttcctgactgcccaggatcgaggagtccccaaggccagggcaggaggctgga

SEQ ID NO: 282251 - DNA, 201 bp, Homo sapiens
gaagggctctgggatggcaggagctgaatgggatgacctagcttgggccccctcccctgcccaggcccgccatcttcaccatcaaggactctttgctggayggccactttgtcttggccacactctcagacaccgactcgcactcccaggacctgggctccccagagcgtcaccagccagtgcctcagctccaggctcaca

SEQ ID NO: 282252 - DNA, 201 bp, Homo sapiens
gatgtgatgctaggctgaggtgtcttatcccatgcagtctttcctgtctgtcttccgctcactggcgatgctggagaagacggtggaaaaatgctgcatckccctgaatggccggagcagccgcctggtggtccagctgcattgcaagttcggtgagtgggcagccggccagccaaggggtgcctcagcagggaggtcggc

SEQ ID NO: 282253 - DNA, 201 bp, Homo sapiens
ccctgcagactcagccttctcggttagctgtactcagagacccctcccacccagggaagcatccccaaggccctgccagcttccttctctggctgaggcckcccctctgagcctcctcccaggccaaggagggaaagggctgctgggaggcaggagctgcctgggctgggggaagcaggtggctggaagggcaggtgggct

SEQ ID NO: 282254 - DNA, 201 bp, Homo sapiens; identical to SEQ ID NO: 57464

SEQ ID NO: 282255 - DNA, 201 bp, Homo sapiens
ctcacttgttctctttccagttccgctcactgttcttcggctccatcctggcccctgtacgctccccccagggccccagccctgtgctggcggaagacagygagggtgaaggctgaaccaagaacctgaagcctgtacccagaggccttggactagacgaagccccagccagtggcagaactgggtctctcagccctgggg

SEQ ID NO: 282256 - DNA, 201 bp, Homo sapiens
ctcttcttccagcaataccaggcagccacccctggtcaggacctgctgcgctgtaagatcctgatgaaggtgaggcccttccctcagcagtggcactactycaccccaggaatctccaccagctgtgcctctgccctggggtactcagtagatgctaagtggggagagagacacgtgcaagcccaatccatgcaaaacaca

SEQ ID NO: 282257 - DNA, 201 bp, Homo sapiens
cccactccgaggaggaagatgaggctgagcccagtacagtgcctgggactcccccacccaagaaggtagggactggaggtggaggcaggggtgggaggtarggaagggagcagcctccagaactcacttgttctctttccagttccgctcactgttcttcggctccatcctggcccctgtacgctccccccagggccccag

SEQ ID NO: 282258 - DNA, 201 bp, Homo sapiens
acaccgactcgcactcccaggacctgggctccccagagcgtcaccagccagtgcctcagctccaggctcacaggtgagggcacctccccccaactcctccyctctccatgtctgtgcactccagcctgagactgcaactcctagcttctgcacctccccgcaatgtgttctctcccgccccttctctttctatcaggcccc

SEQ ID NO: 282259 - DNA, 201 bp, Homo sapiens
ctgcaggcccaggaaggggtggccatcactttctgcctcaaggaattccgggtgaggttcctcccaggcgctcgccgtcctgtcctccctgcccagctcarcccagcccggggcctcacctgctacctctttcctcccaggggctcctgagctttgcagagtcagcaaacttgaatcttagcattcattttgatgctccag

SEQ ID NO: 282260 - DNA, 201 bp, Homo sapiens
agtggcaggtgggagaggggcggggcccaggttactcctgttcttccccaacagacagcactgccaaagccatggtgactgagatgtgccttggagaggargatttccagcagctgcaggcccaggaaggggtggccatcactttctgcctcaaggaattccgggtgaggttcctcccaggcgctcgccgtcctgtcctcc

SEQ ID NO: 282261 - DNA, 201 bp, Homo sapiens
ctccggacggtgaactcctcccgctctgcctatgcctgctttctctttgccccgctcttcttccagcaataccaggcagccacccctggtcaggacctgcwgcgctgtaagatcctgatgaaggtgaggcccttccctcagcagtggcactactccaccccaggaatctccaccagctgtgcctctgccctggggtactca

SEQ ID NO: 282262 - DNA, 201 bp, Homo sapiens
ggcggagcgggaggacgatagggcaagtgtgtgagcagaagcagccagagggctgggtctgtggctgccccctgaccacgtccctctccctgctcttcgtkgcccagctctccctccggacggtgaactcctcccgctctgcctatgcctgctttctctttgccccgctcttcttccagcaataccaggcagccacccctg

SEQ ID NO: 282263 - DNA, 201 bp, Homo sapiens
gctgagctaaggtagcccccgggatgcctccctcaggcccctacctgaattctgatcaaagagattcctggcccaccccctccaggaagtcaccacttaayccctgcatcctctcctctccagccaaatcaggaagtcataaaaccaagagatctccagtggtcgggggccccagagctcccttcgagccctccaaggtgg

SEQ ID NO: 282264 - DNA, 201 bp, Homo sapiens
tgcaatctctgcctcccgggttcaagcgattctcctgcctcagcctcccgagtagctgggattacaggcatgcaccaccacgcccggctaatttatatatktttagtagagacgaggtttcaccatgttggccaagctggtctcgaactcctgaactcaagtgatccactgcttcggcctcccaaagtgctgggattacag

SEQ ID NO: 282265 - DNA, 201 bp, Homo sapiens
ccctgcccagctcagcccagcccggggcctcacctgctacctctttcctcccaggggctcctgagctttgcagagtcagcaaacttgaatcttagcattcrttttgatgctccaggcaggtagttcccagccttgggacagggaagggctctgggatggcaggagctgaatgggatgacctagcttgggccccctcccctg

SEQ ID NO: 282266 - DNA, 201 bp, Homo sapiens
ggtgagggggctggacgtggcctgggacagcagagtggcaggtgggagaggggcggggcccaggttactcctgttcttccccaacagacagcactgccaargccatggtgactgagatgtgccttggagaggaggatttccagcagctgcaggcccaggaaggggtggccatcactttctgcctcaaggaattccgggtga

SEQ ID NO: 282267 - DNA, 201 bp, Homo sapiens
tccctcaggcccctacctgaattctgatcaaagagattcctggcccaccccctccaggaagtcaccacttaacccctgcatcctctcctctccagccaaaycaggaagtcataaaaccaagagatctccagtggtcgggggccccagagctcccttcgagccctccaaggtggggccctgcctctgctcccccagtcccct

SEQ ID NO: 282268 - DNA, 201 bp, Homo sapiens
cttacatgatcgccatggaaaccactataggcaatgagggctcgcgggtgctgccctccatttccctttcacctggcccccagccccccaagagccccggyccccactccgaggaggaagatgaggctgagcccagtacagtgcctgggactcccccacccaagaaggtagggactggaggtggaggcaggggtgggaggt

SEQ ID NO: 282269 - DNA, 201 bp, Homo sapiens
aggacctgctgcgctgtaagatcctgatgaaggtgaggcccttccctcagcagtggcactactccaccccaggaatctccaccagctgtgcctctgccctrgggtactcagtagatgctaagtggggagagagacacgtgcaagcccaatccatgcaaaacacagggagggccatggtaaaagcatcacagcggggacctg

SEQ ID NO: 282270 - DNA, 201 bp, Homo sapiens; identical to SEQ ID NO: 57469

SEQ ID NO: 282271 - DNA, 201 bp, Homo sapiens
tgtgagccatttgtttagcaaagcagagcagacctaggggatgggcttaggccctctgcccccaattcctccagcctgctcccgctggctgagtccctggyccccctgccctgcagatctccttcgctgactacaacctgctggacttgctgctgatccatgaggtcctagcccctggctgcctggatgcgttccccctgc

SEQ ID NO: 282272 - DNA, 201 bp, Homo sapiens
tgagctttcgttgccctctccggtagaaatatgggagaaaccacagagagaaacagagatttcaggaaaacagtaaaattaaacaaataaagtgagacgtmgcccctcctggaggctgcaggctgtgttgaacctgtgtgtgtctgggtgtacagggatgtgagtagatgcgcgtggagatgtgtgtgtgggtggagactg

SEQ ID NO: 282273 - DNA, 201 bp, Homo sapiens; identical to SEQ ID NO: 57494

SEQ ID NO: 282274 - DNA, 201 bp, Homo sapiens
ggtgctggcacttttagctgaggaaaatatgcagacacagagcacatttggggacctgggaccagttcagcagaggcagcgtgtgtgcgcgtgcgtgtgcrtgtgtgtgcgtgtgtgtgtgtacgcttgcatttgtgtcgggtgggtaaggagatagagatgggcgggcagtaggcccaggtcccgaaggccttgaaccca

SEQ ID NO: 282275 - DNA, 201 bp, Homo sapiens
gagaaacaaagagaaataaccatggtcactgtcctggagcaccacacagtgtatatagaaggagaaaagtctcatagaaacatgctttctaggcacagcamgtgcctgtcagatggacagactccaggatggagggaaatgagggattctgggaaggagggatgtgaggagttccctgtcctgggggattagctgagtagc

SEQ ID NO: 282276 - DNA, 201 bp, Homo sapiens
gccattgagaagtctgaacagggctgtgtctgaatgtgaggtctagaaggatcctccagagaagccagctctaaagcttttgcaatcatctggtgagagawcccagcaaggatggacaggcagaatggaatagagatgagttggcagctgaagtggacaggatttggtactagcctggttgtggggagcaagcagaggaga

SEQ ID NO: 282277 - DNA, 201 bp, Homo sapiens
agaatctgggactctggtgtctggcctggggcagacgggggtgtctcaggggctgggagggatgagagtaggatgatacatggtggtgtctggcaggaggygggcaaggatgactatgtgaaggcactgcccgggcaactgaagccttttgagaccctgctgtcccagaaccagggaggcaagaccttcattgtgggagac

SEQ ID NO: 282278 - DNA, 201 bp, Homo sapiens
tcgtggcagaaggcgaatgggaagcaaggcacatcttacatggtggcaggggaggtaaggggggaagttccacatccttttataccaacagagcacgtgasaactcactgtcacgagaatagcaagggggaaattcgcccccatgatcctatcacctcccactaagtccctccctcaccacgtggagattacaattcaaga

SEQ ID NO: 282279 - DNA, 201 bp, Homo sapiens
ggtgtgagccatttgtttagcaaagcagagcagacctaggggatgggcttaggccctctgcccccaattcctccagcctgctcccgctggctgagtccctrgcccccctgccctgcagatctccttcgctgactacaacctgctggacttgctgctgatccatgaggtcctagcccctggctgcctggatgcgttccccct

SEQ ID NO: 282280 - DNA, 201 bp, Homo sapiens
cgtgtggcttttaccccgggcctccttcctgttccccgcctctcccgccatgcctgctccccgccccagtgttgtgtgaaatcttcggaggaacctgtttmcctgttccctccctgcactcctgacccctccccgggttgctgcgaggcggagtcggcccggtccccacatctcgtacttctccctccccgcaggccgctg

SEQ ID NO: 282281 - DNA, 201 bp, Homo sapiens
ggacgggggcctaggggacccaggacgtccccagtgccgttagcggctttcagggggcccggagcgcctcggggagggatgggaccccgggggcggggagrgggggcaggctgcgctcaccgcgccttggcatcctcccccgggctccagcaaacttttctttgttcgctgcagtgccgccctacaccgtggtctatttcc

SEQ ID NO: 282282 - DNA, 201 bp, Homo sapiens
ggccgcgaggccttcgctggagtttcgccgccgcagtcttcgccaccagtgagtacgcgcggcccgcgtccccggggatggggctcagagctcccagcatggggccaacccgcagcatcaggcccgggctcccggcagggctcctcgcccacctcgagacccgggacgggggcctaggggacccaggacgtccccagtgcc

SEQ ID NO: 282283 - DNA, 201 bp, Homo sapiens
gtgtggtggcacatgcctgtagtcccagctattcgagaggctaagtaaggcaggaggatcacttggggccaagagttccagaccagctgcggcaacatacrtgttgtgggaagtcaggcaccccgaacggagggactggctgaagccatggcagaagaacataaattgtgaagatttcatggacatttatcacttccccaa

SEQ ID NO: 282284 - DNA, 201 bp, Homo sapiens
tcatgagctttcgttgccctctccggtagaaatatgggagaaaccacagagagaaacagagatttcaggaaaacagtaaaattaaacaaataaagtgagaygtagcccctcctggaggctgcaggctgtgttgaacctgtgtgtgtctgggtgtacagggatgtgagtagatgcgcgtggagatgtgtgtgtgggtggaga

SEQ ID NO: 282285 - DNA, 201 bp, Homo sapiens
ctatacgggcagctccccaagttccaggacggagacctcaccctgtaccagtccaataccatcctgcgtcacctgggccgcacccttggtgagtcttgaamctccaagtccagggcaggcatgggcaagcctctgcccccggagcccttttgtttaaatcagctgccccgcagccctctggagtggaggaaactgagaccc

SEQ ID NO: 282286 - DNA, 201 bp, Homo sapiens
tcccctccacccaaccccagggctctatgggaaggaccagcaggaggcagccctggtggacatggtgaatgacggcgtggaggacctccgctgcaaatacrtctccctcatctacaccaactatgtgagcatctgcaccagggttgggcactgggggctgaacaaagaaaggggcttcttgtgccctcaccccccttaccc

SEQ ID NO: 282287 - DNA, 201 bp, Homo sapiens
tgtgtgcgtgtgtgtgtgtacgcttgcatttgtgtcgggtgggtaaggagatagagatgggcgggcagtaggcccaggtcccgaaggccttgaacccactrgtttggagtctcctaagggcaatgggggccattgagaagtctgaacagggctgtgtctgaatgtgaggtctagaaggatcctccagagaagccagctcta

SEQ ID NO: 282288 - DNA, 201 bp, Homo sapiens
caaggggagggggtgctgggccttagggggctgtgactaggatcgggggacgcccaagctcagtgcccctccctgagccatgcctcccccaacagctatabgggcagctccccaagttccaggacggagacctcaccctgtaccagtccaataccatcctgcgtcacctgggccgcacccttggtgagtcttgaacctcca

SEQ ID NO: 282289 - DNA, 201 bp, Homo sapiens
gcctcagtgcccggcccaagctcaaggccttcctggcctcccctgagtacgtgaacctccccatcaatggcaacgggaaacagtgagggttggggggactytgagcgggaggcagagtttgccttcctttctccaggaccaataaaatttctaagagagctactatgagcactgtgtttcctgggacggggcttaggggtt

SEQ ID NO: 282290 - DNA, 201 bp, Homo sapiens
ggggctggggctgcagcccacagcccctcgcccacccggagagatccgaacccccttatccctccgtcgtgtggcttttaccccgggcctccttcctgttycccgcctctcccgccatgcctgctccccgccccagtgttgtgtgaaatcttcggaggaacctgtttccctgttccctccctgcactcctgacccctcccc

SEQ ID NO: 282291 - DNA, 201 bp, Homo sapiens
cctaggggacccaggacgtccccagtgccgttagcggctttcagggggcccggagcgcctcggggagggatgggaccccgggggcggggagagggggcagrctgcgctcaccgcgccttggcatcctcccccgggctccagcaaacttttctttgttcgctgcagtgccgccctacaccgtggtctatttcccagttcgag

SEQ ID NO: 282292 - DNA, 201 bp, Homo sapiens
gcctccacccctctcccctgccctgtgaagcgggtgtgcaagctccgggatcgcagcggtcttagggaatttccccccgcgatgtcccggcgcgccagttmgctgcgcacacttcgctgcggtcctcttcctgctgtctgtttactccctaggccccgctggggacctgggaaagagggaaaggcttccccggccagctgc

SEQ ID NO: 282293 - DNA, 201 bp, Homo sapiens
agaccagtggcgggaccaggagggtggtgggaaaggtggggttcattggccaaggcttcctggagggaggatgtccttgtttgaggaagtgaccttccccyggccccccaggcctgtccccggacctgcagtctatggagcagattcggcggatcatgcggcccacagatgtgcctgaccagggcctgctgtgtgacctgc

SEQ ID NO: 282294 - DNA, 201 bp, Homo sapiens
tgcccccttaccctggctctgctgagctgcccccaatgaatccatagcggtcggcctggcgatatgggccaggcccgctgagctctgagtcggaccccaargagctggagtcatcctgcagctcgggaggctgcaccaggtcctcccccagggcctgggccatggtgcccggggccttcgatgccacaggcagagaaagtg

SEQ ID NO: 282295 - DNA, 201 bp, Homo sapiens
cctcaccccgtcctccaagggttccaggtagagctcgtccccgatgcgggacagggagtggacggccttgccgagcactgcggggagaagagcggaagggrgttaggctggcggctccgcggctgctgcaccgccgctgccaggccgacctgcactcacccttcacgttgccgcccgtgaccaggcacttcatgctgcccc

SEQ ID NO: 282296 - DNA, 201 bp, Homo sapiens
cctctgggtacaggcttcaggttcttggttcagccttcaccctcactgtcttccgccagcacagggctggggccctggggggagcgtacaggggccaggawggagccgaagaacagtgagcggaactggaaagagaacaagtgagttctggaggctgctcccttccctacctcccacccctgcctccacctccagtcccta

SEQ ID NO: 282297 - DNA, 201 bp, Homo sapiens
cctgcagctgctggaaatcctcctctccaaggcacatctcagtcaccatggctttggcagtgctgtctgttggggaagaacaggagtaacctgggccccgmccctctcccacctgccactctgctgtcccaggccacgtccagccccctcacctgcctcctcctcgtggtagctgcgcaggatgaccctgcggccacggcc

SEQ ID NO: 282298 - DNA, 201 bp, Homo sapiens
gtaggggaattggggcccctgcccactccctcacctgataggtgccagggctgttcttctggcacacatgggccccacacaacaggggccagcatcgggcrcgcagggcagacgggatgcctttccggcactgcatctttacctgtgggtgaggccaagggctccactaggcagcctccatagctcctgctggcaggcccc

SEQ ID NO: 282299 - DNA, 201 bp, Homo sapiens
cgcaccgcccctgccggccccgcccccgcccccgcctccccattggtccacgtgcaggcgcctccgtcacgtgagaaaaacgctcacaggctctgccgtcrcgtgacggcgcacgttgtccggggtgtcacgtgaccggggaggcccgcggcgcccgccagccagctgctcctggctcccccggcacgcctcggccttccg

SEQ ID NO: 282300 - DNA, 201 bp, Homo sapiens
gcctcctctggaagcctccctggcccagctctgcaccaggcggtgcctgggtgatgggtgatgggtgatgtagcgccaggcaccaggccatcaccttcggyacacccagtcctgtgatttgaggctcaaaaagggaaccctggagctggtgagctacctccccacccacaccccaaggctcctgccccagccactggctgc

SEQ ID NO: 282301 - DNA, 201 bp, Homo sapiens
tgtgagcctggagctgaggcactggctggtgacgctctggggagcccaggtcctgggagtgcgagtcggtgtctgagagtgtggccaagacaaagtggccrtccagcaaagagtccttgatggtgaagatggcgggcctgggcaggggagggggcccaagctaggtcatcccattcagctcctgccatcccagagcccttc

SEQ ID NO: 282302 - DNA, 201 bp, Homo sapiens
agcccacctgcccttccagccacctgcttcccccagcccaggcagctcctgcctcccagcagccctttccctccttggcctgggaggaggctcagaggggmggcctcagccagagaaggaagctggcagggccttggggatgcttccctgggtgggaggggtctctgagtacagctaaccgagaaggctgagtctgcaggg

SEQ ID NO: 282303 - DNA, 201 bp, Homo sapiens
gccgacctccctgctgaggcaccccttggctggccggctgcccactcaccgaacttgcaatgcagctggaccaccaggcggctgctccggccattcagggmgatgcagcatttttccaccgtcttctccagcatcgccagtgagcggaagacagacaggaaagactgcatgggataagacacctcagcctagcatcacatc

SEQ ID NO: 282304 - DNA, 201 bp, Homo sapiens; identical to SEQ ID NO: 57505

SEQ ID NO: 282305 - DNA, 201 bp, Homo sapiens; identical to SEQ ID NO: 57506

SEQ ID NO: 282306 - DNA, 201 bp, Homo sapiens
ccccagggctgagagacccagttctgccactggctggggcttcgtctagtccaaggcctctgggtacaggcttcaggttcttggttcagccttcaccctcrctgtcttccgccagcacagggctggggccctggggggagcgtacaggggccaggatggagccgaagaacagtgagcggaactggaaagagaacaagtgag

SEQ ID NO: 282307 - DNA, 201 bp, Homo sapiens
ggaggacaggacggcgagcgcctgggaggaacctcacccggaattccttgaggcagaaagtgatggccaccccttcctgggcctgcagctgctggaaatcytcctctccaaggcacatctcagtcaccatggctttggcagtgctgtctgttggggaagaacaggagtaacctgggccccgcccctctcccacctgccact

SEQ ID NO: 282308 - DNA, 201 bp, Homo sapiens
tgagtaccccagggcagaggcacagctggtggagattcctggggtggagtagtgccactgctgagggaagggcctcaccttcatcaggatcttacagcgcwgcaggtcctgaccaggggtggctgcctggtattgctggaagaagagcggggcaaagagaaagcaggcataggcagagcgggaggagttcaccgtccggag

SEQ ID NO: 282309 - DNA, 201 bp, Homo sapiens
caggggtggctgcctggtattgctggaagaagagcggggcaaagagaaagcaggcataggcagagcgggaggagttcaccgtccggagggagagctgggcmacgaagagcagggagagggacgtggtcagggggcagccacagacccagccctctggctgcttctgctcacacacttgccctatcgtcctcccgctccgcc

SEQ ID NO: 282310 - DNA, 201 bp, Homo sapiens
ccaccttggagggctcgaagggagctctggggcccccgaccactggagatctcttggttttatgacttcctgatttggctggagaggagaggatgcagggrttaagtggtgacttcctggagggggtgggccaggaatctctttgatcagaattcaggtaggggcctgagggaggcatcccgggggctaccttagctcagc

SEQ ID NO: 282311 - DNA, 201 bp, Homo sapiens
  misc_feature (1)...(201): n = A,T,C or G
ctgcctgcccatcgcggccatagtggacgaaaagatcttctgctgccacggaggtgagggaggggatggctggggaggaggagcactggccgcatccctcngcacccggcagctctccttaggtctcatctgggaagtcactccttccaggaagtgtcccccataccccactgtgctgggctgcactcacttccttgatgt

SEQ ID NO: 282312 - DNA, 201 bp, Homo sapiens
gtgggctggtggctccggcctgcggcaggggaaggggagggccgtgcctgcgctcgggactgactgctcccatcctcgcccaggtggtagaagacggctaygagttctttgccaagcggcagctggtgacacttttctcagctcccaactactgtggcgagtttgacaatgctggcgccatgatgagtgtggacgagaccc

SEQ ID NO: 282313 - DNA, 201 bp, Homo sapiens
gtttgcatcggtgcctgactctctcctcccagccacggctgaatagcccagggaccctggctgagggtggggtaggcaggcacctcacagccacctccccstgggcaggcaagagacgctacaacatcaaactgtggaaaaccttcactgactgcttcaactgcctgcccatcgcggccatagtggacgaaaagatcttct

SEQ ID NO: 282314 - DNA, 201 bp, Homo sapiens
caggggagggggcccaagctaggtcatcccattcagctcctgccatcccagagcccttccctgtcccaaggctgggaactacctgcctggagcatcaaaaygaatgctaagattcaagtttgctgactctgcaaagctcaggagcccctgggaggaaagaggtagcaggtgaggccccgggctgggctgagctgggcaggg

SEQ ID NO: 282315 - DNA, 201 bp, Homo sapiens
tcacccggaattccttgaggcagaaagtgatggccaccccttcctgggcctgcagctgctggaaatcctcctctccaaggcacatctcagtcaccatggcyttggcagtgctgtctgttggggaagaacaggagtaacctgggccccgcccctctcccacctgccactctgctgtcccaggccacgtccagccccctcacc

SEQ ID NO: 282316 - DNA, 201 bp, Homo sapiens
ccggaggtgctgggacacagggtgggtacattttgccaagatgtgggctgaggcagagaggaatgagccatggaagccaagtggggcccctgcccccctcmccttcttgtaccgccgggacatggttttctcccagtgcgaggtcatctccacccacttcatctcccgttggcggatgaggtctgcaggtgggtggcccgg

SEQ ID NO: 282317 - DNA, 201 bp, Homo sapiens
aggggactgggggagcagaggcagggccccaccttggagggctcgaagggagctctggggcccccgaccactggagatctcttggttttatgacttcctgrtttggctggagaggagaggatgcaggggttaagtggtgacttcctggagggggtgggccaggaatctctttgatcagaattcaggtaggggcctgaggga

SEQ ID NO: 282318 - DNA, 201 bp, Homo sapiens
acctcccacccctgcctccacctccagtccctaccttcttgggtgggggagtcccaggcactgtactgggctcagcctcatcttcctcctcggagtggggrccggggctcttggggggctgggggccaggtgaaagggaaatggagggcagcacccgcgagccctcattgcctatagtggtttccatggcgatcatgtaag

SEQ ID NO: 282319 - DNA, 201 bp, Homo sapiens
gctggggcctgcgagaggcagtgaaacagctcagctccagcaagcccacctttctgatccccagggctgagagacccagttctgccactggctggggcttygtctagtccaaggcctctgggtacaggcttcaggttcttggttcagccttcaccctcactgtcttccgccagcacagggctggggccctggggggagcgt

SEQ ID NO: 282320 - DNA, 201 bp, Homo sapiens
  misc_feature (1)...(201): n = A,T,C or G
ttggacctcatctgccgagcacaccaggtgggctggtggctccggcctgcggcaggggaaggggagggccgtgcctgcgctcgggactgactgctcccatnctcgcccaggtggtagaagacggctacgagttctttgccaagcggcagctggtgacacttttctcagctcccaactactgtggcgagtttgacaatgctg

SEQ ID NO: 282321 - DNA, 201 bp, Homo sapiens
tttcgtgaggggggatgcccggccggccgagatcgactccctgtgggagatcagcaagcagatagaaggccatacgatttgtgctctgggtgacggggccscctggcctgtgcaggtattcaccacccttctgcgtagcacggagggtgggtggcatcaagggcccagggtgttgggggatttttggactctgtttcacat

SEQ ID NO: 282322 - DNA, 201 bp, Homo sapiens
agagagcctgggcgggagggctcaggagacggggctgggtctaggggctgactaagggcctgggctcaggactaggcaggtgtgccggccccagccctgamcatgcatccctttggggaccgacttggggccccagggggtgtcacgggcggctgggacaacctccttgctgtgatccctggcggctcgtctaccccactg

SEQ ID NO: 282323 - DNA, 201 bp, Homo sapiens
tctgattggcaagaatgcttgtggctctggctatgattttgacgtgtttgtggtgcgcggggctggggcctacatctgtggagaggagacagcgctcatcragtccattgagggcaagcagggcaagccccgcctgaagccccccttccccgcagacgtgggtaaggcctggcgtaaccctgggtcagactgtgtcctgtg

SEQ ID NO: 282324 - DNA, 201 bp, Homo sapiens
ttgggtcccggagcaaggtgtccccttcattgccttccctattctgtccaggctgaaaggttccctgagtcgaggtgactggtacaagacaaaggagatcytgctgaaggggcccgactggatcctgggcgagatcaagacatcgggtttgaggggccgtggaggcgctggcttccccactggcctcaagtggagcttcat

SEQ ID NO: 282325 - DNA, 201 bp, Homo sapiens
acgggcggctgggacaacctccttgctgtgatccctggcggctcgtctaccccactgatccccaagtctgtgtgtgagacggtgctgatggacttcgatgygctggtgcaggcacagacaggcctgggcacagctgcggtgatcgtcatggaccgctcggtaagggttcacacaccagccctggtccctgccctcctggtt

SEQ ID NO: 282326 - DNA, 201 bp, Homo sapiens
ggccggagctcgaggagcggatgcagcggtttgcccagcagcatcaggcccggcaggctgcctcttagcccaccaccctggcctgctgtcctgcgtctatmcatgtggaatgctggacaataaagcgagtgctgcccaccctccagctgccgctgctgtgactgtgctctttaccctttacccagcacacgatcctcaagg

SEQ ID NO: 282327 - DNA, 201 bp, Homo sapiens
gactggatgaacaaggtgatggcacgtttcgtgaggggggatgcccggccggccgagatcgactccctgtgggagatcagcaagcagatagaaggccataygatttgtgctctgggtgacggggccgcctggcctgtgcaggtattcaccacccttctgcgtagcacggagggtgggtggcatcaagggcccagggtgttg

SEQ ID NO: 282328 - DNA, 201 bp, Homo sapiens
catgttgggagggcagtaaaggattggctgtcagaggagacatctttgaggcctccctgggtggagtggggtggcatggagttgaagacccagtcctgatsgccctgtagcctgtctgacctgtgggcccctgcaggcccaagtatctggtggtgaacgcagacgagggggagccgggcacctgcaaggaccgggagatct

SEQ ID NO: 282329 - DNA, 201 bp, Homo sapiens
tgcttgctgtggcttcatttaacctcctccccaccacgtggcctgcagccctcaagcgccgccccacatcctggctggggagatcatcaggccctctcttrtggctgtggctgcaggtgtggactggatgaacaaggtgatggcacgtttcgtgaggggggatgcccggccggccgagatcgactccctgtgggagatcag

SEQ ID NO: 282330 - DNA, 201 bp, Homo sapiens
gtggccatccgagaggcctatgaggcaggtctgattggcaagaatgcttgtggctctggctatgattttgacgtgtttgtggtgcgcggggctggggcctrcatctgtggagaggagacagcgctcatcgagtccattgagggcaagcagggcaagccccgcctgaagccccccttccccgcagacgtgggtaaggcctgg

SEQ ID NO: 282331 - DNA, 201 bp, Homo sapiens
ctgagtggcttcccggctggggccagatagagagtaggctggcaacaacacacaggctcccccagggccgcctgctgtccctcctcctgcctcggtcccckccgcaccagtgctgctctgtggctccaccttcacagtgcctgttctgaggctaagggcatggggtgaacaaggcaatgggcatctctggagtttggggtc

SEQ ID NO: 282332 - DNA, 201 bp, Homo sapiens
aaacacatttcgcctcttcggccgaggtaggaatataaaaggcccctggcctacccaagttttggtccagcaggggagccaggccgggaaagggccaagcygccacactcggcttgtggggctgtgtggtgccgtgatgcagctgtgggtttggccaccgacagacctgggctcaaattggacctgctgcttttgactgtg

SEQ ID NO: 282333 - DNA, 201 bp, Homo sapiens
ccccttcattgccttccctattctgtccaggctgaaaggttccctgagtcgaggtgactggtacaagacaaaggagatcctgctgaaggggcccgactggwtcctgggcgagatcaagacatcgggtttgaggggccgtggaggcgctggcttccccactggcctcaagtggagcttcatgaataagccctcagatggcag

SEQ ID NO: 282334 - DNA, 201 bp, Homo sapiens
gaactatgaataatacttatatctgtaggaaatatagaaaaataaaataggttaaggcaataaggatataggcaattacatttttattttaattttataargacttttatttttcctttacagactagggtagttaggagacctgatagtagctacttcgtttttattttcctggcagcaaagcagcttacttatgtgttc

SEQ ID NO: 282335 - DNA, 201 bp, Homo sapiens
  misc_feature (1)...(201): n = A,T,C or G
ggcaacacggcggctgctcggctggtcgcttcccgcgcgggtatctgtgcgtttcagcggcgacacggtgaggcccagcctggctggggccacgggtgttnggggccgggtgtcgcggccgcgcccgtgcacgagcagtccctggggtctgtagtggcctctggagagcccttctccccaggccaggcgggaaggcccccg

SEQ ID NO: 282336 - DNA, 201 bp, Homo sapiens
ccgaccccagggtctgatccgccactttcggccggagctcgaggagcggatgcagcggtttgcccagcagcatcaggcccggcaggctgcctcttagcccmccaccctggcctgctgtcctgcgtctatccatgtggaatgctggacaataaagcgagtgctgcccaccctccagctgccgctgctgtgactgtgctcttt

SEQ ID NO: 282337 - DNA, 201 bp, Homo sapiens
gcgcccgtgcacgagcagtccctggggtctgtagtggcctctggagagcccttctccccaggccaggcgggaaggcccccgctccggcctggttgaagtargggaacgggtcccaacgcggggccgactcccttgaccctctgacttgctggcttcccttgttttacagtcctcggcctggcggaagttttgcaggttgtg

SEQ ID NO: 282338 - DNA, 201 bp, Homo sapiens
ccctctgacttgctggcttcccttgttttacagtcctcggcctggcggaagttttgcaggttgtgaagacccctagtctttcattctctccttgtcacagmcttgtagggcgtgaaggggtcattgccccatttagggatgcgcacctcctgatttcccgtccactgctctgcgccctgaagtggctgaaaagtgctctta

SEQ ID NO: 282339 - DNA, 201 bp, Homo sapiens
cctgttctgaggctaagggcatggggtgaacaaggcaatgggcatctctggagtttggggtccagcagggataagaatgataaggggatattagagcaggkgctctgccatgggtgcaggaccctgggacacacctccctgccaggaaacttgccccaccccctagcagccaccagttctcttcccatttccctgaaggag

SEQ ID NO: 282340 - DNA, 201 bp, Homo sapiens
catccgagaggcctatgaggcaggtctgattggcaagaatgcttgtggctctggctatgattttgacgtgtttgtggtgcgcggggctggggcctacatckgtggagaggagacagcgctcatcgagtccattgagggcaagcagggcaagccccgcctgaagccccccttccccgcagacgtgggtaaggcctggcgtaa

SEQ ID NO: 282341 - DNA, 201 bp, Homo sapiens
actaaacgccgaatctatagaaagtggaacacaccaggacccagcagaaggcgacatgcgaggtttgtttacttgtggcatcaaaggctgggagccggcgrgctaaggagggagcgaaagagcgagcggtggggacagccaccgctaaatgccagcccggtggagggaggaaggcggaccccaggccggtgggaccacatc

SEQ ID NO: 282342 - DNA, 201 bp, Homo sapiens
cgatttgtgctctgggtgacggggccgcctggcctgtgcaggtattcaccacccttctgcgtagcacggagggtgggtggcatcaagggcccagggtgttrggggatttttggactctgtttcacatggtccccccaccgaccccagggtctgatccgccactttcggccggagctcgaggagcggatgcagcggtttgcc

SEQ ID NO: 282343 - DNA, 201 bp, Homo sapiens
gccgaggtgggcggatcacctgaggtcaggagttcgagaccagcctggccaacatggagaaaccctgtctctactaaaaaaaaaaaataaatagccgggcrcggtggcgcatgagtgagccgagagttcacgagttcgagaaaaagtaacaatttggccagattcggtggcttacgcctgttatcccagcactttgggagg

SEQ ID NO: 282344 - DNA, 201 bp, Homo sapiens
gaggcaggtctgattggcaagaatgcttgtggctctggctatgattttgacgtgtttgtggtgcgcggggctggggcctacatctgtggagaggagacagygctcatcgagtccattgagggcaagcagggcaagccccgcctgaagccccccttccccgcagacgtgggtaaggcctggcgtaaccctgggtcagactgt

SEQ ID NO: 282345 - DNA, 201 bp, Homo sapiens
caacgtggagacagtggcagtgtcccccacaatctgccgccgtggaggtacctggtttgctggctttggcagagaacgcaactcaggcaccaaactattcwacatctctggccatgtcaaccacccttgcactgtggaggaggagatgtctgtgcccttgaaagaactgattgagaagcatgctggtaaggcctggggcca

SEQ ID NO: 282346 - DNA, 201 bp, Homo sapiens
ggtgagcaagcagagcccctgggacatgttgggagggcagtaaaggattggctgtcagaggagacatctttgaggcctccctgggtggagtggggtggcayggagttgaagacccagtcctgatggccctgtagcctgtctgacctgtgggcccctgcaggcccaagtatctggtggtgaacgcagacgagggggagccgg

SEQ ID NO: 282347 - DNA, 201 bp, Homo sapiens
tccccccaccgaccccagggtctgatccgccactttcggccggagctcgaggagcggatgcagcggtttgcccagcagcatcaggcccggcaggctgcctyttagcccaccaccctggcctgctgtcctgcgtctatccatgtggaatgctggacaataaagcgagtgctgcccaccctccagctgccgctgctgtgactg

SEQ ID NO: 282348 - DNA, 201 bp, Homo sapiens
accccagggtctgatccgccactttcggccggagctcgaggagcggatgcagcggtttgcccagcagcatcaggcccggcaggctgcctcttagcccaccmccctggcctgctgtcctgcgtctatccatgtggaatgctggacaataaagcgagtgctgcccaccctccagctgccgctgctgtgactgtgctctttacc

SEQ ID NO: 282349 - DNA, 201 bp, Homo sapiens
cggggccgctggcgaagttgaaggggcgcagcgataccggtgcgcggcgctggcgtcgggcgcgtgacgtctttcctgcgcgccacctagcgtctctatcrcgccagttcctcagcctcagtgctatgaaggtgacagcgtgaggtgacccatctggcccgccgcgatgctggcaacacggcggctgctcggctggtcgct

SEQ ID NO: 282350 - DNA, 201 bp, Homo sapiens
gactggaggtgagacagtgcccttagtgtgttgggtcccggagcaaggtgtccccttcattgccttccctattctgtccaggctgaaaggttccctgagtygaggtgactggtacaagacaaaggagatcctgctgaaggggcccgactggatcctgggcgagatcaagacatcgggtttgaggggccgtggaggcgctgg

SEQ ID NO: 282351 - DNA, 201 bp, Homo sapiens
cactgtctaccctgtgcctcagttcatgaagctggactcggtcttcatctggaaggaaccctttggcctggtcctcatcatcgcaccctggaactacccaytgaacctgaccctggtgctcctggtgggcgccctcgccgcaggtgaggagggcgttccgaaccccatgctctccccacccagtagcccctcccaaagagg

SEQ ID NO: 282352 - DNA, 201 bp, Homo sapiens
ggacactcactggggatgccaaggccctgctcaccacccacccccactgccctcagcaatgcgggtctgagcacagcctggcacggcactgtgacctgcarctgagggctgagattactcaagtccacacgcagacacacacacgacacacatgacacagacacccatacacacaaagagacacagacacccatatacaca

SEQ ID NO: 282353 - DNA, 201 bp, Homo sapiens
tggcctggtcctcatcatcgcaccctggaactacccactgaacctgaccctggtgctcctggtgggcgccctcgccgcaggtgaggagggcgttccgaacyccatgctctccccacccagtagcccctcccaaagaggcccctggaatcttgctctgaggtaccctgggcctcacatgccctctgagcccagcccctggtt

SEQ ID NO: 282354 - DNA, 201 bp, Homo sapiens
gttccgtgtgtagactgtgagctccatgggggctggccaagtctggggtggtcacctatgggacccaggtccagtcaggaactgcctggtgagcagccagrggtccccagtgtaaacccagaaaatctgagacgggtctcagttaatttataaagtttattttgcctgtaatcccagcactttgggaggccgaggcgggcg

SEQ ID NO: 282355 - DNA, 201 bp, Homo sapiens
cctgttccccaggagccccagggatggggacagaccccgtcctccctttgaggagctcccaggttagaggagaaggcagctctgtggacagacaaggattsggtcgggggcaccagggctgtgatcaggaggtgccggagaatcggggattggaagcagagagattcttggcagttgaagcaaaagtcggatctttggttt

SEQ ID NO: 282356 - DNA, 201 bp, Homo sapiens
gtgcagccctgccccacgcctgttgggtaacactgagcatcaccccattgattaccccattgccaggcgtgggcacgggagttggtttgggagctgccagkctcctgggaggatcgcagtcagcagagcagggctgaggcctgggggtaggagcagagcctgcgcatctggaggcagcatgtccaagaaagggagtggagg

SEQ ID NO: 282357 - DNA, 201 bp, Homo sapiens
ggggtatgtggggccacaggggtgaggggcgggcagagggagctcagggtaaaggacactggtgggaaccaggggcatggagggaaggggatgtgtgcccrtggcccgtgggtcagggggcaagcccaccaaggggcctatggctgcaggggccatgggtacggggcttgctcaggagagggaggtgggtgctggtgtctt

SEQ ID NO: 282358 - DNA, 201 bp, Homo sapiens
gtgcagggaagagctgggatggtgggcagcagggtcacccgaggtgtgtgtgttgggcttccagggtgggcgtccaggagggggatcccctccctggagtrggggaggtcaagcccagggccctccctcatgggcacacctgggaggcaggtgagttgggggtggtgcaggcagccccagccccgtggggtcattcgagtg

SEQ ID NO: 282359 - DNA, 201 bp, Homo sapiens; identical to SEQ ID NO: 57595

SEQ ID NO: 282360 - DNA, 201 bp, Homo sapiens
  misc_feature (1)...(201): n = A,T,C or G
ggaccagcagcggcagctttggaggcaatgagggcttcacctacatatctctgctgtccgtgccattcgggggagtcggtgggtccctgcccatttccacncctagggaagcttggctttggtaccccagacccaggaagtcccttcactcactgttcaaccttgatccacaccctgggcctctcaaggcctcagtttccc

SEQ ID NO: 282361 - DNA, 201 bp, Homo sapiens
  misc_feature (1)...(201): n = A,T,C or G
gagtcggtgggtccctgcccatttccacccctagggaagcttggctttggtaccccagacccaggaagtcccttcactcactgttcaaccttgatccacancctgggcctctcaaggcctcagtttccctatctgtaaaatggctctgtgagtggcctggctctctctgagctccctgccagctgtgtgccctggccgggg

SEQ ID NO: 282362 - DNA, 201 bp, Homo sapiens
caggtgtgggcgacaagccacccaggtgccaaggcaagagactgagggcacaagctgtcccagtataataaagaaaatatatagaataagaatagttataytagaaatagattatagatatgattgtatatgagtatcattaatcattagtttgtagcatcactctttattccaatattataataatctttgttctataat

SEQ ID NO: 282363 - DNA, 201 bp, Homo sapiens
gttccagcggctgcgggcattgctgggctgcggccgcgtggccattgggggccagagcaacgagagcgatcgctacatcggtgagtcctgctgccctaccrcagcccacctgggccaagaccctttctcaatggagggcccacggctgggccacgagtctggactcgcacctgaaacccggccccactatcagagcccggc

SEQ ID NO: 282364 - DNA, 201 bp, Homo sapiens
cagctccagggcctgggccacttccttcaagaaaacaagcagcttctgcgcgacgtgctggcccaggacctgcataaggtgggccgtggagagtgggcccsggcaggggctggagcagcgtccctgtcctctttcaggagggcccgtgccccctagtgactggctatgtccctagttttattcctgtttgtttaacagacc

SEQ ID NO: 282365 - DNA, 201 bp, Homo sapiens
ctgctgcccgccctgcagagcaccatcacccgtttctatggcgacgacccccagagctccccaaacctgggccacatcatcaaccagaaacagttccagcrgctgcgggcattgctgggctgcggccgcgtggccattgggggccagagcaacgagagcgatcgctacatcggtgagtcctgctgccctaccgcagcccac

SEQ ID NO: 282366 - DNA, 201 bp, Homo sapiens
ctgtgcagccccgagatgcaggagaggctgctgcccgccctgcagagcaccatcacccgtttctatggcgacgacccccagagctccccaaacctgggccrcatcatcaaccagaaacagttccagcggctgcgggcattgctgggctgcggccgcgtggccattgggggccagagcaacgagagcgatcgctacatcggt

SEQ ID NO: 282367 - DNA, 201 bp, Homo sapiens
agggaggaggctggggccagcagtgggggcacgtggggagctggagctggcacagagtccgtctgcctgcataggccacgccctgggcacattgcagcaaytggatccaggagtggccaggctggaggcaggtcccagtgggtgagccagaccggccaggagaagggtgaggcgggccaggactttctatgaagaaagcgg

SEQ ID NO: 282368 - DNA, 201 bp, Homo sapiens
gaatgtgcggggctcaagccctcttctcatgactagagcccaacacccaccttctcactccctggcaggttgtgaaccagatgctggagcggaccagcagmggcagctttggaggcaatgagggcttcacctacatatctctgctgtccgtgccattcgggggagtcggtgggtccctgcccatttccacccctagggaag

SEQ ID NO: 282369 - DNA, 201 bp, Homo sapiens
gcaatgagggcttcacctacatatctctgctgtccgtgccattcgggggagtcggtgggtccctgcccatttccacccctagggaagcttggctttggtamcccagacccaggaagtcccttcactcactgttcaaccttgatccacaccctgggcctctcaaggcctcagtttccctatctgtaaaatggctctgtgagt

SEQ ID NO: 282370 - DNA, 201 bp, Homo sapiens
ggccctcatgcaggggggccgcacactgagtgtgggggtcctgtgccaggaatgtgatcacgctgcccaggggagggaggcggcatctgcaggtgtggccrggaaggtgcccagcatggcttcctgtctcctcacattcttcagctgggacctgagccgggcaggggctgctctcctcatcttgtcattcacaagacacgg

SEQ ID NO: 282371 - DNA, 201 bp, Homo sapiens
cgcggtggggcccgcataccacactgcagcatcctaacctcaccgtcgcgactcaaggctgccggctccccatgatcctgcagggcttcctggtctttgcrccatggtggtaatcacccccatggcaccccgaccgtcactgagagggtgctgtccccagaagatgcttagagcggagattattgcccgttagagggtgga

SEQ ID NO: 282372 - DNA, 201 bp, Homo sapiens
atgtaagaaggccaggcacggtggctcacgcctgtaatcctagcactttgggaggccaaggcagggatcacctgaggtcgggagtttgagaccagcctgamcaacatggtgaaaccccgtctctactacaaatataaaattagccgggcatggtggcaggcacctataatcccagctattcagctattcgggaggctgagg

SEQ ID NO: 282373 - DNA, 201 bp, Homo sapiens; identical to SEQ ID NO: 57606

SEQ ID NO: 282374 - DNA, 201 bp, Homo sapiens
ggcagctctgtggacagacaaggattcggtcgggggcaccagggctgtgatcaggaggtgccggagaatcggggattggaagcagagagattcttggcagwtgaagcaaaagtcggatctttggtttcagatgttaaaagcaacatgcattgcttgtttctggttctagaaatactacattcgcatttagaaagtctggaa

SEQ ID NO: 282375 - DNA, 201 bp, Homo sapiens
ttacacactttagggagacaggagacagcaatcaatatatgtaagaaggccaggcacggtggctcacgcctgtaatcctagcactttgggaggccaaggcrgggatcacctgaggtcgggagtttgagaccagcctgaccaacatggtgaaaccccgtctctactacaaatataaaattagccgggcatggtggcaggcac

SEQ ID NO: 282376 - DNA, 201 bp, Homo sapiens; identical to SEQ ID NO: 57608

SEQ ID NO: 282377 - DNA, 201 bp, Homo sapiens
gcagccctggccacccagttcaagccaccccatccggcaggatggaccccttcgaggacacgctgcggcggctgcgtgaggccttcaactgagggcgcacrcggccggccgagttccgggctgcgcagctccagggcctgggccacttccttcaagaaaacaagcagcttctgcgcgacgtgctggcccaggacctgcata

SEQ ID NO: 282378 - DNA, 201 bp, Homo sapiens; identical to SEQ ID NO: 57592

SEQ ID NO: 282379 - DNA, 201 bp, Homo sapiens
ctgaagccgtcagaaatcagccagggcacagagaaggtcctggctgaggtgctgccccagtacctggaccaggtgagggtggccctgccccagcagtgccygacgtccccatatatcacccctgtgggctgaggaggcccggctggcccccgagcccgccccgagcctctcattccaccttgcagagctgctttgccgtgg

SEQ ID NO: 282380 - DNA, 201 bp, Homo sapiens
gtttttgacccaatgctcattcaagagcaggttatttaatttccagttatttgcatggttttgaaggttctttttggagttgatttccagttttattccaycgtggtctaagaacatgcctgatataatttcatttttctcttgttgcccaggctggagtgcaatggtgtgctctcagctcactgcaacctctgcttccta

SEQ ID NO: 282381 - DNA, 201 bp, Homo sapiens
tgaggtaccctgggcctcacatgccctctgagcccagcccctggttgggcatggggaccctgggctcccccaacgacgtccccatctgcccctgcagggarttgcgtggtgctgaagccgtcagaaatcagccagggcacagagaaggtcctggctgaggtgctgccccagtacctggaccaggtgagggtggccctgccc

SEQ ID NO: 282382 - DNA, 201 bp, Homo sapiens; identical to SEQ ID NO: 57596

SEQ ID NO: 282383 - DNA, 201 bp, Homo sapiens
tcatcgcaccctggaactacccactgaacctgaccctggtgctcctggtgggcgccctcgccgcaggtgaggagggcgttccgaaccccatgctctccccrcccagtagcccctcccaaagaggcccctggaatcttgctctgaggtaccctgggcctcacatgccctctgagcccagcccctggttgggcatggggaccc

SEQ ID NO: 282384 - DNA, 201 bp, Homo sapiens
agcccgccgactccaacacctctccagggaggagcaggctctgggctgggccatcctgcctggtccaggtcactgactggccactctggtttccttccacrcccagggagccctcgtgtgggcaagattgtcatgactgctgccaccaagcacctgacgcctgtcaccctggagctggggggcaagaacccctgctacgtg

SEQ ID NO: 282385 - DNA, 201 bp, Homo sapiens
accaagggttatctcagatgtccctcctgcccacagggctgcacactctgccaagagactctctacagccctcagcagggcgtgtccttggtctcaggctygggggaaggtggggtggggacagagtcaggccatccatgaaggacagtggcaggacctgagctcattctgctccctggaacctagaaggtgctcagcaaa

SEQ ID NO: 282386 - DNA, 201 bp, Homo sapiens
ctgtggacagacaaggattcggtcgggggcaccagggctgtgatcaggaggtgccggagaatcggggattggaagcagagagattcttggcagttgaagcraaagtcggatctttggtttcagatgttaaaagcaacatgcattgcttgtttctggttctagaaatactacattcgcatttagaaagtctggaagctgcag

SEQ ID NO: 282387 - DNA, 201 bp, Homo sapiens; identical to SEQ ID NO: 57599

SEQ ID NO: 282388 - DNA, 201 bp, Homo sapiens
ggtcttcatctggaaggaaccctttggcctggtcctcatcatcgcaccctggaactacccactgaacctgaccctggtgctcctggtgggcgccctcgccrcaggtgaggagggcgttccgaaccccatgctctccccacccagtagcccctcccaaagaggcccctggaatcttgctctgaggtaccctgggcctcacat

SEQ ID NO: 282389 - DNA, 201 bp, Homo sapiens
gaccactctgaattccacctccaccacagccagctttcgaggcagacatatctgagctcatcctttgccagaacgaggttgactacgctctcaagaacctkcaggcctggatgaaggatgaaccacggtccacgaacctggtgagccctgctggcaggcggcaggagggcagggcagggcaccgggtagctctggcccagg

SEQ ID NO: 282390 - DNA, 201 bp, Homo sapiens
acgaccagcagagtgccaccccctccccagagcaggtgccaaaccctcctcagggctagggcatgcctatggcttcagtttccccatctgcgacctcaaarctctgtgatctctgaagcaaagaaccctccgagtccctcgtttagtcccagaagggagggaggcccaggggagagctctgttccatctgagtggtctggg

SEQ ID NO: 282391 - DNA, 201 bp, Homo sapiens
ggaaccctttggcctggtcctcatcatcgcaccctggaactacccactgaacctgaccctggtgctcctggtgggcgccctcgccgcaggtgaggagggcrttccgaaccccatgctctccccacccagtagcccctcccaaagaggcccctggaatcttgctctgaggtaccctgggcctcacatgccctctgagcccag

SEQ ID NO: 282392 - DNA, 201 bp, Homo sapiens
catcacccgtttctatggcgacgacccccagagctccccaaacctgggccacatcatcaaccagaaacagttccagcggctgcgggcattgctgggctgcrgccgcgtggccattgggggccagagcaacgagagcgatcgctacatcggtgagtcctgctgccctaccgcagcccacctgggccaagaccctttctcaat

SEQ ID NO: 282393 - DNA, 201 bp, Homo sapiens
cccatgaggccatactctggtccctcagccctggattcactgagctcagattccagggctccagggcccagcgtgctaaggtgaattcccatcccaccacyggctgtcctgaaaggccgtaacctctgattctccgagcccatgatccccaggttctaaactctgacggccccatcctgagcccccagtctcctgggccgt

SEQ ID NO: 282394 - DNA, 201 bp, Homo sapiens; identical to SEQ ID NO: 57604

SEQ ID NO: 282395 - DNA, 201 bp, Homo sapiens
gaggcggtcatccctccaaaggcaccagggagccatggaagaggttagagctgagctgatgtggccaggagctgcttgagcgccgggtggaggctgctgaygctcgcatgccaggcaaagctttgggtcagggccctggaacctgggacctggaagcgctccaggccaataccgcccgctaccagagaagggcccaggccc

SEQ ID NO: 282396 - DNA, 201 bp, Homo sapiens
gtcttgattcaggccggaggcggtcatccctccaaaggcaccagggagccatggaagaggttagagctgagctgatgtggccaggagctgcttgagcgccsggtggaggctgctgacgctcgcatgccaggcaaagctttgggtcagggccctggaacctgggacctggaagcgctccaggccaataccgcccgctaccag

SEQ ID NO: 282397 - DNA, 201 bp, Homo sapiens
gagttccgggctgcgcagctccagggcctgggccacttccttcaagaaaacaagcagcttctgcgcgacgtgctggcccaggacctgcataaggtgggccrtggagagtgggccccggcaggggctggagcagcgtccctgtcctctttcaggagggcccgtgccccctagtgactggctatgtccctagttttattcctg

SEQ ID NO: 282398 - DNA, 201 bp, Homo sapiens
gcccgccctgcagagcaccatcacccgtttctatggcgacgacccccagagctccccaaacctgggccacatcatcaaccagaaacagttccagcggctgmgggcattgctgggctgcggccgcgtggccattgggggccagagcaacgagagcgatcgctacatcggtgagtcctgctgccctaccgcagcccacctggg

SEQ ID NO: 282399 - DNA, 201 bp, Homo sapiens
catggccactgccaagggaatgagtcccctctccatatgacaggtcccatcaggcctccaccttcctgtgtgtcttatttctcagcatctgcccccacagkgcttttgcacacgttggtccctctgtccagatcacctgccctccaagaggccctcccctacggcttccccgcagcagtcagagccaggggtgggtctctg

SEQ ID NO: 282400 - DNA, 201 bp, Homo sapiens
aacctcaccgtcgcgactcaaggctgccggctccccatgatcctgcagggcttcctggtctttgcgccatggtggtaatcacccccatggcaccccgaccrtcactgagagggtgctgtccccagaagatgcttagagcggagattattgcccgttagagggtggaggggcaggtgaggatgaggctcacctccgctgtgg

SEQ ID NO: 282401 - DNA, 201 bp, Homo sapiens; identical to SEQ ID NO: 57607

SEQ ID NO: 282402 - DNA, 201 bp, Homo sapiens; identical to SEQ ID NO: 57609

SEQ ID NO: 282403 - DNA, 201 bp, Homo sapiens; identical to SEQ ID NO: 57612

SEQ ID NO: 282404 - DNA, 201 bp, Homo sapiens; identical to SEQ ID NO: 57610

SEQ ID NO: 282405 - DNA, 201 bp, Homo sapiens
gacgccccgggcaagagaacgccaggagggataacgggaggaaggccggccggggccgccaaggcagtcccaggctcgcgtaggaggcgcgcagaccttgyaccttgcaccttcgcagcgccctgcaccccgccaccatgtgcgagctgtacagtaagcgggacactctggggctgaggaagaagcacatcgggtaagggc

SEQ ID NO: 282406 - DNA, 201 bp, Homo sapiens
atatatatatcctatatatatcatatatgatatatcacatatcatatatattgtatatatatcacatatcatatatatcgtatatatatcacatatcatacacacacacacacacacacacacacacacggcggtattaagtattaacttacatgatcacaatgtcccacaataggctgtctgcaaggtggggagcaagga

SEQ ID NO: 282407 - DNA, 201 bp, Homo sapiens
ccgccaccatgtgcgagctgtacagtaagcgggacactctggggctgaggaagaagcacatcgggtaagggcaccctggcccggaagtaagtgcagagagsgggcaataacgagtgcagaaggtggagagagaaagccggctagggaacaaacgatgcgctgcagccgcactccgtgcccgccgcgcctgtgcacgcgccc

SEQ ID NO: 282408 - DNA, 201 bp, Homo sapiens
atgtacttaaaataaaaccacctatgtgcttcactgaagaagatgcaaagttcatggtggaccaacttgataggattctaacaggtgggtccatggatctytaagatgtcttcttgttccctctcccaaacccacccctcaaaccctggtctagtcataatgagcatatgcatcttgttattcatgatggaagtgaggcag

SEQ ID NO: 282409 - DNA, 201 bp, Homo sapiens
atttagaatgaattttcactcagtcctgaatatatagaatcatgctctattctaaatatgagaaactaatattataagagaacattttatttaaattatawcttcacttatgtatgtatgagccaaatttctcatggatgagggaataccactcattcaactggtatattttctcatttgtcttttttttttttacagtat

SEQ ID NO: 282410 - DNA, 201 bp, Homo sapiens
gggtccatggatctttaagatgtcttcttgttccctctcccaaacccacccctcaaaccctggtctagtcataatgagcatatgcatcttgttattcatgrtggaagtgaggcagggcagaaataaatgtgtaactttccatttaggactagaaaaagatagctgaaaagtaactacatggactcttaaattgaaattttc

SEQ ID NO: 282411 - DNA, 201 bp, Homo sapiens
ggaaccaaaaccgaaagtgtgacctctgagaatactccatgcaaaacaaaggtaagggttggctactttatttttagggggaaagtttaaaatttggggartgtttaaaaaaggaatacaaattttcaaaaaattgtgcagtgaccattagaacaatgccagcctgtattaggttcgcttattgttgcaattttgagtgca

SEQ ID NO: 282412 - DNA, 201 bp, Homo sapiens
tcttctctagttacgttttcacttgattcaaatttcaaaaatgcgttattacaatcatgcctctaagactgtctacttgtatttatcctggaaatacaacmattatctggttccagaactggttgcctaattctgaccttttcagtggtatgcagggtctagtctagaggggtaggggtcattatatggtgaagggaagag

SEQ ID NO: 282413 - DNA, 201 bp, Homo sapiens
acaataaaaaaacatttgggtatatgtctttcctggcttttatacttttttaataaagttaggataatgtcagcacccaaaagatgaaaagaaggaacttwatgtagctctaaataatttattgaaaattatttaaaatgctattctgaaaagctggatatttttcatatatatgtatgaaatactgacatatatatatat

SEQ ID NO: 282414 - DNA, 201 bp, Homo sapiens
  misc_feature (1)...(201): n = A,T,C or G
gccacttgctacaggtctattcctagccatttttaaaataacctgctctataagatatactctttttaggggggttgtagggggacctaatggactttganaccatcttctcttgtatagattgctgcctttattgctgaatccatgcagagttgtggcggacaaataattcctccagcaggctacttccagaaagtggca

SEQ ID NO: 282415 - DNA, 201 bp, Homo sapiens
cttcctcttaccatcaagtttatcatcacttatgcccaccccctgcatgtactcaagcaggagcacatgagtgcacgtgcacgcgtgcgcgcgcgcgcgcrcgcacacacacacacacacacacacacacaatctctagcccggcactggcaaaaggaagttggaggaaagtaggacatcaaggatcccttagttacatga

SEQ ID NO: 282416 - DNA, 201 bp, Homo sapiens
tcctcttaccatcaagtttatcatcacttatgcccaccccctgcatgtactcaagcaggagcacatgagtgcacgtgcacgcgtgcgcgcgcgcgcgcgcrcacacacacacacacacacacacacacaatctctagcccggcactggcaaaaggaagttggaggaaagtaggacatcaaggatcccttagttacatgatg

SEQ ID NO: 282417 - DNA, 201 bp, Homo sapiens
accccgaatactgtaaagtcaaccgtctgcaatattcacttgaaatgaacgactgcagccgggccagtgggcatgagagagcacttggggttacaaggaaraaaacaatccgcatcctcttcggaggaatgctggacagtttctcagactgaagctcctcaccccaactggaggggtttctgggtggtttggaagactagt

SEQ ID NO: 282418 - DNA, 201 bp, Homo sapiens
cccgctcgaaagtccccggctcgctctgcagccggcggactagcgggggctgccggccggctagaggggttggtggatgacggccaatagccctagcagayaccattccagggatgggagatgggtggaagaaggatagcgctccgccacccccacacaactcgaaagtttttggaaactgtgaactgagaaatatttttt

SEQ ID NO: 282419 - DNA, 201 bp, Homo sapiens
actgcatcaacaatgttgcccatggtaaatgtcctgtccttgcagtgctttggaggaaatgttcatggagtaaagctgacttggaacacttaatttttgtytggggaattgcagtggctgcagttcctttgctgagtgggccagtagtcctagtggggaaaatcgcagcaaaatatggaagagaaaggaactcaacttttg

SEQ ID NO: 282420 - DNA, 201 bp, Homo sapiens
agaaaggaactcaacttttgtttgtttgtttgtttgcttgcttgcttgcttcataattcctcttattcccaggcacttagaattctaacttatttcttggrcttttgtttcataaattttagtgggacactgtcacccaggagtggtcaaagctgccctgaaacagatggaactgctaaatacaaattctcgattcctcca

SEQ ID NO: 282421 - DNA, 201 bp, Homo sapiens
tttagaatgaattttcactcagtcctgaatatatagaatcatgctctattctaaatatgagaaactaatattataagagaacattttatttaaattatatsttcacttatgtatgtatgagccaaatttctcatggatgagggaataccactcattcaactggtatattttctcatttgtcttttttttttttacagtatg

SEQ ID NO: 282422 - DNA, 201 bp, Homo sapiens
ttatgaagttgtcatgtagttactcatttttttcaaaataataatagtttataggctgggcaacatggtgagaccccgtctctattaaaactacaaaaaawtagccaggtgtggtggcacacacaaatagtcccagctactcgggaggctgaggcatgagaatcacttgagcctgggaggcagaggttgcagtgagccgag

SEQ ID NO: 282423 - DNA, 201 bp, Homo sapiens; identical to SEQ ID NO: 57615

SEQ ID NO: 282424 - DNA, 201 bp, Homo sapiens
aaactgctgcatgtaatgatggagaaatggaagttgcgctctcatctcctctatttctcatggtagctttattggtaccctagattttcagaagttaatgstttaaatcaattgcttttcctgcatagacaccttttcctttttctttaatcaaatggctaatttgccacttgctacaggtctattcctagccatttttaa

SEQ ID NO: 282425 - DNA, 201 bp, Homo sapiens
acggtacattttggtctccaactttaatgctaagaaggaaaaataatgcatgttcttatattttttgccaatgtagtaaagaataaagctcagtattgccrgctaaccacccagaactctggccaaagttttttcttattttaataaaacatcttaaatacttacatatatatataaaattatactttaagttctgggata

SEQ ID NO: 282426 - DNA, 201 bp, Homo sapiens
acccaaggtcatacaattactaaggggtagtctgaactagaacttgggttctcttgatttcttatctcacattctttgtgctttctcttcaacattatctrtttcctacttctcttttcttagtctctagaatgattcatctgtagttcctattgttaactgcccactgttgagttaagcgtggtttagggcaaaacctag

SEQ ID NO: 282427 - DNA, 201 bp, Homo sapiens
gatggaatattttaatacggtacattttggtctccaactttaatgctaagaaggaaaaataatgcatgttcttatattttttgccaatgtagtaaagaatraagctcagtattgccggctaaccacccagaactctggccaaagttttttcttattttaataaaacatcttaaatacttacatatatatataaaattatac

SEQ ID NO: 282428 - DNA, 201 bp, Homo sapiens
tcaataccagctgggcaacatagcaagacccccctctctacaaaacctttttaaaaatattatctgggcatggtggcacacgtttgtagttccagctactsgggaggctgaggtgggaggatggcttgagcccaggagtttgaggttacagggagtttgatcataccactgcactccagcctgggcaacagagtgagaccc

SEQ ID NO: 282429 - DNA, 201 bp, Homo sapiens
tatatatatatcctatatatatcatatatgatatatcacatatcatatatattgtatatatatcacatatcatatatatcgtatatatatcacatatcatmcacacacacacacacacacacacacacacggcggtattaagtattaacttacatgatcacaatgtcccacaataggctgtctgcaaggtggggagcaagg

SEQ ID NO: 282430 - DNA, 201 bp, Homo sapiens
ttcaggttaacaactttttttttttgtcttcaataatttgcatctttgtgggtgggtttggggatctcagtgacctgaaggcattagactgccgctttgcytttcagatatgtacacggtgcagggggtgtgtttatagctgatgaagttcaagtgggctttggcagagttgggaaacatttctggagcttccagatgtat

SEQ ID NO: 282431 - DNA, 201 bp, Homo sapiens
tttgtcgaaaaggcaaattacaagcaactgcattatttgatgttttcaggcaccaactccagatacttacagaggaaaatatagagaagaccatgcagacycagccagtgcttatgcagatgaagtgaagaaaatcattgaagatgctcataacagtggaaggaaggtttgtatttatagctttggaaacatctcaacatc

SEQ ID NO: 282432 - DNA, 201 bp, Homo sapiens
ctttttaaagatttttgattgttgaaaattgagcatatttccccaatacaaacataagaaaagaaaaaagaaggaaactcaaatagatacatttcaacttycatttatttatttatttttttgagatggagtttcgctcttgttccccaggctgcagtgtaatggcactatctctgctcactgcaacctccacctcccggg

SEQ ID NO: 282433 - DNA, 201 bp, Homo sapiens
agggggaaagtttaaaatttggggaatgtttaaaaaaggaatacaaattttcaaaaaattgtgcagtgaccattagaacaatgccagcctgtattaggttsgcttattgttgcaattttgagtgcacaattaaatttccacagcaagtgtcacatcatttgacgcatcaaaagccaaagaaccattcttacaggatcattc

SEQ ID NO: 282434 - DNA, 201 bp, Homo sapiens
aatcatcttcctcttaccatcaagtttatcatcacttatgcccaccccctgcatgtactcaagcaggagcacatgagtgcacgtgcacgcgtgcgcgcgcrcgcgcgcgcacacacacacacacacacacacacacaatctctagcccggcactggcaaaaggaagttggaggaaagtaggacatcaaggatcccttagtt

SEQ ID NO: 282435 - DNA, 201 bp, Homo sapiens
gggggaaagtttaaaatttggggaatgtttaaaaaaggaatacaaattttcaaaaaattgtgcagtgaccattagaacaatgccagcctgtattaggttcrcttattgttgcaattttgagtgcacaattaaatttccacagcaagtgtcacatcatttgacgcatcaaaagccaaagaaccattcttacaggatcattcc

SEQ ID NO: 282436 - DNA, 201 bp, Homo sapiens
tttccttccattcttcattaaaggtattgctaagataccaaaaagtttttttcttaaggtttttatgttattttgtcttctccataataccttccttgatycagttttagaagaagctatgggaaccaaaaccgaaagtgtgacctctgagaatactccatgcaaaacaaaggtaagggttggctactttatttttagggg

SEQ ID NO: 282437 - DNA, 201 bp, Homo sapiens
actttgtctactcttgcacacaaatctttccttttgattcatggtggagcttgtccaaaagggtttgctgagtttcttgccattcactaagtgatcacacrttagggacctagcctttctggttctcccactttattctacgactgtgaatctaactgatcaaatgatgctcacctcctcaggcagtgcaataagtagctg

SEQ ID NO: 282438 - DNA, 201 bp, Homo sapiens
atcatttgacgcatcaaaagccaaagaaccattcttacaggatcattcccattccaaaaacagccttgtgggcctgcaaagagggcctataaaatatatakagagagaattaaaacggcctaacctccttcctgcttttcctgagggctgcctgacactgcctccgattctcacacactgactttacaatcagcagaagca

SEQ ID NO: 282439 - DNA, 201 bp, Homo sapiens
tcatcttcctcttaccatcaagtttatcatcacttatgcccaccccctgcatgtactcaagcaggagcacatgagtgcacgtgcacgcgtgcgcgcgcgcrcgcgcgcacacacacacacacacacacacacacaatctctagcccggcactggcaaaaggaagttggaggaaagtaggacatcaaggatcccttagttac

SEQ ID NO: 282440 - DNA, 201 bp, Homo sapiens
atcttcctcttaccatcaagtttatcatcacttatgcccaccccctgcatgtactcaagcaggagcacatgagtgcacgtgcacgcgtgcgcgcgcgcgcrcgcgcacacacacacacacacacacacacacaatctctagcccggcactggcaaaaggaagttggaggaaagtaggacatcaaggatcccttagttacat

SEQ ID NO: 282441 - DNA, 201 bp, Homo sapiens
aatgaaacaaaacaaaacaaaagaagtgttcagcacaagaaatcccactttagggttagcaaagttggcacacattttatgaaaagttgactcggagtccyggattttctgttgacatcacatttcaaatgtctattgaagatactgaggagagggttagaaaggagcaagcagtgttgttttgtttggtttttctgtgtc

SEQ ID NO: 282442 - DNA, 201 bp, Homo sapiens
cattaaagagtcctgcaaatgaaacaaaacaaaacaaaagaagtgttcagcacaagaaatcccactttagggttagcaaagttggcacacattttatgaaragttgactcggagtcccggattttctgttgacatcacatttcaaatgtctattgaagatactgaggagagggttagaaaggagcaagcagtgttgttttg

SEQ ID NO: 282443 - DNA, 201 bp, Homo sapiens
tcacagaatttagaaatgttaagggaaaaaaagaacaaaaaaacctaaagtatcttaagttcacatgatcaccattctaacatgttcttgtggggaaatgycttttttttaaggtttgtcgaaaaggcaaattacaagcaactgcattatttgatgttttcaggcaccaactccagatacttacagaggaaaatatagaga

SEQ ID NO: 282444 - DNA, 201 bp, Homo sapiens
aacctaaagtatcttaagttcacatgatcaccattctaacatgttcttgtggggaaatgccttttttttaaggtttgtcgaaaaggcaaattacaagcaaytgcattatttgatgttttcaggcaccaactccagatacttacagaggaaaatatagagaagaccatgcagactcagccagtgcttatgcagatgaagtga

SEQ ID NO: 282445 - DNA, 201 bp, Homo sapiens
aacacactctagttttctgaatgattacgatttgcaatatagttgatcggtgttggctcattttaaatccagactagttaatacagtttccattcactgamatttttaaatactatcatcacatttgttgatttgaatgttctatttatgtgaggagggatatagtcttgatgtataacagtctggaagcaaatccaaact

SEQ ID NO: 282446 - DNA, 201 bp, Homo sapiens; identical to SEQ ID NO: 57623

SEQ ID NO: 282447 - DNA, 201 bp, Homo sapiens
actttcaattcagacttttttgactttttgttttgcagatttggaatgagaggtcatataatgccaattatattaaggtgtgtacaactttagtatctttytgtttttaactttttagtgaataattccttatggttcctaacacagaaaatagtaggaaatttgtgttggaaataccgtattttttatactacagttatt

SEQ ID NO: 282448 - DNA, 201 bp, Homo sapiens; identical to SEQ ID NO: 57630

SEQ ID NO: 282449 - DNA, 201 bp, Homo sapiens
tggaatcctttaaagacaatcacaaaattacctttccctgcacacagatgaactctctttgatcaaatttgccttatgtattggctagtttttgttctttmagcattactgagagattgtggctgtggaagaataaaccacacttttattccatttcattcattatctgtgaaattgcctggcaagttctgatgcaagaat

SEQ ID NO: 282450 - DNA, 201 bp, Homo sapiens; identical to SEQ ID NO: 57633

SEQ ID NO: 282451 - DNA, 201 bp, Homo sapiens
ttattatttacagaacagattccattataatgaactctagagtattacttgtattcctgctagtgatttggaagtaactctttgttgaacagatatgtctrtgtggtggtattagtgtttatgttgaagaaaaagtgcaaagcaaaaacaaaagaaacccccataacagaaactttcttcaagctattgcgttttactgtt

SEQ ID NO: 282452 - DNA, 201 bp, Homo sapiens
tcccacacaaccactttatggtggagatatcatcgtccccaccttgcagactgagaaactgcatctttggaataagatgtacccaatatttcacttgtaartggcagaaccagggctagaagccgggtctgtgtgactgagtagcccattctctttggagtacatctcacagcctcattttaatcatcttcttcctaaagg

SEQ ID NO: 282453 - DNA, 201 bp, Homo sapiens
tcacgaccttcccttgccctgatatgtatatggaggctgtggctttttcctttttcatcctcaggttgttttggggagaccttaagtctgttgagagcaaygagcttaaaattcaagtgattgaggggcttgagtaggaagggaataggtctgacaggtggacagaggcatgggaggaggtaggggcttgaaagcagacat

SEQ ID NO: 282454 - DNA, 201 bp, Homo sapiens
gctctcatcttttctccactttgttcctggcagttgggataaaattaaggttacctgtgtaccaatatttgtggagacgaccttcacgaccttcccttgcyctgatatgtatatggaggctgtggctttttcctttttcatcctcaggttgttttggggagaccttaagtctgttgagagcaacgagcttaaaattcaagt

SEQ ID NO: 282455 - DNA, 201 bp, Homo sapiens
agacaacttgtgaggaacttttcctcagcctgaccttgcctgaggctaaatatgtgtataccaggtggtgtgcgtgaacactgtagacagatattcatgaytggatttcttttattcatacttttgaaaacttttttttttaggcaacctcccgacttctagtaaattacccagagccctatcgttctcagatattggatt

SEQ ID NO: 282456 - DNA, 201 bp, Homo sapiens
gggttctgagaacagggctcacgagtccagggattcatatccagcgttgaaaagctgaaagttgaggtaatcagaacttaaagttggacatggggatttgmaaactacagagagatcaaaagcccagaagcatgaatactgggaatttttagttatatgaggtgataacatttctctcagtactgcttgtaacagaaggtt

SEQ ID NO: 282457 - DNA, 201 bp, Homo sapiens
tgctcataaatgtactatcataaagataataagagctgagatttattgtttaccatgtgccaggcactgagctaagtagaatggcaacattcggaggaagktgtaattttttctttcactgtcagtgaccagtaagtcacaccttatagatgcctcccttcttccacccgctgcaccctactccagcatcactttaactga

SEQ ID NO: 282458 - DNA, 201 bp, Homo sapiens
actgatggttactgtttttccaacttaagggtaggagcttcatatggctttgaagtgatattctattcatggcaacaaaacacaaaaactaaggttaattrtttttcttctggctgggcagaggctccttaatgaaaaccttaaggaagcaatgaggtagaagcagatgttttgactccagcagtcatgtctgaagagctg

SEQ ID NO: 282459 - DNA, 201 bp, Homo sapiens
tttggaatgagaggtcatataatgccaattatattaaggtgtgtacaactttagtatctttttgtttttaactttttagtgaataattccttatggttccwaacacagaaaatagtaggaaatttgtgttggaaataccgtattttttatactacagttatttattttgctggttgtgacataaaattcaagcaaaatctt

SEQ ID NO: 282460 - DNA, 201 bp, Homo sapiens
aaggtgtgtacaactttagtatctttttgtttttaactttttagtgaataattccttatggttcctaacacagaaaatagtaggaaatttgtgttggaaayaccgtattttttatactacagttatttattttgctggttgtgacataaaattcaagcaaaatcttaacaatgtttatattcctgatattaaagcatatgt

SEQ ID NO: 282461 - DNA, 201 bp, Homo sapiens
atagaaagacacgcttgtcttgaacttgtctaaacagaggtttatataaactaatccattatcatgtatagttgtaatcaaggaaatgatttcacattgayggttttttaggtagggataagtaaaagcactgcagcagtttctgagggaatgtcttccctgtggttcctcatacttagtacaatgcctggaacgtagcag

SEQ ID NO: 282462 - DNA, 201 bp, Homo sapiens
cagatgcttagattcattatctacctggaagctacccaactgttttaaaatagaaaaccttggagaagactcgtatttttatatactcaacaaatctataygtatataagtgccacgtcgtgaccttttttcattgacttccaccctttttttttctagggctcattatcctggaacccattcagcaaaagatgcaaagtt

SEQ ID NO: 282463 - DNA, 201 bp, Homo sapiens
aggaaaataatcccaaacactggttttgtatttcatgatattctgttggcacacactctctttgtaccacttcaggccctatattaatttgtttagtactrcaaaccaaatccaacatagctgcacatttgtggtctaactgaaacaaatttgagtgaaagttctgaccacagatatctgactgatgtttaggctgttcat

SEQ ID NO: 282464 - DNA, 201 bp, Homo sapiens
ttgtggcttgtgtttttacacagaatttctgcttgtcccattgtctctgaggtggaaactttacctagattttccgattatggcagtggagttcttggcakccttatttgtgactgatggtcttattttaagtccagtggctgggtttaagtgtccaaggcctgggtcccattgttttgatctccagttttgaagtcgccg

SEQ ID NO: 282465 - DNA, 201 bp, Homo sapiens
agaggatgtgatgaattactcagccatgcttttttgtcttttctttacagagtgaaataccagagctacaggtatggtataccaaacttggaaaaacatcygaaagatttctttttaagcagctggattctctatgggtaattttaaagtaaattcttatattttgggtattccaacagtaaaacagtaaaagggcacaga

SEQ ID NO: 282466 - DNA, 201 bp, Homo sapiens
tgaatatgtgctcataaatgtactatcataaagataataagagctgagatttattgtttaccatgtgccaggcactgagctaagtagaatggcaacattckgaggaaggtgtaattttttctttcactgtcagtgaccagtaagtcacaccttatagatgcctcccttcttccacccgctgcaccctactccagcatcact

SEQ ID NO: 282467 - DNA, 201 bp, Homo sapiens
ttggcccagtgctttgagttttgagctcttcaccttctgagagtagctagttttatatgattgactgtagttagtatgctgtgaatatgtgctcataaatrtactatcataaagataataagagctgagatttattgtttaccatgtgccaggcactgagctaagtagaatggcaacattcggaggaaggtgtaatttttt

SEQ ID NO: 282468 - DNA, 201 bp, Homo sapiens
tatatatatatatatagtacctgatatgtggtaagcacttaatgagtcaagttaatatttttaggagtaggagtgtttggaaccagacagaccagcattcrtatttcctcactaacacatgctgagacttctagcaagttattccacctctttgagtatccatttccttatctgcaaaatggagataacttctgtgaggtt

SEQ ID NO: 282469 - DNA, 201 bp, Homo sapiens
catgctccttgatgccgaactcttcaaggtggttgatgttatagggtaaggcatgttttacttggaaaactagcagtttctgattgcttgctctgtgtatygactatctttttcttgccttctccccatttgattacattctcagaaggtagctctcctgtattcacttacctgaagcatgcatggctcatagttcattat

SEQ ID NO: 282470 - DNA, 201 bp, Homo sapiens
tctaaactccttaaattgtcctccaaaaaatataagaaaattaaggttagacttgtatattggacttgtatattctaatattgagaattatatgagaaaaytaaggttagacttgtatattggacttgtatattctaatattgagaattatatgagaaaattaaggttagacttgtatatcagcgccttgaatgttgaaat

SEQ ID NO: 282471 - DNA, 201 bp, Homo sapiens
gggatttgaaaactacagagagatcaaaagcccagaagcatgaatactgggaatttttagttatatgaggtgataacatttctctcagtactgcttgtaayagaaggttgtggttttattaagacttttacaatgcttaagataataaaaaaaggatgaaatgatatgcttttatcatccatcctttagttgtgtaagatt

SEQ ID NO: 282472 - DNA, 201 bp, Homo sapiens
gtaaggcactcaaatcctagacacgaactaaccacagaacgctcttccccgctttaataaattgaaacatgatctcatttccttcgttttcaatgcttttyatagaaagacacgcttgtcttgaacttgtctaaacagaggtttatataaactaatccattatcatgtatagttgtaatcaaggaaatgatttcacattga

SEQ ID NO: 282473 - DNA, 201 bp, Homo sapiens
gcagtatgataatctattaatactcggcatactctgaacttacagaataagtaccactctatacttcctcattaatgactatcattttacatgagcttctwctacaatcacagtgagagaacagattgctacatgtttgctaaatacattcagtaaggcactcaaatcctagacacgaactaaccacagaacgctcttccc

SEQ ID NO: 282474 - DNA, 201 bp, Homo sapiens
atttttttttttaaactgtcacttttttttttcatttcatcataaatttattttcaggcagtatgataatctattaatactcggcatactctgaacttacmgaataagtaccactctatacttcctcattaatgactatcattttacatgagcttcttctacaatcacagtgagagaacagattgctacatgtttgctaaa

SEQ ID NO: 282475 - DNA, 201 bp, Homo sapiens
caggagatttttttttttaaactgtcacttttttttttcatttcatcataaatttattttcaggcagtatgataatctattaatactcggcatactctgarcttacagaataagtaccactctatacttcctcattaatgactatcattttacatgagcttcttctacaatcacagtgagagaacagattgctacatgttt

SEQ ID NO: 282476 - DNA, 201 bp, Homo sapiens; identical to SEQ ID NO: 57663

SEQ ID NO: 282477 - DNA, 201 bp, Homo sapiens
ttacccattttttagtgaagctccaaactttgctgatcaaactggtgtatttgaatattttacaaatattgaagaccctggcgagcatcacttcacgctaygccaagttctcaaccagagacccattacgtgggctgccgatgcatccaacacaatcagtattataggagactacaactggtaagattgatgttctcaatg

SEQ ID NO: 282478 - DNA, 201 bp, Homo sapiens
tggtctttgcagaaaaataattttagatcttttcttctggagttttaaagttttgttagatttaaatgtaaaagttggccccggaatagcttatgttctcycaaaggctcctagcatgccttcattgcctctctttgttgatggaagtttgaataaacattttccctcagaattgtgtggaactttttactttttaatgtg

SEQ ID NO: 282479 - DNA, 201 bp, Homo sapiens
acagattacccattttttagtgaagctccaaactttgctgatcaaactggtgtatttgaatattttacaaatattgaagaccctggcgagcatcacttcaygctacgccaagttctcaaccagagacccattacgtgggctgccgatgcatccaacacaatcagtattataggagactacaactggtaagattgatgttct

SEQ ID NO: 282480 - DNA, 201 bp, Homo sapiens
caactctgtggtctttgcagaaaaataattttagatcttttcttctggagttttaaagttttgttagatttaaatgtaaaagttggccccggaatagcttrtgttctcccaaaggctcctagcatgccttcattgcctctctttgttgatggaagtttgaataaacattttccctcagaattgtgtggaactttttacttt

SEQ ID NO: 282481 - DNA, 201 bp, Homo sapiens
cttctgaaggatttgatactaaacagagaatttcttacattctgaacagattacccattttttagtgaagctccaaactttgctgatcaaactggtgtatytgaatattttacaaatattgaagaccctggcgagcatcacttcacgctacgccaagttctcaaccagagacccattacgtgggctgccgatgcatccaac

SEQ ID NO: 282482 - DNA, 201 bp, Homo sapiens
agaaggtagctctcctgtattcacttacctgaagcatgcatggctcatagttcattattttctcttttaaatatattttaggatctttctatgacaaacawgtattgatagcttttaaaaagcatgttgatgtttggaataataaaacagggctttgttttagattaaggggcagagtaatacctgtatttaattttagaa

SEQ ID NO: 282483 - DNA, 201 bp, Homo sapiens
agaagccctccaggtgatttcagtgctgttcaggtgtgagaagccctcctagagagtcaactctgtggtctttgcagaaaaataattttagatcttttctyctggagttttaaagttttgttagatttaaatgtaaaagttggccccggaatagcttatgttctcccaaaggctcctagcatgccttcattgcctctcttt

SEQ ID NO: 282484 - DNA, 201 bp, Homo sapiens
acctggtcctgaatacagtagtgtcttctttttcagctccttgacagcgatggcagtttcacactgagcctgcatgaagatgagctgttcacactcaccastctcaccactggtcgcaaaggcagctacccgcttcctccaaaatcccagcccttcccaagtacctataaggatgatttcaatgttggtgagtatttttca

SEQ ID NO: 282485 - DNA, 201 bp, Homo sapiens
ggcgggccgcgccgcggtgcccttgctgctgtgtgcgctgctggcgcccggcggcgcgtacgtgctcgacgactccgacgggctgggccgggagttcgackgcatcggcgcggtcagcggcggcggggtgagcggcaagctgcggggatacgcggggggcggcaagagcccgccccgtggggccagccccacaagcccccg

SEQ ID NO: 282486 - DNA, 201 bp, Homo sapiens
agactgctgtggatcagtgagcctagaaccaggattttattgcttccttatagacagatacttcataggggaaaatggtcctccaagtggcattcctggaygagcagcatcagcatcacctgggaacttgttagacatgcacattcaaggggctgccccagatgtactgaatcacgctgtggggtagggccagtgaactga

SEQ ID NO: 282487 - DNA, 201 bp, Homo sapiens
aagccacataattctagatctcattccccccagcccatttccagaatggatttcttggtgtttccagttttatgtgagatatattgcttgatttatgactkggttatgtgcaggctttctttttcttcccacttgcagttagatactgagtaggaagtgaaatattttcagagatcatgttggtttggggtggttgtagca

SEQ ID NO: 282488 - DNA, 201 bp, Homo sapiens
taagggatgtaagtaccagtgttgattgccagtggtttcatgctggtgataatctatggagagaaaactccctctgatgtcagaggacatacaagagagamtgggcttgagttacttagcatttatcttcctgtaaagtagtccagctctgcttagataattaagtgtggattgtcctccctgtgtagctgatgtaggtac

SEQ ID NO: 282489 - DNA, 201 bp, Homo sapiens
ccactaagtagtgggccatacatgatcaagaaacagacttcagaggaccattttcatatggtttcaaggaatgtgtttctttctactctagggtcatttcrcctctggcatgctgaatgacaagtctctgtggacagacatccctgtgaattttccaaagaatggctgggctgcaattggaactcactcctttgaatttgc

SEQ ID NO: 282490 - DNA, 201 bp, Homo sapiens
ctttcatatgttctgtttcttactccaaaagatattaagaaaaatgctgaattatcaaggtctccagcgagtgaaaatcatagcaagtgataatctctggragtccatctctgcatccatgctccttgatgccgaactcttcaaggtggttgatgttatagggtaaggcatgttttacttggaaaactagcagtttctgat

SEQ ID NO: 282491 - DNA, 201 bp, Homo sapiens
acatttacatttttatcacaagttgtcttggtgtttcttttttatcaaatcttttagcacaatcgcatggaatttagtggctagttactatgaacagttgscttatgggagatgcgggttgatgacggcccaagagccatggagtgggcactacgtggtagaatctcctgtctgggtatcaggtatggttcagttccatct

SEQ ID NO: 282492 - DNA, 201 bp, Homo sapiens
aactggtgtatttgaatattttacaaatattgaagaccctggcgagcatcacttcacgctacgccaagttctcaaccagagacccattacgtgggctgccratgcatccaacacaatcagtattataggagactacaactggtaagattgatgttctcaatgtggatctggctgaaatacccttgtaatattgtcaggtac

SEQ ID NO: 282493 - DNA, 201 bp, Homo sapiens
atacttaggaaaaaaagattccaagggccttgatattggtgagttttccacaaatgtttaggaagttctaacagaaatgatttggacttttctttaagctratttttttaaagctattttgtccacatgagatgagctatagtacctggtcctgaatacagtagtgtcttctttttcagctccttgacagcgatggcagtt

SEQ ID NO: 282494 - DNA, 201 bp, Homo sapiens
gttgaaatatatattgatcataaaatgagcaggatttttctctcttaattgtaaaaggatttctgtgattaacagctgggtcgacagtgatattttatgartttttttaccttagtaaattactgagagaaaaaagcaggtctcttagttgcatgtatcgaatatatccaagctttaaggagcttactgtgtagtggaaaa

SEQ ID NO: 282495 - DNA, 201 bp, Homo sapiens
atgcagggcagttaaatagcttgtccagggcgacagactgaactcgaatttgaatctaggtcttacttcaaaactcatgacctttcctctacaccagatgyctggattaaatattatgcagcatctatatgtcgaactcatcatcttgatatttagtaatgatgatacaaaaattaatgtatctttattagacctaggccc

SEQ ID NO: 282496 - DNA, 201 bp, Homo sapiens
tccttttattcaaaatagaaaaaaactgttcaaatttcataaaaggattccagtgtcttcagagatctacatttagcatagaacaactttgatactgggarcgttttccattggtcacacactaggcttagcactttaaaagcattatctggtttaatcctcacagcagtctatgaggtatgtattttttcctcattttgt

SEQ ID NO: 282497 - DNA, 201 bp, Homo sapiens
ctctcctggatttcagaaactgcctcttgtttttccagtctgactttccaggtcacccatcacactgctacagagtgaaatgtcaaaaatgcagatctgayttttgtgaccactgtgctcagaggacctcagtgattattttcttagaagttaacattccttagtgtagcacatggccctcattatcctcccagaaggtag

SEQ ID NO: 282498 - DNA, 201 bp, Homo sapiens
gtgtagtttggtcagtgttccatgtgcgcttgaaaagaatgtgcatcctgctgttgctagatggaggcatttatagatggcatgttgtttggtagtgttgwtcaaatctcttatatccttgctgattgtccatctagttgtactatcaattactaagagatggatattgaaatctctgattatgaaagtaattttttaatg

SEQ ID NO: 282499 - DNA, 201 bp, Homo sapiens
tctttcacatgaacatgtctattcatacagtttgctaagtaagaaatgaccactaagatctggagaccaatagattctgggacttcatagttttcaagatwtttgtgctgtttttcatccttcagatataaagaatgttgactgtataaaagctgaatttttttccgggggtcagcaacggacattaaagaaactgtgtgt

SEQ ID NO: 282500 - DNA, 201 bp, Homo sapiens
tagggctcattatcctggaacccattcagcaaaagatgcaaagttgactgggaagaagctttggtcttctgaagactttagcactttaaatagtgacatgrgtgcaggctgctggggtcgcattttaaatcagaattatatcaatggctatatgacttcgtaagttattaaaaaccttttagagttcttatcaaaaaaaat

SEQ ID NO: 282501 - DNA, 201 bp, Homo sapiens
cacagaaatgtcattaattaagaatttttatttttataagtttgtgtgtttatagatgtgtttagctcttagacatttagtttgtcttggtggatggtgaygccatcacctggtttcccaggttggaaatttaagtcccatttgagactctctgtctttcccactcaccctctgtatcccgccagtggtcaagtatagaca

SEQ ID NO: 282502 - DNA, 201 bp, Homo sapiens
agttgtgactatttagtaaacagtgatggcaatgtgagaactatgttacatatatttagctgaccttagtgtgtatttgatatctatatatactatatatrcacacacccatacatatatatatatattttttacttcttacatgagaacgaaagttatatttagatgagatgtcttttcagtgaaaacatccttactttt

SEQ ID NO: 282503 - DNA, 201 bp, Homo sapiens
tctatactgttcaccctctgaggctgcctcggaggaagatctctgaggtaggaatgttttgaggacacctgtgccagtaggtcttgaagtacaacatcacwaactacactggaatattcttcaggctgaatagatgaataactcccaagatttaataactgactgctaaatgttgattgtagtactgtctcgccaacccat

SEQ ID NO: 282504 - DNA, 201 bp, Homo sapiens
atcaactgatgagtggataaaggaaatatatatataccatatatatatggtgtgtgtgtgtgtgtgtgtgtgtgtgtatatatatatggtgtgtgtgtatrtatatatatatggtgcgtgtatatatatatggtgtatgtatatacatatacacacacacatcatgaaatactcttcagcatagaaagaatgaaataatgc

SEQ ID NO: 282505 - DNA, 201 bp, Homo sapiens
atgtagcacaattcacaattgaaacatatggaatcaacctaagtgcccatcaactgatgagtggataaaggaaatatatatataccatatatatatggtgtgtgtgtgtgtgtgtgtgtgtgtgtatatatatatggtgtgtgtgtatatatatatatatggtgcgtgtatatatatatggtgtatgtatatacatataca

SEQ ID NO: 282506 - DNA, 201 bp, Homo sapiens
attaatattttaaggaccctaaattgtaagaagatgtacaattgaatgataaatttgtgttatacataactcaaaggagtagtttggcataagccttttakaattctttgatttgacctcaaagaacagaagttgaatattgaacattccaacagtgagtggacatgttaagttaaaacatatggtacatttctttctatt

SEQ ID NO: 282507 - DNA, 201 bp, Homo sapiens
tttatgtagcacaattcacaattgaaacatatggaatcaacctaagtgcccatcaactgatgagtggataaaggaaatatatatataccatatatatatgrtgtgtgtgtgtgtgtgtgtgtgtgtgtatatatatatggtgtgtgtgtatatatatatatatggtgcgtgtatatatatatggtgtatgtatatacatat

SEQ ID NO: 282508 - DNA, 201 bp, Homo sapiens
gtttatgtagcacaattcacaattgaaacatatggaatcaacctaagtgcccatcaactgatgagtggataaaggaaatatatatataccatatatatatggtgtgtgtgtgtgtgtgtgtgtgtgtgtatatatatatggtgtgtgtgtatatatatatatatggtgcgtgtatatatatatggtgtatgtatatacata

SEQ ID NO: 282509 - DNA, 201 bp, Homo sapiens
tactataactggctacttctatcttgatagtgagcattggttggaatcctttaaagacaatcacaaaattacctttccctgcacacagatgaactctcttkgatcaaatttgccttatgtattggctagtttttgttctttaagcattactgagagattgtggctgtggaagaataaaccacacttttattccatttcatt

SEQ ID NO: 282510 - DNA, 201 bp, Homo sapiens
ttggttccatatgaattttaggattgttttttctaattctgtgaaagatgatgttggtattttgataggaattacactgaatatgtagattgctttgggcwttgtggtctcattttcacaatattgattcttccaatccatgagcatgggatgtatttccatgtgtttgcatcatctattatttctttcagccatgttttg

SEQ ID NO: 282511 - DNA, 201 bp, Homo sapiens
tctggggaaaggtttcaaagaacgaattggcccaaacaagcacattatttcacttaattgacacaagtctaccactttttctggttattattaatgttctsataaccaactagtcactaacagtgataaaacaccttattatatattaagttctgaaaaaaaagttcatactttttgtgtaacaaattgctaggaatggca

SEQ ID NO: 282512 - DNA, 201 bp, Homo sapiens
tgttttgagtagaatttcctctcttatacctagatttagtaatttaccagcacagtaatttgattatatgggatagattgtactataactggctacttctrtcttgatagtgagcattggttggaatcctttaaagacaatcacaaaattacctttccctgcacacagatgaactctctttgatcaaatttgccttatgta

SEQ ID NO: 282513 - DNA, 201 bp, Homo sapiens
ttatcaaggtctccagcgagtgaaaatcatagcaagtgataatctctgggagtccatctctgcatccatgctccttgatgccgaactcttcaaggtggttratgttatagggtaaggcatgttttacttggaaaactagcagtttctgattgcttgctctgtgtattgactatctttttcttgccttctccccatttgatt

SEQ ID NO: 282514 - DNA, 201 bp, Homo sapiens; identical to SEQ ID NO: 57647

SEQ ID NO: 282515 - DNA, 201 bp, Homo sapiens
agtgctattttagtaaatctgctctcaatgagtgcacactactcacagtttttagacttgtgttttgagtagaatttcctctcttatacctagatttagtmatttaccagcacagtaatttgattatatgggatagattgtactataactggctacttctatcttgatagtgagcattggttggaatcctttaaagacaat

SEQ ID NO: 282516 - DNA, 201 bp, Homo sapiens
tagatattaaccccttgtctcatgtataatttgcaaatatttcctcccattttgtaggctgttttactttgtttcttttgctgtgcaaaagcttttcagtytgatgtcatcccctttgtctatttttgcgttgtctgtgcttttgaggtcttatttaaaaaattcttgcccagctcattgtcataaagcactttccctttg

SEQ ID NO: 282517 - DNA, 201 bp, Homo sapiens
cagggctagaagccgggtctgtgtgactgagtagcccattctctttggagtacatctcacagcctcattttaatcatcttcttcctaaaggtaggaaatgrgaaatttgtttagtttatctgtagtgctattttagtaaatctgctctcaatgagtgcacactactcacagtttttagacttgtgttttgagtagaatttc

SEQ ID NO: 282518 - DNA, 201 bp, Homo sapiens
aatttttttaccttagtaaattactgagagaaaaaagcaggtctcttagttgcatgtatcgaatatatccaagctttaaggagcttactgtgtagtggaaragaataggctaatagaaatagattttgagattatttagtccttccttccatgaagtaaggttgtttaaaattataaagcataattttataaagttttcta

SEQ ID NO: 282519 - DNA, 201 bp, Homo sapiens
ccactttatggtggagatatcatcgtccccaccttgcagactgagaaactgcatctttggaataagatgtacccaatatttcacttgtaagtggcagaacmagggctagaagccgggtctgtgtgactgagtagcccattctctttggagtacatctcacagcctcattttaatcatcttcttcctaaaggtaggaaatgg

SEQ ID NO: 282520 - DNA, 201 bp, Homo sapiens
atagtaggcactttgatggatttcccacacaaccactttatggtggagatatcatcgtccccaccttgcagactgagaaactgcatctttggaataagatktacccaatatttcacttgtaagtggcagaaccagggctagaagccgggtctgtgtgactgagtagcccattctctttggagtacatctcacagcctcatt

SEQ ID NO: 282521 - DNA, 201 bp, Homo sapiens
acatatggaatcaacctaagtgcccatcaactgatgagtggataaaggaaatatatatataccatatatatatggtgtgtgtgtgtgtgtgtgtgtgtgtrtatatatatatggtgtgtgtgtatatatatatatatggtgcgtgtatatatatatggtgtatgtatatacatatacacacacacatcatgaaatactctt

SEQ ID NO: 282522 - DNA, 201 bp, Homo sapiens
tgcagtgactctctcctgctacctgtgttttccacttctaggcttgatttccaagaccgtttataatttggtctcatctactatgtgttattttccagtaytccaccctctatttgaggcagccagatctgctcagagatccacacaaatcccttgttcatttctgttgtctggctgctgtgcccacttattgtgggaaaa

SEQ ID NO: 282523 - DNA, 201 bp, Homo sapiens
tattcccctgctcaggaagatgcagtgactctctcctgctacctgtgttttccacttctaggcttgatttccaagaccgtttataatttggtctcatctaytatgtgttattttccagtactccaccctctatttgaggcagccagatctgctcagagatccacacaaatcccttgttcatttctgttgtctggctgctgt

SEQ ID NO: 282524 - DNA, 201 bp, Homo sapiens
aaaggcctgccttcatctttctgaagccctgttttcatcatgttattcccctgctcaggaagatgcagtgactctctcctgctacctgtgttttccacttmtaggcttgatttccaagaccgtttataatttggtctcatctactatgtgttattttccagtactccaccctctatttgaggcagccagatctgctcagag

SEQ ID NO: 282525 - DNA, 201 bp, Homo sapiens
tggtcaagtatagacagttgtatccacacatttctcttactcactccttattctccattaccaccgttacttcttgtttcagttcttcattatcgctctcytggatttcagaaactgcctcttgtttttccagtctgactttccaggtcacccatcacactgctacagagtgaaatgtcaaaaatgcagatctgatttttg

SEQ ID NO: 282526 - DNA, 201 bp, Homo sapiens
cataaataaaataaaaattaaagaggaagtaggtagtaaggatattagaacaagagttacatattcatagcattaccaatctgaacttacctcagtgataytgaaatcgaaaacatagaaccagtgaggttaattgagtggcctaatgactcaaagctagttagtggcagaactggaactaggaatttaaatctgtgtctg

SEQ ID NO: 282527 - DNA, 201 bp, Homo sapiens
aataagtaccactctatacttcctcattaatgactatcattttacatgagcttcttctacaatcacagtgagagaacagattgctacatgtttgctaaatrcattcagtaaggcactcaaatcctagacacgaactaaccacagaacgctcttccccgctttaataaattgaaacatgatctcatttccttcgttttcaat

SEQ ID NO: 282528 - DNA, 201 bp, Homo sapiens
tctactctagggtcatttcgcctctggcatgctgaatgacaagtctctgtggacagacatccctgtgaattttccaaagaatggctgggctgcaattggamctcactcctttgaatttgcacagtttgacaactttcttgtggaagccacacgctaatacttaacagggcatcatagaatactctggattttcttcccttc

SEQ ID NO: 282529 - DNA, 201 bp, Homo sapiens
aaacatatggaatcaacctaagtgcccatcaactgatgagtggataaaggaaatatatatataccatatatatatggtgtgtgtgtgtgtgtgtgtgtgtrtgtatatatatatggtgtgtgtgtatatatatatatatggtgcgtgtatatatatatggtgtatgtatatacatatacacacacacatcatgaaatactc

SEQ ID NO: 282530 - DNA, 201 bp, Homo sapiens
ctcatcttaggaagagtctctttcaccattaagtgtgaagttagttctagagttttctttctttttttcttttttagattccctttagggaatttttttcmtacttcctgcttgcttatgaatgagtactgaatgttaaatgctttttttctacatctaatgagatagttatactatcttctttattacgttaatgtgata

SEQ ID NO: 282531 - DNA, 201 bp, Homo sapiens
ttttgatgctattgtaaatagtgtttattatttgttactcatacatagaaatacagttggtttttgtatattgacctgcaatccagctgccttgcgaaatycactttttagtttagctttttttgggtaaattctttagaattttctacatatataattatgtcatctgtgaatatagacaattctgcttcttccttttca

SEQ ID NO: 282532 - DNA, 201 bp, Homo sapiens; identical to SEQ ID NO: 57656

SEQ ID NO: 282533 - DNA, 201 bp, Homo sapiens; identical to SEQ ID NO: 57657

SEQ ID NO: 282534 - DNA, 201 bp, Homo sapiens; identical to SEQ ID NO: 57658

SEQ ID NO: 282535 - DNA, 201 bp, Homo sapiens; identical to SEQ ID NO: 57659

SEQ ID NO: 282536 - DNA, 201 bp, Homo sapiens
attgtggttttgatttgcatttccctgatgattagtgatgttgagtattttttcatgtacccattggccatttgtatgtcttcttctgagaaatgtctatwacagtcttttgcccaattttaaactgggctattttgttgtcgttgtttaagttctttacatagtctagatattaaccccttgtctcatgtataatttgca

SEQ ID NO: 282537 - DNA, 201 bp, Homo sapiens
aaaaagccatagacaatggatgtggctgtgtttcagtaagattttatttattaaaaaaagggcggttggcatgtaggtcatagtttgctgagccctatccygagataataaacttgtaaataagtttataaatgattatgaagaaaaaatagagtcatgagataaagtagctctgttaccctgattctctaaccagggagg

SEQ ID NO: 282538 - DNA, 201 bp, Homo sapiens
gatcatatggtagttctacttttaattttttttttttttttttgaggcagaatcttactctgcacttccaggctggagtacagtggtgcaatcttggctcrctgcaacctctgcctcctgggttcaagtgattcttctgcctcagcctcccaagtggctgggattacaggcgtctgccaccacacctggctcatttttgta

SEQ ID NO: 282539 - DNA, 201 bp, Homo sapiens
attcttctaggacaggggttggcaactttttctgtaaagggccagatagtaaatattttagacttcgtgggccatgtggtctctgctgtggctacccagtwcggctattgtaatgagtaaaaaagccatagacaatagacaataatgagaaaaaaagccatagacaatggatgtggctgtgtttcagtaagattttattta

SEQ ID NO: 282540 - DNA, 201 bp, Homo sapiens
tggtccattttctttcttaactggggttatatgtgtgtccaacttgattctcttgcattttaatatccagttgtccctgcactattttttgaaaagactaytcctttttcattgaattgtcttggcatccttgttgaaaatcaattggcaataaatttgagggtttatttctagaacctcaatttttttctgttgacctat

SEQ ID NO: 282541 - DNA, 201 bp, Homo sapiens
ctaatgactcaaagctagttagtggcagaactggaactaggaatttaaatctgtgtctgcagtccctattgtctgttttaaaccgcctacttgaaattttrtcctggggttctcataggcattcaaataacactaattccaaaaattaacttactattttctccctctaagttaatactattaccatgtgaccaattagac

SEQ ID NO: 282542 - DNA, 201 bp, Homo sapiens
gactttcgtcttaccttaatttaaaaatatctcttttatagttttctgctctttgctttgactccataaataaaataaaaattaaagaggaagtaggtagyaaggatattagaacaagagttacatattcatagcattaccaatctgaacttacctcagtgatattgaaatcgaaaacatagaaccagtgaggttaattga

SEQ ID NO: 282543 - DNA, 201 bp, Homo sapiens
ataattttagatcttttcttctggagttttaaagttttgttagatttaaatgtaaaagttggccccggaatagcttatgttctcccaaaggctcctagcatgccttcattgcctctctttgttgatggaagtttgaataaacattttccctcagaattgtgtggaactttttactttttaatgtgttcatagacaatagtg

SEQ ID NO: 282544 - DNA, 201 bp, Homo sapiens
tttgattattgtgtctgcataggagacttcctggaagaatgcatagcaaaataatggtggttatttcagggtagtaccatttgattatttttgtttcattmccccccccccatatttctatggttaaacgtaattttaaagtcaaagtgaaaatcctctaaaacattttaccccttgtgttttttttttctttttacattc

SEQ ID NO: 282545 - DNA, 201 bp, Homo sapiens
atttgattattgtgtctgcataggagacttcctggaagaatgcatagcaaaataatggtggttatttcagggtagtaccatttgattatttttgtttcatycccccccccccatatttctatggttaaacgtaattttaaagtcaaagtgaaaatcctctaaaacattttaccccttgtgttttttttttctttttacatt

SEQ ID NO: 282546 - DNA, 201 bp, Homo sapiens
tttagcatccaattgttggatgctaaatgtagcataccacaacttatctgtgtattattttttaatggtcatttagactgtttccaattttgggctattgsaattttgttcaggagatatttcttggctcacatcttcataggaagactattcctccctgcctcattcatgttgtgcttggcctgtgctatatctgcagat

SEQ ID NO: 282547 - DNA, 201 bp, Homo sapiens
aataagatacagtccatgtccttaaggaactaagaggtgagtcagaaaaataaaggagtgccggggttcaaagtgttgtaataaagatatggacctggtgycaaaggagaggcgcttacatcaaatcagtgagcagggccagaaggcatccttccttcaaattccagaggtggaatttgagctgaaaggtgaattggagtt

SEQ ID NO: 282548 - DNA, 201 bp, Homo sapiens; identical to SEQ ID NO: 57622

SEQ ID NO: 282549 - DNA, 201 bp, Homo sapiens
gaaaggcctgccttcatctttctgaagccctgttttcatcatgttattcccctgctcaggaagatgcagtgactctctcctgctacctgtgttttccactwctaggcttgatttccaagaccgtttataatttggtctcatctactatgtgttattttccagtactccaccctctatttgaggcagccagatctgctcaga

SEQ ID NO: 282550 - DNA, 201 bp, Homo sapiens
ccgcgccgcggtgcccttgctgctgtgtgcgctgctggcgcccggcggcgcgtacgtgctcgacgactccgacgggctgggccgggagttcgacggcatcsgcgcggtcagcggcggcggggtgagcggcaagctgcggggatacgcggggggcggcaagagcccgccccgtggggccagccccacaagcccccgcggcgt

SEQ ID NO: 282551 - DNA, 201 bp, Homo sapiens
ggaagttgcaattttgcgtgtcaagaaaggcctgccttcatctttctgaagccctgttttcatcatgttattcccctgctcaggaagatgcagtgactctstcctgctacctgtgttttccacttctaggcttgatttccaagaccgtttataatttggtctcatctactatgtgttattttccagtactccaccctctat

SEQ ID NO: 282552 - DNA, 201 bp, Homo sapiens
tatgtgtataccaggtggtgtgcgtgaacactgtagacagatattcatgactggatttcttttattcatacttttgaaaacttttttttttaggcaacctyccgacttctagtaaattacccagagccctatcgttctcagatattggattatctctttaaggtaatgaaaacataattatttcatggtacctgtgatatt

SEQ ID NO: 282553 - DNA, 201 bp, Homo sapiens
actcaatcttatttctggctgggactccaaaaagattgagaagccccttaattgtagtatagaagtgagatatagcaccatccaaagatttactcccccaratcttcatatatttgaatcttcatatacatcttcacaatttaaatagcaatactcagtttttactaggatctattgcagtgggtaaggaggtggggatga

SEQ ID NO: 282554 - DNA, 201 bp, Homo sapiens
ttcatgactggatttcttttattcatacttttgaaaacttttttttttaggcaacctcccgacttctagtaaattacccagagccctatcgttctcagatrttggattatctctttaaggtaatgaaaacataattatttcatggtacctgtgatattttagaaattggatggtgaatttcaccatagaatttattagcct

SEQ ID NO: 282555 - DNA, 201 bp, Homo sapiens
ctaatttaggatgacatttgtggcttgtgtttttacacagaatttctgcttgtcccattgtctctgaggtggaaactttacctagattttccgattatggyagtggagttcttggcagccttatttgtgactgatggtcttattttaagtccagtggctgggtttaagtgtccaaggcctgggtcccattgttttgatctc

SEQ ID NO: 282556 - DNA, 201 bp, Homo sapiens
aatatatccaagctttaaggagcttactgtgtagtggaaaagaataggctaatagaaatagattttgagattatttagtccttccttccatgaagtaaggwtgtttaaaattataaagcataattttataaagttttctaaaatacttaggaaaaaaagattccaagggccttgatattggtgagttttccacaaatgttt

SEQ ID NO: 282557 - DNA, 201 bp, Homo sapiens
tgtgaagtgtgtgtctggggtgggggtggggagtgagatggtcctaggaagtaccattcatggatcattacttccgtttttgctctcctctattcagacgrcactgagccctcccacatgcattatgcactagatgagaattatttccgaggatacgagtggtggttgatgaaagaagctaagaagaggaatcccaatatt

SEQ ID NO: 282558 - DNA, 201 bp, Homo sapiens
ttctttcctaatttaggatgacatttgtggcttgtgtttttacacagaatttctgcttgtcccattgtctctgaggtggaaactttacctagattttccgrttatggcagtggagttcttggcagccttatttgtgactgatggtcttattttaagtccagtggctgggtttaagtgtccaaggcctgggtcccattgttt

SEQ ID NO: 282559 - DNA, 201 bp, Homo sapiens
tctatatttaacagtagtgtgttgatttctacctgtcaaactgggtgcatgatggagtggctgtcaaaagcacattcatttacctcctacatctcatatgyggtaaaaggagggctaattttttgcattactttatggtaaatctaaatttgaggaccctgtatttttcagtttcagaaaaaaatatagggttcattgtta

SEQ ID NO: 282560 - DNA, 201 bp, Homo sapiens
tttaaagagtactaatcaactgttttattttgcaggaccaatctgactataaagtgtgatgtttacatagagacccctgacacaggaggtgtgttcattgmaggaagagtaaataaaggtggtattttgattagaagtgccagaggaattttcttctggatttttgcaaatggatcttacagggttacaggtgatttaggt

SEQ ID NO: 282561 - DNA, 201 bp, Homo sapiens
ttgtgaagtgtgtgtctggggtgggggtggggagtgagatggtcctaggaagtaccattcatggatcattacttccgtttttgctctcctctattcagacrgcactgagccctcccacatgcattatgcactagatgagaattatttccgaggatacgagtggtggttgatgaaagaagctaagaagaggaatcccaatat

SEQ ID NO: 282562 - DNA, 201 bp, Homo sapiens
attctttcctaatttaggatgacatttgtggcttgtgtttttacacagaatttctgcttgtcccattgtctctgaggtggaaactttacctagattttccrattatggcagtggagttcttggcagccttatttgtgactgatggtcttattttaagtccagtggctgggtttaagtgtccaaggcctgggtcccattgtt

SEQ ID NO: 282563 - DNA, 201 bp, Homo sapiens
ctatatttaacagtagtgtgttgatttctacctgtcaaactgggtgcatgatggagtggctgtcaaaagcacattcatttacctcctacatctcatatgcrgtaaaaggagggctaattttttgcattactttatggtaaatctaaatttgaggaccctgtatttttcagtttcagaaaaaaatatagggttcattgttag

SEQ ID NO: 282564 - DNA, 201 bp, Homo sapiens
ccagagcccctggaacccttataacactatgaagagttattgaggtgcagtgaagaattctttcctaatttaggatgacatttgtggcttgtgtttttacrcagaatttctgcttgtcccattgtctctgaggtggaaactttacctagattttccgattatggcagtggagttcttggcagccttatttgtgactgatgg

SEQ ID NO: 282565 - DNA, 201 bp, Homo sapiens
attttacatgagcttcttctacaatcacagtgagagaacagattgctacatgtttgctaaatacattcagtaaggcactcaaatcctagacacgaactaascacagaacgctcttccccgctttaataaattgaaacatgatctcatttccttcgttttcaatgctttttatagaaagacacgcttgtcttgaacttgtct

SEQ ID NO: 282566 - DNA, 201 bp, Homo sapiens
tcccaagctctgacataagtcttaagaaacttttagttatccagagcccctggaacccttataacactatgaagagttattgaggtgcagtgaagaattcyttcctaatttaggatgacatttgtggcttgtgtttttacacagaatttctgcttgtcccattgtctctgaggtggaaactttacctagattttccgatta

SEQ ID NO: 282567 - DNA, 201 bp, Homo sapiens
tgagcttcttctacaatcacagtgagagaacagattgctacatgtttgctaaatacattcagtaaggcactcaaatcctagacacgaactaaccacagaaygctcttccccgctttaataaattgaaacatgatctcatttccttcgttttcaatgctttttatagaaagacacgcttgtcttgaacttgtctaaacagag

SEQ ID NO: 282568 - DNA, 201 bp, Homo sapiens
tacagaatttctatgtgctgacttattccacctgtcatgtgtttctttttcattttttcctataactagtatgattccactgtgggaaaagaaacacatamacattccaggtttagagctagtactagtaataccaagccaccaaaaagccatatccgaagcttggaaactggagagggaagagaaaagaattctgaaaag

SEQ ID NO: 282569 - DNA, 201 bp, Homo sapiens
gctaaatacattcagtaaggcactcaaatcctagacacgaactaaccacagaacgctcttccccgctttaataaattgaaacatgatctcatttccttcgytttcaatgctttttatagaaagacacgcttgtcttgaacttgtctaaacagaggtttatataaactaatccattatcatgtatagttgtaatcaaggaaa

SEQ ID NO: 282570 - DNA, 201 bp, Homo sapiens
atctggtaaagagacaagttatattattcacataaaatataatgccaaactaaaactttcccttcctcttttagttacagaatttctatgtgctgacttaytccacctgtcatgtgtttctttttcattttttcctataactagtatgattccactgtgggaaaagaaacacataaacattccaggtttagagctagtact

SEQ ID NO: 282571 - DNA, 201 bp, Homo sapiens
agggatctgctacatattgccttgactggtagatcatttctccagaagaaaggaagaaaccaaaaaacaaaaataatctttttaaacctcacaggattttyttagaaaaaagttttaattgaaattctctttgtaaaatgtatttaataaaaaatccaaagcaaaaaccctatcgtttatttacttcaaaagacaaatcat

SEQ ID NO: 282572 - DNA, 201 bp, Homo sapiens
ttaattaagaatttttatttttataagtttgtgtgtttatagatgtgtttagctcttagacatttagtttgtcttggtggatggtgacgccatcacctggyttcccaggttggaaatttaagtcccatttgagactctctgtctttcccactcaccctctgtatcccgccagtggtcaagtatagacagttgtatccacac

SEQ ID NO: 282573 - DNA, 201 bp, Homo sapiens
atggtcattccctggatggctgggaaaaggtttcgactggccttatgtcaatcttcagctgactgcctattatgtcgtgacctggattgtgggcgccaagygttaccatgatttggacattgattatattggagttagtaatatatttaaaatatgattcagttttggacatttgtttgtaatttagaaaataatttgatt

SEQ ID NO: 282574 - DNA, 201 bp, Homo sapiens; identical to SEQ ID NO: 57641

SEQ ID NO: 282575 - DNA, 201 bp, Homo sapiens
tccaccctttttttttctagggctcattatcctggaacccattcagcaaaagatgcaaagttgactgggaagaagctttggtcttctgaagactttagcaytttaaatagtgacatgggtgcaggctgctggggtcgcattttaaatcagaattatatcaatggctatatgacttcgtaagttattaaaaaccttttagag

SEQ ID NO: 282576 - DNA, 201 bp, Homo sapiens
tggttttaaattttggtggagcacaggaaatattgaggtattccttgtacgttgggaacgatttaagtaggtagataagaatttcttcctagagttttttyctgtattttaaacttttgctcaaacttgtggaattgtgttttgctgtggttaagtcttgagtgagtagtacatttgctccactaagtagtgggccataca

SEQ ID NO: 282577 - DNA, 201 bp, Homo sapiens
agcttttttctaaaactttataataatgcctgaaaagttttgcattttgttggttttaaattttggtggagcacaggaaatattgaggtattccttgtackttgggaacgatttaagtaggtagataagaatttcttcctagagtttttttctgtattttaaacttttgctcaaacttgtggaattgtgttttgctgtggt

SEQ ID NO: 282578 - DNA, 201 bp, Homo sapiens
gagcttttttctaaaactttataataatgcctgaaaagttttgcattttgttggttttaaattttggtggagcacaggaaatattgaggtattccttgtaygttgggaacgatttaagtaggtagataagaatttcttcctagagtttttttctgtattttaaacttttgctcaaacttgtggaattgtgttttgctgtgg

SEQ ID NO: 282579 - DNA, 201 bp, Homo sapiens
ctaggtaacttggagtgaaaacctgtgactttgagctttaatctattaagcctcagtgtttccatgcataaaataaaagaactaaattaaggcccattacrttatacttccaagacttaaaagcagatttattctggttcttggcccagtgctttgagttttgagctcttcaccttctgagagtagctagttttatatgat

SEQ ID NO: 282580 - DNA, 201 bp, Homo sapiens
gtctgtagtaataggaatgtggctctgaatttggagctaggtaacttggagtgaaaacctgtgactttgagctttaatctattaagcctcagtgtttccaygcataaaataaaagaactaaattaaggcccattacattatacttccaagacttaaaagcagatttattctggttcttggcccagtgctttgagttttgag

SEQ ID NO: 282581 - DNA, 201 bp, Homo sapiens
tcacatcctgttccttcttcttgaccccattctgtgtcttgtacttctgatacagccactcttcactattttagctgtttcttctggtgtgtctttaatayaatgtgattcattacttttaaaaattggctcttgtcttgctactaggatggataggactttgctggcttgcacccacctcactcccctactcctgttatt

SEQ ID NO: 282582 - DNA, 201 bp, Homo sapiens
tgaagtgtgtgtctggggtgggggtggggagtgagatggtcctaggaagtaccattcatggatcattacttccgtttttgctctcctctattcagacggcrctgagccctcccacatgcattatgcactagatgagaattatttccgaggatacgagtggtggttgatgaaagaagctaagaagaggaatcccaatattac

SEQ ID NO: 282583 - DNA, 201 bp, Homo sapiens
gggtgggggtggggagtgagatggtcctaggaagtaccattcatggatcattacttccgtttttgctctcctctattcagacggcactgagccctcccacwtgcattatgcactagatgagaattatttccgaggatacgagtggtggttgatgaaagaagctaagaagaggaatcccaatattacactcattggtaagaa

SEQ ID NO: 282584 - DNA, 201 bp, Homo sapiens
ctttggtcttctgaagactttagcactttaaatagtgacatgggtgcaggctgctggggtcgcattttaaatcagaattatatcaatggctatatgacttygtaagttattaaaaaccttttagagttcttatcaaaaaaaatttaaaaacataagagttagaaaaaaatggaattccttattcttccagcctagattcaa

SEQ ID NO: 282585 - DNA, 201 bp, Homo sapiens
aaaaacaaaacatcatcttctatgttgcccatattccaaattacagctaatgtgaggattttgtcactgactatcagccacctgttgaattcttctcagcrcttgtcaggtgacttgtcccagttctgttgcatggtgggtagcacaatggactttgaagtctactatattctacttgcaagtattttatattgcacagct

SEQ ID NO: 282586 - DNA, 201 bp, Homo sapiens
tattgaagaccctggcgagcatcacttcacgctacgccaagttctcaaccagagacccattacgtgggctgccgatgcatccaacacaatcagtattatargagactacaactggtaagattgatgttctcaatgtggatctggctgaaatacccttgtaatattgtcaggtacattttgaagtgaagagttttcaatggt

SEQ ID NO: 282587 - DNA, 201 bp, Homo sapiens
ttaccaggtgacagtagatggcaatagtaaaaagctaatcagctttagtcgcctagtgaatttaactttttatttagtcatctggtaaagagacaagttayattattcacataaaatataatgccaaactaaaactttcccttcctcttttagttacagaatttctatgtgctgacttattccacctgtcatgtgtttctt

SEQ ID NO: 282588 - DNA, 201 bp, Homo sapiens
aaattatatctattgggataatatttttgtgttacagctggatggattatatatgctttaggacgtgttgaagttacagcaaaaaaatggtatacactcaygttaactattaaggtaagtattgctgattggagtctggaggtaaaatgctcttttgttgtgcatttctataattttctgttataaaataggagggggaaa

SEQ ID NO: 282589 - DNA, 201 bp, Homo sapiens
aatagacggatttgtgaggtatttttaagtttttgttttgctggagagttgatttgttgatctggtgttgccatctagtggaccaatcttagaattacacygtcttagccttattaaaagatctatttaccaggtgacagtagatggcaatagtaaaaagctaatcagctttagtcgcctagtgaatttaactttttattt

SEQ ID NO: 282590 - DNA, 201 bp, Homo sapiens
ttatatctattgggataatatttttgtgttacagctggatggattatatatgctttaggacgtgttgaagttacagcaaaaaaatggtatacactcacgtyaactattaaggtaagtattgctgattggagtctggaggtaaaatgctcttttgttgtgcatttctataattttctgttataaaataggagggggaaagtg

SEQ ID NO: 282591 - DNA, 201 bp, Homo sapiens
  misc_feature (1)...(201): n = A,T,C or G
cctaatagatgtgtaatatgtaatattaagggttgttgaatagtatggtgatgaccacaaagctgcaaattgttttgctgccccagtgtccttccctcatntttgccctatttaatagtgattattacaggagcaatttgattccagtataaaaactaaggacttttggacccaattataatttaatatttgtttataaat

SEQ ID NO: 282592 - DNA, 201 bp, Homo sapiens
  misc_feature (1)...(201): n = A,T,C or G
acaactggtaagattgatgttctcaatgtggatctggctgaaatacccttgtaatattgtcaggtacattttgaagtgaagagttttcaatggtcctcctntttcaagaacctaatagatgtgtaatatgtaatattaagggttgttgaatagtatggtgatgaccacaaagctgcaaattgttttgctgccccagtgtcc

SEQ ID NO: 282593 - DNA, 201 bp, Homo sapiens
  misc_feature (1)...(201): n = A,T,C or G
gatgcatccaacacaatcagtattataggagactacaactggtaagattgatgttctcaatgtggatctggctgaaatacccttgtaatattgtcaggtanattttgaagtgaagagttttcaatggtcctcctgtttcaagaacctaatagatgtgtaatatgtaatattaagggttgttgaatagtatggtgatgacca

SEQ ID NO: 282594 - DNA, 201 bp, Homo sapiens
gaaagcttgtcttgagttatacatctatcactagccagaaaggataccacacatcttgcaaaccatgggcaaaattataagaacttaaaatattcactagyagtaaggtgttttgaaaattaggactattatttctactttgtactgatagaattagaaggctttgatttgctaagaatgtcagtctcttttttttatact

SEQ ID NO: 282595 - DNA, 201 bp, Homo sapiens
ttgctgatcaaactggtgtatttgaatattttacaaatattgaagaccctggcgagcatcacttcacgctacgccaagttctcaaccagagacccattacrtgggctgccgatgcatccaacacaatcagtattataggagactacaactggtaagattgatgttctcaatgtggatctggctgaaatacccttgtaatat

SEQ ID NO: 282596 - DNA, 201 bp, Homo sapiens
ataaaatttctcctctacagcattcattattgtaagactataatttaatttagtaaaactaaaaagggattgataacttaggcccaaaactggtttttgckgcagtttagaagtagaagaaaatttgtaaattttatgcttgatatagtaaacctttcttatgctcttttggcagatgattgtgacgcatgatttggaacc

SEQ ID NO: 282597 - DNA, 201 bp, Homo sapiens
gagtggctgtcaaaagcacattcatttacctcctacatctcatatgcggtaaaaggagggctaattttttgcattactttatggtaaatctaaatttgagkaccctgtatttttcagtttcagaaaaaaatatagggttcattgttagaatgaaagttatagttctgatttgtttttggtgaaacttaaactttgtaactt

SEQ ID NO: 282598 - DNA, 201 bp, Homo sapiens
tttatgcttgatatagtaaacctttcttatgctcttttggcagatgattgtgacgcatgatttggaaccttgcttgacagatattagaaataataaagctrtcccttattgagcccttgccaggtgctggcttatgtacctgttatcttttctttaattctcttgtcctcctgcaaacctggaaatgaagaaactttagat

SEQ ID NO: 282599 - DNA, 201 bp, Homo sapiens
ctaggctctggagatacttgttagggttctaaatgtctcaaatgaggtaatgaatgcaaaaacacttggaaaagcatgaggtataagagctataagatatrtaaaatttctcctctacagcattcattattgtaagactataatttaatttagtaaaactaaaaagggattgataacttaggcccaaaactggtttttgct

SEQ ID NO: 282600 - DNA, 201 bp, Homo sapiens
ttgttttgctgccccagtgtccttccctcatctttgccctatttaatagtgattattacaggagcaatttgattccagtataaaaactaaggacttttggmcccaattataatttaatatttgtttataaatagacggatttgtgaggtatttttaagtttttgttttgctggagagttgatttgttgatctggtgttgcc

SEQ ID NO: 282601 - DNA, 201 bp, Homo sapiens
tttcccagtcactgctacagggtctcgcctccctttctcaggaaatgatctagttggctggagtataaggccttttggactgtgtaatggagtcctctcarctataatacagacaacagtgatcctcagggggagcttggtggtttgtttttctgcaactctttgaaatggcctcttagataaacccattaattttgtgaa

SEQ ID NO: 282602 - DNA, 201 bp, Homo sapiens
tattgctgattggagtctggaggtaaaatgctcttttgttgtgcatttctataattttctgttataaaataggagggggaaagtgtgacatataatgaagrgagacaaagaatctgccttggtgccgggaagccactcatccctaggatagttacatgtgtgagggtaacctatgtgagaaccatcagcagttgactttat

SEQ ID NO: 282603 - DNA, 201 bp, Homo sapiens
tctttaagctaatttttttaaagctattttgtccacatgagatgagctatagtacctggtcctgaatacagtagtgtcttctttttcagctccttgacagygatggcagtttcacactgagcctgcatgaagatgagctgttcacactcaccactctcaccactggtcgcaaaggcagctacccgcttcctccaaaatccc

SEQ ID NO: 282604 - DNA, 201 bp, Homo sapiens
ctggcctatagtatattttcttcatagtaaatggcaagcagctaaaacattgtttgtagatcctgttctcatctgtttctagttccaatccatattttgcrcagccagtatatatgatgttgggaagagaagaaaagaaatactcttcagagaactgtgagcatttagagctatcttctgagctgccgtaataggaaatga

SEQ ID NO: 282605 - DNA, 201 bp, Homo sapiens
ccgaggatacgagtggtggttgatgaaagaagctaagaagaggaatcccaatattacactcattggtaagaaatgaagtttgcaatgtttcttcagtctcktttcctttaacttttaaattctgaatcgtgttggtggaatctctattaatacggaagtactcataatgtcattaatgctaccagtatgctaccagcagca

SEQ ID NO: 282606 - DNA, 201 bp, Homo sapiens
ttgactgcttggtggtgttctgtaggtttatgggtctcacggacagggtcaggtggctttgtaatctgctcctaaaatctgtagcagcaggagagtaatarggagggagctggcattgctggagcatcacttgaagctcctgtttgctgcagagctgcttgttccaccaaagatggacactcctatcaccctttcccagtc

SEQ ID NO: 282607 - DNA, 201 bp, Homo sapiens
gtataatttgaagttagataatgtgatacctccagattgttctttttgtttaggattgctttggctgtttggactcttttttggttccatatgaattttargattgttttttctaattctgtgaaagatgatgttggtattttgataggaattacactgaatatgtagattgctttgggctttgtggtctcattttcacaa

SEQ ID NO: 282608 - DNA, 201 bp, Homo sapiens
tttatggtggagatatcatcgtccccaccttgcagactgagaaactgcatctttggaataagatgtacccaatatttcacttgtaagtggcagaaccaggrctagaagccgggtctgtgtgactgagtagcccattctctttggagtacatctcacagcctcattttaatcatcttcttcctaaaggtaggaaatgggaaa

SEQ ID NO: 282609 - DNA, 201 bp, Homo sapiens
acacttttaattggtgttcacattctaaaagctttgatgatacagctactcccttgcttccttcagagttttcttacctgaccacctgatagaaaacagcrccccatctcactctctaactcctttctgttgctttatttttctccaaaagttttatcccaagctgacatcacacatattctgttaattgttcatgtgttt

SEQ ID NO: 282610 - DNA, 201 bp, Homo sapiens
ttattatccaaaatcacacttttaattggtgttcacattctaaaagctttgatgatacagctactcccttgcttccttcagagttttcttacctgaccacytgatagaaaacagcgccccatctcactctctaactcctttctgttgctttatttttctccaaaagttttatcccaagctgacatcacacatattctgtta

SEQ ID NO: 282611 - DNA, 201 bp, Homo sapiens
gtttgtctattattatccaaaatcacacttttaattggtgttcacattctaaaagctttgatgatacagctactcccttgcttccttcagagttttcttasctgaccacctgatagaaaacagcgccccatctcactctctaactcctttctgttgctttatttttctccaaaagttttatcccaagctgacatcacacat

SEQ ID NO: 282612 - DNA, 201 bp, Homo sapiens
tcatgtcttccatcaactacagtcattaaagctggcctatagtatattttcttcatagtaaatggcaagcagctaaaacattgtttgtagatcctgttctyatctgtttctagttccaatccatattttgcgcagccagtatatatgatgttgggaagagaagaaaagaaatactcttcagagaactgtgagcatttagag

SEQ ID NO: 282613 - DNA, 201 bp, Homo sapiens
tacctttttgatgtaacaaatcagcacatgtgcacatgcttgtttctgaacttttttctgttctccatattgatgtttgtctattattatccaaaatcacrcttttaattggtgttcacattctaaaagctttgatgatacagctactcccttgcttccttcagagttttcttacctgaccacctgatagaaaacagcgcc

SEQ ID NO: 282614 - DNA, 201 bp, Homo sapiens
ttacttagtgatttgctggagtattttagttaactctgttccctccttcttcccctccacacactgtaaagcctgaaatgttgctccttggagaatgtggytttgggcatatccacagtcaccctgggatttgtttttccaggactctgtctggttccttgatcacacctcactgtaagttacactaattgctggtggatt

SEQ ID NO: 282615 - DNA, 201 bp, Homo sapiens
ttttatgtgtaagtctttaatacgtcagaaatttacttgtgaattgtaaggggaagtactgaatataattttttaaaaaatggatagccatcatttattayaatggactatccttttgcccataatttaaaggctacctttttgatgtaacaaatcagcacatgtgcacatgcttgtttctgaacttttttctgttctcca

SEQ ID NO: 282616 - DNA, 201 bp, Homo sapiens
gataggaattacactgaatatgtagattgctttgggctttgtggtctcattttcacaatattgattcttccaatccatgagcatgggatgtatttccatgkgtttgcatcatctattatttctttcagccatgttttgtataatagttctccttttagaactattggttcttggttaagtatattcttatatatttttgta

SEQ ID NO: 282617 - DNA, 201 bp, Homo sapiens
ttacattttgatactgtcaaatatttcactttttattcattgcttttatgtttcatgttttaaataaggccttcttgtttctcaaggttaggaacattttkcccccaagctaaacaaagtttaggatttatttttatgtgtaagtctttaatacgtcagaaatttacttgtgaattgtaaggggaagtactgaatataatt

SEQ ID NO: 282618 - DNA, 201 bp, Homo sapiens
tttattcatgcattcattgttgaacactcaggttgattccatatcttggctattgtaaatagtgttttaataaacatgggagtgcagatacctctttaacrtatatattttattttggggggatatatacacagtagtgggattactggatcatatggtagttctacttttaattttttttttttttttttgaggcagaat

SEQ ID NO: 282619 - DNA, 201 bp, Homo sapiens
tccttgataattagggagcttgcacatctaatgtttactggctatttgtattttctcttctctgaagttgcctgttcacttctttcttcatttttctattrtgttgtctttttctggcaaatttgtgtgaatttaatatgtattctggatagtaacccattgtctgttacatacgtcacaactatgctcttccttcatgtg

SEQ ID NO: 282620 - DNA, 201 bp, Homo sapiens
ttccttgataattagggagcttgcacatctaatgtttactggctatttgtattttctcttctctgaagttgcctgttcacttctttcttcatttttctatygtgttgtctttttctggcaaatttgtgtgaatttaatatgtattctggatagtaacccattgtctgttacatacgtcacaactatgctcttccttcatgt

SEQ ID NO: 282621 - DNA, 201 bp, Homo sapiens
ttatagcaattataataatattcactattattgaatttgaagattttttccaaactcatagatatgatttgtatttccttgataattagggagcttgcacrtctaatgtttactggctatttgtattttctcttctctgaagttgcctgttcacttctttcttcatttttctattgtgttgtctttttctggcaaatttgt

SEQ ID NO: 282622 - DNA, 201 bp, Homo sapiens
tttccatgtgtttgcatcatctattatttctttcagccatgttttgtataatagttctccttttagaactattggttcttggttaagtatattcttatatrtttttgtagctattctaaaagagattgagttattggtttgattctcagttttgtcattattggtatatagcagtgctgctgatttatatacattatttgt

SEQ ID NO: 282623 - DNA, 201 bp, Homo sapiens
tctcaagcttcccaaagaggtcaatgaagttccaacaagaaggaggtagacagaataggaagtgcatatagtcagcagggctttgtgaagaaggatttctrgcaactaagttcccatgggagaagcaagatccaaaacagagaacagagtagccttaaaaaaatggtgtgtgtgtgtgtgtgtgtgtgtgtgtgtgtgtgt

SEQ ID NO: 282624 - DNA, 201 bp, Homo sapiens
ggctttttcctttttcatcctcaggttgttttggggagaccttaagtctgttgagagcaacgagcttaaaattcaagtgattgaggggcttgagtaggaarggaataggtctgacaggtggacagaggcatgggaggaggtaggggcttgaaagcagacatatcaaggattcaagggaactgaatgaaagaatgaaggtga

SEQ ID NO: 282625 - DNA, 201 bp, Homo sapiens
  misc_feature (1)...(201): n = A,T,C or G
ttccaagggccttgatattggtgagttttccacaaatgtttaggaagttctaacagaaatgatttggacttttctttaagctaatttttttaaagctattntgtccacatgagatgagctatagtacctggtcctgaatacagtagtgtcttctttttcagctccttgacagcgatggcagtttcacactgagcctgcatg

SEQ ID NO: 282626 - DNA, 201 bp, Homo sapiens
aattgttggccccacattatctagatgaactaatgtactcttaattttgtgatttttccaagggttgggacatggtatattgcttagtgcattttcaggaygagcttaggaggtgaccaataaatgtacatgtggtggaaataaatatgtttgaaaccataaagttagtttctgaaattcattattaactttttaaacctt

SEQ ID NO: 282627 - DNA, 201 bp, Homo sapiens
caccaggtgacgccggaagagaagccagcagtaagtacatgtgaaatccagtagctgaccacagacacgcgagcgataagaaaaagctcgctgcttctttyctcaacactccgccagctgcgtcagaggcccttgacccgcactcaaaatggcggcggcggcgtcagcatcagcggcctcctgcccgtatctatcgtggcg

SEQ ID NO: 282628 - DNA, 201 bp, Homo sapiens
agcatagaacaactttgatactgggagcgttttccattggtcacacactaggcttagcactttaaaagcattatctggtttaatcctcacagcagtctatraggtatgtattttttcctcattttgtagatgaggagattgtgacttaaagagattaagttgccaagatcgtaagtgtgacataagcctaacttgctagtt

SEQ ID NO: 282629 - DNA, 201 bp, Homo sapiens
ttaagggagaacacaactatttttgttcctaagggaagcatttcttaaatgctttgaaaaacacttgaattgtgaatagattccaattagctttttttaamcaatgataaatagaacaaaaacaaaccaatatttatgtatttgttgtgatgttaatgtgggttgctgtatattgtatttgttctttttcttctctttgtg

SEQ ID NO: 282630 - DNA, 201 bp, Homo sapiens
actgttcaaatttcataaaaggattccagtgtcttcagagatctacatttagcatagaacaactttgatactgggagcgttttccattggtcacacactargcttagcactttaaaagcattatctggtttaatcctcacagcagtctatgaggtatgtattttttcctcattttgtagatgaggagattgtgacttaaag

SEQ ID NO: 282631 - DNA, 201 bp, Homo sapiens
aatagatgcctgctttcacctgagtttagtgactcagtaaaatcttagtggaacctcatttttctctaatacttctttttatgttctccagtatatattgkatattattttcttactcatgaaatcctgggatgccaaattgatattgtgccctaattcatcttcactaggtataaagaattaccaaataggattttttcc

SEQ ID NO: 282632 - DNA, 201 bp, Homo sapiens
cattatttcacttaattgacacaagtctaccactttttctggttattattaatgttctgataaccaactagtcactaacagtgataaaacaccttattatrtattaagttctgaaaaaaaagttcatactttttgtgtaacaaattgctaggaatggcataataaaattgattttcctcataagaaaaataatgtcatttg

SEQ ID NO: 282633 - DNA, 201 bp, Homo sapiens
cacctagaatggcctctcctcatctttgtcatcttttgagactcaattcaagtgtcttttcctctgacgcttcctcaccagtcttagctcatattcacctrgggccatgtgcttacctagttaaatgcttttcctgcaccactggacaccttgaagactgagccttgccttatttagctttatatcccaggtgcttcccac

SEQ ID NO: 282634 - DNA, 201 bp, Homo sapiens
cacatactaaacttacatttttcaaagcatagcatgcctgtttatttacctctgtgactttgcacatactgtgttcttcacctagaatggcctctcctcawctttgtcatcttttgagactcaattcaagtgtcttttcctctgacgcttcctcaccagtcttagctcatattcacctagggccatgtgcttacctagtta

SEQ ID NO: 282635 - DNA, 201 bp, Homo sapiens
atttgccaaaattctttagtgtttagagaataaagtatttgcttgaacaatgttttcctatttttaaaaatattattatttaatatttgaggtgtttctcytgataaatagagataatattgtcattggtacattcttgctggtactgattttggaaatcctcaaagaggatgtgatgaattactcagccatgcttttttg

SEQ ID NO: 282636 - DNA, 201 bp, Homo sapiens
caggtacagtaatgaatgtttttgaagcaaagacactgtaatttttttatcatttgccaaaattctttagtgtttagagaataaagtatttgcttgaacartgttttcctatttttaaaaatattattatttaatatttgaggtgtttctcctgataaatagagataatattgtcattggtacattcttgctggtactgat

SEQ ID NO: 282637 - DNA, 201 bp, Homo sapiens
gaaaactagcagtttctgattgcttgctctgtgtattgactatctttttcttgccttctccccatttgattacattctcagaaggtagctctcctgtattyacttacctgaagcatgcatggctcatagttcattattttctcttttaaatatattttaggatctttctatgacaaacatgtattgatagcttttaaaaag

SEQ ID NO: 282638 - DNA, 201 bp, Homo sapiens
tattctgtcacaggccagtagttcttaagtgaagccttatattatgaacttttaacagtttgcatatgaattgacagaggccctggtgtcttctgtcttcygacttgctttaatctagcaggacagaagccagtaggaggtaaaatgctctgtgactttgaggaacacttacaaaagtcacttgcaagaaagttgttcttg

SEQ ID NO: 282639 - DNA, 201 bp, Homo sapiens
aatagtaaaaagctaatcagctttagtcgcctagtgaatttaactttttatttagtcatctggtaaagagacaagttatattattcacataaaatataatkccaaactaaaactttcccttcctcttttagttacagaatttctatgtgctgacttattccacctgtcatgtgtttctttttcattttttcctataactag

SEQ ID NO: 282640 - DNA, 201 bp, Homo sapiens
tttgtgaagtgtgtgtctggggtgggggtggggagtgagatggtcctaggaagtaccattcatggatcattacttccgtttttgctctcctctattcagayggcactgagccctcccacatgcattatgcactagatgagaattatttccgaggatacgagtggtggttgatgaaagaagctaagaagaggaatcccaata

SEQ ID NO: 282641 - DNA, 201 bp, Homo sapiens
tcagtaaatattatattataaaaaagtctttaaaaatgtgaaataaactcatatttgttatctagtatatgtaaatttctgttaatcttgggcattaactrttgaactttttttcccctaaggtagcttatacatcatttggataatgtatgtgattttttttttcagagtcataaacattctaagtgcatacggccattt

SEQ ID NO: 282642 - DNA, 201 bp, Homo sapiens
tttccccaacttcaggattagaactggaatactgcttttgtgaagtgtgtgtctggggtgggggtggggagtgagatggtcctaggaagtaccattcatgratcattacttccgtttttgctctcctctattcagacggcactgagccctcccacatgcattatgcactagatgagaattatttccgaggatacgagtggt

SEQ ID NO: 282643 - DNA, 201 bp, Homo sapiens
atttttatatggtatataaactttcctttagtcagatctgtattggttttttgctagttgaatgcttttcttaaaaaaaatttgttttattttcaatagcrccagcaccgttatacctcctctacctttgcctcctcccttctctctgcagggttgccatggtcattccctggatggctgggaaaaggtttcgactggcct

SEQ ID NO: 282644 - DNA, 201 bp, Homo sapiens; identical to SEQ ID NO: 57640

SEQ ID NO: 282645 - DNA, 201 bp, Homo sapiens
ctattcctttttcattgaattgtcttggcatccttgttgaaaatcaattggcaataaatttgagggtttatttctagaacctcaatttttttctgttgacytatatatctgtcctgacgtgagcaccacactgtcttaggtactgtagctgtctgataaattttgaagtgaggaaatgtgagtatttcaactttgtcatat

SEQ ID NO: 282646 - DNA, 201 bp, Homo sapiens
caaatcttcatatatttgaatcttcatatacatcttcacaatttaaatagcaatactcagtttttactaggatctattgcagtgggtaaggaggtggggaygagggatggggaagggtgtagaagggaagagagtgacatattctgaaaggaaaggaaccgggaagttgcaattttgcgtgtcaagaaaggcctgccttca

SEQ ID NO: 282647 - DNA, 201 bp, Homo sapiens; identical to SEQ ID NO: 57643

SEQ ID NO: 282648 - DNA, 201 bp, Homo sapiens
tatgtttttaaaccagtaacatgctgttttggttactatagccttgtagtataatttgaagttagataatgtgatacctccagattgttctttttgtttargattgctttggctgtttggactcttttttggttccatatgaattttaggattgttttttctaattctgtgaaagatgatgttggtattttgataggaatt

SEQ ID NO: 282649 - DNA, 201 bp, Homo sapiens
caaaccaaacgaatgtttttcttctgcgaatctgcatttggagaggaagggatgaggaggtttttgtttgtttgtttgtttgtttaattgtcttctctcgrtcgggtacttcaggcagagatccagaagagcaggccttggtgagaattcttaacctttctgccacctttttgtcagtgtctcaggatctcatctgcaggc

SEQ ID NO: 282650 - DNA, 201 bp, Homo sapiens
gttagaaacagttgaaatgaaaagtcaacatagcacaaattttcgtagtgtaagggaattggagatgaattgtcaatggaggcaaattgggtttcccacawcagggaagaaattaattaaatttctaccagacaagacataatttacatagctcagagacaatgaacagggctatagataatacatccgtttttattgaaa

SEQ ID NO: 282651 - DNA, 201 bp, Homo sapiens
tacccattttttagtgaagctccaaactttgctgatcaaactggtgtatttgaatattttacaaatattgaagaccctggcgagcatcacttcacgctacrccaagttctcaaccagagacccattacgtgggctgccgatgcatccaacacaatcagtattataggagactacaactggtaagattgatgttctcaatgt

SEQ ID NO: 282652 - DNA, 201 bp, Homo sapiens
aagcaatagctgaccctgggaaggaagggatctacaggtaatgagcacccaaaactaaatttatacaggaatcacaaaccaaacgaatgtttttcttctgygaatctgcatttggagaggaagggatgaggaggtttttgtttgtttgtttgtttgtttaattgtcttctctcgatcgggtacttcaggcagagatccaga

SEQ ID NO: 282653 - DNA, 201 bp, Homo sapiens
ctcaaccaccaaaaatgacagcactaattattttttagcattaacaatatgtatattgaagatttggtttggatgtagcatagattatttaactataccayactagccaaattgtagccattttatagcaattataataatattcactattattgaatttgaagattttttccaaactcatagatatgatttgtatttcct

SEQ ID NO: 282654 - DNA, 201 bp, Homo sapiens
aaggttgagaagtgatcctccaaagacctagaaccactcccaaggatagtcaaaagaaagacccagataacctccctactccccactccctgtcagagctrgcgatagttggtaaactggctgcaaatagggtgcgaatcacatttttgtctggttatattcttggggcccccaacttgaagttggctgcctgcatacaca

SEQ ID NO: 282655 - DNA, 201 bp, Homo sapiens
tttttttaaaaaattttattttgttttttaaactgaggcataattgatagagtcaataattgaactatttttttcaagtttgcttgaaccaagactgtacmtggagcttatagatgtaagcaaagccatatgcatttatttttgatggttaagaataatttggttttcaattataagcataatttttagaaattggtttcc

SEQ ID NO: 282656 - DNA, 201 bp, Homo sapiens
cactgatgtggaaaatatattattgtttattgaatattctcctcttttagaattggaagttgtctctgttttaattaatagctttgtacaaactgaaatgwtcaattgtatacaaatatctttgtatatgcccatgactattttcttaggctgtattcttagaaatggaatggtcagaaatacatagattttgaagggttt

SEQ ID NO: 282657 - DNA, 201 bp, Homo sapiens
gctaaatgaaaaatgttttggcttaactcagttgtagatctgggaatgaagggacatagctctctgttgaggctgactttactacatacagatgccactcragaaccccactgaattatatgattctgtgattgagatctcaaaattatatctattgggataatatttttgtgttacagctggatggattatatatgcttt

SEQ ID NO: 282658 - DNA, 201 bp, Homo sapiens
ggcatcttcatggcagagaatttagaaaactgaagataggtacaaagaaagaagcaaaatcacctacagtcttatgatccagagctaaccatcctaaacawttttagtgaatgtcctcctgttttatattggcatgtatacattttaaatacaaaattgagaccatactatagaatctgtttaaaaaactgcttttcactt

SEQ ID NO: 282659 - DNA, 201 bp, Homo sapiens
gaggttaattgagtggcctaatgactcaaagctagttagtggcagaactggaactaggaatttaaatctgtgtctgcagtccctattgtctgttttaaacygcctacttgaaattttgtcctggggttctcataggcattcaaataacactaattccaaaaattaacttactattttctccctctaagttaatactattac

SEQ ID NO: 282660 - DNA, 201 bp, Homo sapiens
tcaaagctagttagtggcagaactggaactaggaatttaaatctgtgtctgcagtccctattgtctgttttaaaccgcctacttgaaattttgtcctgggkttctcataggcattcaaataacactaattccaaaaattaacttactattttctccctctaagttaatactattaccatgtgaccaattagactggctgga

SEQ ID NO: 282661 - DNA, 201 bp, Homo sapiens
tttggttataacttaatttggtcttaaaggtaaggcatcttcatggcagagaatttagaaaactgaagataggtacaaagaaagaagcaaaatcacctacrgtcttatgatccagagctaaccatcctaaacaattttagtgaatgtcctcctgttttatattggcatgtatacattttaaatacaaaattgagaccatac

SEQ ID NO: 282662 - DNA, 201 bp, Homo sapiens
ataaggaggggaattgatcggcttaaaatggaaaaatctcatttttgaatttagttaatacttgaaaatagcttgacttttctcagtcatctttacagccyttgtgttaggtaggataatattttatccagaataggtgcttcaaatatgttcagattgaactgtgtccacttcagattggttttgatacacaccactcct

SEQ ID NO: 282663 - DNA, 201 bp, Homo sapiens
ctatatttgaatatagtctatattaaataaagtcaggtttattgaggtataatttatatgtagcaaaatacatgcagctctctgatttttgacaagctacwtgtatttttaataattataaagtaaatagtatatgtaaggacactttatctctaaatattttagcatgtgtctccaaaacataaggatattcttttacat

SEQ ID NO: 282664 - DNA, 201 bp, Homo sapiens
gtggtattttgattagaagtgccagaggaattttcttctggatttttgcaaatggatcttacagggttacaggtgatttaggtaagtgacttttttttttktttaatagcatatgacttatgggctatgttactttgagcacctacttgttatttgtgggagtgataaaaagaattcaacccaaggtgtttggacatctaa

SEQ ID NO: 282665 - DNA, 201 bp, Homo sapiens
ctatgtttggtttgggatatattgaggtagatggaaagagtggctagagagcagctccatgggtgtttgcctcactggtagggactggggatgttttgggygtgacagagtagatatgggcacttaccagaatgtcagtggtagcatatatgagaatataaaatagaaagttgaaccccataaaagtattttgtcccaacc

SEQ ID NO: 282666 - DNA, 201 bp, Homo sapiens
aaggtggtattttgattagaagtgccagaggaattttcttctggatttttgcaaatggatcttacagggttacaggtgatttaggtaagtgactttttttkttttttaatagcatatgacttatgggctatgttactttgagcacctacttgttatttgtgggagtgataaaaagaattcaacccaaggtgtttggacatc

SEQ ID NO: 282667 - DNA, 201 bp, Homo sapiens
gaagagtaaataaaggtggtattttgattagaagtgccagaggaattttcttctggatttttgcaaatggatcttacagggttacaggtgatttaggtaastgacttttttttttttttaatagcatatgacttatgggctatgttactttgagcacctacttgttatttgtgggagtgataaaaagaattcaacccaagg

SEQ ID NO: 282668 - DNA, 201 bp, Homo sapiens
tgaaatgacatatctgtactatgttacaaagggcatattttaaagagtactaatcaactgttttattttgcaggaccaatctgactataaagtgtgatgtwtacatagagacccctgacacaggaggtgtgttcattgcaggaagagtaaataaaggtggtattttgattagaagtgccagaggaattttcttctggattt

SEQ ID NO: 282669 - DNA, 201 bp, Homo sapiens
gaagcatgtgctgtgaaatgacatatctgtactatgttacaaagggcatattttaaagagtactaatcaactgttttattttgcaggaccaatctgactayaaagtgtgatgtttacatagagacccctgacacaggaggtgtgttcattgcaggaagagtaaataaaggtggtattttgattagaagtgccagaggaatt

SEQ ID NO: 282670 - DNA, 201 bp, Homo sapiens
tttgccacctaagggtgagggctccctctgatacttcttttagagtcctcatggggcccaagcatagtactgagtagtaaagtaggtactgtttgtgcttygtttatttcctgttaaaatttagcttgttacttttaatttttgtgggtggacagtcctacaggtaaattttatttgctctcctgtttaataatggcagaa

SEQ ID NO: 282671 - DNA, 201 bp, Homo sapiens
atgggaaatttgtttagtttatctgtagtgctattttagtaaatctgctctcaatgagtgcacactactcacagtttttagacttgtgttttgagtagaayttcctctcttatacctagatttagtaatttaccagcacagtaatttgattatatgggatagattgtactataactggctacttctatcttgatagtgagc

SEQ ID NO: 282672 - DNA, 201 bp, Homo sapiens
tacctcagtgctaagacaatgtaacctctactaactgcagatgttagtatagaattttgttatttttagagtggatatgtatactcattcctttttttttyctcaaaactcttcctatatcaagacatattataggctaaaggtgtgggttctgagaacagggctcacgagtccagggattcatatccagcgttgaaaagc

SEQ ID NO: 282673 - DNA, 201 bp, Homo sapiens
cagactgagaaactgcatctttggaataagatgtacccaatatttcacttgtaagtggcagaaccagggctagaagccgggtctgtgtgactgagtagccyattctctttggagtacatctcacagcctcattttaatcatcttcttcctaaaggtaggaaatgggaaatttgtttagtttatctgtagtgctattttagt

SEQ ID NO: 282674 - DNA, 201 bp, Homo sapiens
agattggttttgatacacaccactcctttgaagctagaccttactggtagtgacttttcttgattctcagtctcttgactttcgtcttaccttaatttaaraatatctcttttatagttttctgctctttgctttgactccataaataaaataaaaattaaagaggaagtaggtagtaaggatattagaacaagagttaca

SEQ ID NO: 282675 - DNA, 201 bp, Homo sapiens
cccagctactcgagaggctgaggcaggagaattgctgatcctgggaggcagaggttgcagtgagccgatatcatgccattacaccccagcctgggcaacargagcgaaactccgtctcaaagaaaaggaagaacttcagggtgatgaaattcaggattgatcctcctgctagagggataggggttctcaatcctactgaat

SEQ ID NO: 282676 - DNA, 201 bp, Homo sapiens
tgcaatcatgacttagattatcagcaaacaattattgagttcctactgtgttgcaggaactgtgactgtaatatttgagggctactaagattaataagctsttgtgttcagtaagagaagtagatgctggaacatataaactgtaatactacatgatgatacagggcatgaggatgagccaagggctggaggaagtcagaa

SEQ ID NO: 282677 - DNA, 201 bp, Homo sapiens
aaacataattatttcatggtacctgtgatattttagaaattggatggtgaatttcaccatagaatttattagcctcacaattctagtttttgaaaaaatgrcacattacttttggaataaattgctatttgaagttttgcttttgtttttgcgtctgtaaaacctaaggcagtaattagtaattgtcttgaagcttcatac

SEQ ID NO: 282678 - DNA, 201 bp, Homo sapiens
ggttactgagacagcaagttcaggaaaaggagcagatacatgcaaaagtgctatgtttggtttgggatatattgaggtagatggaaagagtggctagagascagctccatgggtgtttgcctcactggtagggactggggatgttttgggtgtgacagagtagatatgggcacttaccagaatgtcagtggtagcatatat

SEQ ID NO: 282679 - DNA, 201 bp, Homo sapiens
acctgaaacagccaatatttcatggagtgaggccccatcttttttatagctttacttgtgatactatatctagggtaagagcttaccgaaaaatggaagtmtttgtttccattaggtttattaagcccagtttaaaattactaagatgagaagaatcatttcgtaattcaaagtaggaaactcctacctaatctgatagaa

SEQ ID NO: 282680 - DNA, 201 bp, Homo sapiens
tgaagccctgttttcatcatgttattcccctgctcaggaagatgcagtgactctctcctgctacctgtgttttccacttctaggcttgatttccaagaccstttataatttggtctcatctactatgtgttattttccagtactccaccctctatttgaggcagccagatctgctcagagatccacacaaatcccttgttc

SEQ ID NO: 282681 - DNA, 201 bp, Homo sapiens
tacagtttagctacgaattcaaaatttgatccagttgaaacgccattgacctttgcatttgactaggaacatacaatacacattcagtaaatattatattrtaaaaaagtctttaaaaatgtgaaataaactcatatttgttatctagtatatgtaaatttctgttaatcttgggcattaactattgaactttttttcccc

SEQ ID NO: 282682 - DNA, 201 bp, Homo sapiens
atttcaaaataggtaacaatgtaaagctcaaaagattttaaaagtgagcacgtactgaagattttatgttactcatatgatatgaaggatcctggcagatwgatggtagatgttagaaacagttgaaatgaaaagtcaacatagcacaaattttcgtagtgtaagggaattggagatgaattgtcaatggaggcaaattgg

SEQ ID NO: 282683 - DNA, 201 bp, Homo sapiens
aaaacagttataacaaaaaattaatctgtatgccatatatgtctctacagtttagctacgaattcaaaatttgatccagttgaaacgccattgacctttgyatttgactaggaacatacaatacacattcagtaaatattatattataaaaaagtctttaaaaatgtgaaataaactcatatttgttatctagtatatgta

SEQ ID NO: 282684 - DNA, 201 bp, Homo sapiens
ttttctcaggaaacttaaaaatcataactattattgtccagtaatcatttaaagaggcaatgaaatgacttaagtcatgtaacatttaaaactgttgtcartaaagattcttgaagcccatctctgctacaggcttagacttagcaaatcacattctcacctcaattagaagtttggaagcatgtgctgtgaaatgacata

SEQ ID NO: 282685 - DNA, 201 bp, Homo sapiens
acactggttttgtatttcatgatattctgttggcacacactctctttgtaccacttcaggccctatattaatttgtttagtactacaaaccaaatccaacrtagctgcacatttgtggtctaactgaaacaaatttgagtgaaagttctgaccacagatatctgactgatgtttaggctgttcatctataattttattttc

SEQ ID NO: 282686 - DNA, 201 bp, Homo sapiens
tgccttcattgcctctctttgttgatggaagtttgaataaacattttccctcagaattgtgtggaactttttactttttaatgtgttcatagacaatagtrgcattttaaaatattgtattcttaagatgagaagttgttttattgtagaaaaaaaattttctcaggaaacttaaaaatcataactattattgtccagtaa

SEQ ID NO: 282687 - DNA, 201 bp, Homo sapiens
cattatcctggaacccattcagcaaaagatgcaaagttgactgggaagaagctttggtcttctgaagactttagcactttaaatagtgacatgggtgcagrctgctggggtcgcattttaaatcagaattatatcaatggctatatgacttcgtaagttattaaaaaccttttagagttcttatcaaaaaaaatttaaaaa

SEQ ID NO: 282688 - DNA, 201 bp, Homo sapiens
tgagtttttttgaaatcatgaatgagattttaaaaattttcttaatttttttcaggtactttgcatacctggttaaaatatcaataggatgtgaggcatcytgcctcacatcctgttccttcttcttgaccccattctgtgtcttgtacttctgatacagccactcttcactattttagctgtttcttctggtgtgtcttt

SEQ ID NO: 282689 - DNA, 201 bp, Homo sapiens
tcgggacctggtgtccaagcctggtcctcgcacgaggtagatactccctgagatgctggggaagagccatggtagggccactcatggccctcttcctttgrcggaccttggaatccaccttccctgcgttaaagtgctccaccaggtgacgccggaagagaagccagcagtaagtacatgtgaaatccagtagctgaccac

SEQ ID NO: 282690 - DNA, 201 bp, Homo sapiens
caatctgactataaagtgtgatgtttacatagagacccctgacacaggaggtgtgttcattgcaggaagagtaaataaaggtggtattttgattagaagtkccagaggaattttcttctggatttttgcaaatggatcttacagggttacaggtgatttaggtaagtgacttttttttttttttaatagcatatgacttat

SEQ ID NO: 282691 - DNA, 201 bp, Homo sapiens
ggtttgaagctatttcatgccttgcctctccccctaggtaaatctctaatctctagtaatgtcacctttcttattgttgaagtgtatgttttctcttaacstgattttttattagtctggctagaagtttttcaactgtattgatcttctcgaagaatcagcttttggttttattattttcttgtggtttttaaatttgtt

SEQ ID NO: 282692 - DNA, 201 bp, Homo sapiens
gaaacttacaattctccacatcctccctaacagttcttactgtccatgcctttgattatagccatcctagtgaatgtgaagtgctatgttattgtagttcratatgcattttcctagggactaatgatgtggggatcttttcatgtgcttattggctagtagtatatcttctttggagaaatgtctatttaaactctgccc

SEQ ID NO: 282693 - DNA, 201 bp, Homo sapiens
ctgaagtctggggagtcaggagagataaggtcctgttagacaggttttgtgcttaatgtgatctgtgatttgagtcccttggctcggtgttaatattgagygtttgatggcagcagaagatgttcagtaagcacttctagagctgaagatagctgtgcaagtctgtagtaataggaatgtggctctgaatttggagctagg

SEQ ID NO: 282694 - DNA, 201 bp, Homo sapiens
gagttagtaatatatttaaaatatgattcagttttggacatttgtttgtaatttagaaaataatttgattctgtggtactttttgactaaccattttatgycatgaggctaatttgttctaatggtgtctgataataacacaaactaagtacctgtgacctttaattgctcccctttgcccatcccagtgttcccactttt

SEQ ID NO: 282695 - DNA, 201 bp, Homo sapiens; identical to SEQ ID NO: 57664

SEQ ID NO: 282696 - DNA, 201 bp, Homo sapiens
ctatctataaattctatggcaggatatcccataaagttaaaaaatggcgtatcagataatatgaaagatgatgagagaaatggtatcgtaacgataatctrctttctgacattttgtaactttcaattcagacttttttgactttttgttttgcagatttggaatgagaggtcatataatgccaattatattaaggtgtgt

SEQ ID NO: 282697 - DNA, 201 bp, Homo sapiens
  misc_feature (1)...(201): n = A,T,C or G
tgcaccagcatcattctctgttgcctcagcatgtccagcactctcgggatgtccagcacctaggttgagagaaacggtaatgaagataatgtgttcccctngggagacagaaaggatgggaggacacgagtgtcctggcagaaacctggttgggagatggacagtctcttttccaccttagcgtcttctagaaataagcca

SEQ ID NO: 282698 - DNA, 201 bp, Homo sapiens
ttgaacccaaatggtcaatagctcattggcattatcagtgcaagattaaagcttcacatcacaatgtcatatatcaatatctctggttgaatttcagaacwttttataagaatgagttaaataatcagtgccttgtttatctcatgatttttatattagttttaaatatataatgattatgttttaatttttagctttttg

SEQ ID NO: 282699 - DNA, 201 bp, Homo sapiens
acttttttatttgttggctgcttttatgtcttcttttgataagtgtctatgtccttttctcactttttaatggggttatttgtttttcttcttgctttttyttttttttttaagttcctcatagattcttgtattagggttctctagagggacagaactaatgaaatatatatataaaggggagtttattaagtattaact

SEQ ID NO: 282700 - DNA, 201 bp, Homo sapiens
tattttattttgtgtgtgtgtaactattgtaaatgagattgtgttcttgatttggctctcagcttgaatatcattggtgtatagaaatgctactgattttkgcacattgattttgtgtcctaaaactttactggaatcgtttattagttcaagaagccttttggcagcatctttagggttttctaattatagaatcatatc

SEQ ID NO: 282701 - DNA, 201 bp, Homo sapiens
ttggctctcagcttgaatatcattggtgtatagaaatgctactgatttttgcacattgattttgtgtcctaaaactttactggaatcgtttattagttcargaagccttttggcagcatctttagggttttctaattatagaatcatatcatcaggaaagagataatttgactactacttttccaatttggatgtgtttta

SEQ ID NO: 282702 - DNA, 201 bp, Homo sapiens
cagcatctttagggttttctaattatagaatcatatcatcaggaaagagataatttgactactacttttccaatttggatgtgttttatttctttctcttrcctaattactctggctaggactccagtagtatgttgaataagagtggtgatagtgggcatccttatgctgttccagttcaaaagaggaatgcttccagct

SEQ ID NO: 282703 - DNA, 201 bp, Homo sapiens
tttccaatttggatgtgttttatttctttctcttacctaattactctggctaggactccagtagtatgttgaataagagtggtgatagtgggcatccttaygctgttccagttcaaaagaggaatgcttccagcttttgctcattcagtatgatgttggctgtggacttgtaatagatggctcttattattttgaggtatg

SEQ ID NO: 282704 - DNA, 201 bp, Homo sapiens
aaaaaccaattttctattttgttccatattttgaaagatttgttttcccttttagatgcagaccaacaacgaagagagaaactcaaaaaggaattagcacratgtgaaaaagagttcaaattaactaaaactgcaatgcgagccaattataaaaataattccaagtcactttttaataccttacaaaaggtaagatagtat

SEQ ID NO: 282705 - DNA, 201 bp, Homo sapiens
tccagcttttgctcattcagtatgatgttggctgtggacttgtaatagatggctcttattattttgaggtatgttcttttgatgcctaatttgttgagggtttttttttttaatcatgaaggattgctagattttattgaagctttttgctacatctgttgagatgatcataaggtttttgtttttaattctgtttatatg

SEQ ID NO: 282706 - DNA, 201 bp, Homo sapiens
ttacccaaaagtcattcaggagcaagttggtttaatttccatgtaaaattatgtggttttgaggagtactcttggtattgatttctacctttttttccacygtggtccaaaaatatgtttggcgtggtttcaatttttttacatttattgaaacttgctttgtcttcgagcatgtggttgatcttagagtatgttccacat

SEQ ID NO: 282707 - DNA, 201 bp, Homo sapiens
caagttggtttaatttccatgtaaaattatgtggttttgaggagtactcttggtattgatttctacctttttttccactgtggtccaaaaatatgtttggygtggtttcaatttttttacatttattgaaacttgctttgtcttcgagcatgtggttgatcttagagtatgttccacatgcagatgagaagaatgtttatt

SEQ ID NO: 282708 - DNA, 201 bp, Homo sapiens
ggttaagcatttgtaaccttcatatctctgtgaataactgctaagagttgctttcttatgcccttaggcttggccagtttgtcatatcttgttggcattctttttttttttttttttttttggtaactacacaaatctcactatattgtttgtattatttaaatagttaatccatttagaatttctataaattaaatgtgt

SEQ ID NO: 282709 - DNA, 201 bp, Homo sapiens
atggaagaacttagaacaggaaaggattagtcttcagctttacagagaaaaagaaaaatctgaaaaacatttttcaacctttgtagtttcagtgttacgtrgctagtttatatttagatgattttctgattttgagacattaacatttttgtttatcatttgtaggtttttagaacgactgttcgagcgacatataaaaca

SEQ ID NO: 282710 - DNA, 201 bp, Homo sapiens
ttccctttctcctgaatggatattaattttatgaaatgcttttttgcatctcttggaatgatgatattatgatataatttttctcttttaatctgtggggttttttttttttatatatatatatatagtctcactctgttgcccaggctggagtgcagtggcatgatcttggctcactacaacctccacttcctgggttga

SEQ ID NO: 282711 - DNA, 201 bp, Homo sapiens
ccaagaagacacagccttttgcagggaacattagtaacatcttgaggccaccacagtccaaggaaatgtgcgcaaaaagagctattaagtcactatgtccytctcttccccagcctcatttccacccaaaaaggccaggtgatcataagcgccatcacctcattgtgttccaggcaggcgatcatgatctccgacaaaatc

SEQ ID NO: 282712 - DNA, 201 bp, Homo sapiens
gcttcttttaatgatactataatgctgaatttatttatgaaaaagaaacaatacaggttgaggtgggaaaagccccaaggaaacggagtaagtcactggcrgtcacaggacttgaattccctggggacagtgctgtggggtcccctgctcgccatcccagcacctcagtctgagtatagataatactgcatttttgtaaag

SEQ ID NO: 282713 - DNA, 201 bp, Homo sapiens
ttcatctttttttcgtttcagaaaggaaattgattgctctattacttatatttggaattaaatgttaatatcttagtttaaatacttgactagaacttcarataaaatattaacatcttcaggaacatatcagttaattttgtaaacccttgaggctatcatttttttaatgtataatctcaaaatccccaattacatgaa

SEQ ID NO: 282714 - DNA, 201 bp, Homo sapiens
ggaggctgaggcaggagaatcactcgaacccaggaggcagaggttgcagtgagccgagatcatgccactgcactgtagcctgggcaatagagcaagactcygtctcaaaaataaaaaataaaatgagtactttctgtgctcaaaactaccaactaagctaaactatttcatcaaaagaccccactaatcaggaaaactgat

SEQ ID NO: 282715 - DNA, 201 bp, Homo sapiens
ctgcacccactgtcctgcccccactgtccgacaagccccgtgagatgaacccggtacctcagttggaaatgcagaaatcacctgtcttctgcgtcactcgygctgggagctgtagactggagctgttcctatttggctatcttggaaccgcaaacagtatgtttttcttacattttttcctttacctttttgtttgactta

SEQ ID NO: 282716 - DNA, 201 bp, Homo sapiens
aaggaaggagtagagattaaaaagagggcaagaataaggtgttagtagcagaccactagggaagtacacacaatcccctcaggctctggcttctccctcargcctttgctagggagatctcacctgctaaggccatggagagttcattgttaactaccctgtctttgaaatttctgatgtttcaacacatataacttatta

SEQ ID NO: 282717 - DNA, 201 bp, Homo sapiens
atctctgtgaataactgctaagagttgctttcttatgcccttaggcttggccagtttgtcatatcttgttggcattctttttttttttttttttttttggkaactacacaaatctcactatattgtttgtattatttaaatagttaatccatttagaatttctataaattaaatgtgttagttaatatctagaggcacatg

SEQ ID NO: 282718 - DNA, 201 bp, Homo sapiens
tttgagggcaggaagcatccagcacaggaggaagatgtaggctgtgagagtaggccagcctcaacccttcacgtttttctgcctgctttatgttcgctcgmagctgattagatggtgcccacccagattaagggtgggtctgccttccccaacccactgactcaaatgttaatcttctttgtcagcaccctcacagatata

SEQ ID NO: 282719 - DNA, 201 bp, Homo sapiens
gagagaaactcaaaaaggaattagcacaatgtgaaaaagagttcaaattaactaaaactgcaatgcgagccaattataaaaataattccaagtcacttttkaataccttacaaaaggtaagatagtatttttattttttaaaagcaaatgtttctaaggtacttctttagtggtacaatctgactttgtttactatagttt

SEQ ID NO: 282720 - DNA, 201 bp, Homo sapiens
atagtttagggtcagcaaatttttcctgtaaagatccagatagttaatattttaaaaggctgttcaggcctctgtcacaactactctgccattggaaggcrgacatagacagtacataaataaatgagtatagccgtgttctgctgaaactttattaactgaagacattgggtcagatttggcctgaaggttatagtttgc

SEQ ID NO: 282721 - DNA, 201 bp, Homo sapiens
tactatctgtgtttttagactttacaaataacctgtagaaatggttttcctaaagtaaagccaaaaagaaatggagcaagtcaaaatgcctcccttttcawagtattacccccaccccaatgaaaagaagttgagaaatatatatgaaattattatggaataaatatttattaattatatttaaattatcaattacctaaa

SEQ ID NO: 282722 - DNA, 201 bp, Homo sapiens
agctattaagtcactatgtccctctcttccccagcctcatttccacccaaaaaggccaggtgatcataagcgccatcacctcattgtgttccaggcaggcratcatgatctccgacaaaatcaccacgccagtccttcctaccccagcactgcagtggaccaacaacggagggttggggctttggggatcacttgtgctat

SEQ ID NO: 282723 - DNA, 201 bp, Homo sapiens
tccagcacctaggttgagagaaacggtaatgaagataatgtgttcccctagggagacagaaaggatgggaggacacgagtgtcctggcagaaacctggttrggagatggacagtctcttttccaccttagcgtcttctagaaataagccatgattgcctacttctgattttctgattagttttagctataaatagaatgtc

SEQ ID NO: 282724 - DNA, 201 bp, Homo sapiens
gaggaggtttgtctttccttataacttcattagaaaaattataatgtaaaaataattgtatggtttttttcataccttcaaacaatacattaaaagcaagkgctttttttttcccttgaacttttttgagggtggtggtgggagaagtgaaaggaaaagtattaatcctgtgagattttcagcactgcagtcaaaatttaa

SEQ ID NO: 282725 - DNA, 201 bp, Homo sapiens
tacagctatttagactgtgaagaataatctgttggtggcacttatcatacatgatatagccagtatacagaaggtctgcctatttacaaatggttatagckctctctgaatggccaggtggatcctgccaaatctgggaagtcatttgttactaacatctttcctagatgattggttggctggctggacaaatggaaggat

SEQ ID NO: 282726 - DNA, 201 bp, Homo sapiens
ggtcaggagttcgagaccagcctggccaatatggtgaaaccctgtctctgctaaaaatacaaaaattagctgggcatggtggcatgcacctgtactcctasctactcaggaggctgaggcagaagaatcgcttgagtccaggaggcggggttgcagtgagccaagattgtgccactgcactccagcctgggcgacagagcg

SEQ ID NO: 282727 - DNA, 201 bp, Homo sapiens
atgtgggtttccacacgctgctctgtccatctgagtgggaactgcaaattagtcctgcctcctatctaccatcttccctccagtataccccctgctgctastatttttaaacaaaccatgccactctcttctttaaaacacctgtgagagtttgcacttgctaacacaataaagtccaggacctttggcattttctatgtt

SEQ ID NO: 282728 - DNA, 201 bp, Homo sapiens
gccaatatggtgaaaccctgtctctgctaaaaatacaaaaattagctgggcatggtggcatgcacctgtactcctagctactcaggaggctgaggcagaasaatcgcttgagtccaggaggcggggttgcagtgagccaagattgtgccactgcactccagcctgggcgacagagcgagactccatctcaaaaaaaaaaaa

SEQ ID NO: 282729 - DNA, 201 bp, Homo sapiens
ttgtcatatcttgttggcattctttttttttttttttttttttggtaactacacaaatctcactatattgtttgtattatttaaatagttaatccatttaraatttctataaattaaatgtgttagttaatatctagaggcacatgtgaaataaataatttttaaaatgtgttagtaactctttatataggaaaataaatg

SEQ ID NO: 282730 - DNA, 201 bp, Homo sapiens
gtaaagaaatacaaatgaatagaaaaaatgcctagtagtgaatattctaaaatgttaacaatagttgtaaaaagtagaatacagatttcttgggttttaawaaaaaattgtgaaataattcagaactactaactctgaggttggttcataacttcactgatgctagcaaatgataacaaaggaaattagttgttttttaag

SEQ ID NO: 282731 - DNA, 201 bp, Homo sapiens; identical to SEQ ID NO: 57783

SEQ ID NO: 282732 - DNA, 201 bp, Homo sapiens
cattacatgtgtgatgggcctcttgaagatagtagaaggttgggtcttgttttttgtttttttttaaataaaatattattttattttttaaataaaaaaawtaaaaagtggttcttgccactctgtgccttttaactgggtacatttagaccacttacattcaaggttaatattgatatgtgaggtttgatcctgtcatgg

SEQ ID NO: 282733 - DNA, 201 bp, Homo sapiens
cctttgcatcctcatagcttagctcccacttatgagtgagaacatacaatgtttggttttccattcctgagttacttcacttagaataatggtctccaatwccatctaggttgctgcaaatgccattatttcattcctttttatggctgagtagtattcaattgtgtgtgtgtgtgtgtatatatatacacacatcacatt

SEQ ID NO: 282734 - DNA, 201 bp, Homo sapiens
ctctttatcttttggaatagtgtccataggattggtaccaattcttctttgaatgtctgatagaattcagctgtgaattcatctggtcctggaatttttgkttttttgttagtaattttttttttttttttttgagatagagtctcgctctgtcacctaggctggagtgcagtggtgcgatctcagctcactgctgcaacc

SEQ ID NO: 282735 - DNA, 201 bp, Homo sapiens
ccaaactgctgggattgcaggcgtgagccactgctcccggccgtgattgttttttacttatgctatttcactggagatttttccattcatatcctatatcttttttttttttttctttgaaaaggagtcttgctctgtcacccaggctggagtgcagtgccacaatctcggctcactgcaacctctgcctccctaggttca

SEQ ID NO: 282736 - DNA, 201 bp, Homo sapiens
atgagcattttttcatgtgtcttttggctgcataaatgtcttcttttgagaagtgtctgttcatatccttcgcccacttgttgatggggttgtttgttttyttcttgtaaatttgttagagttctttgtagattctggatattagccctttgtcagatgagtagattgcaaaaattttctcccattctgtaggttgtctgt

SEQ ID NO: 282737 - DNA, 201 bp, Homo sapiens
ctcttttccagtcctccactgccggggctgggcccggccgcgggaaggaccgaaggggatacagcgtgtccctgcggcggctgcaagaggactaagcatgratggcagccggagaggtaaagggcagctgtcaggggctaccgccgcctcgcccctcgctccaggcggcgctcccagcctcgggtccgggcagctgagtgc

SEQ ID NO: 282738 - DNA, 201 bp, Homo sapiens
tggctgtgggtttgtcataaatagctcttattattttgagatacatcccatcaatacctaatttattgagagtttttagcatgaagggctgttgaattttmtcaaaggccttttctgcatctattgagataatcatgtggtttttgtctttggttctctttatatgctggattacatttattgatttgcatatgttgaacc

SEQ ID NO: 282739 - DNA, 201 bp, Homo sapiens
tacttcttttttctatatttagtcatccatatatcttctagactttctatgtgtcctccttgttatagcttttaacagcccacctgatagcaaactagccrtcttaccctcttaaaacatctctgtttgggggataaagcatttatattttgcatattaaattacatttaatgctgtaactcagacttcctgttttggaga

SEQ ID NO: 282740 - DNA, 201 bp, Homo sapiens
ctcattggcattatcagtgcaagattaaagcttcacatcacaatgtcatatatcaatatctctggttgaatttcagaacattttataagaatgagttaaakaatcagtgccttgtttatctcatgatttttatattagttttaaatatataatgattatgttttaatttttagctttttgcactgactcctcttctctcag

SEQ ID NO: 282741 - DNA, 201 bp, Homo sapiens
gatttccacatttggtatttgtcatttataaatactgacaatattattaaactattacctttctctttcagctgcagtagactgctcggttccagtaagcrtgagtaccagcataaagtgtaagtaatttttggacattattacctttttaaaaaaaaattaaggtaaatatacataacataaaatttactgtcttaacca

SEQ ID NO: 282742 - DNA, 201 bp, Homo sapiens
gtaccgggtatcccgcaggcggggctgcggaacgcacgtcccctgcgccgtgacgtcacaatagcgactcactggacccagcccttagcaacggcctggcracggtttccctgctgctgcagcccccgtcggctcctcttttccagtcctccactgccggggctgggcccggccgcgggaaggaccgaaggggatacagcg

SEQ ID NO: 282743 - DNA, 201 bp, Homo sapiens
attatcttttgtcatgctcttactgtaatcacgttttagacattcttttgtaaggcaagccttctaaatggtggtatagtacagcaccagactgaaaaacsgttagtcttgtttgtaatctttgtttcctactaactaactaggtaatcttcagcatgtcactgtacgtccctgggcctcagttatttataaaatgggggc

SEQ ID NO: 282744 - DNA, 201 bp, Homo sapiens
aggataaagaacaatatgtaaagtttgctaactttcttttaaagaatatatatatagagctggtataggtatggtggttttaagtatgaggctgccttggrtcacatggaagctgcatcctttatcagcagtgtaaccttgaagatgtaactcatatctctgtgcctcagttttcacttcgattaaatgataataataatg

SEQ ID NO: 282745 - DNA, 201 bp, Homo sapiens
gttttcaggtttaagttagaaatttgcttcttggaatataatttttgtatgtagggttttgggatttggtagtcattgaatttctgaaattccgttgattragtattaacaatggtaactaattaagcaagcagctaaacatccttagttagaagattgagagctgtcaaaaaaaaaatagttctgtaaatgtaatgacag

SEQ ID NO: 282746 - DNA, 201 bp, Homo sapiens
gattttgggtgtatatttagaagtggaattgctaaatcatatattctatttttaattttttgagaaactaccatactattttcttttcttttcttttttcttttttttttttttttgagacagggtctcactctattgccctggggctaaagtgcagtggaacgatctcacctcactgtaacctccacctcctgggctcaa

SEQ ID NO: 282747 - DNA, 201 bp, Homo sapiens
atggaaagtttgcaaaaccagattagctattgcatagcttaaggaaactgtgtgtcctgaattttgcttgaacatttatgtatctaagattcattgagcaytgagctctactttgtgttatgtaacctaggaccctattatgtatactacttgctttctctgtcataataatatgccaagcatagacatttttaataaatt

SEQ ID NO: 282748 - DNA, 201 bp, Homo sapiens
atttgactcaattaatgtaattagtctcatcttttcttaatcctaggaaaaaatgcgccacctgctgcatgtcctgaaagtagacttaggctgcacatcgraggaaaactcggtaaagcaaaatgatgttgatatgttgaatgtatttgattttgaaaaggctgggaattcagaaccaaatgaattaaaaaatgaaagtga

SEQ ID NO: 282749 - DNA, 201 bp, Homo sapiens
attttgggtgtatatttagaagtggaattgctaaatcatatattctatttttaattttttgagaaactaccatactattttcttttcttttcttttttcttttttttttttttttgagacagggtctcactctattgccctggggctaaagtgcagtggaacgatctcacctcactgtaacctccacctcctgggctcaag

SEQ ID NO: 282750 - DNA, 201 bp, Homo sapiens
cccctcttcagcctgtgcttcgcacgtttccttcagcgtgccgccattcagactgcgccacttacgtcccagtgccacgctgcgtggatcaagtgtcaacrggaaagtatgagttaggcaagcgctttttttttaagctgtaaacgcttcacatgactggccccgtaagaaattgtgggagcttagatgagcctggagctt

SEQ ID NO: 282751 - DNA, 201 bp, Homo sapiens
gtcccctgcgccgtgacgtcacaatagcgactcactggacccagcccttagcaacggcctggcgacggtttccctgctgctgcagcccccgtcggctcctyttttccagtcctccactgccggggctgggcccggccgcgggaaggaccgaaggggatacagcgtgtccctgcggcggctgcaagaggactaagcatggat

SEQ ID NO: 282752 - DNA, 201 bp, Homo sapiens
taaaagtcagagcaacctctgtccttcccagatatggtccaccgtgcctatttaaaggacacttgagcaccaaaagtaatggtaagtgaggtgcttaaaayggcagctttgttagaagattgtctgagtgtttcctttactggcaaattatatgacatgatggaaaaattgtttcatttgacgaatatttgaacttcatat

SEQ ID NO: 282753 - DNA, 201 bp, Homo sapiens; identical to SEQ ID NO: 57779

SEQ ID NO: 282754 - DNA, 201 bp, Homo sapiens; identical to SEQ ID NO: 57781

SEQ ID NO: 282755 - DNA, 201 bp, Homo sapiens; identical to SEQ ID NO: 57782

SEQ ID NO: 282756 - DNA, 201 bp, Homo sapiens
cccatatttcttggaggctttgttcatttccttttactcttttttctctaaacttctcttcttgcttcatttcattcatttgatcttcaatcactgatacsctttcttccagttgatcgaatcggctactgaagcttgtgcattcatcacgtagttctcttgccatgtttttcagctccatcaggtcatttaaggacttct

SEQ ID NO: 282757 - DNA, 201 bp, Homo sapiens
acccagttcgagcttcctggctgctttgtttacctactcaagcctcagcaatggtggatgcccctcccccagcctcgctgccatcttgcagatagatctcrgaccgctgtgctagcagtgagtgagtatctgtgggcgtgggaccctccgagccaggtgtgggatataatctcctggtgtgccgtttgctaagaccattgg

SEQ ID NO: 282758 - DNA, 201 bp, Homo sapiens
gctcagtatttgggtgggaattacctgattttccaggtgccatctgttaccacttcccttggctaggaaagggaattccctgaccccttgcacttcccggstgaggcgatgcctcaccctgctttggcttacgctcggtgggctgcacccactgtcctgcccccactgtccgacaagccccgtgagatgaacccggtacct

SEQ ID NO: 282759 - DNA, 201 bp, Homo sapiens
tttgaaaaccctgtttaaaaatttctgaagaataccatttgaaacctttgtttttgatttcaattaagaaatgtatactttatgggaggccgaggcaggcrgatcacgaggtcaggagatcgagaccaacctggctaacagggtgaaaccccgtctctactaaaaaacaaaaaattagctgggtgtggtggtgggcacctg

SEQ ID NO: 282760 - DNA, 201 bp, Homo sapiens
agggtcttgaagagaggagtagcagggctacttttacttttaaaagcatccctttggcttcatagttgggaatagtctgaagcagaatgactagttagaaracagtaaataatccagatgagaaataatggtgactgggaccagagtggttgcagtggagagagattgaaataatcagattctggaaacatttcaaatgtg

SEQ ID NO: 282761 - DNA, 201 bp, Homo sapiens
aaggacttcaaatgttttctaaaactctctctacccaagtagacatgcaaactttgatctgaatttcctgacatttccttatttttctgtttttgttttgtttttttttgagacagagtcttgctctgtcacccaagctggagtgcagaggcgagatctcggctcactgcaacctctgcctcctgggttcaagcaattctc

SEQ ID NO: 282762 - DNA, 201 bp, Homo sapiens
actgtgacaaggccatcttaatcggggccagagatgacactctccccctgtaactcagcctggctctgtctattgggatgtgcctaaatgggatgggtgagggggcactaaacagctaacactggccagggaattaaggagctaaaatgcaagtacctcttgaataccacagcaatctctgtgcacaaatttggactgtac

SEQ ID NO: 282763 - DNA, 201 bp, Homo sapiens
agaacgactgttcgagcgacatataaaacaaaataaacatttggaggaggtttgtctttccttataacttcattagaaaaattataatgtaaaaataattktatggtttttttcataccttcaaacaatacattaaaagcaagtgctttttttttcccttgaacttttttgagggtggtggtgggagaagtgaaaggaaaa

SEQ ID NO: 282764 - DNA, 201 bp, Homo sapiens
cagtagagatggggtctcgccatgttggccaggttggtctcaaactcctgacctcaagtgatctgcccacctcggcctcccaaaaagtgctaggattacargcatgagccactatgctgagcctcttttaatctgttaatgtaatgaattacaaacaattgactttaatgttaaaccaactttgcattcctgttgtaaaca

SEQ ID NO: 282765 - DNA, 201 bp, Homo sapiens
tttttgtatttttagtagagacggggttccaccatgttagccaggatggtctcgatctcctgacctcgtgatctgcctgcctcggcctcccaaagtgctgkgataatcattgtctttttaatggggcatttaatatgtttttatttctggcttcttatttcataccttctatttgactcaatgtggtagacaaaatttgaa

SEQ ID NO: 282766 - DNA, 201 bp, Homo sapiens
  misc_feature (1)...(201): n = A,T,C or G
attccccttagtaatatgagatagaagtacattggtaatggtagagatagatatttctaattaggtactaatgtttcttacagttttcagaataagtaagnaataatttttatgctatatattgccttccttttacagtgaagaagaactgttgtatctgagtttcattgaagatgtaacagatgaaattttgaaacttgg

SEQ ID NO: 282767 - DNA, 201 bp, Homo sapiens
tccaaacgttttgagagaaaaaataaatttttctgcttagtaaatttctcaaccttaaaacaagatgctggcctagggctaggagaggacttcttagttgwagctcctgcttctctggacaactttcctcttccttcttgcaaatgctttgcagagggacttgcacctctgctgctggacctggtcaggagcaagaggaaa

SEQ ID NO: 282768 - DNA, 201 bp, Homo sapiens
gtgggcggatcacaaggtcaggagttcaacaccagcctggccaatatggtgaaacctcatctctactaaaaatacaaaaattagctgggcgtggtggtgcrcgcctgtagtcccagctactcaggagggtgaggcaggagaatcgcttgaaccccgcaaggcggaggttgcagtgagctgagatcgtgccaccacactcca

SEQ ID NO: 282769 - DNA, 201 bp, Homo sapiens; identical to SEQ ID NO: 57778

SEQ ID NO: 282770 - DNA, 201 bp, Homo sapiens
ttttgggtgtatatttagaagtggaattgctaaatcatatattctatttttaattttttgagaaactaccatactattttcttttcttttcttttttcttttttttttttttttgagacagggtctcactctattgccctggggctaaagtgcagtggaacgatctcacctcactgtaacctccacctcctgggctcaagc

SEQ ID NO: 282771 - DNA, 201 bp, Homo sapiens
gtttttctagtattacataaacaatttatctggcagtaggttttagttgttttagaaagtaaaaacaatttaagattagtatttttttctttgaatatagrtaagtacagtgatatcagatgagtctgcagatatttaatcaaataaaatcaaataattcaaaattatgtattttataagaatagatgggtctcattcttt

SEQ ID NO: 282772 - DNA, 201 bp, Homo sapiens
aggggaacatcacactctggggactgttgtggggtggggggaggggggagggatagcattgggagatatacctaatgctagatgacgagttagtgggtgcrgcgcaccagcgtggcacatgtatacatatgtaactaacctgcacaatgtgcacatgtaccctaaaacttaaagtataataataaaatttttaaaaaaaga

SEQ ID NO: 282773 - DNA, 201 bp, Homo sapiens
agtttagtgttttctaagtttctaagttttctaagttaatatttgaatttatgtagagtttgagaacatttctacattaaaaaagtaaatatcagccaggygcagtggctcatgcctgtaatcccagcactttgggaggctgaggcgggcggatcacgaggtcaggagatcgagactatcctggctaacacggtgaaaccc

SEQ ID NO: 282774 - DNA, 201 bp, Homo sapiens
gcataggcaacttacagaatgggaggaaatatttgcaaaccatgtatctgataagaggttaatatcccaactgtgtaagtaataagtacaactcaatagcaaaaaaaaaaaaaaaaaaaaaaaaaacccaaaaccttgctataaaaatgcatgaaggacctgagtagacattctcaaaggaagacatacaagtggccaata

SEQ ID NO: 282775 - DNA, 201 bp, Homo sapiens
cataggcaacttacagaatgggaggaaatatttgcaaaccatgtatctgataagaggttaatatcccaactgtgtaagtaataagtacaactcaatagcaaaaaaaaaaaaaaaaaaaaaaaaaacccaaaaccttgctataaaaatgcatgaaggacctgagtagacattctcaaaggaagacatacaagtggccaataa

SEQ ID NO: 282776 - DNA, 201 bp, Homo sapiens
ataggcaacttacagaatgggaggaaatatttgcaaaccatgtatctgataagaggttaatatcccaactgtgtaagtaataagtacaactcaatagcaaaaaaaaaaaaaaaaaaaaaaaaaacccaaaaccttgctataaaaatgcatgaaggacctgagtagacattctcaaaggaagacatacaagtggccaataag

SEQ ID NO: 282777 - DNA, 201 bp, Homo sapiens
atgaatgagacccttactattagaacatggcccagcagattcatctctaattatacctttttaactatttacaataatataattgaatatttgtgtgcccrttatgtacaaagtttcatgcctagatactgtggaggataaaaacaataacccattttgtttttataagctatattttaattttatatttaaaaaaataca

SEQ ID NO: 282778 - DNA, 201 bp, Homo sapiens
ttttgcagggaacattagtaacatcttgaggccaccacagtccaaggaaatgtgcgcaaaaagagctattaagtcactatgtccctctcttccccagcctyatttccacccaaaaaggccaggtgatcataagcgccatcacctcattgtgttccaggcaggcgatcatgatctccgacaaaatcaccacgccagtccttc

SEQ ID NO: 282779 - DNA, 201 bp, Homo sapiens
gatgtaggcatttaatactatgaactttcctcttagctctgtctttgctgtattccagaggttcagatattttgatagtttgtgtcactactatcattcakttcaaagaattttttaatttccatcttgatttcattgttgacccagtgatcattcaggagcaggttattgtacttccatttatttggcatggttttgagg

SEQ ID NO: 282780 - DNA, 201 bp, Homo sapiens
ctgtgggtttgtcataaatagctcttattattttgagatacattctatcaacacctagtttattgagggtttttagcatgaagcgctgttgaattttgtcraaggccttttctgcatctgttgaggtaatcctgtggtttttgtcattggttctgtttatgtgatgaattatgtttattgatttgcatatgttgaagcagc

SEQ ID NO: 282781 - DNA, 201 bp, Homo sapiens
tcagaaggggttataattcaacaggtgaatgatgaaacaaatcttgaaacttcaactttggatgaaaatcatccaagtatttcagacagtttaacagatcrggaaacttctgtgaatgtcattgaaggtgatagtgaccctgaaaaggttgagatttcaaatggattatgtggtcttaacacatcaccctcccaatctgtt

SEQ ID NO: 282782 - DNA, 201 bp, Homo sapiens
ggatagtccctcatggcttcccttggctaggggaaggagttcccctaccccttgcgcttcctgggtgaggcaacaccacaccctgcttcagctcaccctcygtgggctgcacatatacagtatttcatcctgtatatgtaccacattttctttatccaattcaccattaatggacacccaggttggttccatatctttgct

SEQ ID NO: 282783 - DNA, 201 bp, Homo sapiens
ccattcactcctcgcactttaaaaacagaagcaaaatctttcctgtcacagtatcgctattatacacctgccaaaagaaaaaaggattttacagatcaacrgatagaagctgaaacccagactgaattaaggtatgacacatcagcaaccaacagtaaatccttcaggaaattaaatgaaaattaatgaattaatattcct

SEQ ID NO: 282784 - DNA, 201 bp, Homo sapiens
ctcattgtgttccaggcaggcgatcatgatctccgacaaaatcaccacgccagtccttcctaccccagcactgcagtggaccaacaacggagggttggggytttggggatcacttgtgctatttgtatggcgtcgaacagactggatctcttcaagatatgctgtggaaaatcaatgaaatagaaaagtactcaaggatca

SEQ ID NO: 282785 - DNA, 201 bp, Homo sapiens
ctaactcttaaagtgattgattactgtggagatgtgtgatgacagattggcacctactaaggaaacctctcttgcctggtacattattaaaaataatccartggggaaataggactaatttaattacatgcctttatgcagtaagatccacagttgaaaaatagaggcagtagctttaattgcactgtaatgttcacacac

SEQ ID NO: 282786 - DNA, 201 bp, Homo sapiens
cctaagcccttccagtcttcaccctgtaactcttgagtcattcactacttagtcaatgctcccatactactcgtttgcttcactggtgtagcacttactgygtgcttttaagattaagtgaatatgtgggtgtgagctttatttctgaataaatctagaaaagaggcgggagcagtggctcacacctgtgatcccaacact

SEQ ID NO: 282787 - DNA, 201 bp, Homo sapiens
cactgaaaaggaaaagctgtgcagagaaaaagagcacttgaataatacatttcctattaggagcaaaggcctatgggcctctttatccaactggatttctrggtgctgtgatatttttatattttaaagctttcaaggtacatttttaaggtaggttttaaaataaatttttgtaattataccttagaagtataagtctat

SEQ ID NO: 282788 - DNA, 201 bp, Homo sapiens
cataggcttgtattatgcacagagtctctggaaggatgcatttaaacagtaacatagtatatttctgggaagggagactaaaggtcagggtagagaaatcrcttctttttcaaactccatatgccattttagctgttgaatttttttaaccacattgcgtgtattacttctcaaaaactgtttttaatgtttaaaaaagct

SEQ ID NO: 282789 - DNA, 201 bp, Homo sapiens
tttgaatatagataagtacagtgatatcagatgagtctgcagatatttaatcaaataaaatcaaataattcaaaattatgtattttataagaatagatggrtctcattctttttgagtttattttttctagccagtaaaccttgttaccacagtgcttatattttgaaggattaacaattatttattttaaattattacag

SEQ ID NO: 282790 - DNA, 201 bp, Homo sapiens
actaagaatggtgttcatatttttaaatggtagcaaaaaatttaaaaaaaagtattttgtgacctgaaattcaaatgtagttatccatagacaaacaatcwttttcaatcttttacatattgtctgtggcagcttttacactaaaaagcagagttgaccagttgtaacagactgtatcaccctgcaaatcctgaagcattt

SEQ ID NO: 282791 - DNA, 201 bp, Homo sapiens
tctggagaatattcagttttttcaacctgtttgttggtctgaaccagtgttgcactggtattatttcagtaaaactacaaaaccttaccaaaatcctttcrggacacttaactctaagattaaattacatttcaataaatattaatcactgtaagtaacaaaatatttgtctcattcaatggtccattaatttcaagtgat

SEQ ID NO: 282792 - DNA, 201 bp, Homo sapiens
ttttcaatcttttacatattgtctgtggcagcttttacactaaaaagcagagttgaccagttgtaacagactgtatcaccctgcaaatcctgaagcatttrctacctggccctttgtagaaaaaatttgccaacccttgatatagaaaaagtccattacctcaaagagttccccctagtcctttgccgtcagtcccctcct

SEQ ID NO: 282793 - DNA, 201 bp, Homo sapiens
cgtactgtataatttttatctactggatatctctgttcaatcacttaaaatttgctgtgttatattctgctttcgtaatgtatttttaagcaaaaataaakattttttttattgcatccccaggcatctaattgtgtgacatatgatgccaaagaaaaaatagctcctttacctttagaagggcatgactcaacatgggat

SEQ ID NO: 282794 - DNA, 201 bp, Homo sapiens
tgtttttctcacttttcctgcaatatctaaagcctcaaggacctttcagttgtcagtgacccagggaattctgtcagctggctgagatgttgtctcttgtkgtgagtgcaaacatttagtcagacctgtctgaagccctctcctacccttgtagctcatgaatgagacccttactattagaacatggcccagcagattcat

SEQ ID NO: 282795 - DNA, 201 bp, Homo sapiens
tgctgctgcagcccccgtcggctcctcttttccagtcctccactgccggggctgggcccggccgcgggaaggaccgaaggggatacagcgtgtccctgcgrcggctgcaagaggactaagcatggatggcagccggagaggtaaagggcagctgtcaggggctaccgccgcctcgcccctcgctccaggcggcgctcccag

SEQ ID NO: 282796 - DNA, 201 bp, Homo sapiens
tgttccctgcttgtgtctcttgcatgattcttcttggtctactgtgaactcttacccttcccctcacctctgccccctccccacgtctctctctcggcccstccctctccggtggcctcttttctttcagacagagaagattacagtatgtggggacacccatggccagttctatgacctcctcaacatattcgagctcaa

SEQ ID NO: 282797 - DNA, 201 bp, Homo sapiens
tgcgggaagcagaggcatctgccgtgcacagagcctggcgagcatattccaggcttgaggaggggtcctaaggcagggagaagttggcgagtgggcagggytgtgctttgagggctgacattggacatggggttcactgggcccaaatcctatggcgctttacaggccccagtgaggaactttgttcctagggcagtgcgg

SEQ ID NO: 282798 - DNA, 201 bp, Homo sapiens
ttgtcttcatcaaacagagaattaaaaacggttcattgtttggaggaagtgtgtataaatattgttttgtggaaatgacttttcatttacacaagtacagrtgagtgatggatgtgatataaaaatccctattttacatgtgggctgcaggcagagagtctgcggtcaccagtgcaggggctagatggggcaggctctggg

SEQ ID NO: 282799 - DNA, 201 bp, Homo sapiens
ggcagatcagcagagagggtgggggtggctcagaatcacagtcacctgtcctgaatgtccatgtccatgctggatgtcccctgcccaacacccacccaggmtgggctgtggggtcagcacctggccgggccaggaggtggcctgtgagtgaccacccccggggaggtggacgagtccctaatgtttccctcgctccccacc

SEQ ID NO: 282800 - DNA, 201 bp, Homo sapiens
ttcccctggattcgtctttcccatctctgtctctctgtccatctgtgtctgttgtggctctgtccctccctctccctctgtcccttcttgcccagcccttycttctcttaacccaccagccccacccagccctgaccacactgtccactctgctcctgtccctgcagcgaccagatggggaacaaagcctcctacatccac

SEQ ID NO: 282801 - DNA, 201 bp, Homo sapiens
tgtgaacagggagactgggcgtcacccagcccagggcctgtcctcgcagggttggagcactgcctcatgcctcttcttctgtctccgcagccaaggactaygagaacgccatcaagttctacagccaggccatcgagctgaaccccagcaatgccatctactatggcaaccgcagcctggcctacctgcgcactgagtgct

SEQ ID NO: 282802 - DNA, 201 bp, Homo sapiens
caggggctctgttctgacttctgtccatcccacctgccctggtcccacagcctcatcccaacgtcaagcccatggcctatgccaacacgctgctgcagctrggaatgatgtgaggtgacgggcggggcggcctgcatcccagggcccctccaatcccaccggacccaggccctgggctaggggcagagcaggccccgcccc

SEQ ID NO: 282803 - DNA, 201 bp, Homo sapiens
cgcagacattagcctaggcctacgcagggtcaggagatcagtatcactgtctcccacctccacaccgtgtcccactggaaggtcctctggggctgtcacaygcatggagctgtcatctagggtgacagtgccttctggatacccctgaaggacctgcgtgaggcccttgagaaggtgtggttcttttcagaaaaatgtcca

SEQ ID NO: 282804 - DNA, 201 bp, Homo sapiens
tgtgcttacccctgtgccacgctcctgcccagaggtcaccatggcatggggcgtgagagtgggagccttttggtcttggcctggctcagaaggcccacttstcggccaggcgctgtggctcacgcctgtaatcccagcactttgggaggccaaggcaggaggatcacgaggtcaggagatcgagaccatcctggctaacac

SEQ ID NO: 282805 - DNA, 201 bp, Homo sapiens
agagaattgcagccctggaaacactttaagttaccttgggaagagcactggagaacaagggagaggcttgtggtttttgttttttttttagagacagaatyttactctgtcacccaggctagagtgcagtggcaccatcattgctcactgcagcctcaaactcctgggctcaagtgatcctcccacctcagcctcccaagt

SEQ ID NO: 282806 - DNA, 201 bp, Homo sapiens
  misc_feature (1)...(201): n = A,T,C or G
ccgggctgccagcaacatggcactgggcaagttccgggccgcgctgcgagactacgagacggtgagctggggagtgggccaggcctggcacctgagccagncagatactgagggctgggctggcggggacgggtgtgaggagccattcactcctctacttaccactcagccagccagcaagtgcctgtggggccttgggcc

SEQ ID NO: 282807 - DNA, 201 bp, Homo sapiens
tctaccaagccacgggtttttgtcttggtttttgttttgcctttttatgatggaacatttcaaagacaggcaagagcagataaaagaacatgatgaacacscccgtatgtgtcacccacccatgcagcaccagtggggccagcctgtgagcgctgaccagctgccctgtgttacagcaagcccctggcacttcacctttct

SEQ ID NO: 282808 - DNA, 201 bp, Homo sapiens
attctggtacaggtcaaagaggtcctctccaagctgagcacgctcgtggaaaccacactcaaagaggtgcgcgttgtggggcagtgcggggagggccagcrggggtgggctctctggctggggaggggccacagagctcaggaactcacggatccacctccctctctccctcacaccccacccctgtgcctttcctcctga

SEQ ID NO: 282809 - DNA, 201 bp, Homo sapiens
  misc_feature (1)...(201): n = A,T,C or G
ggcaggctgaagagatgtctctgggctcagggtagccctcagcttccccatctgtgaacagggagactgggcgtcacccagcccagggcctgtcctcgcanggttggagcactgcctcatgcctcttcttctgtctccgcagccaaggactacgagaacgccatcaagttctacagccaggccatcgagctgaaccccagc

SEQ ID NO: 282810 - DNA, 201 bp, Homo sapiens
cttttcgaagggacattggaattggccactgtgctggatctaggtcgtaggcagcaaagtaatctagcacatgcctcctcttagatcacttccattcagayagggtgtggttacataggtgcgggactagtgggctatttttatcagcaggctatataactgcattcactgttagccccagtttcaccagatggtgtgaaa

SEQ ID NO: 282811 - DNA, 201 bp, Homo sapiens
gaaggcaagatgtctgtcatggacacagaagcaaatccacaattagaataatctgactgttgcgccccagtcagaataagggcttatgggggcctggtgakgaatggagttttagctcaggtccgactctcagtgggttgagtgggtccctggacccctcctgtggtcatttcccccgttccagctgcacaattggaataa

SEQ ID NO: 282812 - DNA, 201 bp, Homo sapiens
ggtccgactctcagtgggttgagtgggtccctggacccctcctgtggtcatttcccccgttccagctgcacaattggaataaatgtactcagcagctggcrgaaaatccccacgtttgttccctaagctgtggagtaagggccattatggtgggaaaggctaaatggaagccatagagctgcctctacctaggaaaattgt

SEQ ID NO: 282813 - DNA, 201 bp, Homo sapiens
cacagtcagttagaaatgcgtgttgccttgcaagcggatactagtgcctgtacacctacagcatggatctgtgaaagtaacaggaatagtcacaaccactrtttcatccagcgctcgccagggcccagggtgtgaccttcatgcagtaatataactcatttcatcttcacggctaccctgcgcagtggagactctctttgt

SEQ ID NO: 282814 - DNA, 201 bp, Homo sapiens
gtgatggcacaatcatgactcactgcagccttacctgggctcaagcaatcctcccacctcagccccccaaagtagctgggactacaggcatgcaccaccayacctggctagctttttgttgttgttgttatttttttctagagatagggactcactatgttgtccaggctggtcttgaactcctgagctcaagtgatcctc

SEQ ID NO: 282815 - DNA, 201 bp, Homo sapiens
atcatgactcactgcagccttacctgggctcaagcaatcctcccacctcagccccccaaagtagctgggactacaggcatgcaccaccatacctggctagytttttgttgttgttgttatttttttctagagatagggactcactatgttgtccaggctggtcttgaactcctgagctcaagtgatcctcccacctcagcc

SEQ ID NO: 282816 - DNA, 201 bp, Homo sapiens
ccagcttggggctggaggggtgggtgggcgggtgtgtggagtcctggagactgtggccgagaggacaagccctgagctaggttggttgggacaggcaggargggcaggctgaagagatgtctctgggctcagggtagccctcagcttccccatctgtgaacagggagactgggcgtcacccagcccagggcctgtcctcgc

SEQ ID NO: 282817 - DNA, 201 bp, Homo sapiens
ccccagggacgagaggcccaggcagggaggggaggtggtggaaggggagcccatcccagcgtgcatagcggaaatcaggagcctgggctttggcgcagttycgcctgggagagaagggaatcctggcttcctgggtgggtgacttcacctccccgggccttggttttcttgtctgtcagatgaggattgtgaaaacactgc

SEQ ID NO: 282818 - DNA, 201 bp, Homo sapiens
ggacctgtgcttgggatgctgctcaccccacagggattctcacagggcacctgaagctgagcccgcagtcctcagacaggcagttgtttgattttagcgcrctcatagctaagattgatgaagtgcacccatgcgggcagctttgctgtgcccagttttggggtgcagaaaccaaggctcggcagttaaatacgtctaggg

SEQ ID NO: 282819 - DNA, 201 bp, Homo sapiens
cctcagttcctctcttcagtggacaaaacagggaaatcttttgtcctgggcctccccagagtgtgagggagggaagtaacagcactcggtgctgctgcccrcctgcccctgctgcatgccgggccccctgtgttacttattccttcccacagccctggcaggggagccctgtgtcacctccctgttagagattaggtaacc

SEQ ID NO: 282820 - DNA, 201 bp, Homo sapiens
gttatactttatttgcataaagtacagcaagattagtgactgaccatatagactccttttaagttggctttcccggaaaatgaggaatttcggattagactttttttttttttttttttttgaggcggagttttcctcttgttgcccaggcaggagtgcaatggcgcaaactcggctcactgcaacttctgcctcctgggt

SEQ ID NO: 282821 - DNA, 201 bp, Homo sapiens
ggctttggctacttagggggagaccaataacaagatgagattaggacagaggccagatcatgcagggtctccgtgagtcattacaaagaccagtttggaattttttttttttttttttttttgagacgggagttttgctctttttgcccaggctagagtgcaatggcgcaatctcggctcactgcaacctccgcctccctg

SEQ ID NO: 282822 - DNA, 201 bp, Homo sapiens
tttattcatttttagtgattgttgggaaaatttcgtgagacagacaaatccaaccatcatctcaagttaaattttctattaaccattttttattattgtaygttaggcaagtatcatagaagtaagaaccttaaagttagatacatacatattttgctggtaactcagaaaacatagtttttatttatttatttttatttt

SEQ ID NO: 282823 - DNA, 201 bp, Homo sapiens
acagacaaatccaaccatcatctcaagttaaattttctattaaccattttttattattgtacgttaggcaagtatcatagaagtaagaaccttaaagttasatacatacatattttgctggtaactcagaaaacatagtttttatttatttatttttattttttatttttattttttttgagatggggtctcactctgtcg

SEQ ID NO: 282824 - DNA, 201 bp, Homo sapiens
ccaggatcccctccctgtgccactggagtaacagctgccccatcaggagcgcgggccaggcagcctctggaccacagccaggaggcctgaaggagtcctcraaggcgctggcattccagggagggtcggtcagatctgggctgcccggttctgcccttgtttgtttttgggaagtcccgggccctgccctcctggggctta

SEQ ID NO: 282825 - DNA, 201 bp, Homo sapiens
gagcgcgggccaggcagcctctggaccacagccaggaggcctgaaggagtcctcgaaggcgctggcattccagggagggtcggtcagatctgggctgcccrgttctgcccttgtttgtttttgggaagtcccgggccctgccctcctggggcttacagctctggagggacacactcattactcaacagtgacgatgagagt

SEQ ID NO: 282826 - DNA, 201 bp, Homo sapiens
ccctgccctcctggggcttacagctctggagggacacactcattactcaacagtgacgatgagagtggacagggctggcacaggagatcccaggggctggrgcagcccagtcgggggcctgacccagcctgggagtaaaggagggcttcccggaggaggggacatgtgagcatttgaaagattgccaggagttggcgtggc

SEQ ID NO: 282827 - DNA, 201 bp, Homo sapiens
gcgcttgtcctgcgcatggggatggtgcagcagggggcttggtcagtgtgtgtcgagaggattgttatcctgcccccccacacagacacacttcactccckccttcccttgcaaccatcacactcggagctgcttgtgtcgtgtagggaggggcaaccagggagctgggagccgcgagtctgcagttggtcgcggggctga

SEQ ID NO: 282828 - DNA, 201 bp, Homo sapiens
cgagctcaacggtttaccctcggagaccaacccctatgtatccttctcagcagagccaccctctccccacctccacccccagccgcagcctcaggtctgcrcagagtgggaggagcccttgccaggaaaagacgtgaccttggaaaggagaggcctggccatgctggggcaccaaggtgtgggtggagctgcaggctggcc

SEQ ID NO: 282829 - DNA, 201 bp, Homo sapiens
gtactgtgggtccactccatgtgggatcttgatgctgctctataatccctcacccttagttttaaaacccaagcagttctgaagaacagttgttctggtamgtttgggcagctcgttcagtggcaaaacctgacctgaactactaagaagctgctgatggtcttgattactctccagtggcatgtctggaggttttgctgc

SEQ ID NO: 282830 - DNA, 201 bp, Homo sapiens
gacaagaagtacatcaagggttattaccgccgggctgccagcaacatggcactgggcaagttccgggccgcgctgcgagactacgagacggtgagctgggragtgggccaggcctggcacctgagccagacagatactgagggctgggctggcggggacgggtgtgaggagccattcactcctctacttaccactcagcca

SEQ ID NO: 282831 - DNA, 201 bp, Homo sapiens
ggctcaaccacctctgggcctctgcacctgctcttcttgctatcggagtgctcttccctcagtctgctgctagtgcccagcttggggctggaggggtgggygggcgggtgtgtggagtcctggagactgtggccgagaggacaagccctgagctaggttggttgggacaggcaggaggggcaggctgaagagatgtctctg

SEQ ID NO: 282832 - DNA, 201 bp, Homo sapiens
cgagccctgagtgtgggttccccacccagccacacctgggcagatgtgctggtgaaggaagttggggcctgtgggtgggtggcaccttccctcacagcggsatcccccatctccccagatcatgcacggaggcctgttcagtgaagacggtgtcaccctggatgacatccggaaaattgagcggaatcgacaacccccaga

SEQ ID NO: 282833 - DNA, 201 bp, Homo sapiens
gggcgacgagcacaagcgctccgtggtggactcgctggacatcgagagcatgagtgagtcaggcctggatgctccacgctccagcccagaacattccacaygggccttctccattccctgggggtggggttgggctcaggggtggccccttgttctgtccccaggctggtgtctgtcgctcctctgcctgtgttccagggc

SEQ ID NO: 282834 - DNA, 201 bp, Homo sapiens
ggggggtgggtgaaggaagacagggaggtcaggaagaggcctctgggccagacctgacccaggaggggactcttcactcactctgtcccgctctcgacctstgtgtccacacccaagttttccccatccctgggagcgagacccccttctccctcatagtggctgtggtcactgactctcgtgtcccgttgttcacaccct

SEQ ID NO: 282835 - DNA, 201 bp, Homo sapiens
ccacttcccagctgtgtgaccgaagcaggttacttcactgcttggtgtcacagtttccccatttgcaaagagggataataatatgtgcaaccttgttactyagcagttactgagaggacaggttaagaacagggcctggcccacacctgatgctatctaagtatttccccgtgttatggtatctgctcgatgaacggccac

SEQ ID NO: 282836 - DNA, 201 bp, Homo sapiens
ggagagctgaaggaggtggactgactagtccccgcacctccccgccactggctttccgggagacaggaggcagggtcctcagtgccatactactgaggctyagcggccaagctctggctggagccacggtgaggaaaggattagaaacccagatcccttgagccctgccaagtcctcactccctgggaggtgctgacagga

SEQ ID NO: 282837 - DNA, 201 bp, Homo sapiens
tggaacatttcaaagacaggcaagagcagataaaagaacatgatgaacacccccgtatgtgtcacccacccatgcagcaccagtggggccagcctgtgagygctgaccagctgccctgtgttacagcaagcccctggcacttcacctttctcccactgattgcccagcacttttcagaaggaaagggatctttttcttaac

SEQ ID NO: 282838 - DNA, 201 bp, Homo sapiens
cccctgcaacccagccctgcctcggaggatgggctttgtgcccttggcaagaaacagcgggtctgagcctcagtttcctcacctgcgacttgggccagtgyacctccttcatggggctgtgatggcaagcacggtcgtgaccatggtgcggggtgaaggcacggtgaccgccgagcacacctgtccttatttatttgtgag

SEQ ID NO: 282839 - DNA, 201 bp, Homo sapiens
cttctctgtagaagtgatcctcacccttttcggcttcaagctcctgtacccagatcactttcacctccttcgaggtgagctgggaagtgacaaggtttggrttcattgtggggtcctgagtggggcactcactctgcaaggataatagttgcagctgtatttattttgtggactcggagatcatgcacagggcgacctttt

SEQ ID NO: 282840 - DNA, 201 bp, Homo sapiens
aaggacgcgtttacatcatagatagtgtagaaatggatgtttactctgaccatttttcagcagatggcaaacaagggtgtgaggatgggccccttattctratttgcacaagggcatgaaacaggctcctgggtggccctaaatctggcactaaagctgagtgactgagtgaacagaccagggctcgagggtgggagtaag

SEQ ID NO: 282841 - DNA, 201 bp, Homo sapiens
tcatgactcactgcagccttacctgggctcaagcaatcctcccacctcagccccccaaagtagctgggactacaggcatgcaccaccatacctggctagctttttgttgttgttgttatttttttctagagatagggactcactatgttgtccaggctggtcttgaactcctgagctcaagtgatcctcccacctcagcct

SEQ ID NO: 282842 - DNA, 201 bp, Homo sapiens
cagggcctctaccaagccacgggtttttgtcttggtttttgttttgcctttttatgatggaacatttcaaagacaggcaagagcagataaaagaacatgaygaacacccccgtatgtgtcacccacccatgcagcaccagtggggccagcctgtgagcgctgaccagctgccctgtgttacagcaagcccctggcacttca

SEQ ID NO: 282843 - DNA, 201 bp, Homo sapiens
tctttcccctggattcgtctttcccatctctgtctctctgtccatctgtgtctgttgtggctctgtccctccctctccctctgtcccttcttgcccagccmttccttctcttaacccaccagccccacccagccctgaccacactgtccactctgctcctgtccctgcagcgaccagatggggaacaaagcctcctacatc

SEQ ID NO: 282844 - DNA, 201 bp, Homo sapiens
gtggaaggattgcttgagcccaggagtgtaaggctgcagtgagccatgatcacaccgctgcactccagcgtgggcaacagagcaagaccctgtctctttgaaaaaaaaaaaaaagtaagaaacttgaagtagagcccagagtatttgctggaggaacagacacaggtgtgagacaaagagggaacgaaaggggccctctag

SEQ ID NO: 282845 - DNA, 201 bp, Homo sapiens; identical to SEQ ID NO: 57795

SEQ ID NO: 282846 - DNA, 201 bp, Homo sapiens
atgccaaaatgaaataccaggagtgcaacaagatcgtgaagcagaaggcctttgagcgggccatcgcgggcgacgagcacaagcgctccgtggtggactcrctggacatcgagagcatgagtgagtcaggcctggatgctccacgctccagcccagaacattccacacgggccttctccattccctgggggtggggttggg

SEQ ID NO: 282847 - DNA, 201 bp, Homo sapiens
ttggagacctcccaggcagacatgaggcgtccgcggtcctgattgcgcgtaggcgctggggaggtgttctctaaggcccatcagccttacagtaagtgcaycgccttctggggtcaggtgcgccacggtccagaagccaagtacacatggcttcaggaaaacaggcacgaggcccaggttgccagtgccattcatttctcc

SEQ ID NO: 282848 - DNA, 201 bp, Homo sapiens
tttgtatttaacccattggtatctttatatttaaaatgtttttcttataaacagcatatacttgggtcttgcctttttatccagttggacaatctttaccttttttttttttgaggtggaatttcgctcttgttgcccaggttggagtgcaatggtgtgatcttggctcactgcaacttctgcctcctggattcaagcaat

SEQ ID NO: 282849 - DNA, 201 bp, Homo sapiens
ggtctcagtatattgcccaggctggtctcaaattgctgggctcaagcagttctgccttggcttcccaaagtgctggaattataggcgtgagccatggtgcytagccatggacctactttttgtcaagattccccccttggtacctccagtctggaaggcaccgcagtggcaagtgcgaggcccatgggggcaagggacgca

SEQ ID NO: 282850 - DNA, 201 bp, Homo sapiens
acctgcgcaggcgcgtgaagggcgccttcagggcccgcgctttacgacacttgtgcggcagcggcggcggccacccggcgctccttcgcgacggttcggcygggtgccgctggcggccgttgccagggtaggggtcgctttgcggcatggcgatggcggagggcgagaggactgagtgtgctgagcccccccgggacgaac

SEQ ID NO: 282851 - DNA, 201 bp, Homo sapiens
cttcagggcccgcgctttacgacacttgtgcggcagcggcggcggccacccggcgctccttcgcgacggttcggccgggtgccgctggcggccgttgccarggtaggggtcgctttgcggcatggcgatggcggagggcgagaggactgagtgtgctgagcccccccgggacgaacccccggctgatggagctctgaagcg

SEQ ID NO: 282852 - DNA, 201 bp, Homo sapiens
ggaccagaagaaactgcaccggaaatgtgcctaccaggtaatgcatctgtcaggtactgggcacccgggaaccctgggatggcatcacagcactgccagcygcgggcactgagcaaaacgacaggagaagggcggccatgacagccaacaccaaacaggagtcgtgtgccggacactgtgccgagggcttaccacatgatc

SEQ ID NO: 282853 - DNA, 201 bp, Homo sapiens
tgagccatggtgcctagccatggacctactttttgtcaagattccccccttggtacctccagtctggaaggcaccgcagtggcaagtgcgaggcccatggsggcaagggacgcatgcacagttctgggccttgagggtgccaggctggaggacactgatgtacctggaggctgagctttctcttctgtccccgtgttggcc

SEQ ID NO: 282854 - DNA, 201 bp, Homo sapiens
tcagttccaccagttcacagcagtggtgagtcacccctcagggcccctgccccttccatcccggcctggggacaaggaggctgagaccctggtaaggggcrggggtaggttctgccggtgggtgctcaggggctctgttctgacttctgtccatcccacctgccctggtcccacagcctcatcccaacgtcaagcccatgg

SEQ ID NO: 282855 - DNA, 201 bp, Homo sapiens
cctgcaacccagccctgcctcggaggatgggctttgtgcccttggcaagaaacagcgggtctgagcctcagtttcctcacctgcgacttgggccagtgcamctccttcatggggctgtgatggcaagcacggtcgtgaccatggtgcggggtgaaggcacggtgaccgccgagcacacctgtccttatttatttgtgagtt

SEQ ID NO: 282856 - DNA, 201 bp, Homo sapiens
cctgggctgagctctcccctgcaacccagccctgcctcggaggatgggctttgtgcccttggcaagaaacagcgggtctgagcctcagtttcctcacctgsgacttgggccagtgcacctccttcatggggctgtgatggcaagcacggtcgtgaccatggtgcggggtgaaggcacggtgaccgccgagcacacctgtcc

SEQ ID NO: 282857 - DNA, 201 bp, Homo sapiens
ggccaagtacacagcccagatgtacgagctctttagcgaggtgttcgagtggctcccgttggcccagtgcatcaacggcaaagtgctggtgaggacggcgygagccctgagtgtgggttccccacccagccacacctgggcagatgtgctggtgaaggaagttggggcctgtgggtgggtggcaccttccctcacagcggc

SEQ ID NO: 282858 - DNA, 201 bp, Homo sapiens
gagtcaggccataagcagggcaggcgcagcgggtccgagtttctcggcacagcactcacccttagctcaggcagtgcaccttggtggtctctctgacttaytatacagagaatgctgggtatgacttgccaaactcattcaccagaaactaacccactagggtaaaaacccttatgtcaggcttcaggctgtcactagcag

SEQ ID NO: 282859 - DNA, 201 bp, Homo sapiens
acagagaatgctgggtatgacttgccaaactcattcaccagaaactaacccactagggtaaaaacccttatgtcaggcttcaggctgtcactagcagcggsatttcctgccctggaaacctgacttcccccagctgcctgcatgcctcaggcaggcacggctcccttctgggctgctgctcattgtctgcatgttggagat

SEQ ID NO: 282860 - DNA, 201 bp, Homo sapiens; identical to SEQ ID NO: 57798

SEQ ID NO: 282861 - DNA, 201 bp, Homo sapiens
gtgagttcagctgtggaaccctggaaggaggggaggtcttggggctcctgtgctagtgacgggcacacttcagagagttcacccacaggtgcacacgcacgtgcacactgtgagtgctgcagaggacatggattgggtgggctggtgctgggtgctcaggaaggcctctccagggaggcgaggtttgagctgacactgcgg

SEQ ID NO: 282862 - DNA, 201 bp, Homo sapiens
ggcccccagtggggacaagcctctaaggctgtttaagccttggctctcctgcctgtcaaatgggcacgagggagggatcaagcctggctctgcaggtgcaracagggcatttgaccttgagcaagacctccatggcttgtctgtaaaatgagcaccagatggtccttactcccgtggagacatgaggattccacaggtcac

SEQ ID NO: 282863 - DNA, 201 bp, Homo sapiens
atacaaaaattagccaagcgtggtggcacgcacctttagtcccagctactcaggaggctgaggcaagaggattacttgagctcaggagctcaaggccgcartgagctatgctctcaccactccactccagcctgggcgacacagtgagaccctgtctcaaaaaaaaaaacaagaagggtgatatgctgccagggacagcag

SEQ ID NO: 282864 - DNA, 201 bp, Homo sapiens
ctcctcattgggaaggatgccaggggctgcctggcactgtcttcctcccctgccttacacccacccacagcccaggtggagctgcctggcagggtgccctrggcctgcccagacagggaggaggccgtggcctgctgggcctgggctcttctcaccccgcttggcgcacacacctgtttccagcatggatgagcctcaccc

SEQ ID NO: 282865 - DNA, 201 bp, Homo sapiens
gagcctgttgccccccaggacctgggatccaggctctcaggagtcctggggctgggcaggcagccagaggggcctggcactgagctggcacggaggagaayggccctgctggcccaggccccttgctgtctgtcaggcagtagcaggcacagagccccaggctccagggctgtgggaataacaataaaaaagaataatgac

SEQ ID NO: 282866 - DNA, 201 bp, Homo sapiens
ctaatcccagctactcgggaggctgaggcaggagaatcgcttgaacccgggaggtggaggttgcagtgagcctggatcttgccactgcactccagcctggrtgactgagactccgtctgaaaaaacaaaaacaaaacaataaaccctcccaacccgccaaaatgctggttaaggattctaaatggctcaacttggccagct

SEQ ID NO: 282867 - DNA, 201 bp, Homo sapiens
acactcgagcccgggcccccggcacgtctaggccgcggcccatgggctccgccgcctgcccccggggagccttgccggagctcgcgccctgctgccagccycgcgagcagtcgcagccccacacgcgatgggacgcgggctgtgggattcagcaccccgggggcgaggaattcaggaccctcggcggggcaagggcctata

SEQ ID NO: 282868 - DNA, 201 bp, Homo sapiens
tattttctcagttgatgttgggagaccagatttcatatacaaatagtatacaacctttcttatggtgagctgcatcttaggggggaaaatcctcttttagsgtaacatacaaacactcacttgccaaataatcatcaaaacattttgaaatcagcattaaatttaaaaagctccatcaatccatataatcagtattttatt

SEQ ID NO: 282869 - DNA, 201 bp, Homo sapiens
tacatttgcaaattttgtatatataagggcactaaaatgaaatacttctgggaacattttaactgattctcactaaactaattttgtacatgagctgaaamagtggctcaaacattgattttactttcagtagattactttctcacaaatggtaactcattgaaattcatatatgtaaatgtatcttaagttttcccatag

SEQ ID NO: 282870 - DNA, 201 bp, Homo sapiens
ctctcacacacacacaccccttctttattcagaaaattttcagtgaagtagttttggtgtttttcacacacacacacacacacacacacacacacacacamcccttattcagaaaattttcccgtaacacttatctcagtttttcttgagacatataattcttttgatttttgtgcctatagaaaattggggataatctga

SEQ ID NO: 282871 - DNA, 201 bp, Homo sapiens
aaaggccattctgatactctgtatcccatatgataaatccaggtaaattggattgtactaaaatttggagatgatacctgccgattttaggctttgtgctrtataataggtgtggcttctgatgtaaaactggtactttcctacagaggcgttggggctgaacctctgctcccatggaaccggatgctgcaaacccagaat

SEQ ID NO: 282872 - DNA, 201 bp, Homo sapiens
tggaaaacaaatggatttgttttctcaaactttagtttcagctgtcttattaaatctcttgttataaccattctcctgcagaagtggttatctctgtgacsctgggattttctcttctccctgggagcttattaccttggctatttccttcattttcttagtttcaggtctttctgtgcatgacttggagatcttcatctg

SEQ ID NO: 282873 - DNA, 201 bp, Homo sapiens
tacaaaaaatacaaaaattagcctggcgtggtggcttgcacctgtagtcccatctacttaggaggctgaggtgggaggattgcttgagtctgggaggtctkggttacagggagccacgattgcaccactgcattccagcctggaagacagagtgaggccctgtctcataaataaataaatgaataaataaatattttaaaa

SEQ ID NO: 282874 - DNA, 201 bp, Homo sapiens
ctgtagataacgcagagttagatcatgtttttaaaatccactttgacaagctacctttttgttggattgtttgatccattcacattttaatgtaattattratagagttacattttactttttgttttttgtatgtctcatgtcatttttctctatttctcctttgtgctttcttttgcaatgagaggatattttctaata

SEQ ID NO: 282875 - DNA, 201 bp, Homo sapiens
cagctgaccttgattaaagttgtaaaggatgtgagggagcacactgcagatgttttcaggaagcacattacagacagagggaatcaccagtgccaaggccctggggcaggaacatactcaggatgttcacagaacacaaaggagccagtgtggaaggagcagaggaggcaaaggaagagcagtaggagatgaactcagaaa

SEQ ID NO: 282876 - DNA, 201 bp, Homo sapiens
gagtttatcttccttcggcttaatgttcttcgtgaggtatgtagcaataatcattgaaatcagcactctaaagcagggtgcctttgatagctgtaatggcrgcattcctttttggttgtagtatttggaaagagaactcacaatggccagcctaccattcacatttgatgttgagaggagcattgatgactgggttttcat

SEQ ID NO: 282877 - DNA, 201 bp, Homo sapiens
tagtcaaaagaaacttgtcaggtgaaaatataatggtgaattttaaaatgaaactcatggctgttttactttcaactgctgttccaataatgtctctaacyaccttacatgctcagtaaatgtctgctgtgactgcttttggttttacttgatgatgacagctctagagatggaaagaaatgtcaccaaatgtattttaag

SEQ ID NO: 282878 - DNA, 201 bp, Homo sapiens; identical to SEQ ID NO: 57811

SEQ ID NO: 282879 - DNA, 201 bp, Homo sapiens
tttccttagtggactttatgtaagtaatattgcagttcttcaagtgaagaatcagtaaggagccatcctcaggccaaatttggtgtaagttaacacactaygctacactgtgctgctccctacagtttccccctctggtcatctctgtgcaagggctgaaagcagaaggctgcgtgtcctcatttgttgccagctgggaat

SEQ ID NO: 282880 - DNA, 201 bp, Homo sapiens
atataatttgtgtatcatgaaattgacctgctgaaagtgtatgattcagtggtttttagtatatttacagagctgtgcaatcatcactattatctgattttagagggtcttcattctcaaaagtaattagcagttgctacccatctccctcccctgtctccaccctcacctgaagcaaccattaatctactttttatattt

SEQ ID NO: 282881 - DNA, 201 bp, Homo sapiens
agaaagctatagtgctgtaaacattttcctcaaatcagctttggtttgcttgctttttgaaactcagaggtctatctgaggaagccggaggtgattcgatycacatttacaggctgttgccaagtcatttgcatactttcaatataggttgatggagcaggcacagtacttatggttccttcaagtttggaggggttaggg

SEQ ID NO: 282882 - DNA, 201 bp, Homo sapiens
ttcattgcatatgtattcgtccctgagcaatattgaatgctgttttatttattcataactttctgtaagtggtatactgtatatgttcttttttttttttttggcttagtatgtttgtgaccatctagctctagctcttccaatctcacttgcatctcacaagtatatggatgttatatgagcttattcttttcctgatgg

SEQ ID NO: 282883 - DNA, 201 bp, Homo sapiens
tgaagtgatctgcctgcctcggcctcctggagtgccgggattacaggctgagttactgtgcctggcctaattgctaatttttagaatttaggatatgtcartttctgtgcttctatcccagattttaaaacataatttcctaggcaaatttttagttttgtaagtatttgcaaaatatataattagtctagacatgtgata

SEQ ID NO: 282884 - DNA, 201 bp, Homo sapiens
aatggaatcatccatccctgtactcatcctgaagacaagtacgtaacccatttttgtcactgatatagcaaatcacagaggaaacattatattatattacrttgtttggttgtcattatagaccagcaccaaaaaatgaagatgaaatgatggttgcaatttttgagtacattgacagacttttcagtattgtaagaccaa

SEQ ID NO: 282885 - DNA, 201 bp, Homo sapiens
tagtcactcttcttttcttgattagtgttgctagaatctatttaattttttttttttgagaacctgtttaattttattgtttttttttcctcccattgaastaacctttagctttgttgatatatagatatttgttcttttccctccatgtacatttgttttctattgatttctgcttttgtcttcattattctcttctac

SEQ ID NO: 282886 - DNA, 201 bp, Homo sapiens
gcattttccactttcttccttatttcccttattagaaggggaggcaggcttgatgcctggcggtgtgcataacctccctcccaccgtgaaccgtgcatgcrataggtattctaatagtttggcaaagtgctaaaaacgccctgctgaaacacagatacctgcttcaaaacactttatttgcaagtcttgctttgttacttg

SEQ ID NO: 282887 - DNA, 201 bp, Homo sapiens
gggaatagatgaagtttgttgacaagtagaaagtaacacagtgcactgagtattgaccgttaagtactctgtttgcgttttactcctactgtcaagatttmaactcactagacactgtcttaacacatcttagatatctctttcctatgagtataacttgcttttgttttctttttgctgtgtttactcacatgtttttat

SEQ ID NO: 282888 - DNA, 201 bp, Homo sapiens
atcatatctaggtgtttagctctgactatgtgatctgaatgttgctgtttggagactgattaaattttcaagctgcttaacctagaaagttcagttatacktagacacttaatatagtttgccttaatcttctctattgaaagagttcttcctcaaaatgaaatatgcagaaatcattctgttaagagatcaatatgtatg

SEQ ID NO: 282889 - DNA, 201 bp, Homo sapiens
ttaaaatatgttaattaaaattaacgtattatgttaattgagttaggtacaaagggaagataatactgaatttaaagtgacagctaagtctttgaaatacyaataaaatctgcatttttctaagatgactaatagatttttatttgttgattgatttttaaaactgaacatataaagtaatttaagttatctaacacagtc

SEQ ID NO: 282890 - DNA, 201 bp, Homo sapiens
aaagtgtagacaaccttgtaatattaacgaagatcatttggttttttagtgagttttgtaaagtgcttacagtttggactttattccattgcccttctttyctttctgtcatctaactgtgttgtgatttaattttaatttctacattcattccatttatgttagagagatcaaccagctttcactcctagtggaatatta

SEQ ID NO: 282891 - DNA, 201 bp, Homo sapiens
tgagttttaattaatttcatgagattggcaatagcgtaattttacaatttatgaggaagatgttcattacagtagctttattccttgtccagtaggacttrgtcagggacgtaagtgtccacccagttacctttttacctgtagaaagaacactggtgtcgatttaaagaaggtcctctaggctctgatgtctgaagggat

SEQ ID NO: 282892 - DNA, 201 bp, Homo sapiens
gagtcccacttctctcttttctccattgtgccatgcatgctatagaataagagccctttttagataacagagtctaattaaattgtcttgctgattttttwaaaaatggataccttagttattaactaccttcaactaaaccttaagaattgttgagttgtttattttattttattttattttttaacttacttgtatctt

SEQ ID NO: 282893 - DNA, 201 bp, Homo sapiens
gcacaaaaaagggagagatccataaggtccacccaggtggtcttctgtttgtgcgtgactaccacccttagagataggcatttaacagaccagcagaacamatgatagaaaaggaatacattaatatttgttattggctaagcgtggtggctcatgcctttaatcccagcactttgggaggctaaggtgggcagatcacct

SEQ ID NO: 282894 - DNA, 201 bp, Homo sapiens
agctagtgatctcttatttttaaaactttgggtgtcattttatgtaacatagtgagttgactgtaagcattctttccaaaagccttcagtacttggtaatstttttatgtgatgtcaagagttttttgcatatagaattcaaattacagaactagctttgtctggaagatcagatgtcaattggaacatttttaactactt

SEQ ID NO: 282895 - DNA, 201 bp, Homo sapiens
gtgtcattgaatcttattttctgttttcatcaactttgtatactgtagctagtgatctcttatttttaaaactttgggtgtcattttatgtaacatagtgrgttgactgtaagcattctttccaaaagccttcagtacttggtaatgtttttatgtgatgtcaagagttttttgcatatagaattcaaattacagaactag

SEQ ID NO: 282896 - DNA, 201 bp, Homo sapiens
agtcttgctgtcacccaggttggagtgcagtggcgtgatcttggctcactgtaacctccatctcccgggttcaagcgattctcctgcctcagcctcccgastagctggggctacaggcatgcaccaccacacctggctaattttttgtatttttagtagagacggggtttcaccatgttggccaggctgatctcgaactcc

SEQ ID NO: 282897 - DNA, 201 bp, Homo sapiens
tgcagacatgccatctgattttgagaagggtacgaaaccggtaagcttaattacttaaagtcataaagtttatagaattctggattagataataatcttgrgtctttaatgttttttcttttttcagtttaaaccactagaacaacttatgggggtatttccagctgcaagtggtaattttctacctccatcatggcggaa

SEQ ID NO: 282898 - DNA, 201 bp, Homo sapiens
aaaatgtttgctgacccctgatctagacgtggttgattttatgggtaatttttattttaaaatgcattggtgagcttttaaaaattaaatacttgtgataytaaaatggattgtgcgttagaaaaagccttaaaatttgcttggttggaaaaaattactggacgtagagtagacttgtttcatcttcattcctgttcttgc

SEQ ID NO: 282899 - DNA, 201 bp, Homo sapiens
caaaagatgaaaccaagtactagaaagaagaaaggacacactcaagccctagggagagtaactggcttgcttgggggcatcttagtaactaaagtgagaayatattactggtatccaggtagccatttgttcatttatttaaaatttttatcaccatggagttaagattcagaaaacatgattttccatataagccatttt

SEQ ID NO: 282900 - DNA, 201 bp, Homo sapiens
cccggcaaatttttttgtttttttttagtagagatggggtttcattcactgtgttagccaggatggtcttgatctcctgacctcgtgatctgcccgcctcygcctcccagagtgctgggattacaggcgtgagccactgcgcctgtccgggtctggcttttttatacagtttgagaatctctgccccctctttttattggg

SEQ ID NO: 282901 - DNA, 201 bp, Homo sapiens
acagagttaatggaaacattttggattttttgtttggatgatgatgatgttggttggttgtttctgagcctaaaggggcctttggtatttagtacatactrtgttcacaagattattaaatttataaaacaggccgggcgcggtggctcacacctgtaatcccagcactttgggaggccagggtggtgggtggatcatctg

SEQ ID NO: 282902 - DNA, 201 bp, Homo sapiens
aatatttaatatttaatatataatataatatatgtttatatatattttatatatatataaatataaataaatgtagtgggtaggatatatatatatatatmtcttaaatgtagtgggtagaaaacaagctagatgatgctgtagtttccccttgatatagttctcttaagtgtatgactaaataatgttttagcaatttcc

SEQ ID NO: 282903 - DNA, 201 bp, Homo sapiens
aaagtggacgtttttgtaggtaacataacaattgggtctggcttttttttatttttattttttattttttattttttttgagatggagtcttgctgtgtcrcccaggctggagtgtagtggcgcgatctcggctcactgcaagctccgccacccggtttcatgccattctcctgtctcagccttccgagtagctgggacta

SEQ ID NO: 282904 - DNA, 201 bp, Homo sapiens
tctaattaggatagagaggcttgcccagaggagagttacagagttaatggaaacattttggattttttgtttggatgatgatgatgttggttggttgtttytgagcctaaaggggcctttggtatttagtacatactgtgttcacaagattattaaatttataaaacaggccgggcgcggtggctcacacctgtaatccca

SEQ ID NO: 282905 - DNA, 201 bp, Homo sapiens
ttttctccctaatataggattctagtataattgacttctatcctgaagattttgctattgatttgaatgggaagaaatatgcatggcaaggtaaaatttakacgttcttttctggtaaaactgtgaacaaacataatttttgaaatgaaataattctgtaaaagataaatattttagcctgggcaacatggtgaaatctca

SEQ ID NO: 282906 - DNA, 201 bp, Homo sapiens
ggaagttaggatatagagaagaggtgacttttgttccatttctttaacaatgaagaataattgggagattggtgggtggtggtgggagatggatgggacarggtttggggagggaggaccttccagatttctcaaatgtggcaggtaaacacactttccgtgcctttgaccacactgacatgttttggcaactacaggtgg

SEQ ID NO: 282907 - DNA, 201 bp, Homo sapiens
attacctagatttattttgtacaaatggttttcatccctattactaagtgttgtctttttaaatggtcagaaagccagcagcagtactgaaacctagtgaytgggaaaaatccagcaatggacggcagtggaagcctcagcttggctttaaccgtgaccggaggcctgtgcacctggatcaggcagccttcaggactttgg

SEQ ID NO: 282908 - DNA, 201 bp, Homo sapiens
agtgtagccctgagtactcagtctgaataaagcatttggtttctgtagcccagagaaccttaaatgtgacttctcttcattttagtctgtaaacttgtcarttagccacgttgaaaagtgatttttgactagtgctatcagtaaacatggaatcttttctgtgattgccacgctgattaggtaaattgtcacttgagaagc

SEQ ID NO: 282909 - DNA, 201 bp, Homo sapiens
aaagtatgataagttcaggcaaatgctgcagacaatgaagaaaggaaatctgatattttcctaatattctttaagcatagtccaacatatgatttgtcggktttttctttttttttttttttttttttttttttggtcagtcttgctttgccacccaggctggagtgcagtggcgcaatctcagctcgctatacctctgcc

SEQ ID NO: 282910 - DNA, 201 bp, Homo sapiens
atgtaatacaataaagacagtatacatgtatctatgcacatctgttcacaaggaaggggtaatcattggttgggtataggtcatcagttggcaaacttcartcctccaggtttggcctgtgagctatgttttttacatttttaaagtgttgttaaaaacaaaataaaacatgaaagactattaaacagagatcatatatgt

SEQ ID NO: 282911 - DNA, 201 bp, Homo sapiens
tgacttcctccctcatttgccatcgttagagattaggtatgtgcatttgtgtagcttttcaaacgactgttttaggcttcttgactttactgtgcctactrgtcctaatgcataatgtttgtctcttgctgacagggaaaatgcaattgaccgtttggttaacatatacaaaaatgtggtacacaaaactggggtaagttc

SEQ ID NO: 282912 - DNA, 201 bp, Homo sapiens
atttatttatttatttatttatttatttatttgagacggagtctctctctgtcgcccaggctggagtgcagtggcgcaatctcggctcactgcaagctccrcctcccgggttcatgccattctcctgcctcagcctcctgagtagctcggactacaggcgcccgccactacactcggctaattttttgtgtttttagtaga

SEQ ID NO: 282913 - DNA, 201 bp, Homo sapiens
ttccaaaatgccttggttattttatgttcgacagggaactagtattgagttgctgtttaatctgtggtcaatgatctttaatttcttttcttctttcttasatttttcaaccttttaactccccatacctttaaaatggagaatttcccaagtgtttaatccttagtggcagtctatgttgtaggtccacgtatctagagg

SEQ ID NO: 282914 - DNA, 201 bp, Homo sapiens
tgcattggtgagcttttaaaaattaaatacttgtgatattaaaatggattgtgcgttagaaaaagccttaaaatttgcttggttggaaaaaattactggaygtagagtagacttgtttcatcttcattcctgttcttgcagcatgatgaacttgccgatagtcttccttgtgcagaaggagagtttatcttccttcggctt

SEQ ID NO: 282915 - DNA, 201 bp, Homo sapiens
gcagtgctgaaagtgctacttgtggtataaataaaagcactgttcagtttccttattttcaaccatgcttaggttttaaatttttatttactttgcccttratgtgtttatgaagacaatcaagcatttaaaatagtgaggttacctattaaggaaaggatctgttatgctacttgggggaaagctggtctggtacataaa

SEQ ID NO: 282916 - DNA, 201 bp, Homo sapiens
  misc_feature (1)...(201): n = A,T,C or G
tttttttataggttattttatctgatgctagtgctcctggtgaaggagaacataaaatcatggattacattagaaggcaaagaggtaaagcttacttaccnatatttgattatatgttctatttttaaaaagccattgcatagaaaatacttggtatgaagtgatattcttgtggtatataatatattaatataaatacat

SEQ ID NO: 282917 - DNA, 201 bp, Homo sapiens
ggagagtagctattaaatagatactaaccagatattaatgagatttttgaaagtatacaacaatgacatcgttttgctttgtaaaaaaatagctttttatmagaatgttatttatgttaacatgtagggttatcttttagtattttaaaaatttcttagtcataatttttaatgggtaaatgttcataaatataaccacta

SEQ ID NO: 282918 - DNA, 201 bp, Homo sapiens
ggatatagagaagaggtgacttttgttccatttctttaacaatgaagaataattgggagattggtgggtggtggtgggagatggatgggacaaggtttggrgagggaggaccttccagatttctcaaatgtggcaggtaaacacactttccgtgcctttgaccacactgacatgttttggcaactacaggtggtttgaatt

SEQ ID NO: 282919 - DNA, 201 bp, Homo sapiens
aaacagccttggaggtgatgtcttatttgtggggaaacatcacccactccatgacttcattttagagctgtaccagacaggttccacagaggtatgttacrcaatttggttaattagaaatgcactttttaaaattttggtaaaatatgcataacataaaatttaccattataaccatttttaagtggttattctgtggca

SEQ ID NO: 282920 - DNA, 201 bp, Homo sapiens
tgcatatgtattcgtccctgagcaatattgaatgctgttttatttattcataactttctgtaagtggtatactgtatatgttcttttttttttttttggcytagtatgtttgtgaccatctagctctagctcttccaatctcacttgcatctcacaagtatatggatgttatatgagcttattcttttcctgatgggcttg

SEQ ID NO: 282921 - DNA, 201 bp, Homo sapiens
aatggaataatccatgagtaaaagcccttgtaacagtgcttatcacgttaagtgctccgtaaatgctagtggtaattattagtcctcattcactaacgtcrtataaaaatgaagatctaacacacgtacaacttgaaaaaatactaatcacccataagtgttaaaattgtcttattataggttgaatttttaagccaaaat

SEQ ID NO: 282922 - DNA, 201 bp, Homo sapiens
aaatcacctgtgaacttgttttgtatgctagctagaaagagtgagacccagccgggaagtaggaaatgttagagtacgtaaaccctttactttctgcctgyctgaagcccatagttgtcaattctaaaattcttctacagtaatgctttttcatcttttaaaataacattgttcattttgttttactatacttgggattaa

SEQ ID NO: 282923 - DNA, 201 bp, Homo sapiens
tcggtgtcccaaattgctctgattatagttatgagccactgtgcctggctgtgtgtgtgtgtgtgtgtgtgtgtgtgtgtgtgtgtgtgtgtgtgtgtagrgtctcattttgtcacctaggctatagtgcagtagtggcacaatcagctcactgtagtttccaactcctgggctcatgcagacctctgccttaatctccta

SEQ ID NO: 282924 - DNA, 201 bp, Homo sapiens
gacagagtctcactctgttgcccaggctggagtgcagtgacgcgatctcggctcactgtaacctccgtctcacaggtccaagcaatttctcctgcctcagyctcctgagtagctgggattaccgccgtgtgccaccacacctgcctaatttttttgtattttttgtagaggtgggatttcaccatgttggccaggctggtc

SEQ ID NO: 282925 - DNA, 201 bp, Homo sapiens
tgctatcacacctggctaattttttgtagagatgaggtttcaccatattgcctaggctgatcccaaactcctgggctcaagtgctctgtctcggtgtcccraattgctctgattatagttatgagccactgtgcctggctgtgtgtgtgtgtgtgtgtgtgtgtgtgtgtgtgtgtgtgtgtgtgtgtagggtctcatttt

SEQ ID NO: 282926 - DNA, 201 bp, Homo sapiens
tatttaaggaatcctttgtcaaagccaaggtctcctgtgttttcttagagaagttttatagttttacttcattctgtggtttccattttttggtctagtcrtatggtgaattatcggtctttaaatgctaaagccaccttgcattccttggataaacctcacttgatcatgttgtattatttttatatacgttgaattcaa

SEQ ID NO: 282927 - DNA, 201 bp, Homo sapiens
ggttttaacttgcatttccttcagatgcttatttgctttctgtatatcatcacgggcagggtgaggcatctgttcagatcttttgctcatttttatcttcrgttgtcttacttaaatgtagagtttgttacatattctagatagaaatccttagtttgatatatcttttgcaaatattttctcttgatctgtggcttgtct

SEQ ID NO: 282928 - DNA, 201 bp, Homo sapiens
ttccacatttttgctgtgaagcaggtttactgtgtgttgcttaccaacttgtctgagtctgaggagacaaggacatccatgtacaatgttacatgaagagkgtttattatttacaaatagacagtaaaggacaacagaagcctaggattcattctgaatgggtcccccatggctcaggaaacatgcccggggcagatagag

SEQ ID NO: 282929 - DNA, 201 bp, Homo sapiens
tttaggtagtccagtgtactgttaccttattgtggttttaacttgcatttccttcagatgcttatttgctttctgtatatcatcacgggcagggtgaggcrtctgttcagatcttttgctcatttttatcttcggttgtcttacttaaatgtagagtttgttacatattctagatagaaatccttagtttgatatatcttt

SEQ ID NO: 282930 - DNA, 201 bp, Homo sapiens
catatattcaagggccttcctgcctaaccctctagaaatagttaattctacttaactttctaattaggatagagaggcttgcccagaggagagttacagarttaatggaaacattttggattttttgtttggatgatgatgatgttggttggttgtttctgagcctaaaggggcctttggtatttagtacatactgtgttc

SEQ ID NO: 282931 - DNA, 201 bp, Homo sapiens
tcaagccattcttctgccacagcgtccagagcagctaggactacaggtgtgcgccgccacgcccagctgatttttttttagtagagacggagttttgccaygttggccaggctggtctcgaactcctgacctcaagtatctgcctgcctcgtcttttaatttttggatagtattctgtgtgtagatacaccacattttatt

SEQ ID NO: 282932 - DNA, 201 bp, Homo sapiens
ttggggctttgctgctcatttgggtgctcatttgggcttttctttgtgttggcatctcatagtagtttatggtaagacttctctcagaatactcactgttsgatgtttttctcattgttgattgatagctgatctcattatgcttggccttgccacacatgaaccgaactttaccattattagagaagaattcaaaccaaa

SEQ ID NO: 282933 - DNA, 201 bp, Homo sapiens
agaataaaatcttctgataagactttatttagcaaatgatgatcaatgtcacacaccttgcctattttgtatcctctgtagtacttgatatagaccttggyacacatcactttgaatctagtgaaattacaattaattagtctaacatactggttaaggtaccatctctgagtcatggttttaaatcctagttcctgaatc

SEQ ID NO: 282934 - DNA, 201 bp, Homo sapiens
tggtgaaggagaacataaaatcatggattacattagaaggcaaagaggtaaagcttacttaccaatatttgattatatgttctatttttaaaaagccattrcatagaaaatacttggtatgaagtgatattcttgtggtatataatatattaatataaatacatgtttctctcttgtttagcccagcctaaccatgaccca

SEQ ID NO: 282935 - DNA, 201 bp, Homo sapiens
ttcatgctgtcatgttagaataaaatcttctgataagactttatttagcaaatgatgatcaatgtcacacaccttgcctattttgtatcctctgtagtacytgatatagaccttggcacacatcactttgaatctagtgaaattacaattaattagtctaacatactggttaaggtaccatctctgagtcatggttttaaa

SEQ ID NO: 282936 - DNA, 201 bp, Homo sapiens
taacaatttttttataggttattttatctgatgctagtgctcctggtgaaggagaacataaaatcatggattacattagaaggcaaagaggtaaagcttayttaccaatatttgattatatgttctatttttaaaaagccattgcatagaaaatacttggtatgaagtgatattcttgtggtatataatatattaatataa

SEQ ID NO: 282937 - DNA, 201 bp, Homo sapiens
ttgacttgatttatttagtagcagaaatatcatatcgcttcagtggaatgatcatggaagtgcacccattggggttatataagggttgtgtgcttcatgakcatgtattattacatgttaaatggattggagattcgggtttttcaaggtgctttgtggaggatgtcttgattaaagcagagagagaagatgcatgggaca

SEQ ID NO: 282938 - DNA, 201 bp, Homo sapiens
ggcgggcggatcacgaggtcaggagatcgagaccatcctggctaacacagtgaaacaccgtctctactagaaatacaaaaaattagcctggtgtggtggcrggcgcctgtagtcccagctactcgggaggcagaggcaggagaatggcgtgaacccgggaggcagagcttgcagtgagtcgagatagcaccactgcactcc

SEQ ID NO: 282939 - DNA, 201 bp, Homo sapiens
gtaattgatttgagattttttttttaattaactttttcagagccaaatacttctgaagagatatttcttaatctaagcatttgcaactataaatttccatstgaacactgctttatatgtattccataacattttgtatattgtgtcttcatttgtattgatcccaaagtagtttctggtttcccgtttgatttcttccta

SEQ ID NO: 282940 - DNA, 201 bp, Homo sapiens
gcagtggctcgcgcctgtaatcccagcaatttgggaggccaaggcgggcggatcacgaggtcaggagatcgagaccatcctggctaacacagtgaaacacygtctctactagaaatacaaaaaattagcctggtgtggtggcaggcgcctgtagtcccagctactcgggaggcagaggcaggagaatggcgtgaacccggg

SEQ ID NO: 282941 - DNA, 201 bp, Homo sapiens
ctgtaccatttagggaataatgacaagaaaaggtctgcacatgttgagtaccaacgcaactgtccatttttttcctgaatatttttgatccatgattgatytattccacagatgtagaattgacagatacggagggctgactgtattttgttgaggatttttgcatccatgctcataagagatgctggtctgcagtttttt

SEQ ID NO: 282942 - DNA, 201 bp, Homo sapiens
attacaggcatgagccactgggcctcattctactttcactgttcttgagaacagcttttttttgtttgttttttaaactttactgtgcacttttgcaaatkaattttgttctaaaatttttacaggttttcttgatttgcttgctgtttgccctcaggatcatttccaaaggctttaaatgtttttgttttaaaagtaata

SEQ ID NO: 282943 - DNA, 201 bp, Homo sapiens
atctatagaatatggtcgtttctggctggctgctttcacttaatattatgttttcaaagttcacccatgttgtagcatgtcgcagtactttattatttgcytatggccaaatactgtgccattgtatggatataccacattttgttcatccatttgtctgttgataaacatttgaacagtttctatgttttggctattatg

SEQ ID NO: 282944 - DNA, 201 bp, Homo sapiens
caggaaacaagaagggagaaaagtagagttatttattgttgcagtgggttcaaaatcatttagattgggaggggcatatttggtttctacttatatattaytatttttgtcagtatcttagtcagccaagactatcacctatgttagctataatcatatctaattaattggaaataaagagttaaattctagcaaggcaaa

SEQ ID NO: 282945 - DNA, 201 bp, Homo sapiens
ttctgtaaaatagtgataatccaccttatgaatgggggatatttctaattgttattctgtgactcctttgtgttgtgggaggggcagattaaaattgatayggtatattctgaaacatgactgcaattaatatgtgaaatctggcacatggaaaagaggcctaaatggagaatcatcttgatgttcttgatctgttctgat

SEQ ID NO: 282946 - DNA, 201 bp, Homo sapiens
tcttttgttgttgtttgtttgtttccacttctttactgctttttatgttatcccactacctattggcatcatttatttatttatgtatttatttatgtatktatttatttatttatttatttatttatttattttgagacggagtcttgctgtgtcacccaggctggagtgcagtggcacgatctcggcttactgcaagct

SEQ ID NO: 282947 - DNA, 201 bp, Homo sapiens
  misc_feature (1)...(201): n = A,T,C or G
acaggtaaatggttgtgggatgaaaagtatactgctcactttatatttcaacaagcctcacaggactccgtattttcttaccaacatttctggagaagacnctgatagagtagcttagagtagcttggctgaacttgggtctgtcattaaaaatgtatatgggttgagtacctgcttcactaaataggttatataccttga

SEQ ID NO: 282948 - DNA, 201 bp, Homo sapiens
ataaaattcaagtactataatttttaaaaatctataaaattaaaactttttttttcttcagaaacttttttttttgccctaataatgttaattgtttttartttaagcatagaaagtttgggtattacattacttcttttgaggggaagtgaaatggagcaagatcagtctctgtaccttctaaatatgtttaccatctct

SEQ ID NO: 282949 - DNA, 201 bp, Homo sapiens
gataactagcttttggtttcattgattttctttattgtttttctgttttctatttctttgattctgctcttatatgtatttgttatgcttactttgggttyaacttgttttttctcttccttgtttattaaggtagaagctgaggtcattgttttgagacatttcttcctctctgatatagatcttgagtgccataaattg

SEQ ID NO: 282950 - DNA, 201 bp, Homo sapiens
aatttggtatttcagactcagatctgtatgactaaaatacaacaatacctgcctcgttttccaagtacaacagtgccttcctgtatttatttttattgggkttttttttgacaatattgtctgtaccttttcattaataacattgacattatgtttttaaaagagatgtgctctaagttctatgtgaaatatgatttcgta

SEQ ID NO: 282951 - DNA, 201 bp, Homo sapiens
gtctcgaatgttttctgtaattataaaaagcagtgggttagcataatgagacttgaaagattttctctatgtttcagtataatgtattatatgtactttargactgagttattaagtattataggctattgtttagaaggtataagttaccatcaaatcaaagtgtagacaaccttgtaatattaacgaagatcatttggt

SEQ ID NO: 282952 - DNA, 201 bp, Homo sapiens
ttggctcatgcagtcctccatttatcagctttctgaccatcggaaaatgacttaaatgcctaaactctagagagccagagcttcttgttaaaaccaaaccscaagattttttttttttttttttttttgaagacagagtcttgctctgttgcccaggctggagtgcagtggtgcaatctctgctcactgcaacctctgcct

SEQ ID NO: 282953 - DNA, 201 bp, Homo sapiens
tgtcagtttctgtgcttctatcccagattttaaaacataatttcctaggcaaatttttagttttgtaagtatttgcaaaatatataattagtctagacatrtgataaacttgttgaaaataaaggcctttctgtcataaaagtcagaagaaggtagtacatgacatccttgctttgttcttctgtttaattttaattattg

SEQ ID NO: 282954 - DNA, 201 bp, Homo sapiens
ttgagtgcctactgtgtgccagttctagagacacagcagtgaacaagacataaacaaaaaggtgtctttatagaatgtagattttcccctctaaacacctwaatgtatcataaagtagctgtgacttcatagaacacctgaaacaattttggggaccccctcaaatcctggcccacaccttgggaatcacagtgcggggag

SEQ ID NO: 282955 - DNA, 201 bp, Homo sapiens
tgacttggtagaaatctgtaacatcatagctcccctgccaaccttgcccctcaggagtcagcatggctgtattcaccagaaagcacagtgacttcagcaargtggctgcatagtctccagtgtgaacaaagtctggagataagcagtcccaggcaggtgatgcttccatgaagacaccaacagccaggctctttgcagttt

SEQ ID NO: 282956 - DNA, 201 bp, Homo sapiens
aaggcccctcctcgtatcttcattctagaagagagatgtttgtagtagcttcacctgttgtcaagctgccatttctttctccactgtaatttcctaaaagygtggtaggaaagagaatagttgctgagaagggttcttgagcttaatttctacttaattattagatttaataaaggcaagttttaaagaagtatctgtggc

SEQ ID NO: 282957 - DNA, 201 bp, Homo sapiens
ttatagcctaacagctaatagccatttagaaaaaaaataaattgaaagaagaaatattttcatttcattcttaaataactgtggctagctaccaatgagakgtgtgcacctgttggacattaaatgacttggcagaaccacttgcattcctgtttcatattgattttcatctagtatttttttttaatcacagcaactgcc

SEQ ID NO: 282958 - DNA, 201 bp, Homo sapiens; identical to SEQ ID NO: 57817

SEQ ID NO: 282959 - DNA, 201 bp, Homo sapiens
tgctgcagcgggcgagtttgaccttctgtctctgcgagatacatccctagttggtctccagttccattagcaatttattgccacttagaaaacacaagatktagatttattaacttgaattttaaagaagcaagtagcagttaagtgaaaaaatatgtaaacaccttaatagtggctgtgacagcttattatggctattag

SEQ ID NO: 282960 - DNA, 201 bp, Homo sapiens
atgaagaactttttactgtccattacttttcacactccttaacaggactctagtatgggattcctttctacctacaatacctcgcccactggccagagtayttcattgttgcagaggcacctggtggagaattaatgggttatagtaagtataataccactagtattttgtggagtaggtaaagattttaatatagatttc

SEQ ID NO: 282961 - DNA, 201 bp, Homo sapiens
gggggactttggcaaagacttcttcctgttttctcttcttagtgatgaaataggaagcccctgagatggcggggctggaggtgagggtgcgggtgggcagrcaagaggagataaagcagttcagtcgtcgaaaggtgtggtggagtgactccctgcactgtattagagcagtgattctcaaggagtgggccagggtttggg

SEQ ID NO: 282962 - DNA, 201 bp, Homo sapiens
tcagtaacttggatccacttacagaaactgtatccttttttacaaaaaaaaaaaagttgaatgaagatttactgagaataaagaaaacagaaatgaaaggmaaacagaggagtactgaaaagtttaaaaacttgtaggtcaggaaacatcataagcaacactgaaagcaattttaaaaagtgaaactgagaacaagagttg

SEQ ID NO: 282963 - DNA, 201 bp, Homo sapiens
tataagaacttccaggagtcacaagagttccaaacaattaatttataaaaataacaaaacatttgtctatgaaaaaaagatcaggattcactctcatcgaygtcctcatctggatggtgctcagcatcctccttttcctgctgctgtttcttccacagtttggccatggccaggagtttgaggttaggttggttggcagca

SEQ ID NO: 282964 - DNA, 201 bp, Homo sapiens
gaagacggaagttccggagaaggagcggggcatgaaaatggggaaacttgaagtgcggtcagacaactgggatcagtgcgaatctagtggctggtttctgycactgagcagtcaggaagaaatgggtgaaacaggaggggtttagacttgatcctgtggaaagaattttctgttgggccagtctggtagctacggtgactt

SEQ ID NO: 282965 - DNA, 201 bp, Homo sapiens
tttttccttccagctttcacactggcacatgcttattacaattctaccttgggaacatgacagaatttttttcttatgcattcatgcaacataaacaaacagataattctaggaagactgtgattaagtcacttgcattctgacctattattttcatctctccctgactctgggtgagccaaaggctattaagatgatgtt

SEQ ID NO: 282966 - DNA, 201 bp, Homo sapiens
ttttttccttccagctttcacactggcacatgcttattacaattctaccttgggaacatgacagaatttttttcttatgcattcatgcaacataaacaaacagataattctaggaagactgtgattaagtcacttgcattctgacctattattttcatctctccctgactctgggtgagccaaaggctattaagatgatgt

SEQ ID NO: 282967 - DNA, 201 bp, Homo sapiens
taaaatccaatattccttcctgataaaaactgttagcaaactgggaaatagaaagggggaacttccttaacctgaaaaatatctacaagaaatttgtagtraatatatttagtagtgatacactgaatgctttccttttgaaattagggacaagttagtcccgcttcagtaatttactagaaattatagcacaggaaagca

SEQ ID NO: 282968 - DNA, 201 bp, Homo sapiens
cttttttccttccagctttcacactggcacatgcttattacaattctaccttgggaacatgacagaatttttttcttatgcattcatgcaacataaacaaacagataattctaggaagactgtgattaagtcacttgcattctgacctattattttcatctctccctgactctgggtgagccaaaggctattaagatgatg

SEQ ID NO: 282969 - DNA, 201 bp, Homo sapiens
aacagaaatatattcagcattgttagtaattggaaatacaaattaaaatctgagatatagttacactgtaagattggcaaaaataaaaacatgtgatgcaycaagccttgttgctgtggaatggaggcttactcacttctgtgcaagagtaagttggtacaagccagttggaaaaacagtttggtattaactaatgaagat

SEQ ID NO: 282970 - DNA, 201 bp, Homo sapiens
  misc_feature (1)...(201): n = A,T,C or G
actattctaaatgtaacagatagtgttacatttacaagtgaatttcaaataaaagcactaactgttagctggatgacctcaggtggtacttaaaaacttcnttattagtttcctttgtaataaaaacatactgaacagtaattctatatttatgtgtaaatcaatgtctagttactgaatgtgatttttgttgttgttggc

SEQ ID NO: 282971 - DNA, 201 bp, Homo sapiens
gcttttttccttccagctttcacactggcacatgcttattacaattctaccttgggaacatgacagaatttttttcttatgcattcatgcaacataaacaaacagataattctaggaagactgtgattaagtcacttgcattctgacctattattttcatctctccctgactctgggtgagccaaaggctattaagatgat

SEQ ID NO: 282972 - DNA, 201 bp, Homo sapiens
tcataaattgctagtgacaatataaattgctattatctttccagaaggcactttggaaatagtaattccatttcctgaaagctgaaaataagaagaaataraggcagtttgtcagtggttgacaaaataaggcccataggccaaatctggcccactgcctgtttttgtaaataaaatgttattgggacaccacgctgatta

SEQ ID NO: 282973 - DNA, 201 bp, Homo sapiens
ggttgcagtgagccgaggttgcagtgagccgagatcgcgccactgcactccagcctgggctacatgtagagcgagactccgtctcaaaaaaaaaaaaaaaaggagagtacctttgggaaatgccacacaggcccgctctgtctcattgaccagcacctgtttcatgcttcacctgtctactgaatcctatctagagtccag

SEQ ID NO: 282974 - DNA, 201 bp, Homo sapiens
accgtgtggctcagtgaggtgagaggagaaccccatggtctcagaagctgagtgaagacagcatttcaggctgtcccaggagtgggaagctgttcaagagkagctgatggctcagtgcacatcatatttgtacatttcttccaggaaagagaaattgaagatgcagatgcaggagggaaagagaattgcaggaggagggtc

SEQ ID NO: 282975 - DNA, 201 bp, Homo sapiens
ttcaaattcttaaccactgagctctgtgggctgtcatgtgatgacagcaggtaaactgggcaggtaagccattcaggaggccttggcagtggcccagagaygatgacttgacagaggcttcagtttgggaggtgcagcatgggaggtgacagggtgccttgaagcttcaagaaaaggcagagcctcatggagaatcagttt

SEQ ID NO: 282976 - DNA, 201 bp, Homo sapiens
attgaccagtttaacactcatgtgtaaatacatttcagcattcctgcttgctttatgtattttatctctctttatcttatctttttgagacagggtcttgstgtgtcacccaggctggagtgcagtggtgcaatcatgtctcagagcaacctctacctcccgggctcaaatgatcctcccacctcagcctcccaagtagct

SEQ ID NO: 282977 - DNA, 201 bp, Homo sapiens
taaaaataacaaaacatttgtctatgaaaaaaagatcaggattcactctcatcgacgtcctcatctggatggtgctcagcatcctccttttcctgctgctrtttcttccacagtttggccatggccaggagtttgaggttaggttggttggcagcatcttctggaaagatgtaatcaaagtattcttcccagcctgcatca

SEQ ID NO: 282978 - DNA, 201 bp, Homo sapiens
atggtgctctgttcctctcccatgtccgcccccgtgagcggtccgggctcgctctgccctggccggcccctcccctgcgtctgctggcaccactcacgaarccattgtccatgatccggcacaggctcttcagtgtctccaggtccttggtgaagtggaactggaccaggcgcgagttccggaacagcggcactagggtgg

SEQ ID NO: 282979 - DNA, 201 bp, Homo sapiens
ccagcctgctgggccaccttagagctagggggctgcaaggcatcgggcagtgagcagagaaggcaggcaggtttttaaaaggctttattggggaaacgtaraggggtggggaccgtccttggaggcctcaggacaccatcctccatgttgctgggcagttgaagtccccaggggcccctgctcagaagcgtgtcacctggg

SEQ ID NO: 282980 - DNA, 201 bp, Homo sapiens
tggaagccgagggctacaaggtatgtgcagccgcctgtctgcatgggcacgtgcacgtggcggtccgaccgcagtcagaccaaggccctggtgagcagagygtctggtgacaccctttgctccccagctggtgatcttcaccaaccagatgagcatcgggcgcgggaagctgccagccgaggagttcaaggccaaggtgga

SEQ ID NO: 282981 - DNA, 201 bp, Homo sapiens
tccccgctccgctggcttccctgccgccgcgccaagacccaccctccagccctgcagagccgcccagtggccgcttttccatggagccctggtgggaaccmgcccggcatcctccgggctcccctgcagctccttgctccagccatcgcatcacactccgcccacaccaagtctggctgcccaaccagggcagtggggtct

SEQ ID NO: 282982 - DNA, 201 bp, Homo sapiens
aggggcccaggctcctgggaaacctgtctgtctgtcctggggcctgccatccctccctccgagccttggcctgttagccccagctgggtccattctctagycccaggggaacaggccctgcccctcatctgctcacagccccccatggctccccagtggcctgagacaggtcccggccctcacctggtgcacaggacctgc

SEQ ID NO: 282983 - DNA, 201 bp, Homo sapiens
tgtcctccctacctcaggaaacgtcatctccaccgctcaaccagcccaaccctggagtgctgtggaagccgctctcagatcccttggcagccccccaggtgcaggtcgtggctgcccctgccccgctcagtccctgcacagccaccagctggctgcctgggaccccttgaagccaagcctgaggagctacccaccacacct

SEQ ID NO: 282984 - DNA, 201 bp, Homo sapiens
gaaaagtacctccctgtcccttgcaaggaccagtgtcaggcaatcctagtgccactatctggctactgcatgtcaaggagccaatcccatgtagaaataarctgcctcttactccctggatgctatagcctgaagcaggccacactccccagaaatgagggacccaatcacacaaggatgcaaatcctgactccacccctc

SEQ ID NO: 282985 - DNA, 201 bp, Homo sapiens
cctggggggtgagtatggatgtccactttccctacagactgggtactcggggcccagatatggcaggccctcaacaaacggtgctgggtgaagggggaacrggtcacttaagagacctcatgccaggcacaagccctggtctgcccctggtctcctgagggagaagggaggccctagcggaacccagggcgctcaacggca

SEQ ID NO: 282986 - DNA, 201 bp, Homo sapiens
ggaccagtgtcaggcaatcctagtgccactatctggctactgcatgtcaaggagccaatcccatgtagaaataaactgcctcttactccctggatgctatrgcctgaagcaggccacactccccagaaatgagggacccaatcacacaaggatgcaaatcctgactccacccctccaatcctcagtggagctggtcgcaga

SEQ ID NO: 282987 - DNA, 201 bp, Homo sapiens
agtccgtgaggatctgggggtcccaagtccctgggctgccgagtgctcacctcctgccactccatgacaccactccatgccagaaacttgttgttgacgayctggactgggcctgagttgacaccaccaggtcccactgcctgttggaagggaacggggtgggaagaggggcccaggctcctgggaaacctgtctgtctgt

SEQ ID NO: 282988 - DNA, 201 bp, Homo sapiens; identical to SEQ ID NO: 57830

SEQ ID NO: 282989 - DNA, 201 bp, Homo sapiens
ctcccgacctgggggcaggcacacggccgacacaaaggcagggacagaagctgaagtccaccctctctttcagatggcagcctgagcgaggagacccccgycggcccccccacctgctcagtgcccccagcctcagccctacccacacagcagtacgccaagtccctgcctgtgtctgtgcccgtctggggcttcaaggag

SEQ ID NO: 282990 - DNA, 201 bp, Homo sapiens
catccacaggtgctggtggccacgcacgcaggcttgtaccggaagccggtgacgggcatgtgggaccatctgcaggagcaggtgagtcttgcagcctgccyggcccccctccttttcctcactccagcccctcactcctgggctccccggcctccggttggggcctccttactcctctgtcctctctcgctccctccttct

SEQ ID NO: 282991 - DNA, 201 bp, Homo sapiens
ggatgaggcccatgaagatcttcttcttggacgagtacaggagcatgagcacgcgcacctcacagggggagatgtgggggaacagcatgcagcccgcctgygggggccgcgggtcaggaccctgtggtcactgcccggggccactgtgcccccaccaccctggaccgccccacctgtaggggatgaagggagatcatcggt

SEQ ID NO: 282992 - DNA, 201 bp, Homo sapiens
tgggaagagacccgcacaccagaatcccagccagatactccgcctggcacccctctggtgtcccaagatgagaagagagatgctgagctgccgaagaagcrtatgcggaagtcaaaccccggctgggagaacttggagaagttgctagtgttcaccgcagctggggtgaaaccccagggcaaggtgagggccacgccgagg

SEQ ID NO: 282993 - DNA, 201 bp, Homo sapiens
ataagacaatcgccaaatattctgggaccttgctgggggcagacagccctccctgcccagcaatgggcctttgggatgtggcacaagctcccgggaaaccwggagtgacaagggcgcctgtccctgaggagtggagagcgcggagttggtgctgagtcagccctgatgtggcagaggaggagcaggcccccgcagaaccag

SEQ ID NO: 282994 - DNA, 201 bp, Homo sapiens
gtcagctcctgcgttacccacagtgaccacccagtaatcagcaatgaccatgactgtctcagtaggagctattacgatgaggattttttatgtccagagakacttgagttcaaatgctgttaccaccacattctgagtcccatgtgtctcatctctacgatgctgaatccataaaaaaagcacgtggcatagttcctgaca

SEQ ID NO: 282995 - DNA, 201 bp, Homo sapiens
cgatgctttgtaggaaaagtgcacgcagccggcctggcaggcacagggcgtggtgtcaccagacagcaccacagggaccagcatccctccaaccacggcaycatgccgtgggctccatgagccaggcacagcctaactgctctgtcctcacaccccccacccaccctggaggtgggcccccttattgggatgacacggtgg

SEQ ID NO: 282996 - DNA, 201 bp, Homo sapiens
gctgtagcagggtgggtgccctccggtggccgcgtggggaacgggaggaggtgaagtcgggagacctggagggagggggctgtgtggagagaccacggagkggggagggggccaggagcacggtgcaaagtggctggagagtgaggacatgaaaggtcgggggatgattcctgatgtggggcacagaccaggcgaagcagc

SEQ ID NO: 282997 - DNA, 201 bp, Homo sapiens
aaagcggtccccccccttgtgggagtgacagcaagtgcaaaggccctgaggcagtccctagcctgggctagttagggacagcgaggcccatgcggctggcyctaagcgagggaggggagagggcagggccacagggagggccccgcttttgccctgagggagggggaacctgggaggcgccggcacgccggaggctggagc

SEQ ID NO: 282998 - DNA, 201 bp, Homo sapiens
ggaggtgacatcagaggaaaaggcctaaggcagggaaaggagggagccaggtggacacctggggaaagcggtccccccccttgtgggagtgacagcaagtrcaaaggccctgaggcagtccctagcctgggctagttagggacagcgaggcccatgcggctggctctaagcgagggaggggagagggcagggccacaggga

SEQ ID NO: 282999 - DNA, 201 bp, Homo sapiens
tacgatgctgaatccataaaaaaagcacgtggcatagttcctgacatgcagttagcacccaaagctttgctcctgcttttattttcacggttattagcccmccgaggtggtgaaggccaggggaagaaggaggctgggtaagacattaacccccattttaaagactgtaatcctggggctggcgtcataaggagtaacagg

SEQ ID NO: 283000 - DNA, 201 bp, Homo sapiens
gtgagtgaggagggtcagaggtatcacagtgctgctgtttgtctttccttggtgacaccaggtggctggctttgatctggacgggacgctcatcaccacamgctctgggaaggtctttcccactggccccagtgactggaggtgataagaggcaaaacaagggagtgagtgaggcctggagtccacctctggccccgggtc

SEQ ID NO: 283001 - DNA, 201 bp, Homo sapiens
cggaagtcaaaccccggctgggagaacttggagaagttgctagtgttcaccgcagctggggtgaaaccccagggcaaggtgagggccacgccgagggctgwgggagccgccacagactgggacccaatcccacgtttgttgcgtgctctcaactttttagcctctacttacttttctgagaaatgggcctaatgataaatg

SEQ ID NO: 283002 - DNA, 201 bp, Homo sapiens
acaggtttcaatgagccaagattgcaccactgcactccagcctgggcgacaaaacaagcctatatctccagggaaaaaaaaaaaaaaaaaaaaaagattcrgacaaggctgaaaacctgtaaccgttccaaagcccgttccaaagtgaagaggtggggcctaagggtctgatagtggtggagaagggctgatttttccgct

SEQ ID NO: 283003 - DNA, 201 bp, Homo sapiens
ggggaaacgtagaggggtggggaccgtccttggaggcctcaggacaccatcctccatgttgctgggcagttgaagtccccaggggcccctgctcagaagcrtgtcacctgggggcaggggtgcagtgggggctgctggccacaggctcccaagcactgaccccacatccctgtgagcagaggcctggccccacccaggcct

SEQ ID NO: 283004 - DNA, 201 bp, Homo sapiens
ctctgccctggccggcccctcccctgcgtctgctggcaccactcacgaagccattgtccatgatccggcacaggctcttcagtgtctccaggtccttggtraagtggaactggaccaggcgcgagttccggaacagcggcactagggtggtctgcggggaagcgaggggacccccagctctggcttctcccaccacggcct

SEQ ID NO: 283005 - DNA, 201 bp, Homo sapiens
gccctctggaagagctactgcgtgcaggctccagcacccggccccagcccctcaccagcagctgctgcgggatgagctgcatgtacagcttccttggccamtgctcggtcctcctgtggggcacaaagggacgagggtcaggaagccccagctcccctggatgctgcctccaccccccagcccagcactcacaggatctcc

SEQ ID NO: 283006 - DNA, 201 bp, Homo sapiens
ttattggggaaacgtagaggggtggggaccgtccttggaggcctcaggacaccatcctccatgttgctgggcagttgaagtccccaggggcccctgctcaraagcgtgtcacctgggggcaggggtgcagtgggggctgctggccacaggctcccaagcactgaccccacatccctgtgagcagaggcctggccccaccca

SEQ ID NO: 283007 - DNA, 201 bp, Homo sapiens
tggggaggcgctcttgcccccagccccgccctctggaagagctactgcgtgcaggctccagcacccggccccagcccctcaccagcagctgctgcgggatragctgcatgtacagcttccttggccactgctcggtcctcctgtggggcacaaagggacgagggtcaggaagccccagctcccctggatgctgcctccacc

SEQ ID NO: 283008 - DNA, 201 bp, Homo sapiens
  misc_feature (1)...(201): n = A,T,C or G
agtttgtgcttgatttagaattagctagatcctttgggggagaggggatcgagccgatttcgggaggatgttcactgcgcggatgatgctcaggccatcgngaaatccagaaacaggcgacgaccttcgtcaagagaaaaatgatcctgtggagaaaagtaaatgtcgctaggttgggatggatggtaacaggccaagccc

SEQ ID NO: 283009 - DNA, 201 bp, Homo sapiens
cgaagtcggaaggtgctctctagggagtacaggaagataaagtttgtgcttgatttagaattagctagatcctttgggggagaggggatcgagccgatttmgggaggatgttcactgcgcggatgatgctcaggccatcgagaaatccagaaacaggcgacgaccttcgtcaagagaaaaatgatcctgtggagaaaagta

SEQ ID NO: 283010 - DNA, 201 bp, Homo sapiens
gccaaggtggaggctgtggtggagaagctgggggtccccttccaggtatggctggaagggaggctgggagctatgtgggggcacagagatccagagcgagrgctttagactccagggtaagcggggcggaggcctcaggcagtgtgatgctgataggaacccatcatcagctacaaattctgggctggggtggcatccagt

SEQ ID NO: 283011 - DNA, 201 bp, Homo sapiens
ggaggcacaggtttcaatgagccaagattgcaccactgcactccagcctgggcgacaaaacaagcctatatctccagggaaaaaaaaaaaaaaaaaaaaaagattcggacaaggctgaaaacctgtaaccgttccaaagcccgttccaaagtgaagaggtggggcctaagggtctgatagtggtggagaagggctgatttt

SEQ ID NO: 283012 - DNA, 201 bp, Homo sapiens
tctgaaccgggtagaagggttcctacgtggagcaagacggggaggggcactgctggcagtgggcatcgcagggcacaggtggcagggcagggacgtgctagaagtgggcttggagcccgggtgcacccctggaccgcgtgtgggtgcagggggattgccctgccggcgctgacctcgccccgtcgccgtccccgcagccct

SEQ ID NO: 283013 - DNA, 201 bp, Homo sapiens
gtgagcggtccgggctcgctctgccctggccggcccctcccctgcgtctgctggcaccactcacgaagccattgtccatgatccggcacaggctcttcagygtctccaggtccttggtgaagtggaactggaccaggcgcgagttccggaacagcggcactagggtggtctgcggggaagcgaggggacccccagctctgg

SEQ ID NO: 283014 - DNA, 201 bp, Homo sapiens
tcacttgtcctcgacgctcgcctccgctcacagcctcagcatcccaggctgcgaggcatgcgcagtgggtgcttccttccccattccctccagcacgggcsgggggaggggacgctgagcggatgaatttatagacaccatccccctcgccttggcatgaaaagcggcaatggggtggacagcgtcaatgtctaacaggtg

SEQ ID NO: 283015 - DNA, 201 bp, Homo sapiens
gctggcctcccccagtatcgccgctacttccttaactccacctccaacccccctttgcccttccctgtgtctgcccccattttccttcccctcccctcccyagctgtgggctgagctagagacggggtcagagagactggagagatggtaggcgtggctgaggtatcggggtgctcccctggatggtgctctgggggggtc

SEQ ID NO: 283016 - DNA, 201 bp, Homo sapiens
atacccagtccacataaaatttctgctcctgcctcaaaaatgtccagaacgatgtatgaattttaaaactgttagaagggttcatggcttctgctcacgcrgttctctgaactgaagtggggtccccaggctctagcccccgggggaggtgaggtgaggggcaggcctcccgggggctgacgtggccacccttgtccgccc

SEQ ID NO: 283017 - DNA, 201 bp, Homo sapiens
ctcaaaaatgtccagaacgatgtatgaattttaaaactgttagaagggttcatggcttctgctcacgcagttctctgaactgaagtggggtccccaggctstagcccccgggggaggtgaggtgaggggcaggcctcccgggggctgacgtggccacccttgtccgcccgcagtggtgaccatcatcaaggggaaggtgga

SEQ ID NO: 283018 - DNA, 201 bp, Homo sapiens
aggcagctttttgttttctgctcccctttctttttcctcctgagcacttggcaggagctgccatcacctgagatcagggggcttccgggggagctgggggrgcttctcggagacagggtctgggcagagatccagtgtggtgggtctgagcaggcaggaggatggaaggcttggagcctggagtcgccgggagtggtctgg

SEQ ID NO: 283019 - DNA, 201 bp, Homo sapiens
tgagggatggaggggagcccatcagggctcagggattggatggaggtgatgggggcaggggatgggtctcaccctcccttcttcctgggccctcagatcgwgtgttccagtatctctgattatgcggtgaagatcgtcaaagccaacaagttagaccacggtgagcccagaaagaggatgggtttgtgggagtggaggggg

SEQ ID NO: 283020 - DNA, 201 bp, Homo sapiens
ggggggcttaaatgttggggaaggggtggaacctgttttcccacgcatgcgcactgcttcccctggccgcaggccgcccccctgcccctctgctgcgcacyccctagggtcgcctcgccaagccgttgccttggagaccgaggttagcctgaatctctgcaggggcctcgcgccgaaggctggggtgggagagcgcatgcg

SEQ ID NO: 283021 - DNA, 201 bp, Homo sapiens
tccatgtttcataaccggcacctcttcaaggacaaggtggtgctggacgtcggctcgggcaccggcatcctctgcatgtttgctgccaaggccggggcccrcaaggtcatcggggtgagtctccagggtggccaggcggggccgggcctgagggatggaggggagcccatcagggctcagggattggatggaggtgatggg

SEQ ID NO: 283022 - DNA, 201 bp, Homo sapiens
gcccccacgtggccgctgcgcggtgggtggggagggggtgtgccgagtccagtggcccggcggctccacgtgcgggacaaaggccccgcccccggccgggraggggcgcccaggggggcggggagggggtccgaccctcctgacgcccccagccctcctccccggggacctgggcacacgccgtggggtgtgatcgacctg

SEQ ID NO: 283023 - DNA, 201 bp, Homo sapiens
ccccacgtggccgctgcgcggtgggtggggagggggtgtgccgagtccagtggcccggcggctccacgtgcgggacaaaggccccgcccccggccgggaakgggcgcccaggggggcggggagggggtccgaccctcctgacgcccccagccctcctccccggggacctgggcacacgccgtggggtgtgatcgacctggg

SEQ ID NO: 283024 - DNA, 201 bp, Homo sapiens
ggtgggtggggagggggtgtgccgagtccagtggcccggcggctccacgtgcgggacaaaggccccgcccccggccgggaaggggcgcccaggggggcggkgagggggtccgaccctcctgacgcccccagccctcctccccggggacctgggcacacgccgtggggtgtgatcgacctggggccctccacgatgtgggga

SEQ ID NO: 283025 - DNA, 201 bp, Homo sapiens
tgaagcaggagaatggcgtgaacccgggaggcggaggttgcagtgagctgagatcacgccactgcactccagcctgggtgacagagcaagactccgtctcmaaaaaaaaaaaaaaaaaaaagtaacatcacctgatacccagtccacataaaatttctgctcctgcctcaaaaatgtccagaacgatgtatgaattttaaa

SEQ ID NO: 283026 - DNA, 201 bp, Homo sapiens
ctgcagaagagcacggggccaggctgggctccgagatgtgcctgaggtcccagctactcgggaggatcacttgggcctgggagttcaaggctgcagtgagytgtgatcacatcactgcactccagctttggtgacaatgttttgttttgttttttccttttgtttttttttacttctgagaccctgtttaaaaaaaaaaaa

SEQ ID NO: 283027 - DNA, 201 bp, Homo sapiens
cgccctctagtgaccggcggtgggactgcgccccggctgctcccgccctaacagcttctgcacacttcagatctgactgaagacactgaaatcccagaacraagctggggtggcattctaaggaattttcttttccccctgaggcctttttcataaaattgtggcaaaatatgcataaaattgccattttttatttttaga

SEQ ID NO: 283028 - DNA, 201 bp, Homo sapiens
gaggccatcacctggccctggcatgggactttggggcccagaatgttggcctgaggtctcagagcctgatctgccagccagaggtggtgctagaggcccasgaaagacacttcgtcctttaaatatctttgtgagcgctgctgtgtgagaaccatgcttggcacttggcttctggcggaggaaacacccaaagctggcagc

SEQ ID NO: 283029 - DNA, 201 bp, Homo sapiens
gggggcttaaatgttggggaaggggtggaacctgttttcccacgcatgcgcactgcttcccctggccgcaggccgcccccctgcccctctgctgcgcaccycctagggtcgcctcgccaagccgttgccttggagaccgaggttagcctgaatctctgcaggggcctcgcgccgaaggctggggtgggagagcgcatgcgt

SEQ ID NO: 283030 - DNA, 201 bp, Homo sapiens
cagtggagtggggcgcctgcattctaggaggtctggacagagttagggtggcactgccaggtttgggtgttggagaggagggagcaaggaatctgggctcraacccacatggtttattgggagccggataggcaggatgcagagtgaaggaggagccgaggctgggtgccagtgagggagggctagcaggaaggggacagc

SEQ ID NO: 283031 - DNA, 201 bp, Homo sapiens
gcactcagggtagtcatggaatgtggaccctgggacacccacgagcctgtgacagcagcagttgtcaactgggcagttttactgccccctccgctccccgcccccccccaggacgtttgccaccgtctgtggaaacatttgtggttgtcactccggagaaggggtggtcctggcatctggtaggtaggggccagggggctg

SEQ ID NO: 283032 - DNA, 201 bp, Homo sapiens
acgccctggtggcctacttcaacatcgagttcacacgctgccacaagaggaccggcttctccaccagtgaggcggggcccacagggctgggggccgttccygagccagggcggaggcgcacccacgtagtggagggggtgacagaaacgggcagaaggaaccatggggacacgcgtgttccagtgtgagctctgccatgta

SEQ ID NO: 283033 - DNA, 201 bp, Homo sapiens
cacggcgtctctgtgccattcttgccctaggagatgctgaaggacgaggtgcgcaccctcacttaccgcaactccatgtttcataaccggcacctcttcawggacaaggtggtgctggacgtcggctcgggcaccggcatcctctgcatgtttgctgccaaggccggggcccgcaaggtcatcggggtgagtctccagggt

SEQ ID NO: 283034 - DNA, 201 bp, Homo sapiens; identical to SEQ ID NO: 57847

SEQ ID NO: 283035 - DNA, 201 bp, Homo sapiens
tcctccaccccagacaccatctcccaccgagagtcatggccccattgggtgagtaagcaggggaggggctctggaacaagtgagtagaacccctctccccygacctgccacaaccccgttgaccctgtcctcctcctcccagccctgcacctcctcgtcctcgtccccatcctcctcagcctggtggcctcccaggactgg

SEQ ID NO: 283036 - DNA, 201 bp, Homo sapiens
gtgaccagccgggccagccgaatgaggggggatgggcggcgttaacagttcggtaatatcggaggagcagtggcatctgagttgccgtggagggcaaggcrgagggcatggtgtgggcaaaagcccaggggcttgagagtggtgaatggccagccgtgggcagaaccacgaggagaagccgagtgtgggctccaggcccgg

SEQ ID NO: 283037 - DNA, 201 bp, Homo sapiens
tgccactgcactccggcctgggtgacagaacgagactcagtcccaaaaaatcagaagacaatatggtgcctgggacttgctctaaaataaatccagtgagrgggcggggagggtgagtgagacaagggctgtgtgaagccatgaattcacctgggtttatcccctgctcactctggttttagatgtttgaaagtttccata

SEQ ID NO: 283038 - DNA, 201 bp, Homo sapiens
agctcgccccggcccggcttttcttctctctggcatcccttcagtcccctccatggggtggggcgcctgttggtggagatggaaattctaccaaggggatrtgtgccatgaggtctaaccactgacctactcactgaaatccgagaatgagaatgggccagcccaggggcttctacacatatgggtcatctctcaactccc

SEQ ID NO: 283039 - DNA, 201 bp, Homo sapiens
agacacaccgggctggccctctgggggctcagaagtgcgctgggcgagacatgcttctcaggcctccgggagcattctgagcacgtactcggggagggaargtccccacccacctgcccggaggaccttgctgggagcaggcatggcatggggcagaagggaaacctacgcggccccacccccactgcgctcccaactaac

SEQ ID NO: 283040 - DNA, 201 bp, Homo sapiens
aggcccggcctccaccctggctgcccgggcagctcagcaccatgtctgcttcttccacaacaggccctcaaagacctcaaggcactgggctgcagaaaggygatgaagaagtttgaaaggcacacgctcttggtaagtggggatcttggttctgctgagatgcagggcaaagagagtgaccatgaggccttccccagagag

SEQ ID NO: 283041 - DNA, 201 bp, Homo sapiens
cctcaaagacctcaaggcactgggctgcagaaaggcgatgaagaagtttgaaaggcacacgctcttggtaagtggggatcttggttctgctgagatgcagrgcaaagagagtgaccatgaggccttccccagagagtcagaaggcgggtacctggcaccctagtcctgccaccgccttcctgcctgacccgggggctggac

SEQ ID NO: 283042 - DNA, 201 bp, Homo sapiens
ccagtggtggggggacagagagacaggacccacagaaatagggactgagaagcagtcaggagctggggagatgaggaagagggaaaagaggccgggcgcgrgggctcatgcctggaatcccagcactttgggaggccgaggtgggtggatcacctaaggtcaggagttcgagaccagcctggccaacatggcgaaaccccg

SEQ ID NO: 283043 - DNA, 201 bp, Homo sapiens; identical to SEQ ID NO: 57849

SEQ ID NO: 283044 - DNA, 201 bp, Homo sapiens
gaagacacaccgggctggccctctgggggctcagaagtgcgctgggcgagacatgcttctcaggcctccgggagcattctgagcacgtactcggggagggmaggtccccacccacctgcccggaggaccttgctgggagcaggcatggcatggggcagaagggaaacctacgcggccccacccccactgcgctcccaacta

SEQ ID NO: 283045 - DNA, 201 bp, Homo sapiens
taggcctgtgtcccacccctgacccaagcctcaccacgagctccatgaagccacagaaacaccagaaagcatccacctcgttctgaatgacgtagaggatsggggagagaagatcactcatgccctggacgtagcctggggggacatggggtcaggctgcagccaagcccgcagcgctcccctggacagccccggccacgc

SEQ ID NO: 283046 - DNA, 201 bp, Homo sapiens
ctgggtctgggccactgtggggatggaagaaggcagggggctggcacggggtggtagagggcaggggatggtcagtgggtggagctgaagggccctcctcrccccacggactccctcaggtcaccatcctggaggcagataacaggatcgggggccgcatcttcacctaccgggaccagaacacgggctggattggggagc

SEQ ID NO: 283047 - DNA, 201 bp, Homo sapiens
tctcctccaccccagacaccatctcccaccgagagtcatggccccattgggtgagtaagcaggggaggggctctggaacaagtgagtagaacccctctccsccgacctgccacaaccccgttgaccctgtcctcctcctcccagccctgcacctcctcgtcctcgtccccatcctcctcagcctggtggcctcccaggact

SEQ ID NO: 283048 - DNA, 201 bp, Homo sapiens
tttttagtagagacgaggttttgccatgttggccaggctggtcttgaactcctgacatcaggtgatccgcctgcctcgacctcccaaagtgctgggattayaggcgtgagccacccctggccctcgtcactatttttgctgacccaagctctttcggtccctgaactctccagctctttgatcatttccctttgccacggc

SEQ ID NO: 283049 - DNA, 201 bp, Homo sapiens
gcactgtcctgaacaaaattccacttcttggaagtgaacctaaagaagaaattacccagactatgcaccgtgatgaaaaactgcaaaggacccgaatctcyagcaggtcaagttacatcaaatctaccacatcttgcaggtggacacaatgccgcgcagtcaagaaaagtgatgtttcagaagactttgaatgacccagag

SEQ ID NO: 283050 - DNA, 201 bp, Homo sapiens
aaaaagaaagaaaggaaagaaagagggaaaagaagagaaagagacaggaacccgagagagctgtggcagaggtggagaccggtgaggagggaggcagggamggtccaggggactctgaaggaatggggttaggggacacaggtccagagagcaggacagtgactgggggagggccggctctagcagctgggcagcccatgg

SEQ ID NO: 283051 - DNA, 201 bp, Homo sapiens
gggaggccgaggcaggcagatcacttgaggtcaggagttcgagaccagcctgaccaacatgatgaaaccctgtctctactaaaaatgcaaaaatgagccargtgtggtggcaggcgcctgtaatcccagctacttgggagggtgaggtgggagaatcacttgaacctgggaggcagaggtttcagtgagctgagatggcgc

SEQ ID NO: 283052 - DNA, 201 bp, Homo sapiens
acccaagcctcaccacgagctccatgaagccacagaaacaccagaaagcatccacctcgttctgaatgacgtagaggatcggggagagaagatcactcatrccctggacgtagcctggggggacatggggtcaggctgcagccaagcccgcagcgctcccctggacagccccggccacgcccgtccccaggcctggcaccc

SEQ ID NO: 283053 - DNA, 201 bp, Homo sapiens
tccagcctcatgctcttttctcctctaagaaatttttgtcctcatggtggtccacatgcccccagctctgtgttcctcacacccactatacctgtgtatcrccctccctttccagaatgcctttcccttccccacacaggaactcctgctcagccctcaagaactagctccaatgtcccctcctccaggaagccttccctg

SEQ ID NO: 283054 - DNA, 201 bp, Homo sapiens
ccctcctgctgcaggctggagtccctgggcacagggacacggccgcgttcctccttgagggggtggaggtggggatgtggggggagaggctatctttcccygtagtctgggggtgaggcccaagccccctgctgtcacatgtctccactgagaggccccagactttcctgtcccacgtttttcatcccagagggaagtctc

SEQ ID NO: 283055 - DNA, 201 bp, Homo sapiens
gtcacaggcctcagtcacaacagccctcccttctcctccaccccagacaccatctcccaccgagagtcatggccccattgggtgagtaagcaggggaggggctctggaacaagtgagtagaacccctctcccccgacctgccacaaccccgttgaccctgtcctcctcctcccagccctgcacctcctcgtcctcgtcccc

SEQ ID NO: 283056 - DNA, 201 bp, Homo sapiens
tctctgatctaacaagggcaccactaacaaggacaaagccaccatcattcaccttgattccgcacatgcccaacgatgacttctgtcctgggctaaccatmaaggccatgggtgctgagagagccccccagaggcagccatgcagtgagtgcccccacccggggccctgggatgttctggaaacaggaaggagggttccat

SEQ ID NO: 283057 - DNA, 201 bp, Homo sapiens
gctggcatttccaaaggagcagcttccagtactaccccaggttccggccacagaacttaacctggattcactcacttgatcctaaaacactgtgacgtccycatttgacagctgtagacgagagccacagaggggagggcgggctcagagcccacgtcctgaccccgggaccacggctgccagccccactgctacacccat

SEQ ID NO: 283058 - DNA, 201 bp, Homo sapiens
gatgtatatcaccttttgttcattcatccgttggtgaacttctgtgtccttttaagggttaaaataatcttagatctcagtgtaaagtgcaaaactataamactttttgaagaaaacatagaaaatctacatgaccttggctttgttaatgaattcttggactataactccaatagtagtctatgaaagaaaatgttaata

SEQ ID NO: 283059 - DNA, 201 bp, Homo sapiens
aagtggagatgacgattattgctgcaaaagaaggcacagttggcagtgtagatggacacatgaaactgtacagggcagtcaatccaatcatccctcccacrggtttggtccgggcaccctgtggactctgcccggtgagttaaagtggcttcactttacacttgactgcccacgggtgcaagtgccacattaagaaacaga

SEQ ID NO: 283060 - DNA, 201 bp, Homo sapiens
tgactcagtataaagtgtattcagaaaacacaccaatattcttatttacatttcttatgtttcaatccttataggcagaaacagcacgagaaagcaaacaraacccaatgatacaaagaaatagttcatttgcctcatcacatgaagtgtggaaatatatctgcgaattgggaatcagtaaggtcagaactgaatttcatc

SEQ ID NO: 283061 - DNA, 201 bp, Homo sapiens
tcagcctcccaaagtgctgggattacaggcataagccaccatgcctggcccaaattcttcatgtttacaacccagtgaaatttgggttcctcagtgttggrgtgagtagttacagacaaacaaggaaagttagaatgatccatgtagtaatggattagacttgaaaacatcagtatggactcttgtgtaatttaatataaa

SEQ ID NO: 283062 - DNA, 201 bp, Homo sapiens
acatcacttataagaatttgatgcttattagtgattttatttatcagaatagcatttcccttccacattgtttaatggataatttcaaatatatacaaagrtagaaaaaatcatataataaaaccctatcatgtagcctcattttgtcagtcctccttctacatctttatgtttaataacagctctgctgaaatataattc

SEQ ID NO: 283063 - DNA, 201 bp, Homo sapiens
cttcaatacacatttcataagaattacagctataattcaaattttataatttcagagctgttaggtctgtggcagtgagtagacctttcctcaaatatccrcttacatatgttgcttcaagtttttatttttgaataaaacaagaattataagaattataacatcacttataagaatttgatgcttattagtgattttatt

SEQ ID NO: 283064 - DNA, 201 bp, Homo sapiens
cgagtaggtgggattacaagtgcctgccaccatacccagctaattcttgtatttttagtagagacagggttttgccatgttggccaggctggtctcgaackcctgacctcaagtgatccacctgcctcggcttcccaaagtgctgggattacaggcgtgagccactgcgcccagcaaccctttactgtttttaacaccctc

SEQ ID NO: 283065 - DNA, 201 bp, Homo sapiens
tattcattggctgacttcagtaaatgtcactgttaactttttttgttttttgttttgtttgttttttgcttttcaagatggagtcttgctctgttgcccargctggagtgcagtggtgcgatctcagctcagccttccatgtagccgggactacaggcgcatgccactgcacctggctaatttttgtatttttagtagaga

SEQ ID NO: 283066 - DNA, 201 bp, Homo sapiens; identical to SEQ ID NO: 57858

SEQ ID NO: 283067 - DNA, 201 bp, Homo sapiens
aatataacatgcatgtgcttgaaggacacccaagagtaaggccgttgttgccttgaaagagacaagaactaaagggctgtgtccagggatggaaaaagacrtctgaattctgagtcacatgaatgtattatctattcaaaataaataaaatttaagttttttttttaaatctgtaccttctagctatatgaccatggacaa

SEQ ID NO: 283068 - DNA, 201 bp, Homo sapiens
gtcctagtccctttcagtttgaaagttttgtttttaatcttgctttaaataagtggttgggtcttagatattttaaaactttaatttgaatataatttttytttcttttttaaaggtttttgatgactgccacgaaggtggtgagatttcaccatctaactgtatttacatgacagagtggctcgaattttaatagagagc

SEQ ID NO: 283069 - DNA, 201 bp, Homo sapiens
tgggcacagtggctcctgccagtaatcccagcactttgggaggccgaggtaggcggatcactagaggccaggagttcaagatcagcctggccaacatggcmtaaccctatctctactaaaatacaaatatcagcgtggcatggtggcatacacctgtaatgctagctacttgggaggctgaggcacgagaatcgcatgaac

SEQ ID NO: 283070 - DNA, 201 bp, Homo sapiens
ttaagtacagtcctagtccctttcagtttgaaagttttgtttttaatcttgctttaaataagtggttgggtcttagatattttaaaactttaatttgaatrtaatttttctttcttttttaaaggtttttgatgactgccacgaaggtggtgagatttcaccatctaactgtatttacatgacagagtggctcgaatttta

SEQ ID NO: 283071 - DNA, 201 bp, Homo sapiens; identical to SEQ ID NO: 57861

SEQ ID NO: 283072 - DNA, 201 bp, Homo sapiens
tgatggaaaagtggagatgacgattattgctgcaaaagaaggcacagttggcagtgtagatggacacatgaaactgtacagggcagtcaatccaatcatcyctcccacaggtttggtccgggcaccctgtggactctgcccggtgagttaaagtggcttcactttacacttgactgcccacgggtgcaagtgccacattaa

SEQ ID NO: 283073 - DNA, 201 bp, Homo sapiens
ctaaaaacgaataatttattttctgcctttattatagatttgcctattctggacagttcctataaatggaataatagaatatgtagtcttttatgtatgaytactttgacttagcatgatgttttcaagatttatccatattgtgctttattccttcttattgccaattaaaattccattgtatagatgtatatcaccttt

SEQ ID NO: 283074 - DNA, 201 bp, Homo sapiens; identical to SEQ ID NO: 57864

SEQ ID NO: 283075 - DNA, 201 bp, Homo sapiens; identical to SEQ ID NO: 57865

SEQ ID NO: 283076 - DNA, 201 bp, Homo sapiens; identical to SEQ ID NO: 57866

SEQ ID NO: 283077 - DNA, 201 bp, Homo sapiens; identical to SEQ ID NO: 57867

SEQ ID NO: 283078 - DNA, 201 bp, Homo sapiens; identical to SEQ ID NO: 57868

SEQ ID NO: 283079 - DNA, 201 bp, Homo sapiens; identical to SEQ ID NO: 57870

SEQ ID NO: 283080 - DNA, 201 bp, Homo sapiens
taaattgtggatgctgacacctctcgtttttgcaaggaccaaaaggaaagctggtgtggtgtagcagtgtcttaacagatgtccctccgcagctatagttyctcttctacccgcttgaagaactgtatctaaattgcaatcctaagttacaataatttgggatctatttgagtcattgatattagctggaaaaattgagat

SEQ ID NO: 283081 - DNA, 201 bp, Homo sapiens
gcgacacgaggaagaaggcccctcggcctcagcagagcgctatcctccactggttacccgggttccccggcttgctaccgggctgctccgtgcatctttcmccccaggcgtcaggaactgcgccctcatggcggaggtgaaggtgaaggtgcagccgcctgacgcggatccggtcgaaatagaaaacaggtaaaccagtga

SEQ ID NO: 283082 - DNA, 201 bp, Homo sapiens
accccttctgccatgtgaaagggagaagacaaacatccacgaaccaggaagtgggtcctcaccagaaaacaaatctgtaagcaccttgatcttggacttcycagcctccagaattgtgagaaataaatttctgttgttgataaaccaccagtctatggtattctgttatagcattaactgaaactaaatatactccatgcc

SEQ ID NO: 283083 - DNA, 201 bp, Homo sapiens
gataagggtacagatgataaaattccattgcatccatgatttttccttccattataaaaacgtcgttttcataatttttttttcttttttttgagatggartcttgctctgttgcccaggctggagtgcaatggtgtgatctcggctcagtgcaacctccgcctcccgggttcaaacgagtctcatgcctcagcctcccga

SEQ ID NO: 283084 - DNA, 201 bp, Homo sapiens; identical to SEQ ID NO: 57854

SEQ ID NO: 283085 - DNA, 201 bp, Homo sapiens; identical to SEQ ID NO: 57855

SEQ ID NO: 283086 - DNA, 201 bp, Homo sapiens; identical to SEQ ID NO: 57856

SEQ ID NO: 283087 - DNA, 201 bp, Homo sapiens; identical to SEQ ID NO: 57857

SEQ ID NO: 283088 - DNA, 201 bp, Homo sapiens
ctcccaggttcaagcaattctcctgcctcagcctcccgagtagctgggattacaggtgcctgccaccacgctcagctaatttttgtattcttagtagagayggggtttcaccatgttagccaggatggtcttgaccacccacctcggcctcccaaagtgctgggattacaggtgtgagccactgcgtccggctataatatg

SEQ ID NO: 283089 - DNA, 201 bp, Homo sapiens; identical to SEQ ID NO: 57859

SEQ ID NO: 283090 - DNA, 201 bp, Homo sapiens; identical to SEQ ID NO: 57860

SEQ ID NO: 283091 - DNA, 201 bp, Homo sapiens
ctgctaattttgtttaagtagtgatgtagattattagattatcctatagtccttaccttactaattttactttattccactacagtaaaatgaagggatcygataaccaagaaaaactagtatatcaaatcatagaggatgcaggaaataaaggtaagcatgtgaaagatgaagcagaaaaaaacattgtctttggaacta

SEQ ID NO: 283092 - DNA, 201 bp, Homo sapiens
cagctctcctgcctcagccacctgagtacctgagattataggcgcccaccaccatgcccagctaattttttttatttttagtggagacggggtttcaccakgttgtccaggctggtctcgaactcctgacctcaggtgatcccctcagcctcccaaagtgctgagattacaggcatgtgcccctgtacctggccccctgct

SEQ ID NO: 283093 - DNA, 201 bp, Homo sapiens
aatacaaaaattagctgggcatggtggcacatgcctgtagccccagctactcgggaggctgaggcaggagaatcacttgaacccaagaggcagaggttgcrgtgaaccaagattgcaccagtgcacgccagcctgggcgacagtgcaagaccctgtctccaaaagaaaaaaaaaagtgctaaaatacacacacacacgatg

SEQ ID NO: 283094 - DNA, 201 bp, Homo sapiens
tgcctcagcctcccgagtagctgggattacaggtgcctgccaccacgctcagctaatttttgtattcttagtagagacggggtttcaccatgttagccagsatggtcttgaccacccacctcggcctcccaaagtgctgggattacaggtgtgagccactgcgtccggctataatatgttcttaagtacagtcctagtccc

SEQ ID NO: 283095 - DNA, 201 bp, Homo sapiens
cacaggtttggtccgggcaccctgtggactctgcccggtgagttaaagtggcttcactttacacttgactgcccacgggtgcaagtgccacattaagaaasagagcaagcacagcccagttttctcagactcttagggttgaccaagagctattcaaacctccatgaaaccttgatgaacagacctttaatgaacacatca

SEQ ID NO: 283096 - DNA, 201 bp, Homo sapiens
tatcttggacatcttttcatgttggtacacacagctctgtctcattctatttaaggtaagcctttcttttggtaaatatgtcactgtggtgaccttgtctrctaattttgtttaagtagtgatgtagattattagattatcctatagtccttaccttactaattttactttattccactacagtaaaatgaagggatccga

SEQ ID NO: 283097 - DNA, 201 bp, Homo sapiens; identical to SEQ ID NO: 57869

SEQ ID NO: 283098 - DNA, 201 bp, Homo sapiens; identical to SEQ ID NO: 57871

SEQ ID NO: 283099 - DNA, 201 bp, Homo sapiens
ttaaacaatttcaaacatatgtgattcttacctgatttcatttccaaaagcgtattgttatcaatttcatggttagcttttccaggctgaggcactcgtartggtatgatctgagggacacacactgaaccagcagtcattttctctctctctctctctctctatatatatatacatataaattccaatgtgcacttatag

SEQ ID NO: 283100 - DNA, 201 bp, Homo sapiens
gtggatgctgaaggtgtgtgagtggccctgcgcactcggtcccccagcctctgcctgcccgctgtctgcggtgaggcatggggcgcttctcagagggaggwtttctgtgggtgtgtggtctcccttcgagcctgccgtgtgcctagctctgaaccgggctaaaccccagggtgccggctggcaaagcccaagtagccattg

SEQ ID NO: 283101 - DNA, 201 bp, Homo sapiens; identical to SEQ ID NO: 57877

SEQ ID NO: 283102 - DNA, 201 bp, Homo sapiens
ggaagccgccctcctggcgcccagcatctgagcttctacacgtgatgggcgggctcaggagaggacagggagtcgtggtggaagttccacagctggccgcktgggggggcccttgcaccgcactgccgcctcctgactgcccctatccccgcagcccctgtgccggatttcatttccctcctctctcccagggtacctggc

SEQ ID NO: 283103 - DNA, 201 bp, Homo sapiens
ccaggaagccgccctcctggcgcccagcatctgagcttctacacgtgatgggcgggctcaggagaggacagggagtcgtggtggaagttccacagctggcygcgtgggggggcccttgcaccgcactgccgcctcctgactgcccctatccccgcagcccctgtgccggatttcatttccctcctctctcccagggtacct

SEQ ID NO: 283104 - DNA, 201 bp, Homo sapiens
ccatggagctgccccacaatgtcagcagtgcggaggctgtgctgcggcacaagcttcaggtcttccaggcgctgcggggcctgcagaggggcagtgccgtygtgggccagtaccagtcttacagtgagcaggtgcgcagagagctgcagaagccagacagcttccacagcctgacgccgaccttcgcaggtgggccctggg

SEQ ID NO: 283105 - DNA, 201 bp, Homo sapiens
cccgccgcgcgcgcccccggcccgggccccagtcttgctgagcgcaaggcggtggaggcctgaggcctgaggcctggggcggggtggcggccgggctggcsttggcctcgcgccttcccctgcggccgccgcgggctccgcgggcggtatcggagtgtcgtgcggcgcgtggccgcgtgacacgcgcacttgtcggagtga

SEQ ID NO: 283106 - DNA, 201 bp, Homo sapiens
gttcccggataatagggtgcggatcacctttcctcggaaaacaggacttagggacactaaaagatcacacagatcctttatctcaccctcccatttcctckatgaggaaactgaggcccagccaggctaaatgacttgtttaaggttatgtggttgtttagaggcagggcgcaggcaagagccaccacacattcgggttcc

SEQ ID NO: 283107 - DNA, 201 bp, Homo sapiens
acccacgggcctctgcttggtgactctctcctcaccccgcacctctgaccctgcgtcgggtgcatcctgaatgcttcacaagcaggagggaagcacgtttytctgtaggaccccctgacccctcaaatacctaagagtcagggtcccccaccccacttgcccccactgtggggcgtcctttagagtctccaggttggatgc

SEQ ID NO: 283108 - DNA, 201 bp, Homo sapiens
tataaataatatcaagagcatagatattagtgaaatgtagtcagatgattaggaagtaatgagttttgagtatttattacctttctttttaatttaatggtttttttttttgagacagagtctcactctgtcacccaggctggagtgcagtggtgcaatctctgctcactgcagcctccgcctcctgggttcaagcaatta

SEQ ID NO: 283109 - DNA, 201 bp, Homo sapiens
cctgttgggtgtgctgtgggaatcagaatgagctctcttctcctgcacccatccaccttttttttttttttagacagagtctgctctgtcaccaggctggrgtgcagtggcatgatctcggctcactgcaacctccgcctcctgggttccagcaattctcccgcctcagcctcccaagtagctcggagtacaggcgcgcat

SEQ ID NO: 283110 - DNA, 201 bp, Homo sapiens
ttctgctctgagcagggaatagaaaggtcagagcccttcccgggagtcagggttcctccttcatcgtgagagtatcctgcagcacgcccagtcttcccccyccgacaggctgtggcgcagatcctgcctttccgagaccagaaccgcaaggctttggacggcctctggaaccggcaccatgtggagcgggtggagatcatc

SEQ ID NO: 283111 - DNA, 201 bp, Homo sapiens
catgcccaccgctgccttcagctgggtggcctcagcatgtcactccttgcagctgtgagatgagcatgtcctgtcggtgaggacagctaaggtcccttagvtggcattctgtgatggtagcaaagttttggagcattgaccgtgaagatgtaaagcactggctcttgcccagtaacgataagagctgaagtttactgtgtc

SEQ ID NO: 283112 - DNA, 201 bp, Homo sapiens
gaaccgggctaaaccccagggtgccggctggcaaagcccaagtagccattgctgcccatgaggagcgtatggtccagagaagtaggcctggcacagaggcrggaaaccactggcacgcggtagaggctggagtctccctgaggtcccccaagtttttgagtgcgtggagaccatgggaactgcgtgagggcttccccgact

SEQ ID NO: 283113 - DNA, 201 bp, Homo sapiens
ctggttggcttgtttacctgccatttacaaacaggtccttgatagctcgtagcagggagggacagcctgctgctgagcccagccccccagcaagtgggccttggacacagggtgctttggcaacagaatgagcttgcttgctgcctctctcaattttgtgtgcctgcgtgccaggggacacattctttctgcattccagga

SEQ ID NO: 283114 - DNA, 201 bp, Homo sapiens
cctaccccctgcagtgagccttcatgggtctcagggaatcgtcctccagcccttccaaatttccctcccagtcctcagccagggcgctggccgtgggttgscccccgtgcctgtctgtgcctgatctcccagcaggcacgtgtgctgggcctatgcctgcttcatcttcagagaagtgagctgcacctggtgcagagagcc

SEQ ID NO: 283115 - DNA, 201 bp, Homo sapiens
ctctgctgggcagctgtgcagcctcttccttgccttccctgcatctgcacccattctccccccaagaccaggggtcgatccccaatataggtcaggtctcrtcttctcctgcctcagatcctccagtgtcccccctacaactgatcttagaaaaaagtccagcctcttcgccttatcctgcaagacccctgatctcctctc

SEQ ID NO: 283116 - DNA, 201 bp, Homo sapiens
tttggtcaccctgggcccacactcctgtgaggcaccacctgaatgcacctgaggtacttaactgtacctctgagggacaccagccttactccatccttttygcttttgctggccccggtaggcattggaatctctgagctttgccctagacccctccttccagaagctcagccggcttcttcattgtgctctgtttctaaa

SEQ ID NO: 283117 - DNA, 201 bp, Homo sapiens; identical to SEQ ID NO: 57891

SEQ ID NO: 283118 - DNA, 201 bp, Homo sapiens
gggcaacatagtgagaccccatctctacaaaaagttttaaaaccaggtatggtggtgccctcctgtggtcccagctactcgggagtctgaggtgggaggaycacctgagcccaggagactgaggctgcagtaaggtgtgattgcactattgctctctagcctggaaaacagagtgagaccctatctcaaaaaaaaaaaaaa

SEQ ID NO: 283119 - DNA, 201 bp, Homo sapiens
acttcagaccatgatctgcagcaagaaacgtgccttccatcataaatcagtccatttgtttacaactgtgttccaagcaggtttcataaagaaattcttamccttagaacctcggatatcctctatgttttagttttcatttttttaaaatgcttcttaaaattcactaaattgggctaggtgtggctcatgcctgtaatc

SEQ ID NO: 283120 - DNA, 201 bp, Homo sapiens
aaagctcctagaagctgagcccttaaggatgactgggagtttgctgggtgaacaaacaaatcccaggttaggggtcctacgtgcagaagcctttgagaaaygatggctcctcgtgtctgaggccaggctctctctgtaggtgagggtgtgaggagacttgggcattggaactctcctgcgaggtggtatgcgttggaaccc

SEQ ID NO: 283121 - DNA, 201 bp, Homo sapiens
gttggaaaagtccaaacctggagatgtccctgtgcctccgcccctacccaccccttttccttcagctgtgttaggaaggagaagttttcagaaccctctargctggtggctttcaaacttcagaccatgatctgcagcaagaaacgtgccttccatcataaatcagtccatttgtttacaactgtgttccaagcaggtttc

SEQ ID NO: 283122 - DNA, 201 bp, Homo sapiens
tatgttggtgttgttacatcagtgttgttacgttgctgttgttacacccgtgttgttacgttgttataccgatattgttacgccagggttgttacattgtygttacaccagtgttatgttgttgttacactggtgttgtcattcttatcccagtgttgttatgttgttatgtcagtgttaatgttgctgttgttatgctgt

SEQ ID NO: 283123 - DNA, 201 bp, Homo sapiens
caggttaggggtcctacgtgcagaagcctttgagaaatgatggctcctcgtgtctgaggccaggctctctctgtaggtgagggtgtgaggagacttgggcrttggaactctcctgcgaggtggtatgcgttggaaccctgatctctgggactgtcctgtatattcgagtcaccgataatcagtgctcaccggggttcagcc

SEQ ID NO: 283124 - DNA, 201 bp, Homo sapiens
gagtcgtggtggaagttccacagctggccgcgtgggggggcccttgcaccgcactgccgcctcctgactgcccctatccccgcagcccctgtgccggattkcatttccctcctctctcccagggtacctggccccagcactctcccatctgttcttcaggaaccgactcctctccagttgcaacaccagggagaaaggggc

SEQ ID NO: 283125 - DNA, 201 bp, Homo sapiens
gatgggcgggctcaggagaggacagggagtcgtggtggaagttccacagctggccgcgtgggggggcccttgcaccgcactgccgcctcctgactgcccckatccccgcagcccctgtgccggatttcatttccctcctctctcccagggtacctggccccagcactctcccatctgttcttcaggaaccgactcctctcc

SEQ ID NO: 283126 - DNA, 201 bp, Homo sapiens; identical to SEQ ID NO: 57908

SEQ ID NO: 283127 - DNA, 201 bp, Homo sapiens
caaccagtctttatcagtgtttcctgtgtgctagccactgttccaagccctgtgtggatattaactccttcaggcccacagaagccctgtaagggaggtgcggggattgttgcttgttcgtatgtgaggtgatgtcagttgctggagatcacagggctgaaagatggcagagccggtatttaaaccggggcaggctgggca

SEQ ID NO: 283128 - DNA, 201 bp, Homo sapiens; identical to SEQ ID NO: 57875

SEQ ID NO: 283129 - DNA, 201 bp, Homo sapiens
tatcctgcagcacgcccagtcttccccccccgacaggctgtggcgcagatcctgcctttccgagaccagaaccgcaaggctttggacggcctctggaaccrgcaccatgtggagcgggtggagatcatcatgaaagagaccgtggatgctgaaggtgtgtgagtggccctgcgcactcggtcccccagcctctgcctgccc

SEQ ID NO: 283130 - DNA, 201 bp, Homo sapiens
agggctggccggagagtcctggtctgtgccagagagtcaccctctgctgttccctcaccccagccgtcctagtgcacattgacaaccttcgctgggagggygtgcctttcatcctgatgtctggcaaagccttggacgagagagtgggctacgctcggatcttgttcaagaaccaggcctgctgtgtgcagagcgaaaagc

SEQ ID NO: 283131 - DNA, 201 bp, Homo sapiens; identical to SEQ ID NO: 57883

SEQ ID NO: 283132 - DNA, 201 bp, Homo sapiens; identical to SEQ ID NO: 57915

SEQ ID NO: 283133 - DNA, 201 bp, Homo sapiens; identical to SEQ ID NO: 57916

SEQ ID NO: 283134 - DNA, 201 bp, Homo sapiens
cattttcaatgccagtctgagacatgttcccaagccggggctcttgttcacaccacttactctggccaccaacaacaacccaggccagacagagcatctctttttttttttttgagacagagtctctgtcgcccaggctggagcccagtggcgagatcttggctcactacaacctccacctcccgggttcaggcaattctc

SEQ ID NO: 283135 - DNA, 201 bp, Homo sapiens
gcaacatagtgagaccccatctctacaaaaagttttaaaaccaggtatggtggtgccctcctgtggtcccagctactcgggagtctgaggtgggaggatcrcctgagcccaggagactgaggctgcagtaaggtgtgattgcactattgctctctagcctggaaaacagagtgagaccctatctcaaaaaaaaaaaaaaaa

SEQ ID NO: 283136 - DNA, 201 bp, Homo sapiens
aagttttaaaaccaggtatggtggtgccctcctgtggtcccagctactcgggagtctgaggtgggaggatcacctgagcccaggagactgaggctgcagtraggtgtgattgcactattgctctctagcctggaaaacagagtgagaccctatctcaaaaaaaaaaaaaaaaaaaaaggaaagagtgatgacaacagccca

SEQ ID NO: 283137 - DNA, 201 bp, Homo sapiens
agttttaaaaccaggtatggtggtgccctcctgtggtcccagctactcgggagtctgaggtgggaggatcacctgagcccaggagactgaggctgcagtarggtgtgattgcactattgctctctagcctggaaaacagagtgagaccctatctcaaaaaaaaaaaaaaaaaaaaaggaaagagtgatgacaacagcccag

SEQ ID NO: 283138 - DNA, 201 bp, Homo sapiens
tgaggtgggaggatcacctgagcccaggagactgaggctgcagtaaggtgtgattgcactattgctctctagcctggaaaacagagtgagaccctatctcaaaaaaaaaaaaaaaaaaaaaggaaagagtgatgacaacagcccagggagcagccccgctcagaacccaagtcccaagttccagcactgtgttcccaggca

SEQ ID NO: 283139 - DNA, 201 bp, Homo sapiens
gaggtgggaggatcacctgagcccaggagactgaggctgcagtaaggtgtgattgcactattgctctctagcctggaaaacagagtgagaccctatctcaaaaaaaaaaaaaaaaaaaaaggaaagagtgatgacaacagcccagggagcagccccgctcagaacccaagtcccaagttccagcactgtgttcccaggcag

SEQ ID NO: 283140 - DNA, 201 bp, Homo sapiens
aggtgggaggatcacctgagcccaggagactgaggctgcagtaaggtgtgattgcactattgctctctagcctggaaaacagagtgagaccctatctcaaaaaaaaaaaaaaaaaaaaaggaaagagtgatgacaacagcccagggagcagccccgctcagaacccaagtcccaagttccagcactgtgttcccaggcagg

SEQ ID NO: 283141 - DNA, 201 bp, Homo sapiens
ggtgggaggatcacctgagcccaggagactgaggctgcagtaaggtgtgattgcactattgctctctagcctggaaaacagagtgagaccctatctcaaaaaaaaaaaaaaaaaaaaaggaaagagtgatgacaacagcccagggagcagccccgctcagaacccaagtcccaagttccagcactgtgttcccaggcaggc

SEQ ID NO: 283142 - DNA, 201 bp, Homo sapiens; identical to SEQ ID NO: 57888

SEQ ID NO: 283143 - DNA, 201 bp, Homo sapiens
gaatagaaaggtcagagcccttcccgggagtcagggttcctccttcatcgtgagagtatcctgcagcacgcccagtcttccccccccgacaggctgtggcrcagatcctgcctttccgagaccagaaccgcaaggctttggacggcctctggaaccggcaccatgtggagcgggtggagatcatcatgaaagagaccgtgg

SEQ ID NO: 283144 - DNA, 201 bp, Homo sapiens
ttcttaaaattcactaaattgggctaggtgtggctcatgcctgtaatcccagcactatgggaggctgaggtgagaggatcacttgagcccagaaggttgaraccagcctgggcaacatagtgagaccccatctctacaaaaagttttaaaaccaggtatggtggtgccctcctgtggtcccagctactcgggagtctgagg

SEQ ID NO: 283145 - DNA, 201 bp, Homo sapiens
ttgggctaggtgtggctcatgcctgtaatcccagcactatgggaggctgaggtgagaggatcacttgagcccagaaggttgaaaccagcctgggcaacatrgtgagaccccatctctacaaaaagttttaaaaccaggtatggtggtgccctcctgtggtcccagctactcgggagtctgaggtgggaggatcacctgagc

SEQ ID NO: 283146 - DNA, 201 bp, Homo sapiens
taggtcccatggagccagggaccaggcagattgcaggcccgattatcctagcaaaggtacttttggattttgaagaaagaaacacggaagatatgaaagamagacaggtggagctctgggcaggtctgtttgccgggacagtctgaggatgttgggtttgaacagcaacacaacagcctgggctggctgtcctcaaggtcc

SEQ ID NO: 283147 - DNA, 201 bp, Homo sapiens; identical to SEQ ID NO: 57892

SEQ ID NO: 283148 - DNA, 201 bp, Homo sapiens
tgatgagaactgctgctctggtgctcgctgctcagtattccggagtctcactactcaaagtgtgctcttggaccagctgtcagcacttcaggtcctcttcyttctgcatcagaatgtccttttaaaaagatccccaggaaattcaaatgctcattaaagtttgagaaacactgtaaaggttaaaaaaacataaaaaaaaaa

SEQ ID NO: 283149 - DNA, 201 bp, Homo sapiens
gctcctaagctccagagtccaaggcctttagtacagctgggccctgtaccttcagcccaggggcaaagggagcctcagcgcaggacaggcagtgggagatmcactagtcctggaggcttgcagcctgtcgcggtgagaccagagtggggctagttcagtccacgttccttgtcagaggtggccagcaggactgcaactgtc

SEQ ID NO: 283150 - DNA, 201 bp, Homo sapiens
agccaccacacattcgggttcccagtgtaatgccccctccccttacagctgctcaaacttttcactaaagattttctcattgatttgttaattttttgagmagaagtgattcgtagttggataagcttttggaaggctacttccatgctctttggctaacttcaagtatgtaatttcggaaggtttatttcacagcccatt

SEQ ID NO: 283151 - DNA, 201 bp, Homo sapiens
gctgccagcgctgcgtcagtggccagctcatccccgcggccgctttctgcagctgcagcgggagcacccgaggccactgcccccccagcccccgcagtgcrtgcccgccacagggcagggcccagagccctggacccagggatgggccaggaggtttctcctctttttctctctcccttgctctttctctgggccattttc

SEQ ID NO: 283152 - DNA, 201 bp, Homo sapiens
ggatgcaggatgaatgtgcgggctggggttttggtgcacctcggggagatctgatgttctggcctctctttagatcctccccacttctccacctccctccrccaggccgcaccagcttctatgaggagtacggtgtcattcgcgacgtcctccagaaccatctgacggaggtcctcaccctcgtggccatggagctgcccc

SEQ ID NO: 283153 - DNA, 201 bp, Homo sapiens
cttcatcgtgagagtatcctgcagcacgcccagtcttccccccccgacaggctgtggcgcagatcctgcctttccgagaccagaaccgcaaggctttggayggcctctggaaccggcaccatgtggagcgggtggagatcatcatgaaagagaccgtggatgctgaaggtgtgtgagtggccctgcgcactcggtccccca

SEQ ID NO: 283154 - DNA, 201 bp, Homo sapiens
gatgaggaaactgaggcccagccaggctaaatgacttgtttaaggttatgtggttgtttagaggcagggcgcaggcaagagccaccacacattcgggttcmcagtgtaatgccccctccccttacagctgctcaaacttttcactaaagattttctcattgatttgttaattttttgagcagaagtgattcgtagttggat

SEQ ID NO: 283155 - DNA, 201 bp, Homo sapiens
accgtgaagatgtaaagcactggctcttgcccagtaacgataagagctgaagtttactgtgtccccagtccccagccgccaggtgaggtgggcgctgttaytagcctccttacagatgaagatggtggcgagcccacagccccacagtagaaggcggtggagcctgatcctgggggcaacagtctggccccagcactcagg

SEQ ID NO: 283156 - DNA, 201 bp, Homo sapiens; identical to SEQ ID NO: 57872

SEQ ID NO: 283157 - DNA, 201 bp, Homo sapiens
tgaggacagctaaggtcccttagctggcattctgtgatggtagcaaagttttggagcattgaccgtgaagatgtaaagcactggctcttgcccagtaacgrtaagagctgaagtttactgtgtccccagtccccagccgccaggtgaggtgggcgctgttactagcctccttacagatgaagatggtggcgagcccacagc

SEQ ID NO: 283158 - DNA, 201 bp, Homo sapiens
cccttcccgggagtcagggttcctccttcatcgtgagagtatcctgcagcacgcccagtcttccccccccgacaggctgtggcgcagatcctgcctttccragaccagaaccgcaaggctttggacggcctctggaaccggcaccatgtggagcgggtggagatcatcatgaaagagaccgtggatgctgaaggtgtgtga

SEQ ID NO: 283159 - DNA, 201 bp, Homo sapiens
gtgaggacagctaaggtcccttagctggcattctgtgatggtagcaaagttttggagcattgaccgtgaagatgtaaagcactggctcttgcccagtaackataagagctgaagtttactgtgtccccagtccccagccgccaggtgaggtgggcgctgttactagcctccttacagatgaagatggtggcgagcccacag

SEQ ID NO: 283160 - DNA, 201 bp, Homo sapiens
gtcatgcccaccgctgccttcagctgggtggcctcagcatgtcactccttgcagctgtgagatgagcatgtcctgtcggtgaggacagctaaggtcccttwgctggcattctgtgatggtagcaaagttttggagcattgaccgtgaagatgtaaagcactggctcttgcccagtaacgataagagctgaagtttactgtg

SEQ ID NO: 283161 - DNA, 201 bp, Homo sapiens; identical to SEQ ID NO: 57878

SEQ ID NO: 283162 - DNA, 201 bp, Homo sapiens
tgccacacacctcagacacactgagtatacacccgggaggcgggggccctgcgtcatgcccaccgctgccttcagctgggtggcctcagcatgtcactccytgcagctgtgagatgagcatgtcctgtcggtgaggacagctaaggtcccttagctggcattctgtgatggtagcaaagttttggagcattgaccgtgaag

SEQ ID NO: 283163 - DNA, 201 bp, Homo sapiens
tcctgcctttccgagaccagaaccgcaaggctttggacggcctctggaaccggcaccatgtggagcgggtggagatcatcatgaaagagaccgtggatgcygaaggtgtgtgagtggccctgcgcactcggtcccccagcctctgcctgcccgctgtctgcggtgaggcatggggcgcttctcagagggaggttttctgtg

SEQ ID NO: 283164 - DNA, 201 bp, Homo sapiens
aagagactggccttggtcataaaatggacagctccactcccaggcctgcggccctccctggtggcctttgccgctttcctatgctcctggcagcaaagtgrttcatctctagcaagtggtctctaactttcccaggcagagtccctgtctacagggcaggctccctacccactgacttcctggaacagaagccaagctgtc

SEQ ID NO: 283165 - DNA, 201 bp, Homo sapiens
cccagcatctgagcttctacacgtgatgggcgggctcaggagaggacagggagtcgtggtggaagttccacagctggccgcgtgggggggcccttgcaccrcactgccgcctcctgactgcccctatccccgcagcccctgtgccggatttcatttccctcctctctcccagggtacctggccccagcactctcccatctg

SEQ ID NO: 283166 - DNA, 201 bp, Homo sapiens; identical to SEQ ID NO: 57881

SEQ ID NO: 283167 - DNA, 201 bp, Homo sapiens
cttggacacagggtgctttggcaacagaatgagcttgcttgctgcctctctcaattttgtgtgcctgcgtgccaggggacacattctttctgcattccagraaggtggcctggtacagccctgctggcccaagcactgctctgtgctgtcctctctgagtcctgctttggagccagtccttcaggggcctcccacctgtgg

SEQ ID NO: 283168 - DNA, 201 bp, Homo sapiens
gtgggaggatcacctgagcccaggagactgaggctgcagtaaggtgtgattgcactattgctctctagcctggaaaacagagtgagaccctatctcaaaaaaaaaaaaaaaaaaaaaggaaagagtgatgacaacagcccagggagcagccccgctcagaacccaagtcccaagttccagcactgtgttcccaggcaggct

SEQ ID NO: 283169 - DNA, 201 bp, Homo sapiens; identical to SEQ ID NO: 57886

SEQ ID NO: 283170 - DNA, 201 bp, Homo sapiens
taatactgcccagattcacgggtgctgtggggggtgatgatctcatcacactggctggtgggacaaactccaaaatggagctgggcgcagtggtacacccrtagtcccagctactcgggggcagaggcgggaggatcatttgagctcagtagttggacaccagcctggggagcatagtgagcctccgtctctgaaaaagaa

SEQ ID NO: 283171 - DNA, 201 bp, Homo sapiens; identical to SEQ ID NO: 57887

SEQ ID NO: 283172 - DNA, 201 bp, Homo sapiens; identical to SEQ ID NO: 57890

SEQ ID NO: 283173 - DNA, 201 bp, Homo sapiens
acaggacttagggacactaaaagatcacacagatcctttatctcaccctcccatttcctcgatgaggaaactgaggcccagccaggctaaatgacttgttyaaggttatgtggttgtttagaggcagggcgcaggcaagagccaccacacattcgggttcccagtgtaatgccccctccccttacagctgctcaaactttt

SEQ ID NO: 283174 - DNA, 201 bp, Homo sapiens
gccatagagatagccccagaggccggttttcaagcatggactgggaagagaaggtcatggaagagatgccaggcgaggggtgagcatggcaaggcgagggscttccctgaggcagggggacgcccagaggagccggcaaggagaggagagggctggccggagagtcctggtctgtgccagagagtcaccctctgctgttcc

SEQ ID NO: 283175 - DNA, 201 bp, Homo sapiens
aatgggaggactgtcacagaaccccatgtggttctttcaggattcttgtctggattcattgagctctaatacacataagtacttagtgccagcactaatcrtttgctggtatcactcttccaggatgacacctaccactcggtgcttaataggtgataggtacaggcctcagctcattataagcatgaactccttttatcc

SEQ ID NO: 283176 - DNA, 201 bp, Homo sapiens
aatactgtcagcccctggctcttgccaccaggccttgtccctccttgccaacaccccacccacgggcctctgcttggtgactctctcctcaccccgcaccyctgaccctgcgtcgggtgcatcctgaatgcttcacaagcaggagggaagcacgtttctctgtaggaccccctgacccctcaaatacctaagagtcagggt

SEQ ID NO: 283177 - DNA, 201 bp, Homo sapiens
cagctggccgcgtgggggggcccttgcaccgcactgccgcctcctgactgcccctatccccgcagcccctgtgccggatttcatttccctcctctctcccmgggtacctggccccagcactctcccatctgttcttcaggaaccgactcctctccagttgcaacaccagggagaaaggggcctccacatgcccaagtaccc

SEQ ID NO: 283178 - DNA, 201 bp, Homo sapiens
ccagacactgttgttggtcctcaccttgggttggtcactcactaggaccctcttggacatgaattttgagagagatgaggaagaggcgggggcggtgggasggggggtctgacgtcagggtcaagaggcagatttggtcccctctatagcggtgctggagaggtcattgggcatgtcatgcagtggctgcacagtcagtcc

SEQ ID NO: 283179 - DNA, 201 bp, Homo sapiens
gctttttgcgaggctggctcttcaggtctcggaggggccttttcattaccctctgtcacaactgctctgtaattttgtttacttccttttctcttcttccsactttccctccctcccactcccctgcacattgcctggcacaggtgtgcgcccggtagtgaggtggcacttgttagtctcatccaagggcaggatgcagga

SEQ ID NO: 283180 - DNA, 201 bp, Homo sapiens
tgtagccactggcccagacactgttgttggtcctcaccttgggttggtcactcactaggaccctcttggacatgaattttgagagagatgaggaagaggckggggcggtgggagggggggtctgacgtcagggtcaagaggcagatttggtcccctctatagcggtgctggagaggtcattgggcatgtcatgcagtggct

SEQ ID NO: 283181 - DNA, 201 bp, Homo sapiens
ccactgtgcctggcctaattagctgacttaattagatcacgaagttaggcagtggtcttgagcccaggtccttggaccccaatgcttccttcttctgcttracaaaggaagctgtttagcatcgtgactgagggtccaggctttgtggcttgacagtttccttcacctcccagtttcctcgtctgtagaatgagactcctc

SEQ ID NO: 283182 - DNA, 201 bp, Homo sapiens; identical to SEQ ID NO: 57874

SEQ ID NO: 283183 - DNA, 201 bp, Homo sapiens
taaaattcactaaattgggctaggtgtggctcatgcctgtaatcccagcactatgggaggctgaggtgagaggatcacttgagcccagaaggttgaaaccrgcctgggcaacatagtgagaccccatctctacaaaaagttttaaaaccaggtatggtggtgccctcctgtggtcccagctactcgggagtctgaggtggg

SEQ ID NO: 283184 - DNA, 201 bp, Homo sapiens
actgaggcccagccaggctaaatgacttgtttaaggttatgtggttgtttagaggcagggcgcaggcaagagccaccacacattcgggttcccagtgtaaygccccctccccttacagctgctcaaacttttcactaaagattttctcattgatttgttaattttttgagcagaagtgattcgtagttggataagcttttg

SEQ ID NO: 283185 - DNA, 201 bp, Homo sapiens
cctatctttattttattaaaaattgattgtaatagaagataggtaattctaactttttttcttggcaaaatacaaatctggtaaccctttggaggtcactygcaagtttttggaacctttactggcctgtgagatcgtgaagtccagaactactgctcagagggcatcttctgctctgagcagggaatagaaaggtcagag

SEQ ID NO: 283186 - DNA, 201 bp, Homo sapiens
cagtgagccttcatgggtctcagggaatcgtcctccagcccttccaaatttccctcccagtcctcagccagggcgctggccgtgggttgccccccgtgccygtctgtgcctgatctcccagcaggcacgtgtgctgggcctatgcctgcttcatcttcagagaagtgagctgcacctggtgcagagagcctagagcagaat

SEQ ID NO: 283187 - DNA, 201 bp, Homo sapiens
cagatgaagatggtggcgagcccacagccccacagtagaaggcggtggagcctgatcctgggggcaacagtctggccccagcactcaggcctggcgccgcygcgctgtgctgccagcgctgcgtcagtggccagctcatccccgcggccgctttctgcagctgcagcgggagcacccgaggccactgcccccccagccccc

SEQ ID NO: 283188 - DNA, 201 bp, Homo sapiens; identical to SEQ ID NO: 57885

SEQ ID NO: 283189 - DNA, 201 bp, Homo sapiens
agtgttgttccaagtagtaagctgctgctgtgtgctgtgtcacagtgcttgaagtcaccattagaggtatattcctttgtgccgtatttcaaatgcagaartgacagtggtcctgtgcaaatgggatttatttgttcatttagcagatatttatagagcgccttctgtatgccaggccttgttttggatactggaggtact

SEQ ID NO: 283190 - DNA, 201 bp, Homo sapiens
ccttggacacagggtgctttggcaacagaatgagcttgcttgctgcctctctcaattttgtgtgcctgcgtgccaggggacacattctttctgcattccargaaggtggcctggtacagccctgctggcccaagcactgctctgtgctgtcctctctgagtcctgctttggagccagtccttcaggggcctcccacctgtg

SEQ ID NO: 283191 - DNA, 201 bp, Homo sapiens
ggcctttagtacagctgggccctgtaccttcagcccaggggcaaagggagcctcagcgcaggacaggcagtgggagatccactagtcctggaggcttgcakcctgtcgcggtgagaccagagtggggctagttcagtccacgttccttgtcagaggtggccagcaggactgcaactgtcctggggtttggccctcactggt

SEQ ID NO: 283192 - DNA, 201 bp, Homo sapiens
ctcccaccccttgtctgctgggcatagaggattagaactgcttcctcctgtggtttaccagaaaacgctctgcggctagagcttcagcacaggctgggtckgctgtgccgggtctgtatggggacagctgcacgcctcttccgcttgtgtgagaacaaaggccggaacctggattctgatccaaaccccctggcccccacc

SEQ ID NO: 283193 - DNA, 201 bp, Homo sapiens
ttcggcagtagaatgacggggccaaaggggagaagtgctttctagctgttactctctgttatgagtctgagcagcacagctggcgggcacagccatggccmccctgctttgtcatcctctgaccttggacgagctctggatgtgcacaggtgggagccaagtttacagggggtctttcctcccagtgtccaccctggttgt

SEQ ID NO: 283194 - DNA, 201 bp, Homo sapiens
cgagctcgcagagcagcctgagcgcaagatcactcgcaaccaaaagcgcaagcatgatgagatcaaccatgtgcagaaggtccggatcccttcccatccaygggcccaggaggcccagcttctctgccagttcccttgggtctctcgggccccagtgccaaaaccatagcaaatcccatttcttaagctcctgtagtgtgt

SEQ ID NO: 283195 - DNA, 201 bp, Homo sapiens
gctggagagcacagtcggctccccggagaagccgctgtctgacctgggcaagctcagctaccgcagctactggtcctgggtgctgctggagatcctgcggracttccggggcacactgtccatcaaggacctcaggtgagggggcctcccgggccctgggggcaggacttgccctgagatgggccacgatcctgcttcctt

SEQ ID NO: 283196 - DNA, 201 bp, Homo sapiens
aggagtcaaggcctccttattgctgtcacatgatcccaaaccagtcagaccagctcccaggatggagcccggggcaggcctctcattcctgggcttccctrcccctccccagcacagcctgcccttttgttctcacctggaggaggtgaaactggcctgagcccagaggagggcagccaggtgtgagctggcctggcccag

SEQ ID NO: 283197 - DNA, 201 bp, Homo sapiens
gatcccaaaccagtcagaccagctcccaggatggagcccggggcaggcctctcattcctgggcttccctgcccctccccagcacagcctgcccttttgttytcacctggaggaggtgaaactggcctgagcccagaggagggcagccaggtgtgagctggcctggcccaggcccagccctgcctcccgccccttctcccca

SEQ ID NO: 283198 - DNA, 201 bp, Homo sapiens
ctgcccttttgttctcacctggaggaggtgaaactggcctgagcccagaggagggcagccaggtgtgagctggcctggcccaggcccagccctgcctccckccccttctccccacagtggactccgtctgcctcaagtgggcaccccccaagcacaagcaagtcaagctctccaagaagtgagcagcctggcccctgctgt

SEQ ID NO: 283199 - DNA, 201 bp, Homo sapiens
acaatctcggctcactgcaacctctgcctcccgggttcaagcaattctcctgcctcagccttgcctcccaggttcaagcaattttcctgcctcagcctccygagtagttgggattacaggtgtgtgccaccatgcctggcttttttttttttcatctttttggtacagatggggttttgccatgttgaccaggctggtctc

SEQ ID NO: 283200 - DNA, 201 bp, Homo sapiens
tgaagtgatccagtctcgagtgaacgaccaggagggccgagaggaattctatgtacactacgtgggctgtgagtggcttggcacatctgggcgtgggtgcrgggagttggctgccctggcagcactcttatggcccatacttacagttaaccggcggctggacgagtgggtagacaagaaccggctggcgctgaccaagac

SEQ ID NO: 283201 - DNA, 201 bp, Homo sapiens
gaaagacgagaatgttattcggcagttgctatagccaagcaccctgccaagtgctgtatatgtataagctcctcaaatccttcccaacaattcaacacacrggaatagttacttttttggtaggtgaggaagcaggctgagagagattaagtaacatgcccaaggtcacacagccagtaaaacggtgggctggaattagaa

SEQ ID NO: 283202 - DNA, 201 bp, Homo sapiens
ggagtgcatccctgtacctgccttggttttttcttgtattgatacataataattgtacatattattgttattttttttttttgagacagcgtcttactctrtcgtctaggctgagtgcagtggcacaatcatggctcacttcagcctcaacctcctgggctcaagcaatcctcctgcctcagcctcctgagtagctgggac

SEQ ID NO: 283203 - DNA, 201 bp, Homo sapiens
gaacccaggaggcgaggttgcagtgacgtgagattttgccattgcactccagcctgggcgacagggcgaggctccatttcaaaaaaaaaaaaaaaaagaaaaaaggctatggctcacgcctgtaatcccagcactttgagaggccaaggtgggtggatcatctgaaggtcagaagttcaagaccagcctggccaacatggt

SEQ ID NO: 283204 - DNA, 201 bp, Homo sapiens
cgccttcataggtgatgctgacctgccagggccactgaccggcgactgcactgctgccacctgtgatgcgtgcttggggggccacaccgcagggagctgcycagggaggaagggaaggggtcaggttgttagcctggccactcctatgcagcccaggagctctgatatagagcttgggaagtgggttcacaggagtcaaca

SEQ ID NO: 283205 - DNA, 201 bp, Homo sapiens
ggtgtgagccactgcgcccgaccaagtctcagtttctaaatttataaaaatcaggagtgcaaaccagagcaagatttgtcaaagtctccagacacccagayatttgttactttcagctattgcagcttcatccttctgagtacatgagttagtgggcaagcccaacatttaaatttctttaaatggaagaaagaaagtgga

SEQ ID NO: 283206 - DNA, 201 bp, Homo sapiens
catcctcttagcttcatatcctttgtgatgtcatccttgattccccttcaggcgaagtgagtggttcccttctctatgttcctgcaacatttttttcctayctcagtcatagtttttgtaacattatgttgtaattttctctctctgtcttcctccatcatactgggaacttctggagggcagcacttcttgtgattcatc

SEQ ID NO: 283207 - DNA, 201 bp, Homo sapiens
tgtgtgatgtttggatctctgtgcctgggccttggtctgtaaaagcaggatcactttcctaaggctgctgggaggattactcgatgtaggtgaagtgttgrggggggaaacagagaggcagagacttgctccaaagcatgcagtggtgggttgggtgcctcctagcagagaacatatgggcagcgaacctgttctcttgtc

SEQ ID NO: 283208 - DNA, 201 bp, Homo sapiens
gtgaaactggcctgagcccagaggagggcagccaggtgtgagctggcctggcccaggcccagccctgcctcccgccccttctccccacagtggactccgtytgcctcaagtgggcaccccccaagcacaagcaagtcaagctctccaagaagtgagcagcctggcccctgctgtcggacctgagcctcctggctcccagcc

SEQ ID NO: 283209 - DNA, 201 bp, Homo sapiens
tgtggtgtggtatgtgtgtgtgtgtgcatgtacaggctgtatgtgcacatgtgtaggctgtgtgtgtccctgtgtgtgtagtgtgtgtgtctgagtgtgcrtgcatgcacgtgcatgtggtttgtgtgtgtgtgcagtctccctggaatgtgacgactctcctccgcctcaggtctttcaggttatctcaggccagttatg

SEQ ID NO: 283210 - DNA, 201 bp, Homo sapiens
ttttttattttttatttttagtagagatggggtttcgccatgttggccagactggtctggaactcctggcctcaagtggtcctcccacctcggcctctcaragtgctgggattacaggcgtgagccaccacgtttagctgagtataattttaaatagccctatgtgacaagtggctactttattggacagtgtagatctaa

SEQ ID NO: 283211 - DNA, 201 bp, Homo sapiens
tttttattttttatttttagtagagatggggtttcgccatgttggccagactggtctggaactcctggcctcaagtggtcctcccacctcggcctctcaargtgctgggattacaggcgtgagccaccacgtttagctgagtataattttaaatagccctatgtgacaagtggctactttattggacagtgtagatctaag

SEQ ID NO: 283212 - DNA, 201 bp, Homo sapiens
gttgcagtgacgtgagattttgccattgcactccagcctgggcgacagggcgaggctccatttcaaaaaaaaaaaaaaaaagaaaaaaggctatggctcaygcctgtaatcccagcactttgagaggccaaggtgggtggatcatctgaaggtcagaagttcaagaccagcctggccaacatggtgaaaccccatctctac

SEQ ID NO: 283213 - DNA, 201 bp, Homo sapiens
tgaacccaggaggcgaggttgcagtgacgtgagattttgccattgcactccagcctgggcgacagggcgaggctccatttcaaaaaaaaaaaaaaaaagaaaaaaggctatggctcacgcctgtaatcccagcactttgagaggccaaggtgggtggatcatctgaaggtcagaagttcaagaccagcctggccaacatgg

SEQ ID NO: 283214 - DNA, 201 bp, Homo sapiens
aggctctgggcaagcacttccactctgggagcttcagcttcctcctgagtaagatgggcctggcagtgctgggctcgcacagctgccgggttggatgagakagtggctgtggtgtcataaaccagggagccccttagtgtgtgccgtgaagccaaactcggtcccattgtccccctcctggagtgcagccaagtggacaga

SEQ ID NO: 283215 - DNA, 201 bp, Homo sapiens
ttgaacccaggaggcgaggttgcagtgacgtgagattttgccattgcactccagcctgggcgacagggcgaggctccatttcaaaaaaaaaaaaaaaaagaaaaaaggctatggctcacgcctgtaatcccagcactttgagaggccaaggtgggtggatcatctgaaggtcagaagttcaagaccagcctggccaacatg

SEQ ID NO: 283216 - DNA, 201 bp, Homo sapiens
cttgaacccaggaggcgaggttgcagtgacgtgagattttgccattgcactccagcctgggcgacagggcgaggctccatttcaaaaaaaaaaaaaaaaagaaaaaaggctatggctcacgcctgtaatcccagcactttgagaggccaaggtgggtggatcatctgaaggtcagaagttcaagaccagcctggccaacat

SEQ ID NO: 283217 - DNA, 201 bp, Homo sapiens
aacctccgccttcctggcttaagcaatttttgtgcctcagcctcccaagtatctgagattacaggcgtgtgccaccacacccagctattttttattttttrtttttagtagagatggggtttcgccatgttggccagactggtctggaactcctggcctcaagtggtcctcccacctcggcctctcaaagtgctgggatta

SEQ ID NO: 283218 - DNA, 201 bp, Homo sapiens
gctggagtgcagtggtgcgatctcagctcactgcaacctccgcctcccagattcaagtgagtttcctgccgcagcctcccaagtagctgggactacaggcrcgcaccatcatgcctggctaatttttgtatttttagtagagatagggtttcactatgtttggcctcaaactcctgacctcaactgatccgcctgcctcgg

SEQ ID NO: 283219 - DNA, 201 bp, Homo sapiens
gatttaaaaaattgaaataccctaaactggaagaactcctcaaggtctaaactgccgaatcgaacttcctattgtaatggaaatgttctatagctgtactrtctagtaccgtagccactagccacatgtagctgttgagcacttgaaatgtgtctagtgtgacgaagaattaagaattttagctgggcgcggtggcttacg

SEQ ID NO: 283220 - DNA, 201 bp, Homo sapiens
agcactcatgatccctgaacaaatgaacaactgcgggtatgtggtaaaatgagcattgaatttagagtcagacttaaattcagttaagtattagctcttaycacttttcaaatctgtgaccctaggtaagcctcagttttgttctgttttttggggttcttttttttgagacagagtcttgctcttgtcacccaggccaca

SEQ ID NO: 283221 - DNA, 201 bp, Homo sapiens
ctcagccttgcctcccaggttcaagcaattttcctgcctcagcctcccgagtagttgggattacaggtgtgtgccaccatgcctggcttttttttttttcrtctttttggtacagatggggttttgccatgttgaccaggctggtctcaaactcctggcctcaagtgatctgcccatctcggcctccagaagtactgggat

SEQ ID NO: 283222 - DNA, 201 bp, Homo sapiens
aatgctttttcttccctttctccttgtttgcctgcctagctcctactcatcctcttagcttcatatcctttgtgatgtcatccttgattccccttcaggcraagtgagtggttcccttctctatgttcctgcaacatttttttcctacctcagtcatagtttttgtaacattatgttgtaattttctctctctgtcttcct

SEQ ID NO: 283223 - DNA, 201 bp, Homo sapiens
gacttccggggcacactgtccatcaaggacctcaggtgagggggcctcccgggccctgggggcaggacttgccctgagatgggccacgatcctgcttcctyataccctgtcaccatcctggccagatcccacaagggcaccaggtctggcatttgctctcatccctttttgcagccagatgaccagtatcacccaaaatga

SEQ ID NO: 283224 - DNA, 201 bp, Homo sapiens
atgagctctccaagctggagagcacagtcggctccccggagaagccgctgtctgacctgggcaagctcagctaccgcagctactggtcctgggtgctgctrgagatcctgcgggacttccggggcacactgtccatcaaggacctcaggtgagggggcctcccgggccctgggggcaggacttgccctgagatgggccacg

SEQ ID NO: 283225 - DNA, 201 bp, Homo sapiens
ccgctgtctgacctgggcaagctcagctaccgcagctactggtcctgggtgctgctggagatcctgcgggacttccggggcacactgtccatcaaggacckcaggtgagggggcctcccgggccctgggggcaggacttgccctgagatgggccacgatcctgcttccttataccctgtcaccatcctggccagatcccac

SEQ ID NO: 283226 - DNA, 201 bp, Homo sapiens
tcctggcccagacttatgcagagatggaccccaccacagcagccttggagaaggagcatgaggcggtaagtggggctgggaagctgcctgcaggtcccccrtctccccttgccgaggagcccctgctgagccgtgcactgtgcctcactcccaccctgcctgcagatcaccaaggtgaagtatgtggacaagatccacatc

SEQ ID NO: 283227 - DNA, 201 bp, Homo sapiens
ccaagtcagataggttagctattggtgtggttattattgccatccaggaatgaggtctggtagacggcagggaagccttgtgggtcctgacgggagggacrgcctggtcaccacttctgttcacctctgcccacttttctttcctggcccagacttatgcagagatggaccccaccacagcagccttggagaaggagcatg

SEQ ID NO: 283228 - DNA, 201 bp, Homo sapiens
gctactggtcctgggtgctgctggagatcctgcgggacttccggggcacactgtccatcaaggacctcaggtgagggggcctcccgggccctgggggcagracttgccctgagatgggccacgatcctgcttccttataccctgtcaccatcctggccagatcccacaagggcaccaggtctggcatttgctctcatccct

SEQ ID NO: 283229 - DNA, 201 bp, Homo sapiens
aggggtgccagggcaggctggatcctaagttcctctttctactgctgccaggttatgagctctccaagctggagagcacagtcggctccccggagaagccrctgtctgacctgggcaagctcagctaccgcagctactggtcctgggtgctgctggagatcctgcgggacttccggggcacactgtccatcaaggacctca

SEQ ID NO: 283230 - DNA, 201 bp, Homo sapiens
gtaaattgtccagacctgagatggggccatgactacctggagcaggacagagaggagaattccagagagggcccaattccagagatgtcagaagtagactygacatccactgtattaggacttggccaggccgagggagagagagtagtctgaggcaagcctagttatgggtcttggacactgggaccaagggtgatgttc

SEQ ID NO: 283231 - DNA, 201 bp, Homo sapiens
gtggcttgggcgtcaggaggctcactgtgggggtaaaagaggcttaccctgggcccctccccaagtcaggtgcccctccacacctctaggcacccagcgtyccacctcacctgagggggccacatgaccccagccagtgacagtgcagtggaggccgttggggaaggaggcgttggctgcagggaggcagatgggccggat

SEQ ID NO: 283232 - DNA, 201 bp, Homo sapiens
ttttgaaatgcagactgaagtgagtagatagttttcacatcatagaaagatttccctgaccgcctctgtggtctgccccatctagatttccgacgggagarcatcctgcctcactctacctccagatccaggatcacgttgctgttacagtctccccccgtgaagttcctcatcagcccagagttcttcaccgtgctgcat

SEQ ID NO: 283233 - DNA, 201 bp, Homo sapiens
agtgaggagcatttctggtgctctagataagaaatcagaatgtggcctatttagttattttagtgagaagagggagcagtgaaggcgataaagaggtatayctatttagaacaatgggtaatgtaatgatttatccgacagaattatcccccaaataatttgtccctgaagagacttaatatttgttttactcttaggtag

SEQ ID NO: 283234 - DNA, 201 bp, Homo sapiens
cctgtattcttaaagtgattttgaccttttcaaattactttaccatcctttgtcccactggatttgaatctcacgtgcctatggagaaagcaagggagttwttattatcccatattacagttaagcaaattgagacagagattaagtagttttctttgtctctatgagtgacagagctgagactagaatctgcactgtagt

SEQ ID NO: 283235 - DNA, 201 bp, Homo sapiens
gaagtatgggatagtgcagtgagatgtatgttattagtctcagattatagcatgtcagagaaagaaaacacatgccaaacttaatgaaccctattaatcawctcagctcctcctcctaattcctttcggtgcctcactgctatttagactgggaggcacgcattgacagccacggcaggatcttctacgtggatcacgtaa

SEQ ID NO: 283236 - DNA, 201 bp, Homo sapiens
ttcatccttttgaatgatcaggccttgctcatctctgtatcctcagggtttagcacagggcttagcacatggcttagcacataattaatgaagcttaggasacccttgttcagtttatagaatgtgggatgctgggccaggatcttcaaagactaaaagtggtgaacaattttgccactttctttatctgttataacacag

SEQ ID NO: 283237 - DNA, 201 bp, Homo sapiens
gcagtggcatgatctcagctcactgctacctctgcctcctgggttccagcaattctgcctcagcctcccgagtggctgggattacaggtgcgcaccaccaygactggctaatttttgtattttttagtagagacggggtttcaccatgttggccaagctggtcttgaactcctgaccttgtgatctgcccacctcgacctc

SEQ ID NO: 283238 - DNA, 201 bp, Homo sapiens
ttggtgccctagttattgtcaattgtgactaatgagttttacttttattttatttaggggctacatatattttaatattgctatgaactcgtgtttaaacrttttattttcatgtgttctaatgaattgcagggttttgaaaatattctaattgggccaatggggaaagctatacaagaaggtgttttaagagtagtttta

SEQ ID NO: 283239 - DNA, 201 bp, Homo sapiens
gagcatttagatcagccctagccagaggggaatcactcattctagcagtcagaacctgaatcccaggaagcctcgccaccatgggttaaattgctctgggkttgtaaataaacattaaaggcagtctagaccacaaggactgcaattcctgggcaagtcctggtgctgtgctgggcttagagccagtagactttgggggct

SEQ ID NO: 283240 - DNA, 201 bp, Homo sapiens
tgaaagaggcattgaacagggtaggagagagagtttttcattgctgacactgcatcccccctatcctccagcagcagcaagtggcacagagagagaatctrtgcgcttaggggagggagaatgcagtgattgtgggactttgcattgaaatgctgtgctgtattgtcacagcagaaagcaacgctgggcagaacctagctg

SEQ ID NO: 283241 - DNA, 201 bp, Homo sapiens
tgagctgttaaggtaggggacacattacaggtacagatgtatgtctgtttttgagtttaataaaatgaatatgcaaaatcaaaaatgacatgtacctataygtgtacattaatatatggactattggattttaagactctacaccattgtctgttagaaatgtggttcaaagagtacctgtatcagaattagctgaggtaa

SEQ ID NO: 283242 - DNA, 201 bp, Homo sapiens
gcttctatttctgaagtccaattgctgaaataagtattttccagttggcccaagtataatccatgtatctctttggttattataatgttgttaacccatcratttttactgagagcacaatttctctgacatgctacataagttatattttaccataaatattattagctcattctttccttccaggagatgaattttttt

SEQ ID NO: 283243 - DNA, 201 bp, Homo sapiens
cgtaacaagccccatcttttggggtctgatgagaagaaagagttacttggcttttctgcttcagagttgcagtcaccttatgtaacccaggtaacacgcakgagcacagatctaagccctatgacacactagttacatcatcctaagcaaaaccctagatccatccctctaaggtaggagtaacaatgttcagagtatttt

SEQ ID NO: 283244 - DNA, 201 bp, Homo sapiens
gcttcagagagacctaggctgagtcccacctctgttacttacctgcagcagggtcttggtgaagttgcatgatccttctgagcctctgtttcctcatctayctggtggatttgaaattctgaggatgatgtgaaatcattcatgaaaaatacttaatactgtctctggccatgagtaagcatccagtcagtgatcgctgcc

SEQ ID NO: 283245 - DNA, 201 bp, Homo sapiens
aagaactgtattgtcagcatcaacagatgagaaaaagggtgctgaaaatacaaatggagagagcgataaagaatgactgctcaagggtttgcctgagcctycttggccaccccacacgcatcacagtctgaacaggctgtgcatccagacacctaagtattacctggcatatttgatttccaaatctgggaattcattatt

SEQ ID NO: 283246 - DNA, 201 bp, Homo sapiens
cctcctgagtagctgggagtacaggtgcaagccaccacgcccggctaattttttgtattttaatagagacggggtttcaccgtgttgcccaggctggacamgaactcctgagctcaggcaatccgccctcctcggcctcccaaagtgctaggattacaggtgtgagccacagcgctcagccctttattttttatttcactt

SEQ ID NO: 283247 - DNA, 201 bp, Homo sapiens
attaaatgatattaggtaccccaagatgttatcctaaattgaagtatagatgactttgagaaacctattttattagtgatattaggtgatattattgttaytatataaggtgacattaggtaccccaagatgtcatctgtttctttaagtacaagcaactgagcaatctgttatcaaagctttcttcttagcaattgaaag

SEQ ID NO: 283248 - DNA, 201 bp, Homo sapiens
ctacactacagaacagccactagaccagaaacctttccttgattcccttgcactgtctggcacattgcttcctggccatgtgctgtggcaggtacgtagtwaaaatcttctggccaatgatgcttattaaattatgaattattggatagtgactcacataaataatataaggactcaatatttttaccccataacaacttt

SEQ ID NO: 283249 - DNA, 201 bp, Homo sapiens
gatgagctccaacaagtatttggtttagttcaataagagtaacctccttctttaaataaaattagctattatagttcctcatccatattatatgaactcaktaagatcaaaggaataatttactcctaaccaaaggatgcttttgtattgaacattgtatttcaaaatgattgtatatttctctgaattttcagccttagg

SEQ ID NO: 283250 - DNA, 201 bp, Homo sapiens
taataatacaactatactctagagagattaaatgatattaggtaccccaagatgttatcctaaattgaagtatagatgactttgagaaacctattttattmgtgatattaggtgatattattgttactatataaggtgacattaggtaccccaagatgtcatctgtttctttaagtacaagcaactgagcaatctgttatc

SEQ ID NO: 283251 - DNA, 201 bp, Homo sapiens
aatagtaaagctagaattcctgcgtaggtcatctcgccattcttcaaacccagcatgcttcatctgtgcctccctgcttttgccactccttaactctctcyagccccattttgctcatccattagacctgttttttccatgacacctttctgactccaccatgtcctctctcatcttctctacgctctctatgctgttcga

SEQ ID NO: 283252 - DNA, 201 bp, Homo sapiens
aatttttttttttttttgagacagagtttcgctctgtcgcccaggctggagtgcagtggcgccatctcggctcactgcaagctccacctcctgggttcacrccattctcctgcctcagcctcccgggtagctgggaccaaagatgcccgccaccacgcccggctaattttttgtatttttagtagagacggggtttcacca

SEQ ID NO: 283253 - DNA, 201 bp, Homo sapiens
tgggggactaaaggggattctgtcactattatctggaggttgtatagagagccagcgaagctgttaagcataaatagaatacattttttaaaaataataaraagaaaaaacaaaccaaactcacttttatccttgccctccgctgccttcaccccaaaaagaatttaagatttcacaaagctacatccctagaggatggcc

SEQ ID NO: 283254 - DNA, 201 bp, Homo sapiens
agacattggctgcagataactcaactattacctaattaattcagtgttatagtcatttataaattcaaatgctcatatatagtgcctggttcacaaaaatrtcttgtccctttttctgttgggtgatggtgttatttatagttgccaccaatattattgaaaaaatagtaaatactcagtacatttttgtggaatatatag

SEQ ID NO: 283255 - DNA, 201 bp, Homo sapiens
gtcttcatacaagttcctcatcgctgcattgtttcaagtagagactggataaatagtcactgagttgtggtataaggctgcgggaatttttttttttttttgagacagagtttcgctctgtcgcccaggctggagtgcagtggcgccatctcggctcactgcaagctccacctcctgggttcacgccattctcctgcctca

SEQ ID NO: 283256 - DNA, 201 bp, Homo sapiens
cgtcttcatacaagttcctcatcgctgcattgtttcaagtagagactggataaatagtcactgagttgtggtataaggctgcgggaatttttttttttttttgagacagagtttcgctctgtcgcccaggctggagtgcagtggcgccatctcggctcactgcaagctccacctcctgggttcacgccattctcctgcctc

SEQ ID NO: 283257 - DNA, 201 bp, Homo sapiens
acccacaaacccatccagccacctttcccctacactcacttttttccccttctattgtgtccttccttctcctttgcttgcctgaaaccacctacctcttmttataaaagactccacttcctggtgaggtatctcggaagggtatgctttctgcagggctgttagaactttgtggaaatactttggctcagtgcagcttta

SEQ ID NO: 283258 - DNA, 201 bp, Homo sapiens
tctgatcaaattatgagtctttcccatttagctaagattattttcaggccaatgtatcctccctactcacatgcatgcattttgacttcccaggccatttyccctaactcccccacccacccacaaacccatccagccacctttcccctacactcacttttttccccttctattgtgtccttccttctcctttgcttgcct

SEQ ID NO: 283259 - DNA, 201 bp, Homo sapiens
ccgtcttcatacaagttcctcatcgctgcattgtttcaagtagagactggataaatagtcactgagttgtggtataaggctgcgggaatttttttttttttttgagacagagtttcgctctgtcgcccaggctggagtgcagtggcgccatctcggctcactgcaagctccacctcctgggttcacgccattctcctgcct

SEQ ID NO: 283260 - DNA, 201 bp, Homo sapiens
acctgggaggtggagcttgcagtgagctgagatcgcgccactgcactccagcctgggtgacagagcgagactccgtctcaaaaaaaaaaatttttttttttaagtttcaaggtggtaagaactttataataaccacatatgacagtaagagctcaaagaccatcagttaagagaagcctaaatgtccattcttctggcttc

SEQ ID NO: 283261 - DNA, 201 bp, Homo sapiens
gactatggtgatagagatgtggagcagctgagaagccaccagcacttacacacataaaataaagtcccaaaataatggggtggtgttcaggctgggaggggacaaatagaggacactacagtgagaaaatgagaaggattttgtggcttactgtataggagaaggaagaaagaagagaagtcaatgatgtttaaaagtttc

SEQ ID NO: 283262 - DNA, 201 bp, Homo sapiens
atagatcttggactggcactctgaagttcatgttatatgtgggaaaaaatgttcttctcttggtttaagtcagcagcaggctttcttgtacctgcagttgktcctaatagagccactaacacagctagaaatacaagaaagggaaaagggtaacaactgcttttaaaggcaagataaagaatgagtgggctgctttggtag

SEQ ID NO: 283263 - DNA, 201 bp, Homo sapiens
tttcacgactgtcgtggcctttgtttttccaactctttctgcctctggtgaatctcttccttccacctccccctataattctccttcttcatccttttgartgatcaggccttgctcatctctgtatcctcagggtttagcacagggcttagcacatggcttagcacataattaatgaagcttaggagacccttgttcagt

SEQ ID NO: 283264 - DNA, 201 bp, Homo sapiens
atatatttcattatattcaactgaataattttccaacatacgtgccaaataattactactgtggcttttaatgagctctaaaaatacattaattctagcgyttaagtttcttagtacttaatgaagaaaaatactgttccaaaatccatacgtatattcttaaaacttgggaattcctgctattgcaaaatagatgaattg

SEQ ID NO: 283265 - DNA, 201 bp, Homo sapiens
gcctgaggtcaggagtttgagaccagcctggctaacatggtgaaaccctgtctctactaaaaatacaaaaattacctgggcgtggtggcatacgcctatartcccagctactcgggaggcaggagaatcgcttgaacccaggaggcagaggttgcagtgagccgagatggcaatgctgcactccagcctgggcgacagagc

SEQ ID NO: 283266 - DNA, 201 bp, Homo sapiens
gcccatcaatggtagactggataaagaaaatatggtacatatataccatggaatactatgcagccataaaaaagaatgagatcatgttctttgtaggaacmtggatggagctggaggccattatccttagcaaactaacacaggaacagaaaaccaaatactacatcttctcacaagcgggagctaaatgatgagaacaca

SEQ ID NO: 283267 - DNA, 201 bp, Homo sapiens
gtggacaattagatttgtaatgagcatcctatggaaacttgagctctggagaaaaactgcccaatatctagaaaaaaagtaacagattattctttttgtgsatttttgttacaggctggattacagtgggccttctagagagtttttcttcctggtatccagagaactctttaacccatattatggcttatttgaatattc

SEQ ID NO: 283268 - DNA, 201 bp, Homo sapiens
cctaaatgcccatcaatggtagactggataaagaaaatatggtacatatataccatggaatactatgcagccataaaaaagaatgagatcatgttctttgyaggaacctggatggagctggaggccattatccttagcaaactaacacaggaacagaaaaccaaatactacatcttctcacaagcgggagctaaatgatga

SEQ ID NO: 283269 - DNA, 201 bp, Homo sapiens
agagaatataaatcattcagttataagacacatgcatgtgtatcttcattgcagctctgttcacaatagcaaagacacagaatcaacctaaatgcccatcratggtagactggataaagaaaatatggtacatatataccatggaatactatgcagccataaaaaagaatgagatcatgttctttgtaggaacctggatgg

SEQ ID NO: 283270 - DNA, 201 bp, Homo sapiens
gcaactcctcaaagatctaaaaacagaaataccattcaacccagcaatctcactactgggtatatacccaagagaatataaatcattcagttataagacayatgcatgtgtatcttcattgcagctctgttcacaatagcaaagacacagaatcaacctaaatgcccatcaatggtagactggataaagaaaatatggtac

SEQ ID NO: 283271 - DNA, 201 bp, Homo sapiens
gttttcccagcactatttgttcaaaagattgtccttttcccaatgaatggcagacatttttagaagtaatattttcaaagccatttttctttctcagagargtattgtgatatattgaactttagaatcatacaaatcttacttcactactaattaactgatctgggatacattaattgacctttctgagacaggattgga

SEQ ID NO: 283272 - DNA, 201 bp, Homo sapiens
agtgttttttgatgtacaagagttttaaattttgatgaagtccaatttatctatttttttctcctgttaactgtgtttttggtgtcatattcaagaaatcrttgccaaatccaatgtcataaagcttttaccgtatgttttcctctaagagttttaagttttagctctatgtttaagtccttgacccatttttgaattaat

SEQ ID NO: 283273 - DNA, 201 bp, Homo sapiens
tacctgtttgagtcccattttaatccctttacgtgtatacccagaagtagaatagctggatcgtatggtaattctatgtttaattatttgaagaattaccrtataatttttcatagcagctgcaccatttcacattctaccagcaatgcacaaggattccagtttctccacatcctcactaacatttatgattttcttttt

SEQ ID NO: 283274 - DNA, 201 bp, Homo sapiens
ttattctttagaagattgaaatggtcttatatgttgcaaccagaaatgtgtaataatgcctgtttttatctgtttatttttctttaccaggtgttcagggmatctgtaaaaatggcacttgtgaacttttctctatgtgataatttactatctttttggttctgcatatatttgcattcatcattttgtaaagagatcctg

SEQ ID NO: 283275 - DNA, 201 bp, Homo sapiens
atatgaacaaaagaggaatggaagaaaatttgttttagaattcctttatccaattagtagtaatactgtagcatttttgaggtaaaaaggagctgaaattkcctctaactttactaataatacaactatactctagagagattaaatgatattaggtaccccaagatgttatcctaaattgaagtatagatgactttgaga

SEQ ID NO: 283276 - DNA, 201 bp, Homo sapiens
agacacagctgtgaaaggctatttaactgtttgttcaaagatacgttaatacttgcttataatttgaagtattcttttgaaaactagttaggcctacggtyctatctgtcagtcctacttaggagactgtgtggttagaaagaacaatagcattggtgttcaaataggcctgtgttttgaatcccacttttgtttttgtta

SEQ ID NO: 283277 - DNA, 201 bp, Homo sapiens
cagtattctctttcttagtattatcttctggctctgtgtcagaattgtgttgtgattattccacacctgtgaagttttgtcttcagaactttcctgcctgytcttcctcaggagctctgcccgtgaatgacgtgatgcctttcctggctgttggtctctggcttcaccttctccttctgttttcttgggttgacagtttgt

SEQ ID NO: 283278 - DNA, 201 bp, Homo sapiens
atgaaagagtgagtgggtggatgaatgggtggatgagcaaatggtaggaaatgcagcttggcaaatgagctttgaaaatgaaggcagtcatgatgttgacrgaatagcagatgtatataggtccttattataggcagtgcattgttcacactttaacagctgtcagaactgaaaatgatttcagtagaagtgcaaactcca

SEQ ID NO: 283279 - DNA, 201 bp, Homo sapiens
atatatagtgcctggttcacaaaaatatcttgtccctttttctgttgggtgatggtgttatttatagttgccaccaatattattgaaaaaatagtaaatastcagtacatttttgtggaatatatagaagaaggaaggaataaatgctttactagttggtccaggttaacttctacatttatagaatttatttttctttct

SEQ ID NO: 283280 - DNA, 201 bp, Homo sapiens
atgaatatataccctgactgtgtattcactcctgtgtatataaaacatctgtgaaaggtatatgtcacctgaacctaatattttgaaatatttgacaaaargaacaactgatccatattttttgaggtagcgtttttaaagaaaaattctatttaaaaattccagaagagtattgtatttttcataaaatttcaaataata

SEQ ID NO: 283281 - DNA, 201 bp, Homo sapiens
tttgagaaaacagtgacattcaagaacagtgggaaaactaacttgtgttttttttttttttgcgtgtggtgtttatggtcatccaggacaattactgatcrgttgcagctatagaaataccagacacaaggaagtctctggatgctcaggcagagccttacaagtactcttagctcctttggatcttagctcctttggatt

SEQ ID NO: 283282 - DNA, 201 bp, Homo sapiens
agctcaggtctctggttactctcttttaggagaatatcagaaacagacatttcagtatggagaagaaagaagacattaaatggtctaagatccaaatcctsacatgtgaaaaatagtagccagggtaaacaagggagctaattattttgtgattgtagttatttaagaggtgttttgttttattttgcttttaattatcaa

SEQ ID NO: 283283 - DNA, 201 bp, Homo sapiens
cctcccaaagtgctgggattacaggcgtgagccaccgcgcccggcaagtttcccttcttatgacgcctagttatttttggtaccctctccatttgagaacrtagtaggtccttgattccatgtcttaacttatctgagggattttgttttccattggaaatcatattggtgaagaaaatattctcattagtaaaaattttt

SEQ ID NO: 283284 - DNA, 201 bp, Homo sapiens
tttgtcaatagtttttgaatattagacttacatttcttcatgttatgtgtgtttgtgctatttgcaatgtaacagcacaatttgaagtttcatctgcattytaattttctccattaatttcttaagtctggaccttaagtaaagaaaaaggcagtaaacttttcctataaagggccagagagtaaatattttagggttttg

SEQ ID NO: 283285 - DNA, 201 bp, Homo sapiens
ggaaaattaaacaaatgtttgtgaaagtgttttgagccaggtgtgctggctcatgcctgtaatcccagcccgttgggaggctgaggtgggcagatcatgtragttcaggagtttgagaccagcctaggcaacatggtgaaaccctgtctttcacccttccatggtggaagtatttataccatggaataaagaaaattagct

SEQ ID NO: 283286 - DNA, 201 bp, Homo sapiens
attgggaaaattaaacaaatgtttgtgaaagtgttttgagccaggtgtgctggctcatgcctgtaatcccagcccgttgggaggctgaggtgggcagatcrtgtgagttcaggagtttgagaccagcctaggcaacatggtgaaaccctgtctttcacccttccatggtggaagtatttataccatggaataaagaaaatt

SEQ ID NO: 283287 - DNA, 201 bp, Homo sapiens
aaaaaataatggaagctaaagggagatatttcctttgtttctaaagcattttgaaacttttgtgttgtgggacttaggatttgctgttcataaagtttctrcttctactttgtgtcttgaaagaaagttcaatggaggagtgtagaatttctagaatttcccatttatctagtcatttgttcattcattcatttatgtttg

SEQ ID NO: 283288 - DNA, 201 bp, Homo sapiens
actttctagaggaagaagtataggtcagagtcctaagtctggaattaatccaaggttgtcactaggaaagcagaattaggaaataaatcccttttgaaaartgataactcttcatcagtttatttcaagaagcttctgtgtctttctcatgtaagttatcattgtgtctttgttcccctgtatgttacatgtcttttttcc

SEQ ID NO: 283289 - DNA, 201 bp, Homo sapiens
tgctatacttaggtgtgattttctttttatttattccagttgatattctctgagcttcgtaagttaatgtttttgatgaaatttggacaaatgttggccaytatttcttcaaatattttttctgtttttatttttttcttctttttctgagatgccagttatgcatatgttagaatcatttcatgttgttctgcaaggccc

SEQ ID NO: 283290 - DNA, 201 bp, Homo sapiens
atgatctgtgcagcaaaccaccatggcacacatttgtctatgtaacaaacctgcacaacctgcacacatacccctgaacttaaaagatgaagaaaaaaaaagagcaactgattgcatggtagtgttcatgagttttctagtatatgtttaaccactggctttctggagaaaaaagtgtgtgtatatttgtgtgtatgtagg

SEQ ID NO: 283291 - DNA, 201 bp, Homo sapiens
tggccaagatttgtaggggatcccctttgtggacttctggccctcatccttctagagctcttttctttccagggccctggcctggagattctagtactccrgttgactcagactcagatctctgtatccaagctcagcagaactgctatggactctagcttcttgctctacactcaggaaattgtcctccatctgagatct

SEQ ID NO: 283292 - DNA, 201 bp, Homo sapiens
ttaaagcatttcatgagagtttagggaagtgtcaagtccagtccaagaatcccagtaacaacatctgccttcaggacagcttggacccttcagcaagaagsacccagggtacccaaagtgcaggccggcatccctagcagcagaaagaaatgattttaagttctttaaaaagggatgcagttagttgacagtcctttcttc

SEQ ID NO: 283293 - DNA, 201 bp, Homo sapiens
ccaaatactcatctttgagaaccacagcaaatagcagttatggttatgaggacagattttagaacagaacaaatatttgtagggtagaaagtaccacaggstgagcctatttgagaattctcattttaccagaccctaatagcctgtgtggctacagttgtttcagtaatgacccagaccctggtttcaatcttgcatgaa

SEQ ID NO: 283294 - DNA, 201 bp, Homo sapiens
acatggtactgatacaaaaacagacacatagaccaatggaacagaatagaaaactcagaaataagactgcacacctacaaccatttgaccttcagcaaacytgacaaaaacaggcattggggaaaggattgattccctatttaataagtggtggtgggagaactggctagccatatgcagaaaattgaaactggacccttt

SEQ ID NO: 283295 - DNA, 201 bp, Homo sapiens
acagtctccccccgtgaagttcctcatcagcccagagttcttcaccgtgctgcattctaaccctgtgagtagcgaatctgaaagagtgtgaaggaaaacarcaggccaaagcaaatgatcgttgtttctgtagtaatagcaggaatgataatggcgaatgtttccagagcatttagtgtgttccaagctttgtgttgagca

SEQ ID NO: 283296 - DNA, 201 bp, Homo sapiens
cacgtgccaccctgcctgccttgacccttttaaaaatgagttgctgtgcttctagaacatttgaagggagaaaacatttttcgtgtaatgcaacatcaaarctattaactattatgaagttattttcccacagtgatgactgatttctagagttgatatgaaacaggatgtccatatcctcatctgcatgaaaggaaatgg

SEQ ID NO: 283297 - DNA, 201 bp, Homo sapiens
tcccttacagagcaaatgccataggtggtcaggagaaaatatgccctccttctggtctccaggattagccccactgtgtctgttgataagcatgtgatcayatggacagttttgggatagttgaatgtgtcaggagaaaaatgcttattaatttcaaaaaataacttacacaaaaatataaatgcacaaagaattttcctg

SEQ ID NO: 283298 - DNA, 201 bp, Homo sapiens
ggacttctcttgattaaaaaaaaataataatactcacccacatatataccttgtttggaaactagagaacaaataaataaatgtgacccctttagtcagcmcaagcattgatgtttactaaagcagaacatatacatttgttatttaaagccaaacatcttttctagtctctagaatctttatttgtggcttctcattatt

SEQ ID NO: 283299 - DNA, 201 bp, Homo sapiens; identical to SEQ ID NO: 57933

SEQ ID NO: 283300 - DNA, 201 bp, Homo sapiens
agaattacaagtgcaataatggatggctatagaagatacactgctggagtggacgattaactccaaagggaaggcacatggaaggggccatagacaggttyggatttgagattagttttaaaggctgattaagagcttgtcccagaaacaagatgggcaggagtactctaggtagaagaagcatcatttgcaaaacaatcg

SEQ ID NO: 283301 - DNA, 201 bp, Homo sapiens
taatggacttaaattcccataaccttttaactgctcggctgtatctgtcaagtcagacagtgccctgtgactgtaataatgagtatgaatgatcagtgctsgtcttcctttcttgacattataccattaggcaagtcaaagcatttctctagaactgcctgagggcagtttttgaaaacgtttatttgtgaatgtgccact

SEQ ID NO: 283302 - DNA, 201 bp, Homo sapiens
gaaaaaaagttctaacattttatacgaatacaaatatattcattagaaaacaacctttaacagtattttataggtgaatgtaatgcacatttaaaaattcwataaaatttttagtattggtgtttgtatagcactatgtaatgagaaaggccatgaacctgagttaagagttgagaatttcccctctaatatgattattaa

SEQ ID NO: 283303 - DNA, 201 bp, Homo sapiens
tcaattcagaataaacgcatgtaaagttattttccaatagggctattttaaaacccaataatttttaaatgaccttgtttaatttgttattgatttttgtrtttcatgtatcttttcactaactcaattcatgtaaaaaatatacctctatcagagctcatacaagaaatgattgataaatttggctacataaatattttt

SEQ ID NO: 283304 - DNA, 201 bp, Homo sapiens
aagtttctgttaacagaattctggccaggatatgctctttttcttcactatagaaagctaaggtttttttcttttaaactaagaattctgctttgggaatkagtaaaaacagaagtcataattatcattcacctatccatagttaaataatatttagatggtatagtcttaaatttattttactatagcttataatatttg

SEQ ID NO: 283305 - DNA, 201 bp, Homo sapiens
ctgccaactagtacattttggcaaattgagttctgcctctttacctccctggctggctgctaatcaatcagaagatggtttttcatttctgacttgtcatwtctgtgaggctgattttcgtaagtttaaatgatcaagatctagaatctcgttggtgacctcatcttgccatttgataataaatatggcttgtcaaatgag

SEQ ID NO: 283306 - DNA, 201 bp, Homo sapiens
tgctaaagttttcttaggacatggaatggggtgggagtgggggtgtgaaaagcctccaaggattatgtgttgcttgccattttttttgtttttttcctggycttggctcatagagcaagttgatggtaaatattgggcaatttatttaaccacactattcctcaatttccttattagcaatgctgtcttgtttataaggag

SEQ ID NO: 283307 - DNA, 201 bp, Homo sapiens
atgtatggcaagcatttttccatgcaacttggcccttaagtgtatactagttgtgtcatctggcactcactcagagagccaataacctagtccaatactgrgggagaaactggctatgtcagggctctctgtaaggtggcatattcatcgccagtgtggtataattttgactgtgtgtttctttcctaaaaccagcttcag

SEQ ID NO: 283308 - DNA, 201 bp, Homo sapiens
  misc_feature (1)...(201): n = A,T,C or G
cacataccatgtgtatctggaaatatgagatacaccatttccagactcctgattgcatggttatgtgactccatggctattcagaacttccctaagccaanttaaagcatttcatgagagtttagggaagtgtcaagtccagtccaagaatcccagtaacaacatctgccttcaggacagcttggacccttcagcaagaag

SEQ ID NO: 283309 - DNA, 201 bp, Homo sapiens
ttggcaggatgctgtgggagcctcctgataatttataaggtaggtattattatcattcataatttactgaaatttagaggtagaagtagggatctatataraatagtaaccaaaaaatctcatcagtttggcatttcatgaaaataatacagatttgttaattgatgaatctttactcttataggaaatgcatgatgactt

SEQ ID NO: 283310 - DNA, 201 bp, Homo sapiens
caggcacctcagcctgctattccattcaccaagcttatatgcctctatgaagggtgagattctaaaacctcagtctattgtgatctcagttgagtgtgatrgtcagtgagagcaactcattccattgcatgtccttctagtatagaaatgtatggcaagcatttttccatgcaacttggcccttaagtgtatactagttgt

SEQ ID NO: 283311 - DNA, 201 bp, Homo sapiens
gaaacagctgccatacagttattcctcttctgctgttttgtgcatggtattatgcaataaatatttattgactgactcatatgtggacaatcatgacatartcagtttgtggaatcttctttaaatatcatagaaatgaagactgtaaggttttggacaaaacaatcacttttctgtgtggtggtatagtggagttttttt

SEQ ID NO: 283312 - DNA, 201 bp, Homo sapiens
cgcccggctaattttttgtatttttagtagagacggggtttcaccatgttagccaggatggtctcgatctcctgacctcatgatccgccgacctcggcctmccaaagtgctgggattacaggcgtgagccactgcgccaggcccaaggctgtggtttttaaacttggtgactttaaaaaataaaatgcatattcttggtac

SEQ ID NO: 283313 - DNA, 201 bp, Homo sapiens
gagtgcagtggcgccatctcggctcactgcaagctccacctcctgggttcacgccattctcctgcctcagcctcccgggtagctgggaccaaagatgcccrccaccacgcccggctaattttttgtatttttagtagagacggggtttcaccatgttagccaggatggtctcgatctcctgacctcatgatccgccgacct

SEQ ID NO: 283314 - DNA, 201 bp, Homo sapiens
tttaaaaatgagttgctgtgcttctagaacatttgaagggagaaaacatttttcgtgtaatgcaacatcaaagctattaactattatgaagttattttcccacagtgatgactgatttctagagttgatatgaaacaggatgtccatatcctcatctgcatgaaaggaaatggttcttaacagaaatgttctcaggctaaa

SEQ ID NO: 283315 - DNA, 201 bp, Homo sapiens
gtggcttagttttaggtatgctccacataaatgtccattttactaatctgggtcaagacacaatgagatcagaaactatgatcattcagtttgttttggayagctctggcatgtggacaattagatttgtaatgagcatcctatggaaacttgagctctggagaaaaactgcccaatatctagaaaaaaagtaacagatta

SEQ ID NO: 283316 - DNA, 201 bp, Homo sapiens
tgctctatcagcacttggggctccagactacatggccaccctggagacatctgtgcttattcggaaatgccctcagatgcagctgttgtgcggctacacayccgtcgtccagagtttttatatttccgtgccaagcctttagctgtggaaccaacctaactggcaaaacaggaatgtaacagacaatccctgtgatatgag

SEQ ID NO: 283317 - DNA, 201 bp, Homo sapiens
ttattttaacaaattttgggtgccactgacaacttgggtggagtgccaacccagccatgtgatgatatttaaaatgctctatcagcacttggggctccagrctacatggccaccctggagacatctgtgcttattcggaaatgccctcagatgcagctgttgtgcggctacacatccgtcgtccagagtttttatatttcc

SEQ ID NO: 283318 - DNA, 201 bp, Homo sapiens
acatcaatagccacaagtcatgttgataatatgtaccctcggtatgatgcgtgagggtggcactttacctctgtggtcttcctcccgaacacataatgctmgtccaaccatgagaaaaatgttagacaaaatcccaactgagagacattgtacaagataccttaccagtactctttaatactcccaaggtcatcaaagacc

SEQ ID NO: 283319 - DNA, 201 bp, Homo sapiens
attctccattccatagttgccatatttgttgccatatttctgacctcccatgtgattgttgtcagaaaattatttttctttgtgtgtagtcaaagcataaytcaaagggatatattcactttctatagatacttcacttcagttgactctgaataggacctatggtgggggtagcttctcaacctaatgggtggcctctct

SEQ ID NO: 283320 - DNA, 201 bp, Homo sapiens
ttgaccctgaccatttctaattctccattccatagttgccatatttgttgccatatttctgacctcccatgtgattgttgtcagaaaattatttttctttrtgtgtagtcaaagcataactcaaagggatatattcactttctatagatacttcacttcagttgactctgaataggacctatggtgggggtagcttctcaa

SEQ ID NO: 283321 - DNA, 201 bp, Homo sapiens
ttatccctcaaatgtaggcaagccatagtaaaataatgctttgctctacccagtggttgggacgctcatccctgtaacctccagagaattaaaaggaacakcatactgagcctttcaggcaaggttttgtttatccctgagtgctaataacctcattcaagtattcatgatgatcttgaccctgaccatttctaattctcc

SEQ ID NO: 283322 - DNA, 201 bp, Homo sapiens
cacaaaatgggaagctaaaaaagtgacacttctgcagatcagtacaaattattgattagtaactgggaccaaagccattgaaatttgagtgttaaaccaayactttgcaagggacctggtggtaacccagagttaaggttttattaaataattttaagcaaagaatacattttctgaaaattatcaccatgttaggaagcc

SEQ ID NO: 283323 - DNA, 201 bp, Homo sapiens
gtttgggaaatcagatcagaaagttgacatttggtctatgctactcattgccaacttgatagcccttcataaaactgaccaattattttcacccccgcccctcaccctccaatggttaaatcagctttggttttaaattttagagtagtttagaaaggaaactggcaagttttcaaaagactttctcatttttttattatc

SEQ ID NO: 283324 - DNA, 201 bp, Homo sapiens
taatgcatcattttttgttttatgaatttgtttagcactattggcagttaactgtatgtttttgtacatttaatgatactatgataacagtatctacactrgggattgtgccagaaattagtcacattcaaaaatcattgcctaggaaggagatggtcttgtccctgaggccttcattttgcttaaaaagagacccagagc

SEQ ID NO: 283325 - DNA, 201 bp, Homo sapiens
tgtacgtttgggaaatcagatcagaaagttgacatttggtctatgctactcattgccaacttgatagcccttcataaaactgaccaattattttcacccccgcccctcaccctccaatggttaaatcagctttggttttaaattttagagtagtttagaaaggaaactggcaagttttcaaaagactttctcattttttta

SEQ ID NO: 283326 - DNA, 201 bp, Homo sapiens
ccacttcagagcagtagacccacaagtgcgctggttcatcggcaacacctgacaaggcaacgcagccacagtgcgggtgaggtgagtcatgcgttttgggsactgacctgttggttgatagaagcttctagtatgtgatggtttgaggaatttgactgatttttttaaagcattttttcttttttttttttttgagtttga

SEQ ID NO: 283327 - DNA, 201 bp, Homo sapiens
ccctacccttgcaatataaaagaagttgtaattatatttatagtgcctagaaatagtctatgcctttgggatgtcatttttttttttttttttttttttttgagacggagtcttgctgcgtctcccaggctggactgcagtggcgtgttcttggctcactgcaacctccacctcctgggttcaagcgattctcctgcctca

SEQ ID NO: 283328 - DNA, 201 bp, Homo sapiens
agcatctgtggattttggtatcccatgggggtcttggaacgaatcccccgtggatatcaagggacaactatataatatgtgcatgtgtgtatatgtatatwcacacacacacacacaaacatacacatttacatatatatgcaaatattacatgtacatacatatacatgtatatatacaaaaatatatatagtatatttt

SEQ ID NO: 283329 - DNA, 201 bp, Homo sapiens
accctttcagtttaatattctttcaaatgtttttctcaaaatatgttttgttccccttttgctgactcaaggcattatttatttaccttgtggttttgagrgtgtacgtttgggaaatcagatcagaaagttgacatttggtctatgctactcattgccaacttgatagcccttcataaaactgaccaattattttcaccc

SEQ ID NO: 283330 - DNA, 201 bp, Homo sapiens
acttctctctttgggctgccgtcttcatacaagttcctcatcgctgcattgtttcaagtagagactggataaatagtcactgagttgtggtataaggctgygggaatttttttttttttttgagacagagtttcgctctgtcgcccaggctggagtgcagtggcgccatctcggctcactgcaagctccacctcctgggtt

SEQ ID NO: 283331 - DNA, 201 bp, Homo sapiens
ttatctaggagaggatgtgatgccatgaatgggttatgtctttccattcttataaagaacagtggctgcttcttggcctttcacagtaaagaacctttgayttataatgtgctcaatgcaaatgcatgaaaggaccatccctcccaaagttctttggcttttcaatatgatgaaactagtagggcaaccacaaaaaaaacc

SEQ ID NO: 283332 - DNA, 201 bp, Homo sapiens
tataggacaggcaacagcacttggactctaatcataggtctgatgcaggctcccttgagaccttgggcaaggtacattctcttcttttcctagttacctcrtctgtcagatgggagaaggactgtttacacaccgtcaaaggatgtcataactcttaattgttggtgaggaaatgtgaccgtaagaacactaattaattac

SEQ ID NO: 283333 - DNA, 201 bp, Homo sapiens
ggattggtgcgcctttcaagcgatgcagaccttgttatgttgctgaggtacatacgtaacactcactcttgaagcagaaggtctcttgtcatcagatatcmtggaacattgtagaaaataatatgccaatattcatagcctaaaaattgttcttattctttagacttgtggaaatattttgaagatttagggtgctgattg

SEQ ID NO: 283334 - DNA, 201 bp, Homo sapiens
ctcctgcctcagcctcccgtatagctgggattacaggtgtgtgcctccacacccagctaattttttgtatttttattagagtcgaggtttcaccatgttarccaggctgatctcaaactcctgacctcaagtgatctgcctgcctcggcctcccaaagtgctgggattacaagcgtgagccaccatgcaggaagtagcatt

SEQ ID NO: 283335 - DNA, 201 bp, Homo sapiens
gttaccagaggctgggaagggtagtgggttgcgggggaagtgcagatggtttatgtataaaaaaatatggttagatagaatgaataagatctagcatttgrtagcacaacagggtgacaacagtcaacaataatttattgtacatttaaaagtaactaagagtataattgaattatttttaacacaaagaaaggataaatg

SEQ ID NO: 283336 - DNA, 201 bp, Homo sapiens
  misc_feature (1)...(201): n = A,T,C or G
caactgaatataggacaggcaacagcacttggactctaatcataggtctgatgcaggctcccttgagaccttgggcaaggtacattctcttcttttcctanttacctcgtctgtcagatgggagaaggactgtttacacaccgtcaaaggatgtcataactcttaattgttggtgaggaaatgtgaccgtaagaacactaa

SEQ ID NO: 283337 - DNA, 201 bp, Homo sapiens
aatgaccactagtaacatttaagccatgcatcttatgcttagatatgggtaatcaaatctcatgcttgctatgtgaaataattatatctgagatcagaatragttggcatgtattgtatgtgactttttctgtagaaacactagatagtttcctaaaggtggacgggacctagattaatcagcaatcaattataaaacaaa

SEQ ID NO: 283338 - DNA, 201 bp, Homo sapiens
attattatgcattgtatgcctgtatcaaagtatctcatgtaccctgtaaatataggcacctaccatgtacccacaacaattaaaaattaaaaaatgcaaaygcctaagacccatcctatacctactgaatcacaatttctgtaatttgctctatggagtctgaattttaaacatgagtcccagatgattctaagacacgta

SEQ ID NO: 283339 - DNA, 201 bp, Homo sapiens
acagagagatgatttacatccgggcgggatggaagggacaatgcaaaatttcatcacactactcagaatgtacacaatctaaaacttatgagttgtttgtktctggaattttccatttaatattttcagactaaggttaactttgggtaatggaaattgcagaaagtgaaactatggatacgaggtgactgccgtaccagc

SEQ ID NO: 283340 - DNA, 201 bp, Homo sapiens
atcatgaagcacagagttctaacttctctctttgggctgccgtcttcatacaagttcctcatcgctgcattgtttcaagtagagactggataaatagtcaytgagttgtggtataaggctgcgggaatttttttttttttttgagacagagtttcgctctgtcgcccaggctggagtgcagtggcgccatctcggctcact

SEQ ID NO: 283341 - DNA, 201 bp, Homo sapiens
gagtcaagcagaaactctggagttggaaatgcaactgacatattgaagaatgcctcggagactcttagcagcagaattgatcaagcagaagaaaaaattakcttgaagacaggctatttgaaaacacacagtcagaggagacaaaaaagaataaaaaagaatgaagcatgcctacaagatctagaaaacagcctcaaaagg

SEQ ID NO: 283342 - DNA, 201 bp, Homo sapiens
ttgctgttacagtctccccccgtgaagttcctcatcagcccagagttcttcaccgtgctgcattctaaccctgtgagtagcgaatctgaaagagtgtgaargaaaacaacaggccaaagcaaatgatcgttgtttctgtagtaatagcaggaatgataatggcgaatgtttccagagcatttagtgtgttccaagctttgt

SEQ ID NO: 283343 - DNA, 201 bp, Homo sapiens
ctcgtgatctgcccgcctcggcttcccaatggtggcacatatttcttgagcatgcaccttattttgcttatcaagccatggcagataatttttttcatgtrtaatcattacttttttgtttgtttccccttgtactcttatcctttactgaaggaagttgttaaattttaaaaacaatagctttttttaagtttgagatgt

SEQ ID NO: 283344 - DNA, 201 bp, Homo sapiens
ttgggacagttctctttaagttgatatctgctgaatacttgaagttttgaatacaacagctcaacagattgaaactagttttctttttcttttttttctttcttttttttttttgagactgagtcttactctgttgcccaggctagagtgcagtggcatgatctcagctcactgctacctctgcctcctgggttccagcaa

SEQ ID NO: 283345 - DNA, 201 bp, Homo sapiens
tctcacaggtaacaatgctcattagtttcaggtttattctttcaaagtttttatacatatatggatggatatatattccacacatgtatatatatatatahacacacacacacatactatatgtatatacacacacacatatacatacatgtatatcaataagcaaatacaactatgtagaaattttcacctctttcaata

SEQ ID NO: 283346 - DNA, 201 bp, Homo sapiens
atgcccttcagaaactgctgtaggtctggggtaggcacatgatgtaatttggcccaattagactgaaagaaactctgttatgttgtagttggtgaaaggtktcactaaaaaagaaaaaatctattttgcagaatatttccatacaatcagcataactctctactctaggtatggaatgtgcatagtgactttattccaaat

SEQ ID NO: 283347 - DNA, 201 bp, Homo sapiens
attgaggtaccgaggatacatatgctgtttttgagagatgaaaacagtaattgtgctggaaaaatagaaagctaaaaaaaagaaagaaagaaagaaagaarccttgagctacataaaagtaaggagctcttttagcctttgccaccttctcaaacacactgactctatcacatgaaaatgaacaaccctaactttttttct

SEQ ID NO: 283348 - DNA, 201 bp, Homo sapiens
gtttctgctgaaaatctttcttaaccccaagtccagttgtcacctttactggtagaagtatatttgcctggtggtaccatcctggcccacagcagtgattyccaaatactgatccactaagttgtgccaaactgttttcatcagtatcacctgggaagctttatataatacaaaatgccaggtcatgcctcctccaattcc

SEQ ID NO: 283349 - DNA, 201 bp, Homo sapiens
aactccaatagccaaaattagtttaggttcttttcatagtatcactctcagatatttgttaaattattttctgataaacattgttctctgatgtaactttsaaagattccccaaattatacatgcattcatccactggatatttctccaaagtattgtgtttttttgctaataagtggttcaatcatgattttcaagatgg

SEQ ID NO: 283350 - DNA, 201 bp, Homo sapiens
cattttaaaacttaacctgtagtaacagcaatacatatatatactttaatcaccaaagctttcaagcaccccctcaatgcctattttttcctgagtgtgtrtgctccgtgagtgcctggggcctcactgccagcttgtgggatgtgcctagggcagggctgggacaggtagctggctgatttcagctcaatgctagtaatg

SEQ ID NO: 283351 - DNA, 201 bp, Homo sapiens
gaagtagtaacacaattcttttaaaaataaaagtgtccttacacttattaaaatgtacttgacaaaaaagtagtttattttaattatatatgttttttgcrtctttatcttttccaagatgtacccactgttaatatttcagtgtcaaatctcatagtgtttgattgtctctcagtatattggagctttttataaaaactt

SEQ ID NO: 283352 - DNA, 201 bp, Homo sapiens
  misc_feature (1)...(201): n = A,T,C or G
tctaattttataacaaatttctgaattatttcactggtttggtttaattactggacttggactaagaacattccagaaatcactgcctatgtagtggctcntattcttctctttaattcttagtttctttccttatgactctgggtttttgctaatagccatgcctacatatttgtttctgtctgtttgtcatcttagtct

SEQ ID NO: 283353 - DNA, 201 bp, Homo sapiens
gcctcacatggtcaacagtccaccaaatatctccactcggatgtcttacaaggatctcagaatcaacatggttaagactaagctcatcaagtttccctacstaaaagtataccttctcccatatgcccagttacagttaatagtgccactattctcaggccactctggtcagaaattgggagtcacccttaaacagcgatg

SEQ ID NO: 283354 - DNA, 201 bp, Homo sapiens
ttctcacaggtaacaatgctcattagtttcaggtttattctttcaaagtttttatacatatatggatggatatatattccacacatgtatatatatatatwcacacacacacacatactatatgtatatacacacacacatatacatacatgtatatcaataagcaaatacaactatgtagaaattttcacctctttcaat

SEQ ID NO: 283355 - DNA, 201 bp, Homo sapiens
taagcaacagaaatttctttctccgttctggaggctgggaagtgcaagatcaaggtgccagcagattcggtgtccagtgaggacctattcctcacagatgrtgctacctttgtgtcctcatatggtggaagagcagaaaggcaaaatgggatgaacaagctctctcttttataaggatgctaattacattcatgagggctt

SEQ ID NO: 283356 - DNA, 201 bp, Homo sapiens
acactgaatatatacatatgcttttacactgaatatataatgcatagatactatctgcttccaattaggaatgagctcatcacatgcaacttaaaggtatrgcctcaggaaaatagatgactctcccaacacaatccctttttggaacagcagggcatcagcgtaagactatatcgctaaaattcaggcccacagtcagct

SEQ ID NO: 283357 - DNA, 201 bp, Homo sapiens
tgtggttttgatttgcatttctctgatggccagtgatgatgagcattttttcgtgtgtctgttggcttcataaatgtcttcttttgagaattgtctattcrtatcctttgcccacttgttgaatggggttgtttgattttttttcttgtaaatttgtttaagttctttgtagattctcaatattagccctttgtcagatgg

SEQ ID NO: 283358 - DNA, 201 bp, Homo sapiens
tccatcacgtgtttcagatgtatgattccaaaacttgagggaaaatgttctgcctggttcaagccttcactgaaataaccttaagcagagagaggctggcsttctgagcaactcctttacgtacatgcctaccactaatttctaatagtctttaaaaaaaaaatagtagttagctgctggcaataaagtacagaaaggaaa

SEQ ID NO: 283359 - DNA, 201 bp, Homo sapiens
aggaatcgccacactgtcttccacaatggttaagctagtttacaatcccaccaacagtgtaaaagtgtacctatttctccacatcctctccagcacctgtwgtttcctgactttttaatgatctccattctaactggtctgagatggtatctcattgtggttttgatttgcatttctctgatggccagtgatgatgagcat

SEQ ID NO: 283360 - DNA, 201 bp, Homo sapiens
taatttttcatagcagctgcaccatttcacattctaccagcaatgcacaaggattccagtttctccacatcctcactaacatttatgattttctttttttwaaaaaaaaaaaacatagtcatcctaatgggtgcacagtggtatcattgtgattttggcttgcattttcctaatgatgatatgcatcattagtgatgttaa

SEQ ID NO: 283361 - DNA, 201 bp, Homo sapiens
tcttctcctgtcttatctcctctgactcccaaatctgtactctcagtcatgatctcccttaaggtgtagcctcacatggtcaacagtccaccaaatatctycactcggatgtcttacaaggatctcagaatcaacatggttaagactaagctcatcaagtttccctacgtaaaagtataccttctcccatatgcccagtta

SEQ ID NO: 283362 - DNA, 201 bp, Homo sapiens
caccccagctactgtcagtccccacgtggctctcccgtgtcatctcctcagaactcgccaggtgagtccacctgctgctcacagtgaattctctgaggagwgaaccttcaagccagatgttctatcctccctaaagacagaacagtaagggaacacttcaggtacatctttggtgttagcacagatacacgtgtgcatttc

SEQ ID NO: 283363 - DNA, 201 bp, Homo sapiens
ataatttttcatagcagctgcaccatttcacattctaccagcaatgcacaaggattccagtttctccacatcctcactaacatttatgattttctttttttaaaaaaaaaaaaacatagtcatcctaatgggtgcacagtggtatcattgtgattttggcttgcattttcctaatgatgatatgcatcattagtgatgtta

SEQ ID NO: 283364 - DNA, 201 bp, Homo sapiens
acgtggatggaactggaagccattatcctcagcaaactaacacaggaacagaaaaccaaacaccacatgttctcacttataagtgggagctgaaaaatgasaacacatggacacagagaggggaacaacacacactggggcctgtttcagagtaggactgggggagggagagaattagggaaaaatagctaatgcgtgctg

SEQ ID NO: 283365 - DNA, 201 bp, Homo sapiens
gcagtgtctttcctctgtcacaccaatctgtctaaacagctctgattcttccatatgtagaagaattcccaaagacggttttttatttttgtttttttttkttttgttttgttttgttttgttttgttgagacggagtctcgctctgtcccccaggctggagtgcagtggcgccatctcggctcactgcaagctccgcctc

SEQ ID NO: 283366 - DNA, 201 bp, Homo sapiens
aataagtcctatgtctgcttttgtagacaatcaccatgaatggtaagtattttttccccaacacttttcttcaggcgatttcctatgatattagttttttyatagaacccacatttaaacattaaaacattttttcccttgggcaaagtcatattttcagttaaatacctcatttgactcttgtttttattgtcaaattta

SEQ ID NO: 283367 - DNA, 201 bp, Homo sapiens
ctgacccttatcttaagatgtcaattcagccaggaaagaagagcagtttccccacctgtgcccaccacgggcaggagagacggtctactatcatcagtaayaccaccaatccaatttggcaccgagaggtaagatgatcctcgggggtctcctacttgatggtgaggaagtcagcccagtctctctctttccttgagactt

SEQ ID NO: 283368 - DNA, 201 bp, Homo sapiens
tgccagggggaaatgacttgaagtcttgttttactttaacctctttgtaatatacatatgttttcatgcagaaatgatgttagaattaccaattgaataawaatgtaacttgatgtttccccttcttcaaatccttggggaaaaaattagcctccaaaagtatgctccacacttctaatggggctgagtctggggaagccc

SEQ ID NO: 283369 - DNA, 201 bp, Homo sapiens
gcacaattatcaaatttctgagctaaagcttgtcatttcttttttcctttagtaacttattatggcaagtttccctctttttttttttttttttttttttwttgagacagagtctcactctgttgcccaggcaggagtgcagtggtgccatctcggctcactgcaagctccgcctcccagattcatgccattctcctgcct

SEQ ID NO: 283370 - DNA, 201 bp, Homo sapiens
agaccatgtctctcttggatgtgtattcctagggtattacacagtagctgccacataataggtaccaaaaaacatcatgactattataaaaaatgctcttyactactgagttatagcctaaaggtctaccatatacattttgtgctgtttcttttcttgattagggagaagatccaatttatccgaactgaagggactcca

SEQ ID NO: 283371 - DNA, 201 bp, Homo sapiens
actattaatggctcagagtctctcactcttattcccatgttagacaactatttcaaagtttctttgactaagaataaaaagtaaatctcttgcaagccatscccccagaaatgaaactcaaggtctgttaaagggccagtatatagctgcacaattatcaaatttctgagctaaagcttgtcatttcttttttcctttagt

SEQ ID NO: 283372 - DNA, 201 bp, Homo sapiens
gctaaagttttcttaggacatggaatggggtgggagtgggggtgtgaaaagcctccaaggattatgtgttgcttgccattttttttgtttttttcctggcmttggctcatagagcaagttgatggtaaatattgggcaatttatttaaccacactattcctcaatttccttattagcaatgctgtcttgtttataaggagt

SEQ ID NO: 283373 - DNA, 201 bp, Homo sapiens
tgagtgaatttccttaatgaaacttagcattagggaatcaatattgttcaaaatttgctttgctagtagccaatgtgaaaaggatctatttttccatatgwtttcttttttcatgcctgcattctcgacatactctactctagacagcatttattaatatgtgatagatacttacataaataattgcaggctgttcaaaaa

SEQ ID NO: 283374 - DNA, 201 bp, Homo sapiens
gtgactgttgtattttgtggttgggctaatttttacttggcacaaagtagaagacatggttgtctctttgatctttgtgtgtcctgtcgttaaagtgtagytgttaccgcttttgattcccagacttcaattggacttctcttgattaaaaaaaaataataatactcacccacatatataccttgtttggaaactagagaa

SEQ ID NO: 283375 - DNA, 201 bp, Homo sapiens
ccgagggagtaacggcccaagaagattctgtgtggagaaatgggggaaaatcactgctcttcccaggtaaaatataaaataacatttctttactgtcacarcatttggtggagacattcatttatgtatatattgattaattactgcttttatattaaaagtttgggagagcggaaaagctcttagaatgaatttctccct

SEQ ID NO: 283376 - DNA, 201 bp, Homo sapiens
gccgtcccatcatcaagcgttttctggggaaactaaccattccagtccagaggctgctggagcgacaagccatcgggtaatcagcccttacctttggggawcttgttgagattagttcatataggaaaaaatgacatgaaacttggtagtcctaggacttttcatactgataagaagtagtaacacaattcttttaaaaat

SEQ ID NO: 283377 - DNA, 201 bp, Homo sapiens
atggcttttaaaatgctggtgaggatatgaagaaaagggaacccttgtacaccttggtagaaatgtaaattagtacaaccactatggaaaacagtttggargttcctaaaaactaaacattgaactaacatatgatccagcaattacactgctaggtatatatgtaaaagaaaggaaatcagcatatcgaagagatatctg

SEQ ID NO: 283378 - DNA, 201 bp, Homo sapiens
agtggaggagtattttcaactatgttttgcaacttcagaatttcatgagattaggaattcaaattgtcaatcaaatatactagttaattctaatccattcyataacaagatattaaatatcaaagaattgagatacaataaatgtagggagtactaaaattgcattgtgcataacttaatatttgataacatctcctaaaa

SEQ ID NO: 283379 - DNA, 201 bp, Homo sapiens
aaatggcttttaaaatgctggtgaggatatgaagaaaagggaacccttgtacaccttggtagaaatgtaaattagtacaaccactatggaaaacagtttgsaagttcctaaaaactaaacattgaactaacatatgatccagcaattacactgctaggtatatatgtaaaagaaaggaaatcagcatatcgaagagatatc

SEQ ID NO: 283380 - DNA, 201 bp, Homo sapiens
gaaggctgactccagcgtagtcaggatgaaagaagcatttctcttcttgcagtgatcaaatgctcagctacaaccttggcagaaggctcccagctgaccaygtgagtgggtacctccagtttaaagtggaggttacgtcttctgttcatgaaggtgagatataaatatatctgtatgaatacattgctataggaaaaactt

SEQ ID NO: 283381 - DNA, 201 bp, Homo sapiens
catgtgtagtatttctggtgcttctgcatgtcacaagtgggttaacattggttctccattcttttctttagagtgcctaccgcatgtttacaaacaacacrtgtttgaagcacatgatcaccaaagtccggagggacacccaccactttgaacgctaccagcataaccgcgaccttgtgggattcctcaacatgttcgcga

SEQ ID NO: 283382 - DNA, 201 bp, Homo sapiens; identical to SEQ ID NO: 57943

SEQ ID NO: 283383 - DNA, 201 bp, Homo sapiens
atgcctttgttttaatttatgtatatttatgagaaattagaataaaataaattttaaaagtaaaagctaaggaaatgaagttggagaattgtgcttttgaktaatgaaatgaaaacatagctccctttaaaagaaggaataaatagagtttcttttttttttttttttttttttttttttttgagacagagtcttgctctg

SEQ ID NO: 283384 - DNA, 201 bp, Homo sapiens
tctaaatgtaacgcttgagtcagctggaggctttctgaaactttctttcatgcaactaaaaaattaagagtcctgagaactttagaactatgactaagttkgagtgtggtgcgttggccaaatgcatcagactgaaacagcactagactgtggtctagcagaagatgggaagattgatccatgtcttgctgctgcccagct

SEQ ID NO: 283385 - DNA, 201 bp, Homo sapiens
tctcttccactgcactgtaagctccttgaaaagggactttctcttactccccattggattcccagcgtgtggtaccatgactggcacacaataggcacgcrgaaaatgttcactgaaagaatgactcaatatcaacataagaaagtacttactggtgtgatgtacatcagacgacatgttccagtgtctggttcctgaaag

SEQ ID NO: 283386 - DNA, 201 bp, Homo sapiens
aaggcccagggaagttaaagtaagtcaaagtgacacaaaccacataatgtatagatggtgaaaggagggggcacagttgggcctctaggaaattgattgtkatttgggatgactagccttcattttagtcggcataattattttggaatttgtaaattataggatcatctaaaacatagtcctggaatgaaacatgattaa

SEQ ID NO: 283387 - DNA, 201 bp, Homo sapiens
tcgatgtaactgctgatttgagcaaggttactggtcagcatatgtaaggtaacttggagttttctggtccatcatgtgattcatttgcctgaatggagtgytatgcaactaataaaattcttttgaaaaatcagcattgtttgccagtagtaccagttactcgggaggctgaggctggaggatcacttgagcccagaagtt

SEQ ID NO: 283388 - DNA, 201 bp, Homo sapiens
gtaggaaacctcagagaatacagggagagctccagattagagagtggaaaagagcagaagtaagggttcaagtttttcatctgctgtccattttatccatkataatatttttatagtgcttttatattgagagagctcttctaataatattatctcatataattttttttgagacagggtcggctgggcatagtggcttac

SEQ ID NO: 283389 - DNA, 201 bp, Homo sapiens
gtggctctgaggatcgttttggagtgggggtacgggacagtagttggcacttggaagagttgctgaaccattccgagcttcaatttcttaatataccaacytcataagattgcactgaaggtggaacaagataacatttgtaattgtgatacgcgagtagccaggtagccaccccactacacacatccccaacaaacattt

SEQ ID NO: 283390 - DNA, 201 bp, Homo sapiens
tctcttcactccagcctgggtgacacagtgagactccatctcaaaaaaaaaaagataaaggagcaagggcttttgccctgaagaaacttatgtttcaaaargaatttaagttgtacctcactagccaaatcagaaggtgtacccataaaagtgctagaatgtactctaaggggcacagagagataaacgtacccatgtaga

SEQ ID NO: 283391 - DNA, 201 bp, Homo sapiens
agcagtttccccacctgtgcccaccacgggcaggagagacggtctactatcatcagtaacaccaccaatccaatttggcaccgagaggtaagatgatcctygggggtctcctacttgatggtgaggaagtcagcccagtctctctctttccttgagacttttgcatccctcaggttgtttatgaagtgtctaggggttctg

SEQ ID NO: 283392 - DNA, 201 bp, Homo sapiens
ttcaacattgggtaataatacagtggctctgaggatcgttttggagtgggggtacgggacagtagttggcacttggaagagttgctgaaccattccgagcytcaatttcttaatataccaacctcataagattgcactgaaggtggaacaagataacatttgtaattgtgatacgcgagtagccaggtagccaccccacta

SEQ ID NO: 283393 - DNA, 201 bp, Homo sapiens
cggtactatctctataccctaaaactcatacagttggagtatccctagtcaaaaaattttaaatctaaaatgctccaaaatccaaaactttttgagtgccracatgatgccacaagtagaaaatttcacaactgacctcatatgacagggtgcagtcaaaaacgcggtcaaaactttgtttcatgaaccaaattatgtaaa

SEQ ID NO: 283394 - DNA, 201 bp, Homo sapiens
cagaatgagtgttgtgttagcaggcatgaaaacaacattaatttccttgtaaatcttcatcagacctcttaggtgacttgtcgcagtttttttttttttttccaagcagtatgtctcaatagtggccttaaaatattcagcaaaatattccgtaaaaatattcagtaaatctaaatgacagatgtgctgtcattttggctt

SEQ ID NO: 283395 - DNA, 201 bp, Homo sapiens
gctataggcccaaacctccaaattacaacaattaatcccttgcagatggtttgcggaaatcactaggcttataatttattgttggtctccaaaattagaaytgattcctcacaaatttaacagtgctatttattgcctcctcctaagtgcaccaaataaaaagaaccaaatgcttatcttatacaaagacacttaggtcat

SEQ ID NO: 283396 - DNA, 201 bp, Homo sapiens
aaaattcacatgcacatatacacatagcagattctgggaatttattttttttcttctttgggaggaggagattcaacagtacatttgcttatattatgaartttgtggttacatctctacctcattaaatgtcagaaccttcagaacctgcaggtgttacagtattttctcttaggtcgatgcaaaagtaattgcaccaat

SEQ ID NO: 283397 - DNA, 201 bp, Homo sapiens
cactgcactccagcctgggcaacagagtgagaccctgtctcaaaacggggatagggcatcaagaaggatgagatctgaaaagaggcctcatttagatttgmaaatcatgacattatcaatggtctttgccaaagcaggttctgtgaagtaataggttataaaccggatcatgattggtgacagaatgatacaggatctgaa

SEQ ID NO: 283398 - DNA, 201 bp, Homo sapiens
gtgggagggttacttgggctcagaaggtcaagcctgcagggagccatgatcatgccactgcactccagcctgggcaacagagtgagaccctgtctcaaaasggggatagggcatcaagaaggatgagatctgaaaagaggcctcatttagatttgcaaatcatgacattatcaatggtctttgccaaagcaggttctgtga

SEQ ID NO: 283399 - DNA, 201 bp, Homo sapiens
atgttagccaggatggtttcgatctcctgacctcgtgatccacccgcctcgacctcccaaagtgctgggattacaggcatgagccaccacgcccagccaakttgccataatcttaagtgtactgtgtaatgaacatttacgtatgtgtagacctgtataactgccacccagatcaggacatagagtattctcagcacctca

SEQ ID NO: 283400 - DNA, 201 bp, Homo sapiens
caccacgcctggctaattttttgtatttttagtagagacggggtttcaccatgttagccaggatggtttcgatctcctgacctcgtgatccacccgcctcracctcccaaagtgctgggattacaggcatgagccaccacgcccagccaatttgccataatcttaagtgtactgtgtaatgaacatttacgtatgtgtaga

SEQ ID NO: 283401 - DNA, 201 bp, Homo sapiens
gctctgtcgcccaggctggagtgcagtggtgtgatctcagctcactgcaagctctgcctcccgggttcatgccatcctcctgcctcagcctcctgagtagstgggactacaggcgcccgccaccacgcctggctaattttttgtatttttagtagagacggggtttcaccatgttagccaggatggtttcgatctcctgac

SEQ ID NO: 283402 - DNA, 201 bp, Homo sapiens
tcagtttatttcaagaagcttctgtgtctttctcatgtaagttatcattgtgtctttgttcccctgtatgttacatgtcttttttcccctcctttggctaytttcaagatttttctctttatcttggtttccagcagtttgtctatgctatacttaggtgtgattttctttttatttattccagttgatattctctgagct

SEQ ID NO: 283403 - DNA, 201 bp, Homo sapiens
gagtatcgctctgtcgcccaggctggagtgcagtggtgtgatctcagctcactgcaagctctgcctcccgggttcatgccatcctcctgcctcagcctccygagtagctgggactacaggcgcccgccaccacgcctggctaattttttgtatttttagtagagacggggtttcaccatgttagccaggatggtttcgatc

SEQ ID NO: 283404 - DNA, 201 bp, Homo sapiens
gttttgagattattgatggatcaagaagtgatcatctggccgggcacggtggctcacgcctgtaatcacagcactttgggaggccgaggcaggcagatcaygaggtcaggaaatcgagaccatcctggctaacacagtgaaaccccgtctcttctaaaaatacaaaaaattagctgggtgtggtggcaggcgcctgtagtc

SEQ ID NO: 283405 - DNA, 201 bp, Homo sapiens
ttggctttctctaatctgatctgtcctgtgtgggtaaggagaaatttccccaaagattgaaaattatgagaaaatagagctaagattgtgactcagaagtkagtcttttcctgaccgtctgatgttataagtcagctaagacatgtgagcggcatgtatttgactcagtgtattgtatcctaggcattctttgtggaccac

SEQ ID NO: 283406 - DNA, 201 bp, Homo sapiens
caataaatattaatattatttattctttgtgcaagtgcgcactttgtgcaagtgagacaggtgccttttgcaattatgtgttatattaagattttaccctkcaatatgagatttatgtaattatgtgtctaaaatcattcttggtgatagtgcatatctaaaagaagttttgtaggccaggtgcggtggctcacacctgta

SEQ ID NO: 283407 - DNA, 201 bp, Homo sapiens
cacttgaacccgggagatggaggttgcggtgagctgagattgtgccattgcactccagcctgggcaacaagagcgaaactccatctcaaaaaaaaaaaaaagaatccaataaatattaatattatttattctttgtgcaagtgcgcactttgtgcaagtgagacaggtgccttttgcaattatgtgttatattaagatttt

SEQ ID NO: 283408 - DNA, 201 bp, Homo sapiens
aggctgaggcaggacaatcacttgaacccgggagatggaggttgcggtgagctgagattgtgccattgcactccagcctgggcaacaagagcgaaactccrtctcaaaaaaaaaaaaaagaatccaataaatattaatattatttattctttgtgcaagtgcgcactttgtgcaagtgagacaggtgccttttgcaattat

SEQ ID NO: 283409 - DNA, 201 bp, Homo sapiens
tttcatctttgatgacctaattaactatctgatcatggaaaacttacaatttctaattgtacttaagataatgggtttcattattaccttgagtcaatttyactttgaaaacttacaacattgggcccctaaggataatgatagatagcacttgtatagttttagaattaaacaaacagaccaaaaaatgctttgctacat

SEQ ID NO: 283410 - DNA, 201 bp, Homo sapiens
acagataagggacattaggtagaaactagggaaatgtagataaagtatggattttagctaataatagtgtatcaatattggtttattaattataacaaatrtattatactaatgtaagatgttaatctgtgtgtgaggtgtacaagaactctctgttttatccttgcaatctttctgtaagttaaaacctattctaaaaca

SEQ ID NO: 283411 - DNA, 201 bp, Homo sapiens
ggtttataggtactgagtctcctggctctcctaatagcctctttcatctttgatgacctaattaactatctgatcatggaaaacttacaatttctaattgyacttaagataatgggtttcattattaccttgagtcaattttactttgaaaacttacaacattgggcccctaaggataatgatagatagcacttgtatagt

SEQ ID NO: 283412 - DNA, 201 bp, Homo sapiens
tgttaattgatgaatctttactcttataggaaatgcatgatgacttataagggatatactgtaggattcatgtcagcatcctattcctcctcttaaggaayggctggtctcccttaaccatggtggtctgagagaatggcattttcacagcagggtttctttttggtgttacagttctttgctgtccatgttgttcttgat

SEQ ID NO: 283413 - DNA, 201 bp, Homo sapiens
aaaagaggtttaattggctcatgattctgcaggctgtacaggaagcatagcacccaaatcactgggctttggggatggtctcagggagctttttcaatcayggtggaaggcaaaggggaagcaggcacatcatatgacaaaagcaggagggagagagagagagagtgtgtgtgtgtgttggagggaggtgccacactttta

SEQ ID NO: 283414 - DNA, 201 bp, Homo sapiens
taaaaatacaaaattagtcgggcgtggtggcacatgcctgcaatcccagctactcagtaggctgaggcaggacaatcacttgaacccgggagatggaggtkgcggtgagctgagattgtgccattgcactccagcctgggcaacaagagcgaaactccatctcaaaaaaaaaaaaaagaatccaataaatattaatattat

SEQ ID NO: 283415 - DNA, 201 bp, Homo sapiens
ctgaccaacatggagaaaccatgaccctactaaaaatacaaaattagtcgggcgtggtggcacatgcctgcaatcccagctactcagtaggctgaggcagracaatcacttgaacccgggagatggaggttgcggtgagctgagattgtgccattgcactccagcctgggcaacaagagcgaaactccatctcaaaaaaaa

SEQ ID NO: 283416 - DNA, 201 bp, Homo sapiens
cagtgtgatgctgaaatatgtaacaggcctgaaatacaacctgaaggaatacttgaagaagtgtctggctttctgctacatatcttaagcaggaagacagrcatgttcttttttgttattattatttccttcaaaagatctgaggatctgttacatgaggtcattcttcttccctgtgtacttccttaggctgactggtct

SEQ ID NO: 283417 - DNA, 201 bp, Homo sapiens
gctaacctgtctctctgcttaaatacagataatttaaaaacagtaatgtgggcatacatacatgttatttcacttttttctagagaggaataattgtcagyatttcttctgttgtgattttaagctataagggttgtggcctatttctttctttcagggaagtagtttagttatatacagcctgcattttttattcaacta

SEQ ID NO: 283418 - DNA, 201 bp, Homo sapiens
aagaaggttggggtcagatcacagagaactttgtcaaccaacataaggagtttgggttttattccaagtacagtggagaccaggattttaagcaggagatkaataaggtttgacttttagaagatgactctggcttttggaggagaatggattataggtcagtcttgtagcagtgcagatgagagggaatatgggcttata

SEQ ID NO: 283419 - DNA, 201 bp, Homo sapiens
tgcagataataaaaacagtgtaatgcaacaggaatgattgggcagactttagattgggagtcaggaaagacctttctgcaaggtgatgtttaggctgagtracaagaaggaacaagcattgccaacatcagaggtaggagcattctaggcagagaatggttcctaaggccctaagcaggaacgagcttggcaggtgtcagg

SEQ ID NO: 283420 - DNA, 201 bp, Homo sapiens
gggggtggcaagggataaaagactacacattggatacagtgtacactgctcaggtgatggtgcaccaaaatctcagaaatcaccactaaagaacttactcrtataaccaaacaccacctgttccccacaaatctattgaaataaacaagaataacaatttaaaaaaaaagaatcactgctctcaaggtagatatcaatttg

SEQ ID NO: 283421 - DNA, 201 bp, Homo sapiens
ttttgtaagaactgattgctctcctgtgagttaagctatgtttactactgggaccctcaagaggaataccacttatgttacactcctgcactaaaggcacrtactgcagtgtgaagaaatgttctgaaaaagggttatagaaatctggaaataagaaaggaagagctctctgtattctataattggaagagaaaaaaagaa

SEQ ID NO: 283422 - DNA, 201 bp, Homo sapiens
gattttcaatagagtgaagttaaattgggggtcataaaagcattggattgacatatggtttgccagcctatgggtttacaggcattgcccaaacatttctwtgagatctatatttataagcagccatggaattcctattatgggatgttggcaatcttacattttatagaggtcatatgcatagttttcataggtgttttg

SEQ ID NO: 283423 - DNA, 201 bp, Homo sapiens
gtaaatattttgtgattgaattaagatagcttttgcatgcggtttagaaattctttgttctgattgcaaccattactaacccacaaaataattccttactrtacatactgattttattgtgtttgttataattagctttttatactttcttaaggactaaatagtggacacacctataaagttacttataatgcaattatt

SEQ ID NO: 283424 - DNA, 201 bp, Homo sapiens
tacaaaaaattgctaagaaatatatgtatatattaaatatatattaaaatacctacatatgtatcaatccaatgtccacccaatgtccactactagctggkcatggtggtgcatgcttggagtcccaggtacttgggaggctaaggcttgagcatgggagtttgagtcaaacctgagcaacatagagagataccatttctg

SEQ ID NO: 283425 - DNA, 201 bp, Homo sapiens
ccataggctaattatgtctcttttattgttttattgaggaattgcacatatttaggaaagtccttaaggtgccataatcttttttttttttttttttttgwgacggagtatcgctctgtcgcccaggctggagtgcagtggtgtgatctcagctcactgcaagctctgcctcccgggttcatgccatcctcctgcctcagc

SEQ ID NO: 283426 - DNA, 201 bp, Homo sapiens
ctggcatcccagaccccacaagggtccattttctgcccccttcgctctgtagtcagaaccctgatagggtcattgtgagcagtaagtcctcaatctcaggrcaggtaggccccccccaggctcaggaaaggtctaaacttgtatgctaatccaaacattgagtagtctagaagtagacatgtgactcggttcttgcccatg

SEQ ID NO: 283427 - DNA, 201 bp, Homo sapiens
gcactaagctatactattagactcaaatatgttaatgaatgactaacctaaaaaatgtgaaatttccaactgggaatttacattaaattaactaacaggartctaaatatttactatgtatctttttaaggcatccaagtaaatagtagggttttttttctttaagtgtaagtctgtggcatatttttgacattgtaaagc

SEQ ID NO: 283428 - DNA, 201 bp, Homo sapiens
ggatgaggacctggcatcccagaccccacaagggtccattttctgcccccttcgctctgtagtcagaaccctgatagggtcattgtgagcagtaagtcctyaatctcaggacaggtaggccccccccaggctcaggaaaggtctaaacttgtatgctaatccaaacattgagtagtctagaagtagacatgtgactcggtt

SEQ ID NO: 283429 - DNA, 201 bp, Homo sapiens
taatgaacattttaaaaggagaactgaagttcagtgtcctgttggctgtatttctgtttgatatacaattgaattttgtgacatggttcactggaagtatmcctttagtctttagatttaaaatcttgttgatttggggaaagctgttagtcctggactgaatttccaagacttcatggatcctatattcctagggagctt

SEQ ID NO: 283430 - DNA, 201 bp, Homo sapiens
attactaagataagctctgttaacatgttagagtatgtgatttcactcatttcttcaggtacacacaggcacacagacacacacatacacacacacacacattttaaaacaacattccgtttatcacatggaacatctttccatgtcattaaatattgctctgtaatgttatcaataattcagttttccctcctccattat

SEQ ID NO: 283431 - DNA, 201 bp, Homo sapiens
ctattctatgacttctgcaaaaggaataagtgctagtcatgttttatttgaatggatgtactaatttatagatctgcatatgcttttgaattgtatatcaygtatatatctaattttcacatttttgatgcatggaatctcttttaactattaatgtcaacttgaagacaactggacagtcaatcacctaaaatttaaaag

SEQ ID NO: 283432 - DNA, 201 bp, Homo sapiens
aaaggagaactgaagttcagtgtcctgttggctgtatttctgtttgatatacaattgaattttgtgacatggttcactggaagtatccctttagtctttaratttaaaatcttgttgatttggggaaagctgttagtcctggactgaatttccaagacttcatggatcctatattcctagggagctttaagaattgttttc

SEQ ID NO: 283433 - DNA, 201 bp, Homo sapiens
aattactaagataagctctgttaacatgttagagtatgtgatttcactcatttcttcaggtacacacaggcacacagacacacacatacacacacacacacattttaaaacaacattccgtttatcacatggaacatctttccatgtcattaaatattgctctgtaatgttatcaataattcagttttccctcctccatta

SEQ ID NO: 283434 - DNA, 201 bp, Homo sapiens
tgacagagagaggcatgactaatgcttaggcaagtaagtatatattcatggggcaaatcatagggagaattatgctttttaactattaaagttcatgtaawgggacttacgcccagtctccaactcaagtgccatgtttctcctcaattattacaaaaatcaagagtatcctatgtggatactacaagttgctaagctctt

SEQ ID NO: 283435 - DNA, 201 bp, Homo sapiens
ggaaaaaaaagtcaattactaagataagctctgttaacatgttagagtatgtgatttcactcatttcttcaggtacacacaggcacacagacacacacatacacacacacacacattttaaaacaacattccgtttatcacatggaacatctttccatgtcattaaatattgctctgtaatgttatcaataattcagtttt

SEQ ID NO: 283436 - DNA, 201 bp, Homo sapiens
atatagactttaatttgctattgaggtaccgaggatacatatgctgtttttgagagatgaaaacagtaattgtgctggaaaaatagaaagctaaaaaaaakaaagaaagaaagaaagaaaccttgagctacataaaagtaaggagctcttttagcctttgccaccttctcaaacacactgactctatcacatgaaaatgaa

SEQ ID NO: 283437 - DNA, 201 bp, Homo sapiens
atagccacgattatcttccctgcagagaatgaattttccagaatgttttggttcatttccttgagagcttttaagctttagaattttttcacagactaggwtagctgtaaaactttaggaaagtgactcagtcttcttaaataaataatgtaagccactgagtactttgtaatcaagtcacattttgcagaaatgagctgc

SEQ ID NO: 283438 - DNA, 201 bp, Homo sapiens
aggaaaaaaaagtcaattactaagataagctctgttaacatgttagagtatgtgatttcactcatttcttcaggtacacacaggcacacagacacacacatacacacacacacacattttaaaacaacattccgtttatcacatggaacatctttccatgtcattaaatattgctctgtaatgttatcaataattcagttt

SEQ ID NO: 283439 - DNA, 201 bp, Homo sapiens
tgaattgacctattctacatttttaaaattggggctactgtaaacattctttggagaagaattggtcatttcttttcatgtgtatttgatttgatgtctaygtgcctgaattaccctgactccgatgagaaaggaatgagataggggtaattggttcccaaaatcttttgagatggaaaagcatgcaaggagcagagcaaa

SEQ ID NO: 283440 - DNA, 201 bp, Homo sapiens
ttccctggaagtctttttaatagtctctatggataccctatgtggaaagcagaaacacttaagcatctgttgctttattactgtgatcatgttcctgaacrtgtatctgttaaatactttcttgtacattacgtcagctgtcaaatgcagtatcaaaatacagcatttagttgagtgacattttagtagcctgtggctatt

SEQ ID NO: 283441 - DNA, 201 bp, Homo sapiens
ttttggttcagagactgaataatgccatgggtctttaatcgatttctgaccaagcttgagacagtttggtctatgtccaaaattgaaaggctgtacctcaygggcacctcattttggggatcaggactatgtttctataatagcatgatggtcatctaggtatatgacatgtgtttagttatgtgactgattaacatcctt

SEQ ID NO: 283442 - DNA, 201 bp, Homo sapiens
ggagtttggcagcatcttctctctctgtttcctttagctggtctagttggtctctatttttttatcctgaattgacctattctacatttttaaaattgggrctactgtaaacattctttggagaagaattggtcatttcttttcatgtgtatttgatttgatgtctatgtgcctgaattaccctgactccgatgagaaagg

SEQ ID NO: 283443 - DNA, 201 bp, Homo sapiens
tactcctacttataacatttataattattttgatgttagaatatggaacaccttgtgttgcattgctgacaaaacacaaacaaatctttaaattaattaamaaaaattttttaatgtaccacacttccttaaacttctctatgtagcattttaattaaggaatataaaacttaaaagcaaagaactagaaggagcctgata

SEQ ID NO: 283444 - DNA, 201 bp, Homo sapiens
ttcacttggtaaattcctactttgttagttccaggaaaaaattccatctttgagaatttctttcactgtttttgtcagaaaatggaaagtatgcaacaatrtgttttcttttctgccataactgccagaaaattaagagccaaattttagtaataatctaatcttgggagtttggcagcatcttctctctctgtttccttt

SEQ ID NO: 283445 - DNA, 201 bp, Homo sapiens
ctggcaccgaaagtaggttttatcttacattcctatccgagttgaatagtggaagctgcatagagtgctatgttaggaagactgaggcttcattctggaargagttgtataatcaattagcgatgttgggcatgggcaagagatgaagcaaaatattactcaattttattctattcattaccaatcttaatataatttatt

SEQ ID NO: 283446 - DNA, 201 bp, Homo sapiens
aggaaaaaagtttgcatagatttacatagcatatgtgtagtgctttgaatagtgtccccataagtcatgtcttcctgaatctccgaatatgaccttgcttrgaagtagggtctttgcaggtataattagtgaagataaggtcatactggattacagtgggccaatgaatccaatgaatgttgtccttaaaagaagaggaca

SEQ ID NO: 283447 - DNA, 201 bp, Homo sapiens
tcctgaatctccgaatatgaccttgcttggaagtagggtctttgcaggtataattagtgaagataaggtcatactggattacagtgggccaatgaatccartgaatgttgtccttaaaagaagaggacaggataagagaaagacacagagaagaccatgtgaagacagaggcagagactggacagattcagctacaaacca

SEQ ID NO: 283448 - DNA, 201 bp, Homo sapiens
tcctgattcagagccaagcattcacttgaaattggcactatagaatttgtctttatggggtcttgagtaattacatcagtgtgaagatacagtatttgatrgggataattttaatatgtgttcagtgttccatgaccttagaaagcaaatttttggtccttgttttcttattctccccattgcacattgaaaggtctttat

SEQ ID NO: 283449 - DNA, 201 bp, Homo sapiens
acctaatgtaaatgacgagttaatgggtgcagcacaccaacatggcacatgtatacatatgtaacaaacctgcacgttgtgcacatgtacccgagaacttraagtataagaaaaaaataataaatgtaaaaaaaaagaaaaatagattacgtgtagttgtaatacctagtaatccttactggaaagaaaagtgttaaatag

SEQ ID NO: 283450 - DNA, 201 bp, Homo sapiens
acacacacacacaaatcgttgctctcgttttcactgcaccctgattatataacatatttgacaatgtggcaagacaaggaagtaaatgttaagtcctcagycttctaactctgcctatctcattttagcattgtctatctgaaagaaactttgatgctatgaaatgagttttcatatgctttcttataccaaaaacaaacc

SEQ ID NO: 283451 - DNA, 201 bp, Homo sapiens
aaggttgttaaaagtgtagataactgagccctagcttcagatagtctgattctgaagacctggggtgcatcataggaatctgcatttttattgatcctcaragtgattctggcacatgttgtcagagtccacctgccttgagaaacatttctgtaggtaatagttttcaaaccttattattgtcatgaagctatttatgca

SEQ ID NO: 283452 - DNA, 201 bp, Homo sapiens
gtttggcatagaattatattcaaaacgtattctacttttctgcttcttcctcccctacccctggaacagagataaatctttatttaatatttttattccartgtttcacagatgatagattataaaccactgctaggactctagtgtagtatacaagttgaatttttaaataagtaaaaccttttcttgaggctcaatttg

SEQ ID NO: 283453 - DNA, 201 bp, Homo sapiens
atgggaagttgagcatacatgtgcagaggacacaggacgtgagtggaaggaaagtggtttgtggaataaggcaggctcatgggcagcacgacactgaaggmagaaacacaggccaactttggaacaaaatagggacacctattttgatgacacaggctgaaagaagtgtatgacactacaggtaagtttaaaggtttaggg

SEQ ID NO: 283454 - DNA, 201 bp, Homo sapiens
aaaaagggactcttctgtaattaatgtaaaacgtcaagctattgaaagaatttgtgactttaatggaatgagataatcattccacttgcattccatcagcrttgttgctgctgacaacagaggacaggatagtccaagtcaaatctactaaaggtccttgagagctatttcacaagtcagattttaaagtgtctatttgtg

SEQ ID NO: 283455 - DNA, 201 bp, Homo sapiens
tttggaattggaatgatttgaattggtgactacaaacttcagtcagcatacttgtcacttacataatggaagcctttgtgtctattttaatgttttgtctratttcttaaaaaggaaaaatcactcctggtacaaattgacttatcagtaagctgcaatgtagagatagtgttgctctaggacattattcaattcagaata

SEQ ID NO: 283456 - DNA, 201 bp, Homo sapiens
ctactgtcaaagtgaattatcagccagtataccggaaaataaccaagtcctgaaatacaatgtcactttcctcaattaaaagaaaaaccaggctgggcacrgtggctcacgcctgtaatcccagcactttgggaggccaaggtgggcagatcacgaggtcaggagatggagaccatcctggctaacatggtgaaaccccgt

SEQ ID NO: 283457 - DNA, 201 bp, Homo sapiens
gatatagactttaatttgctattgaggtaccgaggatacatatgctgtttttgagagatgaaaacagtaattgtgctggaaaaatagaaagctaaaaaaawgaaagaaagaaagaaagaaaccttgagctacataaaagtaaggagctcttttagcctttgccaccttctcaaacacactgactctatcacatgaaaatga

SEQ ID NO: 283458 - DNA, 201 bp, Homo sapiens
gaattaagatagcttttgcatgcggtttagaaattctttgttctgattgcaaccattactaacccacaaaataattccttactgtacatactgattttatygtgtttgttataattagctttttatactttcttaaggactaaatagtggacacacctataaagttacttataatgcaattattttatcctgctatatttc

SEQ ID NO: 283459 - DNA, 201 bp, Homo sapiens
actcatcattcatttgtatctgtcccttagggactgtcaagattcacttaatttaacaattaacaattggaaactcctctgctttggaggatattgagaatttttttttttcctctttgttctcacagtcatcttgctgggcacttaataattgaattccttgtctacgtgcattgagacttaaaacattgcctcatagag

SEQ ID NO: 283460 - DNA, 201 bp, Homo sapiens
cttaaggactaaatagtggacacacctataaagttacttataatgcaattattttatcctgctatatttcttaaagtctgttttgtctgttatcagttgtyacatcaacttcctttcagttagtttttgcttagtgtatcttttcccatcaatttactttcagccattctttggcatgctctagatttatctgctgtaaat

SEQ ID NO: 283461 - DNA, 201 bp, Homo sapiens
tttctcttccttcatcaaaatgtgtaaaacaacagtcaaatagtataaatgatcacattttcttagctactgtagttcataaaatcattaccagaaccatsgtaatgccttacctacaaacaagctggaactggatagagtctccattaacttcaacattgggtaataatacagtggctctgaggatcgttttggagtggg

SEQ ID NO: 283462 - DNA, 201 bp, Homo sapiens
gtttcctacagggagcgttactctaaaatattttacatttacacaataaaaccagccttgactgctccatgcctagactgaggactgagccttctggctcraggtttagctggaaattactgagggccaaaatatcatggcaatatcattaagataacgttttagaagccatccaaaggtatattaaaatacctttccaag

SEQ ID NO: 283463 - DNA, 201 bp, Homo sapiens
tggcctctcctccctgaggaaaaggtaaattgccaaatgctgccccttccgtgctctttaaaggcatgcacttgaagactgcacacattcttcaagactgyatgagcactctaaatgtggctgagttcacttcctcatttagcatcgcaaatgctcatgagtaatcattggtgacaataaaatccattctagaaacttaca

SEQ ID NO: 283464 - DNA, 201 bp, Homo sapiens
gaggcggagggtgcagtgagccaagattgcaccactgcactccagcctgctgggtgacagagtaagactccgtctcaaaaaaaaaaaaaaaaaaaaaaaaagtttcatgaggagttttttggtgaggaatttagagtgaatgattaaaacctcactcttggtgccacttacttatataccatgtactttccattgcaactt

SEQ ID NO: 283465 - DNA, 201 bp, Homo sapiens
agagataccatttctgaaggaaaaaaaagtcaattactaagataagctctgttaacatgttagagtatgtgatttcactcatttcttcaggtacacacagrcacacagacacacacatacacacacacacacattttaaaacaacattccgtttatcacatggaacatctttccatgtcattaaatattgctctgtaatgt

SEQ ID NO: 283466 - DNA, 201 bp, Homo sapiens
aagactttgaaggtcacaaagagaatagcaattgttgattacaaagtctgccatgtcacatagtaagcactggaacagactttagttaatattctaaaaamggaaagttacaaaactagaagagtggggctgtttttaataaaatctttaaaaaaatcattgtgtctgaaattagacaacagcttccaaacatttttaagc

SEQ ID NO: 283467 - DNA, 201 bp, Homo sapiens
tctttaaaggcatgcacttgaagactgcacacattcttcaagactgtatgagcactctaaatgtggctgagttcacttcctcatttagcatcgcaaatgcwcatgagtaatcattggtgacaataaaatccattctagaaacttacatttagagttaaacattttccaaagacctgtgtaacccaaatatatctaaattgc

SEQ ID NO: 283468 - DNA, 201 bp, Homo sapiens
ggaggcggagggtgcagtgagccaagattgcaccactgcactccagcctgctgggtgacagagtaagactccgtctcaaaaaaaaaaaaaaaaaaaaaaaaagtttcatgaggagttttttggtgaggaatttagagtgaatgattaaaacctcactcttggtgccacttacttatataccatgtactttccattgcaact

SEQ ID NO: 283469 - DNA, 201 bp, Homo sapiens
cactttgggagtccaaggcaggcagatcacttgaggtcaggagtttgagaccaccctggccaatatggtgaaacccccatctctacttaaaaaaaaaaaaatacaaaaattagccaggcatggtggtgtgcacctgtaatcccagctactcgggaggctgaggcagaagaatcacttgaacccaggaggtggaggttgcag

SEQ ID NO: 283470 - DNA, 201 bp, Homo sapiens
ccctgcctggccatctttaattcaactattaatttgtttataggagggctttttagtggtgctgtcacattgtttcctacagggagcgttactctaaaatrttttacatttacacaataaaaccagccttgactgctccatgcctagactgaggactgagccttctggctcaaggtttagctggaaattactgagggccaa

SEQ ID NO: 283471 - DNA, 201 bp, Homo sapiens
taatatcttgaaaattatgacagtaataaattttaatgatcttcattgagaattcctaggaacctggtaaactttccccgcttttcctcattccaagcacrttgacatgtattttcaagtgcagaagagagaggggctttggaaactttgactcactgctttttgcagctgttagagtgctcaccaaaatttgtcaaaatt

SEQ ID NO: 283472 - DNA, 201 bp, Homo sapiens
agtggggcagggtactgttactactcctaggcctgaagatgtaagaagagggaacagttactagaacctgggttacggagagagctaggttgaggggtcasctggtagaagataaataacctgcagagagactatatatttagaactgggagtttaaatattccagtcttactctcctccctgcctcctgtctcttgctgg

SEQ ID NO: 283473 - DNA, 201 bp, Homo sapiens
cttcaccatgttagccaggatggtctcaatctcctgacctcgtgatccgtccgcctcggcctcccagagtgctgggattacaggtgtgagccaccacaccyggccattttttttttaattggaatatatgcaaacctaggtctgtaatatttttgcaagacaatagtttgctggaactggaggggacattgccacatccca

SEQ ID NO: 283474 - DNA, 201 bp, Homo sapiens
gtcagatagaattctttagtttgtatatgattatgcaattttgtaacagtatatgaaaatagggtaacacaatatagaagttctttagacctgcctagcartgacaaagcaaaaactccctagtgtctgttactgaaattttttcctgcacagtattagcaaaatgctgactatccatgaagtcagcccttcatttgatgt

SEQ ID NO: 283475 - DNA, 201 bp, Homo sapiens
caatggcctggatgcaaatttttggttggcctttctttttctgtaattttgggcaagctacataacttctttgagcctcaggtattcatgaataaaatggrtgtcataatagggtctacctcatggagttgtcaggaaaattatgagataataaatataatataatatagtatctgagcataatatcagtatttcatgcca

SEQ ID NO: 283476 - DNA, 201 bp, Homo sapiens
atggcctggatgcaaatttttggttggcctttctttttctgtaattttgggcaagctacataacttctttgagcctcaggtattcatgaataaaatgggtrtcataatagggtctacctcatggagttgtcaggaaaattatgagataataaatataatataatatagtatctgagcataatatcagtatttcatgccata

SEQ ID NO: 283477 - DNA, 201 bp, Homo sapiens
attgagaaggtactaaataaatgttaactatttttatttcaagcctaagctttcaaagtatctaaagaggtcctgaaccatcagaaagggttttggctggytgtggaagcttagcacgagtggtgtagtcctttgtagtgtccatccagtggctgttcagggagaggatacactcatccaaggatgaggtctgtggtcccc

SEQ ID NO: 283478 - DNA, 201 bp, Homo sapiens
ccttcatcaaaatgtgtaaaacaacagtcaaatagtataaatgatcacattttcttagctactgtagttcataaaatcattaccagaaccatcgtaatgcyttacctacaaacaagctggaactggatagagtctccattaacttcaacattgggtaataatacagtggctctgaggatcgttttggagtgggggtacggg

SEQ ID NO: 283479 - DNA, 201 bp, Homo sapiens
agtcaatttagtctgcctttctggtactgaccacctctgagaccctgacaaggtcaagactcttgcagaggcaggaggcagatctggaatagtgggggatycatcaaggtacattccccaggctgtttgtaggtgttctgttataaagtgttcctgggttaaatcagtttaggacgccgtagaaggcagagggcttccaga

SEQ ID NO: 283480 - DNA, 201 bp, Homo sapiens
ataagaaaaaaatatttttaaacactgtcatctgtcatttatcacaaagcttataattttccttgaaagtacctttagttcattagaacttaatcatctcrccattttggtgatgatacctgtggttattatagttttttatagtggatttatacatttatttcacaacaatcaggtgcttgattttactaaatccaatga

SEQ ID NO: 283481 - DNA, 201 bp, Homo sapiens
ggggataatcaagtaggagggaggtcaagcagtgtaagaacagagaagcgaccactgggcttggcaatgtgtcaagggaagctgtcggctggtgtcttgayaggattggtgggggtagaagttgaaatgaaatgagttgagaaagagatgtgaggtgaggaagtgggtatttcagctgtagagaattcccttaagaagttt

SEQ ID NO: 283482 - DNA, 201 bp, Homo sapiens
ttgacagtcctttcttctctttcatctaactttccacaaatttgagaaaacagtgacattcaagaacagtgggaaaactaacttgtgttttttttttttttgcgtgtggtgtttatggtcatccaggacaattactgatcagttgcagctatagaaataccagacacaaggaagtctctggatgctcaggcagagccttac

SEQ ID NO: 283483 - DNA, 201 bp, Homo sapiens
ctggctggcataactcagaaataggaatgattttctttttctgtaatgtatttttctacctacatgatccccttcttttcttcctcctcctttttttttttaaattttgtttccttcattatattgtagccaccatgtgaccctaaagcattagcgcatgaccaggacagaggccgttatgggtgagggatgaggcagggg

SEQ ID NO: 283484 - DNA, 201 bp, Homo sapiens
tattcctcacagatggtgctacctttgtgtcctcatatggtggaagagcagaaaggcaaaatgggatgaacaagctctctcttttataaggatgctaattrcattcatgagggctttatcctcatgacctaatcactgcttaaaggcccacctcttaataatattgcattggggatttgaagtcaacatatggtttttgtg

SEQ ID NO: 283485 - DNA, 201 bp, Homo sapiens
gagaaagcacttattatcaaatatttattgagcatccacttggcgctagacatacttctagatcctgggatatggcaataaatacaacagagcgtctcccwacttgtggagcttacattctaaagagaaaagatggaaaataaatacacaagaaaaatgtcagatagtatttcaagtaagtacaatgcagataataaaaac

SEQ ID NO: 283486 - DNA, 201 bp, Homo sapiens
aaaattgagtcatcacctagcaccatgcattattctcatgatggactcaaaacaatctttgctgttaggagttagtattatagccttgttataagctatamcaaggcttataacaagccttgtgatttagttctagcaaacgactacaatcattcacagtgagtgagtgttgttaatcagaacttgattctttttctagtt

SEQ ID NO: 283487 - DNA, 201 bp, Homo sapiens
ctggtgacctcctataatttaagagtcactatccaggatctggttgccagctaatctgggtaattcaaaggtctttggaggttcaggggccatatgcagartttctctctgaaccacagtgttcagaacctccctagattaatcttccagcattttctaagattatttagctcccaggcctatcttattcaaactgatatt

SEQ ID NO: 283488 - DNA, 201 bp, Homo sapiens
acacctttaaacaatcagatctcctgtgaggtcactcatcaccaagggagtggtgcgaaaccattcatgagggatctgcacttatgatccaaacacccccsacaaggccctacctctgacactggggattatatttaaacatgagatttagagggaacaaacatccaaaaaaaccatatcaggtagcataagctaagccac

SEQ ID NO: 283489 - DNA, 201 bp, Homo sapiens
tattgtagccaccatgtgaccctaaagcattagcgcatgaccaggacagaggccgttatgggtgagggatgaggcaggggaagctgcaggagcgggggatwcatgcagaggacatttcttcaggaagccctcttctaagcattcacctcctattctcttcttttgtttctaggtcctcatatgggaaatgagactaaacag

SEQ ID NO: 283490 - DNA, 201 bp, Homo sapiens
atcacctgaacccaggaggcagaggttgcagtgagccaagatcacaccacagcactccagcctggcgacacaacgagactctgtctcaaaaaaaaaaaaaattgctcttagtttaatttttaaatatttgcagatatatcaaactttccgcctctactgccaggtatgtgtcattagacctttctggagtgttttcagcac

SEQ ID NO: 283491 - DNA, 201 bp, Homo sapiens
tattcccaaggccagaccttgcagtcttgtcattggctcttctaagcccgtgttgtttttttctacccagtaatgtgctggtgcccatttctgcattctcrggcacactgttctcagcaaatcattctggtgccattcaagtggcttcaaagccgtagtcgccagtaggtgccctcttagcaggtggcctggtggtgccat

SEQ ID NO: 283492 - DNA, 201 bp, Homo sapiens
ttctctgaggagtgaaccttcaagccagatgttctatcctccctaaagacagaacagtaagggaacacttcaggtacatctttggtgttagcacagatacmcgtgtgcatttcctgtctcgtaagagtggcttatttccatgaggattcattttgacaaacataatgaataggaggattagtggtatgacatactcagata

SEQ ID NO: 283493 - DNA, 201 bp, Homo sapiens
tattcttctctttaattcttagtttctttccttatgactctgggtttttgctaatagccatgcctacatatttgtttctgtctgtttgtcatcttagtctrtgtgacctgagtgacctagaataccttgatgaagagttccatcagagcctgcagtggatgaaagacaatgatatccatgacatcctagacctcacgttca

SEQ ID NO: 283494 - DNA, 201 bp, Homo sapiens
tatagaggaggtgaaatttgatttatagatggctagattttaaatttcaaattaaaggaaggcatggttcagcttgccaactgaatataggacaggcaacrgcacttggactctaatcataggtctgatgcaggctcccttgagaccttgggcaaggtacattctcttcttttcctagttacctcgtctgtcagatgggag

SEQ ID NO: 283495 - DNA, 201 bp, Homo sapiens
atcaaaatgtgtaaaacaacagtcaaatagtataaatgatcacattttcttagctactgtagttcataaaatcattaccagaaccatcgtaatgccttacytacaaacaagctggaactggatagagtctccattaacttcaacattgggtaataatacagtggctctgaggatcgttttggagtgggggtacgggacagt

SEQ ID NO: 283496 - DNA, 201 bp, Homo sapiens
tgcactgaaggtggaacaagataacatttgtaattgtgatacgcgagtagccaggtagccaccccactacacacatccccaacaaacatttgttgagaacytactgtgtggctgccactaggcaataggataaaaaatgaatcagctcataataggtgagatataagtaggaaggaaataattgtaatgcactgtattcag

SEQ ID NO: 283497 - DNA, 201 bp, Homo sapiens
gttgacagtcctttcttctctttcatctaactttccacaaatttgagaaaacagtgacattcaagaacagtgggaaaactaacttgtgttttttttttttttgcgtgtggtgtttatggtcatccaggacaattactgatcagttgcagctatagaaataccagacacaaggaagtctctggatgctcaggcagagcctta

SEQ ID NO: 283498 - DNA, 201 bp, Homo sapiens
gtgactcgcacctgtagtcccagctactcaagaggctgaggcaggagaatcacttgaacccaggaagcagaggttgcagtgagccaacattgtgccactgygctccagccatgcaacagagctagactctgtctcagaaaaaaaaaaaaaaaggaaaccagattgtggatacataaagaaggcctttaaaagaagagaacc

SEQ ID NO: 283499 - DNA, 201 bp, Homo sapiens
acaggaatgtaacagacaatccctgtgatatgagtcatattaactatttatatgaaagaagttgctaagacattacaggaagcaaaggcatgatgtacccygctgtgacatgttttactgagttagctaggcttatttataaattgtaatctacaacctgctctcagataggcagttctaagctttggattataatcaaat

SEQ ID NO: 283500 - DNA, 201 bp, Homo sapiens
tttttgttgaattcactcatgtatcctaagatcctggcacaaagtaggcactcagtaaatagttattgagttaattagtctttctaccatctcgttagtcyaattcttcatgaagttatagcctaagtttctcctttctaaacagtttcagggttgagggtagaggtggcacattggtgtatgttaataggaagaagttct

SEQ ID NO: 283501 - DNA, 201 bp, Homo sapiens
cttatttataaattgtaatctacaacctgctctcagataggcagttctaagctttggattataatcaaatcaaagtttaagactattttggctttagaggkgactccatcagtgcttctagagttaaaagtcagcagataaaaacttgaccagttgaagacacattttctcctagaggaactaactgttagctctgttttt

SEQ ID NO: 283502 - DNA, 201 bp, Homo sapiens
gtgtaggaaatagatacaagtaagttaatagatacaagggaagggaagttctcaaagctcaggttggaaaggtaggctagggctggttggtcattgaagcmttattattattattattattattattattattattattattttgaatcggagtcacacttcttcgcccaggctggagtgcagtggcgtgatctcccaggt

SEQ ID NO: 283503 - DNA, 201 bp, Homo sapiens
atttatagtacttgggcagcaaaatgatgaagccagtgaaagaatctttctccccacaacattagaactgggaggtgttgatgcttacaagatccccccccttgaaggcaaagaccatgtctctcttggatgtgtattcctagggtattacacagtagctgccacataataggtaccaaaaaacatcatgactattataaa

SEQ ID NO: 283504 - DNA, 201 bp, Homo sapiens
ttttgttgaattcactcatgtatcctaagatcctggcacaaagtaggcactcagtaaatagttattgagttaattagtctttctaccatctcgttagtccrattcttcatgaagttatagcctaagtttctcctttctaaacagtttcagggttgagggtagaggtggcacattggtgtatgttaataggaagaagttcta

SEQ ID NO: 283505 - DNA, 201 bp, Homo sapiens
ttgcatttctctccagtggattctgttttagtaaataattggacattggctttccaattctttttttatttctctgccacaggaaaaaaagaaaaaaaaaagatagcaagattgtttattccaaacaccgggtggaaattgttaggagccacatacgttattttggcctaaattaatcatgtccctgctttgtattttact

SEQ ID NO: 283506 - DNA, 201 bp, Homo sapiens
agaagttctagatacacagctctacactgttgtgacatttttcacattaaatgaggcattttacattcaatgaaacatacctaataggttttaataaatasgcttccaaccaagttagtttcatttggaccaaattcctaagtaattaggaaaaaaaacaaaacccatgtactacagtagttattttaatctagacaagtt

SEQ ID NO: 283507 - DNA, 201 bp, Homo sapiens
aagaagtgttataataaagctcctagacatatacattcattcaagcaactaaaatttattcattgacattctcttaaaatttaatgtgtaattaatgtctrttttctttttgtgagctttttgtaagttgtgagtaaagtagtaagtcatactgaggagatagagaagaccaaaaacaagttatgcaaattaataatgcat

SEQ ID NO: 283508 - DNA, 201 bp, Homo sapiens
gcaggcccaagttggtagcttcaagttttgttttgttttctttctgctttttagagtctgaaaagtctctaatctcctaaagatgttgaagatttttttttagtggcatctagagtcctcagttaagcataatctttcttctaacataggattcacatggtaatctatttttatgcaattatttgataggctatgaaatat

SEQ ID NO: 283509 - DNA, 201 bp, Homo sapiens
gtattttcagtccccatgtgctccagttccagagaagttaaaggactagcttcagatcacaaaagtgattctctaagacctgccacccaggtcttctagcrtcctaccttaggtgagtagagtgctctttttaataagaggcttttggtatcaggtttaataagaggctttggtatcagggcatagggcttaatggagagg

SEQ ID NO: 283510 - DNA, 201 bp, Homo sapiens
ccactagttaatatctgttcctctaagtgtaccccatcccccacaaaacaggaaactcaagaagtttttcactttttctctgcgttccacattagtgtgtratacgaattaacatatctttaaatctccaccatcagagagattaggtgatctaatctacctggacagggcatttgtcattagtctttaatgacttgacag

SEQ ID NO: 283511 - DNA, 201 bp, Homo sapiens
ttgggaggctaaggcaggacgattgcttgagcccaggagttcaagaccaacctgggcaacatagcaagaccctgtctctacaaataaaaattagctggacrtggtaactggtgcctacagtctcagatatttggaaagctgaggcaggaggattgcttgagcccaggaattggaggctgcagtgagctgtgattgtgccac

SEQ ID NO: 283512 - DNA, 201 bp, Homo sapiens
tctagttccaaactataactttgagtataagtaatattagccagaaaaacagatttcatttatttattttttgttgttgttgttgtttttcaatagaaacragttctcactatgttgcccaggctggtcttaatctcctgagctcaagtgatcctcccaactcagactctgaaagtgctggggttacaggcgtgagctacc

SEQ ID NO: 283513 - DNA, 201 bp, Homo sapiens
aaaatgtcgtgaaattcaatataatgcccatgacctaagaagcttgacctctggataagaagaaatctagggttgaagtctaacagtctaggtttttttttatgttattactaatatgacactaaatactgcacatggaattttaaagcactataaagttgttgcttagacagttatgtgggctctgagctcagacgcact

SEQ ID NO: 283514 - DNA, 201 bp, Homo sapiens
gcagtggctcacgcctgtaaccccagcactttgggaggccgagatgggcagatcacaaggtcgacagatcgagaccatcctggctaacacggtgaaacccygtctctactaaaaatacaaaaaattagccaggcatggtggcacgcacctgtaggcccagttactctggaggctgagacaggagaatcacttgaacctggg

SEQ ID NO: 283515 - DNA, 201 bp, Homo sapiens
tctatctttacatttaccacctgtactatttttctgggatcattttcttttcttttttatttttaattatactttaagttctagggtacatgtgcacaacrtgcacatttgttacgtatgcatacatgtgccatgttggtgtgctgcacccattaactcgtcatttacattaggtatatctcctaatgctatccctccccc

SEQ ID NO: 283516 - DNA, 201 bp, Homo sapiens
gatctaattagaaatgttagcaatcctagacctcaaagcaaaacaaacaaaattcttcctcttttgctaatcacaaaataaagggaactctattttctctstcttctaccacttccaaccaacacatgccactagttaatatctgttcctctaagtgtaccccatcccccacaaaacaggaaactcaagaagtttttcact

SEQ ID NO: 283517 - DNA, 201 bp, Homo sapiens
aaaataaatgagtgtgggagaaaggcctgaaaaacaacttgagttgttattaaaaggatgaggttgaagtagatcagtggttgccaaacctggagcgcctraggcaggtggagtggacagactggtgggaggccatatgggctccgtgctccgtcttaaattagactaggttggctgggcgcagtggctcacgcctgtaac

SEQ ID NO: 283518 - DNA, 201 bp, Homo sapiens
ggatacattaattgacctttctgagacaggattggagagatcgttcatctttctggctctcgtgtctgcctttaggtggtctgaactctctaaaggggggrtgtttattgactcactaaaattacaccagctccaatttcaggcaaaaagatggaaggaatattttattttaaaacatgagattttagtttctctctatct

SEQ ID NO: 283519 - DNA, 201 bp, Homo sapiens
tagacctcaaagcaaaacaaacaaaattcttcctcttttgctaatcacaaaataaagggaactctattttctctctcttctaccacttccaaccaacacaygccactagttaatatctgttcctctaagtgtaccccatcccccacaaaacaggaaactcaagaagtttttcactttttctctgcgttccacattagtgtg

SEQ ID NO: 283520 - DNA, 201 bp, Homo sapiens
atgtgtgatatatacatagaaaaggaaaatgtacttttgttggtgtattagtccatttcacactactataaagaacttccctaagactggataatttatamacaaaagagatttaattgactcacagttccacatggctggggaggcctcaggaaacttacgatcatggcagaaggtgaaggggaagcaggtaccttcttc

SEQ ID NO: 283521 - DNA, 201 bp, Homo sapiens
gcagctgcaccatttcacattctaccagcaatgcacaaggattccagtttctccacatcctcactaacatttatgattttctttttttaaaaaaaaaaaaacatagtcatcctaatgggtgcacagtggtatcattgtgattttggcttgcattttcctaatgatgatatgcatcattagtgatgttaaacatctttttaa

SEQ ID NO: 283522 - DNA, 201 bp, Homo sapiens
gggcctagcatgtattcagttattataacaaataatagtcatgatcgtttttagtgagtttaacggcctactttctaagccaaatttaaaaatacacgtaktttgtacacatgtatcaacttgggtttagatttgaggtcctacccttgatattttagcagctacctcacttttgtatatattttcaaaaagctttctgat

SEQ ID NO: 283523 - DNA, 201 bp, Homo sapiens
agcaaatacccaagtgatgcaacatgataaaagggctgcaaatggttgtgggtggaataaaactctcttttcaaaatcccagtttataaatccagtacagkgtgttattttttcttattctctcttatactgctgttctgctattgtctcaaaagatttctgtaatatgggggaaaatgctaaagcagaagcaaaaacaac

SEQ ID NO: 283524 - DNA, 201 bp, Homo sapiens
tgttcttacctgaaaaatcagaccagttgccttcacagactgctagtttttatctggaaagtgatgaaaagtttcccatttggcatacctcctctggtgcmtttgtcctttctttttctcatcctatcatccttgtgactcaagaagcgatgatgtttttcttattcacaggaaacttccaagccgcagaccagggcctga

SEQ ID NO: 283525 - DNA, 201 bp, Homo sapiens
aggggtgtgactggaacacaaaaagggcaaattgtatggagaattgagcctgggccctatttcatggaacgtaagtaactaagtgtgaaatataaacttaytattgaacattgcataagtatgcagaattctatggagtctttttgaatgttattttgaaattctttggtttggatttacatatttatgccatgatggaaa

SEQ ID NO: 283526 - DNA, 201 bp, Homo sapiens; identical to SEQ ID NO: 57944

SEQ ID NO: 283527 - DNA, 201 bp, Homo sapiens
gatgcaggctcccttgagaccttgggcaaggtacattctcttcttttcctagttacctcgtctgtcagatgggagaaggactgtttacacaccgtcaaagratgtcataactcttaattgttggtgaggaaatgtgaccgtaagaacactaattaattactttatcgtgttgtcagtgaagcaccaaggagctaacatcca

SEQ ID NO: 283528 - DNA, 201 bp, Homo sapiens
acagtagaaaatatgcccttcagaaactgctgtaggtctggggtaggcacatgatgtaatttggcccaattagactgaaagaaactctgttatgttgtagytggtgaaaggtttcactaaaaaagaaaaaatctattttgcagaatatttccatacaatcagcataactctctactctaggtatggaatgtgcatagtgac

SEQ ID NO: 283529 - DNA, 201 bp, Homo sapiens
gatggtcctgtcagctagaggtagttgagggctaaagccctctaaaatattatcggtgtgacaaatgttggtctttttagcattaagatgagtgaaaaaasaatcgccagcccagcccctctgaaaaactattttctttttctcttattgattccagtgtaattgtgacttaacccattgctgcattggagacaatatgga

SEQ ID NO: 283530 - DNA, 201 bp, Homo sapiens
tagaggctgaaaagctttcgaatgttgacagggcttctctggaaatacatacagcctaaatcacaaatttaaaaaggtaggatatatgaggcaaaactgamgaaatttaagattttttgactcagaggaaggtgagagggtgttgataatgtactaaaatgttcgagacaggaagatgataagcccatttgcacacccatt

SEQ ID NO: 283531 - DNA, 201 bp, Homo sapiens
cacctagccactcttcctttctaaaatttcacagtggaagattaatgtatgctatgcatcaaaggtagtgtttttgtcttctacaatttaggaatgtcaaytaagttaggtgatgtcttctgacttggagaataagctgtttttgtatccaaggacacaaatttacacctgaaatttgtattacgctcagtgaatgcagct

SEQ ID NO: 283532 - DNA, 201 bp, Homo sapiens
aaattcagtgctcttttaaaaaatggctcttctgctgctgaagtaacaggcctgttaaacagcaatcttcaaacttaaataatgggtctctattggaacckgggtttgtagatacacaaccaaacaggctggcagcttcaaccttagtgtaatctgcaaaggttatgagaaacacctagccactcttcctttctaaaattt

SEQ ID NO: 283533 - DNA, 201 bp, Homo sapiens
tagcagaagatgggaagattgatccatgtcttgctgctgcccagcttttggttcctggagaatttcctgtaagatctcgggagtcagggtaggtatgaccyggacagagaatcataaaatcccaagttttagatcctaaagagatatttgagttcatttgtttaacttctcttaacattttagtcaacagcacagagattt

SEQ ID NO: 283534 - DNA, 201 bp, Homo sapiens
acagggccaggaagagaaggaaacaggtaacaaatgagtgggcagctgaaacccttcctctagattaggcctcctgtttctgagcggggagaccttgggayttaatcacatagctaggaagaaggcagcatggtttgcatccagatgggcttgagttcaaattcagtgctcttttaaaaaatggctcttctgctgctgaag

SEQ ID NO: 283535 - DNA, 201 bp, Homo sapiens
atttgcatagcatttatgttaggtattataagttatctagagatgatttaaagtatacgagaggatgtacacaggttatatgcatatactctgacactttwtgtaaggaacttgagcatctgtggattttggtatcccatgggggtcttggaacgaatcccccgtggatatcaagggacaactatataatatgtgcatgtg

SEQ ID NO: 283536 - DNA, 201 bp, Homo sapiens
ctaagcccttcgaaggctgagaccctattgtttatttcttggaatgaggatatagaacatactttgtatatttatgatgggttctcaataaacattttctmttttgtgttggaatcctgtttccaaatctgaaaacccaggtatgattttcaaacaaacatgtacactcaaactcatatgttgaaatagtaaaataaagtc

SEQ ID NO: 283537 - DNA, 201 bp, Homo sapiens
agtagagatggggtttcaccatgttggccaggatggtctcgatctgttgaccttgtaatccgcccgccttggccacccaaagtgctgggattataggtgtragccaccgtgcctggcccacacatttcccgcattcttaataggaaaggaaaatatgaaaccctactacaaatgaataaaaatatgaatgaaaaatgcttt

SEQ ID NO: 283538 - DNA, 201 bp, Homo sapiens
ctgggattctaagaacaggggtgtgactggaacacaaaaagggcaaattgtatggagaattgagcctgggccctatttcatggaacgtaagtaactaagtrtgaaatataaacttattattgaacattgcataagtatgcagaattctatggagtctttttgaatgttattttgaaattctttggtttggatttacatatt

SEQ ID NO: 283539 - DNA, 201 bp, Homo sapiens
gcctcagcctcccgagtagctgggactacaggcacctgccaccgcgcccggctaatttttgtatttttagtagagatggggtttcaccatgttggccaggmtggtctcgatctgttgaccttgtaatccgcccgccttggccacccaaagtgctgggattataggtgtaagccaccgtgcctggcccacacatttcccgca

SEQ ID NO: 283540 - DNA, 201 bp, Homo sapiens
tacacatgtgggggatttagaattgtttctttgatatacctttttatattcagttattgttcttttttttgagttagggtcttgctctgtcatctgggctrcagtgcagtggtgcaatcgtggctcactgcagcctcaaactcctgggctcaagggacacccctgtctcagccttctgagtaactagggctacaggtgcat

SEQ ID NO: 283541 - DNA, 201 bp, Homo sapiens
ttatacatggaatggagccactcagtaatctatgtgtcaaagttcactgtggaccttatattcatacctggagcaaggattcccagtaccaacatagcttkgcatatgtcctttctcatctgtggcacaccacttaagataaatattccttcttatttttcccataatataatgataaaagtggtagcccttgagagattg

SEQ ID NO: 283542 - DNA, 201 bp, Homo sapiens
aaattctactcttggaatttcccctcgtgatttatatacttgctccaatgcatcatgtgtttgctggttgtaagtgcagatatagaagggtgcacatgagragctcatataaaaatgatatacaaatatattacaggatgaggtatgtgcaaaaatttttctgttttatgagtagctaataaatctttaccttgctgtcat

SEQ ID NO: 283543 - DNA, 201 bp, Homo sapiens
ttacctttaccatagtaattttcgcattgcattatatatctatgtgccttatcccgtcagctccttatggcaggaaatatccccccttatcccgtcagctscttatggcaggaaatagatgcttatggtcttcatagtagtcagtcaataaatacctgtcaaatgaatgaatgaatgaacaaggtaacaaatgagagggac

SEQ ID NO: 283544 - DNA, 201 bp, Homo sapiens
aaaatcagcttccaaacgtcagtaccacatctgtaaaatgggtagtgtccccatggcattattatatgctactactggttctcactgaaagaagatgtttrtatgctatgacactaaaataaaagctgaaaaaaagttctaacattttatacgaatacaaatatattcattagaaaacaacctttaacagtattttatagg

SEQ ID NO: 283545 - DNA, 201 bp, Homo sapiens
ggttcagacttgactatatgtcacccagtttggatctagtaagacatttcacattctccagttggctccctgcttgtgataccctgctatagaggatacarcaataaaacatctctcttaaacttgatagtacatattgtgagttcaacaagtgtgccctgtgcctctccactctgccagcattcctttccagggcagtga

SEQ ID NO: 283546 - DNA, 201 bp, Homo sapiens
gcagtattggaaaaggcaacatttggttggttaaaaagcattattcagaaagaatcaatggggaaagggtgggcaaacatgaacagaggttctcactctgratcacggctttcatccagaaccagcagtgtggtctttcagccttcaggctgtttttggcttgaaggtggcatttcatcagggattcgcccctatgtacct

SEQ ID NO: 283547 - DNA, 201 bp, Homo sapiens
gagaggaataattgtcagcatttcttctgttgtgattttaagctataagggttgtggcctatttctttctttcagggaagtagtttagttatatacagccygcattttttattcaactacaatgtgttaggagttgattatttatagttcttgctgaagctgatgtgctgcatgactcactgagtttataaagaaataatg

SEQ ID NO: 283548 - DNA, 201 bp, Homo sapiens
agtattaacagccttttgattacttgcattcggtgggtcctgagttcttgccccacatccaagaagaatgaggtcatactgacaattgaagggtgatgagrttggagaattatattgagcagtgaaacagctctcaatggagaggggacaggaaagtagtctctaaccctaagtcaggtcatctatcaccctaagtcaggt

SEQ ID NO: 283549 - DNA, 201 bp, Homo sapiens
ggcttggccctgatgttgcttcctgttgcatggggtggctgccctccactggcagagggcaaagggccacagtattaacagccttttgattacttgcattyggtgggtcctgagttcttgccccacatccaagaagaatgaggtcatactgacaattgaagggtgatgaggttggagaattatattgagcagtgaaacagc

SEQ ID NO: 283550 - DNA, 201 bp, Homo sapiens
aaggaaatagcttacaaggttggcacacctgaatccctaattcgaatcagtggaaacataggatttgatttgtaacagccatttgtagagtcgactctccrgggaacccattcatgaagcaaagtagcaagtgccccattttggaaggtttaaacttagtgtgggtgaccagttggtaggaaagagtggcattgcatctta

SEQ ID NO: 283551 - DNA, 201 bp, Homo sapiens
gacttctagttacatacatgagtcatttgagccactgtcttatattccttcagcaaatattccattcagtagaaatattgatgtcttttccatctaacaarttaacaccaaacacctgctacaatgaagaaacatagtggttgctgttatgagggatgcaaataaataacacatttcctgcattctttttttttttttaag

SEQ ID NO: 283552 - DNA, 201 bp, Homo sapiens
gctcctagccccactctggcctgtggctccagagctggggcttggccctgatgttgcttcctgttgcatggggtggctgccctccactggcagagggcaargggccacagtattaacagccttttgattacttgcattcggtgggtcctgagttcttgccccacatccaagaagaatgaggtcatactgacaattgaaggg

SEQ ID NO: 283553 - DNA, 201 bp, Homo sapiens
atagatatataacatatattatatatttggatacatataagtatatgcaaatattaaaatgtttctatacaaatatatattttatatatatatatttttttatttttttcccataatttgaggccagcagggggagatgttgcctgccacatcaggctgtgggaaaaagcagctaggatagatggactcattcattgctct

SEQ ID NO: 283554 - DNA, 201 bp, Homo sapiens
caggatggtctcaatctcctgacctcgtgatccgtccgcctcggcctcccagagtgctgggattacaggtgtgagccaccacacccggccattttttttttaattggaatatatgcaaacctaggtctgtaatatttttgcaagacaatagtttgctggaactggaggggacattgccacatcccacccaggccactttac

SEQ ID NO: 283555 - DNA, 201 bp, Homo sapiens
gaggtagatagatatataacatatattatatatttggatacatataagtatatgcaaatattaaaatgtttctatacaaatatatattttatatatatatatttttttatttttttcccataatttgaggccagcagggggagatgttgcctgccacatcaggctgtgggaaaaagcagctaggatagatggactcattca

SEQ ID NO: 283556 - DNA, 201 bp, Homo sapiens
ttcaaatacagagtgctaaatctgtattttagcaatgctataagcaaatgtatcctgaagattatcaaaaggggcccttatattgccatgatctatgactsgcttcagctgtccagaagggacctcagagagcagatgccgctcatcctctgttctcttcctcctgaggctagacctggctcagccgatatcaggtcctta

SEQ ID NO: 283557 - DNA, 201 bp, Homo sapiens
gcacttgccagttttgatggtgtaaattctcccaacatggtcaattacatgctgtcagcatcacatcaacctgctcacagaattccttaaaattacagtcygctctcacaagctggtacaagccatctccaacataacactggctcccctcttacaggttgaacgcctaaatactgtcactcccaacatataaaataccac

SEQ ID NO: 283558 - DNA, 201 bp, Homo sapiens
aaaaaaaaaatttgccgggagtggtggcagacacctgtagtcccagctacttgggaggctgaggcaggagaatggcgtgaacctgggaggcagagcttgcmgcgagccgagattgcaccactgcactccaggctgggtgacagagcgagactatgtctcaaaaaaaaaaaaaaaaaaaaaaagagaagaaaaaagaaaaaa

SEQ ID NO: 283559 - DNA, 201 bp, Homo sapiens
atttctaacctgggctggttcctcctaccttaggcaacctggtgatctccaactcctcggagttcaccatattgttggggaacttagtgtggacacctgaytggcatagcacactgtagtccagaactcctgggctcaagcagtcctcccacttcagcctcccaagtagctggaactataggcacgtgccaccctgcctgc

SEQ ID NO: 283560 - DNA, 201 bp, Homo sapiens
actgggccaggtaatctaggacatttggtcatcataacactaaggaaaacctgcaaaaaaaggagaggggattgattattatttccattgtggttgacaaraactaagtatttgcatgtaattttcttattctgctgccaaatggcaatgacatttacttctacaacctcaaacaaacatgtaaccaaacaaaaacacatt

SEQ ID NO: 283561 - DNA, 201 bp, Homo sapiens
tattggtatttggttcaagttgcataagcacaaaccattaaatcttagttttactgatagttgtcttggaaatttattctttctttctgacatcctttgcraaacatcttgtatgcaaatattttgtcatcatcaccaggtattgtagtgctggcttctctctattaagtataaaagttgaataaaatcggccgggcacgg

SEQ ID NO: 283562 - DNA, 201 bp, Homo sapiens
tttttctcttcccttgggaaggcagcacacctaccaacattactacctaacataaacaaacatgtcccgccttccatgactcttccatgagtgtgctcgtyaagataagggttaggaaatgaagcggggaagactcctacacagtgtctgttgtgcccaaatagacataactgttattacacatcacattagaagaggcca

SEQ ID NO: 283563 - DNA, 201 bp, Homo sapiens; identical to SEQ ID NO: 57936

SEQ ID NO: 283564 - DNA, 201 bp, Homo sapiens
cacaattaatgcaaaaaattcataatgaataaaatatgaacatttaaaataaggacaggatcagtaacattgccttgtagagtcatagtggggcctgaggsaagaggaaaaatcagcaatactgatcttgttttatttaaaattttgatattttgttgtagcatacatttagtacaaattaaaggaatttctctctctgcg

SEQ ID NO: 283565 - DNA, 201 bp, Homo sapiens
tcacaattaatgcaaaaaattcataatgaataaaatatgaacatttaaaataaggacaggatcagtaacattgccttgtagagtcatagtggggcctgagscaagaggaaaaatcagcaatactgatcttgttttatttaaaattttgatattttgttgtagcatacatttagtacaaattaaaggaatttctctctctgc

SEQ ID NO: 283566 - DNA, 201 bp, Homo sapiens
ggccaagattgaggcactggcagatatggtgtctgatgacagtccatttccttgtgtgtagatagcatcttctccctccatcttcatatggtctaagggckgagggtgcttgctctctcaggcttcttttataagggtattaattcctaattacctcttaggtcacctcctgcccccatctcctaatactattatattggt

SEQ ID NO: 283567 - DNA, 201 bp, Homo sapiens
taataggttttattttgacaacagaagattattgcatgatcaggcttattaaacaccctttaaggctttatgtctggaaagcttaaatctaattcttcgtrttgtagcactaatgttttatgtttatctgtctcttgcagctttgtaggcagccaatcccagagaagcagacgggatggctagttcagcccgggagcacct

SEQ ID NO: 283568 - DNA, 201 bp, Homo sapiens
ctaattacctcttaggtcacctcctgcccccatctcctaatactattatattggtgattaggtttcaacatatgaactctgggggacacaaacatcggacycataacaggaggatttaaaggattattccacgagtctccgagggctgagggagtggcttactgaagatagtaattaaaggaaggtcattttaactgcaca

SEQ ID NO: 283569 - DNA, 201 bp, Homo sapiens
aacagtagaataataggttttattttgacaacagaagattattgcatgatcaggcttattaaacaccctttaaggctttatgtctggaaagcttaaatctrattcttcgtgttgtagcactaatgttttatgtttatctgtctcttgcagctttgtaggcagccaatcccagagaagcagacgggatggctagttcagccc

SEQ ID NO: 283570 - DNA, 201 bp, Homo sapiens
aaataatgaacaatacataattaataatactaggaaaattcgaatgagggacttgttaaaggaattgaaggagaacatattgaatttaacaagacatatcmtacactttcagaaaaacagagtagatcatagagaaaaataaaagtcaacatagtcctatcaccaggagtatgtggtgaggtaattagtatatattaatac

SEQ ID NO: 283571 - DNA, 201 bp, Homo sapiens
gataactatcaaagtcattatatttttttccgtcaattgtttcccacaatctggctgacattattgttgaattgttgaataaatacagacttgcctcacartagtgtgcagttcatatggacttcagagaaactgcattgagcaactcagattttcaacctgttttaagtttagaaaccagagtattgtaactcagattta

SEQ ID NO: 283572 - DNA, 201 bp, Homo sapiens
atgcttaccaagaatttgcaatgttgtccctgtttttctctacactgaataagatggagatctctttaaaaaggctttgtgtgttccatggtgaaaatgtyatttcttttttgtatatttaaagaatatagtactaatattcaattaatatcatataatcaaaagaagatatcaagatactgatgcaggatttttctcagc

SEQ ID NO: 283573 - DNA, 201 bp, Homo sapiens
tttttttaactcacaattaatgcaaaaaattcataatgaataaaatatgaacatttaaaataaggacaggatcagtaacattgccttgtagagtcatagtrgggcctgaggcaagaggaaaaatcagcaatactgatcttgttttatttaaaattttgatattttgttgtagcatacatttagtacaaattaaaggaattt

SEQ ID NO: 283574 - DNA, 201 bp, Homo sapiens
gtttgttaggtaggtaaacttgtgtcacaggagtttgttgaagagattattttgtcactcaggtactaagccactaggcttaatttttttttctgatcctstctctcctcccatccttcaccctcgagtaggctccagtgtctgttgttcccttttttgtgtccatgagtctcatctcttagctcccacttacaagtgaga

SEQ ID NO: 283575 - DNA, 201 bp, Homo sapiens
tgctgctgaagtaacaggcctgttaaacagcaatcttcaaacttaaataatgggtctctattggaacctgggtttgtagatacacaaccaaacaggctggmagcttcaaccttagtgtaatctgcaaaggttatgagaaacacctagccactcttcctttctaaaatttcacagtggaagattaatgtatgctatgcatca

SEQ ID NO: 283576 - DNA, 201 bp, Homo sapiens
tctcacaaagaattacccactagaatgcctgtagtgccctcattgagcacagtttagtgaaaagtatgttgaagatttagtaaagacttacatgagcagtmatctctggaaaggtaactgatcttctgataaagcagttttggggagggacccacagagagcagtcacttcataacactattctttaggatcaggagcaat

SEQ ID NO: 283577 - DNA, 201 bp, Homo sapiens
  misc_feature (1)...(201): n = A,T,C or G
aattatagacaacttgtaaagaattcaagaggatgatttatgtctggggactcttcgtgtcacgtatcttggtggcttaatatagaagagtcaaagtaacntgggcttttatgattggtttgataggataccatgacaatcatattgtaattcggtggttctgggctgcagtggaaagattcaacaatgaacaacgactaa

SEQ ID NO: 283578 - DNA, 201 bp, Homo sapiens
tcttgtcatcacttttaggattatgtcaaaatgtaccattgctatttacttgatcccaaaatatgttacatgcatttttctttcaaagcgcatgaccatgraacaatgatcatatttacaaatctttgcatccctaagtgagaacacttggcagagcagaagcaacatttccattttttttcaggatgaaaccttgcacaa

SEQ ID NO: 283579 - DNA, 201 bp, Homo sapiens
tcttggactcctggcctcaagtgatcctccagcctgggcctcccaaactgctgagagtacaggagagagctatcatgcccagctctatttcatgttatttyatatttcatataattcttagggcagctctccacctgattaactgtgccacctgatggtgggaaccagaggaggaagttaacaggttaagttgcttaccca

SEQ ID NO: 283580 - DNA, 201 bp, Homo sapiens
ggtccagagaccagaccaacagcagccccatggctcactgccccacctgcaggaaggcttgcttgattaaaatccaccttcattgccctaaaaaatcatcwgcctgcccaaacaccatacttctctgagctttacttttctcacacttaacttacaaaggtctaggatgatccagctgtcatgcattcagcctccctatca

SEQ ID NO: 283581 - DNA, 201 bp, Homo sapiens
ttaagctcttaaggtcctcaccacaactttgataaagcagtactattattattgccatgtacagataagcagctccatgtgcagaatggttcagtgacttrcctgacatcacagagacaggcagtggctgagccacgctgtaggccagccaggctggttccaggaaccatgctcttaaccatgacattatgctctgcaagt

SEQ ID NO: 283582 - DNA, 201 bp, Homo sapiens
ccaatctcaaaaaaaaaaaaaaaaattagaccagctctccatttatctttgttttaaaacgtcttctttaaattaaaaaaaaaatgtcgtgaaattcaatrtaatgcccatgacctaagaagcttgacctctggataagaagaaatctagggttgaagtctaacagtctaggtttttttttatgttattactaatatgaca

SEQ ID NO: 283583 - DNA, 201 bp, Homo sapiens
atgctatgcagccacgaaaaggaatgagataatgtcctttgcaggaacgtggatggaactggaagccattatcctcagcaaactaacacaggaacagaaarccaaacaccacatgttctcacttataagtgggagctgaaaaatgacaacacatggacacagagaggggaacaacacacactggggcctgtttcagagtag

SEQ ID NO: 283584 - DNA, 201 bp, Homo sapiens
cttctttctcccacataaatgcaagcacagaaactcgggtaatactctgctgggaggtagtcattaagaataatgtgcattatattttctcatttatcttytttccatttattttagaacttatgttaatcttcctgctacggagagaaaggttataattaatctgaaaagtgtttctttggtttttctagatgagaattc

SEQ ID NO: 283585 - DNA, 201 bp, Homo sapiens
caaaaattctgtcaaggcaaatctcatcaaccttatactaaagaatgccttatatttgtagggagctttacaggttttcaagtgccaacacaaggtacacrcatattattcctgaaactccatgtgtccccttttctaaggcttaattatagctgatatttctccaggctcctaagccatgccttgtactctttttattcc

SEQ ID NO: 283586 - DNA, 201 bp, Homo sapiens
gaaaaaagatctctctggtcacacttaaaatacatacatccatatcttaaaatacaaaacacaacaaaagcaaagtatttgttagcatcagtaaagcgacrttggttatcatgcttgtggcttatgattgtggctctaatcaggtgtttccagaagcttgagttttaactttataactatttagaatcccttcagtaaaaa

SEQ ID NO: 283587 - DNA, 201 bp, Homo sapiens
ccgtcttaaattagactaggttggctgggcgcagtggctcacgcctgtaaccccagcactttgggaggccgagatgggcagatcacaaggtcgacagatcragaccatcctggctaacacggtgaaaccccgtctctactaaaaatacaaaaaattagccaggcatggtggcacgcacctgtaggcccagttactctggag

SEQ ID NO: 283588 - DNA, 201 bp, Homo sapiens
agtcgagaaagtcagtgaaagatgaacttccttagggaaatacattgagcagccccactttaatagtcctggtgactcatttgagagaggaactccctccygtagcctaggattctccctccagggcctgcccatcagcatccttgcatatttagaacgacaccttgggagaaatgcatctcgcagtgacacttcagtgac

SEQ ID NO: 283589 - DNA, 201 bp, Homo sapiens
gattataggtgtaagccaccgtgcctggcccacacatttcccgcattcttaataggaaaggaaaatatgaaaccctactacaaatgaataaaaatatgaaygaaaaatgctttgtaaattttcttttttaatagttgggaaagaaaaatatacctttagataatcatgttttcttctttttatttatatctttccagcttt

SEQ ID NO: 283590 - DNA, 201 bp, Homo sapiens
ttatcatatctttctcttaaaataaggaaaccaaagaccctgcaggaggccatttggtacagtcgagaaagtcagtgaaagatgaacttccttagggaaawacattgagcagccccactttaatagtcctggtgactcatttgagagaggaactccctcctgtagcctaggattctccctccagggcctgcccatcagcat

SEQ ID NO: 283591 - DNA, 201 bp, Homo sapiens
tcaaacagaaattgatgtaatttgttggcgctgagtggaaaaaagaggtcattcagagtcatgagtaggattccctgagaggtggtatggtggatttccayagctgattcctccatgacttgtttcactgtttaaattactgttttctccaattgctttgcagcggagataaaaatctgttttaaatattaccacggcatt

SEQ ID NO: 283592 - DNA, 201 bp, Homo sapiens
tcagaaaaacagagtagatcatagagaaaaataaaagtcaacatagtcctatcaccaggagtatgtggtgaggtaattagtatatattaatacatatttayttatgttaatatttttctgccttctttagctttgctttacaagtataaacatctgtctgcctttcctcatcattgtctcctggtttacaggtttagcttg

SEQ ID NO: 283593 - DNA, 201 bp, Homo sapiens
cactgctggagtggacgattaactccaaagggaaggcacatggaaggggccatagacaggtttggatttgagattagttttaaaggctgattaagagcttktcccagaaacaagatgggcaggagtactctaggtagaagaagcatcatttgcaaaacaatcgattcgtgaagctgcaagtctgtcttgataattactgca

SEQ ID NO: 283594 - DNA, 201 bp, Homo sapiens
gtgtgtcttttgtattttgccatgcctgtgattggcatctcagcagctacactacagaacagccactagaccagaaacctttccttgattcccttgcactktctggcacattgcttcctggccatgtgctgtggcaggtacgtagtaaaaatcttctggccaatgatgcttattaaattatgaattattggatagtgactc

SEQ ID NO: 283595 - DNA, 201 bp, Homo sapiens
ccactcttctgactgatgcttctgccaccaatttcctcttactgcaattcatcccccatactgccaccagagccacctgtcttatgaaaaatatagttttrtccctgatcatgaaagttaagcttagtgaaaaacatttaaaatacagaaaatagaataaaatgaaagctacttgtggtcctgctaccatttgcaatatca

SEQ ID NO: 283596 - DNA, 201 bp, Homo sapiens
aatgaaaaactgaccaaagagtgggaatgtcttttctgtggacaatggatagccatgagaagctttgtattggggtggtgatgtaattgaagtgtttagamagaatattcttatagtaacgggccagttaaatgactatggtgatagagatgtggagcagctgagaagccaccagcacttacacacataaaataaagtccc

SEQ ID NO: 283597 - DNA, 201 bp, Homo sapiens
tactggaatccagcagcacatcaaaaaagttatccaccacaatcaaattgactttatccccaggatgcagggttggttcaacatatgcaaatcaatacatrtgattcatcacataaacagaactaaagacagaaaccacatgattatttcaatagacgcagaaaaggccttcgataaaattcaacatcgcttcatgttaaa

SEQ ID NO: 283598 - DNA, 201 bp, Homo sapiens
cctcgtgcacactacttagctttgttcttgcagactacatgctattcgtcttggaaaaaagcaagtgggagagtaaagtttgctcaggtctgtccagctaytactatttcagaaataaccagtaatctgtgtttgtgttcaggaaagtcatttgcagaagagttctcagggaggcaaagtaatagtaaagctagaattcct

SEQ ID NO: 283599 - DNA, 201 bp, Homo sapiens
ccaccagagccacctgtcttatgaaaaatatagttttgtccctgatcatgaaagttaagcttagtgaaaaacatttaaaatacagaaaatagaataaaatkaaagctacttgtggtcctgctaccatttgcaatatcatttttactagtattgaggctggttacatttctaaaggtcagggttatcatgcgagctaccctg

SEQ ID NO: 283600 - DNA, 201 bp, Homo sapiens
aataaatgaaatcactttggataagtatcatgttcaggcatggtggctcacatctgtaatcccagtactttgggaggccaaggtacgcatgtgtgcgcgcrcacacacacacacacacacgtttcacttttctatttagagaaaatgtgtagccaactagacttgtaagagaatgaagaagtcgtgagacacaaagggaca

SEQ ID NO: 283601 - DNA, 201 bp, Homo sapiens
gttccagtgggtatgtcatccctttccagaaatcatctgtccttttgtgccattatctgtaccatgtacactgtgctgatacttcccctgttgttagcctkctactttttgccctatattgagaaattgctgcattatccttaagaaatgtataacaaaatcctacagacttgagtctcaaagggcttctgtcttgtaata

SEQ ID NO: 283602 - DNA, 201 bp, Homo sapiens
ttgtccctgatcatgaaagttaagcttagtgaaaaacatttaaaatacagaaaatagaataaaatgaaagctacttgtggtcctgctaccatttgcaatawcatttttactagtattgaggctggttacatttctaaaggtcagggttatcatgcgagctaccctggtttagaacattcatgtaaagcaagtgccatttcc

SEQ ID NO: 283603 - DNA, 201 bp, Homo sapiens
ttccagtgggtatgtcatccctttccagaaatcatctgtccttttgtgccattatctgtaccatgtacactgtgctgatacttcccctgttgttagcctgytactttttgccctatattgagaaattgctgcattatccttaagaaatgtataacaaaatcctacagacttgagtctcaaagggcttctgtcttgtaatat

SEQ ID NO: 283604 - DNA, 201 bp, Homo sapiens
aaattcttgtcataatttggctccaacccttctgatcaatttcatttcccatttactcccagcactcctcctccactctaggctagcttggttctcttggygtcttctgaacacacatgcagtgctcatgccagctgttgctgctgtgttccactttaggatataaattctccttcttttgcaaggtgtggttccaattaa

SEQ ID NO: 283605 - DNA, 201 bp, Homo sapiens
agaataaaatgaaagctacttgtggtcctgctaccatttgcaatatcatttttactagtattgaggctggttacatttctaaaggtcagggttatcatgcsagctaccctggtttagaacattcatgtaaagcaagtgccatttccgttggaaatgcagttgctgtagatgctttttaaagccaggttatttataaataat

SEQ ID NO: 283606 - DNA, 201 bp, Homo sapiens
catttttactagtattgaggctggttacatttctaaaggtcagggttatcatgcgagctaccctggtttagaacattcatgtaaagcaagtgccatttccrttggaaatgcagttgctgtagatgctttttaaagccaggttatttataaataatgaagacaaagtagggcacgtattgctacaagacagagaatacaatc

SEQ ID NO: 283607 - DNA, 201 bp, Homo sapiens
ccccttcttcctcatttcaggtctgggttcaagtctcaacatcttcttcataactcagcagctgctagagggaatttttctaataccatacaattgtctgrttgtgttctctgtggctcttgttgatttggatcattttaaggctatccctctcagtcatgcctgggaataaagtatattagattatggaatcatattagt

SEQ ID NO: 283608 - DNA, 201 bp, Homo sapiens
ttcttttgtgtcttaaaagattttcattcagttccttgttcttcatttttctctctcttatcaatgattttgctcttgaaagttgattcattacagctgcrttctgccctgtctgggttttctagtctgcagtttctcagactggagcactgacactgattgtgccacccttgagtggacttgaactgcacggtcctatcc

SEQ ID NO: 283609 - DNA, 201 bp, Homo sapiens
cagtgcccgagatcgtgccactgcactccagcctgggcgacagagtgagactccgtctaaagaaaaaaaaaaagtttcttttgtgtcttaaaagattttcrttcagttccttgttcttcatttttctctctcttatcaatgattttgctcttgaaagttgattcattacagctgcattctgccctgtctgggttttctagt

SEQ ID NO: 283610 - DNA, 201 bp, Homo sapiens
aagacatacaaattaagttaaaaactagaaaaaatcaataacatttgaattaatgctattaatatgaggatactttgtttttcagaagccaaatcaccaaygttgagaccattatcggtggaaagacacatttgcacctttctgtgcttgtgtttgacttgattcttttgattttttgcatctctggcctagcatgtgcct

SEQ ID NO: 283611 - DNA, 201 bp, Homo sapiens
agaagaaatctagggttgaagtctaacagtctaggtttttttttatgttattactaatatgacactaaatactgcacatggaattttaaagcactataaarttgttgcttagacagttatgtgggctctgagctcagacgcactataaaccccgattcaataattatccaagtgtcttcattattcatatatagtgaaacg

SEQ ID NO: 283612 - DNA, 201 bp, Homo sapiens
tatacacacacacacacatactatatgtatatacacacacacatatacatacatgtatatcaataagcaaatacaactatgtagaaattttcacctctttyaatataaaaaatagcaaaatatatgcactattctacactttgtttcacttatatattgttcagatttttccaggtcagaacatagaaagagtcccattct

SEQ ID NO: 283613 - DNA, 201 bp, Homo sapiens
gcttttaaaagatgcagctacatgcagacaggatgggggagtcctgggttaaagcagtttagatgaaaggtttcgggctttagctgatgactagcactttrtaagtcaacaaagtaaagtggttgctccaaaggcaggataagtttaacctgcatcgccggagaaaagtgtcgaggagtttctaagctctgtgctgagaag

SEQ ID NO: 283614 - DNA, 201 bp, Homo sapiens
ggcatgcgccaccacacccagctaattttttgtatttttagtagagacggggtttcaccatgttggccaggatggtctcaatctcctgacctcgtgatccrcctgcctcagcttcccaaagtgctgggattacaggcgtgagccatggcacccagccatattaaggcttttaaaagatgcagctacatgcagacaggatgg

SEQ ID NO: 283615 - DNA, 201 bp, Homo sapiens
ttgttgttgtttttcaatagaaacaagttctcactatgttgcccaggctggtcttaatctcctgagctcaagtgatcctcccaactcagactctgaaagtrctggggttacaggcgtgagctaccatgcctggctgaaaaacagatgattttgaaaagtttggatttataggccgggcacagtggcttacacctgtaatcc

SEQ ID NO: 283616 - DNA, 201 bp, Homo sapiens
ccttagtcgtctctataaaatgatggcattggacaaaatgacttctaagatgactttgaccacgggcatgctctgtttctaaaagacacaggggactaagyctcaaaaagtgaaattttaatcgggaaaagtatggtctagtgttaaggccttttttttttttttttttttttttttgagacggagtcctgctctgtcgcc

SEQ ID NO: 283617 - DNA, 201 bp, Homo sapiens
cattggatacagtgtacactgctcaggtgatggtgcaccaaaatctcagaaatcaccactaaagaacttactcatataaccaaacaccacctgttccccamaaatctattgaaataaacaagaataacaatttaaaaaaaaagaatcactgctctcaaggtagatatcaatttgtttaaggcaaacagtagaaaatatgcc

SEQ ID NO: 283618 - DNA, 201 bp, Homo sapiens
acattcctgcaattcattaattgcattagatagaacagaaatggattggcagatagaagatgttgataggtaaactgaaatgtgtacattcaatctctttwtgaaagagataggcctgaatgaaagagtgagtgggtggatgaatgggtggatgagcaaatggtaggaaatgcagcttggcaaatgagctttgaaaatgaa

SEQ ID NO: 283619 - DNA, 201 bp, Homo sapiens
tgaaattgttcagtttaatggacttggacattcctgcaattcattaattgcattagatagaacagaaatggattggcagatagaagatgttgataggtaamctgaaatgtgtacattcaatctctttttgaaagagataggcctgaatgaaagagtgagtgggtggatgaatgggtggatgagcaaatggtaggaaatgca

SEQ ID NO: 283620 - DNA, 201 bp, Homo sapiens
ttaatctgttcactctgcatatggtttattgaagctggatttctggactcatgactttgtcaggtcagtatcataaattattagatatagactttaatttrctattgaggtaccgaggatacatatgctgtttttgagagatgaaaacagtaattgtgctggaaaaatagaaagctaaaaaaaagaaagaaagaaagaaag

SEQ ID NO: 283621 - DNA, 201 bp, Homo sapiens
ctggacattttgcccattccagctaatgactgataacttccgctcttgtcacatgcagtgctgtgtagtctcccagctattcctacattaaggtaaagtartatgtgcaaacacactatgacatgacaaaatttgtacagaagtttgcatgagacctgagcctttcattgctgatgtgcataagtggacttctcacttgtg

SEQ ID NO: 283622 - DNA, 201 bp, Homo sapiens
ccaggcatggtggcttacgcctataatcccagcatttgagaggccaaggcaggcagctcacatgaggccaggagtttgagaccagcatggcgaacatggcraaaccccatctccaccaaaagtacaaaaattagctgggcgtggtgacacatgcctataatcccagctactcaaatgtctgaggcaggagaatcatttgaa

SEQ ID NO: 283623 - DNA, 201 bp, Homo sapiens
tgtgggtggaataaaactctcttttcaaaatcccagtttataaatccagtacagtgtgttattttttcttattctctcttatactgctgttctgctattgkctcaaaagatttctgtaatatgggggaaaatgctaaagcagaagcaaaaacaacattagagttttctggtaaggctgttaatgggtatttttggttatct

SEQ ID NO: 283624 - DNA, 201 bp, Homo sapiens
aaacagtttggaagttcctaaaaactaaacattgaactaacatatgatccagcaattacactgctaggtatatatgtaaaagaaaggaaatcagcatatcraagagatatctgcactgtttgctgcagcactgttcacaatagccaagatttgaaagcaacctaagtttataacagcagacgaatggaaaaagaaaatgtg

SEQ ID NO: 283625 - DNA, 201 bp, Homo sapiens
gatattgcatttcctgatttctgtagtgttaatacgcccactatggccaatgtcaaaccaccaatgacatcatgaagcacagagttctaacttctctcttygggctgccgtcttcatacaagttcctcatcgctgcattgtttcaagtagagactggataaatagtcactgagttgtggtataaggctgcgggaatttttt

SEQ ID NO: 283626 - DNA, 201 bp, Homo sapiens
aataggaaaggaaaatatgaaaccctactacaaatgaataaaaatatgaatgaaaaatgctttgtaaattttcttttttaatagttgggaaagaaaaatayacctttagataatcatgttttcttctttttatttatatctttccagctttagtgaggtataattgacaaataatataaactgttcacaatggcagctgct

SEQ ID NO: 283627 - DNA, 201 bp, Homo sapiens
taagacagttgcctcatttgacttgttgattgtgatagcttttgtccatggtgatgtgatgaacataaggacgaggcacaaatccagattgtcctctcttygtggtttgctgcaggtacccagcgtgccaatgcccgggctccagccccttacaagcgggatttcgaagccaaactgaggaacttttacaggaagttagag

SEQ ID NO: 283628 - DNA, 201 bp, Homo sapiens
aaaactgacacatgggatctaattaaactaaagagcttctacacagcaaaagaaactatcatcagagtgaacagacaacctacagaatgggagaaaatttktgtagtctgtccatgtgacaaaggtctaatgtccagagtctacaaagaacttaaacacatctacaagaaaaaaaaaaaaaaaacaatcccattaaaaagt

SEQ ID NO: 283629 - DNA, 201 bp, Homo sapiens
tgagagctacagtcaatgtagatagaggttatgagtgaaggctttggaatcagacagctcaggtttgagtcctgactctcatttcttatctgtctgacctrcagcaaacctcaacatctcttctgtaatatggggaaaggaatttctgcctcccaaggttctgtgagggttcactaacaacatgaacgtgagacataacat

SEQ ID NO: 283630 - DNA, 201 bp, Homo sapiens
caacattcatcttaaaagcagaacagacctctcacctttggaccttgtgtgcgatgtgtagcacaattagggctctgtctgatattttattgcatagcccrtgccctttaaccactcaccttatcatgacttcacagtatgaagctggctgtttggtctagttaggactatttttctgggaaaacatgcatgagattaata

SEQ ID NO: 283631 - DNA, 201 bp, Homo sapiens
aattaatcacagcatatcaggaaaaagtacacagtgagttctgtttattttttgtaggctcattatgtttatgttctttaagatgtatataagaacctacytatcatgctgtatgtatcactcattccattttcatgttccatgcatactcgggcatcatgctaatatgtatccttttaagcactctcaaggaaacaaaag

SEQ ID NO: 283632 - DNA, 201 bp, Homo sapiens
gcttatgagtgcctgcatggtgtgcaccataggtttccgctttcatgggacatgagtgaaaatgaaaccaagtcaatatgaggtacctttacagatttgcrataagatggtctgtgacaatgtatatgcaagtggtatgtgtgtaattatggctaaagacaaaccattattcagtgaattactaatgacagattttatgct

SEQ ID NO: 283633 - DNA, 201 bp, Homo sapiens
taaatacctaactcttcaaagcccagaccctgaagaacattcacaagcatcaagaccacccaggaaaacatgacctcaccaaaggaactaaataagacacyggtgaccaatcctggagaggcaggtatttgtggtcagtcagacagagaattcaaagtgactgttttgaggaaactaaaagaaattcaagtaaacaaagag

SEQ ID NO: 283634 - DNA, 201 bp, Homo sapiens
agtgatcaaaaacttagatcacaacaccaaagtcccttaaatatctggaataccttcaaagaaagacaggcacaaacaagcccagactgtaaagactgcartaaatacctaactcttcaaagcccagaccctgaagaacattcacaagcatcaagaccacccaggaaaacatgacctcaccaaaggaactaaataagacac

SEQ ID NO: 283635 - DNA, 201 bp, Homo sapiens
atactattcaggacataggcacaagcaaagatttcatgacaaaagtaccaaaagcaattgcaacaaaagcaaaaactgacacatgggatctaattaaactraagagcttctacacagcaaaagaaactatcatcagagtgaacagacaacctacagaatgggagaaaatttttgtagtctgtccatgtgacaaaggtctaa

SEQ ID NO: 283636 - DNA, 201 bp, Homo sapiens
agctaagattcagaatgtgttattattcttttaatcaaaaatatgtattgtgcccttcccaccattaggtaattgttaggaaaatggagattaataaaacrtggttctgagcctgaaggaacgtagactgatagagggaattggacctgacagtgtatccaaatggaccagattttcctaactggcataagaaggtacatg

SEQ ID NO: 283637 - DNA, 201 bp, Homo sapiens
atatagtgcctggttcacaaaaatatcttgtccctttttctgttgggtgatggtgttatttatagttgccaccaatattattgaaaaaatagtaaatactyagtacatttttgtggaatatatagaagaaggaaggaataaatgctttactagttggtccaggttaacttctacatttatagaatttatttttctttcttt

SEQ ID NO: 283638 - DNA, 201 bp, Homo sapiens
agaaaggttataattaatctgaaaagtgtttctttggtttttctagatgagaattctccagccaacttctgggattctaagaacaggggtgtgactggaayacaaaaagggcaaattgtatggagaattgagcctgggccctatttcatggaacgtaagtaactaagtgtgaaatataaacttattattgaacattgcata

SEQ ID NO: 283639 - DNA, 201 bp, Homo sapiens
atgacacatacacagtacaaataagtcctatgtctgcttttgtagacaatcaccatgaatggtaagtattttttccccaacacttttcttcaggcgatttyctatgatattagtttttttatagaacccacatttaaacattaaaacattttttcccttgggcaaagtcatattttcagttaaatacctcatttgactctt

SEQ ID NO: 283640 - DNA, 201 bp, Homo sapiens
gttggacaagttttattgagaaatctttgggccatcaatgggagattcccaaagacagctggaaatggcagccatggcgcacaggagaggttgaaagcaargagttcagtgtactggtggcaactggaacctagagtatagactaaagcaactggggagaaagtcattgaaaaggagaggaaatagaggatgatgtcatga

SEQ ID NO: 283641 - DNA, 201 bp, Homo sapiens
tctcaatcaactaggtattgaaggaacatacctcaaagtaataagagccatatatggcaaaccaacatccagtgtcatgctgaatgggcaaaagctggaarcattccccttgaaatccagcacaaggcaaggatgctctctgccaccactcctattcaacatagtattggaagttctggccagggcaatcagtcaaaagaa

SEQ ID NO: 283642 - DNA, 201 bp, Homo sapiens
acccatctctgtgtgtggaatattatggggaagaaagaacttgaaaaaaaatttaaagtttttctgtttaaattattttagcttggtgtgtcatttttttwaaaaaaaaagaattagttttttaaaagactactctttataattacattgtaggttaatataattatcaacttttccagggaagaaaaggataatctcctg

SEQ ID NO: 283643 - DNA, 201 bp, Homo sapiens
ctgcagtggatgaaagacaatgatatccatgacatcctagacctcacgttcactgtgaacgaagaagtatttgggcaggtgtgtgtatctgcacacctggygcctaagtgtggtaactgaaggctattgatgagtgaagaattaactccatggctaagatcagatgcttatttattcgtggtttattgggtgatttaaact

SEQ ID NO: 283644 - DNA, 201 bp, Homo sapiens
atagctctggcatgtggacaattagatttgtaatgagcatcctatggaaacttgagctctggagaaaaactgcccaatatctagaaaaaaagtaacagatkattctttttgtggatttttgttacaggctggattacagtgggccttctagagagtttttcttcctggtatccagagaactctttaacccatattatggct

SEQ ID NO: 283645 - DNA, 201 bp, Homo sapiens
cagtcacctcattgtgaatttttagggttctgcttgttttaaatggattgtgttgttaagtacaggttctacctacaagaaaatgcttttgaaaattgccktaggttgagtctaaatagatttcatggccggttatctgtccctggaataatcatggtttttgacaaattttaaagttcttctctcagggagtgagatgtg

SEQ ID NO: 283646 - DNA, 201 bp, Homo sapiens
ttctactcctttgggatttaggcttttccccactactttggctgaagtgcccgttttgtttcttgtctttccccagcttatttgaagaagagataatgtcrtatgtgcctccacatgccttactccaccccagctactgtcagtccccacgtggctctcccgtgtcatctcctcagaactcgccaggtgagtccacctgct

SEQ ID NO: 283647 - DNA, 201 bp, Homo sapiens
  misc_feature (1)...(201): n = A,T,C or G
cttcagttcagctctggctgctcctatgaatgaaactgccacgtgggttggccaggtgtatgattttaaggaagaatgccatgtttcttcttgctgctgcntaagtctcatttgactgatggattttaaaacctttgggattatatgaggtaagatattggaaagtgctgtggaatgaattccactgtcacttgatttcct

SEQ ID NO: 283648 - DNA, 201 bp, Homo sapiens
  misc_feature (1)...(201): n = A,T,C or G
ggaatcctgtctagtatttcatttctagaactttgggggaagaggaagagaagcaggagcatccgtgaagtggacctgcagagctttcacagccaccttanaactccagacccgccttgacttcagttcagctctggctgctcctatgaatgaaactgccacgtgggttggccaggtgtatgattttaaggaagaatgcca

SEQ ID NO: 283649 - DNA, 201 bp, Homo sapiens
ctattgcaaccttgacctgggcttacatgatcctcttgcttcagcctcccaggcagctgagactacaggtgcatgccaccatgcctggataattaaaaaawtttttttttttagtagagatgaggtcttattacgttgcccagtctggtcttgaactcctgggctcaagcaatcctcccacattggtctcccaaagtgctg

SEQ ID NO: 283650 - DNA, 201 bp, Homo sapiens
gctattgcaaccttgacctgggcttacatgatcctcttgcttcagcctcccaggcagctgagactacaggtgcatgccaccatgcctggataattaaaaawatttttttttttagtagagatgaggtcttattacgttgcccagtctggtcttgaactcctgggctcaagcaatcctcccacattggtctcccaaagtgct

SEQ ID NO: 283651 - DNA, 201 bp, Homo sapiens
tggaatcatattagtgatattgaacaaattcagccattcagtacacagtggatgaaataatgactccaaactataaaataatttgcatctgctgatggaastagggaatagaaaaatcaggattcaaattcaggccgtttgtctttcatctggtactcttggactagctctgggacctaagcaaaactcctgcactccagc

SEQ ID NO: 283652 - DNA, 201 bp, Homo sapiens
ggatattgagaatttttttttttcctctttgttctcacagtcatcttgctgggcacttaataattgaattccttgtctacgtgcattgagacttaaaacawtgcctcatagagttgttcttgctttactaaacaaaatgtatgggcggggggcggtgtgtgtggtgtgtgtggtgttgttttatgatcattttttttctgg

SEQ ID NO: 283653 - DNA, 201 bp, Homo sapiens
cagtgagggtggaaattaggtaggggatgtgaggacagagacagatttggaattgttaagagaaacgagaaagggaagtggccaagtataacttggttttraagaccagtggcattctatgatttgtcggaacctttactcagttaaaggaagaaataaagttataattacttctatattacacatgtgggggatttagaa

SEQ ID NO: 283654 - DNA, 201 bp, Homo sapiens
gaatgcatgagtttagggacacagagttcacacagagttccagtgagggtggaaattaggtaggggatgtgaggacagagacagatttggaattgttaagrgaaacgagaaagggaagtggccaagtataacttggttttaaagaccagtggcattctatgatttgtcggaacctttactcagttaaaggaagaaataaag

SEQ ID NO: 283655 - DNA, 201 bp, Homo sapiens
gcttgaacctgggaggcagagcttgcagtgagctgagatcacaccactgcactccagcctgggcgacagagcgagactcggtctaaaaaaaaaaaaaaaaatacaaaaataatcctagagtctataaatacaaatactttagttgattagttcatcaccaactaagatcacattttatattatgctttggctttttacaaa

SEQ ID NO: 283656 - DNA, 201 bp, Homo sapiens
ctgccacactcatcattcatttgtatctgtcccttagggactgtcaagattcacttaatttaacaattaacaattggaaactcctctgctttggaggataytgagaatttttttttttcctctttgttctcacagtcatcttgctgggcacttaataattgaattccttgtctacgtgcattgagacttaaaacattgcct

SEQ ID NO: 283657 - DNA, 201 bp, Homo sapiens
  misc_feature (1)...(201): n = A,T,C or G
tttacaggaagttagagactaaaggatatggacaaggcccagggaagttaaagtaagtcaaagtgacacaaaccacataatgtatagatggtgaaaggagngggcacagttgggcctctaggaaattgattgtgatttgggatgactagccttcattttagtcggcataattattttggaatttgtaaattataggatcat

SEQ ID NO: 283658 - DNA, 201 bp, Homo sapiens
atggcaacatactgtgaggagagaaagtatatattggagtgttgaaatgataagttatctgactaacaatctgtacttagtgatcagatctccccagagartagctgtattcattcctcaaagccagtaactcaagagaagcaggatgagaagacttctagttacatacatgagtcatttgagccactgtcttatattcct

SEQ ID NO: 283659 - DNA, 201 bp, Homo sapiens
gagaaacacatgggcaccattgtaactattcaaacagaatttttattctcaaccaaaatgccacaaagaggacgtcacttaagaccttggttgaggtttgytatatccttcaacttgcagaaatcaaaaatgcagaagttaagacagttgcctcatttgacttgttgattgtgatagcttttgtccatggtgatgtgatga

SEQ ID NO: 283660 - DNA, 201 bp, Homo sapiens
ctgataagcaacttcagtctcagaatacaaaatcagtgtgcaaaaattgctagcattcctatacaccaacaacaggcaagcagagagccaaatcatgaatkaactcccattcacaattgctacaaaaaggataaaatacctaggaatacagctaacaagggaaatgaaggacttcttcaaggaaaactacaaaccactgct

SEQ ID NO: 283661 - DNA, 201 bp, Homo sapiens
ctgtctaattgccatgatatcatttcagcagcaagcaaagacatttcatcctaacagttactactagacatgagtaactctgtttgactcatattagtttygactgaaaaggggaacatacttgagaaacacatgggcaccattgtaactattcaaacagaatttttattctcaaccaaaatgccacaaagaggacgtcac

SEQ ID NO: 283662 - DNA, 201 bp, Homo sapiens
tctcagcccaaaagattcttaagctgataagcaacttcagtctcagaatacaaaatcagtgtgcaaaaattgctagcattcctatacaccaacaacaggcmagcagagagccaaatcatgaattaactcccattcacaattgctacaaaaaggataaaatacctaggaatacagctaacaagggaaatgaaggacttcttc

SEQ ID NO: 283663 - DNA, 201 bp, Homo sapiens
ttgatgcctctccaatagtggagaccacctgcatcagactcacttggcatatttattaaaatgcatattcccccaggcccaccccaaaccttctgaattamaatcacaaggggtgcaaccaaaaatctccattgtaaaacaagctcctggagtgattttgatacactctaaagtatccttttgagtatttgccttcttcta

SEQ ID NO: 283664 - DNA, 201 bp, Homo sapiens
gtgagccaagattgcaccactgcactccagcctgctgggtgacagagtaagactccgtctcaaaaaaaaaaaaaaaaaaaaaaaaagtttcatgaggagtyttttggtgaggaatttagagtgaatgattaaaacctcactcttggtgccacttacttatataccatgtactttccattgcaacttcctgtctaattgcca

SEQ ID NO: 283665 - DNA, 201 bp, Homo sapiens
tatatagtgcctggttcacaaaaatatcttgtccctttttctgttgggtgatggtgttatttatagttgccaccaatattattgaaaaaatagtaaatacwcagtacatttttgtggaatatatagaagaaggaaggaataaatgctttactagttggtccaggttaacttctacatttatagaatttatttttctttctt

SEQ ID NO: 283666 - DNA, 201 bp, Homo sapiens
ctacttatactcatttcttttttataacattactattacttttgtgtaacactgatcttaacaaatgcttgcggggcttggggggcaggcagccatgtcaytgagtggctgccgcaaagtggtgagctcatgcctcgtctaacagagtagctgcagctgcccgctggatccccaaggaaatgcaagccagtcattgcaaga

SEQ ID NO: 283667 - DNA, 201 bp, Homo sapiens
ggtctcgaactcctgacctcaggttgatccgcctgcttcagcctcccaaagtgctgggactacaggcgtgagccaccatgcccggccctttttttttttttatgacagagtcttgctctgttgcccaggctggagtgcagtggtgtgacgtgatgttggctcactgcaatggccgcctccctggttcaagcaattgctacc

SEQ ID NO: 283668 - DNA, 201 bp, Homo sapiens
aagaaataaaaggtattcagctaggaagaaaggaagtcaaattatctttgtttgcagatgacatgattctacatctagaaaacccagtcctctcagcccaraagattcttaagctgataagcaacttcagtctcagaatacaaaatcagtgtgcaaaaattgctagcattcctatacaccaacaacaggcaagcagagagc

SEQ ID NO: 283669 - DNA, 201 bp, Homo sapiens
cttttcactatcattttttcctttcatttttcacagtgccagtgacaactgtatctgttgtccttgagaatgtctcacattcaggatttgtttttttttttgctcactggtattgtcttttaacttgttccactgactcccttatttcttataaattggaggttaaccaaaagggtcttgaatatcatcaagttaatgttt

SEQ ID NO: 283670 - DNA, 201 bp, Homo sapiens
tttcagaaagaataagtcaagatatcgcttaatttaataacatgacttgcctttgaaatatctcattataatttttgccagcggcagaataacttcgtgtktggaccccagtcttttcaaagtgttgatgaaatagacgggctcactgacattgaggtcggcttaccagaaaatcagacattggctgcagataactcaact

SEQ ID NO: 283671 - DNA, 201 bp, Homo sapiens
attaaatgcctgtgatttgcctggtacattctagactctgggaatagagtggtaaataagacagagtagaatatagttaacagactagtgaataaaaaagrtaatgcaggtactgtagtgtggtgtgaggcaactgaaaccacacactgggatagagttacttggggatgaggtggaggaggcactattttattttatttt

SEQ ID NO: 283672 - DNA, 201 bp, Homo sapiens
caaatatgggacccagaagtttatttaagctgcacatttctaggaaattaaatgcaataacacctaatttatctgatattattggagatgtgctctcttaygtggattttccaggtaaccaaagctatgattttaactgtatgagaatttgtttgaccccctatttgctgaaactctttcataaatatattatatttctct

SEQ ID NO: 283673 - DNA, 201 bp, Homo sapiens
tttcagagcatcttgaaagtgtcacagatacaacactggcaatcagtatagtgtattttggttcagagactgaataatgccatgggtctttaatcgatttytgaccaagcttgagacagtttggtctatgtccaaaattgaaaggctgtacctcacgggcacctcattttggggatcaggactatgtttctataatagcat

SEQ ID NO: 283674 - DNA, 201 bp, Homo sapiens
agtctgctgtttagctgctgcagcctcagtaattataagcagattgaactacttctgtgccacttggtaaagagtcactgccccagcccctctcaagaatrtggatgcctcaactccccccaccatttagccactaaaacaaggctttcaataactaagaaccctgcttcagccccacagctggtatctgttctgatcaag

SEQ ID NO: 283675 - DNA, 201 bp, Homo sapiens
gctgggaggtagtcattaagaataatgtgcattatattttctcatttatcttttttccatttattttagaacttatgttaatcttcctgctacggagagamaggttataattaatctgaaaagtgtttctttggtttttctagatgagaattctccagccaacttctgggattctaagaacaggggtgtgactggaacaca

SEQ ID NO: 283676 - DNA, 201 bp, Homo sapiens
aaaatggttgttacaaaatgcatgtattttaatgcatgggagaagcccttaaactctcattgaaactactgacttgatttctgcaagtgtttttaataaamctctaattcccagccaagagaagattagaagtggcaagcatgaagtttaggagagatgaaagagaattgggcttgtgattatgtccctggaccacaggta

SEQ ID NO: 283677 - DNA, 201 bp, Homo sapiens
ctgaaactctttcataaatatattatatttctctttactttcctatacactgcacattgaggatatttcatggtttggggggatcattgtgcctatgaatyatgatgcagagctcttgttacttgactagagctggactccctggaaactagcaccagcagaaagtcaccttcaacagaagtaaaacactcagagagcaca

SEQ ID NO: 283678 - DNA, 201 bp, Homo sapiens
gcttgccaactgaatataggacaggcaacagcacttggactctaatcataggtctgatgcaggctcccttgagaccttgggcaaggtacattctcttcttktcctagttacctcgtctgtcagatgggagaaggactgtttacacaccgtcaaaggatgtcataactcttaattgttggtgaggaaatgtgaccgtaagaa

SEQ ID NO: 283679 - DNA, 201 bp, Homo sapiens
actacaggcacctgccaccgcgcccggctaatttttgtatttttagtagagatggggtttcaccatgttggccaggatggtctcgatctgttgaccttgtratccgcccgccttggccacccaaagtgctgggattataggtgtaagccaccgtgcctggcccacacatttcccgcattcttaataggaaaggaaaatatg

SEQ ID NO: 283680 - DNA, 201 bp, Homo sapiens
agaatgggtgggatttgattggttggaaaacaaggcatcttgggatatttcttcttttccattctcatagctattactaaatcttactgcttatgttttcyaccagctcctgaaacactaatttatttgaacctatggcaatatctcttgtttttgaaaagacctgtagtaatggtataacatttttgttaaatgtgttta

SEQ ID NO: 283681 - DNA, 201 bp, Homo sapiens
tttccccttcttcaaatccttggggaaaaaattagcctccaaaagtatgctccacacttctaatggggctgagtctggggaagcccattagtagtgcttcyggagtgtacatgctcaacctgagaaccatacccaagagaagctctggagattaagaatagattttgggggccaatatgtcatcatgaattgaaataaaat

SEQ ID NO: 283682 - DNA, 201 bp, Homo sapiens
tacccagcagtggcagcctggcaatatgagtatcaagtggtgtaatattctcattgcacctgtaatgtgtgatatatacatagaaaaggaaaatgtacttytgttggtgtattagtccatttcacactactataaagaacttccctaagactggataatttatacacaaaagagatttaattgactcacagttccacatgg

SEQ ID NO: 283683 - DNA, 201 bp, Homo sapiens
catccacacgtgtggccctgagctctcaccccaattccagccctgtatttttcagtctctagggcatttggttagctgtcatatccaagtcaatatgtatraagtttcacatgcccttgtccacctgcatcacttcccacactcttcatagcatcaggtagatagacttggctcaaatcccaaatctactgtcactggaat

SEQ ID NO: 283684 - DNA, 201 bp, Homo sapiens
atttccctgtctttagtattcacctctatgcagataacaacagctaacacttacgtgggatctcttatgcaacagtcactgcataaagtgccataaacacrctaactcagctcatccacacgtgtggccctgagctctcaccccaattccagccctgtatttttcagtctctagggcatttggttagctgtcatatccaag

SEQ ID NO: 283685 - DNA, 201 bp, Homo sapiens
atttaacactcatgcctgggtcccaccccacattctgggtctttacacattttgttgtaatgcatcttgggtgtggcctgaacattggaatttttaaaagyttcctaagtgattctaatgtgcagtcaagattgagaacccctgcctaggagtctcttctgcttcccagatctttaaagtcaagtttattcacttgcttta

SEQ ID NO: 283686 - DNA, 201 bp, Homo sapiens
  misc_feature (1)...(201): n = A,T,C or G
cagattatagcatgtcagagaaagaaaacacatgccaaacttaatgaaccctattaatcatctcagctcctcctcctaattcctttcggtgcctcactgcnatttagactgggaggcacgcattgacagccacggcaggatcttctacgtggatcacgtaaacagaaccacgacgtggcagcgaccgacagctcccccagc

SEQ ID NO: 283687 - DNA, 201 bp, Homo sapiens
tctccagctatgaggctttcattgaagctagaaaagacatggagaaatcaggtttttttggtgaaaataaacatcaatacccattttgacgtgaatatctraagtgttatgaaaccaactacatatatttttaaaatgctggggctcatacgtgaagggtgagcactgtgggcaaatttggaaagattctctacatttaaa

SEQ ID NO: 283688 - DNA, 201 bp, Homo sapiens
ggtattacacagtagctgccacataataggtaccaaaaaacatcatgactattataaaaaatgctctttactactgagttatagcctaaaggtctaccatrtacattttgtgctgtttcttttcttgattagggagaagatccaatttatccgaactgaagggactccaggattggtgcgcctttcaagcgatgcagacct

SEQ ID NO: 283689 - DNA, 201 bp, Homo sapiens
ccagagcaaagaaggccaaggatatttttctcaccttttcctaatttgcagtgcccagcttgtcaacagagacaagtcaaaaacagtggcagcagtgaaamgctaattcaaacaggtggtctgcttctttacattgctgttaatatctgcactccttttatctctttgctgcttctcaagcatgttagcaagctccctcat

SEQ ID NO: 283690 - DNA, 201 bp, Homo sapiens
tttttctagatgagaattctccagccaacttctgggattctaagaacaggggtgtgactggaacacaaaaagggcaaattgtatggagaattgagcctggrccctatttcatggaacgtaagtaactaagtgtgaaatataaacttattattgaacattgcataagtatgcagaattctatggagtctttttgaatgttat

SEQ ID NO: 283691 - DNA, 201 bp, Homo sapiens
ggtagctaaaagagatggtgacccgtgaggatctgtgacagtgaatgtgcaggagattttggtaagtctgcttatatagagattctgtttaagacccctasgtgttcctcctaaaaataatgtggttttaatgaaggaaaaggggcctatttctcacctcattaacaagctctgagaagtttctctgtgtcattatatagt

SEQ ID NO: 283692 - DNA, 201 bp, Homo sapiens
ggaaggagatggtcttgtccctgaggccttcattttgcttaaaaagagacccagagcaaagaaggccaaggatatttttctcaccttttcctaatttgcartgcccagcttgtcaacagagacaagtcaaaaacagtggcagcagtgaaaagctaattcaaacaggtggtctgcttctttacattgctgttaatatctgca

SEQ ID NO: 283693 - DNA, 201 bp, Homo sapiens
gccaagagctgattaatgctatgatgaaaaataacgcaacaaatgaggtctagtgaaagacaggaatggagaatgttatttcatagagggtggttggggargatgtcacagataaggccataggtgagcagatacctgaaagaagtaaggagtaaagtatatcaacattcaaggcaaatggaacacgtaaagtactcagta

SEQ ID NO: 283694 - DNA, 201 bp, Homo sapiens
tttatagatgcttgcatttttggaaacaggcaagtagtcaggttgaaattcagaaagcagtctttgcaaatggcactttgaaattgttcagactcaccctrtgctgtctctgatagtgcttgtacctatcaagcactgtatcaagcagtctttccctctcatctattcatttaaacaaatattcattaaatgtctgctaag

SEQ ID NO: 283695 - DNA, 201 bp, Homo sapiens
gcagttaactgtatgtttttgtacatttaatgatactatgataacagtatctacactagggattgtgccagaaattagtcacattcaaaaatcattgcctrggaaggagatggtcttgtccctgaggccttcattttgcttaaaaagagacccagagcaaagaaggccaaggatatttttctcaccttttcctaatttgca

SEQ ID NO: 283696 - DNA, 201 bp, Homo sapiens
ggtaagccaactactttgtagaactgtcattctcatgaatgcagcattcatgtctcagagacaggcaatagacaaataaataaacatactattctttgtakgccaagagctgattaatgctatgatgaaaaataacgcaacaaatgaggtctagtgaaagacaggaatggagaatgttatttcatagagggtggttgggga

SEQ ID NO: 283697 - DNA, 201 bp, Homo sapiens
gtctttccctctcatctattcatttaaacaaatattcattaaatgtctgctaagtactaagcattgtgccaccactacagatgaaatgatgaagaaaaacsccgtcattgatctcgtaggtctggtgcagaagagagacatcaatcaaatattatatttatttgagtgataattgtatgagagggagcaaaatggggcaag

SEQ ID NO: 283698 - DNA, 201 bp, Homo sapiens
ataaaaagtctgggaatatgtgacttgaagggtagggaaaattaaaatgacatatttaaagtatttaacaacccttggagtgtttgttcaacaaatatttrttgagcgcctaagcaaaacaggtaagccaactactttgtagaactgtcattctcatgaatgcagcattcatgtctcagagacaggcaatagacaaataaa

SEQ ID NO: 283699 - DNA, 201 bp, Homo sapiens
aattgagaaactccacagggaaggaaatgagctgtcatgctaatcatgtggtctcttttctcacatatcctattgcgatgaattgaagattaaaaaaaaargggggacctctctgtcatttgtattttgttttcattgtcattcatcagcatacacagtgatatgtgtctcagatacttggaacaggaaatctttcagctt

SEQ ID NO: 283700 - DNA, 201 bp, Homo sapiens
gccagcttgtgggatgtgcctagggcagggctgggacaggtagctggctgatttcagctcaatgctagtaatgttgttataacattaagagtattgctttrtagtcattctttttattttgtaatctcagataactgaacgagaattaaagccagggggtgccaatatcccagttacagagaagaacaagaaggagtacat

SEQ ID NO: 283701 - DNA, 201 bp, Homo sapiens
atttttccactaaaacccagcagaagctttccctccttgaaatctttcaactccactgtggactctcactttcatgatctaggctagtatttctctatctaagtgtgctaggcatcagtgggaataggaaaagaagagtttctgctgaaaatctttcttaaccccaagtccagttgtcacctttactggtagaagtatatt

SEQ ID NO: 283702 - DNA, 201 bp, Homo sapiens
gatttttccactaaaacccagcagaagctttccctccttgaaatctttcaactccactgtggactctcactttcatgatctaggctagtatttctctatctaagtgtgctaggcatcagtgggaataggaaaagaagagtttctgctgaaaatctttcttaaccccaagtccagttgtcacctttactggtagaagtatat

SEQ ID NO: 283703 - DNA, 201 bp, Homo sapiens
gtaaagcttttcagaagaagagacatttctctggtacctgcatcatattaggtgctaccttatgttaccttagttgggacagaaagcagggacacacagcrgtgtctttcctctgtcacaccaatctgtctaaacagctctgattcttccatatgtagaagaattcccaaagacggttttttatttttgtttttttttttt

SEQ ID NO: 283704 - DNA, 201 bp, Homo sapiens
agatttttccactaaaacccagcagaagctttccctccttgaaatctttcaactccactgtggactctcactttcatgatctaggctagtatttctctatctaagtgtgctaggcatcagtgggaataggaaaagaagagtttctgctgaaaatctttcttaaccccaagtccagttgtcacctttactggtagaagtata

SEQ ID NO: 283705 - DNA, 201 bp, Homo sapiens
aagatttttccactaaaacccagcagaagctttccctccttgaaatctttcaactccactgtggactctcactttcatgatctaggctagtatttctctatctaagtgtgctaggcatcagtgggaataggaaaagaagagtttctgctgaaaatctttcttaaccccaagtccagttgtcacctttactggtagaagtat

SEQ ID NO: 283706 - DNA, 201 bp, Homo sapiens
acctgggcgtggtggcatacgcctatagtcccagctactcgggaggcaggagaatcgcttgaacccaggaggcagaggttgcagtgagccgagatggcaaygctgcactccagcctgggcgacagagcaagactctgtctcaaaaagaaaaaaaaagaatcctctaagaagtctggcatggtcttgtgtcgggcatgggag

SEQ ID NO: 283707 - DNA, 201 bp, Homo sapiens
attttagttatttttttctgaggactaaatttactacaattgtgcatgaatatgcgtgtggaagtctccagctatgaggctttcattgaagctagaaaagwcatggagaaatcaggtttttttggtgaaaataaacatcaatacccattttgacgtgaatatctaaagtgttatgaaaccaactacatatatttttaaaat

SEQ ID NO: 283708 - DNA, 201 bp, Homo sapiens
tgtttactttgttcttttttaactttttatcctgacttttgtaagccactgtactactttaactattaacattggctccacaaagaataaaagtacattcrgagggaaaaaattaaaagaacttaattgcatgacagtatagttatatgagaagcaacttcttcattgacaacattgtcatcacccttaatgaaatgtggg

SEQ ID NO: 283709 - DNA, 201 bp, Homo sapiens
cactctctttctaccctagggacaagctactgaagcagtgtagtttgagctttgatggccaccatgtggcatgatcatggtgcactgcggcctcaaactcmtgggctcaagtgaagctcctgcctcggcctcctgagtagctgggactataggcaagcatgatcatgcctggctggtttttttgtgtttttattttttgta

SEQ ID NO: 283710 - DNA, 201 bp, Homo sapiens
tttctgcttcagagttgcagtcaccttatgtaacccaggtaacacgcaggagcacagatctaagccctatgacacactagttacatcatcctaagcaaaamcctagatccatccctctaaggtaggagtaacaatgttcagagtatttttgacaattgtaagataatgtatatgaaaggcttaggaacactgtgtttactt

SEQ ID NO: 283711 - DNA, 201 bp, Homo sapiens
tctgtagagttcaccagtgcttcgcagactacctgtggacattgatcttttgtaaaatagagtgaaaataagctagtagaaaaagaaatggaataaaatayaagatctataaaatatgagtccaaaattttattattagattgaatagacataaaattactctgacaaatttctgtaaaagtttctaagagcttccagtca

SEQ ID NO: 283712 - DNA, 201 bp, Homo sapiens
cagctctctagaatgattcctttaatatgccctgtaaggatgcattaaaaatcaaagagcaatttcatatgtctggctggcataactcagaaataggaatkattttctttttctgtaatgtatttttctacctacatgatccccttcttttcttcctcctcctttttttttttaaattttgtttccttcattatattgtag

SEQ ID NO: 283713 - DNA, 201 bp, Homo sapiens
ttttcttatgcattgaaaaattatgaattttgtaattatcttatttcttctgtacttatttcctggaattcttatgtaaaaagcacttctcctcatggctygttagtacctttgaaatactgttcattctggaaaagcaaaatgatgcttaattctttaattttcaatgacagttttcagaatatgtgggcattggtgccc

SEQ ID NO: 283714 - DNA, 201 bp, Homo sapiens
cttttctgcttcagagttgcagtcaccttatgtaacccaggtaacacgcaggagcacagatctaagccctatgacacactagttacatcatcctaagcaaraccctagatccatccctctaaggtaggagtaacaatgttcagagtatttttgacaattgtaagataatgtatatgaaaggcttaggaacactgtgtttac

SEQ ID NO: 283715 - DNA, 201 bp, Homo sapiens
actattccacaacgcataattaccacatatgactaaagtgtacacatcagttcattgctggcccatggccttctgagtatctgtgcttggttttgcatgtktctccttttcccatatgagcttgcttttttgctttgcttccctggtgaatttcagcagctgtaaactagtgacttatggttcaaatttggccaataaatt

SEQ ID NO: 283716 - DNA, 201 bp, Homo sapiens
tccatatgatttcttttttcatgcctgcattctcgacatactctactctagacagcatttattaatatgtgatagatacttacataaataattgcaggctrttcaaaaactgtgacataaagtgatccaaatgtactaggtcagcttcattgctggcttgaactaggtagcatttcctgtgggaaagtgatccattttcct

SEQ ID NO: 283717 - DNA, 201 bp, Homo sapiens
aacaattttctactacctataaaatgacttcaataaaacctatgtgtgtagtatgaatagtaattacaaaattaggttgagaatgtcttcctggcaatacyattattgtttacattattatacagatgtgaaaataatcaaattttttctttttctttaaaatatgttttattttcctgtaattcacatcatactatattt

SEQ ID NO: 283718 - DNA, 201 bp, Homo sapiens
ttctactttgtgcttttacttactaattccttaattcattgtaatctggcttgtaccattagttctctaaattgcattggaaaagactacttgtgatagtytaattgtcaaatttagtggcctcttcttggctttatagtctttttttccgtgacatgaattatctttttttatataagtttttggtttatttatttattt

SEQ ID NO: 283719 - DNA, 201 bp, Homo sapiens
aagagcattttgggttgtgaaaaaaaatctcatgaaagggtactttaaaaagagcatgttttattctgggacctcagtgaattttgttgtatttaaaatgyaatatgcatggataacagcagataatgctagaaagctagctttagagccaaattctgaagtcataggagaaatggaaagagatctgtggattttacttaa

SEQ ID NO: 283720 - DNA, 201 bp, Homo sapiens
tgttattgtgtaacaggcactcttttaggggcttttgcatgtagtaacattttattctatgaggattatatttttatttctatttttcttatgaggaaacrggcattgaagaatattaggtaatttacttaaaatcacataacaaattactggtggaatgaggatttaaagctaggcagtctgacttcagaatttattgct

SEQ ID NO: 283721 - DNA, 201 bp, Homo sapiens
ttcattcgctcttcagtgagtagtgtaatcctagagttgatttatgtgcctttttggcgtttgactagtttgtggtttttaaatttaatttaatttcaatwtcttaattttttgggacagggtctcactttcttgcccaggctggagtgcagtggcataatcatggttcactctatcctctacctactaggctgaagtgat

SEQ ID NO: 283722 - DNA, 201 bp, Homo sapiens
acctgtagttccacctacttgggaggctgaagcaggaggattgctggagcccaggagtttgagcctatggtcagctatgattgcactattgcactccaccytcagtgacactgtgagaccctgtctctaaaacaaataaaaataaaataaaggtggacaatttgaaacatcttttgacaagggaacagttaaacgatatag

SEQ ID NO: 283723 - DNA, 201 bp, Homo sapiens
ccaggctcaagtcgtgggatttcgccatgttgtccaggctggtctcgaactcatgagctcaagccatctacctgcctcagcctcccaaagtgctggggctrtaggtgtgagccaccagcaggtatcacattcttgagaacaattgataatttgtatcaggagtcttaaaattgtttataatctttgaacaattttgccagt

SEQ ID NO: 283724 - DNA, 201 bp, Homo sapiens
tatttcatatgcaatatccaaaacttacattcattaatattaccactgatgttattagaaaatcatttacattttgggaaggcactatgttcatagtgtcmcacacaacttttccaacattctaattttctattgaaaactcacattttatcattgacaagctcagttgtttcctttgtagatgacagcctcactttgttc

SEQ ID NO: 283725 - DNA, 201 bp, Homo sapiens
tggcctcccaaagtgctggggttacagatgtgagccaccctgcctggccatgtttctcaattttctttgctctttgaaattcagggtgacctgtctttcayaggttttcttttaaaaagtaaagacaaaacaatgttatgtgaaattgtattccatcacaaatattgtgttatgcagagtattaaatagatacttatgtgt

SEQ ID NO: 283726 - DNA, 201 bp, Homo sapiens
tggtctcaaactcctgagctcaagtgatcctcccaccttggtctcccaaagtgctgagattattggcatgagccaccactcctggcccgtttgacattaaygccagttaattaaatgatttcaaatctgacttaaatgcaagtattattttaattagtttgttttacattgtttcttgttgctgtttattgtagcttaaaa

SEQ ID NO: 283727 - DNA, 201 bp, Homo sapiens
atagcataaggtggctaagagtgatcctggatgaaggacatgccatacgaaatccaaatgctcagcagacaaaagctgtacttgacttagaatcagaaagragatgggttttgacaggtaatcatagcattaaacttactaaaaccttaaatctctaaaatatatcattatgtaagttagtaaagtaactttgtaaactta

SEQ ID NO: 283728 - DNA, 201 bp, Homo sapiens
ttggtaattatttttttctttagttaataaaatctaattttgtgattatgattttctagaaagtaattttgaagtaaaaagagataggaatatgttggtascagtttgggactagatcttactatctttgtagaacacagtttttcctatagtttttagttaaaatagtggtataaagatgtgttcctcagttttcttttt

SEQ ID NO: 283729 - DNA, 201 bp, Homo sapiens
  misc_feature (1)...(201): n = A,T,C or G
gttaaaatcccaaataagggattttaaaaacacttttacagaagctataaaacagtaacaaattaaaatgttctgtttcgttcttcttggatcaatttatntagaaattaaaagttacataattatttgttttattctgattaggcgtttacagtccctaattaaaaatattacacttagaagaacaaagacaagcaaaat

SEQ ID NO: 283730 - DNA, 201 bp, Homo sapiens; identical to SEQ ID NO: 57947

SEQ ID NO: 283731 - DNA, 201 bp, Homo sapiens
cgattacttgattttaaaatgggaacgtttttctggtgaactgggtttcacaatctgaccatttatctttttaaaacatttttaagggtaaaactcttacrgccattgcagtaatccttaccaacttccatgatggcagacctcttcctattgaaagagttaaaaagaatctactgaagaaggtaaagtagtagtaagtgc

SEQ ID NO: 283732 - DNA, 201 bp, Homo sapiens
cacttttttgaccattgctatttgggctttttgtaggattagtgcagatgttaacagagtaaggtctgtcttagtagtattataaaaacagttttgacttygcattttcgtgaagggctcctgggaaaccctccccatccccagtggcctgtggaccacactttgaaaactgctgttatttacactgctttaaaattgcca

SEQ ID NO: 283733 - DNA, 201 bp, Homo sapiens
aaaactgtgactgaaactcgggacttaaaattcttttatattcttttacctcctaacaactaaagcacctgttcattcgctcttcagtgagtagtgtaatyctagagttgatttatgtgcctttttggcgtttgactagtttgtggtttttaaatttaatttaatttcaatttcttaattttttgggacagggtctcactt

SEQ ID NO: 283734 - DNA, 201 bp, Homo sapiens
gcaaactgaaaaatgtacagtctgaaactaaaggcagggcgaaaggtatgtgtatactatatacccataatctagacttcaagattattaaagtacagctycattgatttgtatctcgctaggttggaatgttttagtaatagctcttaaacttggctgatgtttacatttgaactcttcatggagctaaccatgggtttt

SEQ ID NO: 283735 - DNA, 201 bp, Homo sapiens
ttcttgttttatttatactacttgtcaaggtttatgcattagcatttggatgagattcattaaaaatataagggcacatttgatgtttggctcttaacaaraactcaaatgtttaacctcaagtttttaacacattaacttcaaaatatctgcaaaatgtgttatacagcaggacaatatgggtataaggagaattaaggt

SEQ ID NO: 283736 - DNA, 201 bp, Homo sapiens
cgtgtttttctacgtgtacaaaggggctgtttggcctgagaggaccttggactaattcagtttctaatttgcactgggtactatgtgggctaaaggcaacmctctgctgtttctgtgcattcagacttaagatttgtggttgtaacttgttacctgaaactcagaagatttttaacatgtaggaattctactgagatacat

SEQ ID NO: 283737 - DNA, 201 bp, Homo sapiens
tacttaagtttggaacaggaaagaaatagaaaggtggcgagttagggtaagatgaggttttttttgtttttgattttgttctgtggtctaactcatctacstagatgagttaggtagatgagttagcagtagaaggaaagaagtaaggttgaaggaaagtatagataaatgagtggattaaaagataggaaaattgagatt

SEQ ID NO: 283738 - DNA, 201 bp, Homo sapiens
taaaatgcaatttcctttgcattcaacgtagagacttaggagttctaggattagacccaggaagctgcatttttagcatatatcataggtgattgaggtayaggtggtctaggatcacaatttgagaaacaaattatcattaatggaatgttctgagtacgttttaatgcctaatatagtgcagtcagttgtggttgtgta

SEQ ID NO: 283739 - DNA, 201 bp, Homo sapiens
tagaaatgaggaaatactagattaggaaaaaagtagagaaaatagagtaatgaaaggaatgaagatcttaagaaaactgaaaatcagtaattagaaaaccaaggttttaagagggataatactagtttctaagacaccttactaatactttatatttgcatttttctttgaaatagacgcatctagatgtagtgaacaacc

SEQ ID NO: 283740 - DNA, 201 bp, Homo sapiens
ataaacaagatagacaaaatgattaccatcacggttctagtagtcttaagctttaatgtgcataagaattaggtaaaatgcaatttcctttgcattcaacstagagacttaggagttctaggattagacccaggaagctgcatttttagcatatatcataggtgattgaggtacaggtggtctaggatcacaatttgagaa

SEQ ID NO: 283741 - DNA, 201 bp, Homo sapiens
atcccaggcctttaccctttatatttgttgtcctaactttttctctgtctttgttctggttcctattaaatctgtcttttctgtatttccatacaacatakaattttttaaaaagagtattttaaaaaattttaatgagatctccatctactcatcaagattcaaaaattaccaaaagtctgacacatgtgctttcctttt

SEQ ID NO: 283742 - DNA, 201 bp, Homo sapiens
ttgttttctcctttttcagtttatcaggtttttcagttattgagaataacttagtgaatcacaagttcttgcatttcccattttccaagcagaatgagttrctaccctcagtggttccgttagccaaactctaccctttgatttaacttattttacttatattacaatcttgtttacaggccatccttgcatttttaaaac

SEQ ID NO: 283743 - DNA, 201 bp, Homo sapiens
gattgatttttttttttttttttttttttacagtcttgctctgtcgcccaggctggagtgcaatggcgcgatctcagctcactgcaacctccacctcccargttcaagtgatcctgctgcctcagcctcttgagtaggtggaattacaggcacatgccaccatgcccggctaatttttgtttttttagtagagatggggtt

SEQ ID NO: 283744 - DNA, 201 bp, Homo sapiens
atgaaaaatggtacacttctatagggcagccccattataatcttgtggaacaactgttgcataatgcatgtggtctgtcattgctgaaatgttgttatgcrgggtatgactatactgttatgattaattctcattccttttgttattcttgtctttgtctttttgtttttttatatgtcctgttttttcttgctgctggga

SEQ ID NO: 283745 - DNA, 201 bp, Homo sapiens
tggagtgcagtggcacagtctcagctcactgcaacctctgtctcctgggttcaagtgattctcatgccttagcctcccgagtagctggaattataggtgcrcatcaccatcaccaccatgcccagctaatttttgtatttttagtagaggcagggtttcgccatgttggctaggctggtctcgaactcctgacctcaagtg

SEQ ID NO: 283746 - DNA, 201 bp, Homo sapiens
catgaaaaaagtacagtaaaaatattgtataaaatatgaaaaatggtacacttctatagggcagccccattataatcttgtggaacaactgttgcataatrcatgtggtctgtcattgctgaaatgttgttatgcggggtatgactatactgttatgattaattctcattccttttgttattcttgtctttgtctttttgt

SEQ ID NO: 283747 - DNA, 201 bp, Homo sapiens
tcctagtatacgtcttcagttaggtattctatagtgaccaaaaatgataaaggtctaaaatattcatctctttcttacttggatgcccacttttcccttctttttttttttttttaaacttccttatatttttatcacacaattctaggtagtcattcaagtatcagagcatcttagtcttattattattattcatatttc

SEQ ID NO: 283748 - DNA, 201 bp, Homo sapiens
aaagtaatcatcagttttcttattttgccaaatatatatactttaaattttatttttttccaggaacactatgttgagatatcatttattttataattaaygcatgttcttttatttgtttttgttttttttttgaaacggagtcttgcttgcattgcccaggctggagtgcaatggtgcaatcttggctcactgcaacct

SEQ ID NO: 283749 - DNA, 201 bp, Homo sapiens
gaacgtagaaccaacagaacttgctggttgatatgttatggcatgtgaaagaggaatcaaagataacttcaagcctttttacctgcataagtggaaggctggaattgctgtttaccaagacaggtctatgggaagagcagagatttttttaagctaagatcagaagctcagttttggacacattgatcataggatgcccgt

SEQ ID NO: 283750 - DNA, 201 bp, Homo sapiens
ttttggcttctgaatgtttcttaaatttcaaatttaaattatgctttttgcctatggcagaaaatgatgagagactttccctactggcaagcgaaactttyccttataagatagattaacttgtcatattacaaaccttgctctgaaattaatttttcagccttttctctaggaaatgatacacctgaagaactgagaaag

SEQ ID NO: 283751 - DNA, 201 bp, Homo sapiens
taatagctttataagccattaagatggatttttttttaaagaatagtactaaatagtgtagctgtattgtatttaggttcaataaattgttattcatagattttttttttaaacttgcttacaatgttataatttttggtttcttgctcttgcttctagctagtccagatcacatacttttgctccctcctttatccattc

SEQ ID NO: 283752 - DNA, 201 bp, Homo sapiens
tatccttctcagtaagattataactagggtcatcatacttaggccttcatgggtgaatatcatggatatggtatggtctgttgtattttcttttttcttttttttttttttttgagacagagtcttgctctgtcgcccatgctggagtgtggtggcacaatcttggctcactgcaacctccacctcctgggttcaagcggt

SEQ ID NO: 283753 - DNA, 201 bp, Homo sapiens
acattggaacgtttcaaattgttttttgattgtctgaaatgtgttgtctaggagattccttaggaagagacaatatttcctaagtttttatattttcatamttgtggcattttatgaatgacagtttcataaaatgaaagttatgaaggacttaatgacagttgggctgaatttaaaatctttgtaatatatctttgtaat

SEQ ID NO: 283754 - DNA, 201 bp, Homo sapiens
gtggccgccggagaaataaatgcattgtcttcgctggcgagtaggggctcctagggcgagtcccgtgttagggacttgggaaatctctgtcaccgactgtrgggggcctggggcttaaagcatctcggccagtgctttatttaacaaaacatccattagatacccactgtgcgccaggcattgtgctcggtggagggccga

SEQ ID NO: 283755 - DNA, 201 bp, Homo sapiens
ctgattaccctttttgaaaattgtattggtggttattattattgctcttgaattgaactttagattttagttataaaatcccatttaagatatcttgagatttattgaatttattattactttcgagaactatctttctttataagtaacgaatgtttccatacaggaacatagtatcctttctccatttatgtagatctt

SEQ ID NO: 283756 - DNA, 201 bp, Homo sapiens
catataacagaattgctgcttcacaacttttgcccagttctcacctcttatcctaaaaaagcctctcatctgataagttttaatgaaaacctctagcaacygtaacagacttttctcaacccagctctagatactaagtatcagaaacaaggcttgtgaagtggatgtgttcacagaaaaatgcagtgtttctactggagg

SEQ ID NO: 283757 - DNA, 201 bp, Homo sapiens
gtagaattgtagaatagcagtcattcaataaaatgacacttctcagagatacttgtagtattttatagtgtaaatcatttaataattccctaataatgcartgggggaaagcattttctaactaaatgaaatactcatttttcattaatatacagtacacttttgtgaccttgaatgatatttgatattcgattacttgat

SEQ ID NO: 283758 - DNA, 201 bp, Homo sapiens
tctgatttccctttctttttctcccaaatataatagggtagttccttttggtgcaaacaatgcttttaccatgcctctgcatatgactttttggggaaaaraagaaaatagaaaagcggtttcagatcagttgaagaaacatggatttaaattgggtcctgcaccaaaaagtaagtttagggtttcacttaatattattct

SEQ ID NO: 283759 - DNA, 201 bp, Homo sapiens
tttcttatgtgcagtgtttagcagtagcattaaaaaatgaatggaaatcccagataaagtataacaaagttattgtctattatttataatgtaatattatytgtttatcatttttattaggttaataataatgaaatggttgcattacaacgagatcctaataacccttatgataagaatgcaattaaagtaaacaatgtg

SEQ ID NO: 283760 - DNA, 201 bp, Homo sapiens
tgccctgcagtgttttagacattttttcgttcagtactaattattgaaatagctaagtccgcattttatacatattaatttattttcttaaatacaaaaawcttatttttctcttgacaagtgggaaatctggcaatgcaggatgagttgtcacttccatatgacaatagttgactggaactctccctttagctagggcat

SEQ ID NO: 283761 - DNA, 201 bp, Homo sapiens
atggaagctcaagtcaccaagcatgcaccctgttcctgtttctgcacatgagaggtattgattttcccctcagggcatgccatccattttaaagaattgtrttttggcagctctgtttgagatctgcagtcatccctctcagcatcttcctatctgacttagactgcaattggcagccatttctcatatattgtgccttat

SEQ ID NO: 283762 - DNA, 201 bp, Homo sapiens
ggatctccaactataatgcttctgtccttaaaagcaggtggagttggtttgaatctgtctgcagcttctcgagtgtttttaatggatccagtaagtagttytgtaaattttttcagaatcttagtacttctttcaaaaaaataagacaaaaaactatttggtaaataccttcatagttataattaactgtgaaaattctta

SEQ ID NO: 283763 - DNA, 201 bp, Homo sapiens
acttcgttctttcttatatagccacatgctaaatgccctttatgcagaaatgatatacatgaagataatttattagaatgtcctccagaagaattagcacrtgacagtgagaaaaagtctgatatggaatggacatccagttcaaaggtaaagtactcatgtgcaaatatttgagtatttgttttacctttatataaggaa

SEQ ID NO: 283764 - DNA, 201 bp, Homo sapiens
agttaataaggaagatgaagttaattctgagctcaggttcagatgaggaatgtgcaatttgcctggattctttaacagttcctgtgataacacattgtgcrcatgtattttgtaaaccctgtatttgccaagtcattcagaatgagcaggttagttttttgctcagtacaggttcagtgtttgatagagtagtgtacctgt

SEQ ID NO: 283765 - DNA, 201 bp, Homo sapiens
aaggaggaaaagtgaataaatagttgcaaattaaaatctaagggataataatatttaaactatacttaaaacaattttctactacctataaaatgacttcrataaaacctatgtgtgtagtatgaatagtaattacaaaattaggttgagaatgtcttcctggcaatactattattgtttacattattatacagatgtgaa

SEQ ID NO: 283766 - DNA, 201 bp, Homo sapiens
ctctatgaggtatattatgtgagttggctactattttggcttctgaatgtttcttaaatttcaaatttaaattatgctttttgcctatggcagaaaatgakgagagactttccctactggcaagcgaaacttttccttataagatagattaacttgtcatattacaaaccttgctctgaaattaatttttcagccttttct

SEQ ID NO: 283767 - DNA, 201 bp, Homo sapiens
ttttcccctcagggcatgccatccattttaaagaattgtgttttggcagctctgtttgagatctgcagtcatccctctcagcatcttcctatctgacttasactgcaattggcagccatttctcatatattgtgccttattgttatagatctctcttggttttattagagttgcttttctgcttttcattcttgttttgga

SEQ ID NO: 283768 - DNA, 201 bp, Homo sapiens; identical to SEQ ID NO: 57945

SEQ ID NO: 283769 - DNA, 201 bp, Homo sapiens
taccttccctctttttttgatataaatttctccatggaagctcaagtcaccaagcatgcaccctgttcctgtttctgcacatgagaggtattgattttccmctcagggcatgccatccattttaaagaattgtgttttggcagctctgtttgagatctgcagtcatccctctcagcatcttcctatctgacttagactgca

SEQ ID NO: 283770 - DNA, 201 bp, Homo sapiens
agaagctcagttttggacacattgatcataggatgcccgtgaattttccaagtagagatatcaaataattagttggataggagagtcgagttcaaagtcasctatgtgtggatggtaattaaagccatgagatcaccaagggagtgagtaaagtgaaagagatctaactgtgaagatagcaatggctggtgaaataggagg

SEQ ID NO: 283771 - DNA, 201 bp, Homo sapiens
tgtttacaggccatccttgcatttttaaaactgctttattccattttctcaattttttctggcactctgtttctaaaaatcacccttctgattgtttatgkttctatttcttttcctttttttctttcaagtctgcccaactagttccttattactttacttcaatgtaaaatgtaaatgatacacttaaaatattgaact

SEQ ID NO: 283772 - DNA, 201 bp, Homo sapiens; identical to SEQ ID NO: 57959

SEQ ID NO: 283773 - DNA, 201 bp, Homo sapiens
ctgcaatctctgcctcccagactcaagcaattctcccaattcagcctcctgagtagctgggactgctggcgttcaccaccatacccagctaatttttgtatttttttttttttgtatttttttttaggttttggcatgttgtccaggctgatctggaactcctgggctcaagtgatccgtccgccttggcctctccaagtg

SEQ ID NO: 283774 - DNA, 201 bp, Homo sapiens
gctggatagtatgaacgagagaaaatagtcatgatatcagagatttattggaatgggggtatgtaacgcatatgtcaaggactttggcttttactttttaygacaggaaaccttaaagggttttgagccaggagagggacgtaatctgatttatatttttaaaagatcactctggctgctgtgctcagatttaggttattt

SEQ ID NO: 283775 - DNA, 201 bp, Homo sapiens
gtgacgcgcaagtattatctggcagttacatggtgccgcctgtgcagctgggcgccaccaccagcttcctgccctgtgcgattaaaaggccagcttcgggracagcagcctcctcaacgcaaagcgaccagccctgccaggcgtcggctgcagctggtccaaggttgacggtcccagggccgcattctccttccggtcacc

SEQ ID NO: 283776 - DNA, 201 bp, Homo sapiens
caatctctgcctcccagactcaagcaattctcccaattcagcctcctgagtagctgggactgctggcgttcaccaccatacccagctaatttttgtatttktttttttttgtatttttttttaggttttggcatgttgtccaggctgatctggaactcctgggctcaagtgatccgtccgccttggcctctccaagtgctg

SEQ ID NO: 283777 - DNA, 201 bp, Homo sapiens
ttgcttgcttctatttccaaaatcgtatggaaatctggaaataggaactgatgaaataggtttaacaagaagattaaggattggtagaaggtatgaaattytggtccaagcaagatcaggtttaatgtgagcccacagggaacagaatgaataagagacaagtgaaagcagaataggactgtgaaaggggaatcttcaaaa

SEQ ID NO: 283778 - DNA, 201 bp, Homo sapiens
agccttttctctaggaaatgatacacctgaagaactgagaaagaagttaataaggaagatgaagttaattctgagctcaggttcagatgaggaatgtgcartttgcctggattctttaacagttcctgtgataacacattgtgcacatgtattttgtaaaccctgtatttgccaagtcattcagaatgagcaggttagttt

SEQ ID NO: 283779 - DNA, 201 bp, Homo sapiens; identical to SEQ ID NO: 57950

SEQ ID NO: 283780 - DNA, 201 bp, Homo sapiens
gttcctgccctaggcagccacgagtctcatttcttttctttttttttgttttttttgagacggagtctcgctctgtttctcaggctggagcgcagtggcgsgatctcggctcattgcaagctccgcctcccaagttcatgccattctcctgcctcagcctcccaagtagctgggactacaggcgcctgccaccatgcccgg

SEQ ID NO: 283781 - DNA, 201 bp, Homo sapiens
ttcagttaggtattctatagtgaccaaaaatgataaaggtctaaaatattcatctctttcttacttggatgcccacttttcccttcttttttttttttttwaaacttccttatatttttatcacacaattctaggtagtcattcaagtatcagagcatcttagtcttattattattattcatatttcatatttcattagtc

SEQ ID NO: 283782 - DNA, 201 bp, Homo sapiens
ctggtctaaaactttttttgacagtttgattatgatgtgaccagggggggatctctttgagtttattttagttggagttgttgagcttcttatatgtgtaragtagtggtttccatcgaattgggaaggttttggctgttatttctttaaatattttttctgcccctttctcttttctccttatggtactcttatgtatgt

SEQ ID NO: 283783 - DNA, 201 bp, Homo sapiens
aaaattatacttaaaaatttttatttttttaaataattttttttttttttttttttttttttttaaaaaactgtcgttacccttttgcccaggctggtctmaaactttttttgacagtttgattatgatgtgaccagggggggatctctttgagtttattttagttggagttgttgagcttcttatatgtgtaaagtagtg

SEQ ID NO: 283784 - DNA, 201 bp, Homo sapiens
tacttaaaaatttttatttttttaaataattttttttttttttttttttttttttttaaaaaactgtcgttacccttttgcccaggctggtctaaaacttyttttgacagtttgattatgatgtgaccagggggggatctctttgagtttattttagttggagttgttgagcttcttatatgtgtaaagtagtggtttcca

SEQ ID NO: 283785 - DNA, 201 bp, Homo sapiens
tgggttcaagtgattctcatgccttagcctcccgagtagctggaattataggtgcgcatcaccatcaccaccatgcccagctaatttttgtatttttagtrgaggcagggtttcgccatgttggctaggctggtctcgaactcctgacctcaagtgatccacccgccttggcctcccaaagtgccgggattacaggcatga

SEQ ID NO: 283786 - DNA, 201 bp, Homo sapiens
tggagggccgagtaagacagtccttgtccccaagtggctcacagcttatctgtatgcacagacgtgcagataagtatttgcagaggcgctagtagagataygcgccacttgcaaggaaaacgcatcgcaaataagcgactgttcttaggagaatggaaactttttgcaatgctccagtagactccccttcacttttcattg

SEQ ID NO: 283787 - DNA, 201 bp, Homo sapiens
tgagaaaaagtctgatatggaatggacatccagttcaaaggtaaagtactcatgtgcaaatatttgagtatttgttttacctttatataaggaaatatacmcagtatatcaaaatcgtaattctgctttcattcctgtcattttagtgttctgttgttgaccactggctttttatttttagtggtgaatttgaggggaaat

SEQ ID NO: 283788 - DNA, 201 bp, Homo sapiens
tacttagaatttgagtgttgactattcggtgatggagttgacaggacagttgagaagtaaaagagttagtgattggaacaaaaatggggaacagaacttasgaaaataaggacaggatataaaaagattaaactatgttaggtattgaggggaaatttccatacatttgttttaataattttatttttgtagaatacttct

SEQ ID NO: 283789 - DNA, 201 bp, Homo sapiens
ctgtgtatccattaaataataacttcccattcctctccccccagcccctggcaactaccattctactttctttctctgaatttgactactctacaaaaccrtatagatatatcgtaatatatttaacccattaagttttttgctaataaaaacagtgccataatgagcattattatatataaatcttttcacatagatgca

SEQ ID NO: 283790 - DNA, 201 bp, Homo sapiens
aacaagaattgatacatctctttttttccagtactgagaaagaaatgtaaagattgtggaacctgtaaagcatttttctgtgttctgaattaccatattayctttttattttgggggcactcattactttatacaattacttatttatatacttttgattttaatattacagaatgtagtatcttacccatatttgtattc

SEQ ID NO: 283791 - DNA, 201 bp, Homo sapiens
tttctctgcacctacatttatagttatgtgtacatctccttaaaaacattcttttaaagataaatggaattatactttattctacaacatatttgtttccyttaaaactatacattggagactacctcataagtacatttagatgaacactttttttaaatagtggtaaaatacaaaatttaccattttgaagtatacagt

SEQ ID NO: 283792 - DNA, 201 bp, Homo sapiens
aaactgttttaaagaatgcaataaattgaagacagaaaagccaggatgaatcatcatgcaaagtagcaaaaactgaaaagtattacatgaaacaaacaaamaagacacaaaaatatagattatatgattttttcctaacaaaatgaagacttcttgactcagtgaaaacattgggagaacaaagtaattagggttaatctt

SEQ ID NO: 283793 - DNA, 201 bp, Homo sapiens
ctagtaaaaatattaccttttatataaaagaaagtaatgttgaattcaagtaattcttacaactgccattttctatatcattgctatgttttaatccgagrtagaacagttcagtgtattgaccagtgactcaacagagagctagactgctgcttgggtttgaatgctagttctgccacctgtggtgctttgggtaacata

SEQ ID NO: 283794 - DNA, 201 bp, Homo sapiens
aaactttttgaaaaataccttgctatcaaaatttcagtcttctagtaaaaatattaccttttatataaaagaaagtaatgttgaattcaagtaattcttamaactgccattttctatatcattgctatgttttaatccgaggtagaacagttcagtgtattgaccagtgactcaacagagagctagactgctgcttgggtt

SEQ ID NO: 283795 - DNA, 201 bp, Homo sapiens
agattttttttttaaacttgcttacaatgttataatttttggtttcttgctcttgcttctagctagtccagatcacatacttttgctccctcctttatccrttctacttaccacattatgtctggagttcagcatgttcagatgtctcttaaatggatgaaatccattaaaaggtttaataaaatgttagctatgagagat

SEQ ID NO: 283796 - DNA, 201 bp, Homo sapiens
atatttcttctgttgccttaaaatacttaaatatcagatggcctggttatataatttttggatcacccatttccttaagaatctatgttgtcattgtaccmctgtattttgtatagaatgtttctgtggggaagcctggttttttttttttttttttttttccctctgaagttcagcaacttctttgttgactttcccctg

SEQ ID NO: 283797 - DNA, 201 bp, Homo sapiens
tttgtatttttagtagaggcagggtttcgccatgttggctaggctggtctcgaactcctgacctcaagtgatccacccgccttggcctcccaaagtgccgrgattacaggcatgagctactgcacctggcctggaatatttttaattataccccaggcatcatgtgttttctcccaataaaaacaagtcttctccttacat

SEQ ID NO: 283798 - DNA, 201 bp, Homo sapiens
cagaaatgtttgttgccataatactaccagtactaatactagcaacagattcatgtatagcacttaatatagtccaggcactattttaaatactttacatrtattaaattaaataacagtagttgtatgaggtaggtacttttacaatgccactgttagaactgaggaagctcaagacataggttaagcaacctgtccaag

SEQ ID NO: 283799 - DNA, 201 bp, Homo sapiens
gtgttagtccattcttgcattgctataaagaaataactgaggctggataatttaagagttttaattggctcatgatactgcaggctttacaggaagtatcrtgctggcatctgcttctggtgaggccacaggaagcttacacagcctcaggaagcttacactcttggcagaaggtgatggggacccagcatcacattgcca

SEQ ID NO: 283800 - DNA, 201 bp, Homo sapiens
tgattttctagaaagtaattttgaagtaaaaagagataggaatatgttggtaccagtttgggactagatcttactatctttgtagaacacagtttttcctrtagtttttagttaaaatagtggtataaagatgtgttcctcagttttcttttttttttttttgagatggagtcttgctctgtcacccaggctggagtgcag

SEQ ID NO: 283801 - DNA, 201 bp, Homo sapiens
gttatgatgaaataatgactctcttggaatccctgtgaatataaggaccactcaccgttcttgccacttccaagttatctgtttatctctcatcgccattyttcttatgtcagaggaggaagagatcctactctttttaagaccagtatttagtctctacattggattctctcttttcccacattgctcatctgttctttt

SEQ ID NO: 283802 - DNA, 201 bp, Homo sapiens; identical to SEQ ID NO: 57955

SEQ ID NO: 283803 - DNA, 201 bp, Homo sapiens
taaatcaagaaaaaaccaaaaaagttaatttttcagaaaacattatttagtataatagttttgaaattgtaattgctgtaacattttaatcaaactagtayaaattgtacttgatctttaaatataaaacaaagaatgattaagggaaagaatgttttactcctggttctgggatgtgaaatattgataacatagagaaaa

SEQ ID NO: 283804 - DNA, 201 bp, Homo sapiens
catgtaccaccatacctggctaatttttctatttttattttgtagaaatggggtcttgctatgtttcccaggctggtctcaaattcctggcctcaagagawcctcacacttcagcctcctaaagtgctgggattacaagtgtgagccaccatgcccagcccctttgaacatatttaaaataactgacttaaattctttttc

SEQ ID NO: 283805 - DNA, 201 bp, Homo sapiens
aacagttctttgggaatgaatctctgaaagaactgtaactccattctctttttttctggtgactgccaggctttacctaggatcccaacaagctattattwttatttatttatttatttatttatttatttatttatttatttattttgagatgaagtctcgctctgtcaccaggctggagtgcaggggcgctatcttggc

SEQ ID NO: 283806 - DNA, 201 bp, Homo sapiens
aatgaatctctgaaagaactgtaactccattctctttttttctggtgactgccaggctttacctaggatcccaacaagctattatttttatttatttattwatttatttatttatttatttatttatttattttgagatgaagtctcgctctgtcaccaggctggagtgcaggggcgctatcttggctcactgcaacctct

SEQ ID NO: 283807 - DNA, 201 bp, Homo sapiens
agctattatttttatttatttatttatttatttatttatttatttatttatttattttgagatgaagtctcgctctgtcaccaggctggagtgcaggggcrctatcttggctcactgcaacctctgcctgccgggttcaagtggttctcctgcctcagcctcccgagtagctaggactacaggcgcgtgccaccacaccca

SEQ ID NO: 283808 - DNA, 201 bp, Homo sapiens
ttggcaagagtttgttcaaataatgtggaattacttgtttttttagtgatttagtatttagcttttaaaatacctctaaaatacaaggcttttaatgcagtttgttatgcacgttttatttatttatttgtgtatatattttgagacagagtcttgctctgtcacccaggctagagtacagtggccacgatcagtggctga

SEQ ID NO: 283809 - DNA, 201 bp, Homo sapiens
gaactcctacctcaggtgatccacctgcttcggcctcccaaagtgctgggattacaggcctgagccactgtgcccagccaagaacattcttaaggaaaacttttttttttaactgtatgtggcagttaagaatatgatgactagtactaatataccttagtgccaactgctttgttttatgctgaggcacttttttgacca

SEQ ID NO: 283810 - DNA, 201 bp, Homo sapiens
catacgaaatccaaatgctcagcagacaaaagctgtacttgacttagaatcagaaagaagatgggttttgacaggtaatcatagcattaaacttactaaamccttaaatctctaaaatatatcattatgtaagttagtaaagtaactttgtaaacttaaagtgggtgtaaattctgccccaaaattaatcatataaataat

SEQ ID NO: 283811 - DNA, 201 bp, Homo sapiens
agtccattcactacactatctgtaccaaaatgttaataataacttatgtcctagtgatgagaataagggtgacttttcttgaaaatttgtgtgtgtgtgtrtatatatatacatatatatatgtatataatataaacatacatttatatttggtttctaagaattaaaaattagtttagtgagaaaaataaatgttactag

SEQ ID NO: 283812 - DNA, 201 bp, Homo sapiens
taataaaatgttagctatgagagatacagattttagcatacatttaaaaatttttaggcatatttatatttgttcttctgttaagtgttgctcatacttcsttctttcttatatagccacatgctaaatgccctttatgcagaaatgatatacatgaagataatttattagaatgtcctccagaagaattagcacgtgaca

SEQ ID NO: 283813 - DNA, 201 bp, Homo sapiens
aacgtttttctggtgaactgggtttcacaatctgaccatttatctttttaaaacatttttaagggtaaaactcttacagccattgcagtaatccttaccarcttccatgatggcagacctcttcctattgaaagagttaaaaagaatctactgaagaaggtaaagtagtagtaagtgcgctttatgtgaaacctccagttt

SEQ ID NO: 283814 - DNA, 201 bp, Homo sapiens; identical to SEQ ID NO: 57952

SEQ ID NO: 283815 - DNA, 201 bp, Homo sapiens
ggatcttgtatatagtctccaacattttgaatctagagcctgtccttttaacactacccatcagaaattttttttttccagattgcttttctgttctgaarcattgacattggaatggaacctcttgattaattgtttatttgcagcctggatatgttttcttcctagtttgagcttcaaacttcttgttatgatgaaata

SEQ ID NO: 283816 - DNA, 201 bp, Homo sapiens
acacattgtgcacatgtattttgtaaaccctgtatttgccaagtcattcagaatgagcaggttagttttttgctcagtacaggttcagtgtttgatagagyagtgtacctgtctttaatataataaaagatagtatatggagttttgcacttggatttaataatatacctttgatagttaattattccagtattttaatag

SEQ ID NO: 283817 - DNA, 201 bp, Homo sapiens
atctcactctgtccagattcaagcgattctcctgcctcagcctccctagcagctgggattacaggcacatgccaccacacccagctaattttttgtatttytagtagagacagggcattaccatgttgttcaggctggtgtcgaactcctgacctcaaaggatccgcctccctgggcctcccaaagtgctggattacaggc

SEQ ID NO: 283818 - DNA, 201 bp, Homo sapiens
gcccaggtctttgtccccacagatgctctgctccttccagatttgagcctccatgtgccaccaggtggtgccagtttcctgccagactgtgggcagctgcrgggtgaaggggagggcctctgcgggactggatcagaaccactgccagagctgctattcccttggacctgccggggctgtggacaagagctggaggagggt

SEQ ID NO: 283819 - DNA, 201 bp, Homo sapiens
ctactagaggtggtggtgcggcagggtgggggtgggggttgtgtggcagaggaacagctgaaaaactacctatttgatactatacccagcacctgggaaaygggttcagtcataccccaaacctcagcatcacacagtatacctttctaacaaacttacacatgtattctgtgattctaaaataaacattgaaaaataaaa

SEQ ID NO: 283820 - DNA, 201 bp, Homo sapiens
tggcccggcacatgaagacacacagtggtgagaagcccttccgctgcgcccgctgtccttatgcctctgctcatctggataacctgaaacggcaccagcgygtccatacaggagagaagccctacaagtgccccctctgcccttatgcctgtggcaatctggccaacctcaagcgtcatggtcgcatccactctggtgaca

SEQ ID NO: 283821 - DNA, 201 bp, Homo sapiens
atttggcatcgagggccagctctgaaaagagaaggggcaatcctctgtgcagccagcccaggggacaaggaaaggtaggatacgaggcccctggccaagaraaaaggggtaggtaggaaagaagaaggaaaagacccctccgcccctagcatgggggacacaggcacagggcaagtttctgtaaattcctctggggtagag

SEQ ID NO: 283822 - DNA, 201 bp, Homo sapiens
atactaaatgctaatttggcatcgagggccagctctgaaaagagaaggggcaatcctctgtgcagccagcccaggggacaaggaaaggtaggatacgaggyccctggccaagagaaaaggggtaggtaggaaagaagaaggaaaagacccctccgcccctagcatgggggacacaggcacagggcaagtttctgtaaattc

SEQ ID NO: 283823 - DNA, 201 bp, Homo sapiens
caaaatactaaatgctaatttggcatcgagggccagctctgaaaagagaaggggcaatcctctgtgcagccagcccaggggacaaggaaaggtaggatacsaggcccctggccaagagaaaaggggtaggtaggaaagaagaaggaaaagacccctccgcccctagcatgggggacacaggcacagggcaagtttctgtaa

SEQ ID NO: 283824 - DNA, 201 bp, Homo sapiens
ccagtgacaaaggctttgcctgtagcctctgcccctttgccactcactatcccaaccacctggcccggcacatgaagacacacagtggtgagaagcccttycgctgcgcccgctgtccttatgcctctgctcatctggataacctgaaacggcaccagcgcgtccatacaggagagaagccctacaagtgccccctctgcc

SEQ ID NO: 283825 - DNA, 201 bp, Homo sapiens
gcagccatggtcccttagactttgtgcaaaatactaaatgctaatttggcatcgagggccagctctgaaaagagaaggggcaatcctctgtgcagccagcmcaggggacaaggaaaggtaggatacgaggcccctggccaagagaaaaggggtaggtaggaaagaagaaggaaaagacccctccgcccctagcatggggga

SEQ ID NO: 283826 - DNA, 201 bp, Homo sapiens
attcataagagatattggtctgtagtttcttgtgatgtctttgtctggttttagaatcagggtaatgctggcctcatagaatgaattgggaagtgttgtcttcttttctatgtgatgggagagtttgtgaatcattggtattaatttttctgtaaatgtttggtagaattcacaaataaaggcatctgagcctgggctctt

SEQ ID NO: 283827 - DNA, 201 bp, Homo sapiens
catgatggtgcatgcatgtaatctcagctaattggaaggctgaggagggagaatcacttgaaccacggaggcagaggttgcagtgagcctagatcgtgccmttgtactccagcctgggcaacaagagcaaaactctgtttcaagggaaacaaagttttcataacataaaaattaccatcttagtcatttcttttctttttt

SEQ ID NO: 283828 - DNA, 201 bp, Homo sapiens
aaaatttttttgagacggagtcctgctctgtcgcccaggctggagtgcagtggcaccatctctgctcactgcaacctccacctcccaggttcaagtgattstcctgcctcggcctcccacgtagctgggattacaggtgctcgccacaacacccggctaatttttgtatttttaggtagagactgggtttcaccatgttgg

SEQ ID NO: 283829 - DNA, 201 bp, Homo sapiens
gaaaaaacgcccatttctaatcatcagacaaatgcaaattagaaccacaaagagataccatctcacaccagtcagaacagcttttgttaaaatgtcaaaaratgagaaacgttggtgaggctgcagaggaaagcagacacttgtacactgttggtgaaggtgtaaattaatttagcgtaggcacagtcagtttggagattt

SEQ ID NO: 283830 - DNA, 201 bp, Homo sapiens
gtggcacgatctcggctcactgcaacctccgcctcctggtccgcctcccgggttcaagtgattcttctgccttagcctcccaagtagctgggactacaggygcgtgccaccactcctggctaatttttttgtatttttagtagagatggggtttcaccatgttggccaggatggtctcaatctcttgacctagagatccgc

SEQ ID NO: 283831 - DNA, 201 bp, Homo sapiens
gggcgtggtggcaggtgcccactgtaatttcagccactcaggagactgaggcaggagaattgcttgaacctggaaagtggaggatatggtgagcctagatygcgccactctactccagcctgggagactccatctcaaaaaaaaaagaaaacaagatgctgaaatgaagtaattaccacagtcaatgtgatcctataactt

SEQ ID NO: 283832 - DNA, 201 bp, Homo sapiens
aagaactttgccaaatactttcttcaccaatctcatgaggagagggaacatgctgagaaattgatgaagctgtagaaccaacgaggtggccgaatcttccytcaggatatcaagaaaccagactgtgcggggagaatgcgatgggagagcgggctgaatgcgatggattacatttggaaaaaattgtgcattttgcattac

SEQ ID NO: 283833 - DNA, 201 bp, Homo sapiens
aggtcgggagtttgagaccagcctgggcaacatggtgaaaccccgtgtctactaaaaatataaaaactagccagtcatggtggcacacacctgtaatcccrgctacttgggaggctgaggcatgagaatcacttgaacctgggctgcggaggttgtagtaagctgagatcatgccactgtactccagcctgggtgacaggg

SEQ ID NO: 283834 - DNA, 201 bp, Homo sapiens
ctctactccagcctgggagactccatctcaaaaaaaaaagaaaacaagatgctgaaatgaagtaattaccacagtcaatgtgatcctataactttgttttsttttagagatggggtctccctctgtcacccaggctggagtgcagtggtgcatcatagctttctgcagcctccacctcctgggctcaggtggtcctcttgc

SEQ ID NO: 283835 - DNA, 201 bp, Homo sapiens
gaatcacttgaacctgggctgcggaggttgtagtaagctgagatcatgccactgtactccagcctgggtgacagggagacattctctctctcaaaaaaaamaaaaaaaaaaaaaaaacaaaacaaaccaacaaaacaaagtaatccaggaacaacaacatgatgaaggactgcatgcaggactcagtgatggatggtggaa

SEQ ID NO: 283836 - DNA, 201 bp, Homo sapiens
cacttgaacctgggctgcggaggttgtagtaagctgagatcatgccactgtactccagcctgggtgacagggagacattctctctctcaaaaaaaaaaaamaaaaaaaaaaaacaaaacaaaccaacaaaacaaagtaatccaggaacaacaacatgatgaaggactgcatgcaggactcagtgatggatggtggaagaca

SEQ ID NO: 283837 - DNA, 201 bp, Homo sapiens
tgaacctgggctgcggaggttgtagtaagctgagatcatgccactgtactccagcctgggtgacagggagacattctctctctcaaaaaaaaaaaaaaaamaaaaaaaacaaaacaaaccaacaaaacaaagtaatccaggaacaacaacatgatgaaggactgcatgcaggactcagtgatggatggtggaagacagcca

SEQ ID NO: 283838 - DNA, 201 bp, Homo sapiens
tgggcagatcacgaggtccaggagatcgagaccatcctggccaacatggtgaaaccccgtctctactaaaaatacaaaaattagctgggcgtggcggcgcrtgcctgttatcccagctactcaggaggctgaggcaggagaattgcttgaacccgagaggcagaggttgtgatgagccgagatcgcgccactgcactccac

SEQ ID NO: 283839 - DNA, 201 bp, Homo sapiens
gaagtgacaaaactgctttctatggagagttaggaattttttttttttttgaaacggagtctcgcattgtcacccgggctggagtgtagtggcttgatctyggctcactgaaacttccgcctcttgggttcaagtgattctcctgcctcagccttccaaatagctgggattacaggagtctgccaccaggccagctaattt

SEQ ID NO: 283840 - DNA, 201 bp, Homo sapiens
tctttctctctgtcccagactacctagtagcaaactttaatcttcctagtgcttgtgcctttcaaagcactttaatatctactacctctgttcttatattyctgtgaaataactaagatgggtagaggtatcattatacataggtatcattatacccatcttatgtaacatttgaatgatgaaaaagacctgtgagtgccg

SEQ ID NO: 283841 - DNA, 201 bp, Homo sapiens
cagtgttgcccaggctgaggaattttatttatgtttattttatttatttatttatttatttatttatttatttatttatttatttattgagatggagtctyacactgtcacccaggctggagtgcagttgcgcggtctcagctactgcaagctccgcctcccgggttcatgccattctcctgcctcagcctcccgcgtagc

SEQ ID NO: 283842 - DNA, 201 bp, Homo sapiens
ccatgctgtgatgggggaagcaggggcagtgagagggaaccagaggtaggcagcagtcaggctgagtttaatgatggggaactgggccagaccaaacacakacctctgcccatccccttggcctttggcccatggctccaagaggccagaagcggcccagagggagatatggttcctccccaaggcaggcagccatggtcc

SEQ ID NO: 283843 - DNA, 201 bp, Homo sapiens
ctccacacagactaacgtaggcactataaggaccagcccaaccccatgggcgggggggcccatatggaccaggggaccttgccttgactgaggcacttcaygagctcagtgagaagggccctgtattcacctccactgcccccaggggctgtggacaaaccggctgggggactgcccagcctcccacctgtttatttaact

SEQ ID NO: 283844 - DNA, 201 bp, Homo sapiens; identical to SEQ ID NO: 57993

SEQ ID NO: 283845 - DNA, 201 bp, Homo sapiens; identical to SEQ ID NO: 57994

SEQ ID NO: 283846 - DNA, 201 bp, Homo sapiens
cctgtgagggcaggcagatgctgaagttgcagagaggtcctgtttggttgccgtctgtagttttcaactctctttccttctcctattttgacatcatcccscaagacccactgtattctaagctttagtcttgaattcattgagctccatcatcacaggtaccatttgcctttttacctcttcctttgttggtactataac

SEQ ID NO: 283847 - DNA, 201 bp, Homo sapiens
tattgctgtgtagaagctggcttattagtggtcaaggggtcatctagaattgactataaagatagtattgagcagaaaattcttaaaatacctgcatattwgtttcagtcattaaattaatggaaaaaatataaaaagaaatatcacaagtatgctatggggttctaccttagggcattgaaggttgaaaaacatttattt

SEQ ID NO: 283848 - DNA, 201 bp, Homo sapiens
acctagccaatctcataacattttatgactagcaaacttagtagttctgattcaggcataaatcagttggtggggttatacaaggttgggtgagtttttcyagatttctaagagaccatgttgaaatacttggctctgtctcagtaagggatagagagaagcaaaggtgtgggtaaaggttatgagcagacatgtaaaggg

SEQ ID NO: 283849 - DNA, 201 bp, Homo sapiens
tgagcttaagatgtttaatgacattttgtagacagagtatgatttcagtgtagttgtttttgtttctttctagatctagttcagagatgaagtatatcaamttttttttcctttttgacccaatgctagcagaaaaacaacaccttttaatcatatttagtatttgaaaatgtgtatacaggttcctttttattttattta

SEQ ID NO: 283850 - DNA, 201 bp, Homo sapiens
aaattagctgggcatggtagtgcaagcctgtaatcccagctactcaggaggctgaggcaggagaaccgcttgaatccgggaggcggaggttgtagtgagcygagatcgtgccattacactccagcctgggctacaagagtgaaactccgtctcaaaaaaaaaaaaacaaaaaagacttaaaataaaaagaccagtgagtga

SEQ ID NO: 283851 - DNA, 201 bp, Homo sapiens
tttgcctgtaagtttctttttaaaaaaatcacacatacattgttgtagtagatttaagaataagtattttgctgacccaaggttcttttgcttctttctakatcagtgccttgcaggttttattttacagagcttaatagaatcagaaatctctttaaaactccagtctcatatccagttatcactcaccatctctgtgtt

SEQ ID NO: 283852 - DNA, 201 bp, Homo sapiens
agcaggatggttcaggctccagtgggcactttttaaaattctctccttctgttcagatagacagagctcaggcagatcaccaagtctgttgcctgtgtaaycaggaaagagatgctagttttcttttaggcactcccatttgtttctgttggaaccttcctcacttagttgatggaagggaagcaaaagacccagaactcc

SEQ ID NO: 283853 - DNA, 201 bp, Homo sapiens
atattccatggtatggatttgtcacattttgtttatccattcattagttgatagacattttggatttccactttttttttttttttttgctattataaatmgtgatactatgtacaaatttttgtgtggaaatatgtcctcatatctcttggttatataccaaagagtggaagtgctgggtcatatggtaactacgtgttt

SEQ ID NO: 283854 - DNA, 201 bp, Homo sapiens; identical to SEQ ID NO: 57992

SEQ ID NO: 283855 - DNA, 201 bp, Homo sapiens
caaaagagaagagggaaaactgcggtagggaggaaagggaggaagacgggttaaccgtggctttgtgaagagcattctgaagtctaggcaaaagggccagrgaaatactctgtctggtattgagggtttctccacctaccgggtgggcttcaggtaacagcgaaatactgtctcccttgggaattgtttcagatccctcgc

SEQ ID NO: 283856 - DNA, 201 bp, Homo sapiens
cttcttatgtctatttcaccaggagactctctgggggccaggcctgggcttccctatgggctgagcgacgatgagtctgggggcggccgggcactaagtgyggagagtgaagttgaggagccagccaggggtccaggggaggccaggggtgagaggccaggcccagcctgccagctgtgtggggggccgacaggtgagggg

SEQ ID NO: 283857 - DNA, 201 bp, Homo sapiens
ttggttatataccaaagagtggaagtgctgggtcatatggtaactacgtgtttaacattttgagaaactgctaaactgttttccaaagttgctgtaccgtygtacattcctgccagcaatatatgaggatgccagttccttcacatgttcactacacttatccaccttttttataataactaatggtgggtgtgagatggt

SEQ ID NO: 283858 - DNA, 201 bp, Homo sapiens
atttgtcaatttctgcacaaaaggcacctgggtttctataggggttatgcagaatctgtagatcaactgggggagtattacaggcatgagccaccgtgccyggctgactgagtttttcatagatgtactctatcaggtttaggaagttcccttttattcctaggttgttgagtctattttatattacttttttagagacag

SEQ ID NO: 283859 - DNA, 201 bp, Homo sapiens
gcctcccaaagtgctgggattacaggcgtgagccactgcgcccggcctttttttaaaattttttttctttctcccttctagtcaaagcatgaaacctttaygtcactggaaatatactgtagtgactttgaggggaataggatggtgaggggataatcttcatactctttctcctttttcacctctttccatgatccccct

SEQ ID NO: 283860 - DNA, 201 bp, Homo sapiens
gctaatttttgtatttttaggtagagactgggtttcaccatgttggccaggctggtctcgaactcctgacctcaaattatccacctgccttggcctcccamagtgctgggattacaggcgtgagccactgtgcccagcctccatgttgtttttcacaacacctgtatcatttacatttccaccaacagtacacaagaattt

SEQ ID NO: 283861 - DNA, 201 bp, Homo sapiens
ttgggaggccgaggcaggtggatcacgaggtcaggagattgagaccatcctggctaacacggtgaaaccccgtctctgctaaaaatacaaaaatcagccgrgcgtcttggcaggcacctgtagtcccaggtactcaggagttttgagacgggagaatggcgtgaacccggaaggcggagcttgaagtgagccgagattgcg

SEQ ID NO: 283862 - DNA, 201 bp, Homo sapiens
gccttttactaacttcggaaaacttgaattatgtcagtccctaggttttcctttttattatgcttcgttttctttctctcttaggatttctctaaaacttaatcagtaattctcatttgcctgtaattgtagtttatagtttctttgattgtaagtcatttcatcaatttttttcatcacaacctacctacaaagggcttt

SEQ ID NO: 283863 - DNA, 201 bp, Homo sapiens
ccttttactaacttcggaaaacttgaattatgtcagtccctaggttttcctttttattatgcttcgttttctttctctcttaggatttctctaaaacttaatcagtaattctcatttgcctgtaattgtagtttatagtttctttgattgtaagtcatttcatcaatttttttcatcacaacctacctacaaagggctttt

SEQ ID NO: 283864 - DNA, 201 bp, Homo sapiens
gcagatcacttgagctcaggagtttgagaagagcctgggcaacatggtgaagccccgtctctactgaaaatacaaaaattggctgggcgtggtggcaggtkcccactgtaatttcagccactcaggagactgaggcaggagaattgcttgaacctggaaagtggaggatatggtgagcctagatcgcgccactctactcca

SEQ ID NO: 283865 - DNA, 201 bp, Homo sapiens
cttttactaacttcggaaaacttgaattatgtcagtccctaggttttcctttttattatgcttcgttttctttctctcttaggatttctctaaaacttaatcagtaattctcatttgcctgtaattgtagtttatagtttctttgattgtaagtcatttcatcaatttttttcatcacaacctacctacaaagggcttttc

SEQ ID NO: 283866 - DNA, 201 bp, Homo sapiens
gagggtgtctggtctgcacagccagggttcactcttttaatctgagctaagtcggcaatctgggagcattatcagtaattgctgacagacgctaaaccccractccaaagttccaccttctgtcatttccctgacttagccttatgccttatggactagcaggtgggccgttgtgtgatacctcttgcccattcctctcct

SEQ ID NO: 283867 - DNA, 201 bp, Homo sapiens
tggatcagaacttccccaaacagtgtccttcaaatagggttcaggggtgctaagatatttatcccctcaacccttggggttcactccagtatggcatataratattgtatcactttctatgtgtggggagcagtgctccaggtgaccttccttcctttccttctaggggaggaagttgccttgtactgtgccaaatatctt

SEQ ID NO: 283868 - DNA, 201 bp, Homo sapiens
gggtgacagagcgagacgctgtctcaaaaaataaatgaataggccaggcatggtggctcatgcctgtaatcctaacactttgggaggctgcggcgggcggrttgcctgagcttaggagttcgagaccagcctggacaacatgaagaaaccccgtctttattaaaatacaaaaaattagctgaatgtggtggtgcgtgccta

SEQ ID NO: 283869 - DNA, 201 bp, Homo sapiens
ccaagttctttgaggacagtgaggatgagtcagatgaggcggaggaagaagaggaagacagtgaggtaagggcctgtgagggcaggcagatgctgaagttkcagagaggtcctgtttggttgccgtctgtagttttcaactctctttccttctcctattttgacatcatcccccaagacccactgtattctaagctttagt

SEQ ID NO: 283870 - DNA, 201 bp, Homo sapiens
ctttgtccccacagatgctctgctccttccagatttgagcctccatgtgccaccaggtggtgccagtttcctgccagactgtgggcagctgcggggtgaargggagggcctctgcgggactggatcagaaccactgccagagctgctattcccttggacctgccggggctgtggacaagagctggaggagggtgagggtag

SEQ ID NO: 283871 - DNA, 201 bp, Homo sapiens
tgtgtgacttcattgagacacattacctgaatgaacaagtgaaggccatcaaagaattgggtgaccacgtgaccaacatgcacgagatgggagcgcccgawtctggcgtggcagaatacctctttgacaagcacaccctgggagacagtgataatgaaagctaagcctcaggctaatttccccatagccatagggtgactt

SEQ ID NO: 283872 - DNA, 201 bp, Homo sapiens
ggcaggtgcccactgtaatttcagccactcaggagactgaggcaggagaattgcttgaacctggaaagtggaggatatggtgagcctagatcgcgccactstactccagcctgggagactccatctcaaaaaaaaaagaaaacaagatgctgaaatgaagtaattaccacagtcaatgtgatcctataactttgttttctt

SEQ ID NO: 283873 - DNA, 201 bp, Homo sapiens
ttttactaacttcggaaaacttgaattatgtcagtccctaggttttcctttttattatgcttcgttttctttctctcttaggatttctctaaaacttaatcagtaattctcatttgcctgtaattgtagtttatagtttctttgattgtaagtcatttcatcaatttttttcatcacaacctacctacaaagggcttttct

SEQ ID NO: 283874 - DNA, 201 bp, Homo sapiens
gcaggtgcccactgtaatttcagccactcaggagactgaggcaggagaattgcttgaacctggaaagtggaggatatggtgagcctagatcgcgccactcyactccagcctgggagactccatctcaaaaaaaaaagaaaacaagatgctgaaatgaagtaattaccacagtcaatgtgatcctataactttgttttcttt

SEQ ID NO: 283875 - DNA, 201 bp, Homo sapiens
tattattatttttaatagttcctattctaatgggtatgaggtagtgaggtgggtggttgtggtgtttttatgaatgtttaattggaaatgggtggccattktgtgcaggaaaaacctcctaaattgtgtcaaactcctggaaaatgaaatatcattccagttgcaagaatatctttttttttttttttttttttttaagac

SEQ ID NO: 283876 - DNA, 201 bp, Homo sapiens
tctggtcttgaacttctggcctcaagtgatctgcccgcctcagcctcccaaagtgctggaattacaggcatgagccactgtgcccggcctttttatttttwaaattatttatgtatttattttgagacaggatctcactcttgcccatgcttgagtggtaaggagtatgggatttcttgtgccggttccttcacatcctca

SEQ ID NO: 283877 - DNA, 201 bp, Homo sapiens
gagcttaagatgtttaatgacattttgtagacagagtatgatttcagtgtagttgtttttgtttctttctagatctagttcagagatgaagtatatcaacttttttttcctttttgacccaatgctagcagaaaaacaacaccttttaatcatatttagtatttgaaaatgtgtatacaggttcctttttattttatttat

SEQ ID NO: 283878 - DNA, 201 bp, Homo sapiens
agcttaagatgtttaatgacattttgtagacagagtatgatttcagtgtagttgtttttgtttctttctagatctagttcagagatgaagtatatcaacttttttttcctttttgacccaatgctagcagaaaaacaacaccttttaatcatatttagtatttgaaaatgtgtatacaggttcctttttattttatttatt

SEQ ID NO: 283879 - DNA, 201 bp, Homo sapiens
acaataaaaaatgagacgtcagaggggaagtatagtaactagtgttgttttgattaagaaggggatgaaacacaaaaaccaaaagaagtctgtggaggagraggagctagggcatgttcttctgagacttgagcgagaggaaccttgggagtgggaggttgtggggaagttagaggctgcaagggctgttgaggtagtgag

SEQ ID NO: 283880 - DNA, 201 bp, Homo sapiens
tataattcagtgggtttaagggtataattcattcattttaagggtataattcagtggcttttagtatattttcttttttttcttctttttttcttttttcragacagggtcttgctctgttacccaggctggagtgcagtgacgcagcctcagctcactgcaacctccacctcccaggttcaagcgaattctcttgcctca

SEQ ID NO: 283881 - DNA, 201 bp, Homo sapiens
ttcttttttcgagacagggtcttgctctgttacccaggctggagtgcagtgacgcagcctcagctcactgcaacctccacctcccaggttcaagcgaattytcttgcctcagcatcctgagtagctggaactacaggctcacgccaccacacccagctaatttttatattttcagtagaaacagggtttcaccatgttgcc

SEQ ID NO: 283882 - DNA, 201 bp, Homo sapiens
ctcaggagactgaggcaggagaattgcttgaacctggaaagtggaggatatggtgagcctagatcgcgccactctactccagcctgggagactccatctcaaaaaaaaaagaaaacaagatgctgaaatgaagtaattaccacagtcaatgtgatcctataactttgttttcttttagagatggggtctccctctgtcacc

SEQ ID NO: 283883 - DNA, 201 bp, Homo sapiens
aattttttatttttggggacagggtctccctctgtcgcccaggctggagtgcagtgatgcgatctcagctcactgcaacctccaccttctgggttaaagcrattctcctgcctcagcctcccgagtagctgggactacaggtacccaccatcacacccggctaaattttttgtgtgtattttagtagagacgagatttcgc

SEQ ID NO: 283884 - DNA, 201 bp, Homo sapiens
agagttctttatgtgttttggatacaagtttgttagatatatgatttgcaaatcttttctccaatttttgtggacttttgctttctttttttgttttgttkttgttgttgttgttgttgttgttgttttggtcgggggacagtcttgctctgaccacccaggctggaatggagtggcgcgatcttggttcactgcaacctc

SEQ ID NO: 283885 - DNA, 201 bp, Homo sapiens
gtgtgtggggaaggggagcaatgagtcttgaaaagccacaaggcaggtgtgaatcccctaattttgattttgagacaggggatccccctgatactttaggrtggaagtaatagtcatggggatttattctgcaaggggaatgagatggtaagcctttggggttgaattatctaaaaacaagggagagggagtgtgctgctg

SEQ ID NO: 283886 - DNA, 201 bp, Homo sapiens
atattcataagagatattggtctgtagtttcttgtgatgtctttgtctggttttagaatcagggtaatgctggcctcatagaatgaattgggaagtgttgtcttcttttctatgtgatgggagagtttgtgaatcattggtattaatttttctgtaaatgtttggtagaattcacaaataaaggcatctgagcctgggctc

SEQ ID NO: 283887 - DNA, 201 bp, Homo sapiens
ccacgcagggccccccactcctccctgcccgacctgtggcttccgctgctgtactccacgaccagcccggcctcccagtcccacagagcaggagggggcgrtgccccggcgacctgaaggtaagacacaccagggaccaaagatcttgggacatgggtggctgaccctaggaatgcttggattggattcatagcccaggtc

SEQ ID NO: 283888 - DNA, 201 bp, Homo sapiens
tattcataagagatattggtctgtagtttcttgtgatgtctttgtctggttttagaatcagggtaatgctggcctcatagaatgaattgggaagtgttgtcttcttttctatgtgatgggagagtttgtgaatcattggtattaatttttctgtaaatgtttggtagaattcacaaataaaggcatctgagcctgggctct

SEQ ID NO: 283889 - DNA, 201 bp, Homo sapiens
ccttaaagcagtcttgaagagtagatgctgtatgtctgtcttgcagatgaacttagcctaagagggaataagtaacttgtgaaagatctcataggtaataygtggcaaaattcatgctctttaaacaatgtcacattccattcttaggaaaaaacaaagtccaaaaagaaaaaaaaaaagaaagaaaaaaaagaaggcggg

SEQ ID NO: 283890 - DNA, 201 bp, Homo sapiens
gtgaaacttggggccacaagtttgagaccagcctgggcaacatagcaagatcttgtctctacaaaaaaaaatgtttaaagaatttttttaaattagcaccygtagctccagcttctcagaagattgaggtgggaagatcacttgagctcaggagttcaagactgcagtggactattataactccactgcactccatcctag

SEQ ID NO: 283891 - DNA, 201 bp, Homo sapiens
gtatatttagtagagacgagggtttcactatgttggccaggctggtctcgaactcctgatctcgtgatccacccgcctcagcatcccaaagtgctgggatwacaggcgtgagccactgcacctggcccaccttgccttttaaaagacaaaagtatggccaggcttagtggctcacgcctgtaatcccaacactttggaagg

SEQ ID NO: 283892 - DNA, 201 bp, Homo sapiens
cctctgctccgtgcgggcgcggcgaatggcaggtcccgaggtcgcagcttccactggcgcgggttgagttccctgttgcccttggtctcggggtcgctgtmggcgctgaggctgcaggtgggtttggggagcccggggggccgccgcgacgaggatcacggcgacggtggcggggagggttctaggcaagccctcggtgct

SEQ ID NO: 283893 - DNA, 201 bp, Homo sapiens
cactgcactccatcctaggtgacagagcgagactatttaaaaaaaaaaaaaagtttcatataagattaccttcaggctatgtgtataaggtatatataaarcacaaatgaattttatgttttaattcggtcctatccccaagatagctcattatgtgcatgcaaatatttcaaaatcaaaaaatcgaaaacacttcgggtc

SEQ ID NO: 283894 - DNA, 201 bp, Homo sapiens
ctatagttctattcctcctcatctaccttctggaaactcagcatttaaaagcttttaagtaccataaacatcaattcaggaaggggtttcttaggcatggsctataatagcagccagagctgtagagtgaagctgaatttgaactccagctctgtacttaatagctatttggattaagctgttttcttatctgtaaaatgt

SEQ ID NO: 283895 - DNA, 201 bp, Homo sapiens
cagtgagccaagatcgtgccactgcactccagcctgggctacaaagccagacttcgtctcaaaaaaaaaaaaaaaaaaaagaaaatgaaatattgcaatcwttcttctgacttccccttttatctcgtatcacagttttatttacagtttttccatttcttccttttttgctttccacacagggaattgcaacccagtgaa

SEQ ID NO: 283896 - DNA, 201 bp, Homo sapiens
cctagtaacctagtagtcttttttttttttttgagacagcatcacgctctgtcgtccaggctagagtacagtggtgtgatctcaggtcattgcaacctccrtctcttgggctcaagcaatcctcccacctcagcctccgaagtagctgggactacaggcatatactaccacacccagctaattttttgattttttgtagag

SEQ ID NO: 283897 - DNA, 201 bp, Homo sapiens
tgatctgcccacctcagcatcccaaagtgctaggattacaggcatgaaccaccgcacctggcccagatgcaatttaaaagctatttcaaaaaaaaaacaaagcagttgtatttctgataatttttttttcttttagctatcatggtgaacttacttcagattgtgcgggaccactgggttcatgttcttgtccctatggga

SEQ ID NO: 283898 - DNA, 201 bp, Homo sapiens
ggctgaagtacagtggcacgatcttggctcactgcaacctccgcctcctgggttcaagcaattctcctgcctcagcctctccagtagctgggataacagaygcgcaccaccacacccggctaatttttgtgcttttagtagaaatggggttttgccatgttggccaggctggtctcgaactcctaatctcaagtgatctgc

SEQ ID NO: 283899 - DNA, 201 bp, Homo sapiens
cgctgtatcccccaggctggagtgtagtggcgtcatctcagctcactgcaacctctgcctcccgagttcaagcaattctcctgcctcagcctcctgagtarctgggactacaggcatgtgccactacgcccacctaatttttgtatttttagtagagatggagtttcaccatgttggccaggctggtctcgaactcctgac

SEQ ID NO: 283900 - DNA, 201 bp, Homo sapiens
tccatccgccttagtctcccaaagtgctgtggttacaggcatgagccacctagtagtcactctataaaagtaaattttcttctccctttgcctttttttttctttcttttttttctgagacagagactcgctgtatcccccaggctggagtgtagtggcgtcatctcagctcactgcaacctctgcctcccgagttcaagc

SEQ ID NO: 283901 - DNA, 201 bp, Homo sapiens
tgaatccgagaggcagaggttgctgtgagccaagattgcgccattgcactccggcctaggcaacaagagcgaaacttcgtctcaaaataaaaaaaaaaaaaggaaagaaaaaagtatgaattgtataagcatgccagtgtaagaggagaggcagaaattcagtctacatagtcctagcacagcttagtgctaagcactttt

SEQ ID NO: 283902 - DNA, 201 bp, Homo sapiens
catcccaaagtgctgggattacaggcgtgagccactgcacctggcccaccttgccttttaaaagacaaaagtatggccaggcttagtggctcacgcctgtwatcccaacactttggaaggccgaggtggccggatcaagaggtcaggagtttgagaccagcccggccaacagtgaaaccccatctctacttaaaaatacaa

SEQ ID NO: 283903 - DNA, 201 bp, Homo sapiens
ctattgaagctagtagtaaaatgtaataaatagacccagtgtggtgtaattttatattaatcattgtcccgtatgtaatcttcatcaattagattttaaartattatactacattctgatgccaggcaaacaaagaggcgtattaggcttttaacatctattacatctatgtctatcatcttcttgtttcagatgcaattt

SEQ ID NO: 283904 - DNA, 201 bp, Homo sapiens
gtaatcttcatcaattagattttaaagtattatactacattctgatgccaggcaaacaaagaggcgtattaggcttttaacatctattacatctatgtctrtcatcttcttgtttcagatgcaatttatttattttattgagatggagtcttgctctgtcgcccaggctgaagtacagtggcacgatcttggctcactgca

SEQ ID NO: 283905 - DNA, 201 bp, Homo sapiens
ggctaactgccttccggaacaagagtatgttatttaaaaggttagtctgcatttttttaaaccagcaattggccaaatttggggaatattctttttgataygtgccaaaaataaacagaaggggtaatttttcccccttgaggacttagattcaaatgatactgtttttagtcttgtttgttattgaatccttggataaaa

SEQ ID NO: 283906 - DNA, 201 bp, Homo sapiens
ttgccatgttggccaggctggtctcgaactcctaatctcaagtgatctgcccacctcagcatcccaaagtgctaggattacaggcatgaaccaccgcaccyggcccagatgcaatttaaaagctatttcaaaaaaaaaacaaagcagttgtatttctgataatttttttttcttttagctatcatggtgaacttacttcag

SEQ ID NO: 283907 - DNA, 201 bp, Homo sapiens
agtatgattacctctagaatttaaagtcttcatttaatgaataggctgtttcaggtctttgaaagtatcgtctttttttaattcaaagtgcattttaatayagaaacagtttaaaagtagctggccaaaacctagcttatatacagcttccacatatattgtcatatattatcttacttaagacatgctatagctgagata

SEQ ID NO: 283908 - DNA, 201 bp, Homo sapiens
tgagcagcatccacagtgggtatggagagatggtagaagtgattcacaaatcagggatttcaagaaagaaaataagctggaaagggtttagaaaacatttsgaatgaactcactgagcagagataatagctttcatataaagataaactaagtaattacaattctttaacccagaaaaatgaagctaacaatatggtaaaa

SEQ ID NO: 283909 - DNA, 201 bp, Homo sapiens
ttaacccagaaaaatgaagctaacaatatggtaaaagttaaaatcatgaatgaaaagaatacatatgatgaatctaatatgtaaattttttaaatggatcrgtgtaatagaaaataaaatattgaccgggcgcggtggctcacacctgtaatcctagcactttgggaggccgaggcaggtggattccttgaggtcaggagt

SEQ ID NO: 283910 - DNA, 201 bp, Homo sapiens
aaattcagtctacatagtcctagcacagcttagtgctaagcacttttgttggcaataatgtattgtctttctaggatgttgtcatatgtcttcttagtcaytgtacatgatttattagtttagtccaaacgcacacaggtgtattttgaattcatctgtatgcacgaatttttacagaaaattggcaatccaactatgttt

SEQ ID NO: 283911 - DNA, 201 bp, Homo sapiens
ggtgaaaccccgtctctaccaaaaatataaaaaattagctcggtgtggtggcacacagctgtaatcccagctacttgggagggtgaggcaggataatcgcwtgaagccaggaggtggagtttgcagtgagccaagatcgtgccactgcactccagcctgggctacaaagccagacttcgtctcaaaaaaaaaaaaaaaaaa

SEQ ID NO: 283912 - DNA, 201 bp, Homo sapiens
atcagaaacattaggttttatttcttttgttttctttggtttgtttcaagcatatatactttattgcaagcaatattacacctaagtcttttgtccttaarggatatatggagagtttcaacacaatgctgttgtgtgtatttttttctacctccctttcctggaaatacgtgtagtattttttatgaaacataaattgct

SEQ ID NO: 283913 - DNA, 201 bp, Homo sapiens
gaattgcaacccagtgaagaagttacctggaagtaaagactggctagattatcgaatgttcacattttaaagttctgagagaaataaaaacatgaagaatytgaaatgtctttcttttcatacaaaggtagcccttctggtaacaagcatacttaaaaaataattattagggcccagcgcggtggctcacacctgtaatcc

SEQ ID NO: 283914 - DNA, 201 bp, Homo sapiens
gcttgaagccaggaggtggagtttgcagtgagccaagatcgtgccactgcactccagcctgggctacaaagccagacttcgtctcaaaaaaaaaaaaaaaraaaagaaaatgaaatattgcaatcattcttctgacttccccttttatctcgtatcacagttttatttacagtttttccatttcttccttttttgctttcc

SEQ ID NO: 283915 - DNA, 201 bp, Homo sapiens
gctgtgcatgtgtggaggggtggtctgggcttccccggggcttccgaacgaaggtgacgggaaaggaaaatggggttttcttcgggtggaggatgggattkccgggccggagcttttggaaagggttttctgaggctgtcataacaggaaaacgtccgtagagatgtgacccagtgaccgcccgctaaccggactggagag

SEQ ID NO: 283916 - DNA, 201 bp, Homo sapiens
cccacgcctggcctgaagcagggaagacgctgcctcccctccgcgagcagcttacattcgtccaagttccagccttctgtcttctcgctaacctcgctctyttccaaatcgcaaatcctcttgagccgacaccgttgcgcctaaatgatgtgcttacccttttactttgcttttttatttttgagacagagattcactctt

SEQ ID NO: 283917 - DNA, 201 bp, Homo sapiens
cttacattcgtccaagttccagccttctgtcttctcgctaacctcgctctcttccaaatcgcaaatcctcttgagccgacaccgttgcgcctaaatgatgygcttacccttttactttgcttttttatttttgagacagagattcactcttgtcacccaggctggagtgcaatggtgcaatctcggctcactccaacctcc

SEQ ID NO: 283918 - DNA, 201 bp, Homo sapiens
agcatgccagtgtaagaggagaggcagaaattcagtctacatagtcctagcacagcttagtgctaagcacttttgttggcaataatgtattgtctttctargatgttgtcatatgtcttcttagtcattgtacatgatttattagtttagtccaaacgcacacaggtgtattttgaattcatctgtatgcacgaattttta

SEQ ID NO: 283919 - DNA, 201 bp, Homo sapiens
ccagtgtaagaggagaggcagaaattcagtctacatagtcctagcacagcttagtgctaagcacttttgttggcaataatgtattgtctttctaggatgtkgtcatatgtcttcttagtcattgtacatgatttattagtttagtccaaacgcacacaggtgtattttgaattcatctgtatgcacgaatttttacagaaa

SEQ ID NO: 283920 - DNA, 201 bp, Homo sapiens
acttggcaatgatggaaatgggcctttaaactgcttttcgtgttaatggaatttctatgcacttaaagatttgaaataattttaatcaatttgtttattayatatgccagactgtgcttttatgtttaattatgttttcatttcatttgaaagactcttctagcttgctgtttctggaccaaaaaaaatgacgtctattat

SEQ ID NO: 283921 - DNA, 201 bp, Homo sapiens
ccatatgctgtgaatcagagcaacccatgtcctgaccaatcataaagtaatctatttcatatatttcggttattatgtctgcatattaatgaatagaaaaygtactaaagaattttttttatttggtttctagacggaaactggacgcattggattagaaggctgcctttgtcaagatttttataggataagagacctttt

SEQ ID NO: 283922 - DNA, 201 bp, Homo sapiens
actcatcgtaggcaacagagtgagaccctgtctcaaaaacaaaacaaaacaaaacaaaaaacaagagtgtaagatacataaaaaaaaaaaaaaattaacacaacagagtataaaaagtctattagtatggtttcaggttctgcgttaaaactaaccttgaagaaactaccactttctgagttttaatgtagtatcaaagaa

SEQ ID NO: 283923 - DNA, 201 bp, Homo sapiens
ctgaagtgggaggatcgcttgaggctggaagattgagctgcagtgagctataattgcaccactgcactccagcctgggcaatggagcaagaccctgtctcaaaaaaaaaaaaaaaatgccgttcttcccactatcttttttttgctttggaaaatgtaattattttttgtaaaaatctgttaatgttgccatgtggtttta

SEQ ID NO: 283924 - DNA, 201 bp, Homo sapiens
tgaagtgggaggatcgcttgaggctggaagattgagctgcagtgagctataattgcaccactgcactccagcctgggcaatggagcaagaccctgtctcaaaaaaaaaaaaaaaatgccgttcttcccactatcttttttttgctttggaaaatgtaattattttttgtaaaaatctgttaatgttgccatgtggttttat

SEQ ID NO: 283925 - DNA, 201 bp, Homo sapiens
ccgaccttaggtgatctgcccgcctcgacctcccacagtgctgggattacaggtgtgagccgtcgcgcccggcctattattattattaatttatttatttytgagctggagtctcactctgttgtccaagctggagtgtaatggtgcgattatggctcactgcagtttccgcctcccaggttccagcgattctcctgcctc

SEQ ID NO: 283926 - DNA, 201 bp, Homo sapiens
gagcacagctcactgcagccttgacctcccaggctcaagtgatcttccactttaaccacctgagtagcggggacaacaggcacatgccaccactcctggcttttttttttttttttttttatgtggagacaaagtctcattatgttgcccaggctagtctcaaactcaagtgattttcctgccttgcaaagtgctaggatt

SEQ ID NO: 283927 - DNA, 201 bp, Homo sapiens
taatgtgaacctgtgatcaattaagcagctgaccaattgttacctcgtcctccctgctctttctacccaataaatatgaagggctgtagaagctgaaggcrgctccctttgctcactagaagcagggagctctcttcttcttctcctgaccccttcctttaaaatagttacttttgttttaagttttcatttctgcattcg

SEQ ID NO: 283928 - DNA, 201 bp, Homo sapiens
aatagattataagataaaatttcaagcatttgaattatataatttacattatgtcaagcaaaatttctgaatattctttagtaagtttgtgcttttaaaattttatttttgtatgaagagacttgtgaagtatggtggcatgatattttctcttcattaatggtatttgaatgccaaagtaattgaattggtggtggtggg

SEQ ID NO: 283929 - DNA, 201 bp, Homo sapiens
atagattataagataaaatttcaagcatttgaattatataatttacattatgtcaagcaaaatttctgaatattctttagtaagtttgtgcttttaaaatwttatttttgtatgaagagacttgtgaagtatggtggcatgatattttctcttcattaatggtatttgaatgccaaagtaattgaattggtggtggtgggg

SEQ ID NO: 283930 - DNA, 201 bp, Homo sapiens
tcacttgaacctgggaggtagaggttgcaatgagcgaagatcatgctactgcactctagcctgggcaaaagagcgagacccaatctcagaaaaataaaaayaaaaataaaataaatcatacagatactataacatgtgtatttctcaaatcctagtgttatatattgtatacatgataaaagccatttttttttagaatta

SEQ ID NO: 283931 - DNA, 201 bp, Homo sapiens
agggacagggaaaatgggattggggaggaaacgtcttttgaagtaagcaaatgactgggatctagaaaatgaatttttggttcagtcctgcccatggcackctagttgaccccattatgcaagtgggtgagtgaagagcctaacattaccaaacgtctctgttatgatgaggcatgactaacaaaactgattgtgaaacag

SEQ ID NO: 283932 - DNA, 201 bp, Homo sapiens
cactttgggaggctgaggtgggagaattgcttgaggccaggagctctacatcagcctgattatagggacaccctgtcagaaacctagtcggcatggtggcrtgcacctgtaatctcagcttagaaggctgaggcaggaggattgcttgagctcaggagttcgagactacagtgagccacaattgtgccactgcatctagcc

SEQ ID NO: 283933 - DNA, 201 bp, Homo sapiens
tactctggaagatttttattttcttctttatacttttttgaagttactggatttcttatcaatgagcatgtctacttttatagttagaggagggaacaccktataaatgaagctgcttattttttaagtaagagaagctattattgtttacttgaaatgatataaaatattcctcttcttaaactttcttatagccattta

SEQ ID NO: 283934 - DNA, 201 bp, Homo sapiens
gttttcaaaattaattatttgcatagtaagggggaaagtatggtataagacataagagattttaaaaatttataggttaagtatacactctacaaaacggrtatctccctggagatgttgcaaaggagatgaattttttacgtatcaaattacatgttcttgacctgctatttaacacaactttgtggatgggttgttctt

SEQ ID NO: 283935 - DNA, 201 bp, Homo sapiens
acaatcaagtagcagtccgcagagtaagtgtgttttcaataagggctgaattgaacacatacgtctgatgttttgtcattttgaaattctgtaattcttgwttggtattttcacaaaactgaagatcagtaatttatattcatgatcatgacctcaaaggcttacagaagtcttattgacttgaaggcttatgaaagactc

SEQ ID NO: 283936 - DNA, 201 bp, Homo sapiens
cctcccaagtagctgggattacaggcatgagccactgggcccggctagtttttgtacttttagtagaaacggggttttgccatgttggccaggctggtctygaactcctgacctcaggtgatccacccatctcagcctcccaaagtgctgggattacaggcgtgagccaatgcacccagccaatagtcatacctccatttt

SEQ ID NO: 283937 - DNA, 201 bp, Homo sapiens
ttaggcaagaaccactttcgttactgattgtagaacctatggcatccattacatttgctctgaggaaggagggacagggaaaatgggattggggaggaaaygtcttttgaagtaagcaaatgactgggatctagaaaatgaatttttggttcagtcctgcccatggcacgctagttgaccccattatgcaagtgggtgagt

SEQ ID NO: 283938 - DNA, 201 bp, Homo sapiens; identical to SEQ ID NO: 58010

SEQ ID NO: 283939 - DNA, 201 bp, Homo sapiens
agttagaaaccttttttctcccgctttctacttagttaaataataccagtaagtgatcattttggaatttcttttaagtcatcagagaacaaagttttttrtttgtccagtaatatcatttagtatatatttttgggtgtagataaaatctaaataatacagatagggccgggcacggtggctgatgcctgtaatcccagc

SEQ ID NO: 283940 - DNA, 201 bp, Homo sapiens
cagtctcagactcaagtgatactcagtctctgagtagctgggactacaggtgcatgctaccactactggcttttttttttttttttctgagacagagtatygctttgtcacccaggctggagtacagtggtgtgagcacagctcactgcagccttgacctcccaggctcaagtgatcttccactttaaccacctgagtagc

SEQ ID NO: 283941 - DNA, 201 bp, Homo sapiens
ataccttgcatgttacttcataatctaaatgaagaaagtgggaattaaggaagacttaagtagaaaagagtttcccttaggccattaatataattgtggtrcagtaagctttttgacagggataatttccaaggtcctttccaaaattgtatttataaacgtttttcatcaaatagagaattaatgtctttgtaccccaaa

SEQ ID NO: 283942 - DNA, 201 bp, Homo sapiens
gggtaataggtgcagggtatttctgaagatgaatctggtagcaatgtttaggttggatgaagggaggaaatactggaggcagagaaactgagaaacccaawcataaggtagtgaggcccttcctgtattagggtactggcagtgggatagaaagggaatgatgtgcaaagcgttcctgagggaagaataatcaggaactgg

SEQ ID NO: 283943 - DNA, 201 bp, Homo sapiens
ccaggagtttgagaccagcttgggcagcatgtcaagactcggtctctacaaaaaaaatacaaaaattagctgggagtggtggatggctgaagtgggaggakcgcttgaggctggaagattgagctgcagtgagctataattgcaccactgcactccagcctgggcaatggagcaagaccctgtctcaaaaaaaaaaaaaaa

SEQ ID NO: 283944 - DNA, 201 bp, Homo sapiens
aggacataaaggaggtcagagagacactaagtaaatgtcaaatgggattcacctgctgactgctaagttaatggtaagaaggtgacttgagtttttagtcygggagagtaaatggttggcaatactattaaaacttagtctgagacatgtacataaacataggatggtgccaacctgcactttaggggtgacaacatgatg

SEQ ID NO: 283945 - DNA, 201 bp, Homo sapiens
ctcctgggctcaagcaattctctcatcttggccttctgagtagctaggactacaggtacatgccaccagccagttttcttatattttttttttgtagagayagggtctcactacattgcctaggctggtctcaaactcctgaactctagcagtcttcctgcctcggcttcccaaagtgctgggatcacaggcgtgagccac

SEQ ID NO: 283946 - DNA, 201 bp, Homo sapiens
acctgcctgagcatttagtgcacgagtgattggtgaagcaagaggtaggttaagatcagcttgtgaaggatcttggtttccaatagggagtttagattttwttcagtagttaccaggaatccagtggatattttgtgcaaggagtgagcaggaggatatttgtttttttaggatggtctctgacagctatatggaggatca

SEQ ID NO: 283947 - DNA, 201 bp, Homo sapiens
ttccactatcactgcgaagttctaattcttttttgacttcgtactattttacgtgctctttagaaaagaagaggtcagattgaaccccggcaagtctggcytcctgtgaccaggcgaacctgagctatcatttatacccatcccctaatttttaattttacaacccctttaacccctttcttttttctttctttttttttt

SEQ ID NO: 283948 - DNA, 201 bp, Homo sapiens
gcgttcttagcctcccctgctcgggctcttcccgtcgttttgggttgagagaccacgaggttgctaagctctggacaccgcttaggcgtccttttagttcwtcgactccagagacctttcggttgtttgtaccacactgtactaaaagggtcttgggccttcgcgccctcccgccatcgccctccagcgcttccactatca

SEQ ID NO: 283949 - DNA, 201 bp, Homo sapiens
ccgcttcggctgcgactgtcccggtcgttcccggcagaagtggtcagcgagggaaagagaagtgacttctccatgggtttcaagctcccagctgttttgcrgcagcccgtacggttccctcccgggatcttcttccctcctttctgcttccctctgcttcccctttcatctcttggcgctggaagagttaaaccgacgcca

SEQ ID NO: 283950 - DNA, 201 bp, Homo sapiens
catactactttttcctcctcagggttgactcctctcattttttttttttttagcttccaaacattaccaataatttctgaataaaatttcgctccagacaracgaggcgtgcaggcgtgaccgccgtcgccttccgacagcaccgtgcccaccccccggagatggtctcgccctggttcctcctcgtctccgccgctagtc

SEQ ID NO: 283951 - DNA, 201 bp, Homo sapiens
cggagcagaggggtgacgccagcaaatcatactactttttcctcctcagggttgactcctctcattttttttttttttagcttccaaacattaccaataayttctgaataaaatttcgctccagacagacgaggcgtgcaggcgtgaccgccgtcgccttccgacagcaccgtgcccaccccccggagatggtctcgccct

SEQ ID NO: 283952 - DNA, 201 bp, Homo sapiens
ctgcgacctcgggacctgccattcgccgcgcccgcacggagcagaggggtgacgccagcaaatcatactactttttcctcctcagggttgactcctctcattttttttttttttagcttccaaacattaccaataatttctgaataaaatttcgctccagacagacgaggcgtgcaggcgtgaccgccgtcgccttccgac

SEQ ID NO: 283953 - DNA, 201 bp, Homo sapiens
tgcgacctcgggacctgccattcgccgcgcccgcacggagcagaggggtgacgccagcaaatcatactactttttcctcctcagggttgactcctctcattttttttttttttagcttccaaacattaccaataatttctgaataaaatttcgctccagacagacgaggcgtgcaggcgtgaccgccgtcgccttccgaca

SEQ ID NO: 283954 - DNA, 201 bp, Homo sapiens
gcgacctcgggacctgccattcgccgcgcccgcacggagcagaggggtgacgccagcaaatcatactactttttcctcctcagggttgactcctctcattttttttttttttagcttccaaacattaccaataatttctgaataaaatttcgctccagacagacgaggcgtgcaggcgtgaccgccgtcgccttccgacag

SEQ ID NO: 283955 - DNA, 201 bp, Homo sapiens
cgacctcgggacctgccattcgccgcgcccgcacggagcagaggggtgacgccagcaaatcatactactttttcctcctcagggttgactcctctcattttttttttttttagcttccaaacattaccaataatttctgaataaaatttcgctccagacagacgaggcgtgcaggcgtgaccgccgtcgccttccgacagc

SEQ ID NO: 283956 - DNA, 201 bp, Homo sapiens
aagtctggcttcctgtgaccaggcgaacctgagctatcatttatacccatcccctaatttttaattttacaacccctttaacccctttcttttttctttctttttttttttttttaataaagacggggtttcactatgttgcccaggccggtgtcgaactcctgggctcaagagatcctcccattttggcctgtgctggga

SEQ ID NO: 283957 - DNA, 201 bp, Homo sapiens
agaattgcttgaacccaggaggcagagattgcactgagccgagatcgtaccactacactccagcctgggcgcaaagcaagactctgtttcaaaaaaaaaawaagataaaataaaaagtcaatgatgtttgcagtattatactaattttgcaagaaaagaggacttaaatatttaaaaaactttagaacttgagaaaaaaaa

SEQ ID NO: 283958 - DNA, 201 bp, Homo sapiens
gtgaaagattttccaattttaacatattaccagaggtagaaaatgataataggttatatttaatttgttaatatgtattctgtgggttttatttctctccycctcctttgcatgtctaggtgaggttaaaagactcacttgtcagctctcttcagttttgtaaggcaaaagatgctgaattagcttggatagatggtgtct

SEQ ID NO: 283959 - DNA, 201 bp, Homo sapiens
attgcttgaacccaggaggcagagattgcactgagccgagatcgtaccactacactccagcctgggcgcaaagcaagactctgtttcaaaaaaaaaataarataaaataaaaagtcaatgatgtttgcagtattatactaattttgcaagaaaagaggacttaaatatttaaaaaactttagaacttgagaaaaaaaatcc

SEQ ID NO: 283960 - DNA, 201 bp, Homo sapiens
taataatttctgaaattctaagctgagttcttgaacttaaattaatagtttgcgaccaggcacagtggctaatgccggtaatcccagcactttgggaggcmgaggcgggcagatcacttgaggtcaggagttcgagaccagcctgaccaagatggtgaaaccccatctctactaaaattacaaagattagccaggcatggt

SEQ ID NO: 283961 - DNA, 201 bp, Homo sapiens
cagcactttgggaggccgaggcgggcagatcacttgaggtcaggagttcgagaccagcctgaccaagatggtgaaaccccatctctactaaaattacaaarattagccaggcatggtggtgcatgcctgtaatcccagctactcaggaggctgaggcaggagaatcacttgaacctgggaggcggaggttgcagtgagcca

SEQ ID NO: 283962 - DNA, 201 bp, Homo sapiens
actgcacataagaatcatctggggagcttcgtgagggtcagagggactcagtttttctggtcttaatcttaccagttatgttagaaacactggatatgacrctctgatatactttttgttttaattgccatgtgattccattttgtagtcagggttaagaatctctattttggaaagtaggcaggggcccaatgatctgca

SEQ ID NO: 283963 - DNA, 201 bp, Homo sapiens
acttttttctgggaacaccttttttttgttggtattttttttttcttgtgtttgagacggagccttgctctgtcgccaggctggagcgctcggctcactgyaacctctacttcccgggttcaagcgattctcctgcctcagcctcccaagtagctgggactacaggtgtgtgccacgttgcccagctaatttttttttttc

SEQ ID NO: 283964 - DNA, 201 bp, Homo sapiens
gagttaaactagccacttttttctgggaacaccttttttttgttggtattttttttttcttgtgtttgagacggagccttgctctgtcgccaggctggagygctcggctcactgcaacctctacttcccgggttcaagcgattctcctgcctcagcctcccaagtagctgggactacaggtgtgtgccacgttgcccagct

SEQ ID NO: 283965 - DNA, 201 bp, Homo sapiens
tctcggctcactgcaacctccgcctcccaggttcaagtgattctcctgcttcagcctcctgagtagctgggactacaggtgtgtgccaccacgcctggctrattttttgtagttttagtagagacattgtttcaccatgttaaccaggatggtcttgatctcctgactttgtgatccgtctgcctcagcatcccaaagtgc

SEQ ID NO: 283966 - DNA, 201 bp, Homo sapiens
acgatctcggctcactgcaacctccgcctcccaggttcaagtgattctcctgcttcagcctcctgagtagctgggactacaggtgtgtgccaccacgcctrgctgattttttgtagttttagtagagacattgtttcaccatgttaaccaggatggtcttgatctcctgactttgtgatccgtctgcctcagcatcccaaa

SEQ ID NO: 283967 - DNA, 201 bp, Homo sapiens
gtatattacaaacatttaaatgtttttggataaataaatgtaagctttttagtaattttataatagtacattgtatatgtgtgctgtgattatttaatctmgtggttctcaaaagtgtggtttgaggacgcctgggagtccctgagaccctttcagggagtccacaaagccaaaactatttttcataatactggtaagatg

SEQ ID NO: 283968 - DNA, 201 bp, Homo sapiens
tttctgaaccatttgaagaaaaattgcaaatattttatcattatctctaaatattgccagtgtgtgttacctaaaaacaagggcaatctccagcaaaactrtgttacatccattgaaatcaggaaatcaacattgataccatcctaccatttcacccattgaccccattcagcattcaccttttaccgatgaccacaatgt

SEQ ID NO: 283969 - DNA, 201 bp, Homo sapiens
atgtaaatcacccatttattttatacatgaaaataatctgattttggtttaatttttttgtttttacttgtctcccctccccttaccccactgggcagccsctgaactagaatagtttcagagagattcccccttttccattacttttaattttgaaaaaatttcaaacaggaaagttacaaaaatattatacccagattc

SEQ ID NO: 283970 - DNA, 201 bp, Homo sapiens
ctctccagtccggttagcgggcggtcactgggtcacatctctacggacgttttcctgttatgacagcctcagaaaaccctttccaaaagctccggcccggmaatcccatcctccacccgaagaaaaccccattttcctttcccgtcaccttcgttcggaagccccggggaagcccagaccacccctccacacatgcacagc

SEQ ID NO: 283971 - DNA, 201 bp, Homo sapiens
gattctgagcaagtatagcaaagtaaaatggtgtctttggggttatttagtagctcagaaatacaaggttaaaagaactaagaaatacttgaaacaatttsatcagataggaaatactgaatttgaaaattttaattactagaaattcaattaggtctaataaaccatttgaggaattagtaaaagaaaaatggtttaagt

SEQ ID NO: 283972 - DNA, 201 bp, Homo sapiens
tttcaataagggctgaattgaacacatacgtctgatgttttgtcattttgaaattctgtaattcttgtttggtattttcacaaaactgaagatcagtaatktatattcatgatcatgacctcaaaggcttacagaagtcttattgacttgaaggcttatgaaagactcttgaagaaatgatatataattttattgtaaatt

SEQ ID NO: 283973 - DNA, 201 bp, Homo sapiens
aaatgtgaagggctttgttaaataatgttaaataatggggtaaaatttagaataacaacttggaatgtgatttacagtcttgaaatgatctgtcaaaggayttcagggaataatagaaaatctcttagagataatgtagtattttactttattcagtacagttgtatgtctggtgttttacttgaagttattctttcccct

SEQ ID NO: 283974 - DNA, 201 bp, Homo sapiens
gggcggatcacctgaggttgggagttcgagaccaccctaaccaacatagagaaaccccatctctaccaaaaatacaaaataagctgggagtggtggcacaygcctgtaatcccagctactcgggaggctgaggcaggagaatcgcttgaacccgggaggcagaggttgtggtgagccggagattgcgtcattgcactccag

SEQ ID NO: 283975 - DNA, 201 bp, Homo sapiens
aaccccatctctaccaaaaatacaaaataagctgggagtggtggcacatgcctgtaatcccagctactcgggaggctgaggcaggagaatcgcttgaaccygggaggcagaggttgtggtgagccggagattgcgtcattgcactccagcctgggcaacaagagcaaaactccatctaaaaaaagaaaatcaagttacttg

SEQ ID NO: 283976 - DNA, 201 bp, Homo sapiens
cgggaggcagaggttgtggtgagccggagattgcgtcattgcactccagcctgggcaacaagagcaaaactccatctaaaaaaagaaaatcaagttacttgtggtgtctactgttcttttttgtttttgttcttgtttttatttttaggcagggtctcactctgtcacccagactggagtgcagtggcatgatctcatcaa

SEQ ID NO: 283977 - DNA, 201 bp, Homo sapiens
gggaggcagaggttgtggtgagccggagattgcgtcattgcactccagcctgggcaacaagagcaaaactccatctaaaaaaagaaaatcaagttacttgtggtgtctactgttcttttttgtttttgttcttgtttttatttttaggcagggtctcactctgtcacccagactggagtgcagtggcatgatctcatcaag

SEQ ID NO: 283978 - DNA, 201 bp, Homo sapiens
ggaggcagaggttgtggtgagccggagattgcgtcattgcactccagcctgggcaacaagagcaaaactccatctaaaaaaagaaaatcaagttacttgtggtgtctactgttcttttttgtttttgttcttgtttttatttttaggcagggtctcactctgtcacccagactggagtgcagtggcatgatctcatcaagg

SEQ ID NO: 283979 - DNA, 201 bp, Homo sapiens
gtggcatgatctcatcaaggtcaacctcctgtgcccaagtgatcctcccatgtcacccctcaagtagctgggactacaggctcatgccaccacccctggcttttttttttttttgtattttttatagagaacggtgttttgccatgttgcccaggctgatcttgaactcctgagctcaaacgatttgcctgccttggcctc

SEQ ID NO: 283980 - DNA, 201 bp, Homo sapiens
gttcttgacctgctatttaacacaactttgtggatgggttgttcttttgttttgtaacgtgatatggtttggctctgtgtccccacccaaatctcatcttrtagctcccataattcccacatgttgtgggtgggacccggtgggagatgattgaattatgaggttgggtctttcccgtgctgttcttgtgatagtgaatgg

SEQ ID NO: 283981 - DNA, 201 bp, Homo sapiens
cagaatcgtgaatgttgtacccaatgtataatgtccttttcaaggagctgtggaaatgcatggtagtgggaatgactgtattctgtttagcacttttcttggtcataagagattggttaactttagtatttttgaaaaaaatattatgtgaccatcagtttttgtataagaagaaacttagctggtttgaatttaactttt

SEQ ID NO: 283982 - DNA, 201 bp, Homo sapiens
tttttttttgagatggtgtcttgctctgttgcccaggctggagtgcagtggcacagtctcggctcactgcaaccttcacttcccgggttgaagtgattctyctgcctcagcctcccaagtagctgggattacaggcatgcgccaccatgcccagctaatttttatatttttagtggagatggggtttcgccatgttggcca

SEQ ID NO: 283983 - DNA, 201 bp, Homo sapiens
taattagagacagactctcactctgtcacccagcctggagtgcagtggcaccatcatagctcactgtaccctcaaactcttaggctcaagctgtccctacmccaccccctaacccactccaccttccaaagtgctgggattatacatgaaccactgcacctggcccttagcagtcattttaaggaaagtttagtttgttaa

SEQ ID NO: 283984 - DNA, 201 bp, Homo sapiens
gagagcctttaatagcacaaatttcagagttccttaactggaggttctcattcttctttgagatggggtcttgctttgttacctagtctagagtgcagtgktgctatcatagttccgtgcagcctcaaactcctgggcttaaaggatcctcctccctcagcctcctaagtagctggaaccatagacatgtgccaccatgcc

SEQ ID NO: 283985 - DNA, 201 bp, Homo sapiens
atttaagcaaccagtgggggtaaaagatagaacttgaattccttgactattagagaatatattgaagttataatatagtatttctaattcttgtcatcttyccccccatgttaggtagaatggatgagtgataaattgatgagatgttttgaagacaaaagaaataatccgtttcagtttcgccatctctctttatgtcat

SEQ ID NO: 283986 - DNA, 201 bp, Homo sapiens
tgattcttctgcctcagcctcccaagtagctgggattacaggcatgcgccaccatgcccagctaatttttatatttttagtggagatggggtttcgccatrttggccaggctggtgttgaactcctgacctcaggtgatcctcctgcctcagcctcccaaagtgttgggattacaggcgtaaaccactgcacctggcctta

SEQ ID NO: 283987 - DNA, 201 bp, Homo sapiens
gtgctgggattacaggcatgagccaccacgcccggccacaagtataggtttcttaatgcatacgttgcacagtggtgaagtttggccttttactgtatccrtctccagaatcgtgaatgttgtacccaatgtataatgtccttttcaaggagctgtggaaatgcatggtagtgggaatgactgtattctgtttagcacttt

SEQ ID NO: 283988 - DNA, 201 bp, Homo sapiens
atggattagaactaaatagaaatgaagcaatattggtgagtctgatctctgatttggaaaagactttgtaagcataaaaataatgaaccaagttacaaagkaaaagtttgatagatttgatgacatacaggttcaaatgtctgaaacaacaaataaaaaaaaaaatcaaagtaggaaaatatttgcagcaagttgcccaaa

SEQ ID NO: 283989 - DNA, 201 bp, Homo sapiens
tctgccacccagaaggaatgctgagggcagtcaggcctcaggtgcaggtgtttcttgtgattagacacatctgaagcctgttagcagtaatgtgaacctgygatcaattaagcagctgaccaattgttacctcgtcctccctgctctttctacccaataaatatgaagggctgtagaagctgaaggcagctccctttgctc

SEQ ID NO: 283990 - DNA, 201 bp, Homo sapiens
ttaaaaagtttattattgaattaggaagtcctatactaagtctatatttatcatctacagagataattgtattagatattttcatagatatgaaccctggsattgataaaatggtgcaataatggactctgaagatttagcccagaaataacaacagtctcaacagttttgcttctagttaatttttctgcaggataaatt

SEQ ID NO: 283991 - DNA, 201 bp, Homo sapiens
gaattttaaaatatttcagaaaaaatgctaacagaatgttaatagctcaggccttttcatatttaacttgggaaaaactcatttagtgtttactgtgtacrataaacaaaagataatgtggccatttcctcttcctcagagcttacagttagattgaggcaacaaagtagctgagatggctaaatgtagtgattggggtaa

SEQ ID NO: 283992 - DNA, 201 bp, Homo sapiens
aggtaaaaagaatttccagtagtaagtatttagatgaatggggtttaacttgctggaaaataccgaggagaattcagagagaaaattataggcattatagkctgaagaataaaaaagttagcacattctgccttgatacagaactcttaacttccatttgaattttaaaatatttcagaaaaaatgctaacagaatgttaa

SEQ ID NO: 283993 - DNA, 201 bp, Homo sapiens; identical to SEQ ID NO: 58008

SEQ ID NO: 283994 - DNA, 201 bp, Homo sapiens
aggctggagtgcagtggcacagtctcggctcactgcaaccttcacttcccgggttgaagtgattcttctgcctcagcctcccaagtagctgggattacagkcatgcgccaccatgcccagctaatttttatatttttagtggagatggggtttcgccatgttggccaggctggtgttgaactcctgacctcaggtgatcct

SEQ ID NO: 283995 - DNA, 201 bp, Homo sapiens
gggaggaaacgtcttttgaagtaagcaaatgactgggatctagaaaatgaatttttggttcagtcctgcccatggcacgctagttgaccccattatgcaartgggtgagtgaagagcctaacattaccaaacgtctctgttatgatgaggcatgactaacaaaactgattgtgaaacagaaaatgtgaagggctttgttaa

SEQ ID NO: 283996 - DNA, 201 bp, Homo sapiens
tcactgcaaccttcacttcccgggttgaagtgattcttctgcctcagcctcccaagtagctgggattacaggcatgcgccaccatgcccagctaatttttrtatttttagtggagatggggtttcgccatgttggccaggctggtgttgaactcctgacctcaggtgatcctcctgcctcagcctcccaaagtgttgggat

SEQ ID NO: 283997 - DNA, 201 bp, Homo sapiens
taaataagctataagggatttcagcagggaaaattggattccatttttaaacatgttttcaaccattgtttttagttcatctactttaaaagtacaactattttttttttttttttttttttgagatggagtcttgctctgtcgccaggctggagtgtagtggcacaatcccggttcactgcaacctctgcctcccgggtt

SEQ ID NO: 283998 - DNA, 201 bp, Homo sapiens
cagtcttgaactcttgggctcaagcgcgcctcctgcttaagcctcccaattagttcgcactgcaggcatgtgccgccatgcccagctaatttaaaaaaaawtttatagagatgggaacttgctgtgttgcccaagctggtcttgaactactggcctcaaacaattctcccaccttggcctcccaaagtgtgggtattatag

SEQ ID NO: 283999 - DNA, 201 bp, Homo sapiens
gagaggctgggcgtcatggcccatgcctattcctaacactttgcgaggctaagatgggaggttcacctgaggccaggagtttcagaccagcctgggcaacwgcaacactctgcctctacgaagtataaaggtatattaaacaaaagaaatttgaaagagaatgtctttgaggggccagacatactggctcatgcttgtaat

SEQ ID NO: 284000 - DNA, 201 bp, Homo sapiens
gagcagtgatcatgccactgcactcatcgtaggcaacagagtgagaccctgtctcaaaaacaaaacaaaacaaaacaaaaaacaagagtgtaagatacatwaaaaaaaaaaaaaattaacacaacagagtataaaaagtctattagtatggtttcaggttctgcgttaaaactaaccttgaagaaactaccactttctgag

SEQ ID NO: 284001 - DNA, 201 bp, Homo sapiens
ctgcactcatcgtaggcaacagagtgagaccctgtctcaaaaacaaaacaaaacaaaacaaaaaacaagagtgtaagatacataaaaaaaaaaaaaaattaacacaacagagtataaaaagtctattagtatggtttcaggttctgcgttaaaactaaccttgaagaaactaccactttctgagttttaatgtagtatcaa

SEQ ID NO: 284002 - DNA, 201 bp, Homo sapiens
tgcactcatcgtaggcaacagagtgagaccctgtctcaaaaacaaaacaaaacaaaacaaaaaacaagagtgtaagatacataaaaaaaaaaaaaaattaacacaacagagtataaaaagtctattagtatggtttcaggttctgcgttaaaactaaccttgaagaaactaccactttctgagttttaatgtagtatcaaa

SEQ ID NO: 284003 - DNA, 201 bp, Homo sapiens
gcactcatcgtaggcaacagagtgagaccctgtctcaaaaacaaaacaaaacaaaacaaaaaacaagagtgtaagatacataaaaaaaaaaaaaaattaacacaacagagtataaaaagtctattagtatggtttcaggttctgcgttaaaactaaccttgaagaaactaccactttctgagttttaatgtagtatcaaag

SEQ ID NO: 284004 - DNA, 201 bp, Homo sapiens
cactcatcgtaggcaacagagtgagaccctgtctcaaaaacaaaacaaaacaaaacaaaaaacaagagtgtaagatacataaaaaaaaaaaaaaattaacacaacagagtataaaaagtctattagtatggtttcaggttctgcgttaaaactaaccttgaagaaactaccactttctgagttttaatgtagtatcaaaga

SEQ ID NO: 284005 - DNA, 201 bp, Homo sapiens
ctgaagtaagttcaccatgatagctaaaagaaaaaaaaattatcagaaatacaactgctttgttttttttttgaaatagcttttaaattgcatctgggccrggtgcggtggttcatgcctgtaatcctagcactttgggatgctgaggtgggcagatcacttgagattaggagttcgagaccagcctggccaacatggcaa

SEQ ID NO: 284006 - DNA, 201 bp, Homo sapiens
actcctgacctcaaggaatccacctgcctcggcctcccaaagtgctaggattacaggtgtgagccaccgcgcccggtcaatattttattttctattacacygatccatttaaaaaatttacatattagattcatcatatgtattcttttcattcatgattttaacttttaccatattgttagcttcatttttctgggttaa

SEQ ID NO: 284007 - DNA, 201 bp, Homo sapiens
aaattattattattcttatttatatttttatgtatttttttgaaacagagtctcactctgtcaccgaggctggaggcacaatcacggctcactgtagtgtygacctcccagcttcaagcaatcttcccattttagcctcccaagtagctaggactacaggtgcgctctaacatgcctggctatttttgtaattttagtaga

SEQ ID NO: 284008 - DNA, 201 bp, Homo sapiens
ttttttttttttttttttgagacgaagtctggctttgtagcccaggctggagtgcagtggcacgatcttggctcactgcaaactccacctcctggcttcawgcgattatcctgcctcaccctcccaagtagctgggattacagctgtgtgccaccacaccgagctaattttttatatttttggtagagacggggtttcacc

SEQ ID NO: 284009 - DNA, 201 bp, Homo sapiens
atttccttaatgactgatgatgtggagcctctttccatgtgtttattgactttttatatattttggagtaatatctgttcatatcctttgtccattttcartttgtttatgttcatatcctttgtccattttcaatttgtttatctttactgttgagatgtaagagtttttttatatattttctggatactaaaccattat

SEQ ID NO: 284010 - DNA, 201 bp, Homo sapiens
aaaaaaagaaaatcaagttacttgtggtgtctactgttcttttttgtttttgttcttgtttttatttttaggcagggtctcactctgtcacccagactggrgtgcagtggcatgatctcatcaaggtcaacctcctgtgcccaagtgatcctcccatgtcacccctcaagtagctgggactacaggctcatgccaccaccc

SEQ ID NO: 284011 - DNA, 201 bp, Homo sapiens
tgaggatcacctgcctgcttccagtcaggagatttatagttttctaagaaagtcatactgttttttttttgttttgttttgttttttgagatggagtctcrctctgttgcccaggattgagtgcagtggtgtgatcttgtctcactgcaacctccgcctcccgggttcaagcgattctcctgcctcagcctcccaagtagc

SEQ ID NO: 284012 - DNA, 201 bp, Homo sapiens
  misc_feature (1)...(201): n = A,T,C or G
gggctgaattgaacacatacgtctgatgttttgtcattttgaaattctgtaattcttgtttggtattttcacaaaactgaagatcagtaatttatattcangatcatgacctcaaaggcttacagaagtcttattgacttgaaggcttatgaaagactcttgaagaaatgatatataattttattgtaaattttaattatt

SEQ ID NO: 284013 - DNA, 201 bp, Homo sapiens
gcagtattatactaattttgcaagaaaagaggacttaaatatttaaaaaactttagaacttgagaaaaaaaatccaaaccattttattaatttcttgtgtygatgagaacatatgcttccctgattaactgaagttttactattcaattagcaaaactgtctgtggttactatgcgaaaaagctgggacaaaaatccatta

SEQ ID NO: 284014 - DNA, 201 bp, Homo sapiens
gcctcagcttcctgggtaactgggattacaggcatgtgccaccatgcctggctactttttatatttatagtagagacggggtttcaccatgttggccaggytggtctcggactcctgaccttaggtgatctgcctgcctcgacctcccaaagtactaggattacaggtataagccaccatgccctgctggttttattattt

SEQ ID NO: 284015 - DNA, 201 bp, Homo sapiens
ttgtgaatttgaaaggtaaaaagaatttccagtagtaagtatttagatgaatggggtttaacttgctggaaaataccgaggagaattcagagagaaaattrtaggcattataggctgaagaataaaaaagttagcacattctgccttgatacagaactcttaacttccatttgaattttaaaatatttcagaaaaaatgct

SEQ ID NO: 284016 - DNA, 201 bp, Homo sapiens
ggcgcaaagcaagactctgtttcaaaaaaaaaataagataaaataaaaagtcaatgatgtttgcagtattatactaattttgcaagaaaagaggacttaartatttaaaaaactttagaacttgagaaaaaaaatccaaaccattttattaatttcttgtgttgatgagaacatatgcttccctgattaactgaagtttta

SEQ ID NO: 284017 - DNA, 201 bp, Homo sapiens
  misc_feature (1)...(201): n = A,T,C or G
aaaaaaaaaagtaaacttggcaatgatggaaatgggcctttaaactgcttttcgtgttaatggaatttctatgcacttaaagatttgaaataattttaatnaatttgtttattatatatgccagactgtgcttttatgtttaattatgttttcatttcatttgaaagactcttctagcttgctgtttctggaccaaaaaaa

SEQ ID NO: 284018 - DNA, 201 bp, Homo sapiens
gagccaccgtgcctggcctgtagatgtgttcatgttatattttcctgaaatatatgtagtaggcatcccaatttgcatttcatcagatatatgttgaagcrtgcatcaggttctatttagggagttgcaaacatatgccacctatgtttttcagttgctcacattccaatgcaagggttcttaatgttaaactccctgaaa

SEQ ID NO: 284019 - DNA, 201 bp, Homo sapiens
ggcattaaccatttactgtcctgtgtgctttaaatgtattatttaatttaatccctatttattctattaagtagtttccattgtgtccctgttttaaagawtaggcaaattgcttcccttctaactcttagtatcccagtctgtaaaatggggacaaaaatagaacctacctcatagcattggcatgttagaattcattgt

SEQ ID NO: 284020 - DNA, 201 bp, Homo sapiens
ctcttagagataatgtagtattttactttattcagtacagttgtatgtctggtgttttacttgaagttattctttcccctttgaccttatctaaggttccwggacatcagtcagtttttatgaatgaaccaaggctgtcagacttcaagcaagttctcttacgggaggggattcaagctgaatttgtaggaggtgtacttg

SEQ ID NO: 284021 - DNA, 201 bp, Homo sapiens
acactgcactccagcctggcaacagagtgagactccgtctcaaaaaaaagcaaatagcacagctgtaattctcctccatatcccatccccccgccggcccygcatgattggagttaatcaggactggggttttgccagcctagtagagagaagtacctagaggagcaagacatttgagtgtttgcaaataatgttaacaga

SEQ ID NO: 284022 - DNA, 201 bp, Homo sapiens
gagagcatttaatgttttcctcccagattcaacttttgcgctcacagtacactgctagttttcaaatgatcagaaatttttttttttctcggcaactccarttatgaattagctatccaattagtgtttgtgattgttttgagacttggcagtgtttgttcttatgatttatcttcttttctcacacatttcagggatata

SEQ ID NO: 284023 - DNA, 201 bp, Homo sapiens
cctcatgctataaattggtggtgttctggttggacttggtgaatcaggagattgtataatcaacaattacccaaagcagagattctgatttagtaggccamgggtggcctactaaatgtgcattttaagaaggcatgtctaaggattcaggtagtagtgtgagaagcagtactctgtttctggtactgaggctaatggtct

SEQ ID NO: 284024 - DNA, 201 bp, Homo sapiens
aggagagtggggaaggggcagggggagatgatgaaattcatttatcctctgtgatgctatggaagaacaattaagatcatgtttcctacttgattttagtkgctagtcatttcttaatctaagcaccccctataatttacctatgtcatcatgcaaaatcaccattggtaataatgtgggggcgggggaagtctatacaag

SEQ ID NO: 284025 - DNA, 201 bp, Homo sapiens
cccagccaccaggctaggcgacaattggtaatgcccagagatattttttgcttttcataactgaaggagaagggggctaccactgacattagtaggtagamgtcagtggtactgctgaataccctgtaatacataggacagacccccacaataaagaattatctgggccaaaatgtctagtgctgaagttgagagaccctc

SEQ ID NO: 284026 - DNA, 201 bp, Homo sapiens
acttattttttgttttttttcattataggcaccctcccgccctccacccctcccaaaaaaaaagaaaaccaaaatataaaacagaccttgttgtacatcarggacatccacatgactcagataaagggctttggacttagacaaatggaagttcaagtcttggctttacaattgagtaactgtaaaagcttgagcaagtta

SEQ ID NO: 284027 - DNA, 201 bp, Homo sapiens
ctttgcctcttgaatttttgaatagtttgcttttgactgttttcctgtcttattagtgatgcatccttaatatattcacctacaccttcctcagctgattsttcacttcctgctacttctatgcgtagtttacatatgtcttatattatttgtcatacgtgtgtgttattttttatgtgaaaccacaggaatgactacctt

SEQ ID NO: 284028 - DNA, 201 bp, Homo sapiens
tctcagaaatgtgaataatacctgtttcatcattcttaagtgttttagatattatgtaactggtatattttacatataatgatataaaaagcagttatatrgacaaataaacaggcatgtttatgaaagaacattttgaaaaatgaagtattaaaaccagttgtaataacaagatatacttttgaaagtggttctggccca

SEQ ID NO: 284029 - DNA, 201 bp, Homo sapiens
agagacagtgtagcctgtagtgatgtgctctcactgttgctggcattttctctagtgcattgacatcttatgtaattttatcttagtcagttcaccagatwattgagtacaagtacataacaagcaatttgttttttaatgtcagtaaaagcagttcctaggaacttgcgtaaaaaagaaaattagcctaaaaacttcagg

SEQ ID NO: 284030 - DNA, 201 bp, Homo sapiens
taacaagcaatttgttttttaatgtcagtaaaagcagttcctaggaacttgcgtaaaaaagaaaattagcctaaaaacttcaggcatagatgaacaaataytgtatcccttttaaaggaacatgcataagattaatgatatttaattcaatagagaatattatgattgtccagtaaagtataataaacaatttttagatga

SEQ ID NO: 284031 - DNA, 201 bp, Homo sapiens
agcagttcctaggaacttgcgtaaaaaagaaaattagcctaaaaacttcaggcatagatgaacaaatattgtatcccttttaaaggaacatgcataagatkaatgatatttaattcaatagagaatattatgattgtccagtaaagtataataaacaatttttagatgagtaatgattatattttccccttttaaaataga

SEQ ID NO: 284032 - DNA, 201 bp, Homo sapiens
tgtgttttcctctcggaaagggaatttggtagctttgaccaatgtcagtgtgtaaatatttagacgttattagtgacttttaaacatttttcagcgagatstgttatttacagtgtgtcatatgttattaatgcttgttgcctaagttccttggcaaatctgtttcatgccttctgagaaagtagacaattgatagattgt

SEQ ID NO: 284033 - DNA, 201 bp, Homo sapiens
tacaggtgggataagtggaagctacaaatagtttcaagtcagttcacatttagggttgctaccaaattattttgtaacaaccttattaaaaaacctttgatttttttttcttttttttcagagttttgggattctagaattgtagataagcagttatggccctctataatagttcccccttatctgtggggaatacatttc

SEQ ID NO: 284034 - DNA, 201 bp, Homo sapiens
catttagaaaaataaacacagttgattttcattattctcggtggtgttatgttccataaagttgtcaaacaccgaattagcgaatactgaaccattactcytaggggaaataaaagattatctttttttgatcttctagttaattatgtaaattaatacataaccattttatgtttctgttgaaaaacatcttctcagtgt

SEQ ID NO: 284035 - DNA, 201 bp, Homo sapiens
aatggtaagagaaaatcttaaaagaatgcacagaagcctggactggagtataatcactaaaatgattacatggtccttgttccatatactagagatgatamccacaaaacttaagtcactagttcagcaatttatagctaactatgctgcaagtgcccaaactagaaactgggtactcttctcaccagcaaatgttgtttc

SEQ ID NO: 284036 - DNA, 201 bp, Homo sapiens
tttactgggttgtttttccactttgctttcaaatactcttttaatcattccattcattctagatacacagtattacacagaaaggaagataatctttaatwcttaaacacaagtattaagtaatacttaatactttggatgtattttgccttgcattatttaagtgcaattagactataaaaggagatgttaaatttttct

SEQ ID NO: 284037 - DNA, 201 bp, Homo sapiens
tacaagccttctctccctttggattgtacctcactcaggaagtacggaatttgaagatcagatttcatttccagaaaatccataaggcagtcacagcttakgaccaaggctcacacctttttttctgcttacctttccctgctattgtcctgacttcttgcctcccaagattgatatgtaagaagtggggccatttttttg

SEQ ID NO: 284038 - DNA, 201 bp, Homo sapiens
ttcagtggaaatggagtgttgctagttggctacatttcattctgatacaactcagagaagcagcctgggttggaaattatttgagtattttaggtgtatasatggcagtatgtatcaataaagttcacttaggtgagtgtaaacggagaggatgaaaagaggggaaaaaagctttgagaagagttaacttttaatgattga

SEQ ID NO: 284039 - DNA, 201 bp, Homo sapiens
caccaggctaggcgacaattggtaatgcccagagatattttttgcttttcataactgaaggagaagggggctaccactgacattagtaggtagacgtcagkggtactgctgaataccctgtaatacataggacagacccccacaataaagaattatctgggccaaaatgtctagtgctgaagttgagagaccctcctatag

SEQ ID NO: 284040 - DNA, 201 bp, Homo sapiens
cttgttggctgcataagagtactagtacacaattaacaatataatgccctttgatctagtttcatgtttaatctatattattcattaatgtttattttctrttgctcactgcgttaggtaaggcatcctaagaggttgtatgaaaaagtatagaaggataaagtacatagagaatgtttaagctggcagatacctatcaat

SEQ ID NO: 284041 - DNA, 201 bp, Homo sapiens
tttttttattttttacatgggagtctcattatgtttctcaggctggccttgaattcctggactcaagtaatcctcccacctcagcttcccgagtagctggkactacagtcatgcaccaccttggctgactacattaatttttttaaattgcaaatatgttaattgcaacaaaggaaaaatactgagtgttatgatagtgaa

SEQ ID NO: 284042 - DNA, 201 bp, Homo sapiens
tagggctttcactggcaccccttacctgattcctttatcatcgtttgaagagcactttttagccctctgctaaactcttgctgtggtcacagaactctcaratggtgaagatcattttaaatatgcatgagacaccatgttttttcttccatggttatttttttttaaggacatatataatgttttacttgtgtatgtata

SEQ ID NO: 284043 - DNA, 201 bp, Homo sapiens
tgtgacattatgggatctctgcggtatagacaaatatgatgggtatgccaatcaggcatatgttattttgcttatgatgttttgtttcttctgcatgaggwttggatggaagctgtgcaaataattctgctaatatttattgaccaattactatgtggcaggcaatagtgtaagtctcaaagcagccttatgaatgttatc

SEQ ID NO: 284044 - DNA, 201 bp, Homo sapiens
tgggaggctgtcatagttggaaccaaggaggtccaagcctagtccttctgaagaacagaattgggaggcatttccagagtctcttactctgacagcaaggyagaactggagagggtaaggaggcagaagtctgtagggtcagaattcgtatcaccaggataaaataaacagtgagagctagaattgagcacaaatagtaca

SEQ ID NO: 284045 - DNA, 201 bp, Homo sapiens
ataaaatacaagatacctaattaaaattgaatttcaaataaacaataatttttataagtatgtcccaaatgtacatggagcacacttatatgcatgttaartattaggaacatgctaaatatttctcgtttagctgaaattcaaatttaactgagtagtttctgtttttctgtaattaaacttttgattttgagataatta

SEQ ID NO: 284046 - DNA, 201 bp, Homo sapiens
tttgaccttccattggttgaactttggtctccagagttaccatcctggaaggggcagtgtgtcaatgtattctttctgccaagactgtggagggggcccarcagtgaatggaggccagtagagccaaaggtgctgctgcaggtttctgtctacactagtgctggacaggagaactttccacaatggtagaagggcttgata

SEQ ID NO: 284047 - DNA, 201 bp, Homo sapiens
ttcttttttctctttggaaggaggtagggggagatgaaaggtggttatgctatataactccttagctgatcttcactttgagtttatctgctctacaaatwttatgtgtttgctaattacaaggttctttctggcactgtgatacatacagagatgaatacattttcacatccttaaacagtttatcatttccctgtccag

SEQ ID NO: 284048 - DNA, 201 bp, Homo sapiens
gacactaacctttaccttctttatacctttttggggtttaaatttttttttttaaattttttagtacagacaggatctcactgtgtagtccaggctggtcktgatctcctgggttcaagcgatcctgcttccttggcctcccaaagtgctaggattacaggcatgagccaccatgcttggctaatacctttttgtctttat

SEQ ID NO: 284049 - DNA, 201 bp, Homo sapiens
ctaaattttttttttgagatggagttttgctcttgtcgcccaggctggagggcagtggtgtgatctctgctcactgcaacctctgcctcccaggttcaagygattctcgtgcctcagtcttccaagtagctgggactacaggcatgtgccaccacacctggctgattttgcatttttagtggagacagggtttcgtgttgg

SEQ ID NO: 284050 - DNA, 201 bp, Homo sapiens
aaaaaatagacaacttgaaattcacctcattatatctggatttccctgacatgggtaaatctagtgatatggttgtaggtgactggatggattaagttttwtattaagtttttagagttagggaatggtagaggataggaaaggggaatttttatccttcctgttttgtaatattttagttggacatgtttcaatatttgt

SEQ ID NO: 284051 - DNA, 201 bp, Homo sapiens
aagactacatttttgttataatgttaaatatttctttaaaaatttttgccttttgacatactaaggtgctcacggttttgtttcatgtgtacaggctcctyaccatgacatgagccttttttggtatataccttccctgagagttatctcaaaagagaaatacagaaaataatcactgagttatctgacgtcaaaccaagg

SEQ ID NO: 284052 - DNA, 201 bp, Homo sapiens
attcaggcacaagtacagtataaatagtctttagtagtctttgttgttaatttaactatacatgagaaagagtgattaaaccatgattaggcagcagagcrttggtacctagtcctggatatattttgaagtaaacagaacaatgcatagcaaaaggaatttttgacaaatgtaggtattatcattgacatgtatttacag

SEQ ID NO: 284053 - DNA, 201 bp, Homo sapiens
ttctcagaaaatgattgacactttatgtgagagtaaaacttaaagtgagctatgaattaatgttaaaaccagattacgaaaaagtaagacttcatcctacsattctaccatcctattatccactcaccttgtacaaaaacaaaatccagaaacattttcaaaaaggaaggaaaattcagtcaagtattttggaaactgagt

SEQ ID NO: 284054 - DNA, 201 bp, Homo sapiens
aggggaacatcacacaccgggacctaccgtggggtggggggagcggggagagatagcattaggagatacacctaatgtaaatgacaagttaatgggtgcarcacaccaacatggcacatgtatacatatgtaacgaacctgcacgttgtgcacatgtaccctagaacttaaagtataataaaaaaaattaaaaagaaattt

SEQ ID NO: 284055 - DNA, 201 bp, Homo sapiens
cttaaaggaatcatgaattgctttgtggcacaagaagacagaggaattcggccagtgtgaggcatcccttactttctttaacacagccgcctgatagaacrgtagccatgctctttaagtaactctactctgacaacctcgaaggatttctgggcataaaaattgggggcatccaatatagcaaaggggttgagagcatgg

SEQ ID NO: 284056 - DNA, 201 bp, Homo sapiens
gattgttcccaagggtttttaccacaggaacagaggaaggtcacataataggtaatataagctgatgatgaattttactcataatttaatggccagctgtstcagaatttaagatttattttgtttggtgttgaactctataggtataaagtaagcctccaatgtggtaagtgatgtcagtacagtgcattcttcaaacag

SEQ ID NO: 284057 - DNA, 201 bp, Homo sapiens
agcactcttagtgcttcagccatagccccagttttgacttattgggcccctgtccctcttatttttcaaattaaaaattacacagaaaactattcagagtrgaaagagtataagtgaaaactaggtttccttttcactacagagcaccacatcctttttagaggtaaccagtattagcatttccttctgtatttttacaga

SEQ ID NO: 284058 - DNA, 201 bp, Homo sapiens
tcagtgttactggttaaattacatcctccaaaatggtatgtttaagtcctaacctccagtacctcagaatgtgaccttttttttttttttttttttttttkggaaatagggtcattgcagtggaacgaggaaacatttttggggtggtggatatgctctatatcatggttgtagtgatgttacaggactatacatttgtca

SEQ ID NO: 284059 - DNA, 201 bp, Homo sapiens
ttagttagctttaaatgtagattgagaggtaaatgttattcatagaaagatccccataaaacagtttgtgaggaaattaccaatgccatttgaagtagacyaggccaaaagtttctcaataccttcatttaatttgttaatggcataccactctataattattttgtcaccatcattaatggaatctctacttttaaaagt

SEQ ID NO: 284060 - DNA, 201 bp, Homo sapiens
cctgagcaacatggcgagactcccatctctacaaaaaaacaagtgtacaaatgctaattttggccatgataaaatttctaatagtgtcacttgcaaagtcraaaaattcatctcaataattttataatgacaaagacactgatgtctaggagttaaataaaattttcgtaaaatgtcatcccgtggtatccttgggggatt

SEQ ID NO: 284061 - DNA, 201 bp, Homo sapiens
tgttcatcactgtattttcagtacccactagtgcctggcacatggtagataatcagtaaatgttagaagagtgaatcagtaacactgagtaccccacatamgtgccagctatagtatgaagctttgtaattacattgtccaccaaggaaaaagatcttccataaagccacagataagcaggaaatagatttattgaatttt

SEQ ID NO: 284062 - DNA, 201 bp, Homo sapiens
ggaaattaccaatgccatttgaagtagactaggccaaaagtttctcaataccttcatttaatttgttaatggcataccactctataattattttgtcaccrtcattaatggaatctctacttttaaaagtatttaggtgcacagaccacttctaacaagagtaaagcaatgtgtctgaaaccagtgcctccttttcctgct

SEQ ID NO: 284063 - DNA, 201 bp, Homo sapiens
gcttatataagtgactttgtatctatccagcattattttatgtggataattttgtgttgttcagtatttgcataatcactgtgagggcaaggaccttgtawgttcttctgttcatcactgtattttcagtacccactagtgcctggcacatggtagataatcagtaaatgttagaagagtgaatcagtaacactgagtacc

SEQ ID NO: 284064 - DNA, 201 bp, Homo sapiens
aaccgttatttcgttggacatttaagttattttgagtttcactattgttattttgctttgagccttcttttacaaaaacttttattcacgtctctgttttktgtcctaggatagcttcttggatgtgggattacttaatcaaatgactcttgatacatgtggctaagaatctttaaaaggctgtatttctcctccgatcta

SEQ ID NO: 284065 - DNA, 201 bp, Homo sapiens
gagtaagaaggttgtagagacgttttctcatttgatcaattttaaaaagctgttatattatgctgattattgttacagctttttgaggtggtgatagggargttttccaaggaggctggcatgcccctggctgagcccagcaaagctgcattacctcaataaattcaccacaatctaaagatgttaatgagttttggcaaa

SEQ ID NO: 284066 - DNA, 201 bp, Homo sapiens
attctcacagcacccctgcccctggacacttgtgggagaggaatccacaaattcctttgaggctccatcaccggaacaagttctcagtagctggagaaggyctgggtggcaaacaggaagtttttgtattctggctactttgtgccgtggggtaaaaaccgcagagtccacctggagactgcaaaaagaatggtagaacaa

SEQ ID NO: 284067 - DNA, 201 bp, Homo sapiens
aaaaagttaacatatttgaagaatatgaaatactaacattagggaagattagtttgatacttttaatttaggaactattagagaaaggggaaagacaactratattttaggtgattctatttagataaatggcaaaatccgccttggaaaagctacataataaatatacaagtcatttgtaaactattcggatcacttagg

SEQ ID NO: 284068 - DNA, 201 bp, Homo sapiens
aatctacacccctgcatttattcacatcttttttcccctcataaaagtagtacctgctcattaaactagaaaaacactgaatatagtaaaaagaaaataargttgttcatattcatagtcactctaaaatctaggtactggtcaaccttttgttttcagacatttttgttttgcttattgtaaaaatatgatgcatattca

SEQ ID NO: 284069 - DNA, 201 bp, Homo sapiens
ctacttattccaaaataattgtttgcatatttcttccaaatctctattatacatttttcatccatcatggatacaactttgttttctgaagcagaaaggayacatttaacctgattttacagaagatgctataagacatctcagaaaaatttaagtgacaatgttaagtaaaaatataagttaaaaaatgatgtatgacac

SEQ ID NO: 284070 - DNA, 201 bp, Homo sapiens
ccactatccaaaggctgtccaaaagcaacctcctggggatgcctgaaaccacagcacttccccactcttcactggctgtcaacatctccaggctgtcctaracatctcaatcctttcatgccactgtggggccaatgatgctgttaatttcttctcctctttctcatctcttcacttggaatgccacttttttcttcagaa

SEQ ID NO: 284071 - DNA, 201 bp, Homo sapiens
cttagccctacatgttgctccctattgataatcagaccttgtgagtactttcatcattttataaatataagagagtagactggactccggaaaagaagagraagtggagataagtaaaactgtgaactaagtataattgttttttttttttttctttctttatacttggaaatacctgggcaaatagctatagaacattgt

SEQ ID NO: 284072 - DNA, 201 bp, Homo sapiens
tgctaccttatccttttccctcatctgtacagtaggtagtatggcctggggagaaagaaggctagcgtgttttccacgcaattacttagccctacatgttsctccctattgataatcagaccttgtgagtactttcatcattttataaatataagagagtagactggactccggaaaagaagagaaagtggagataagtaa

SEQ ID NO: 284073 - DNA, 201 bp, Homo sapiens
atatcttttataaaagtcaaatctaactttttatatatagctcaaaattcatttttttttttatgaaggggactttcctaactggaatattaaaatatacrtatgatcatgttactttaaactttttcttttgaaaatttagctattatatatgaagatactgctgaaaaataagcatttcattttaatagaatattagaa

SEQ ID NO: 284074 - DNA, 201 bp, Homo sapiens
gacctaaatttaatcatttttttttccagtagtctgtggtgactttattagtgatttcataactatgggattacaatttggataaatcagatcttaatgcycactgcccctttgagtaagctgagagaaagaagtgaccctgcaggttttcagaatttttgagcctaattaaaatagcttgctaccttatccttttccctc

SEQ ID NO: 284075 - DNA, 201 bp, Homo sapiens
ttttgtatattaaagacatatcttttataaaagtcaaatctaactttttatatatagctcaaaattcatttttttttttatgaaggggactttcctaactkgaatattaaaatatacatatgatcatgttactttaaactttttcttttgaaaatttagctattatatatgaagatactgctgaaaaataagcatttcatt

SEQ ID NO: 284076 - DNA, 201 bp, Homo sapiens
ttctagcaagatactgcattggaaatgttaggaaacaaataatttagcttgaggcatctctgagcaggtaatattttgaaccattcagtctcaggtctctytcatctcccagtccttcaaagttcttccacctcctttgacctaaatttaatcatttttttttccagtagtctgtggtgactttattagtgatttcataac

SEQ ID NO: 284077 - DNA, 201 bp, Homo sapiens
ggaaaaaagtaaggtagtcataaaaaatagacaacttgaaattcacctcattatatctggatttccctgacatgggtaaatctagtgatatggttgtaggwgactggatggattaagttttttattaagtttttagagttagggaatggtagaggataggaaaggggaatttttatccttcctgttttgtaatattttagt

SEQ ID NO: 284078 - DNA, 201 bp, Homo sapiens
ctcccagattcaacttttgcgctcacagtacactgctagttttcaaatgatcagaaatttttttttttctcggcaactccaattatgaattagctatccarttagtgtttgtgattgttttgagacttggcagtgtttgttcttatgatttatcttcttttctcacacatttcagggatatattagtttcctttatccagt

SEQ ID NO: 284079 - DNA, 201 bp, Homo sapiens
attttgatgaatataatgattataaatttagcatgttggttttttgctgaaattgcaatatatcatctaattctttagtgttcactctgttgctgagatayacagtattaaccattaagatctatagttggacaaatgaaaaataagatttctggtataatcttggtatttggaacaattatttctctgcaatgctaaatc

SEQ ID NO: 284080 - DNA, 201 bp, Homo sapiens
gattaattgaagaaaaagactcttaagttttcctggacaccttttaatgaaaaacagaaattggctaatataagaatttcacactatatagtactgtataygatttgccgtaattttgatgaatataatgattataaatttagcatgttggttttttgctgaaattgcaatatatcatctaattctttagtgttcactctg

SEQ ID NO: 284081 - DNA, 201 bp, Homo sapiens
tattctacattgattatatctaatcaaataaataactgcttccaacttactgaaattacattaaagttggagggaatttttgtatctctactataactcayttttcttactggataactctaagatacctcaggaaaacatactttatgaaaatgaatataattaaggaataatagtagaaagcatagatttatctttttt

SEQ ID NO: 284082 - DNA, 201 bp, Homo sapiens
cacttgaaatttgatagaagtctcctgtaaaactatgtggacctggtggttttgtatttgggataaggtggggaaaaggtggaaattaactacaagtcccrtctctatattgtataaccagtattcacttagtctgttctttttagtaggttgaatttttctaggaattagagcatttatttttttcatgtctgttatttc

SEQ ID NO: 284083 - DNA, 201 bp, Homo sapiens
atgtcagccatcatcttccagctcagtcttctgagcgtgactctcttttttctgtatttcttttcacagtgcctttactttctgctttctctttctacctrgaagaccaccctaattttgttttcgttgtatttttaacctagctctacattatggggctgctacagtgattgtgctttggcttcacttatgcctgtggga

SEQ ID NO: 284084 - DNA, 201 bp, Homo sapiens
gaagggttaagtaatcttagccaagatttctaaaagctcttattaatctgatttttcagaattagaaaatctctgttgtcagagttctccagtttggggtktgataagaaagcatatcatagaaattactctgcctacctaaaatcctttatggtttagattttattctgtagtgcctttacagcactcttagtgcttcag

SEQ ID NO: 284085 - DNA, 201 bp, Homo sapiens
ccacattgtgcttccaggccctgctacttgttcctgatggcctcagggcattttcctatgctttgaagtcctctttcccagccctttcctttcagcttctmctgataaacccccactggggtatttgaaataatcttttaaatattgcttcctctgactcttcccttatctctctaacatttccccggcattcaacaagga

SEQ ID NO: 284086 - DNA, 201 bp, Homo sapiens
acatttccccggcattcaacaaggaataccttgcctttgtagcgttttctgttttatgtttttttgtgagtttatttgattaagatctatatcctcagctwggctgaaatctccattgtatatttagtttcttgtacagattcctagccccaaatcgtagacactcaataactccttaatgaatgaatgaatttgttttct

SEQ ID NO: 284087 - DNA, 201 bp, Homo sapiens
ctattgaataatttgttacggttatatagttatatattttttctatttaacagacctacatttttagctttaatcttttgtatatgtatttaatatttttrtgaatctgaagttacctttgtttgagttgtgaaatggcaaggatgtttataaagggtcaggttaattagtttttcaaatggctttaccaaacacaggttt

SEQ ID NO: 284088 - DNA, 201 bp, Homo sapiens
aggaaatgctttgtatttaagatttggccatatcttctaatattgaagtgacagagtaccaagatttatttttcataatctcttactttttatagtccacktggggacactactcttctgttaagagtcactgacctccatgttcctcaccaataagaaatcatttttaagttacttcagttgttttcttctaatgtaagt

SEQ ID NO: 284089 - DNA, 201 bp, Homo sapiens
caataactccttaatgaatgaatgaatttgttttctttattgaatctaacaagtactgtattttgtatattgttaaagcttaaatactttttttgattcamagtaaattcataggttcacaaggcacagtatggattaataagcaataccatttcctggttggttgttatagagattacataagaattcacacatttacca

SEQ ID NO: 284090 - DNA, 201 bp, Homo sapiens
agatggagtcatacagtatgtagccttttcatattgggttctcccacttactaatatgcatttaagtttcatccatatcttttcatggcttgatagctcayttctttttagcaccgaataatatttcgttgtctggaggtaccacagtttatatatccattcacctactgaagtaacatcttgatcaccttcaagatttgg

SEQ ID NO: 284091 - DNA, 201 bp, Homo sapiens
tgatgtttttgctgacaaataagatattaatcctaatggagtattgttttcccttgtgaagtcatatattcatttaagttacatttttctgtctttatccragtgttaaaaattgattatccagataacctcaccattacagtgtttcttcttttctcttcttttttttttgttttcttttctttttttcctcttttctct

SEQ ID NO: 284092 - DNA, 201 bp, Homo sapiens
taatcttctttaatgaaattgacacttccagagattagcagtgcctctcttcatgaaacttaatgatcagaaatgatcatatttgctagaaaatttgcaawttcaggcctttgctatatttgaaagcagatttaaaattgtgctgcaaatctgcttacagttttacaaaacatgactttcaatcgtatatcacaggtaact

SEQ ID NO: 284093 - DNA, 201 bp, Homo sapiens
aatgtttttcttttccaacatggtgacttttgttctctgtacttttaaaaatttatgttgcagtctataccatttaaaatttatgtagcctgtgtgtatatgtatatgtgcacataaacggatttattttgtgaataaaagagggttatttctcagtaacttattgtctaacaaggtaacgagtgccatctagtggtattt

SEQ ID NO: 284094 - DNA, 201 bp, Homo sapiens
aaatgtttttcttttccaacatggtgacttttgttctctgtacttttaaaaatttatgttgcagtctataccatttaaaatttatgtagcctgtgtgtatatgtatatgtgcacataaacggatttattttgtgaataaaagagggttatttctcagtaacttattgtctaacaaggtaacgagtgccatctagtggtatt

SEQ ID NO: 284095 - DNA, 201 bp, Homo sapiens
ctaaaccagtagttgataatctctagattcctcattagcctaattgtctgaggataaattctgctttcttctgagggttgctaccactttccatcattttytagggcggactagaactttgctacttaaaagagtgagctgctgactgtcagcatctgcgtcacagatgaggttgttagaaatgcagactcttgcttcccc

SEQ ID NO: 284096 - DNA, 201 bp, Homo sapiens
cagatactttgtcttcaaattcttgtgggtggaagaagacctagtttttgtccttgagtaggaattggaatactgagtgtttagtaaaggtgttttagaaytttgacaaataaaaagcctgaatttgtattgtatttttgccttcatgtcagatctgtgacagactgtggtgttatgttcttttaattgacaagtgcgtaa

SEQ ID NO: 284097 - DNA, 201 bp, Homo sapiens
ataaaatcatgggaaccactagcacatacctaggtctgcccttttagttagtagaattatttttctacgttatttccccagccactcctctcaccctaattgtctgtattatagctttccctaattgtgaactcctaattgctttcaacctaaataaatatgattctttctaaaacactcaggaataacaactgttcactt

SEQ ID NO: 284098 - DNA, 201 bp, Homo sapiens
ttttggaagcttttggactagttatgccattccaaagtttttttgctgctttagtgttccagagcaaatatactctgtcattctgtttaacttccagcttstctggggaaaaataaagacatctctagtccaaaattgcttttgggagtatagttccacatcttttggtctgaatgaaaggcctagggaaacatgaatttt

SEQ ID NO: 284099 - DNA, 201 bp, Homo sapiens
gagtatagttccacatcttttggtctgaatgaaaggcctagggaaacatgaattttgttacctttttattttattttccttcacttataaatcatcatcakgatccccctttacatccatgcgtctcactttttataaacactgtttattccctttctgaggatggttatttgtagttagttttgccatttacagtcttat

SEQ ID NO: 284100 - DNA, 201 bp, Homo sapiens
accacagtttatatatccattcacctactgaagtaacatcttgatcaccttcaagatttggcagttatgaatcaagctgctattcacatctgcatgcagarttttgtgtggacataagttttcagttcatttgagtaaatacccaggagtgtgattactggatcttatggtaagatatgtttatgtttgtaacaagattgc

SEQ ID NO: 284101 - DNA, 201 bp, Homo sapiens
gaaaaacaccaaactctctagcaaaaccactgctaagttatccactagtgctaaaaggtaatgtgtaaaagaaggatccagcacactttgtcaggttgtcytccaggtggttggacgcttttgttggttttacctcaatagcagtagttcagaaatatttacttcattatcagtttaattgtacttgaatgagttgtcatt

SEQ ID NO: 284102 - DNA, 201 bp, Homo sapiens
atgttagttatatttttggagtaattataggtcattgatttatcacaatagttttttagtgagtaaaacacttcaataataattgatattttaaatctgayttctgggtctttagaatactgaattccagagccagaatagtttaattaatttaaccaccagcctgtaatagagtaagctttcaaatgccttatttgctgc

SEQ ID NO: 284103 - DNA, 201 bp, Homo sapiens
taagtcaatttcagtcctgtgactttagatagtaacctacattatagtgatatacgtgcaccacattaacacaatttcgttaacatttacattgtaaattmtttggacagaattatggcatgatgtgaaacgtcaattatttttctcaaatgtttataaattgtcttaagagagtgagataatggttctacataagcatta

SEQ ID NO: 284104 - DNA, 201 bp, Homo sapiens
ggggaggttgaattacagttataacaagggtagtcggggaagacctcacctaaaaaatgagtcaagagctgaagatggtgaggaataagccacataggaaragagtcctacaggcggagggaataccaactgaaaaaatcttgtaacaagagcatgcccaatgcattcaaaaggtagcaagtgcttaggagggctggagca

SEQ ID NO: 284105 - DNA, 201 bp, Homo sapiens
tgtgtagttggtatttatagctgtgagacctatgatcactcactcaagggaatgagtgctgctagagaagaaagaagcttaggcactcccagcattaggargctgaggagagatgagtcagcaaagtaatccaggaaggaacgctcaagaagtgaaaggaaaatcaggagagtgtgataacctgaaagggaagtaaaaagt

SEQ ID NO: 284106 - DNA, 201 bp, Homo sapiens
aactatttgttttagtaactttattgaatagtccagtggctagagtgccatctgtcatttcatgattctttttttgcctagttctgtgttgggctcttccrttctattcatcaagttgtctatctctgcacaaatagtacatgatatagttttaattactataattctaatgagtcttgatatctagtaggacaagtatct

SEQ ID NO: 284107 - DNA, 201 bp, Homo sapiens
gtggggccatttttttgcttttctctgaaaaactagtcagcaaagaggttggaattttaattggtttaactacttaacttagaaagccaagagttaaatayttagaagtgaaactttttttcttttcctgattgggtctttctgaacaatatttttgctgtgattattgcacatttaagcccaactgtactttttatctga

SEQ ID NO: 284108 - DNA, 201 bp, Homo sapiens
gaccaaaaaaatttaaaagtgtatatatatatgtgtgtgtgtgtgtgtgcgtacgcacacattctcacacacatatatgtatgttagatggtaagtgttayggagaaaaacaaagtagggaagggaaatagtgtgtgcagtgagggagaaagaaaggggaggttgaattacagttataacaagggtagtcggggaagacct

SEQ ID NO: 284109 - DNA, 201 bp, Homo sapiens
agcattatactggctgctttgagatatataaaagaactataacatctaaacatttaatgttagaatgaaatgtaatttctatttagtataaggtatactamaaattataggatgaaggtgggtaatcactagaggtttcagatggatcataggtaaaaaatactggaaaaacagtttagtctgatgacaaaggaaatcact

SEQ ID NO: 284110 - DNA, 201 bp, Homo sapiens
caggttagaattcaggttctgccacgtattagctctggagccttgagcaagcacctgacctcagtttcctcatttgtaagactagggacccatactaaatratatctaaagacctttcaattctgaacatccataattgagtcccaggccaaatgtgctaagtatctgggttggaagtagtgataaagaaaattacataat

SEQ ID NO: 284111 - DNA, 201 bp, Homo sapiens
actacagaagaatcagaaagttaaaaaaaaattttaagttgacatagtaaaaaagttacagccaggctcacacctgtaatgccagcacttttaggaggttraggggggaggattatttgaggccagaagtttgaggccagcctgggcaatatagcaagacaccatctctacaaaaaatttaaaaattagcgggcatggtgg

SEQ ID NO: 284112 - DNA, 201 bp, Homo sapiens
tcacagatttcactttatcagtttggaaaatgagataatgttatttcaaatttatttaaccatatattgcataatcacattagaaaatttatattgataartaaagcaagcatttaataaggtggtgttttctgatgcatacttaaagaacttggagtctgccccactaacttgtctaagtgttcttacaacaatataaga

SEQ ID NO: 284113 - DNA, 201 bp, Homo sapiens
ttcctggtttatgtatttactgtgctttttattgttattttagagtgtactccttatttttttaaagttaactctaaaacagcctcaggcagttctttcargaggtattgcaggagaaggcattgttataggagatgacagctctatgtgtatgttattgctcatgaggaccctacagtggaacaggatgtggcggtggaa

SEQ ID NO: 284114 - DNA, 201 bp, Homo sapiens
ttaaatgacgatgataaaatatctacctgataattttggtgtgagaattaaatgaattgatacatggaaagttcataaactggtgccctccacgtaagttsgtgctagataaatgttagctataatcattactactattattattatccttaatttaagtagactctttatttctccctactccttactgtcacaagtgat

SEQ ID NO: 284115 - DNA, 201 bp, Homo sapiens
gaaacaaacttgtgctgccagcacatataattatatgtagtacatacttgataataaacaactgtgttcctggtttatgtatttactgtgctttttattgktattttagagtgtactccttatttttttaaagttaactctaaaacagcctcaggcagttctttcaggaggtattgcaggagaaggcattgttataggaga

SEQ ID NO: 284116 - DNA, 201 bp, Homo sapiens
aaagcaatgggaatacctgtgttttatatttcttttgcatttgtaacctctcccagtactcatgtttgttactaatatggttagtcatttttctcctattsatactgtcgttgtaggtcaggtaaacatgtatgttcagtccttcactatgagtgagccaaaagttcatatgaagacttcagcattgagtccccaaaggat

SEQ ID NO: 284117 - DNA, 201 bp, Homo sapiens
tgatgctggtggaaacaaacttgtgctgccagcacatataattatatgtagtacatacttgataataaacaactgtgttcctggtttatgtatttactgtrctttttattgttattttagagtgtactccttatttttttaaagttaactctaaaacagcctcaggcagttctttcaggaggtattgcaggagaaggcatt

SEQ ID NO: 284118 - DNA, 201 bp, Homo sapiens
tcaatgtagagccctttcttttttgtttttaaaactctctaagatagctctactttatatggaaacaaattttctaaagagcaggcaatggatttatggamatttgcacataaacgtgtaatcacattttgtctaaaaactgtaaaaatattttaacgtcattcaaaacatacgttaaatgttgagtaataccaagaagca

SEQ ID NO: 284119 - DNA, 201 bp, Homo sapiens
tgtcacctaattgaggttgtagtcatcgtagcatcgtcagacagtgcattactcacatgtttgtggtgatgctggtggaaacaaacttgtgctgccagcamatataattatatgtagtacatacttgataataaacaactgtgttcctggtttatgtatttactgtgctttttattgttattttagagtgtactccttatt

SEQ ID NO: 284120 - DNA, 201 bp, Homo sapiens
tggcaatttctcaaggatcttgaactagaaataccatttgacccaccaatcccattactgggtatatacccaaaggattataaatcatgctgctataaagacacatacacatgtatgtttattgtggcagtattcacagtagcaaagacttggaaccaacccaaatgtccatcaatgatagactggattaagaaaatgtgg

SEQ ID NO: 284121 - DNA, 201 bp, Homo sapiens
agaatctacaaagaactcaaacaaatttagaagaaaaaaacaaccccatcaacaagtgggcgaaggatatgaacagacacttctcaaaagaagacatttaygcagccaaaagacacatgaaaaaatgctcatcatcactggccatcagagaaatgcaaatcaaaaccacaatgagataccatctcacaccagttagaatgg

SEQ ID NO: 284122 - DNA, 201 bp, Homo sapiens
tttgtgtttgtgttgtgtttcactagtttatactattacgtttgttaccttttctatttacttgagctaattttgctgttctttttgtaattttttagatwgggttcttaatttttagcttttcttctgtaatacaaacattaaagctgtacatttacctctaagtactgatttttgtggcctctcatactatttttttaa

SEQ ID NO: 284123 - DNA, 201 bp, Homo sapiens
ggggaccatttcaaacaatgaaattactaacaaaaagcacaaaaatgcaaaaagcatggtactaagtaggctgcaaaaaaaaacaaaaaacaaaaaaaaaaccccacaggtttacagaaagagagctgaaacagaagacagagtgctgccttgttcaacctcagctgggactcaaatttttctccactctgcgcattgtct

SEQ ID NO: 284124 - DNA, 201 bp, Homo sapiens
atgaatccctaaacataacaccagtactgctaaatgacagttatctaatctcactgatgaacaagaatatgaaaattataaaaggtcgaatttatttattrtgataagagaataatacccctccacaaagggtattacatgaccgcaaagaatggcagttcctagtactctgacgttccacagtaggctaaagaagaaaaa

SEQ ID NO: 284125 - DNA, 201 bp, Homo sapiens
acatgtgaatttagtataaaattcaggacatgcaaaaacatatttaaaaattgaaacagcatttatggcccaatattttaagcctacatatagtcacattrggacattttaaaatgagggctttatcacatagcttatatgtgttctttgtgaactaaattggtgacttgcattttttttattttaatacatctagaacat

SEQ ID NO: 284126 - DNA, 201 bp, Homo sapiens
gttaacccaacatattaaaaatattgtcatttcaacatgtaatccgtgtaagagtattgttaatgaaatcttacacattttctttttggtactaactcttwgaaatctggtatttattttacacttctagttcgtctcaattcaccttgccacaatttaagagctgtatatgcacatgtaactagtatatgctgtattggt

SEQ ID NO: 284127 - DNA, 201 bp, Homo sapiens
gttctgtttcttactttactgtctaggacaaccaagtcataattgagcttcttttcttgttccatgttttaaatggagcggtataaacttgtcatctttamtattgatgtttggcgtgggtgtttgaaaaggtattctttatcaattaattcggtcccttttttttttttttttgagacggagtctctctctgtcgccagg

SEQ ID NO: 284128 - DNA, 201 bp, Homo sapiens
ttcttaaaaatgttgaattttctttttcataaacatactgtatcaccctcatttatttaggatttctttaattctgattttgctttgtaattttctgtatwcaagtattgtacatcttttgctaaatttatttctaggagtttaatatttttgatgcttttgtaagttttatctaaaaacttgttttttatctagcaacct

SEQ ID NO: 284129 - DNA, 201 bp, Homo sapiens
tgtgttggtcccctaccccctccctgtcatgcattcttttcaggaagacacttttgagagcatttaatgttttcctcccagattcaacttttgcgctcacmgtacactgctagttttcaaatgatcagaaatttttttttttctcggcaactccaattatgaattagctatccaattagtgtttgtgattgttttgagact

SEQ ID NO: 284130 - DNA, 201 bp, Homo sapiens
tctgtcgcccaggctggagtgcagtggcacgatctcatctcagaatgtgtatatttttctaatgtcagactaactttgcatttccaatttggcaatatatrttatcttttttcaatatgaacagtcttggatatgatttgttactaagagtcttacatgtgtgttcatgatttgagattggcttctttttttcttacacct

SEQ ID NO: 284131 - DNA, 201 bp, Homo sapiens
tttataatcaggttgttcattttctttagttttaatggttcatcgtatatttttgataacagttctttatcaggtacatcttttgcaaatattttctccargactgttgcctgccttgttctcttgacattgtcttgcagagcaaaaaaaatctaggctgcagttacagatttggaagttaagagcatattggtgctattg

SEQ ID NO: 284132 - DNA, 201 bp, Homo sapiens
gatgaagagtcacagggtcatttttttctgtattgccccatgttatttctttgccagtaggttgaattgaaaggtaactgggtaagaagcaccctagtttyagaagtataatttcaacaacttctattttgtctcacaccatgagtatttcttaagttagcttagcaaactcagatatgttggctgctcccaccttagtcc

SEQ ID NO: 284133 - DNA, 201 bp, Homo sapiens
tgtcagctgctgatttttctttttgaacttaaacacagcttttgtcattgtcatggaaatgttaccatgttctttattttaaaatgtatttataaaaaatrtgaattactttttaaatagtaataactactcttactagtgatatatattactttcagtagatgtattatatattactcttagtaatattatatatgtata

SEQ ID NO: 284134 - DNA, 201 bp, Homo sapiens
tatgaaaaagtatagaaggataaagtacatagagaatgtttaagctggcagatacctatcaattcacaatactttttttgaagacaaacttaggaatgatkacgaacgaagaaaaccctctaaattcatagatttgattgccatgatttacaacagtgctttccaataaaaatgtaatgcataccacgtatgtaattttca

SEQ ID NO: 284135 - DNA, 201 bp, Homo sapiens
tctcaccagcaaatgttgtttctgttatatagtaccatggagcatgttagagcaatgagaatgagtccagagtaattagccatgaagattaaaatttgttsaattcaactagctttataaagttataggaaattttagaaagataaaataaccacatgctacttctggcattcatatggcagaccttgaaataaatactag

SEQ ID NO: 284136 - DNA, 201 bp, Homo sapiens
ctagttctcgaggatttcttttagttccatgtttcctccaggccaacagtaagatgttttcacttttctttctttctttctttctttttttttttttttttcagaagaggtgtggtggaaaggtcttccagaaccagaggctaagcacacagcagtacaaatataaattctttattccagcttccagaattcctcctcttc

SEQ ID NO: 284137 - DNA, 201 bp, Homo sapiens
acctagctctacattatggggctgctacagtgattgtgctttggcttcacttatgcctgtgggactttcattttctttactcttcttggtactgctggctrtcttctaaaatgaatgttcttgaatgtataataaaaacagttatactctagtagcaatttatgccaataaaatataaagaacactaattatgtttagaga

SEQ ID NO: 284138 - DNA, 201 bp, Homo sapiens
tcatatattcatttaagttacatttttctgtctttatccgagtgttaaaaattgattatccagataacctcaccattacagtgtttcttcttttctcttcttttttttttgttttcttttctttttttcctcttttctcttttcttttcccctccctccctcccttcctcccttccttcctttctccctccctccctctct

SEQ ID NO: 284139 - DNA, 201 bp, Homo sapiens
accatgtaccctagaaatattttttaaaatagttatgtcatgaatgcataaaatatatgtagatattagtctatttatgtgttaacctacttcgttatcadactcctggtccactgtaggctactacttttggggagtcaaaagccatgtgtgggattttccactgtgtggcatcacccccctgtgttgctcttcaagggt

SEQ ID NO: 284140 - DNA, 201 bp, Homo sapiens
taaatgcaaccagatttttagatcttgtgtgatttccaagccttttcaatacagtttactgcttcctcttttattgttacaagaaagattgttcagaagarctttcaggatgtctggtgagcaaggaagcttaaaagtcaagtcttatgcctgcacaactagaaaaataaatgaaagtgccatttaaaaaattgttttaaa

SEQ ID NO: 284141 - DNA, 201 bp, Homo sapiens
gagtttgcttaaatagacatactttcacttgttttaaagtaaaggcacacctccctgttcaatgtatatgcattctgttcatattgtttgtgatttcagatttttgttgccttccaccttttgccgttccagattccatgaaggatactacttctggatctaggatggccagataaaatacaagatacctaattaaaattg

SEQ ID NO: 284142 - DNA, 201 bp, Homo sapiens
tttgacatatggtgccacatgtttttatttttattatagtgatatgtttctagtaagatttacaagatatttgacccttcaacaacacgggtttgaactgyacaggtccacttaataatgcagattttttttcaaaatgtatcagaaaacttttggaaatttgtaacaatttgaaaaaacttgcaaaccatgtaccctaga

SEQ ID NO: 284143 - DNA, 201 bp, Homo sapiens
atggtttaatttctttagagctaagcttgaaataattttgtagacagtgaccgtgattctctgttgcagtctttgacaaagtcagtcttgcagtatgtgctttttttttttttttatcagactagggtataatttgttttatttttcatgggaatgtaaaattagttgaatgaaacatcattggatcttgatgcattaaat

SEQ ID NO: 284144 - DNA, 201 bp, Homo sapiens
gttaaagcttaaatactttttttgattcaaagtaaattcataggttcacaaggcacagtatggattaataagcaataccatttcctggttggttgttatasagattacataagaattcacacatttaccaaaacgaggtcattcttgggaagaggagtaggaagataaaatcatgggaaccactagcacatacctaggtct

SEQ ID NO: 284145 - DNA, 201 bp, Homo sapiens
ttgaaataattttgtagacagtgaccgtgattctctgttgcagtctttgacaaagtcagtcttgcagtatgtgctttttttttttttttatcagactaggstataatttgttttatttttcatgggaatgtaaaattagttgaatgaaacatcattggatcttgatgcattaaatattatagcagtgctaaggatacttat

SEQ ID NO: 284146 - DNA, 201 bp, Homo sapiens
ttcggcaccaaaacatttcttttcttcctcactttctgtctttctgtatgtatgtgtacacacacagttgtatatgctgtggatgtgtatgcaaacagacrtacccacacacatagatggaattactgtatcagttatttaagtataactgatcagttcctcactttagttctttctatacagggtaaaaacaaaaaattt

SEQ ID NO: 284147 - DNA, 201 bp, Homo sapiens
atcataccaccataaaatccactactactactgtcttgggggtgtacgtgggagtgtgtagtaaaaaggtttaaaatttataacttgccatcttgggcagyaatcctggccaagtttcttaaaagacaatttgatacactaataaaacttctgccaaaataatcttttacagagccaaagtaactttaggtatgataagct

SEQ ID NO: 284148 - DNA, 201 bp, Homo sapiens
tatcagaatctgcttaatacaaattttaggaaaagaatccacttctttacaaggcaatactctgatcactatttcctgaacagttattgaaggtgtttcargcaagagttacatactagtatagatttttaatgcaaatggccatatttgttttgaaggtgataccttgtgggttttcttcaactctttcaaaacttgaat

SEQ ID NO: 284149 - DNA, 201 bp, Homo sapiens; identical to SEQ ID NO: 58018

SEQ ID NO: 284150 - DNA, 201 bp, Homo sapiens
agcatttggcagtgctgaaattgagccttctgttcgttcaaaataattcactgatgagtgggcaactttatacttttttgagggtttttttttttttttttgctgaattcgagtattggaagtgttttagcttacatgttagctatatgtaagtaccttcaaaaaatgacactacaggcataggcaagtacataatcggga

SEQ ID NO: 284151 - DNA, 201 bp, Homo sapiens
cttcctctccccctgcaccttcatgctttcccgcagtttttgtttataacgtcacaactttatattgaacacgcgcgcacacacacacacacacacacacmtacacacacatacacaagttataactgttccctataaaagtagatattcatagattatagcttctggagtttataaagtacaatattgcattttagcaaa

SEQ ID NO: 284152 - DNA, 201 bp, Homo sapiens
ttccagcggatcctctggttggaagcatagccactcagtatttgaccaacagagcagaacacgacaggatagccagacagtggaccaagagatacgcaacrtaattcacataatttgtatgcagtgtgaaggagcagaaggcatcttctcactgtgctgcaaatctttatagcctttacaatacggacttctgtgtatatg

SEQ ID NO: 284153 - DNA, 201 bp, Homo sapiens
ttttaatgttctttctgcttttccagcggatcctctggttggaagcatagccactcagtatttgaccaacagagcagaacacgacaggatagccagacagwggaccaagagatacgcaacataattcacataatttgtatgcagtgtgaaggagcagaaggcatcttctcactgtgctgcaaatctttatagcctttacaa

SEQ ID NO: 284154 - DNA, 201 bp, Homo sapiens
atgaaggaagcattttatttgaaatagcatggtattgtaagactggggttttattttaaaattaaccatttttgaactattcataagcagaaatataaccrcctagtatacttccattttgaatgaaaggccaaaattacaaaatagtttttgtatattaaagacatatcttttataaaagtcaaatctaactttttatat

SEQ ID NO: 284155 - DNA, 201 bp, Homo sapiens
ataatactcaccattttatattcatgtatcatattctatcgagtgaatgaaccataatttaccaagcatagtccttatgttggacagtttgagtggtttcmatttttatatagtataaattatactgggataaacactgtcaggcatatagcatttaaaaaatattttggattatttccttaggatagattcccagaagta

SEQ ID NO: 284156 - DNA, 201 bp, Homo sapiens
ttttagcttgcttttcacaactgttattttaataatggcaaatttaattatgtgggtgaatcagtatgtgtaatcatttgcatattgttggacatttccartttttcagtatcatttttctcacttttagaatgtttccttgaagtacatttcttttgaaatggagaaatctggtcaaagggtatggccacatttaaggct

SEQ ID NO: 284157 - DNA, 201 bp, Homo sapiens
gcaatttgttttttaatgtcagtaaaagcagttcctaggaacttgcgtaaaaaagaaaattagcctaaaaacttcaggcatagatgaacaaatattgtatyccttttaaaggaacatgcataagattaatgatatttaattcaatagagaatattatgattgtccagtaaagtataataaacaatttttagatgagtaatg

SEQ ID NO: 284158 - DNA, 201 bp, Homo sapiens
ccaggctaggcgacaattggtaatgcccagagatattttttgcttttcataactgaaggagaagggggctaccactgacattagtaggtagacgtcagtgrtactgctgaataccctgtaatacataggacagacccccacaataaagaattatctgggccaaaatgtctagtgctgaagttgagagaccctcctatagat

SEQ ID NO: 284159 - DNA, 201 bp, Homo sapiens
ttcacctacaccttcctcagctgattcttcacttcctgctacttctatgcgtagtttacatatgtcttatattatttgtcatacgtgtgtgttattttttrtgtgaaaccacaggaatgactaccttgagtacttgctaaattatggtcttctgaggccagaaatgcttacagcagtattttatttcttttaggtcttgtg

SEQ ID NO: 284160 - DNA, 201 bp, Homo sapiens
atttttgcaatttatttattgaagaaactgggctgagtttccttagagtctgttttgcttattggatttctgtggtatagtttaatatctttcttcatccttagtgtttcttgtatgtttgggagttagatcaagaggcttgatcaaattcaggctggatttttttttttttttctgacagctaccactttttgtttgttt

SEQ ID NO: 284161 - DNA, 201 bp, Homo sapiens
tctaatctcactgatgaacaagaatatgaaaattataaaaggtcgaatttatttattatgataagagaataatacccctccacaaagggtattacatgacygcaaagaatggcagttcctagtactctgacgttccacagtaggctaaagaagaaaaactgaacatttcaagaaataccacaataccaaaaaaagcatttg

SEQ ID NO: 284162 - DNA, 201 bp, Homo sapiens
tttatggtatattagtgaaaagaactgaatttaaatggtagttaaatttatcagtctcttatatgattagcactttttgtgtcatggttaagaaattactytctgtcccaaggtctcgaggatatctttatttttttttcaaaggcttgcccttagtgttccaaatttatttggaattgattctttgaaaagggtaaggta

SEQ ID NO: 284163 - DNA, 201 bp, Homo sapiens
tgagatacacacaaacctattataaaaagttagaatttatcaaaacttacacagtcatttacagaccacacatggtgccatttggagtcaagagaatcgtwaatgtaaatattaaatcgtaactgcataaaattaactataacatactgtattactgcagtaattttgtagccacctcctgttgctgttgcagtgggctct

SEQ ID NO: 284164 - DNA, 201 bp, Homo sapiens
tcttagttgggataaggagagtggggaaggggcagggggagatgatgaaattcatttatcctctgtgatgctatggaagaacaattaagatcatgtttccyacttgattttagttgctagtcatttcttaatctaagcaccccctataatttacctatgtcatcatgcaaaatcaccattggtaataatgtgggggcgggg

SEQ ID NO: 284165 - DNA, 201 bp, Homo sapiens
aatcttcagacagacaatgtcttacgaagaaaatattttggaaggattttaagtaaaacccaaaacttttatttgcatatacttgcatactgtcagcctakaagacaaactcagcactgtgtgtaagttacttttaaaaattgactttgaatgcctgtatcagaacttatttggttgcagcggcatacaactcaaaccaaa

SEQ ID NO: 284166 - DNA, 201 bp, Homo sapiens
tttttaaaagggtattaccgaatcagttgacaacattataatacaaattgtactttaaagaattgtattaatgtatttactgaaattgtaactgtattgtratttataggagattgtttttaggaaatgcacactgacatgtttatggggaaaaggccgtgtgcaactttcaggtgactcagaaaaaagtatgtctctatg

SEQ ID NO: 284167 - DNA, 201 bp, Homo sapiens
tgtgtgcctccaaatgtgataccatgagaaggacacatactatttcagccagacacctactatttcagccagaaatgcgttacatgaatcaaatcatgagsaaacatggcaagctcaaaatgatgagcattttttaaaaaagaagactagattctgcaaaaaacgttaatgttataaaagttaaagaaaggcggaaaggac

SEQ ID NO: 284168 - DNA, 201 bp, Homo sapiens
ctccaagactgttgcctgccttgttctcttgacattgtcttgcagagcaaaaaaaatctaggctgcagttacagatttggaagttaagagcatattggtgstattgggagccgtaaaactgcataagataaccaaaacagtatatgtaggtagaaaagagaagagtgtaaggtcttagctctggaggactggtgatattta

SEQ ID NO: 284169 - DNA, 201 bp, Homo sapiens
ctttgtaattttctgtattcaagtattgtacatcttttgctaaatttatttctaggagtttaatatttttgatgcttttgtaagttttatctaaaaacttkttttttatctagcaaccttgtataaatgttctttttaattctaataatttgcttatacattacattctttgatttttatctgtagacaatcttttttttt

SEQ ID NO: 284170 - DNA, 201 bp, Homo sapiens
ccctggtaagcaaatctttattaacatgtacaataagactacaaaaacgagtgctttttttttttttttttttttttttagttagctttaaatgtagattsagaggtaaatgttattcatagaaagatccccataaaacagtttgtgaggaaattaccaatgccatttgaagtagactaggccaaaagtttctcaatacct

SEQ ID NO: 284171 - DNA, 201 bp, Homo sapiens
tagttcttagatctttcaactatttttttttttttttaaatccttgatacatgctttccaaaggctgaggaaacagaaagtgagagaggggtgaaagctgyatataatggggattatctggagattagttaaagtttcactaatgccattaatttaaatatttgactccggccctttcgtgtatgagatttgttccgccat

SEQ ID NO: 284172 - DNA, 201 bp, Homo sapiens
gcatttttttgtaatctgattttttttttcaatttcagaagataatgaataaaccctaggtaactctttcatttccattcccttaacaaataactgcagtytctcatagaccattttgattcctgctggtttctctatcttgtttgtctgaaggtagagcagagacacctctgtgtattgtattttctgtcagctagttct

SEQ ID NO: 284173 - DNA, 201 bp, Homo sapiens
aattttaaattttctaatagccacataaaacataaaacaattttaatactatattagttaacccaacatattaaaaatattgtcatttcaacatgtaatcmgtgtaagagtattgttaatgaaatcttacacattttctttttggtactaactctttgaaatctggtatttattttacacttctagttcgtctcaattcac

SEQ ID NO: 284174 - DNA, 201 bp, Homo sapiens
acataaaacaattttaatactatattagttaacccaacatattaaaaatattgtcatttcaacatgtaatccgtgtaagagtattgttaatgaaatcttayacattttctttttggtactaactctttgaaatctggtatttattttacacttctagttcgtctcaattcaccttgccacaatttaagagctgtatatgca

SEQ ID NO: 284175 - DNA, 201 bp, Homo sapiens; identical to SEQ ID NO: 58027

SEQ ID NO: 284176 - DNA, 201 bp, Homo sapiens
tgactgctcctttttcatcttatttttcgtttagattcccacggtaataatcagttcctgtgtcagcctcaactgggattcatattgacttgggtttagcmggtggagtcgccagtctatttgcataaatgttggggttttggctggaagaggaaggtggggttgttgtctttcctttgcagaggtttctgggggggaact

SEQ ID NO: 284177 - DNA, 201 bp, Homo sapiens
tgggaggctgaggtgggaggattgcttgaggtcaagtttgagaccagcctggccaacatagtgaggccccatctctacaaaaaaaaattaaaaattagccragcatgggcgtgtgcctgtggtcccagctacttggaagactgaggcgggagggtggcttgagcctagaaggtcgaggctacagtgagctgcgatagtgcc

SEQ ID NO: 284178 - DNA, 201 bp, Homo sapiens
gatttctggaccagaagtataaattgccttatggatgggtaggccctatttgtcccagtacaattggggatggggaagaggatgggatgggaagtaagaayagaaccccaagagcctccccaccctctttgatcccctcctcctctacaggccttctgcccttggccaaaatcacttcagggacacaaaccccagtacaaa

SEQ ID NO: 284179 - DNA, 201 bp, Homo sapiens
tctccttcccattgcaaggtaacctaaaagattctttccccaggggtaatacctgtaatcctagcactttaggaggctgaggcaggtggattgcttgagtstaggagtttgcgaccagcttggacaacatggcgaatccccatttctacaaaaaatacaaaattagctgggcatggtagtgtgtgcctaaaatcccagcaa

SEQ ID NO: 284180 - DNA, 201 bp, Homo sapiens
gcctacttttaatatcacaagattcacatactaattactaagtagttacaagagaggaggaaggtcagctttcctgaaagaagcttgttagtgaaaatggratagtatattactattttgtgattatttctcagcttgctagaactgctaatatccttactgatctgatctttggcactattccaattgctgatgccctgg

SEQ ID NO: 284181 - DNA, 201 bp, Homo sapiens
agtgtggaaactacagaaaagagaaaaggcaagctgggtgtgatggctcatgcctataatctataatctcagctgcttgggaggctgaggtgggagggtcmtatgaatccaggagttcgaggctgcagtgagttatgatctcaccactgcattccagcctgggcaacagagcaggatcctgactctttgaaacaagaaaga

SEQ ID NO: 284182 - DNA, 201 bp, Homo sapiens
ggtggtgtcccatcaaagtgacaggacatctgaggcccaagagtatcccttctctgggaaagggacacagttcttgagccttcaattctactaaaaactgycaagttcactttccctttttcgttattcttcttaggaaccgttgccatcatatgaattctggctcactatgctgcattttctacttccaccccagaatct

SEQ ID NO: 284183 - DNA, 201 bp, Homo sapiens
ataattttttgagggaacaggtggtgtttggttacgtgaataagctctttagtagtgatttctgagattttgctacacctatcacctgatcagtatacacygtatcaaatttgtagtctttttatccttcactgccccccttaccctttcccctgagtccccaaagtccattgtattattattatgcctttgtaccctcat

SEQ ID NO: 284184 - DNA, 201 bp, Homo sapiens
gactgtagaattctttagccctaggagtttggaggtgaggtggagactgcctgtgatcagtgagttaccatctgtttttctccacactttatggcacagarcttgcattgctaccctgatttttttttttttcctccagaggatttctggaccagaagtataaattgccttatggatgggtaggccctatttgtcccagta

SEQ ID NO: 284185 - DNA, 201 bp, Homo sapiens
tagtgtgtgcctaaaatcccagcaacttgggaggctgaggtgggaggattgtttgagcccaggaggtcaaggctgcagtgagcagggattgaacgactgcrctccagcctggatgacacagagtaaaaccccgtctcaaaaaaaagaaaaaaagaaaaagaataataatactgaagcatgaaaggattaaataacttgctg

SEQ ID NO: 284186 - DNA, 201 bp, Homo sapiens
gaatcccctatatctttatttttttaattcaaaagtgtttttgagcattgttttgcatgttttgaattatgttattaattcagtaagtaaaaaatttattwtttatttatttatttattttattttattattattatactttaagttttagggtacatgtgcacattgtgcaggttagttacatatgtatacatgtgccat

SEQ ID NO: 284187 - DNA, 201 bp, Homo sapiens
cagttccatccaggttgttgcaaatgccattattcgtttctttttatggctgaatagtattccatgggtgtgtgtgtgtgtgtgtgtgtgtgtgtgtgtgkatcacaatttctttatccacttgttgattgataggcatttgggctggttccatatttttgtaattgggaattgtgctgctataaacgtgtaagtatcttt

SEQ ID NO: 284188 - DNA, 201 bp, Homo sapiens
ttgctggcagtggtgattttgttctttgtacagctgtttgaaaagagtgaagctcccaccattggaaatgcaaggccgtggaaacttctgatttcttcttstactaatgtggctgttgacagagtacttcttgggtaggcatgacaagtgcatttaagtagctaatgttttgggatattgttgagagaggcaacccactat

SEQ ID NO: 284189 - DNA, 201 bp, Homo sapiens
tataaacactatgtttgtatagttgccattcttgtttcattttctggtgttcatgcttgaatgtcagatactctctcagatctgtattctctgttttctcmgtacctggaattatggtggtgtcccatcaaagtgacaggacatctgaggcccaagagtatcccttctctgggaaagggacacagttcttgagccttcaat

SEQ ID NO: 284190 - DNA, 201 bp, Homo sapiens
ccctgcttcggctcatgctcggtgcactgcacccactgtcctgcacccactgtccaacactccccagtgagatgaacccggtatctcagttggaaatgcasaaatcacccgtcttctgcattgctcacgctgggagctgtagactggagctgttcttatttggccatcttggctcttccccccaaatgttaggccttttta

SEQ ID NO: 284191 - DNA, 201 bp, Homo sapiens
gctgggagaaccactactctcttcaaagctgtcagacagggacatttaagtctgcagaggtgtctgttgccttttgtttggctaagtcctgccccccagakggggagtctacagaggcaggcagtcctccatgagctgcggtgggctccacccagttcgagcttcctgccactttgtttacctactcaagcctctgcaatg

SEQ ID NO: 284192 - DNA, 201 bp, Homo sapiens
ggctacttgggggtcagggacccacttgaggatgcagtctgtccattctcagatgtccagctgcgtgctgggagaaccactactctcttcaaagctgtcaracagggacatttaagtctgcagaggtgtctgttgccttttgtttggctaagtcctgccccccagagggggagtctacagaggcaggcagtcctccatgag

SEQ ID NO: 284193 - DNA, 201 bp, Homo sapiens
aatgttgctgcctgattgttcctctggaagttttgtctcagaggagtacccagccgtgtgagttgtcagtctgcccctactggggggtgcctcccagttargctacttgggggtcagggacccacttgaggatgcagtctgtccattctcagatgtccagctgcgtgctgggagaaccactactctcttcaaagctgtcag

SEQ ID NO: 284194 - DNA, 201 bp, Homo sapiens
tttgttaattttccctctaacagtcaggaccctcagctgcaggtctgttggagtttgctggaggtccactccagaccctgtttgcctgggtatcagcagcrgaggctgcagaacagcggatattggtgaacagcaaatgttgctgcctgattgttcctctggaagttttgtctcagaggagtacccagccgtgtgagttgt

SEQ ID NO: 284195 - DNA, 201 bp, Homo sapiens
tcctttagctgggagtagtttgatcgtctggagccttcttctctcgacttgtcaaagtcattctctgtccagctttgttctgttgctggtgaggagctgcrttcctttggaggaggagaggcgctctgatttttagagtttccagtttttctgctctgttttttccccatctttgtggttttatctaccattggtctttga

SEQ ID NO: 284196 - DNA, 201 bp, Homo sapiens
catggaagtaagagaatagaatgatggttaccagaggctgggaagaaaagggggtgggaaatgaagagaggttggttaaagtgttaaaaaaaaaaaaaaaaggaatacagtagggaaattatagttaacaataatttattgtatatatcagaataactagaagagaagaattgtaatgttcccaacacaaagaaaagatca

SEQ ID NO: 284197 - DNA, 201 bp, Homo sapiens
tccacacgtttctcatttttaaaaaccctgttcttctctgtgcctacttttaatatcacaagattcacatactaattactaagtagttacaagagaggagraaggtcagctttcctgaaagaagcttgttagtgaaaatggaatagtatattactattttgtgattatttctcagcttgctagaactgctaatatccttac

SEQ ID NO: 284198 - DNA, 201 bp, Homo sapiens
cagctgttagtctaatgggcttccctttgtgggtaactcgacctttctctttggccgcccttaacattttttccttcatttcaactttggtgaatctgacrattatgtgtgttggagttgctgttcttgaggagtatgtttgtggcattctctgtatttcctgaatttgaatgttggcctgccttgctagattggggaagt

SEQ ID NO: 284199 - DNA, 201 bp, Homo sapiens
aacttttgtgcaggaacattatgtatgtttttattttttaaatgtatatcacatagaagacattcatgaagtggttggatttttagaaattaagcatttgwgatcattttttaaaaattaaaaatctccaagccagcatttgggggaaaaaaaattaaacaagtaatacataaatatatacaatgaaaaatgaaggtataa

SEQ ID NO: 284200 - DNA, 201 bp, Homo sapiens
tctgatcttagttatttcttgccttctgctagcttttgaatgtgtttgctcttgcttctctagttcttttaattgtgatgttagggtgtcaattttagatytttcctgctttctcttgtgggcatttagtgctataaattccccactacacactgctttgaatgtgtcccagagattctggtatgttgtgtctttgttctc

SEQ ID NO: 284201 - DNA, 201 bp, Homo sapiens
gacaaatattgcatgttcttactcatgtgtggagctaaaaaagcagatctcatggaagtaagagaatagaatgatggttaccagaggctgggaagaaaagkgggtgggaaatgaagagaggttggttaaagtgttaaaaaaaaaaaaaaaaggaatacagtagggaaattatagttaacaataatttattgtatatatcag

SEQ ID NO: 284202 - DNA, 201 bp, Homo sapiens
ttttgtaactcagtctgctcctttataatttcctagtcaaatgaggttcaagaataactctaagtagactttttaaacctgtacccactttggtaaactgytagatgagaacagaactgactaccctaaaagggagacttattagcatatctgatgaatgagtagcattataaacttatggtcaaagtatccagattgatc

SEQ ID NO: 284203 - DNA, 201 bp, Homo sapiens
accaaatattaatgtacacatgagccaattacttctaactagatttttctcttagtattttttatctgtttcattattagtttatcagctccaaattagcrtatccaaatgagttacccagcaatagataaattgcttttgattttgtgtcataattaatatttttatctagtcatttatctatcattttagaaactagcc

SEQ ID NO: 284204 - DNA, 201 bp, Homo sapiens
accatgtccctttttaaaaaattggaagtgatattatattaaatgcattaaaattgataggaaaatccagttttcaatttggaatattattatctacctgkgatgttttatttttctcactacaatgaagtcctaggtaaaaaaataaatatcctttgatttcattatgttatttatccaatttgaaatgaattttcatgg

SEQ ID NO: 284205 - DNA, 201 bp, Homo sapiens
caagtgaaactctatctcaaaaaaaaaaaaaaaaaaaaagagaaaaggaattatgcattatttttcatctgtttattaaggtttgagctaataaatgttastgtacattttcacttcatcaagagataatttaaggatcatttcagtattgattttattttttattatctgtatttttatattacaaattatttaacattt

SEQ ID NO: 284206 - DNA, 201 bp, Homo sapiens
ttttttttaatggcatagtacaagagaaatacattttctctaattgttgaattcaaaactctttaatgatcagatcaagcttattaattgtcttgtccagwtcttctatatagtcttgctaactttttgtggcagttatctaagtaattaagggagatgagttgcaaacttcctctgtggtgcactctctgtctgctattt

SEQ ID NO: 284207 - DNA, 201 bp, Homo sapiens
tattgttgtaccagttccacactgccttaattaccatggcttcataaatccaaatatcaaatagtgcaagttcccctctctgttcttagatgtgacctggmtgttcttggtcctttactctttcatatatattttagaatcatcttatcaagtttcatgaaaaacttgttgggatcttaattggaattgtacctataaagt

SEQ ID NO: 284208 - DNA, 201 bp, Homo sapiens
atctactcatcattaattgcttactttatatagtatgtgtgttggatttttttatttttgaagattttttcacaaacatctcatttaccccagtgggggggataggtattttccccattctgtacatgattaagccaaggatcagaaaaattgaagtgatccacctaatctaccatgagtagtaccaggcagggctggaac

SEQ ID NO: 284209 - DNA, 201 bp, Homo sapiens
gtccacttgaagttgattcttttttcttttgtatatggtatgaagtagggatccagtttcatctttttctttttaattaccaattttgctagaatagtaascattttttattgattagtctctcttttcctcactgatctgaaatgctacctctgtcatataatcaggtttaaagtagctgtgtgtgttcttgactcccta

SEQ ID NO: 284210 - DNA, 201 bp, Homo sapiens
tattttgaagacattaattaattaaatggaggagggagagatggatgaaatatttgttatacctatagaaatttatgtttgaccaggcacagtggctcacrcctgtaattccagcactttgggaggccaaggcaggtggatcacttgagttcaggagtttgagaccagcctgccaatatggtggctctactaaaaatacaa

SEQ ID NO: 284211 - DNA, 201 bp, Homo sapiens
gtttcaccacgttggccaggctggtctcaaactcctgaccttaagcgatccgcctgcttcagcctcccaaagtgctgggattacaggcgtgagccaccgcrcccggcctactgtagactttataaacgctgtacagttaggctaccccaaatttattttaaaattttttctttcttcaataataaattaactttagcttat

SEQ ID NO: 284212 - DNA, 201 bp, Homo sapiens
aaacctaactgatacagggctattgtgtgtggtgaatattatttattattaaaataaggcagttgtaatgttttcttattttgtaggatctgtggaggcartatttaatttgtaaagcatattttttgttagtttgttgaaaaaaggtatggtcagttggtatgaactgcccttgctatcaagaagtgtaattttatagat

SEQ ID NO: 284213 - DNA, 201 bp, Homo sapiens
aaatcttttctgctgttagaatctcagcaacataataataaataaaaagataacataattttttaaagaaaacttaatactttaggtttttgtattagatrtttctttaaatttaaaaaatgcttcttgacacataactttagagttctcattctaagattgttttgtagatatagttgccagaaattaaataaaatgaat

SEQ ID NO: 284214 - DNA, 201 bp, Homo sapiens; identical to SEQ ID NO: 58029

SEQ ID NO: 284215 - DNA, 201 bp, Homo sapiens
attcaaaataaatataatgactatttgcatggtgatttagtagtaagatttttattcggagctgatatatgccaggccctcttctaactaggcacttcgcrtgaattattttatgcaattattataatagcccgtaagatggagatatcggaataagttattcccgttttatagtttagaaaatgaggttccgcaaaaaaa

SEQ ID NO: 284216 - DNA, 201 bp, Homo sapiens
aaatgaaaactattttagaggaattattttttagaaattttctctgacatatttctaaggtccagccaggcattcggacctgacacatttctttctttctwtttttttttttttgagccagagtctcgctctgtcacccaggctggagtgcagtggcgcagtctcagctcactgcaacctccacctcttggttcaagcaat

SEQ ID NO: 284217 - DNA, 201 bp, Homo sapiens
ttcttttgagaagcatctgttcatgtccttcgcccactttttgatggggttgtttgtttttttcttataaatttgttggagttcatcgtagattctggatrttagccctttgtcagatgagtaggttgtgaaaattttctcccattttgtaggttgcctgttcactctgatggtagtttcttttgctgtgcagaagctctt

SEQ ID NO: 284218 - DNA, 201 bp, Homo sapiens
tatctcattgtggttttgatttgcatttctctgatggccagtgatggtgagcattttttcatgtgttttttggctgcataaatgtcttcttttgagaagcrtctgttcatgtccttcgcccactttttgatggggttgtttgtttttttcttataaatttgttggagttcatcgtagattctggatattagccctttgtca

SEQ ID NO: 284219 - DNA, 201 bp, Homo sapiens
  misc_feature (1)...(201): n = A,T,C or G
actgcgaaggtaaaataaaaatgggtttaattcatgcatttcaagttcaaactgacttttatgggttaatgcttggggtgcttcaagcaggaacagctctnctgggggaagtaactgacatgataatattgggacctctgtaaaataaagaatagttgtctcatgtcgtatgtttttttaaggaagggaagatggattgca

SEQ ID NO: 284220 - DNA, 201 bp, Homo sapiens
gctgcttgttcttgactatggtttaatttaaagacagctgtgaaatatctttatactaattagatttgtttatattaaataagaatgaactggaaattggkgatttactcgacagatattggaccttgaaaattaaataattgttctaaaaacattagatcaacactgatttgaaatccctggtttgtaattagccatgag

SEQ ID NO: 284221 - DNA, 201 bp, Homo sapiens
caggcgtgagccaccgcgcccggccatctttacatttttaaataaataaaactaatgtgcttgaaggttaagcaaagaatatttcgttagcatatttaatrttctttgtgaagaactttggcctgtgttgatataatgtatgttgtctaacctcatctagaagataaaatatgtgcgtcatcctagatgtttaacaaatgc

SEQ ID NO: 284222 - DNA, 201 bp, Homo sapiens
aacttacatcatcatgtagagatgatcctttccatctctaataattttttcttaaaaatctatctgttaatgtagatatgctaagtttattttgactagtrttagtttcataagtcttttttcatttttttatctttctttcttcatattttacaggtgttccttataaacagcatatgtctcaattttaaagacgtgact

SEQ ID NO: 284223 - DNA, 201 bp, Homo sapiens
tatcccctttatcattttttattgtgtctatttgattcttctctcttttcttctttattagtcttgctagcggtctatcaattttgttgatcttttcaaawaaccagctcctggattcattgattttttgaagggttttttgtgtctctatttccttcagttctgctctgatcttagttatttcttgccttctgctagctt

SEQ ID NO: 284224 - DNA, 201 bp, Homo sapiens
gtgttttttctccactttatgtttttgtttgttttgtcaaagatcagttggctctaagtatttggctttatttctgggctctctattctgttctattggtytgtgtgcctgtttttataccagtaccatgctgttttggtggctatgagatttaaatcttcagtccacttgaagttgattcttttttcttttgtatatggt

SEQ ID NO: 284225 - DNA, 201 bp, Homo sapiens
tattattggtacattttatcagtaaatcaaggatagataccaaatattaatgtacacatgagccaattacttctaactagatttttctcttagtattttttatctgtttcattattagtttatcagctccaaattagcatatccaaatgagttacccagcaatagataaattgcttttgattttgtgtcataattaatatt

SEQ ID NO: 284226 - DNA, 201 bp, Homo sapiens
aatggtaccagttcctccttgtacctctggtagaattcggctgtgaatccatctggtcctggactttttttggttggtaggctattaatgattgcctcaayttcagagcctgttattggtctattcagagattcaacttcttcctggtttagtcttgggaggatgtatgtgtcgaggaatttatccatttcttctagatgt

SEQ ID NO: 284227 - DNA, 201 bp, Homo sapiens
tgtgaacttcaaagtagttttttccaattctgtgaagaaagtcattggtagcttgatggggatggcattgaatctgtaaattaccttgggcagtatggccrttttcacaatattgattcttcctacccatgagcttggaatgttcttccatttgtttgtatcctcttttatttcattgagcagtggtttgtagttctcctt

SEQ ID NO: 284228 - DNA, 201 bp, Homo sapiens
cccaaagctgatcgatgtaaattctttaaatggcttgaggacgtgactccaggatattcaacacaggaaggagctcgacctggcatggttttaagtgataytaagagtattggcttatatttaagaagtcaaaagataccactttatgaggaatgccagcttttggtgaggtatgttttatagtaccaaataattgcctgt

SEQ ID NO: 284229 - DNA, 201 bp, Homo sapiens
acatatggctagccagttttcccagcaacatttgttaaatagggaatcctttcccatttgcttgtttttgtcaggtttgtcaaagatcagatagttgtagrtatgcggcattatttctgagggctctgttctgttccattggtctatatctctgttttggtaccagtaccatgctgttttggttactgtagtatagtttgt

SEQ ID NO: 284230 - DNA, 201 bp, Homo sapiens
attattctgtcctgtgtaaggacaagacaagtaggattcattgattcagaaaaaagaatgaatgttgcattgactagaggaaagaggcatttgttgattgygggaaatttagcctgtttgaggaaaaatcaactttggggacgagtgatccaacactgcgaaggtaaaataaaaatgggtttaattcatgcatttcaagtt

SEQ ID NO: 284231 - DNA, 201 bp, Homo sapiens
ttcttaaccaaatccagaaaggcttagtttggctgtgttcaattaatacaaattagtcatttatgtaaactacttatcattttactcacccaacgtaacartgatatataagaatcattattcatatatatcattgttaatgatttcttggatgattttctgaatgaaagcccagttactatgatctattgctcatttgta

SEQ ID NO: 284232 - DNA, 201 bp, Homo sapiens
cagatggcagaagtgcaagagggcaggacagatcacagaaacacatttaaagcttcagttcatattatgtttgctgacattccatttgcacaggtcacacrgccaagcctaacatcagtgaggcagggaaatatactcccctacttctctggtgggaagcactgccaagtaacatggcaaagggtgtggatatgtaataat

SEQ ID NO: 284233 - DNA, 201 bp, Homo sapiens
cgaacacaattcagtaaaaagaatttataatgtgaccttcgaaggaaacttttgtgcaggaacattatgtatgtttttattttttaaatgtatatcacatrgaagacattcatgaagtggttggatttttagaaattaagcatttgtgatcattttttaaaaattaaaaatctccaagccagcatttgggggaaaaaaaat

SEQ ID NO: 284234 - DNA, 201 bp, Homo sapiens
tatcatctggagctgtagtgagtgttaaacagtataacatatgtaaagaggctcttcctaacaaatcttggtgctaagtatatgatagctattgctttctrtattatgtctttagaggcaattttatttgtggtaaatactaacattggcattttatgaacatttagtgagccttcaagatggaataatgcgtattttaaa

SEQ ID NO: 284235 - DNA, 201 bp, Homo sapiens
tggagtgcagtggcacaatctcggttcactgcaacctgcgcctcccaggttcaagcagttctcctgcctcagcctcctgagtagctgggattacagctacscaccaccatgcccggcttttgtatttttagtagagacagggtttcgccatgttggccaggctggtctggaactcctgacctcaagtgatccacccacctc

SEQ ID NO: 284236 - DNA, 201 bp, Homo sapiens
gccaggcgtggtggcgggcgcttgtagtcccagctactccggaggctgaggcaggagaatggcgtgaaactgggaggcggagcttgcagtgagccgagatygtgtcactgcactccagcctgggtaacagagtgagactccatctcaaaaaaaaaaaaaaagaaacccttagtcatagacacagttcagacaagttctttg

SEQ ID NO: 284237 - DNA, 201 bp, Homo sapiens
tggctaacacggtgaaaccctgtctctactaaaaatacaaaaaattagccaggcgtggtggcgggcgcttgtagtcccagctactccggaggctgaggcargagaatggcgtgaaactgggaggcggagcttgcagtgagccgagatcgtgtcactgcactccagcctgggtaacagagtgagactccatctcaaaaaaaa

SEQ ID NO: 284238 - DNA, 201 bp, Homo sapiens; identical to SEQ ID NO: 58039

SEQ ID NO: 284239 - DNA, 201 bp, Homo sapiens
tcgtctccaaaaaaaaaaaaaatcactaaaatatatgctttttaaccaaatcgatttaaaagtttttacagttttcttttttaaccaaattgatttaaaaktttttacattttggctttttttttaaagggggacagcatctctgtcacccaggctggcatgcagtggcatgactatggctcactgcagccttgaccttct

SEQ ID NO: 284240 - DNA, 201 bp, Homo sapiens
tttcatggctccactagttaggcattaccctagtggggactctctgtggtggccttacttcctgggctctactaggctttaccttggtggagattctcagstaccactaaccccacagttccactgtggctctgcccttgagacaagtctgttccctggctcccaggcttctgaggacaatctttgaggccaagtggaggc

SEQ ID NO: 284241 - DNA, 201 bp, Homo sapiens
tttttttaaagggggacagcatctctgtcacccaggctggcatgcagtggcatgactatggctcactgcagccttgaccttctgggctcaagggatccttytgcctcagcctaccggggaagcttggactataggcgtgcaccgccacactcagataatttcgtgactttttttttgtagaaacaggatcttgccatgttg

SEQ ID NO: 284242 - DNA, 201 bp, Homo sapiens
atattatgaaaagattaattttattaacaaaagttctatgttggttaatttgtattttgtccttttttttaaaaaaagatttccttttgtagctgtttcarttggctttgctgtaaataaaaaggtatgattttttaaacgtatagttgattatatgccttgctctcattttctgagaaaaagtaaatgtgttttcataat

SEQ ID NO: 284243 - DNA, 201 bp, Homo sapiens
taactgaaatacaactcagtatttagtaaccattatatgtgtgatagagtcagatgggatagaagtttatatgtgatcttaaatgcttcgtggaagaggtragatttgagctgggaatgctttagtaggtgttagtgaagaaatacatttagaaaccagcaagtagcaggggccaaagcatggttggaaaatacagactct

SEQ ID NO: 284244 - DNA, 201 bp, Homo sapiens
cctattgatggaacaactaactttgtacataggtatgttttaaaatgtctaatataattactctttgcatattaactggattgacctatagatactctatktaggaacatgtacactttagaaaattgtatacttcgtttatgcttctttattctaataaagtatatataaaatgtaaaagtggagcaaaatgtattatgc

SEQ ID NO: 284245 - DNA, 201 bp, Homo sapiens
atataaaatgtaaaagtggagcaaaatgtattatgcagacttatcagatatggaggaggtaaagaaatactaatgtgatcttgtcctgtggtgccaagtgycccgttcaccattctttttcccactgttggcactatctaaaaagggaagcaaacaacattgctgctttgagagtgggaagggcactttgcactgcatgcc

SEQ ID NO: 284246 - DNA, 201 bp, Homo sapiens
ctcttataattaatttctggcttctctatatcagtggttatttccaccttgtcacttattttgtctatttgtgctttttttcttgttcttttttctcaaaraaccaggattttaatttaagctggttttttcttttctgcactattattttcatcttcgtgctttcttttggtttgtttccttttttttcctttttgatta

SEQ ID NO: 284247 - DNA, 201 bp, Homo sapiens
gcactattattttcatcttcgtgctttcttttggtttgtttccttttttttcctttttgattagaaaatttattataattcctttatgtttattgatgtaratatttaggctatgaatttcatctgatcattgttttcattgtatcccataaatactgatacttactgttttcattatttttttcataaattctgtaattt

SEQ ID NO: 284248 - DNA, 201 bp, Homo sapiens
cagcacagaatgtgacatggtggggctgagcatgctagctcaggtctctgttcttctctttataaagccaccagtcctagtcctatgatgactcattaatytattaacccatgagtggattaatccattcatgagggcatagccctcttagagaccccacctttcagtactgctagattggagattaagtttccatatgag

SEQ ID NO: 284249 - DNA, 201 bp, Homo sapiens
tggtggctcacgcctgtaatcccagcactttgagaggctgaggcaggtggatcacgaggtcaggagatcgagaccatcctggctaacacggtgaaaccctrtctctactaaaaatacaaaaaattagccaggcgtggtggcgggcgcttgtagtcccagctactccggaggctgaggcaggagaatggcgtgaaactggga

SEQ ID NO: 284250 - DNA, 201 bp, Homo sapiens
atggtggctcacgcctgtaatcccagcactttgagaggctgaggcaggtggatcacgaggtcaggagatcgagaccatcctggctaacacggtgaaacccygtctctactaaaaatacaaaaaattagccaggcgtggtggcgggcgcttgtagtcccagctactccggaggctgaggcaggagaatggcgtgaaactggg

SEQ ID NO: 284251 - DNA, 201 bp, Homo sapiens
gttggctggccatggtggctcacgcctgtaatcccagcactttgagaggctgaggcaggtggatcacgaggtcaggagatcgagaccatcctggctaacayggtgaaaccctgtctctactaaaaatacaaaaaattagccaggcgtggtggcgggcgcttgtagtcccagctactccggaggctgaggcaggagaatggc

SEQ ID NO: 284252 - DNA, 201 bp, Homo sapiens
ttgcccagccaggctggtctcgaactcctgggcccaagtgatcttcctgctttggcctgctaaattagtgctgggaggagtgagccgctgtgcgtggccaygaaaaaatatttttacatagctactatattcatagaatttgaccttcaaaagatagaaaacgcagtgcaaaatgcccttcacacttccatttctggtttc

SEQ ID NO: 284253 - DNA, 201 bp, Homo sapiens
cccttctgttgagtagccacaatgaagtgattcttgaagccccttcaatcaatgtcttatccctaaggcccccctgtagaggatgatccccactacctccycagctttatctctcctgtttcccttaatctgagctgtcactcttaggctgttcagttagtcttcatgtaccaggcatcctgcagttgattgagttcatgc

SEQ ID NO: 284254 - DNA, 201 bp, Homo sapiens
tgccagataccctaattcattactctcaagtttaggctttcaggaaaccctgtcaagttggctggccatggtggctcacgcctgtaatcccagcactttgrgaggctgaggcaggtggatcacgaggtcaggagatcgagaccatcctggctaacacggtgaaaccctgtctctactaaaaatacaaaaaattagccaggc

SEQ ID NO: 284255 - DNA, 201 bp, Homo sapiens
cgcctcccgggtttaagctattctcctgcctcagcctccggagtagctgggattacaggtgcgcaccaccatgcccaactaattttttgtatttttagtaragatggggtttcaccatgttggccaggctggtctcgaactcctgacctcgtgatctgcctgcctccgcctcccaaagtgctgggattacaggtgtgagcc

SEQ ID NO: 284256 - DNA, 201 bp, Homo sapiens
aatatggtagctttgatagaaacaactcttttcctttgcatagtcattcttcactttacaaagtattaaattatgtaacttttattttttttcctcccgaracagagtcttgctctgttgcccaggctggagtgcagtggcgtgatctcggatcactgcaacctccgcctcccgggtttaagctattctcctgcctcagcc

SEQ ID NO: 284257 - DNA, 201 bp, Homo sapiens
actatctaaaaagggaagcaaacaacattgctgctttgagagtgggaagggcactttgcactgcatgccattttctattctttgagtggcatgtaccataratctatatggatctactaatatgcatctattagtagtaactatgtaaaaatatggttttttttttttaagatggagtttccctcttgttggccaggctga

SEQ ID NO: 284258 - DNA, 201 bp, Homo sapiens
ttagccgggtatggtggcacatgcttgtaatcccagctacttgggaggctgaggcaggagaatcacttgaacccgggaagtggaggttgcagtgggctgaratcgtgccattgcactccagcctgggcaacaagagcttaacttcgtctccaaaaaaaaaaaaaatcactaaaatatatgctttttaaccaaatcgattta

SEQ ID NO: 284259 - DNA, 201 bp, Homo sapiens
caacaatagaaaagtgtagggtacagacttttgctattttttttttttttttcctgagacagagtctctctcagttacccaggctggagtgcagtggcacratctcggctcactgcaacctccgcctaccaggctaaagccattctcctgcctcagccttccaagttgctgggattacaggcgcctgccaccatgcccggc

SEQ ID NO: 284260 - DNA, 201 bp, Homo sapiens
taaaattatggagagtgaagcagatctccacacatctgttggacttttgtccatatgtagaatttaaaaaactttttgatatatgttatactgcagttttygaagcagaaacaagctatataattgtgtgcaaaatcaaaataagctttaggagatagaggtaaggataagaggtaatggtaatgtgagacttacaatgat

SEQ ID NO: 284261 - DNA, 201 bp, Homo sapiens; identical to SEQ ID NO: 58037

SEQ ID NO: 284262 - DNA, 201 bp, Homo sapiens
gattgttggcagatgtcagttcctgggggagttgtctgctggtagcttctctcagttccttaccatgtagcctcttcacagagtagctcacgacatggaarctgacatctcctagtccagagcaggtggcacaggaagggagaaacagagtgaaccagatgcaaattagaggggcattttgtgaactagtctccaaagttt

SEQ ID NO: 284263 - DNA, 201 bp, Homo sapiens
ccccacctttcagtactgctagattggagattaagtttccatatgagttttggagggaacaaacattcaaaccacagcattccacccctgacactccccaratttgtctttttccatacaaatacactcattccatccccagggtcccaaagtcttcacttgttctatcatgaacttaaaagtttaaagtccacagtctca

SEQ ID NO: 284264 - DNA, 201 bp, Homo sapiens
atggaggaggtaaagaaatactaatgtgatcttgtcctgtggtgccaagtgccccgttcaccattctttttcccactgttggcactatctaaaaagggaarcaaacaacattgctgctttgagagtgggaagggcactttgcactgcatgccattttctattctttgagtggcatgtaccatagatctatatggatctact

SEQ ID NO: 284265 - DNA, 201 bp, Homo sapiens
ttggccaggctggtcttgaactcctgactcaggtgatccgccctccctggcctcccaaagtgctgggattacaggcgtgaacctccacacctcgcctgctrtgttttatagtactctgtgtagctaaggaaatgttatgatttggaaattgttgaaatcagtgtaaagattaagagtttgtcctacttggcttttagtttc

SEQ ID NO: 284266 - DNA, 201 bp, Homo sapiens
ctctgtggtggccttacttcctgggctctactaggctttaccttggtggagattctcagctaccactaaccccacagttccactgtggctctgcccttgaracaagtctgttccctggctcccaggcttctgaggacaatctttgaggccaagtggaggctggaaagcctctacagctcttcctttatgcaagcttgcaga

SEQ ID NO: 284267 - DNA, 201 bp, Homo sapiens
caggcgcctgccaccatgcccggctaatttttgtatttttaatagagatggggtttcaccacattggccaggctggtcttgaactcctgactcaggtgatycgccctccctggcctcccaaagtgctgggattacaggcgtgaacctccacacctcgcctgctatgttttatagtactctgtgtagctaaggaaatgttat

SEQ ID NO: 284268 - DNA, 201 bp, Homo sapiens
ccacatcagaatactgttcctatttttattagcattctggtcagagctacttaactcaatctctaaggcattccaaactttccctggccttgtcttctaasccctcaccaaaatctcccttaatgcttcattcacggaaatgcaggcattttctagcctgctcctctgaattcttctgtcttctacctattacccatttca

SEQ ID NO: 284269 - DNA, 201 bp, Homo sapiens
ctactatttctgtctttttctttgtgaaaatattatcaatgagttataagagtcctagaactgatcaaagatcatctaataatccagccttattttgtagrtgagttgactgagattcaagtaggtgatgtggctgcttgagatcgcacagctggatagaaatagggctagaatcctggctcccagatcatttctgtttct

SEQ ID NO: 284270 - DNA, 201 bp, Homo sapiens
ttcacttcgttttgtgatcagggttcctgctttctgaatttcttattttgccagttgtgcctttctgtgcattttcttttatgaatacctgctggttgtaratagagttggcttgtcttgtttatcattcatttctgcagggtccttaagttttcactctttttttttttctttttttcctttttcttttttttgttatta

SEQ ID NO: 284271 - DNA, 201 bp, Homo sapiens
gaaaaatggactttaaaatcagaattgaattcaagttctgtgtcatttgtctgtaattttgggcaaattatttctcatctctgaaccttaagttcttcatstttacacataattttttcaagtaccttttgctgcttcccttcaagcttcttttatttcagtattcccagtgttctttctcgttttcactgtattctcctc

SEQ ID NO: 284272 - DNA, 201 bp, Homo sapiens
ttccctgtgggtcctctgctcctccttgttctttctcacaaagtcttttctgccttctctgccctactctgtgtatctacgggcttccggtgctctgttaraatttatttatttgtttttcttctacttagaggtagtttgagagtttgcatttcctgatttctatctgaaagaatgggtcctatgggttttatttgtcct

SEQ ID NO: 284273 - DNA, 201 bp, Homo sapiens
ctgtgaaagatctcattgaacagaactcactcccttattaccatcgctttaaacagttggagaaggaatttgtgtaaaaaccacttgaaagtaacttgtaracatgatgacgtttgtcttctaaatacacatttcagcgtgtgtgtctttaataaaagggacattgtctaacatagccacagtacaatgataaaagtaagg

SEQ ID NO: 284274 - DNA, 201 bp, Homo sapiens
ttctcatctctgaaccttaagttcttcatctttacacataattttttcaagtaccttttgctgcttcccttcaagcttcttttatttcagtattcccagtrttctttctcgttttcactgtattctcctccaaaatattatcctaacttttaaagtatttcttgtgttgtttcttatctattctccaaacgaatgttttgg

SEQ ID NO: 284275 - DNA, 201 bp, Homo sapiens
tgtaaactttcttaaaacataatgagttttttgcgattaaaaaaattttttttagctcatcagccgtcattagtgctagtgtattttatgtgtggcccaaracaattcttattcttccagtgtggcccagggaagccaaaatattcgacacccttggcctagacagtcaccgagtctgaggcttatacccagagctctttg

SEQ ID NO: 284276 - DNA, 201 bp, Homo sapiens
aagtatatttactgtattatatatgtgtatgtgtgtgtatgtgtgtgtgtgtgtgtatgtgtgtatgtgtgtgtgtgtgtatatatatatatatatagttkgcatccaccattcctggctcataactcccatagcccttgacaggaatcttggcccacctttctgtcttagaactagccatgaagaaattctctgacctac

SEQ ID NO: 284277 - DNA, 201 bp, Homo sapiens
cttatgtatggtatactatatatagtatctaaatatacttatgtatggtatatatactatatatagtatctaaatatatagtatataaagtatatttactrtattatatatgtgtatgtgtgtgtatgtgtgtgtgtgtgtgtatgtgtgtatgtgtgtgtgtgtgtatatatatatatatatagtttgcatccaccattc

SEQ ID NO: 284278 - DNA, 201 bp, Homo sapiens
ctccaaacgaatgttttggttttttaaaaaaatgtaatatggtacagacacactgggaagcaatttcatagaatagtctttatgaaaataatttgatataraaattaggtaatttaggtgagaaatgttttttactgggtataggcataaatcttgggaaaaactctagggcagggggtgaatcctgaaatgacagtctgt

SEQ ID NO: 284279 - DNA, 201 bp, Homo sapiens
cctcaggagcgggcgcgagcgccgtgcgcggtcggcgcctagggtggaggcagcctctgggtgacccctgcctgctgcgttatccggagctgccctgggckaccgggaacagttccggcattggagtagcggttcgctcacgcgacctcacttaacctctgtggcggcttctgtggaataattgcccctttttatgtcccc

SEQ ID NO: 284280 - DNA, 201 bp, Homo sapiens; identical to SEQ ID NO: 58075

SEQ ID NO: 284281 - DNA, 201 bp, Homo sapiens; identical to SEQ ID NO: 58076

SEQ ID NO: 284282 - DNA, 201 bp, Homo sapiens; identical to SEQ ID NO: 58036

SEQ ID NO: 284283 - DNA, 201 bp, Homo sapiens; identical to SEQ ID NO: 58038

SEQ ID NO: 284284 - DNA, 201 bp, Homo sapiens
tgcctcagccttccaagttgctgggattacaggcgcctgccaccatgcccggctaatttttgtatttttaatagagatggggtttcaccacattggccagrctggtcttgaactcctgactcaggtgatccgccctccctggcctcccaaagtgctgggattacaggcgtgaacctccacacctcgcctgctatgttttat

SEQ ID NO: 284285 - DNA, 201 bp, Homo sapiens
taatttgtcatccatattcagttttgtcagttaatctgctaatgtcctttatagcatttgccttccaataaagtaggattcagtctagagtcagcattatwtttaggtgtcatgtctccttagccttctttgatctggaacatttccacagcctatgaaattacttcctttaagttttcaaattatttgcatagaagtctg

SEQ ID NO: 284286 - DNA, 201 bp, Homo sapiens
accttttttttttcctgtaccattttagagtaaattatatacatcatggtttctaaagaatagggagattctgttccataaccatgaaaccactgatttcrtaaatacactttttatctaatttgtcatccatattcagttttgtcagttaatctgctaatgtcctttatagcatttgccttccaataaagtaggattcag

SEQ ID NO: 284287 - DNA, 201 bp, Homo sapiens; identical to SEQ ID NO: 58043

SEQ ID NO: 284288 - DNA, 201 bp, Homo sapiens
tttttgtatttataaagattacattttattccagcaggtttcttttgtaatacaacttttatagtacctttaatattattttcttacttaactatttactrtctagaatgttttggcttcgcctattgcctatgtaagtctcccattccccttttctctctctttatcccatttttaaagttgcattctgtctactttgcc

SEQ ID NO: 284289 - DNA, 201 bp, Homo sapiens
taaaacaaggaagagggatacaaatgccctcttctgaattacaagtgtcaggtattttctagaagtctaaatattgaaacctaacactttctttttagatrttaccaaatctctcttggtgactgagttgggctcttccagaacaccagagactgtgagaatggttctttctaatatggaaaagcttttttgcattcctgt

SEQ ID NO: 284290 - DNA, 201 bp, Homo sapiens; identical to SEQ ID NO: 58050

SEQ ID NO: 284291 - DNA, 201 bp, Homo sapiens; identical to SEQ ID NO: 58051

SEQ ID NO: 284292 - DNA, 201 bp, Homo sapiens; identical to SEQ ID NO: 58033

SEQ ID NO: 284293 - DNA, 201 bp, Homo sapiens
taactgaaacgaattagtaggtgaggtagaactaagagaataatggtgggagcatggaggtagtgaattaagtattgaataagtcttgagccagtagactmcaattcttcagacaaggcatttgaggcaacaaagaaagtttgttgatactctctttgtgggactttcagaagaatgagtgatcagggcagaagccacatt

SEQ ID NO: 284294 - DNA, 201 bp, Homo sapiens; identical to SEQ ID NO: 58034

SEQ ID NO: 284295 - DNA, 201 bp, Homo sapiens
tttggcctgctaaattagtgctgggaggagtgagccgctgtgcgtggccatgaaaaaatatttttacatagctactatattcatagaatttgaccttcaawagatagaaaacgcagtgcaaaatgcccttcacacttccatttctggtttcccaggatccatctctggagatgaccactgttacaagtttctcgtgaatcc

SEQ ID NO: 284296 - DNA, 201 bp, Homo sapiens
ctgtttctaattaagacgtttttgtgaactaactattctataattaagacttctaagacagttataactactttgtacagatatttgtcaaatattttcaraagatggctgatccttggcaggaatgcatggattatgcagtaactctagcaagacaagctggagaggtatgagctaagattttgtcaattataatcaatt

SEQ ID NO: 284297 - DNA, 201 bp, Homo sapiens
tttctaattaagacgtttttgtgaactaactattctataattaagacttctaagacagttataactactttgtacagatatttgtcaaatattttcagaaratggctgatccttggcaggaatgcatggattatgcagtaactctagcaagacaagctggagaggtatgagctaagattttgtcaattataatcaattata

SEQ ID NO: 284298 - DNA, 201 bp, Homo sapiens
tatagctatagcatttccttgctgtttggctccttagttggtcaaacagtaaaggatggttactaacattttacctacctatcttcaaggaacttttgatrtgtaagatcaacatgtataacagcagttataacatttctgaatataaaacacatattggacaaatgacagcttagccccagggttgtattaattaatgag

SEQ ID NO: 284299 - DNA, 201 bp, Homo sapiens
agatatttgtcaaatattttcagaagatggctgatccttggcaggaatgcatggattatgcagtaactctagcaagacaagctggagaggtatgagctaarattttgtcaattataatcaattataatgtgattggtgggtatactgtgttgttgccttgttttgtttgtttcgatttggtttctttttttgaaacggtct

SEQ ID NO: 284300 - DNA, 201 bp, Homo sapiens
tgttgccttgttttgtttgtttcgatttggtttctttttttgaaacggtcttgcttgtcacccaagctggaatgtagtggcaggaacatggctcactccascctcaacttcccaggctgggctcaagtaatcctcccacttcagcctcctgagtagctgggactacagcaggcatgagccaccatgtccagctacttttca

SEQ ID NO: 284301 - DNA, 201 bp, Homo sapiens
gttcagactgtcatgcagctatggaaaaattttggctcaaagtctacttttcagaggccaagcctaaagtttgctgttggagtagagacaagtaacagccrtttattttgtccagtgcagtatttgtgtttatcacggtgtaggacataggaaaaaaacatcacaggccaggcgcggtggctcatgcctgtaatcccagca

SEQ ID NO: 284302 - DNA, 201 bp, Homo sapiens
gttttgtatactgtcacttacgctttattggttagaaacaagtatctgcatagctcacgctcaaggaaggaatattaggctccacctcttgaaggacggaragtattagagagtgacctttttttttttttttttagacggagacacgctctgtcaggcaggctggagtgcagtggcatgatctcacctcactgcaacctc

SEQ ID NO: 284303 - DNA, 201 bp, Homo sapiens
atttggaaattgttgaaatcagtgtaaagattaagagtttgtcctacttggcttttagtttcattggtgaagaatctgtggcagctggggaaaaaagtatyttaaccgacaaccccacatggatcattgaccctattgatggaacaactaactttgtacataggtatgttttaaaatgtctaatataattactctttgcat

SEQ ID NO: 284304 - DNA, 201 bp, Homo sapiens
ccggcaaaaaaaaaaaaattgcatgggtgttaggatgaatagacgtgcattctggtatttttttacggctttttcaccttaggcaagttagttaacttttytaggccacaatgttaaaaaacatttataaaaaggccgtattaatagcacttgcctcgtagaattgtaactcaactctatgagtagtacattaatgtaaga

SEQ ID NO: 284305 - DNA, 201 bp, Homo sapiens
gagggtcgcctggccatctgtatatttttttaagttttcaggtaacaatatcaggcagccaggattgagaattattttgttttccaagaataactgatttyttagaagtagccaactcacctactcacccacctcaacaaacctcagagggtcttagggtatgacttgatacctttacaaggaaatgttgctgtgagccat

SEQ ID NO: 284306 - DNA, 201 bp, Homo sapiens
ccgggtatggtggcacatgcttgtaatcccagctacttgggaggctgaggcaggagaatcacttgaacccgggaagtggaggttgcagtgggctgagatcrtgccattgcactccagcctgggcaacaagagcttaacttcgtctccaaaaaaaaaaaaaatcactaaaatatatgctttttaaccaaatcgatttaaaag

SEQ ID NO: 284307 - DNA, 201 bp, Homo sapiens
tcaatgagttataagagtcctagaactgatcaaagatcatctaataatccagccttattttgtaggtgagttgactgagattcaagtaggtgatgtggctkcttgagatcgcacagctggatagaaatagggctagaatcctggctcccagatcatttctgtttcttcaatattggacttctcttagaagtcagacccttc

SEQ ID NO: 284308 - DNA, 201 bp, Homo sapiens; identical to SEQ ID NO: 58046

SEQ ID NO: 284309 - DNA, 201 bp, Homo sapiens; identical to SEQ ID NO: 58047

SEQ ID NO: 284310 - DNA, 201 bp, Homo sapiens
ggcccctgctttcttatttttcctgtttgcctgataaatctttgtccacccttttatttttagtcctttgaaccactgcatttgaagtgtgcctgtcatayacagcattgcatggaatttcactttataagtcaatttgaaaatctttttcttttaacagataggttaggcctattgatttattgatatgactgtttttgt

SEQ ID NO: 284311 - DNA, 201 bp, Homo sapiens; identical to SEQ ID NO: 58048

SEQ ID NO: 284312 - DNA, 201 bp, Homo sapiens
ggcgttttaatcagaaagaacagcttggagaaattgaagaccattatacgtgtggggaatggtgagatgttcatggagagggaagcactgcaagtggccargacaaaggttagtttggccttgctgtgaggcactgtggccagtccatgcaagaaaatttagtttgtgtttcaaggtagttgggaaccagtagaggttttg

SEQ ID NO: 284313 - DNA, 201 bp, Homo sapiens
tgtgagccaccatgcccagccctaaattacgtaactattaaatgtagtacaacagttacagaaatgctcagatcaaacacagctggtgaacatacatctcmattggtgggaggaggtgagatctagggtgttgggtgtgtcctgagcttcaaatggaaaaccttggataacctgtcagccttgtaaatggatgtcagagaa

SEQ ID NO: 284314 - DNA, 201 bp, Homo sapiens; identical to SEQ ID NO: 58049

SEQ ID NO: 284315 - DNA, 201 bp, Homo sapiens
ctattctcctgcctcagcctccggagtagctgggattacaggtgcgcaccaccatgcccaactaattttttgtatttttagtagagatggggtttcaccaygttggccaggctggtctcgaactcctgacctcgtgatctgcctgcctccgcctcccaaagtgctgggattacaggtgtgagccaccatgcccagccctaa

SEQ ID NO: 284316 - DNA, 201 bp, Homo sapiens
tgcattttatcaggcacatttctttttgtcccattatgagtgatattaacttggataacttggtaatggtagaccattgtaaagatgctatttttccattrtacttattatgtatcttgtggagagacactttgacactctgtaaattatcagactcacccattaattttaacattgattctttactgaataaattattac

SEQ ID NO: 284317 - DNA, 201 bp, Homo sapiens
tagtagagacagggtttcgccatgttggccaggctggtctggaactcctgacctcaagtgatccacccacctctgcctcccaaagttctgggattacaggsgtgagccactgtgcctggcccctgctttcttatttttcctgtttgcctgataaatctttgtccacccttttatttttagtcctttgaaccactgcatttg

SEQ ID NO: 284318 - DNA, 201 bp, Homo sapiens
gcttttgtatttttagtagagacagggtttcgccatgttggccaggctggtctggaactcctgacctcaagtgatccacccacctctgcctcccaaagttytgggattacaggcgtgagccactgtgcctggcccctgctttcttatttttcctgtttgcctgataaatctttgtccacccttttatttttagtcctttga

SEQ ID NO: 284319 - DNA, 201 bp, Homo sapiens
tatacctttataataaaagatgaatgaaaatacatttttgtaatgttttgactgtattttcttataggaaatacttttttacttggaaaacatcttataaratatgttgttggtttatcctgagaatctgaactcttcttaaatctgactttgttagcgtatcttatgagactttgaaaaaaatcaagataaagatattga

SEQ ID NO: 284320 - DNA, 201 bp, Homo sapiens
aaattcattgcaagagcatattttaagagaatgaaagcttacgatgataaagactgaagtgataagacattatgccaactcagaattcataaagattataytgaggcgtaatatgctgttaaggccttccttgatgatgagcttatgttactacgaacttcaacatgaaaagaagaggaagtgtgtgaatcctctgaagtg

SEQ ID NO: 284321 - DNA, 201 bp, Homo sapiens
cagtctcccagctcaaacctgacttaaagaagtaaacattaacaatgattttgtaagtctcaatatatcagctatcctctgtagatgtttttacttcttcstctttcaaatacatgattacaccatttagaaactatggaggcctaacatttggcatggtgctttgaagatcccaggtgaccaaaatttttttggtggaca

SEQ ID NO: 284322 - DNA, 201 bp, Homo sapiens
agggcattgggagttataagccaggaatcgtggatggaaacccatatatatatacatatatatatatatacacatatatatatatatatatatatatacayatatatatatatatatacacacatatatatatatatatatatatatacacatatatatatatcacacacacataaccgtataatacaaaacgtaagatac

SEQ ID NO: 284323 - DNA, 201 bp, Homo sapiens
gagcaagattgtcttaaaaaaaaaagtcacatatatacatagaatatgcaattaaaatatatttcataaactatctgctatgaaatctgtgccagtgtgarctttctccaagttttaatttatggctggctgtggatttagtcctgagtctaacaaataacacaacctaataattattgcctactttgaggaagatattct

SEQ ID NO: 284324 - DNA, 201 bp, Homo sapiens
aacaagggcattgggagttataagccaggaatcgtggatggaaacccatatatatatacatatatatatatatacacatatatatatatatatatatatayacacatatatatatatatatacacacatatatatatatatatatatatatacacatatatatatatcacacacacataaccgtataatacaaaacgtaag

SEQ ID NO: 284325 - DNA, 201 bp, Homo sapiens
gtctatgtatttccacctctggttgagaaacactgcttcagagccacactccatctgctgggtccacgctggcagctttttcccaacaaaaaatagatgtyttgccattcttgacatccgtgaagctagtgataaggtattcaaaagggggagggggagaaagataaagaaaacctgtctttgtagtcttaaagctggcca

SEQ ID NO: 284326 - DNA, 201 bp, Homo sapiens
tcaacagtaggcacttacagctctcatagacttgattacctgttttaacatactgcttgcacatatccaaaataatatttttaatttgggggattttgaaratcatcagtctgtaggaagagaagctatggctaaatcttccccattgcaagtagcagatacgatatagaagaaccatggtattcagagttctgactctgg

SEQ ID NO: 284327 - DNA, 201 bp, Homo sapiens
acataagtatcatttccctgtcagactgagattaatgatatttaagtcatgccagaacagcattaagaaattctttttaaaaattcactaacaaatgtttyttcctttagaatgaggacctaatttgcttcaaagatatcaaaccagcagcaactcatcattatcttgtggtgccaaagaagcatattggaaactgcagaa

SEQ ID NO: 284328 - DNA, 201 bp, Homo sapiens
tcattatacaaatttttggctagtcaaggataggctgactggaagggataccatatccttaatttgggctcaaagacaaattcaaagttttcttgtcttaytaaatcaaacaatttctgtttaattacttggtcttcttgatgagagttagtcctcatatgatcagatgtcctaaatagccagctgtcctaaagtctactt

SEQ ID NO: 284329 - DNA, 201 bp, Homo sapiens
ttggttttctgttcctgtgtaattcatttagaataatcgccaccagctgcatccatgctgctgcaaaggagatgacttcattcttttttatagctgcataktattacatggtatatatgtaccacatcttctttatctagtctactgctgatgggcacctaggttgattccatgcctttgctgttgtgaatagtgctgtga

SEQ ID NO: 284330 - DNA, 201 bp, Homo sapiens; identical to SEQ ID NO: 58136

SEQ ID NO: 284331 - DNA, 201 bp, Homo sapiens; identical to SEQ ID NO: 58142

SEQ ID NO: 284332 - DNA, 201 bp, Homo sapiens; identical to SEQ ID NO: 58138

SEQ ID NO: 284333 - DNA, 201 bp, Homo sapiens
tataacctagatgtcagctgcaccttcctggcattatgtccttcaggtcagtatccatgatcaatatataacttagttgtgaaatgtctgagtttccaaasaattcacccacactagatagttcaagaatttaatagccaaacttttacagggctgtatagctcctgccgtcttccttgctgtcttcctctacttcactcc

SEQ ID NO: 284334 - DNA, 201 bp, Homo sapiens
tcattgtagaaattgagtttttgtagtttttgatagttcaaattccttagaaaagagttgtagtagtagcatcacctatcagatctgtggctgaagagttkttttttttttttttgagacagtctcactctgtcaccaagctggagtgcagtagtgcaatcttggctcactgcaacctccgcctcccgggttcaagctatt

SEQ ID NO: 284335 - DNA, 201 bp, Homo sapiens; identical to SEQ ID NO: 58135

SEQ ID NO: 284336 - DNA, 201 bp, Homo sapiens
ttgaagatcagatggctgcaggtatgtggctttatttctgggttttctgttatgttctgttggtctgtgtgtctgtttttgtaccactatcatgctgtttyggttatatagacttatagtatagtttgaagttgggtaacgtgatgcctctagcattgttctttttgcttaggattgtcttggctacttgggttttttggt

SEQ ID NO: 284337 - DNA, 201 bp, Homo sapiens
atgcctcgacatggtaacaaaagactgtaacaagggcattgggagttataagccaggaatcgtggatggaaacccatatatatatacatatatatatatayacacatatatatatatatatatatatatacacatatatatatatatatacacacatatatatatatatatatatatatacacatatatatatatcacaca

SEQ ID NO: 284338 - DNA, 201 bp, Homo sapiens
tgtatacatgttaaatatttacatgttttcagagtcaaaattgtaaagcaaggtacatttggagaaatctagcatccattctcttgtcatctctaccatgtctctttctccataagaaacttttaaaaacttttttgtttatccttccattgtgagtaaataggtattcacatgtctgtatttgtattcttctttcttaca

SEQ ID NO: 284339 - DNA, 201 bp, Homo sapiens
tataattatcatgtttgttatcttaggataaccaggattactggaatggatatgacgcacttgtttgaattgaattttggctcttggaacagagaactatygagcagcattgcattcatggattttttctaagggaaactctgcttacactgattttaattaatttttatttaatgtaaagtaaaaattaaaatcagtata

SEQ ID NO: 284340 - DNA, 201 bp, Homo sapiens
acacagaactctgaagaacactaacatcataagggacagacagaggaagaggacctggaaagggaatagagaaggaacagagaaatagaaggaacgctggraaggctaagagaagggagtatgtcaaaaagaaaggaattgccagcaatgtcagcagcaatattagcctgccttcatcctcaaatctgggttagatgaccc

SEQ ID NO: 284341 - DNA, 201 bp, Homo sapiens
agaactgcttgaatccaggaggtggaggttgcagtgagccaagatcgcgccgctgcactccagcctgggtgacagagcaagactctctctggggggggggraaaaaaaagaagttagggcaagcaagtggctgaagtggtagaccatggaatatatgctgaataggagaaggaagtaaagacagcacctgacagggagaaa

SEQ ID NO: 284342 - DNA, 201 bp, Homo sapiens
gaactgcttgaatccaggaggtggaggttgcagtgagccaagatcgcgccgctgcactccagcctgggtgacagagcaagactctctctggggggggggaraaaaaaagaagttagggcaagcaagtggctgaagtggtagaccatggaatatatgctgaataggagaaggaagtaaagacagcacctgacagggagaaag

SEQ ID NO: 284343 - DNA, 201 bp, Homo sapiens
aactgcttgaatccaggaggtggaggttgcagtgagccaagatcgcgccgctgcactccagcctgggtgacagagcaagactctctctggggggggggaaraaaaaagaagttagggcaagcaagtggctgaagtggtagaccatggaatatatgctgaataggagaaggaagtaaagacagcacctgacagggagaaaga

SEQ ID NO: 284344 - DNA, 201 bp, Homo sapiens
ctgttgaaaacaaggctttaggaattttgctcattctttaaaaacctacgaattttaaaaatcaaactttaaaaaactttttgtttttttttttaaaaaaacggcagcgtaatacaatatttggacacgctatactatgggctttgaagaacgcctgtccagaacacccaacaagctccattatgtcaaacgctcccgcgc

SEQ ID NO: 284345 - DNA, 201 bp, Homo sapiens
actgcttgaatccaggaggtggaggttgcagtgagccaagatcgcgccgctgcactccagcctgggtgacagagcaagactctctctggggggggggaaaraaaaagaagttagggcaagcaagtggctgaagtggtagaccatggaatatatgctgaataggagaaggaagtaaagacagcacctgacagggagaaagaa

SEQ ID NO: 284346 - DNA, 201 bp, Homo sapiens
ctgcttgaatccaggaggtggaggttgcagtgagccaagatcgcgccgctgcactccagcctgggtgacagagcaagactctctctggggggggggaaaaraaaagaagttagggcaagcaagtggctgaagtggtagaccatggaatatatgctgaataggagaaggaagtaaagacagcacctgacagggagaaagaat

SEQ ID NO: 284347 - DNA, 201 bp, Homo sapiens
caaattccaaagtccttattctcctgctgcttcttaaccactcttgtaagctcaagaactttgaacaggtctggctgtgagtccctcaaaggcagtttcaytgatgtcacagtagttccacactaactctagtggcctgtgcaaggttaatctctacttctccagaccaggtatccaacaatttagattcatgatgtaaat

SEQ ID NO: 284348 - DNA, 201 bp, Homo sapiens
aaggggtgggatccagacttctatcacatccaaggtgagaatttttcttggttaggaacaaagtaaacaatatgaagagactggggatattttcatggtaraaataagacatgatcagtactttcaactaatttacaccctaaattagggaaacggggaatatatacaatagcccattgtcagtggaaaaacacaaactgt

SEQ ID NO: 284349 - DNA, 201 bp, Homo sapiens
tggttgtcctccatttcaattcttatactatctacctgatgatagcatcagatcccgcaggttgaagactcagtccccaagactggcctgcccttcccacyagttgcaagtccaggcctctggaacttctgaccgaccagcttgaagttggggatcccacaagcttctctttgggttctaaagcttgctagagtggcttac

SEQ ID NO: 284350 - DNA, 201 bp, Homo sapiens
ttttttttttttttttttttttttttgagacggagtcttgcactgtcccccaggctggagtgcagtggtgcgatcttggctcactgcaacctctgcctccsgagttcaagtgattctcctgcctcagccttccacgtagctgggattgtgtgtgcatgccaccatgcctggctagcttttgtatttcttatagtagagaca

SEQ ID NO: 284351 - DNA, 201 bp, Homo sapiens
atatatacatatatatatatatacacatatatatatatatatatatatatacacatatatatatatatatacacacatatatatatatatatatatatatacacatatatatatatcacacacacataaccgtataatacaaaacgtaagatacagatgcgtgtataatagtgctcccaaaagttgtgtatctttttcaaa

SEQ ID NO: 284352 - DNA, 201 bp, Homo sapiens
tatatatacatatatatatatatacacatatatatatatatatatatatatacacatatatatatatatatacacacatatatatatatatatatatatatacacatatatatatatcacacacacataaccgtataatacaaaacgtaagatacagatgcgtgtataatagtgctcccaaaagttgtgtatctttttcaa

SEQ ID NO: 284353 - DNA, 201 bp, Homo sapiens
tttagccggtatatatttcttttcggtccttagatggtggcaagttttaaaagttgaattaactttaagttgggagttaaagttagctttgtaaaaaatgsgtaagtttaaaagtggataaggatgtttattattgctgtatagaacaatgtgtctattgctttaattctgttttgttttgtttgtttgtgtctttgcaga

SEQ ID NO: 284354 - DNA, 201 bp, Homo sapiens
gggtgtcccatcctggtttccccagcacgttaagattatcattctcagcaaactatctcaaggacaaaaaaccaaacaccacatgttctcactcataggtaggaattgaacagtgacaacacgcacacaggaaggggaacatcacacactggggactgttgtcgggtggggggaggggggagggatagcattaggagatat

SEQ ID NO: 284355 - DNA, 201 bp, Homo sapiens
accatttttatagtccatgtttggattgctcagattgggtggtaatctagaggtggctcccatgaagtggccatccatctcatgagtgggataaggaggcmatttccctacatgatgtacatttggtctaatggtacaactgctgaaaccatctccctgcatattttggtttccataacctaagtatttagatgtaaaact

SEQ ID NO: 284356 - DNA, 201 bp, Homo sapiens
tctgtctagtaatatactttattatttttatatgtaatttgggcttgttgtacacagcatttttggttttactgattttttgctctaatgtcatctgcttsttttggtcaacaaggttgtatataggtcatgtaacatttatacatttagaatataatatttaatatcttagtataaaaaggaaagcagtgcattcttttt

SEQ ID NO: 284357 - DNA, 201 bp, Homo sapiens
acacaattaagtgtaacattgagacgaaacaaattgttagtcatccaacaatatgtacaaatcagtcaggaaatccaagaaaaataaaatataaactaacmaattgatgattattattaagaaccatcttagaaacaaaatagaaaatatctacagaagtaatttatcattcttaggttagagatctttagaaggatagat

SEQ ID NO: 284358 - DNA, 201 bp, Homo sapiens
tgttgtacacagcatttttggttttactgattttttgctctaatgtcatctgcttcttttggtcaacaaggttgtatataggtcatgtaacatttatacawttagaatataatatttaatatcttagtataaaaaggaaagcagtgcattctttttagtttttttttttttttttaagtttcgtttatagtgggcactaac

SEQ ID NO: 284359 - DNA, 201 bp, Homo sapiens
tttttttttttttttttaagtttcgtttatagtgggcactaacagcttagtcatccctcctttaaatgattatactgcttttcccctggcaggtcgtagtmatagtttgagaagtaaaaagaatcttaaagattaaaagttccttggggcctccatgattcaatattgtgtctccagcgtctagaagagtccctgacacat

SEQ ID NO: 284360 - DNA, 201 bp, Homo sapiens
catgccttttattacacttttaaacattcaaagtacaaataactattaaatccaagagaggataaagtacatttaggtatgtacacacacatatttacatwcatatatgttcttacaacctagattacatatattattgactaaaaggacatcagtgaggatgttggcactgtttttagctgatagaagagcctatttgat

SEQ ID NO: 284361 - DNA, 201 bp, Homo sapiens
gacccaaaatttgttagtagcttagaatgagcgaattaacagctctaatatgtacctaagtaatattatcttgagacttatctgtagatgttaaatgagtycaaagtatggtcattacaaggccagacagtaatggaagttttcactttcgagatgcatattgctagaatactcagggtgtgttgattgagattttagaat

SEQ ID NO: 284362 - DNA, 201 bp, Homo sapiens
ccatgaagtggccatccatctcatgagtgggataaggaggcaatttccctacatgatgtacatttggtctaatggtacaactgctgaaaccatctccctgyatattttggtttccataacctaagtatttagatgtaaaactctggctatttccaaaccttggctggtaaagtgtatggatgggtggtagactgagcttag

SEQ ID NO: 284363 - DNA, 201 bp, Homo sapiens
tataaggaattggcttacatgattatagtggcttggcaagtccaaaatttgcagttgggctggtgggctggagactcaggaaagcagatgatgcagttccrgtgtgaaggccagcagcctggagacccaggagagccagttgagcagatgaaatctgatggctgtctcctggagaattcccttttgcttgggacagactag

SEQ ID NO: 284364 - DNA, 201 bp, Homo sapiens
ttataaggaattggcttacatgattatagtggcttggcaagtccaaaatttgcagttgggctggtgggctggagactcaggaaagcagatgatgcagttcyagtgtgaaggccagcagcctggagacccaggagagccagttgagcagatgaaatctgatggctgtctcctggagaattcccttttgcttgggacagacta

SEQ ID NO: 284365 - DNA, 201 bp, Homo sapiens
aaacccagtataatgagggtctacttttcatatagctggtttctgcagggctactgtgagactttcatatgcatggattttgggggagcaggtggtggtcytggaactaatccttcatgtaaaccttgttactagtgtataatgtattattttttctcagactgctttaaagattttctccttatctttggatttcagaaa

SEQ ID NO: 284366 - DNA, 201 bp, Homo sapiens
ttaagtctggagaagctgtctgctcccttttgttcagatgtgctctgccccagaggtagaatctagagagggagtaggcctgctgagctgtggtgggctcygcccagttcacacttccctgcggctttgtttacactgtaagcatagaactgcctattcaagtctcagtaatggctgacacctctccccctaccaagctcc

SEQ ID NO: 284367 - DNA, 201 bp, Homo sapiens
tttgaggaattataaaagcagtttttgaatataactattttatcaatttaccaatataaaacagaatgaaaacttttcagtcaaatatttcaagatatccygtatcaattaaatgtaggtggaaggataaggagggaaaataataaaagtagagagactgaatgacaagtatagtccaggcaatagatggggatgtcctga

SEQ ID NO: 284368 - DNA, 201 bp, Homo sapiens
agtggttgaatcagctgtaagaaacatagtggtaggaagtcacttttaacaccgcattgttaatgggcagagggaaagaagcagagtcctggaagttggtwacagacttagaaccacagatatagaaaacttgaatgttctaagtcccttgagggattttgtattgttcatttggtgtctaagaaaactaaatgttatact

SEQ ID NO: 284369 - DNA, 201 bp, Homo sapiens
accctgagtgtgatccaccatccaaagcctcgttggttccggagcagccccttttcctccccaagctgaacaagcccagaaggctaagcgacttcgggggkgtccctgagttgccgagctcagagaaaggacccaggtcttcgtgactcattgttccgtgtaccccattgtttcactgtgtacgttaaccgtaacagaaaa

SEQ ID NO: 284370 - DNA, 201 bp, Homo sapiens
gtagctccgcgcgcacagcaggaccgtcattgacgccatgagcgcgctgctgcggctgctgcgcacgggtgccccagccgctgcgtgcctgcggttggggrccagtgcagggaccgggtcgcgccgtgctatggccctgtaccacactgaggagcgcggccagccctgctcgcagaattaccgcctcttctttagtaagta

SEQ ID NO: 284371 - DNA, 201 bp, Homo sapiens; identical to SEQ ID NO: 58146

SEQ ID NO: 284372 - DNA, 201 bp, Homo sapiens
tgactggtcctgaaagtcgcaaaagttctgtggacagggtaagagagaacagaaacaggtatctttgatgttgatgattattttatgaaggctagtgaggrtacttaaatgtaggtaagaaactccactagtgatatacaacacccattaagcaaagataagagcaaagtcagggttctgatcattgtccagcacaatttt

SEQ ID NO: 284373 - DNA, 201 bp, Homo sapiens
cccattaaacaatatgtaaaggatggaaagctacgctatgtggcgaatatcttcccttacaagggttatatatggaattatggtaccctccctcaggtaasatttttgttacaatggtaaaatgttcctgtcttctgaaaaaattgccttataaatcctgtgaactactgaatttaaattggttctgaggacatgtcattt

SEQ ID NO: 284374 - DNA, 201 bp, Homo sapiens
tcctggtctcctgggtagctgggattacaggcataaactaccgcacccagttaaagatgaatttttttttttttttgagatggagtttcgctcttgttgcmtaggctggagtgcaatggtttgacttcggctcactgcaacctccacctcccaggttcaagctattctcctgccttagccttccgagtagctgggattaca

SEQ ID NO: 284375 - DNA, 201 bp, Homo sapiens
ttttgggttttgtttttaaatttttttagaaatgtgcacattcttctattccagctggaactgtgtaattctaaaattgctatttattttatatgtctctrtctccactaaagaaggaattcttttgttttttgctttttttttagaatctgggtcatctttgtcacccaggatggagcacagtgatgcaatcatggctca

SEQ ID NO: 284376 - DNA, 201 bp, Homo sapiens
aaaacttttcatagatattcatacacatttctaaaaacataatttgacataaaataacttacaaatagaccatcgtttaatttgcctctattgttcgaacsaaaaaaaaaaaaaaatgtttgggactgttaaagtccacagtggaaaagaagagtagctaaatcattttaggattagtcccttgtccatgtctgctgtgta

SEQ ID NO: 284377 - DNA, 201 bp, Homo sapiens
catttatttatttttatagcttgatttatttcagaagttcttgctgagaattaaacttttacaacagtatcaaagcactccttatactttgtgatactagstaaacaaaataacagtattaatccaactattaatagtgtttaaaaacttttcatagatattcatacacatttctaaaaacataatttgacataaaataac

SEQ ID NO: 284378 - DNA, 201 bp, Homo sapiens
catagactcattcatttatttatttttatagcttgatttatttcagaagttcttgctgagaattaaacttttacaacagtatcaaagcactccttatactytgtgatactagctaaacaaaataacagtattaatccaactattaatagtgtttaaaaacttttcatagatattcatacacatttctaaaaacataatttg

SEQ ID NO: 284379 - DNA, 201 bp, Homo sapiens
aagtatatatattttacagccatcttgtccaattctttcaaaaaacctgctggggttttgaaacatcatgtattgaacatattgattagtttggggagaamtgacatcttaataatatttagtcttttgatccattaacatagtgtatctctccagttactgaagttttctataatttatctcagcaatgttttagtttcc

SEQ ID NO: 284380 - DNA, 201 bp, Homo sapiens
tgatcaatggagacaatgtgatctaatgtgatctaaaataaaattagaagatattcttgagagaaatgtgatcacaatggactgactttagaaataacttyaacatgagatggtattaatgagcctgtcactttctgcacagaagtcttcaaattcatgtctctgagcaccttgttacttttcccatacatatttaaccct

SEQ ID NO: 284381 - DNA, 201 bp, Homo sapiens
caaatttcatgtcttttcacatacctgacacctaactctctctgtttaagaaatttccataagataactgaagtaaaaatataaaaaatgaaaaggtaaasatttggctgatacaggtaatatgcaacttaatactattttcactctcttgtctctcctcctttgtactctgtcaaacctaactttctcttttcttcattt

SEQ ID NO: 284382 - DNA, 201 bp, Homo sapiens
ctatgggaagaagcaacactcccccaaaatgaagcactctcttgcttttcacacttcaaaaatagatgtgctagatgtgaagcctcttcaaaaacaggctraaagttttttctacgaaatgacttcctctgtttttggtagtatcacatttgcctcatctcatacttctgaacacaaatttcatgtcttttcacatacctg

SEQ ID NO: 284383 - DNA, 201 bp, Homo sapiens
taagatttattatgtaagattcgggaatgttgtgaaaaaaaagaatgacacgtatttaaacacaaaaagtatcttatataatcaacaagtgctactttatragcaggctttccagaaaggaagttaacacagttgtagataacactttaaagaaactttcagctttgtaaatgaaacttttaaaagtcatacttctgtttt

SEQ ID NO: 284384 - DNA, 201 bp, Homo sapiens
gcatgcaatggaatttgctaaataattaaaataagatttattatgtaagattcgggaatgttgtgaaaaaaaagaatgacacgtatttaaacacaaaaagyatcttatataatcaacaagtgctactttatgagcaggctttccagaaaggaagttaacacagttgtagataacactttaaagaaactttcagctttgtaa

SEQ ID NO: 284385 - DNA, 201 bp, Homo sapiens
ccccctttctcacgtctatccaccacaaagtcttcttcagtgtttctaacttacctcattgtgtcctcaccaggccttcaccaaactgttcattcattcartacatatttattaaaggcctgtatatttgcaaggtgttcttgtaagtactgcaggtaaagcagtgataaaaagtgacagatatttctctggagcttttat

SEQ ID NO: 284386 - DNA, 201 bp, Homo sapiens
gaggccaaggccataaagtgaatcccagtgacagttaacatcagcatgtagtgtggccatctatttcatcccaaaacgttatcagtcatcccataaatgcrtattggcattgatgtagagactcaaagatgaatccgggtgaaggactttagctgaatccatcaatataagcatttcatgtgagtctgaggcattgttatc

SEQ ID NO: 284387 - DNA, 201 bp, Homo sapiens
gccaatttgggaaggaatggagggctggaagattcccacaactattgtttagcatcttgtggttctaggaagtgtttcagctggagtgcactgatattatrtatgggatgattcacatggcagagaatgggtagagatgaggatgatttagcctcaagctccttgaagccatgtgggactagatgaggacaagtatatttg

SEQ ID NO: 284388 - DNA, 201 bp, Homo sapiens
atgaagtgtggaaatacaatgcagaaagacaatgtccggctgggcacagtggctcacacctgtaatcccagcacttaaggagaccgaggcgggtagatcamttgagttcaggagttccagaccagcctggccaacatggtaaaaccccgtctctaaaaaaaaaaaaaaaagaaaaaagaaaaagaaagacaatgtccaagg

SEQ ID NO: 284389 - DNA, 201 bp, Homo sapiens
aattgcggaaatcgcagaaaccaataacactgtttacagctaaagaaatcatatggagactacctactgcatgtacccagaatcaaagttgaagtgccttrctcaaccaacatcatagatacatcttcaggaaaaattctcccatatgaaagtaaatttaaaaataggaagaagtgactattaaaccagatgcacagatat

SEQ ID NO: 284390 - DNA, 201 bp, Homo sapiens
aagaattgattagaagcctgcctggcccagatcaactgggagctggagtgacttaccaactcggggaaagggtgagtgagagacttccacatccctactgyaaaactgtggaatctgggctgttggagaacaccttgaccctcccaacccctgaaactaacagggagctgcagggatgtcacggaatgaaactgctccaag

SEQ ID NO: 284391 - DNA, 201 bp, Homo sapiens
ataaaggtcagtgagccttcatcaagtgcatacactcatgtaaccagcttccagatacagaaaaagaatattatcagcactttaaaatcagaaattcctcygtctcaagccctctgccggtcactacccactaccaacccccatcttctctaaagtgtagctaccctgattttcaaaatacatggatttgctttgtctatt

SEQ ID NO: 284392 - DNA, 201 bp, Homo sapiens
ctcccagcccctggcaaccaccatacgactttctgtctctctgaattcaactactccaattatcaactactccaattaccttgcataggtgcaattatacygtatcagtcattttgtgtctgacttatttaacacaatgtgttcaaggttcatccatgttgtagcatgtgcatgtatttccttccttttagaataattttc

SEQ ID NO: 284393 - DNA, 201 bp, Homo sapiens
ttcttcctactcccagcccctggcaaccaccatacgactttctgtctctctgaattcaactactccaattatcaactactccaattaccttgcataggtgmaattatactgtatcagtcattttgtgtctgacttatttaacacaatgtgttcaaggttcatccatgttgtagcatgtgcatgtatttccttccttttaga

SEQ ID NO: 284394 - DNA, 201 bp, Homo sapiens
agaatgaagaaataaaaccattctggaaattattttaaaataaaatgtaatgataaatgttttagagtagcttgcccatttctttactgtaatactttttrggttaacgagaagctgctcaattattctatttttatacactgtacattttattcctctgaaatgtttggcactccaacaagaagcagctgctaattttaa

SEQ ID NO: 284395 - DNA, 201 bp, Homo sapiens
accagtaaggactctccttaaggaaaacaaacaacaatttttgggaaaaaactctaaagaactttctgctttggaattataaagcaagttttccttagatrttcttactggatgtatatccaacaagaggtatatctattgttgcttatgcatttttagacaatgtcataaatgtcaaggagatgtactgctttcagacag

SEQ ID NO: 284396 - DNA, 201 bp, Homo sapiens
tggctttgttgagctgcagtatgctctgcccagttcgaacttctggaagctttgtttacactgtgaggggaaaaccacctactcaagcctcagtaatggcrgatttccctccccccaccaagcttgagcatcccaggtcaacttcagactactgtgctggcagcgagaatttcaaaccagtgactcttatcttgctgggct

SEQ ID NO: 284397 - DNA, 201 bp, Homo sapiens
tggcttccttgcattgggttagaacatgctcctttagctcagagaagtttgttattacccaccttctgaagcctacttctgtcaattcgttacattcattstccgtccagtgttgttcccttgctggcgaggagttgtgatcctttggaagagaagaggcgttccagtttttggaattttcaacctttttgtgctgttttt

SEQ ID NO: 284398 - DNA, 201 bp, Homo sapiens
agagaagggggagagagggggcagaggtgccaggctcctttaaacaaccagccaccactaagtgaactaaaagagcaagaactaacacattagcatggggktgtcaccaagccattcatgaaggatctgccctttgacccaaatgcctcccaccaggcccacctccaatactggggatcacatttcaacatgatatctgga

SEQ ID NO: 284399 - DNA, 201 bp, Homo sapiens
ttttttgctttcatgtacatgaacgttatttctggaaagaattttatttattgtggtaaaatatagcacaaaattgggcattttaaccattttaaagtgtrtatttcagcagtattaattacattcactatgttgtataaccatctccactatctacttccaatattcttttatcacccaaacagaaactctgtacccact

SEQ ID NO: 284400 - DNA, 201 bp, Homo sapiens
gaggcaagagaatcgcttgaaccagggaggcggaggttgcagtgagccgagatcgtgccactgcactcccatctgggtgacagagcaagattctgtctctragtaaataaataataaataagagtgctctctcagtgaaacataatgcggacttcagggaagagtccattaaaggtgtaacaacttcaaattttttaaccg

SEQ ID NO: 284401 - DNA, 201 bp, Homo sapiens
gtaagtgccagagctagttttggaattagcttctgaccacaaagcttatgctctttaaccactctatgaaacaggtgttagagaaataaagcaggggtaamaatggtggtgtttgaatagctgttctcttagaactgaaaatcacttgacagttgtcagggtgtgaaagatgccaggagaactgatgctatcaaatcaaaa

SEQ ID NO: 284402 - DNA, 201 bp, Homo sapiens
attgtagctcccaaaattcccatgtgttttgggaaggacccagtgggaggtaattgaatcatgggggcagatctttcccatgctgttctcaggagagtaartctcatgagatctgatgattttataaaggggagttcccctgcacatgttctcttgcctgccgccatgtaagatgtgactttgctcctcatttgccttcag

SEQ ID NO: 284403 - DNA, 201 bp, Homo sapiens
ctctgaatgatactgtaatggtgaatgagtatcattaaacatggatccagactcacagaatacataacaccaaaggtgaactctaaactatgaactttcakcgacaattgtcaatgcaggttcattgactgcaacaaatgtaccattctggtaaaggatgttgataatgagggaggctatgcacatacaggggcagcatgt

SEQ ID NO: 284404 - DNA, 201 bp, Homo sapiens
tcccgtggagaagcatgaagctcaactgagcatgcttgcaggttgcagccctttatgagaaataaagctctgctttccaaatttatgaacctcatcattcttcagttgccatttttatgaagctgagtaactagaagtcaggtttttggcctttctagtcgttgctcctgtgcaaatttatagatatattgcccattaaag

SEQ ID NO: 284405 - DNA, 201 bp, Homo sapiens
tatttgaaaccaacttttaagtggataccagtaagtatgttttataagtgaaataaggcatgttaatgaaaacttaaaatttataatgggtattttgctgwaaaagaattgattgctggactctgtttttttgaaagcacattaaaagaatccttcaaatcttgagggctttgtctgggattattaaatgtaaatataaaa

SEQ ID NO: 284406 - DNA, 201 bp, Homo sapiens
agaaaggctgttatcttaaaagtatgaaaaacatttaagctacaccatcctagctgtgacaagttttggtgatgactgatgagcataatactgacaacttyatttcaagaacaaattgtcaacctagagtgtggaagacaaaattattggctctggatgagcaaaattattggttgtgtctctggaaggtgaaagtctttg

SEQ ID NO: 284407 - DNA, 201 bp, Homo sapiens
agaaaatgatttgattgtacggtgactttttttttcgctgaagtactgagatattccagccagttctgatacatttaattttaaaagatttaattaaaaaraaactcttacatttagatatttatctttttttaatgaatcacttattttagctgaagatcttaaaatctatagttatagaattaaaaataaatataatat

SEQ ID NO: 284408 - DNA, 201 bp, Homo sapiens
cgatggggttttctagatatacaatcatgtcatctgcaaacaggaacaatttgacttcctcttttcctaattgaatgccctttatttccttctcctgcctkattgccctggccagaacttccaacactatgttgaataggagtggtgagagagggcatccctgtcttgcccagcaccatttagtaaatagggaatcctttc

SEQ ID NO: 284409 - DNA, 201 bp, Homo sapiens
gcttaaggagattttgggctaagacgatggggttttctagatatacaatcatgtcatctgcaaacaggaacaatttgacttcctcttttcctaattgaatrccctttatttccttctcctgcctgattgccctggccagaacttccaacactatgttgaataggagtggtgagagagggcatccctgtcttgcccagcacc

SEQ ID NO: 284410 - DNA, 201 bp, Homo sapiens
taaagttctagaagacagataaattttttagcaagtgtgtgttttatagcaagcatgaacaaacatatatttaaatatgtgtgtgtgtgtgcttgattttractttcaagacattagctgcggaagccattgaaagaaaacctctcttctcattcctagctgcaagaccttcagtggattccatgggttaagataaaaaat

SEQ ID NO: 284411 - DNA, 201 bp, Homo sapiens
tcctgactctatggactttgtacccaccgttacttctgcaggggccggtgggtggctgtttggaggtaaaaggtgcctagatatgtgggctactaaattaytacccatgtgcagatgaggcccttgaaatacagaaaggagcctggaatagggagagaagtggagcaggatgagggcctcttttccttcctctgctgcatc

SEQ ID NO: 284412 - DNA, 201 bp, Homo sapiens
gagaagttattcatgtgaagatccttggaattttggctcttattgatgaaggtgaaacagattggaaattaattgctatcaatgcgaatgatcctgaagcytcaaagtttcatggtaagactgttactttccagaaagtgaaagcaaattagtgtgtcattggaattctgagaacttaaaagaagttcacataggggagtt

SEQ ID NO: 284413 - DNA, 201 bp, Homo sapiens
actgaatccttacatgagggactggttctctcacttctattttagttggaaaataaaaattgaaacacatttcttgactccattctagttttgtcactacwcatcaaagatattctcagactcgtaacctctgacactgtgtgtaagtgctcaagtgacatggtggcctaaatttggctgtgttttagacaactctaattt

SEQ ID NO: 284414 - DNA, 201 bp, Homo sapiens
cacattgaatggaaacaatatttcttttcttttaattgaataggaactttggacttttcttcccatggatagtaggtagaaattgggaatactattgttargtttccccaagggaaattgacatcagttttaatagaattcacttagtaatgagtttctttttcaaaagtgatgtttttttttttaatatgtattttgggt

SEQ ID NO: 284415 - DNA, 201 bp, Homo sapiens
ctgtggttctgaggaagggctgtctgatgtgtgcttcagttctaccacttttttttttttaacctagtgctagataagttctactgtctttaaaaataacrgcatgtgttgccacagcgcttgttccatataccatatccctctgtctgtagcgcatatgtaccatatagattatctcattcattttatagaggatcagga

SEQ ID NO: 284416 - DNA, 201 bp, Homo sapiens
gtaatgcctttgaaattctgagagaaaagagttttcctcctagaattttctacccagccagctgtcaatctggagtgagaacagagtaaagacattttagmcatttaacaacttgagaaattggcctcacatgcaatccttcttacagaacacttattagggatatgcttctgcaagacaagtaaaccaaaaaaacgtgaa

SEQ ID NO: 284417 - DNA, 201 bp, Homo sapiens
atggtccctttcccaagtgctgggaggctactgtgtgtgcagacagcctgccccaagggaagaatcaggggagatgggacacaagatcctggaagtatgcyaacatataaaaccccaagttgaaaggtcaaaccgtgcatttgtcttttcaagttgcccactttgccctcttccaagtgtaccttccttccctttgttcct

SEQ ID NO: 284418 - DNA, 201 bp, Homo sapiens
tagggggcaccggcgtgcggcccggccgagcccccaggtagctccgcgcgcacagcaggaccgtcattgacgccatgagcgcgctgctgcggctgctgcgyacgggtgccccagccgctgcgtgcctgcggttggggaccagtgcagggaccgggtcgcgccgtgctatggccctgtaccacactgaggagcgcggccagc

SEQ ID NO: 284419 - DNA, 201 bp, Homo sapiens
acctcctgattcttcaccctgcttccacccttagccctgtatagtctactttccatacagcaatcaccttcatccttttaaaatgtaagtcagataatgtmcaagctctgctgaaaatgccagtggctttccatttcactcaaaaaattttttgaaatatgtaccatagcatgtaaggtcctactggatctaatactgggc

SEQ ID NO: 284420 - DNA, 201 bp, Homo sapiens
cccataacctgggcattcttcttgtcaccttttactcttatcccacagctaactcattagcatatttttttgaaatgtaccaaaagacaattccttctgtycacttccacccttctcactttctctgtttcaccatcatctttcccttgatcagttgtaacctcctgattcttcaccctgcttccacccttagccctgtat

SEQ ID NO: 284421 - DNA, 201 bp, Homo sapiens
atttagtctgggaatgaaccaagcagttctttaaaattaatttgctttgtcacttatagtaagcatgtgcttgtgttgaaattactgtaggttttctttaygtcatttgggtagtaggaggaatctgccattgaaagtgctgtatctttggacttaaaagagaacttcccgtgaataatccacaaaatttgtttgagtctt

SEQ ID NO: 284422 - DNA, 201 bp, Homo sapiens
atctctaaatttttgttataggaaatatttttaatctattatttttagcttgttgtcttctgttagtaaaaagacctaaattatcttcaaagttagtgctrtgggaaacccagtttaaattaaaggattagatgatttcttggggacattggcacgtttttaagtgctttagggtaactgttaagtgatgaagctggaagt

SEQ ID NO: 284423 - DNA, 201 bp, Homo sapiens
tttactaatttgcaataaagagataaataatacctcatttacaagttgtgaagtttaaatgacatactattgttggcagcagtggcccgtctggagcagcygctgcaaagactggctgcagccggggaggcacagccaaggctgcacactccaccgagctacaggagccaggaacaggtgggagccccacccccttccgag

SEQ ID NO: 284424 - DNA, 201 bp, Homo sapiens
aaatgacatactattgttggcagcagtggcccgtctggagcagccgctgcaaagactggctgcagccggggaggcacagccaaggctgcacactccaccgrgctacaggagccaggaacaggtgggagccccacccccttccgagttggcagggtgggatcaccaccttcctggacacagctgcagccacccagccacagc

SEQ ID NO: 284425 - DNA, 201 bp, Homo sapiens
tattaaatgtaaatataaaattattattttagattaaattatcttaaaggattgaaaatttatacattatttttcttttaaaaattttcattttattattsagataattgaaattttaaacctatatggtatttttgcctcagggtaagtctgccaagtcacgaatttgtaaagaatgaggtagtttttggtttttgtttg

SEQ ID NO: 284426 - DNA, 201 bp, Homo sapiens
tcatatagaaaatattttaggctttgaagatcgtatgatttctgtcacagctgctcaactctgctatcgtagtactagagcagccataggccaaacacaarcaaatgtgactgttcagtaaaactttacagggggcagactggattttacccatagttcctagtttgccaacccctgatatagattatccctattatattc

SEQ ID NO: 284427 - DNA, 201 bp, Homo sapiens
ctcctgactctatggactttgtacccaccgttacttctgcaggggccggtgggtggctgtttggaggtaaaaggtgcctagatatgtgggctactaaattwttacccatgtgcagatgaggcccttgaaatacagaaaggagcctggaatagggagagaagtggagcaggatgagggcctcttttccttcctctgctgcat

SEQ ID NO: 284428 - DNA, 201 bp, Homo sapiens
gcctgtttctggggcctgtgtagaaaccaggctacacatctccccaggtccacgctcctgactctatggactttgtacccaccgttacttctgcaggggcyggtgggtggctgtttggaggtaaaaggtgcctagatatgtgggctactaaattattacccatgtgcagatgaggcccttgaaatacagaaaggagcctgg

SEQ ID NO: 284429 - DNA, 201 bp, Homo sapiens
agccggtgcctgtgctggtgcccggagttgcctgccctttgccactccatacctggcttgcccttggcatgcgtgggatccaggcttagcacgagcggagygcagcctgccaggccgagtgggtggaaggagcccagcgggccgagcaaaactcgggaaaaggcgccactggccacagaggtttcaagctggaaaagcgac

SEQ ID NO: 284430 - DNA, 201 bp, Homo sapiens
aggggtgataggctcatttaacagatgtttattaggcatcctccgaatattcagtatgaagtactggagatacaaagataagacatagtcatgggagaaayattttaaaaagctttttccttttggaagaaatgttataaagttacagaaattaagaaggaaggcttttggagatcacctgtttcaacccttcatcattgt

SEQ ID NO: 284431 - DNA, 201 bp, Homo sapiens
ttctaaatgcccatgcctctgacacaaaacccttccatgatctgcagacctgttgaaaatatggtagagttcatcagtttgacttattttacggaggataktcttttcaggttattctgctcacctctgccacctggaattatggagaatgtacatttttccattttgttgcactggtgataatgaaatgtaacattaccg

SEQ ID NO: 284432 - DNA, 201 bp, Homo sapiens
ggctgggcacgatggctcacacctataatcccagcactttgggaggccgaagcagtggatcaggagtttcagaccagcctggccaacatggtgacaccctrtctcgactaaaaatacaaaaaattagccaggtgtggtggcaggtgtctgtaatccctgctactcggaggctgaggcaggagaatcacttgaacctgggag

SEQ ID NO: 284433 - DNA, 201 bp, Homo sapiens
caaaaatctcacaaagcaaaatatttttatatttgactttagaaaaataaaacacatacttaggttgaaaaaaagtcaatatctagcagacaaaatgccartatttctaatatagaaaaaaatgttaaattttgtacagaaaatacacaatagaaaaatcgatgtttacaaaaaaagctataggaatggccaaaaaacaaa

SEQ ID NO: 284434 - DNA, 201 bp, Homo sapiens
atttataatttagtgggaatactgataaataaatggacatttaattgaaatacattgtgcaaagatgaaaaacgcaatttttcagcatgtaaatctatgcrgtttctttaaaatctaataactaccatataatttcttagaaagtgaaagcctccttattcatcatgatcactaattgattgattaagaggaattaagtaa

SEQ ID NO: 284435 - DNA, 201 bp, Homo sapiens
ttattctttttttccactgctggatgtttactctgaaatctaaatattatattaacagagagaatttaatttctagtcttacctaagaaaactttaaactygattctgggagaaatcattttttgacatttgagtttactcttcagtcctctcccactttctcttcaaccagttgatataccttattaagaaatcagaaat

SEQ ID NO: 284436 - DNA, 201 bp, Homo sapiens
tcataaatcttacggtataaaaagtaatacatttcttttcaaaatagaaataaattttataataaattaactttttgcataattcttgcctcctaaaattstactaatcattgagatttttacttaaagtcctttctaaattattttattatgttgtttgctatggagcctccaaatgaatatagtaaagatttgcctcat

SEQ ID NO: 284437 - DNA, 201 bp, Homo sapiens
gcagtcttttaaattaactgtgaaatcataatgaagttagactcacttatattgagccaaagacctaatgctgcatgccagtattcctttgatatcttgcrtgtttttgtttgttttgtttcgttaataacttgaaattttattttagatttcatactgttctcataggatagggaaaagctatgctttccataattagga

SEQ ID NO: 284438 - DNA, 201 bp, Homo sapiens
gtgtgtaattatcagtgtctcacacgtgataggtatttaataaatgttatttatttttcccttttgactttaagacattagactaaaatccttattattasattctgtgaagggagaaaataaggtgatgtgattgattattttgaagtgttcctgttaatttataggtttcagaaggttttttgttgttgttgtttattc

SEQ ID NO: 284439 - DNA, 201 bp, Homo sapiens
cttaccttcagatgacatccggtagctcagtttctccgtaaataaaatggggatagcactagtaattttatagaattgctgtggcagttaaatgagactaygtgtgtaattatcagtgtctcacacgtgataggtatttaataaatgttatttatttttcccttttgactttaagacattagactaaaatccttattatta

SEQ ID NO: 284440 - DNA, 201 bp, Homo sapiens
atgtaacttctccaaaaactgaaccacagagtacttatttctcagaacatttgttaacatcttagtgacatcagggttatgatttctgcaacttccagaakcaactgtgctgtaacagttctaaactaatagtcaaaccacttaagttgtagtcctgactttaccgtcttggacaagtcactcgactgaattaaccagagg

SEQ ID NO: 284441 - DNA, 201 bp, Homo sapiens
ctgtctactgcaagtattctagatttgcaataagtacggtaattaatagatacccaaataataaatatttatgaagtgtgctagacactgttaggcatagyacagagattcacaatattactataattatggaaaaagtaaatacactggttgagcaaaaacaggcttgagaagccaggagcgcacagagtagttgaccca

SEQ ID NO: 284442 - DNA, 201 bp, Homo sapiens
taagaaacatgagaaaatgattactagtgaaccattgcctcattcagaaactcagcctatttatattaagtggccttgaaattgggagctaaaattagttrctatttaatagttgcctatgttgaaaaaagaattttgatatttcaaattaggtgttcagaaacttttcataaaaggacctctgaggttttaagctttgtt

SEQ ID NO: 284443 - DNA, 201 bp, Homo sapiens
ttgatgtaatacttaaaaaaaaattggtgttaaactttgtagaaagagtgagacaggatgattaggggaaagggtatcctgatgggaatcatcaggcctcsttggtgccagccctgaccctgttagtatcttgctgtcacttcacctccctgcatctcattttttaaaaccatggaatgaggagattggaccagatgatca

SEQ ID NO: 284444 - DNA, 201 bp, Homo sapiens
gatttcatccaacccttctattcttaaacaatgtgtccaaacctacctttccagcctcatgggctcttccttcctgtccccttgtctttctttggtggacrtcttcattttttcgagaagcagtttagatgtcacctctgcacagtttcatttctgttgggctgttgtatcactgctgtacatacctctatgtagaactgg

SEQ ID NO: 284445 - DNA, 201 bp, Homo sapiens
aaggagtgtctaggctgttttatggattttctcaggtgctcttaattacatgttctcctccatgattgcaaaactttccccttaaattagcctctttttcmagaaggtagatataaaaaacgttttttctttgaggaagcaaaattttcattggcatcagttaaaaattaaactgaaatctatcaccactgaataaaacaa

SEQ ID NO: 284446 - DNA, 201 bp, Homo sapiens
tgagacctggagatttctactgaaagagccctggcttttacatttttttccatctcctgtgcagccagcttctgatgaggcctcaggtctcagattctccrgagagttaactgctatcacctaaattattttgattaacccttaactctgagagtctcaatttactgacatgccacattaatactcttgtgtaaatgtctg

SEQ ID NO: 284447 - DNA, 201 bp, Homo sapiens
tatgcatgtgtagaacaggtccctattccaaaataatctgaatattttttacataggaggtcaatctaggggataagttattcttcatttcaatgagtaawggaagcaaaaactcctctccacttttcctgatcttattaagcagttttccaaagatttctcatgctcattgatggcttctgactttggaacattttagca

SEQ ID NO: 284448 - DNA, 201 bp, Homo sapiens
catagtgatgtgatatatataatgtaaagtgattagataagtgtaattagcatattcatcatttcaaacatttaccatttctttgtgttgggaacattcartatcctttattagctattttgaacctatgtaacatagtattgttagccatagtcatcatacagtggtatagaacactagaacttattcctcctgtctagc

SEQ ID NO: 284449 - DNA, 201 bp, Homo sapiens
tggaaaaatgatcgaactttatgaggctccacacacaaactggtggcatacagaactgaggagagagccatattcagtgctaaaggattcccagacttgcytcagacatgtgcacagcctaactccagggatttaaaactcttacaatctagaattcaggccaagaagagtaagtagctatacacttgctcagttctaggg

SEQ ID NO: 284450 - DNA, 201 bp, Homo sapiens
aaaaataaatatatgaagttgtttaatgagaaacaatgttaatgatagtgcccaaaccagccactgatttaagctgagatctcctcaaaccttaatgtgcytccaaatcactgtcaatcttgttaaaatgcagattctgattcacttggcctggggtagggcctgagattctgtatttctgacaggggtcaatgatgctga

SEQ ID NO: 284451 - DNA, 201 bp, Homo sapiens
taggatgctaaatggatggtgttttgaagtaaaaaagtcaagggggaattggaacttcaatataaatgtattatttcttgctacatttggtagatcttatytctcagtaaagcaacaatatccatagtgttgtataaaatttggatggttgtcttatagttgatgcaagacttcttagctgaattgtaaaaagcagtgcat

SEQ ID NO: 284452 - DNA, 201 bp, Homo sapiens
tttcccacaccttcctgtcttcttctgagccctccaaactttcaacctctgcttgttacccagttccaaagttgcttctacatttttgggtctctttatascagcactccactcaatgtactatattagtccattctcatgctgctataaagaactgccgaccgggcgtggtggctcacatctgtaatcccagcactttgg

SEQ ID NO: 284453 - DNA, 201 bp, Homo sapiens
attttgtagttaaacacaaaaacgtaagtattttgttcattatagaataaacttgaaggtaggtattggaaagaagcgaaccattcacttaatgataacakagtttcaggagagaggacttaagggataggagctgttttattatggttcattttgacatgtatataacaacctccaccatcatcaaaaataatttgtgat

SEQ ID NO: 284454 - DNA, 201 bp, Homo sapiens
tagccatatagtacttagtaatgtaaataataaaaacaatttatagaaaaataaatatatgaagttgtttaatgagaaacaatgttaatgatagtgcccawaccagccactgatttaagctgagatctcctcaaaccttaatgtgcctccaaatcactgtcaatcttgttaaaatgcagattctgattcacttggcctggg

SEQ ID NO: 284455 - DNA, 201 bp, Homo sapiens
atcggagctcaaatgccatgctggaagaactactgctctcttcagagctgtcaggcagggacatttaagtctggagaagctgtctgctcccttttgttcasatgtgctctgccccagaggtagaatctagagagggagtaggcctgctgagctgtggtgggctctgcccagttcacacttccctgcggctttgtttacact

SEQ ID NO: 284456 - DNA, 201 bp, Homo sapiens
ctgagtcattcccttagtcttgaggttaggaaccagcttagaaacagctgagagtgacatcactgtggccatttgaaaaggcagagaaagaagggtacatygggctgcttcaggaagactggaatagagaccttcacagaagagagaggccccatatcagaaggaagtgtgacccagaaggatggagctcttcagagacag

SEQ ID NO: 284457 - DNA, 201 bp, Homo sapiens
tcttaactctgtgaccccggacgagtttaagttgctaagccttgttttttctcatccgtaaaatagggctgcaagtattacatgacattatatatgtaaastgattagtcacagggcctaaaatataaattactattgttaataccgataatcattatagatatttgtaatttatgagagatttgcagttatgctacatga

SEQ ID NO: 284458 - DNA, 201 bp, Homo sapiens
ccagagcttctgtagggttaatttagccagcagtttcttctttttttttctgtttttttttttttttctttttttaaaagtgtttccatggggaagtgaaracttggagcttcctagtctgcaattttgttgacagtactcctaaactcagattttatgactttctttttctgctcctggatgccatgctggaggttttat

SEQ ID NO: 284459 - DNA, 201 bp, Homo sapiens
gtttttttttttttttctttttttaaaagtgtttccatggggaagtgaagacttggagcttcctagtctgcaattttgttgacagtactcctaaactcagwttttatgactttctttttctgctcctggatgccatgctggaggttttatgacattttgggggagtttatgagtagtttgggggatactgatggaaattga

SEQ ID NO: 284460 - DNA, 201 bp, Homo sapiens
agcaaggactacaggcatgcaccaccacaccaagctaatttttctattttttgtagagacaggattttaccatgttttccaggatggtctcaaactcctgrgctcaagtgatccacctgcctcagccttccaaagtgccaggtttacaagtgtgagccaccatgcctggcctgttttttttttttaattaaaaaaactttg

SEQ ID NO: 284461 - DNA, 201 bp, Homo sapiens
agctctggacttggaaaaacccaatggaaccttaagatttgtctgttatattgcttcattattacctgtttttcaactggaattttagagagaaatttacratattttcaatgtatttatatagaactatgattatttataaaacatatttttatagttttaatacaaaaattcccttaaggagattctatataatctttg

SEQ ID NO: 284462 - DNA, 201 bp, Homo sapiens
aactttggctgtgttcatggacaaagttttggggaattggagagataatgattgatatttgttaagaattattcccttttattaggtgattttcacccatwatttaatccccatgacaaccttgatttcttcttccctattctggatttgaagaaacaggtagtacatttttcccaaagtgatacaatatggaagtaccag

SEQ ID NO: 284463 - DNA, 201 bp, Homo sapiens
ttgattcaaggattaatgtccctttcactcttatcgtgttgcttcttgaactattacttatcctcaaagtccagctcaaatgcagccttttctgtccccarcccttcacattgaaatcaattattttcttttctgtgagaggtgaatagcactatatatttattcctccattatagtctttaggtcattctgacttgtatt

SEQ ID NO: 284464 - DNA, 201 bp, Homo sapiens
tcccaaagtgctgggattacaggtgtgagccaccgcgcctggcctgtgtatttatttttgaaagataaaagcttgtaaagctattaatttgcctgtaagtrtaactttggctgtgttcatggacaaagttttggggaattggagagataatgattgatatttgttaagaattattcccttttattaggtgattttcaccca

SEQ ID NO: 284465 - DNA, 201 bp, Homo sapiens
tagtttctagtgagtggtagaggcagaagtagaaaagagctctggcttttgattcaaggattaatgtccctttcactcttatcgtgttgcttcttgaactrttacttatcctcaaagtccagctcaaatgcagccttttctgtccccaacccttcacattgaaatcaattattttcttttctgtgagaggtgaatagcact

SEQ ID NO: 284466 - DNA, 201 bp, Homo sapiens
ttatatgcttattaataatatgatgatttagtttcagaaggggcatcattgtcttgccataggtcaaggtatgtcttgccactactagtttatctttactyattatactgtcttataatgtcttacatggtgaatcaaatctttaaattcctgttggcttctattattttcatccttctttccatattctgttttaccagt

SEQ ID NO: 284467 - DNA, 201 bp, Homo sapiens
accacctccatgatcaaattacctcccacaagcccctccctcaacacatggggattacaacttggattacaaatcattatgagatttgggtggggacacaragccaggccatatcacttactctggtagctcacacgagagctcacatgagagagcctggcaactcccattcttgctctcttgcacccaccctctcttgcc

SEQ ID NO: 284468 - DNA, 201 bp, Homo sapiens
ctttggcttgctctccgagggctgcacccactgtccaaccagtcccaatgagatgaaccaggtacctcagtttgaaatacagaaatcacctgtcttctgcrtcgatctcactgggaactgtagacgggagctgttcctattcggccatcttggaggcaacctcctatttttttaactattaaaataaactttaagtcatta

SEQ ID NO: 284469 - DNA, 201 bp, Homo sapiens
gtccattccctccttcttcctattgtgttaaactatcatatcttgcttttccattgaatcaatgttaacatttctctaattagcctcctgacacaaaaatstatctcccacactgtttaccagacttattttattttaaagaaaacgtatttaaaaaaaggttttgactcagagcttacagaaaaatccagattctctaac

SEQ ID NO: 284470 - DNA, 201 bp, Homo sapiens
gattttagatggcattttaaaaattataaaattaattttatacatggaaataaaaactcagaagtataaaaaaagtacataaaatgaaagtaaagtttttyttcctacctcccacctcatcttctcagatcttatcacagatgttttttgttcttttgaatggttgcttccttctgtaaatgatgtgcttatatttcttaa

SEQ ID NO: 284471 - DNA, 201 bp, Homo sapiens
tgggcagttccaccccctgtggctttgcagggtacagcccccctcatggctgctttcatcatgggctggcattgagtgtctgtggcttttccaggcacacrgttgcaaactgtaggtggatctaccattctggggtctggaggatggtggccctcttctcacagctccactaggcagtgccctagtgaagcctctgtgtgg

SEQ ID NO: 284472 - DNA, 201 bp, Homo sapiens
tttggtatctttaaaacattaatttttacatcagttgttgatatatgtttcccatttattcaggtattcttgtttatcttttatatcttgtatatcttttmgcacagtctgaaaatatcttaaataggtgtgttttaacttattttaaagggagaaagcattcatttgtacttggaattttgccatttttaactattgcag

SEQ ID NO: 284473 - DNA, 201 bp, Homo sapiens
ttataaaattaattttatacatggaaataaaaactcagaagtataaaaaaagtacataaaatgaaagtaaagtttttcttcctacctcccacctcatcttytcagatcttatcacagatgttttttgttcttttgaatggttgcttccttctgtaaatgatgtgcttatatttcttaatttatgcattttccctgttgact

SEQ ID NO: 284474 - DNA, 201 bp, Homo sapiens
gagagacaagtgcagagcaaagaggggaaagccccttataaaaatcatcagctctcacgagaactcactcactgtcacaagaacagtataggggaactgcygccatgatctaatcacctcccatgaggtcccttctccaacacttttggattacaattcagattacaattcaagatgagatttaggtggggactcagagcc

SEQ ID NO: 284475 - DNA, 201 bp, Homo sapiens
gtgaagactgtgggaaaagcgcatatttgggtggtagtgtacagttcctccaggtacagtctgtcatggcttcccttgcctaggaaagggaaatccccgaycccttgtgcttcccgggtgaggcaatgccctgccctgcttctgctcgccctccatgggctgtacccactgtccaaccagtcccaatgagatgaaccacgt

SEQ ID NO: 284476 - DNA, 201 bp, Homo sapiens
gtggtggcaagagagacaagtgcagagcaaagaggggaaagccccttataaaaatcatcagctctcacgagaactcactcactgtcacaagaacagtatargggaactgccgccatgatctaatcacctcccatgaggtcccttctccaacacttttggattacaattcagattacaattcaagatgagatttaggtgggg

SEQ ID NO: 284477 - DNA, 201 bp, Homo sapiens
atgattttcaaaagcctctcagtaaactaggaaaagaggggaactacctgaacctgataaagaatatatacaaaaccatacagctaacatatttaatgtarataaagaatatctacaaaaccatagagctaacataaaattgaagatttcctgctgagatcaggaacaaggcaagtatgttgcctctcaccaatgcctttc

SEQ ID NO: 284478 - DNA, 201 bp, Homo sapiens
aacaaacatgtccttcacgtggtggcaagagagacaagtgcagagcaaagaggggaaagccccttataaaaatcatcagctctcacgagaactcactcacygtcacaagaacagtataggggaactgccgccatgatctaatcacctcccatgaggtcccttctccaacacttttggattacaattcagattacaattcaa

SEQ ID NO: 284479 - DNA, 201 bp, Homo sapiens
cagaggcatttgtcaaataatcataggcagctgttgaatattgtcactgactcaggtgtagctaataactggagcaaaacataagataactaaaaaagctyaaaagtaaattacctgggaaatgagatgatccacaggaggctttgaaaatatattcctgggaatttagaaagccacatgcaactgtagggcccacaaaag

SEQ ID NO: 284480 - DNA, 201 bp, Homo sapiens
tgctatgttgctcaggttgaacctgaacttctgggctcaagtgatcttcccgcctcagcctcccaaatagctggaactataggtgtgtgccaccatcagtrgcttgttttgcctacttttatacttgatatatacataggtatatggaattatataatataagcttatttgtgtgtgctttttccattatgtttgggatat

SEQ ID NO: 284481 - DNA, 201 bp, Homo sapiens
aattttgtattgttatactgtccttaaattgtgcaggacacaaataggcatcctgcacaatttaaggagtatatagcaatttcatagaataagcaggttamcccgttttatggtctgtttagaaaaacagagccgtcaaatcccaaatgcctaatctcaaggagtacaatttttatgttgtgttactgtcatacccagatt

SEQ ID NO: 284482 - DNA, 201 bp, Homo sapiens
ggcttgagaatctagaatttaagcaaccagagtccaaacttgaggacatgtatcagaaatactttgtgattgcagctggtaagaagcatgccggagggcasggaatgggaaaggaacagacagtatttcagacaattgagacctcaactgtagagggaaattctttgtttataatgtctcttcccgtggacagtgttgtca

SEQ ID NO: 284483 - DNA, 201 bp, Homo sapiens
cccttttatagaattagatcactgtaggaaataacatataaagtgtccctcagaaaatctgattccttgtctttgatcctttaggatattcttcatgaggygtatacttttcaaaaaaaacttctcctagcctttttgtttactgagaatggtaaggggaaaaatgaatgatttcctttaggaacccaaaccttaatactg

SEQ ID NO: 284484 - DNA, 201 bp, Homo sapiens
ctggaatgaaacatggttatattaggatgcactatagccccagttatcatttactacttctgcttttcagaaactagcatagcctcctaataatgagcagktgctgagtacatgattagtgatgattttagatgttggggtggttggtaggccttgtgtttgttcttctggatcagaagttaggaaaccagaacctacggc

SEQ ID NO: 284485 - DNA, 201 bp, Homo sapiens
ataagtttggtagtttttttttgaggcagtctctctctgccttccatgatggagtgcagtggcacaatctcagctcactgcaaccaccgcctcctaggttygagtgattcttgtgcctcagcctcctgactagttgggagtacaggcgcgcgccaccacacctggctaattttttgtattttagaagagatggggtttcac

SEQ ID NO: 284486 - DNA, 201 bp, Homo sapiens
aacttgatgtttcttatgcctttattcttttttttctttttatactttaagttctagggtacatgtgcacaaagtacaggtttgttacataggtatacatrtgccatgctggtttgctgcacccatcaactcgtcatttacattaggtatttctcctaatactatccctcccccagtcccccaccccccaacaggccctgg

SEQ ID NO: 284487 - DNA, 201 bp, Homo sapiens
tctgcgagctgtactgtcagtaaatcaccttgccttgctcaccctccatttgcccaggtacctcattcttcttctgtacgggagaagcactcgggaacacycaaatggcgaaactgaaagaaccctaaggcaaacaaggctgaaacatgccacctcctgatcctgctcgccacattgcaggcaacaaggagaagagaagag

SEQ ID NO: 284488 - DNA, 201 bp, Homo sapiens
cagagagtttaaatgattattccaggagtaaatattctgttgaagtgtctttggtcatgtatgaacctctttgagggacaacaaagagtgtaagagaagartgaattctttttacttttatagatatattgtttaaattgtgaaaataaaacttgtagaaaggtagaaaatagagtactattattgcaatagttgtaacaa

SEQ ID NO: 284489 - DNA, 201 bp, Homo sapiens
gagcccataaaaaccttggatttaaccagactcgggaggacgggacaacctgcctgcgttaggagctacccgctctggatgtcctctctgctgagggctgyagtctcagtgggcctcaggctcaatgggatgacctacctgtggataggagctacccacttctgatcttctgcgagctgtactgtcagtaaatcaccttgc

SEQ ID NO: 284490 - DNA, 201 bp, Homo sapiens
tcttaaaattgtagagtggatcttctgatcactaaaagatccctagggtttttcccatctctaaatttttgttataggaaatatttttaatctattatttktagcttgttgtcttctgttagtaaaaagacctaaattatcttcaaagttagtgctatgggaaacccagtttaaattaaaggattagatgatttcttgggg

SEQ ID NO: 284491 - DNA, 201 bp, Homo sapiens
gtctaaaattattgtcattctgatctctttaaattttctctttgcctttttcttgactactttgatttagaatgaaaagccttgacaaatctttatcctgracactgtctttgaggattctcataagtgtgggccattgtttgatttgaaatttacttgaagaaaatggtttcccttcacaaaacactattatctgtctag

SEQ ID NO: 284492 - DNA, 201 bp, Homo sapiens
ttgtaggaggaggcagttgaggaacaaggacaaatcgagttaaaaaattataattgagatggaattaaattaccgagaacctgctgtctcttttttgaacyttgacctcttacagtttttttttttttggtttcagtcattcccatgatatggtgaagtatgggggaggcctaaattctaaaatcctctttttgtttatta

SEQ ID NO: 284493 - DNA, 201 bp, Homo sapiens
ttattctaacaaatagtttgttgcttatttgaaattcaaatgtaattggttgttatgtattttatatggcaactatatctagaaaagacctccccaccccygccccctgttctctcaccttcatttttccagaatttccaaggaatgttttactttggtttagttataatgttaaaagcattgttgtatgcattgtaatta

SEQ ID NO: 284494 - DNA, 201 bp, Homo sapiens
gtctgttgtgctgcaataactgtttacctgtgcagtgattttatagttttaaaaaatgaaagatttaaaacaatcgaaatcagaatagttatattgatatrgatacattgtggatgaataaatcatataagcaattatttaaaatgagaccgttctgacattttcataggccggcatcacacttgtcctaaaattattaag

SEQ ID NO: 284495 - DNA, 201 bp, Homo sapiens
cattggaactggctattggcacagttccagcttaagaataataaaattggcccagcatgggagctccttcccgtaatcccagcattttgggaggccaaggygagtgaattacttaaggccgggagtttgagaccagcctggccaacataaggaaaccccatctctactaaaaatataaaaaattagctgagcctggtggtg

SEQ ID NO: 284496 - DNA, 201 bp, Homo sapiens
gttctgagacacgaagtttgtggtagtttcttgcagcagtcctaagaaaaagaatatagatgaattagaagataaggtaaatctatcagaaagtagaacamaatgtcagagatagaaaaaggaggcaagaagaagtgacgtagagattgaatccagaaagtccaacatttgactcatatgggtttcagaaggaaagaacag

SEQ ID NO: 284497 - DNA, 201 bp, Homo sapiens
aaggaaaacttaaaaattaaatgggaaaaacaagaaacttgaattttagaaggtcaagtgggtgttctctattacatctgctataaaaaaaaggaagagtkggctgtgaagaaatggcaatcaagaccaagacctctttagcaaataacttgttaaaacaagtaagtcagtagaaggtgtagtgggttgaatggtgttctg

SEQ ID NO: 284498 - DNA, 201 bp, Homo sapiens
aagtgtgtgaagagtttggataaggactaactggattgggccgtctcatgtatggattggtggatccagaagcagaataagagttgacagactctgtctgrgggtgatgtggctgctgctgctggggtctctgctgctgctggggctgtggtggctgcttctgtagaggctggggctgctgggactgctgcatgactggtc

SEQ ID NO: 284499 - DNA, 201 bp, Homo sapiens
atctagtgctcctttccattttacttcacagaacccatgctctatcagaggcaaattcttcttgattctaaacatccttctcatcatcttactctctgtcrccttcctggaatgaaacatggttatattaggatgcactatagccccagttatcatttactacttctgcttttcagaaactagcatagcctcctaataatg

SEQ ID NO: 284500 - DNA, 201 bp, Homo sapiens
aattctaagcatcttttgtgaacactttttcattctttcaacaactgtgagtgtattgggggaggggggcaatgggggtggggaagataaagtccctgackccttacggataagttgggtgattgaagttaataaacaagtgtcttcatgaaacaagcacttccctcaaatcaattaagggaagaaaagatgcttccccac

SEQ ID NO: 284501 - DNA, 201 bp, Homo sapiens
taacctttcttgcctcattttccatcacttcttgtctcctatttcatgttacaacaactgaaggccacttgtcactgtgcttgtagtaatctctagacctktactcattttgtttcctttgccatgattgtcttctcatttcttgaactggccatgttactcatcttttaagatttaatttttactttgtcttctctagga

SEQ ID NO: 284502 - DNA, 201 bp, Homo sapiens
gattctccagagagttaactgctatcacctaaattattttgattaacccttaactctgagagtctcaatttactgacatgccacattaatactcttgtgtraatgtctgcaggggaaagtgataaaccaggtctaatgccaaggggctgagggtgagcctttgtaagacattttttttttaagcttgaaatagaattgtaa

SEQ ID NO: 284503 - DNA, 201 bp, Homo sapiens
agtatatagagattttttaaatttcctatacgtttttattgttattaggcatttaaaaagtaaatccttggccggcatggttgctcgcaccagtaacccarcactttgggaagctgagacaggaaggtcacttgagtgcaggaggtgagaccagcctgagcaacgtagtgtgacttcgtttctataaataaataaataata

SEQ ID NO: 284504 - DNA, 201 bp, Homo sapiens
ttaagcagcaatctagatgctgctgtggagggactttgcagagggaatcaatgttactaatcaactgaccataaaatagggagattagcccagattgccartgtaatccaatgagcccttgaaagcagacgaggcaaacaggagaggcgaggcggaaggagaggtcggagccatttggggcatgagaaacattcagtctgt

SEQ ID NO: 284505 - DNA, 201 bp, Homo sapiens
cagataaacgagagaaatttaaaaacacttaggagagggcagctatcaggaattttctttttaattgtgtagttttctgggtatgtgtgtaatataggagyatatagagattttttaaatttcctatacgtttttattgttattaggcatttaaaaagtaaatccttggccggcatggttgctcgcaccagtaacccaaca

SEQ ID NO: 284506 - DNA, 201 bp, Homo sapiens
taaattctaccattccctctttagttttcccttttcattgttggctggtgtccattttccaaaaatatctaatgcagtaactttaaatataaattgctgtrtataaattgaaatttctattacaaaggaataagtgattttatattttatgaccgtttaaacatttgtcatctatacttcttggcatatttgtcagtcaga

SEQ ID NO: 284507 - DNA, 201 bp, Homo sapiens
aagttgttggcaatataagaaacgatttatttaaagcatctggctttcacataccagtgttgaatatatgacaactattattattctttgaccaatttttyctctatttttctttcctgttttattcttgctcaggatcctctttacttgtaaacctcgattctaaactggaagatattaccatttctaagatgactgaac

SEQ ID NO: 284508 - DNA, 201 bp, Homo sapiens
aggaagagcattcaaggccacactcccaaaggtcctgaggcaagaggatgtctgaggtattcaagaaacactcaaagtgaccatagtgactggtagagtaragaaagtatgggggagaaaggaggagatgagattggaaatgtttggatctgggtttgaaaatgggagttgattatggaagactctgtgcaggctatttaa

SEQ ID NO: 284509 - DNA, 201 bp, Homo sapiens
ctggataatttcctaaagagtgatttctcacttggttccattctccccatcactttcaggtacaccaatcaaacgtagttttggtcttttcacatagtccyatatttcttggaggctttgttcctttcttttcactctttttctctaatcttgtcttctcgctttatttcattaatttgatcttcagtcactgatatcctg

SEQ ID NO: 284510 - DNA, 201 bp, Homo sapiens
attgagattttagaatatggttaactgctttgtacttttaaaatagacaaggaaaagaaaagaaatggactaaacttttgagtggttgatagaactattgkaggaagtatatgctggatgaacatttattgatcaaaacacaattaagtgtaacattgagacgaaacaaattgttagtcatccaacaatatgtacaaatca

SEQ ID NO: 284511 - DNA, 201 bp, Homo sapiens
accattatatgaaactttgcaggtaggcataagggaataagttatattcgtgctgaaaatctcagactcattgatgatagctgccagtgacaggagtagtrttgccactgtaagatacgccatctttgttagttactctcatctactcgtttcttgtattctgcctcttggtcatctttgattctcatttatctgcaaatt

SEQ ID NO: 284512 - DNA, 201 bp, Homo sapiens
acacatattgatagatacacacatatagatatatatatacacacacatctatatatatagatatatatacatctgtatatacagagatatatatctcaagsaagtatttttgtgtactggctacaattagaaaataatattaaaattacattatttataatggtatcaaaaatacaaaagaaacacttaggaataactctg

SEQ ID NO: 284513 - DNA, 201 bp, Homo sapiens
ataaagtttgttcttttgctttaatttgataaatgtttgtatttttttgattgacgtttttaagaaattatctgatcaattttgtagttaaacacaaaaamgtaagtattttgttcattatagaataaacttgaaggtaggtattggaaagaagcgaaccattcacttaatgataacagagtttcaggagagaggacttaa

SEQ ID NO: 284514 - DNA, 201 bp, Homo sapiens
gtgtcccatcctggtttccccagcacgttaagattatcattctcagcaaactatctcaaggacaaaaaaccaaacaccacatgttctcactcataggtaggaattgaacagtgacaacacgcacacaggaaggggaacatcacacactggggactgttgtcgggtggggggaggggggagggatagcattaggagatatac

SEQ ID NO: 284515 - DNA, 201 bp, Homo sapiens
caaatatgtgagtaatatcacagcctgtatggcagatgaaagcataatctttggaaagttgtgtgccttgacctgaaaatacttggactgaccatcactgycatcgcaaaccataagcaactgagcacttattgaatatgattttctcaacctgcagctatacttgaagtctgtaggggctgaaacttaccgttatttcca

SEQ ID NO: 284516 - DNA, 201 bp, Homo sapiens
aatctctagacctgtactcattttgtttcctttgccatgattgtcttctcatttcttgaactggccatgttactcatcttttaagatttaatttttacttygtcttctctaggaaacattccctcatatgctagttgaaatgccagtactctctgtattccttgtcttctgtggatttttgtcattacatctgtcagttat

SEQ ID NO: 284517 - DNA, 201 bp, Homo sapiens
tgtcttctctaggaaacattccctcatatgctagttgaaatgccagtactctctgtattccttgtcttctgtggatttttgtcattacatctgtcagttaytaaatacttggttaatgaatttatcttcttctctagaatataagttcctcaagagcagatgaataaagatgccttattcatctttatattcctaatgcct

SEQ ID NO: 284518 - DNA, 201 bp, Homo sapiens
gttactaatcaactgaccataaaatagggagattagcccagattgccaatgtaatccaatgagcccttgaaagcagacgaggcaaacaggagaggcgaggyggaaggagaggtcggagccatttggggcatgagaaacattcagtctgtccttgctagctttgaagagggaggaaggagctgtgagccaaggaatgtggtt

SEQ ID NO: 284519 - DNA, 201 bp, Homo sapiens
tgctaagaaatcaagtattgaaaaaaggtatgcttttttttttaacaataaaaaaaaggacttggaaaaaaatgatggtacacaatgctttcactctcagwtcaatatcctattgccaaactagtgttgaggtatatgacaagtaggaacatcactcaaacatttaatgaattcttagctcacattatgatatatttgtag

SEQ ID NO: 284520 - DNA, 201 bp, Homo sapiens
agtaaagggggtggactatccaagaatcactctcaaacttgctataagtacaaaatctgaaatttttatgagctttcatttatttttcacataagacaaayatttcatatacgatatatttagtagcatttcttcagtctacagaggagcacttaaagtctgttcctccaccaatgactacatgcctttttagcagcttat

SEQ ID NO: 284521 - DNA, 201 bp, Homo sapiens
aatcgcttgaacccaggaggcggagcttgcagtgagccactgcactccagcctggtagacagagggagactctgtctgaaaaaaaaaagaaagaaaaaaasatcttcctatttaagcctttcttaatagctgaagaaacagatctggatagtttaatcaagatagtttgtggtagaatctagatgttttcctttaggccaa

SEQ ID NO: 284522 - DNA, 201 bp, Homo sapiens
tttgacaggtagaggattttttaatggaatgaataagacaaaataggtttttattttctttagtagtgttttgtcctttcatttataaagggaaaactggrttccttttagtaatttagatccatgtgctgttaccgggtcaaaggaagcggtgaatgacggaagccacagttgaggcagtcagcggaaacacagaaacaa

SEQ ID NO: 284523 - DNA, 201 bp, Homo sapiens
tttctttaaacatttattaaggatttatgtgctaggcaggatattaggtgttgggtatataaagacagatgggatatagatgtgacatcaaggcctcatartaagtgactggaaaatgtgggtttgggagtgagattgtcactttctagtaatgtgaccttgggccttgggaaagatacttttcctcattttcttcatctg

SEQ ID NO: 284524 - DNA, 201 bp, Homo sapiens
taagtctgcagaagtttctgctgccttttgttcagctatgccctgcccacagaggtggaggctgtaggccttgccgaggggcactgaggtccacccagttygagcttccaggccgctttgtttacctactcaagcctcagcaatggtggacgcccctcctcccaccaggctgtcgtctcacaggccgatcttagactgctg

SEQ ID NO: 284525 - DNA, 201 bp, Homo sapiens
ttactactttattttattaatcattatttattttgatccatctgtcttacatatttttcaagttttgattgattcttgagtgccttctagttataaaactrcactaattcagttacttagcatttctttactcataaagtaatgctttatttctttactcatactctttttttattaacaatcattctcctgtttaatata

SEQ ID NO: 284526 - DNA, 201 bp, Homo sapiens
agtatcagccccacatgtagacttatgtcttcctagaacgcaatgagggataagcctctgcttctgatgtggcagctttggaggagttagaatagtgaagwagtagctctgctttaatgggtgggaggggacagtggtggccacagaaaatagaagagctttgtaaaatgtgcgagtcctagccacagatcaaggtttctg

SEQ ID NO: 284527 - DNA, 201 bp, Homo sapiens
atcagccccacatgtagacttatgtcttcctagaacgcaatgagggataagcctctgcttctgatgtggcagctttggaggagttagaatagtgaagaagyagctctgctttaatgggtgggaggggacagtggtggccacagaaaatagaagagctttgtaaaatgtgcgagtcctagccacagatcaaggtttctgtgg

SEQ ID NO: 284528 - DNA, 201 bp, Homo sapiens
atgtatattcagagctgcaaatatcatccatatctttataatcacttgtcatatgttccttttgggcttgagaatctagaatttaagcaaccagagtccamacttgaggacatgtatcagaaatactttgtgattgcagctggtaagaagcatgccggagggcagggaatgggaaaggaacagacagtatttcagacaatt

SEQ ID NO: 284529 - DNA, 201 bp, Homo sapiens
agttttgatgtatattcagagctgcaaatatcatccatatctttataatcacttgtcatatgttccttttgggcttgagaatctagaatttaagcaaccasagtccaaacttgaggacatgtatcagaaatactttgtgattgcagctggtaagaagcatgccggagggcagggaatgggaaaggaacagacagtatttca

SEQ ID NO: 284530 - DNA, 201 bp, Homo sapiens
gaggcgagctaagaggatctcctgaacccaagagttcaagaccagcctgggcaacatggtaagactgagtctcaaaaaaataataataaataaatagaatmccatactaccacagctaaacgcccttctctaaatatgatccagcctgtataagttagcaattacatatgcagttgtaaaatttttctatggagtacttta

SEQ ID NO: 284531 - DNA, 201 bp, Homo sapiens
gttcttaggtttagtagtagtttttttatgaatccgggtgctctgatgttgcgtgcatgtatatttaggatagaccttgatgactgtgtgccttggtgatrttcatcttgcatagcatctctcaagtgttctctgaatttcttgtatctgggtgaaaaacatggaacaattcatgaattcacatatcatccttgcatctta

SEQ ID NO: 284532 - DNA, 201 bp, Homo sapiens
agtacagtttggcaggagaagaagctttggctcagtttggggtatgaatcccaggtcttccattcactagttctgtgatctcaggcaaaaattatttaacygttgtgaatcccagtatctttgtttccaagacagggataatatctacactgtacactagtttttgtaagtgaagaataaaatgatacccatagaagacat

SEQ ID NO: 284533 - DNA, 201 bp, Homo sapiens
attaactcagaagtccgcagtccacagtctcatctgagacaaggcaagtcccttctacctatgagcctgtaaaatcaaaagcaagttagttacttcttagrtacaatgggggcacaggtattgggtaaataaaacattccaaatgggagaaattggccaaaacaaaggggctacaggccccatacaagtccagaatccagc

SEQ ID NO: 284534 - DNA, 201 bp, Homo sapiens
gtcagttgtgttaactaattacaattccatgcagatttatgttaagattttagaatcaacttccaaatattctgacaggatttatttgactttatgacttraaattctagtattttttccctcaaaataaataatttcaggacacagaagtgacttttttctacataccttgttttctaaatgtaaaactgcattttgaat

SEQ ID NO: 284535 - DNA, 201 bp, Homo sapiens
cataaataatagagtgactaaatatatgatctggtgtttcctttccaaacaatttttctcatatagtgctataaattagtaataagagctggcttaatttmttttaaagcatctttgatcattaagttgaaatatgaatgtttagtctgaaaatagcagatttttaaaagtactatttggacatagaattaattatttctt

SEQ ID NO: 284536 - DNA, 201 bp, Homo sapiens
attaagagaaaaataagacaatgtgaacatattttatatcaataaatttgacagcttgcatgaaattgacagatgccttgaaatatataaactaccaaagytcactgaagaagagtaggcataaacaaattcaatttgtacttaaaaacctttctataaacacgactctaagcccagttggcttctactactattgttcag

SEQ ID NO: 284537 - DNA, 201 bp, Homo sapiens
ttgataattttgtttaaaatataaattgccaatattaaatcaataataaatagaaaacctaaataaacttgtaaaacaatacttaatcatgaagatggcartttttcccatgttaattcatgaagtcagtctatttttttcatcagaatcccaatgaggttttcactgaacctcacagggtgattctaaaatgtatatgaa

SEQ ID NO: 284538 - DNA, 201 bp, Homo sapiens
attaatctaatgcacatacataattagtgaatacataattttttcaagtatatgtacacatttccaaaaattgagtagatattaggccacaaatagagttrcaaaagacttgctgtcatgcagaccacattctctgtctacaatataatcaattatgaaaatattaaaagaaaaaagcacaagttcatgtgtttgaaaatt

SEQ ID NO: 284539 - DNA, 201 bp, Homo sapiens
ccaccctcctcagccttccaaactgttgggattacaggcgtgagccaccacgcccagcctgaaatattactcttaacaagcacctctgctctggctatgaraaagtatctctcccaggcagaaagaagcaggcagtctcccaatggacaagcttagctaaaacgcatgctactaccgaagataggcagtttcaatcctgct

SEQ ID NO: 284540 - DNA, 201 bp, Homo sapiens
atgacttttggggagaaagcctcctagactgaggtagatattagataattagctttctctttctccttggaagtcagtgagttaagtaacaaaaatcatayaaaagttatatgatttgtaaaagttatatacagtggaagagaaaatgttagtttgagtaaggtacaacgatgaagtcataaatcagatttaagcaacaga

SEQ ID NO: 284541 - DNA, 201 bp, Homo sapiens
tttttttgttttgttatttgggacaatgcagctgttttctcctagggtataattagttgagaatggaaaagtttagcttatatttggagagttatacttcytatttccattataaaattttcagtttttttcctaatttgtgtctttgcttattgggtcctctttatgacttttggggagaaagcctcctagactgaggta

SEQ ID NO: 284542 - DNA, 201 bp, Homo sapiens
ttaaaactttgttaggacaggtctagagtaaccgttgtttgagagccagtttagtcctaccattaatgcatgcctattataggctcactaatgaatgcccsttgtggtaaatgaggttttcctgggtggttggaactcattttataggtctctggccattattctttgccttgacttataaagtctcatcccatgaatgca

SEQ ID NO: 284543 - DNA, 201 bp, Homo sapiens
gtccaatactatgttgaataaaagtggcaaaagtgggcatccttttctttttccaaatcttagaggaaaggctttcagcatttcactattgaatatatggkaggaatctttgagttagttttattatcataatattgatgataataaagcctgagattagtaacaaaaggcaagttgattaatctttatcctcttgccatc

SEQ ID NO: 284544 - DNA, 201 bp, Homo sapiens
gtaaataagtttgtttgtaattatctatataaaattaaaggaaataagcttagataacctgaaatcttagataataatgataatctgattcttgggatgayggtctctgtatcccttttagtttgaatttaaagcaaataattttagggaacttctacagttccatttagaatcaggcaattctgaggctttttgggagag

SEQ ID NO: 284545 - DNA, 201 bp, Homo sapiens
  misc_feature (1)...(201): n = A,T,C or G
catccttgcatcttatagccagagaagttttttcctttaattaataagacctgaaataatacttactaaatatgaaataaatatatgactaccatctaaanaatagttctcggttaggggtatgctcctttctttcatgcctggctatgagatgagtggttgaatcagctgtaagaaacatagtggtaggaagtcactttt

SEQ ID NO: 284546 - DNA, 201 bp, Homo sapiens
aataaagctctgctttccaaatttatgaacctcatcattcttcagttgccatttttatgaagctgagtaactagaagtcaggtttttggcctttctagtcrttgctcctgtgcaaatttatagatatattgcccattaaagcattattattatctgagatctaaggccatatttgttttctagaagtagttatatttttac

SEQ ID NO: 284547 - DNA, 201 bp, Homo sapiens
ttcaagatggtattggggaaatatctgagaagagaggtcttgttttatccaacatgaaaaagcagctgcccgtgtagaataaacattcacaggaaaatttwaaaaaaaaattgttttctaaagagtcaggctgtctctgattcagttagatcacccacatggatacattcttggttaaaatgggcacttctaaagtgatat

SEQ ID NO: 284548 - DNA, 201 bp, Homo sapiens
tgtaaaaaatgcgtaagtttaaaagtggataaggatgtttattattgctgtatagaacaatgtgtctattgctttaattctgttttgttttgtttgtttgkgtctttgcagagaatgtaactggtcactacatttccccctttcatgatattcctctgaaggtgaactctaaagaggtattgttttgacttgttttgggaa

SEQ ID NO: 284549 - DNA, 201 bp, Homo sapiens
ttttctggtcttgcctattaagtgtcagtgaaaaacttttaagcgaggctttatctacagtcattcctttgaacatgacaagttatgcttttatacacatycatatatgatagcacaaattttatattttaaactttaacagatgaatgtgttaaattattaactttttcctggaactcattgtaaattgaattgcacaac

SEQ ID NO: 284550 - DNA, 201 bp, Homo sapiens
ttacattcctagagaaaggtatattaacctggtacttcctttttttttttttttttttgttactttaagttccaggatacatgtgcagaacatgcaggttygttacataggtgtacatgtgccatggtggtttgctgcacccatcaacccatcacctaggtattaagccctgcctgcatcagccatttgtcctaataatct

SEQ ID NO: 284551 - DNA, 201 bp, Homo sapiens
ttcatcagattctattcatgccaagaatgaaaatgaatcccacattatgagtctggatagaaaccaaaatgaccacttattataatcgctgtatactcagygtcatcaattacaaacagatatagacagatgtttttatcaccgatatctcggcatatttcacacagctattgtgaaaataaatttgataatgtatatcct

SEQ ID NO: 284552 - DNA, 201 bp, Homo sapiens
tgggtgtcccatcctggtttccccagcacgttaagattatcattctcagcaaactatctcaaggacaaaaaaccaaacaccacatgttctcactcataggtaggaattgaacagtgacaacacgcacacaggaaggggaacatcacacactggggactgttgtcgggtggggggaggggggagggatagcattaggagata

SEQ ID NO: 284553 - DNA, 201 bp, Homo sapiens
ataccttgaaaattctctttctccgaagttttttttgttgttgttgttgtttattctttttttccactgctggatgtttactctgaaatctaaatattatwttaacagagagaatttaatttctagtcttacctaagaaaactttaaactcgattctgggagaaatcattttttgacatttgagtttactcttcagtcctc

SEQ ID NO: 284554 - DNA, 201 bp, Homo sapiens
ttttaatccaggtagtgactcttctcttttcaggagcactgcttttattaagttcttttcattgataccttgaaaattctctttctccgaagttttttttkttgttgttgttgtttattctttttttccactgctggatgtttactctgaaatctaaatattatattaacagagagaatttaatttctagtcttacctaag

SEQ ID NO: 284555 - DNA, 201 bp, Homo sapiens
ctgtgttttagacaactctaatttctagaaaaaatttaaggcataggtagatgtatgatggagactcaacattttttttgtcgggggaaaacatctaaggyattcttataagggaggtaacggaaaaaataaaaggtaaaatttttaatgttctctctttgttttgtttttaactgcagaatctgtttaatatgattgtag

SEQ ID NO: 284556 - DNA, 201 bp, Homo sapiens
ttttaaagcatctttgatcattaagttgaaatatgaatgtttagtctgaaaatagcagatttttaaaagtactatttggacatagaattaattatttcttrtcccatctccttttcttccttctgtgatttgcttagattgccaccaaggagccaatgaatcccattaaacaatatgtaaaggatggaaagctacgctatg

SEQ ID NO: 284557 - DNA, 201 bp, Homo sapiens
agcagttaaactaacaaactacaagctttctgagactctggtccaactatttttcatggttttcaaatgcaaaataataaaagttcttcatgtaattttttatatgtcagattccatttcaggcattggcatttataagaattatggaaaagctggctgggcatggtggcctacacctgtaatcccagcactttgggaggc

SEQ ID NO: 284558 - DNA, 201 bp, Homo sapiens
agcctgtctcaaaaaaaaaaaaaaaaaaaaaaaagaaaagaaaaagaaccagtcaaactaccagtccacagaagatactggggatagaggaataggttaadcaaaagaaccaagatgaaatcggccaaatccagaatgtggggaattttacagagaaaatcacagtttctttaaaaaacaaattcaaattcataaagaaag

SEQ ID NO: 284559 - DNA, 201 bp, Homo sapiens
tcatgcctgtaaccccagctctctgggaagcctaggagggaggatctctttagccaggagttcaaaaccagcttgggtaatatagtaagactccagctccmccaaaaaaaaaaaaaaaaaaaaaaaaaaaaaaatccagaaaggaaacggagaagctgatcttaaaatgcatatggaaacccaagaaacatggtaggcaaa

SEQ ID NO: 284560 - DNA, 201 bp, Homo sapiens
aaattgaccaacagattcaacagaaccccagtcaaagtcccagaagggggttggatgtggtggctcatgcctgtaaccccagctctctgggaagcctaggmgggaggatctctttagccaggagttcaaaaccagcttgggtaatatagtaagactccagctccaccaaaaaaaaaaaaaaaaaaaaaaaaaaaaaaatcc

SEQ ID NO: 284561 - DNA, 201 bp, Homo sapiens
agatatcaatactctccaaattgaccaacagattcaacagaaccccagtcaaagtcccagaagggggttggatgtggtggctcatgcctgtaaccccagcwctctgggaagcctaggagggaggatctctttagccaggagttcaaaaccagcttgggtaatatagtaagactccagctccaccaaaaaaaaaaaaaaaaa

SEQ ID NO: 284562 - DNA, 201 bp, Homo sapiens
attaaatggtaactaacggttgatgaggaaaagtcctgtaaagtattccagctaataaatgcaaaaggaattttacaattagaaatgatcactttacacatgtcagcaaaaatggcagaataaggatctctgaaaattttatcctccataaaagcaataaaagtactgataaatattgtcagaatcagctttttcagatct

SEQ ID NO: 284563 - DNA, 201 bp, Homo sapiens
tattaaatggtaactaacggttgatgaggaaaagtcctgtaaagtattccagctaataaatgcaaaaggaattttacaattagaaatgatcactttacacatgtcagcaaaaatggcagaataaggatctctgaaaattttatcctccataaaagcaataaaagtactgataaatattgtcagaatcagctttttcagatc

SEQ ID NO: 284564 - DNA, 201 bp, Homo sapiens
aaatatattgtatacaatacaatatgctgtgacaatatactgtaataaaattaccagcaccactactctcgtgctttgtggccattctgaagcaaaataarggttaactgaacacaagcactgccatatcaagacagtggatctgctaactgagaaggctactaagtgactaatggtgggtagtatatagaatgtggccac

SEQ ID NO: 284565 - DNA, 201 bp, Homo sapiens
tacacatacagaaaagtgcacataattttacagtttacaaatggaaaatacccagttaagtagaacccacactaagaaacaaaatatttactatcccctggaatttcccctcattttgcctttcagtcactcactgtctgtctccctaacagtaacttctctaagaatatagtagttctgcctatttttatgttaataatg

SEQ ID NO: 284566 - DNA, 201 bp, Homo sapiens
cacttttataatgctttcttttactccctcttctatgacattaccattgcttctgtttatctctgttaaaacctcattgcattttaattgcagtttatctmtttgtctctttccctgagttaaaaactgagtatcttgatgaaaagaactttgttgtatccatccatttattccccatacatagcacattgtctgaagatg

SEQ ID NO: 284567 - DNA, 201 bp, Homo sapiens
agagaggataaagtacatttaggtatgtacacacacatatttacatacatatatgttcttacaacctagattacatatattattgactaaaaggacatcaktgaggatgttggcactgtttttagctgatagaagagcctatttgataaatagaaggaactttgtaatctttcatcctatgtatcggtttatcttacaaga

SEQ ID NO: 284568 - DNA, 201 bp, Homo sapiens
aacggggcccagacatgatccccaggactttgctgacaggtctaaataaggctaatctacatgttgccaccaggagctctattaaaaaattggacagctgrgggaaaggctggcctactgggcttttcactgttctgactgggcagcccaacatcctattgccctgatagaatagaactcctcatatctgccttgctttct

SEQ ID NO: 284569 - DNA, 201 bp, Homo sapiens
ctaatctctgaggttaatctggctgggataccctcttatcaccagggttgctttgacccttcagactacctatacaagaaatacttccctctatgggcacrcactttaatcaaagctgtatctccatcaaagaggactgcattttcttttagagtagaactgatcttaggatgtaattttctagtaagatcacactacaat

SEQ ID NO: 284570 - DNA, 201 bp, Homo sapiens
atccacaatttcagagactgatgctccccatcaattcttctatatgtctttggtcagttctttcttctattttctactacgtttattgttactatttcttrttctctgcagacattcaactcttctcccttttttctcactcctagaagaacatcttacctttaattttgtagagcctcagaaaccagcacataaaaactt

SEQ ID NO: 284571 - DNA, 201 bp, Homo sapiens
agttgaattaactttaagttgggagttaaagttagctttgtaaaaaatgcgtaagtttaaaagtggataaggatgtttattattgctgtatagaacaatgkgtctattgctttaattctgttttgttttgtttgtttgtgtctttgcagagaatgtaactggtcactacatttccccctttcatgatattcctctgaaggt

SEQ ID NO: 284572 - DNA, 201 bp, Homo sapiens
aaaaattgggaacctatttttttccctttaattttgaactcttttagtaaaatgacagaatgtcaatccctttgttatatatagtaaagcaggatactttrtattggttcagtgtgtcatgtttgttcatttggacaaatgtaacttacaggtgaaaatgcttatagggacctggtagagttatttgagagagagacactt

SEQ ID NO: 284573 - DNA, 201 bp, Homo sapiens
tggaataaaccctacttgatcatgatgaattatctttttaatgtgcttttaaaggacacaagaacaccagtggagtgttgaagcctcccactagtgtattkctcaggttcttaggtttagtagtagtttttttatgaatccgggtgctctgatgttgcgtgcatgtatatttaggatagaccttgatgactgtgtgccttg

SEQ ID NO: 284574 - DNA, 201 bp, Homo sapiens
agatattttctgctttggatattttaagccacagggataagtaaattatttcagcaacccaaatatggtttagccggtatatatttcttttcggtccttaratggtggcaagttttaaaagttgaattaactttaagttgggagttaaagttagctttgtaaaaaatgcgtaagtttaaaagtggataaggatgtttatta

SEQ ID NO: 284575 - DNA, 201 bp, Homo sapiens
tttcctgaaagtcctgaacatattcataataactactttaaaattcttgtttgcataggtcacataaggattgatttctgttaactgctttttctcttgayacaggtctcagaaatattccagtatatacaataaatcgcatagtcatcctgccttcacttgacaggagccaaacttccagcctgtcctacctgcctgcac

SEQ ID NO: 284576 - DNA, 201 bp, Homo sapiens
taggaattgtgtgatctatatggaacagaggaagcatttttattgaagtttttaggctcctttacatttcttaatctttttatcagaaaataaaacaaagktagctttagtcattgctgaagcttccagtaagaatctctataagtggttttgtagtcgtgtgtaatcatatgttggtatatggcatacatttagctgtct

SEQ ID NO: 284577 - DNA, 201 bp, Homo sapiens
gaactttgtaatctttcatcctatgtatcggtttatcttacaagaatctcctaagttcatttgtatgtgcttgccatttcatttttcattcttaaaacagstaatttttttttttttttttttttggagacgttgccttgctctgtcacccaagctggagtgcagtggctccatctcggctcactgcaacctccaccaccc

SEQ ID NO: 284578 - DNA, 201 bp, Homo sapiens
acacagctattgtgaaaataaatttgataatgtatatccttaggtccacttgagggggaatatgtttacgtgtgttttacctattattttatcttttaggkatctgctaatcactttttcttctatttaaaaaagttaatttggctttaactcccttctctaccacctctttatccattttaatctgcctgttcctgtgat

SEQ ID NO: 284579 - DNA, 201 bp, Homo sapiens
agtctgttgtttgtttatctgaaagaatgaacaatgataatgaaaagcaaaggggaatatttacctttttcaggttagagatccattgtgtgtaaactttsttctataatttcgtgaaaaaacttctggatgcgctttccacatataaatatttattgtaacagagattctttctctgtttttatttccaggtatcatctt

SEQ ID NO: 284580 - DNA, 201 bp, Homo sapiens
cactcagttcagtttaggtccatactatcatagacattctctcaatgtatatgtaatacacagaattaactagggaaattgttagagaactcagatacatwgtccccttctttaaacctagtgtattagtatctttaggaagtagaatctaaacgtatatgtttttaaagccccctatgtgattctgatgagcctctctgc

SEQ ID NO: 284581 - DNA, 201 bp, Homo sapiens
ccttcataccatcttccacatttctaaacagtgattttcttacagcatagatcctatcttgttatatttttctcaaaatgctctctatgcatagttttctrtattcttgacaataaaaatcagactctttccttttgtcaggaaacccatcctacagccatgcaatgctactcactcctcaaacatatcttatactcacac

SEQ ID NO: 284582 - DNA, 201 bp, Homo sapiens
agacccaaaatttgttagtagcttagaatgagcgaattaacagctctaatatgtacctaagtaatattatcttgagacttatctgtagatgttaaatgagwccaaagtatggtcattacaaggccagacagtaatggaagttttcactttcgagatgcatattgctagaatactcagggtgtgttgattgagattttagaa

SEQ ID NO: 284583 - DNA, 201 bp, Homo sapiens
tttctaagctctggaatcattttgctatagcctcctgagtaatgataaggattacattaacagtaagagttaacatttattaactctatactatgttccaygttctgagtgatttatatatgttatgtaattaatactcaagaatcctataaaatatgtattgttatctccattttacacatgaagaaattgagtccacat

SEQ ID NO: 284584 - DNA, 201 bp, Homo sapiens
aaagcttatgcagtctttgatgagacttgagtgtttccccaggtttcctcagctacacagccagagaccctttgtttggttagtatatatatagcttgaaytcattccttctgtgctgagtctaattatccttactgtgaaggtaactttatttctaagctctggaatcattttgctatagcctcctgagtaatgataagg

SEQ ID NO: 284585 - DNA, 201 bp, Homo sapiens
atataaataatataatttattaacagcaaagctggatatgattgaatgtcctctagtcttgtctatcctagtaaatggtagagtgagctattctttgtggkctaaaattaagactccagtgtaatgagtccctccagtatgaaggaggagggggtctgtgattgtctgaggaaatatttgcttgctctttgctgtcttatc

SEQ ID NO: 284586 - DNA, 201 bp, Homo sapiens
gataacactatgaaatacgatagagtccctgtgctctctgagcacagtctgggaatcaagagggtcatttaaataaattactagactaaggtaatcagatrgagtaaagaattatttaatatcaaggaatattttacctaagttatcaagaaggcccattttgcctacaacacaaatgcttggcattgaagatattgactt

SEQ ID NO: 284587 - DNA, 201 bp, Homo sapiens
agtaaatcatggctgcacactatttgtcagaagttatgacactctttataaagccttttttaaaaatctggggtgataggcagggcatggtggctcacacytgtaatcccaacactttgggaggccaaggcaggaggaacactggagcccaggagttcaagaccagcctgggcaacaaagcaactaaaacaaaacaaagca

SEQ ID NO: 284588 - DNA, 201 bp, Homo sapiens
ttaaactttcaaatttgaaagtaaatcatggctgcacactatttgtcagaagttatgacactctttataaagccttttttaaaaatctggggtgataggcwgggcatggtggctcacacctgtaatcccaacactttgggaggccaaggcaggaggaacactggagcccaggagttcaagaccagcctgggcaacaaagca

SEQ ID NO: 284589 - DNA, 201 bp, Homo sapiens
tgttgcccaggctggagtgcagtggcatgatcttggctcactgcaacctccgcctcccgggttcaagcaatcctcctgcctcagactcccgagtagctgarattacaagtgtgtgccaccactcctggctaatttttgtatttttagttgagactgggtctcaccatgttggccaggctgatcctgaactcttgacctcaa

SEQ ID NO: 284590 - DNA, 201 bp, Homo sapiens
gatatggagtctttcactgttgcccaggctggagtgcagtggcatgatcttggctcactgcaacctccgcctcccgggttcaagcaatcctcctgcctcaractcccgagtagctgagattacaagtgtgtgccaccactcctggctaatttttgtatttttagttgagactgggtctcaccatgttggccaggctgatcc

SEQ ID NO: 284591 - DNA, 201 bp, Homo sapiens
tttactctttttcttttttttttttttttttttgatatggagtctttcactgttgcccaggctggagtgcagtggcatgatcttggctcactgcaacctcygcctcccgggttcaagcaatcctcctgcctcagactcccgagtagctgagattacaagtgtgtgccaccactcctggctaatttttgtatttttagttga

SEQ ID NO: 284592 - DNA, 201 bp, Homo sapiens
attttcatatataaatattaaaacttgaacatatttgatggcttcatattttgggtacttaagttttaggaaatgtataaaatagtttcaagtatgagacrgtccataataagaatcaagggagcaaaaagaacatcaatgctttgttattctgcctcaagtaaagccatttgattaacagcacctattaaaaattcattt

SEQ ID NO: 284593 - DNA, 201 bp, Homo sapiens
gcttacatctgcatcagaggcaagacagggcacaaatgaaagctccttgctttaacattgaaattttatttactctttttcttttttttttttttttttttgatatggagtctttcactgttgcccaggctggagtgcagtggcatgatcttggctcactgcaacctccgcctcccgggttcaagcaatcctcctgcctca

SEQ ID NO: 284594 - DNA, 201 bp, Homo sapiens
acagaatattttgttctttatctctactctgggtcacccctttacatgcaaaattataccctgaaccctttgttggtatagaacatatatatatatatatwtatatataacatgtatctattttcccctcaccactgcctccaattacaagaccgatccattttacccactgtaatatgtagtcaggctcttttgcactgt

SEQ ID NO: 284595 - DNA, 201 bp, Homo sapiens
tcacctgaacccaggaaatcaaggctgcagtgaaccatgatcacactactgcactccagcctgggtgatgggtgtgagacctgtttcaaaaaaaaaaaaaatgaacacattgttttaaaaattaacatataatgtcaaggaacatagcactgcaactcctgaaaaagtctggactactcacacttgactctagctttccag

SEQ ID NO: 284596 - DNA, 201 bp, Homo sapiens
taagagagaacagaaacaggtatctttgatgttgatgattattttatgaaggctagtgaggatacttaaatgtaggtaagaaactccactagtgatatacracacccattaagcaaagataagagcaaagtcagggttctgatcattgtccagcacaattttttgtctaaggcattagaaatacaaaacttagtgaaaaaa

SEQ ID NO: 284597 - DNA, 201 bp, Homo sapiens
agtaaatatttgtttattttctccacaaacaaatttggctattgctttatatagaatacaaacctttgaggcaggatcagtgtaaaaattctgttcccaaraaaataattcacaaaaacaattgtctttctgtaatctgtgaaaataggagtacaacactttacatctaaggaaataggtagtgggtgcccctttgctctt

SEQ ID NO: 284598 - DNA, 201 bp, Homo sapiens
agctcacattatgatatatttgtagcaggctgagtagcaccatcatgatgtgaattctgcttcaaactcatatatatatatatatatatatatatatatatgtatatatttaatttttttacagtactaaaatactaaagcattgcattaaaaaagttttgtttacaatttaatttactatacaactctttcacttcttta

SEQ ID NO: 284599 - DNA, 201 bp, Homo sapiens
gcagtttcaagttagatttcttattttttggagaaataaagaacgttttacatgcagatgctatttggcttctgacccttttttctcccctaaaaaggatyatctaactggccagtattacacttgatggtttatgggggtgcacagatatatatggcttaaggtggtgcttcttggagaaaaaagggagaaacagtaaat

SEQ ID NO: 284600 - DNA, 201 bp, Homo sapiens
tagctcacattatgatatatttgtagcaggctgagtagcaccatcatgatgtgaattctgcttcaaactcatatatatatatatatatatatatatatatatgtatatatttaatttttttacagtactaaaatactaaagcattgcattaaaaaagttttgtttacaatttaatttactatacaactctttcacttcttt

SEQ ID NO: 284601 - DNA, 201 bp, Homo sapiens
agaaaatttttaaaactcttgatttattaagattttagaactcttggtaggctctcaaaccataatttcatttttaccaatacctactccagcttgtatcytgccccacaaaacaaagtactattaatgtaatttacattaatgtctgttaatttgtctctagaatatacttaaccatttacagatagattttatttaata

SEQ ID NO: 284602 - DNA, 201 bp, Homo sapiens
atccttgcgcaggggccatgctaatcttctctgtattgttccaattttagtatatgtatgtgctatttatctaaaataatctttttttgcctttgttttaraaatacaattttgcttgatgtcaaatttaaagttatagggttttttaagctttatattgatgttccattttctatcagcccccattgcttctaatgaatg

SEQ ID NO: 284603 - DNA, 201 bp, Homo sapiens
ttagctcacattatgatatatttgtagcaggctgagtagcaccatcatgatgtgaattctgcttcaaactcatatatatatatatatatatatatatatatatgtatatatttaatttttttacagtactaaaatactaaagcattgcattaaaaaagttttgtttacaatttaatttactatacaactctttcacttctt

SEQ ID NO: 284604 - DNA, 201 bp, Homo sapiens
tctccaactactagagtttccacagtcactgggggacagtaacctcatctaagagcaatttaaggcattatgagattatagacagggaattatttccttgytttgtgactatcttctctctaatttgggagtcctagttatgcttcatgatcaagtgttcttttgctgctatgtaaacctgttttgtcagaggaggaatcg

SEQ ID NO: 284605 - DNA, 201 bp, Homo sapiens
ctgaggcaggagaatggcgtgaaccccggggggcggagcttgcagtgagccgagatagcaccactgcactccagcctggggaacagcaaaactccgtctcaaaaaaaaaaaaaaaaaaaaaaaaaaagaactgcctgagcctgggtaacttataaatgaaagagatttagttgattcaccattccacatggctagggaggc

SEQ ID NO: 284606 - DNA, 201 bp, Homo sapiens
cttagctcacattatgatatatttgtagcaggctgagtagcaccatcatgatgtgaattctgcttcaaactcatatatatatatatatatatatatatatatatgtatatatttaatttttttacagtactaaaatactaaagcattgcattaaaaaagttttgtttacaatttaatttactatacaactctttcacttct

SEQ ID NO: 284607 - DNA, 201 bp, Homo sapiens
ttattcgctctaaagacttacaaatggatcaaatatagcctattacagcatttattggttttaatattttatatatccagctgcaaattcctacagatatraatttgattagcacagtttacttgatatcaggtgtcaacctctggtctagtcaactgtgacctggtggatcagggtcttgtcatatgaaggtctacccct

SEQ ID NO: 284608 - DNA, 201 bp, Homo sapiens
tccactcaatgtactatattagtccattctcatgctgctataaagaactgccgaccgggcgtggtggctcacatctgtaatcccagcactttgggaggccraggcgggtggatcacgaggtcaggagattgagaccatcctggctaacatggtgaaacctcgtctctactaaaatacaaaaaattagccgggcaaggtggc

SEQ ID NO: 284609 - DNA, 201 bp, Homo sapiens
catgagctgaaatatccctgaatttttagaacaaaaaggttgaagttcaagttatacttgctaagaaatcaagtattgaaaaaaggtatgcttttttttttaacaataaaaaaaaggacttggaaaaaaatgatggtacacaatgctttcactctcagttcaatatcctattgccaaactagtgttgaggtatatgacaag

SEQ ID NO: 284610 - DNA, 201 bp, Homo sapiens
ctccttgttatttaagcaaattctgcagcaggattgaatttctccccagaaaatgggtttttctttgtgcatcattaggctacaaattttccaaactttcrtgttctgcttcctcttgaatgctttaccacttagaaatttcttctgccagataccctaaataatctctctcaagttcagagttctacagatctctagggc

SEQ ID NO: 284611 - DNA, 201 bp, Homo sapiens
atgatcagactaattttgcaaattgtgtacatagaaaaactttctatttactgttttgtggaggagaaagttactcacccttaatgtaaatccataggggmctccctcctaagtgttcattctaccacgacggaactaagctgcttaacaattgaaaggacacctgaattatcttactgtcataggatttttctattagaa

SEQ ID NO: 284612 - DNA, 201 bp, Homo sapiens
ttcggccttaattatttgggtattatcttagatatagtttaacataagactaactatctatcttaaaagtgtctttaaaaattattttttattcccttttyttcattgaggtggcagtcattcaagcactaaaaaaacttcaggaagacaacacttagagtgcattaaataaatataaattttattaaaaacactcacata

SEQ ID NO: 284613 - DNA, 201 bp, Homo sapiens
gccatggctagagcagccgggatgcagggtaccatgtcccaaggctgcacagtgcaagggggactgggcctaaaccacaaaaccttttttcttcctagtcytccaggcctgtgattggaggggctgctctgaaggtctctgacatgccctggagagattttccccattgtcttcgtgattaacattcatctccttgttatt

SEQ ID NO: 284614 - DNA, 201 bp, Homo sapiens
ttacatgtctattgataagagactgggtgaaaaagcaggacacatatagtatgtaccatttatgtatttttttaaaagcaatagacatattttttatgaawacaaacatatatggtattacattttagaaacataaataagaaaagtaaacgtcaatttcagcacggtggccagaagttacctctgagaagggaggggagt

SEQ ID NO: 284615 - DNA, 201 bp, Homo sapiens
ctgcttaacaattgaaaggacacctgaattatcttactgtcataggatttttctattagaataccactgagttaccacaaagtatctctaatatgacacaratggagagaatggaccaaagagttaaagtctaaagcatggaattttttttaaagttattaccactaggtaaattgaatatttgaaaccaacttttaagtg

SEQ ID NO: 284616 - DNA, 201 bp, Homo sapiens
aaaaatatatatatatatgtgtatatatatatacatatatatatatacgtatatatatatatatacatatatatatacacgtatatatatatatatatatrtatgtgtgtatatatatatatgtatatatatatatagactagtggaccagaatagagaatccagcaataaagccacatatttatagtcaactgttttttg

SEQ ID NO: 284617 - DNA, 201 bp, Homo sapiens
caacacataggccaacaataagtggttatatccatctaaagcattttatgctttggaatttttgcaggtgtccattgagtcatgaaaaatatagaagatarcagaggaatgaatgatttaaagggaaatagaacaagctaatacatttcactactttaaaaaaacaaacaaacaaacaaaaactggcagggcatcgtgact

SEQ ID NO: 284618 - DNA, 201 bp, Homo sapiens
gcctcttcactagctcagtggaacttcatgtatgccagttttcatcattcaatatttgtaagtcaaagaattaccccattagcaccctcatgaatgatttsggattcttagagcccagattagttaacacctttctcatatagtgtttaatttgttataatgaaattctttgtcataaaagtattttgtctcatttccttt

SEQ ID NO: 284619 - DNA, 201 bp, Homo sapiens
aactaaaactaaaaataaaatagataaattgaaaagctgtataagctaagtgaaatatttttaaaatagtcgctaaaatttcagatgaaatattttctaaytcagaaaataaggagaatgcatttaactacttttctaggttagaaaatgatttgattgtacggtgactttttttttcgctgaagtactgagatattccag

SEQ ID NO: 284620 - DNA, 201 bp, Homo sapiens
ggtaacttggttgagctttataataatgaagaagatactctactgaataatttttcactgagaatactgcatcagaaattcacaaattagagaaaccagtrcctcttcactagctcagtggaacttcatgtatgccagttttcatcattcaatatttgtaagtcaaagaattaccccattagcaccctcatgaatgatttc

SEQ ID NO: 284621 - DNA, 201 bp, Homo sapiens
aaaatagtcgctaaaatttcagatgaaatattttctaactcagaaaataaggagaatgcatttaactacttttctaggttagaaaatgatttgattgtacrgtgactttttttttcgctgaagtactgagatattccagccagttctgatacatttaattttaaaagatttaattaaaaaaaaactcttacatttagatat

SEQ ID NO: 284622 - DNA, 201 bp, Homo sapiens
ttttgaagtcatatcattactattaacttacttccaaagtatgtttaattctgaagtgtgggtaatattgaagtcttggcaaactcatgtgattagaaacmcccctggtgcaacagagtgtgtttttggattcaaaaaaaaaaaaagagtagaaagaattttccaattagattttagaaacaagtgaattggtttatatgg

SEQ ID NO: 284623 - DNA, 201 bp, Homo sapiens
gatctcctgacctcgtgatccgcccacctcggcctcccaaagtgctgggattacaggcatgagccaccgcgcccggccaagggaactctttttacattgtktgtgggaatgtaaattttacagccactatagaagacagtatagaaatttcttaaaaaactaagaatagaactatcattcaatccagcaatcctactacga

SEQ ID NO: 284624 - DNA, 201 bp, Homo sapiens
agttaaaaactgagtatcttgatgaaaagaactttgttgtatccatccatttattccccatacatagcacattgtctgaagatgctttgtaaatgtttgtrgagtgcaggaatagtattatacatatgaaaacacaaaagtctgaaggtgatatacatatcaatgatgatgctgctctaggtatcataatcaattgtgctt

SEQ ID NO: 284625 - DNA, 201 bp, Homo sapiens
tgaaatacattgtgcaaagatgaaaaacgcaatttttcagcatgtaaatctatgcagtttctttaaaatctaataactaccatataatttcttagaaagtraaagcctccttattcatcatgatcactaattgattgattaagaggaattaagtaacagtaacataaacatttaatttaaaacatttaaatgtatattcac

SEQ ID NO: 284626 - DNA, 201 bp, Homo sapiens
agatgatcacagattggatatttattactcagtgtgtctgtatgcagtactagggtggactaatgtctcacttcaaaaaaaatatgagtgtagtatacttsgcctaaaattgttactcagtgttactaaagtgtaatcattttccacatctccaaatatattccaagtctctgaaatactagtgcattgggaggtagaaca

SEQ ID NO: 284627 - DNA, 201 bp, Homo sapiens
catggcctaactggaccttggccccttttagccatggctagagcagccgggatgcagggtaccatgtcccaaggctgcacagtgcaagggggactgggccyaaaccacaaaaccttttttcttcctagtcctccaggcctgtgattggaggggctgctctgaaggtctctgacatgccctggagagattttccccattgtc

SEQ ID NO: 284628 - DNA, 201 bp, Homo sapiens
tggttaactgctttgtacttttaaaatagacaaggaaaagaaaagaaatggactaaacttttgagtggttgatagaactattgtaggaagtatatgctggrtgaacatttattgatcaaaacacaattaagtgtaacattgagacgaaacaaattgttagtcatccaacaatatgtacaaatcagtcaggaaatccaagaa

SEQ ID NO: 284629 - DNA, 201 bp, Homo sapiens
aatttggatggttgtcttatagttgatgcaagacttcttagctgaattgtaaaaagcagtgcattcaggaggccaaggccataaagtgaatcccagtgacrgttaacatcagcatgtagtgtggccatctatttcatcccaaaacgttatcagtcatcccataaatgcgtattggcattgatgtagagactcaaagatgaa

SEQ ID NO: 284630 - DNA, 201 bp, Homo sapiens
gagcggcgcaccggagaaacctgggtgggggatggaatgggggacacttgggacgccccgcgcggtctcccttctctctttttggggccctcagcggtagycgcgcggtccaggccaccttacttcccgcgggagcgcgcaccgagtcacgagaactgccagcgaggaggcggcggatcaagaccccaaagcggagagcag

SEQ ID NO: 284631 - DNA, 201 bp, Homo sapiens
aatttcagatgaaatattttctaactcagaaaataaggagaatgcatttaactacttttctaggttagaaaatgatttgattgtacggtgactttttttttcgctgaagtactgagatattccagccagttctgatacatttaattttaaaagatttaattaaaaaaaaactcttacatttagatatttatctttttttaa

SEQ ID NO: 284632 - DNA, 201 bp, Homo sapiens
ttctttgtgcacaaactgagtagagattttattctttttgaagtacttggaaaaactaaaggatgtttttaaaaattgtaattttaggccaggcacggtggctcatgcctgttatcctagcactttgggagaccaaggtgggaggaaagtttgagcccagaagttcaagaccagcctgggcaacttagcgagactccatct

SEQ ID NO: 284633 - DNA, 201 bp, Homo sapiens
gagactcaacattttttttgtcgggggaaaacatctaaggtattcttataagggaggtaacggaaaaaataaaaggtaaaatttttaatgttctctctttkttttgtttttaactgcagaatctgtttaatatgattgtagaaatacctcggtggacaaatgctaaaatggaggtaccgatatactttattaatatgaaac

SEQ ID NO: 284634 - DNA, 201 bp, Homo sapiens
atacactgtacattttattcctctgaaatgtttggcactccaacaagaagcagctgctaattttaagcaggaaatctaaacagctaatttgagaaaaaaaattttgtattgttatactgtccttaaattgtgcaggacacaaataggcatcctgcacaatttaaggagtatatagcaatttcatagaataagcaggttacc

SEQ ID NO: 284635 - DNA, 201 bp, Homo sapiens
gacttgaagataagtcaattgagattattcagtctgaaaaatgaaaacataaacagaacctcagagatctgtggaagaccataaagcataccaacatagayataatgcaggtccccaaagtagaggatgaagaataaagaataggaagaatatttgaaaaataatggccgaaaacttctcaaatttgatgaacaacatcaa

SEQ ID NO: 284636 - DNA, 201 bp, Homo sapiens
aaagaacaaagctggaagcaccatgttacctaacttcaaaatatattacaagtaaccaaaacagtatggtactggttaaaaaaaatatatatatatatgtrtatatatatatacatatatatatatacgtatatatatatatatacatatatatatacacgtatatatatatatatatatatatgtgtgtatatatatata

SEQ ID NO: 284637 - DNA, 201 bp, Homo sapiens
atcatgccattgcacttcagcctgggcaacaagagccagtatataaaaatagttgcttgagattatctatctatctatctatctatctatctatctatctatctacacatattgatagatacacacatatagatatatatatacacacacatctatatatatagatatatatacatctgtatatacagagatatatatctc

SEQ ID NO: 284638 - DNA, 201 bp, Homo sapiens
aaaagaaatcccatcagagtaacagtgaatttctcaataaaaacctttcaggccagaagagaatgggacgatatattcaaagtgctgaaagaaaaaaaaaacaacctgccagacaatactatacctagcaaaatatcttttataaagtttttccagacaggcaaatgctgaggaatattttaccactagaatagttctaca

SEQ ID NO: 284639 - DNA, 201 bp, Homo sapiens
gatcatgccattgcacttcagcctgggcaacaagagccagtatataaaaatagttgcttgagattatctatctatctatctatctatctatctatctatctatctacacatattgatagatacacacatatagatatatatatacacacacatctatatatatagatatatatacatctgtatatacagagatatatatct

SEQ ID NO: 284640 - DNA, 201 bp, Homo sapiens
ctcattgtgaatttcttttgtttttttgagacagagtctcactctgtcaccaggctggagtgcagtggcacagttacagcccactgccatctctgccttcyaggtggaagtgattctcctgcctcaacctccctagtagctgggattacaggcatgcactaccacgcccagcaaatctttgtatttttagtagagacgggg

SEQ ID NO: 284641 - DNA, 201 bp, Homo sapiens
ggatcatgccattgcacttcagcctgggcaacaagagccagtatataaaaatagttgcttgagattatctatctatctatctatctatctatctatctatctatctacacatattgatagatacacacatatagatatatatatacacacacatctatatatatagatatatatacatctgtatatacagagatatatatc

SEQ ID NO: 284642 - DNA, 201 bp, Homo sapiens
tttgctttagctcttttagcaaatttaaggtttttttaattgtagtaaaatatacacaataatttaccattttcaccaaaaaccaaggtttttttttttattattattgtggtaaagtatacaccacaatttaccattttaaccatggaccatcaccatcatccatttctagtattttaaaaaaaattttccaaactaaaa

SEQ ID NO: 284643 - DNA, 201 bp, Homo sapiens
aggatcatgccattgcacttcagcctgggcaacaagagccagtatataaaaatagttgcttgagattatctatctatctatctatctatctatctatctatctatctacacatattgatagatacacacatatagatatatatatacacacacatctatatatatagatatatatacatctgtatatacagagatatatat

SEQ ID NO: 284644 - DNA, 201 bp, Homo sapiens
ttttgctttagctcttttagcaaatttaaggtttttttaattgtagtaaaatatacacaataatttaccattttcaccaaaaaccaaggtttttttttttattattattgtggtaaagtatacaccacaatttaccattttaaccatggaccatcaccatcatccatttctagtattttaaaaaaaattttccaaactaaa

SEQ ID NO: 284645 - DNA, 201 bp, Homo sapiens
caggatcatgccattgcacttcagcctgggcaacaagagccagtatataaaaatagttgcttgagattatctatctatctatctatctatctatctatcthtctatctacacatattgatagatacacacatatagatatatatatacacacacatctatatatatagatatatatacatctgtatatacagagatatata

SEQ ID NO: 284646 - DNA, 201 bp, Homo sapiens
ctgcctttctttcagagatgccctgcccagagagaaggaatctagagagtcagtctggctacagtggctttgttgagctgcagtatgctctgcccagttckaacttctggaagctttgtttacactgtgaggggaaaaccacctactcaagcctcagtaatggcggatttccctccccccaccaagcttgagcatcccagg

SEQ ID NO: 284647 - DNA, 201 bp, Homo sapiens
gccctaacagaggttctccttgagggctctgcgcctgcagcaaacttctacctggacatccagggatttccatacatcctctgaaatctaggcagagcttyccaaatctcacttcttgacttttgtacacccccaggctcaacaccacatggaagccattagggcttggggcttgcaccctctgaagccatggcctaactg

SEQ ID NO: 284648 - DNA, 201 bp, Homo sapiens
ttgaacccaggaggcaaaggttgcagtgagccgagatcgcgccactgcactccagcctgggtgacagaacgagactctgtctcaaaaaaaaaaaaaaaaaattagccaggcgtggtggcgggtgcctgaaatcccagctactggggaggctgaggcaggagaatcgcttgcacctgagaggcagaagttacagtgagtcag

SEQ ID NO: 284649 - DNA, 201 bp, Homo sapiens
catctttgtggatttatctacctttggtttttgatgttggtgacctttggatgagggttctgtgtggatgtactttttgttgatgcttttccttcctcttygttagttttccttctaacaggcccttctgccacaggtctgctggagttcactggtggtccactttttgttgattttgatgctattcctttgttagttttc

SEQ ID NO: 284650 - DNA, 201 bp, Homo sapiens
agagagtgctctgagtgggctacagcatgtggaccctggcaacaggaccctgtatgtaatagttcaactgcaggaccactcaattattattatttttttttgagacacagggtcttgctctgccgcccaggctagagtgcagtggcatgatcatacagttcacagcagccttgacttcctgagctcaattgatcctcccac

SEQ ID NO: 284651 - DNA, 201 bp, Homo sapiens
tgttgttcccttgctggcgaggagttgtgatcctttggaagagaagaggcgttccagtttttggaattttcaacctttttgtgctgtttttttttttttttctcatctttgtggatttatctacctttggtttttgatgttggtgacctttggatgagggttctgtgtggatgtactttttgttgatgcttttccttcctc

SEQ ID NO: 284652 - DNA, 201 bp, Homo sapiens
caggccacattattttctccaagttatcagttttgtatctatgtagattatattcagaatttggttttcattacttatttaaggatgaaaatgaaggaaawcaaaaacttttcatctttgtacaagcagtctgtctcactaatctcagattaagtctattccatgtatttcagttttagattcataaataatatagtagat

SEQ ID NO: 284653 - DNA, 201 bp, Homo sapiens
aatttatattcagataatcaagtaatattacttgtataaagtgtatttaggagtgatcttaggctagaaatctcatttataaattaagggtttttaagaaygatgagatttaaaagctagtgaatttagatctttacactaagaacaactaaaatgttcctaaatgttagttgatcactgtggctgcttttaatttattgt

SEQ ID NO: 284654 - DNA, 201 bp, Homo sapiens
aaatattcctccatccctttattttgagcccatgtgtgtctttgcacttgagattggcctcctgagtacagctcaccaatgggtcttgactctttattcartgtggcagtctgtgccttttaatttgggcatttagcccatttacatttaaggttaatattgttatgtgtgaatttgatcctgtcattatgatgctagctg

SEQ ID NO: 284655 - DNA, 201 bp, Homo sapiens
atcctagatttttctgtaacatatttgggacctatttggagagaagatagaggcatacaactttgagtgcttatagaaaacactagtttcaatttgtactrcatgtcacctactgacccgtattgccctcagtatgaaatgtgttgttgcagtgatctctagctgcttttttgttgtcgttgcttttgaaccccaagttaa

SEQ ID NO: 284656 - DNA, 201 bp, Homo sapiens
ttaatgttcatagaaacagttcttccacactcttttacagttcatctgtgaacataattaatacttaaattttgaaattatagtaacaagtacaattgacraacacatttaagaactaaaaactgactcttggtaagtctaagtataggaggcaaaagcagtcctgtgggggtactaaagataacactatgaaatacgata

SEQ ID NO: 284657 - DNA, 201 bp, Homo sapiens
tgaggagcgcggccagccctgctcgcagaattaccgcctcttctttagtaagtagctcccggaggttcgccgagcggcgcaccggagaaacctgggtgggrgatggaatgggggacacttgggacgccccgcgcggtctcccttctctctttttggggccctcagcggtagccgcgcggtccaggccaccttacttcccgc

SEQ ID NO: 284658 - DNA, 201 bp, Homo sapiens
caaactcctgacctcaggtgatcctcccgcctcagcctcccaaaatgctggaattagcgtgagccatcgtgcccggccatgcctctgtttttgttgggcaraatccagggcttatttgttgttgttgttgtttaataaacttcattttggaataattttagattgggttaagctgcaaagttagtacaggattccagcata

SEQ ID NO: 284659 - DNA, 201 bp, Homo sapiens
tcaaggaaacatctaacttacagggctctgcctttttcaattgtcagcttgtttaaacatgagctgtagaaaagacaaaaaactgtcttttttttcccccctcaacttttaagttcaggggtacatgtgcaggatgtggagttttgttacgtaagtaaacgtgtgctatagtggcaaaaaaaacttagtcttaaagatgtt

SEQ ID NO: 284660 - DNA, 201 bp, Homo sapiens
acggggttttgccatgttggtcaggttggtctcaaactcctgacctcaggtgatcctcccgcctcagcctcccaaaatgctggaattagcgtgagccatcktgcccggccatgcctctgtttttgttgggcagaatccagggcttatttgttgttgttgttgtttaataaacttcattttggaataattttagattgggtt

SEQ ID NO: 284661 - DNA, 201 bp, Homo sapiens
agttttttgtataaggtgtaaggaaggggtccagtttcacttttctgcatatggatagccagttttcccagcaccatttataaaatagggaatcatttccycattgcttgttttcatctggtttgttgaggctcagattgttgtagatgtgtggtgttatttctggggttccattgatctatatgtctgttttggcaccag

SEQ ID NO: 284662 - DNA, 201 bp, Homo sapiens
tgaatggtattgtctaggttttcttctagggtttgtatggttttgggttttacatttaagtttttaatccatcgtgagctagttttttgtataaggtgtarggaaggggtccagtttcacttttctgcatatggatagccagttttcccagcaccatttataaaatagggaatcatttcctcattgcttgttttcatctgg

SEQ ID NO: 284663 - DNA, 201 bp, Homo sapiens
cacaaagcatggtagggggaaataaaatattggtgggaattaacaatttcattgttaagttacatgcctttttttttttttttttttttttttttggaggkggagtcttgtgtcgccaggctggagtgcagtggtgcgatttcggctcaccgcaacctccgcctcctgggttgaagctattctcctgcctcagcttcctga

SEQ ID NO: 284664 - DNA, 201 bp, Homo sapiens
ttgttgcactgatccctttaccattatgtgatgcccttgtttgtgttttttggtatttgttgggttaaagtctgttttatcagagaccagaattgcaaccmctgcctttttttttcttctttgctttccatttgcttggtaaatattcctccatccctttattttgagcccatgtgtgtctttgcacttgagattggcctc

SEQ ID NO: 284665 - DNA, 201 bp, Homo sapiens
atctcattgtggttttgatttgtatttctctaatgatcagtgatgatgagctttttttcatgtttgttggctgcataaatgtcttctttcaagaaatgtcygctcatatcctttgcccactttttgatgggtttttttttcttgtaaatttgtttaagttccttgtagattctggatactagacctttgtcaggtaagtag

SEQ ID NO: 284666 - DNA, 201 bp, Homo sapiens
tttgtcttttcaagttgcccactttgccctcttccaagtgtaccttccttccctttgttcctgctctaaagccttttattataataaactgattccatctstaaaattgcctcagcctctccttctgccttctgcccctcagttgaattctttcttctgaggaggcaagaattgagattgttgcagagccatagggatttg

SEQ ID NO: 284667 - DNA, 201 bp, Homo sapiens
cactgtgttctgagagactgtttgttatgatttctgggtttttttgcatttgctaaggagtgctttacttccaattatgtggtcagttttagaataagtgygatgtgatgctaagaggggtgcgtatactcttttgatttggggtggagagttctgtagatgtctactaggtccacttggtctagagctgagttcaagtcc

SEQ ID NO: 284668 - DNA, 201 bp, Homo sapiens
tagcagtctatctatattgttgatgttttcaaaaaaaccagctcctggattcactgatgattttttttttttgaagggtttttggtgtctctgtctccttsagttctactctgatcttagttatttcttgttttctgctagcttttgaatttgtttgctcttgcttccctagttcttttaattgtgatgttatggtgttga

SEQ ID NO: 284669 - DNA, 201 bp, Homo sapiens
gtcttaaagttgtttctttttacattcctagagaaaggtatattaacctggtacttcctttttttttttttttttttgttactttaagttccaggatacaygtgcagaacatgcaggtttgttacataggtgtacatgtgccatggtggtttgctgcacccatcaacccatcacctaggtattaagccctgcctgcatcag

SEQ ID NO: 284670 - DNA, 201 bp, Homo sapiens
tagattttctagtttatttgcatagaggtgtttataatattctctgatgctagtttttatttctgtgggatcagtgttgatatcccctttatcattttttmttgtgtctatttgattcttctctcttttcttctttattagtctggctagcagtctatctatattgttgatgttttcaaaaaaaccagctcctggattcac

SEQ ID NO: 284671 - DNA, 201 bp, Homo sapiens
atgaatataactcatttttatgcctaaaaacgtcttatgattcccttcaaaaatgggatttcatccaacccttctattcttaaacaatgtgtccaaacctrcctttccagcctcatgggctcttccttcctgtccccttgtctttctttggtggacatcttcattttttcgagaagcagtttagatgtcacctctgcacag

SEQ ID NO: 284672 - DNA, 201 bp, Homo sapiens
tgaactgttacccaccagagagatcttccctgaccattcaatatcaaatattactccttctgttacagtaggtagctagtcaggcatgagcagggcagaaragggctcccctccctcaacacacaccaggaatgacaggcaaacatcaggtgatggtcaggcagttgttaactgtttctctaaaatattaattggttgcag

SEQ ID NO: 284673 - DNA, 201 bp, Homo sapiens
tttctcttgtttaaaagagtttcagaaagaatggtaccagctcctttttgtacccctggtagaattcagctgtgaatacgtctggtcctgggctttttttygttggtaggttattaattactgcctcaattttaaaacttgttattggtctattcagggatttgacttcttcctggtttagtcttgggagggtgtatgtgt

SEQ ID NO: 284674 - DNA, 201 bp, Homo sapiens
tttaaagccaaccattttcttttttttttttttgagacagagtctcactctgtcacccaggctggagtgcagtgatgcaatctcggctcactgcaacctcygcctcccgggctcaagcaattctcctgcctcagcctcccaagtagctaggattacaggcacctgccaccatgcctggccaatttttgtatttttagtaga

SEQ ID NO: 284675 - DNA, 201 bp, Homo sapiens
gctttttgatgggctgctggattcaaattgccagtattttcttgaggattttcacatcgatgttcattagggatattggctagaaattttctttttttgtkgtgtctctgccaggttttcgtatcaggctgatgctggcctcattaaattagttagggagaagtctctctttttctcttgtttaaaagagtttcagaaaga

SEQ ID NO: 284676 - DNA, 201 bp, Homo sapiens
tcctaatgcctggcatgtagtagccactcaataaatatctgttggagtaaattgttgaataatattttaaagccaaccattttcttttttttttttttgaracagagtctcactctgtcacccaggctggagtgcagtgatgcaatctcggctcactgcaacctccgcctcccgggctcaagcaattctcctgcctcagcc

SEQ ID NO: 284677 - DNA, 201 bp, Homo sapiens
attattggtgtatagcaatgtttgtgaattttgcaccttgattttgtatcctgagactttgctgaaattgcttatcagcctaaggagattttgagctgacrttatggggttttctaaatatacaatcatgttatctgcaatcagagacaatttgactccctctcttctcttcctatttaaattccctttatttccttttct

SEQ ID NO: 284678 - DNA, 201 bp, Homo sapiens
aacgtatatgtttttaaagccccctatgtgattctgatgagcctctctgcttaagaaccatattattattattattattattattattattattattattattattattttgagacagtgtcttgctctgttgccgaggctggagtgcaggggcgcgaacatgactcattgcagccttgacctcccagagttcagcgattc

SEQ ID NO: 284679 - DNA, 201 bp, Homo sapiens
ttttctcaacaccatttattaaatagggaatcctttccccattgcttctttttgtcaggctgtcaaacatcagatggttgtagatgtgtggcattatttckgaggcctctgttctgttccattggtctatatatctgttttggtaccagtaccatgctgtttttgttacagtagcctcgtagtatagttacatcaggtagt

SEQ ID NO: 284680 - DNA, 201 bp, Homo sapiens
tggttgtttgtctttttcttgtaaaattaagttccttgtagattctggatattagccctttatcagatggatagattgcaaaaattttctcccattctgtrggttgcctgttcaccctgatgagagtttcttttgctgtgcagaagcttttcagtttaattagatctcatttgtcaattttggcttttgttgccattgctt

SEQ ID NO: 284681 - DNA, 201 bp, Homo sapiens
cttttactttttttctttctttttgagacagggtctcactcctgccacccagactgtagtgcagtggtgatcatggctcactgcagcctcggcttcctgarctcaggtgatcttctccctcagcctcacaagtagctggaactacaggtacatgccaccttgcctggctaatttttttgtatttttagtaaagatgaggtt

SEQ ID NO: 284682 - DNA, 201 bp, Homo sapiens
atctacaccaaatttttgtagtgattcacctttattgaggctttttagggcctcagtattgtttaaagcctcgttagttttataacctacttaatgttcayagaaacagttcttccacactcttttacagttcatctgtgaacataattaatacttaaattttgaaattatagtaacaagtacaattgacaaacacattta

SEQ ID NO: 284683 - DNA, 201 bp, Homo sapiens
ctttaaatatatcattccagtgccttctagccttcaaagtttctgctgagaaattggctaataatcatattgggactcccttgtacataataaatattttmttgggtttatcataattgatttttcaagcttattggatgtatatttgtgtctttcatcaagtttagaaagtttctggccattatttcttcaaagaaagtc

SEQ ID NO: 284684 - DNA, 201 bp, Homo sapiens
ttttgatacatgcatagaaaacatcaagtgaggttatttattatattgaacacttttatgttggtaacatctcaaatcttctagatattttgaaatatacwatatattgttaactatagtcaccctactgtgctgtcgaacactagagcttacttttctatcttaacagtatgtttgtacccattaaccaacttctcttca

SEQ ID NO: 284685 - DNA, 201 bp, Homo sapiens
tatttggcacaattcttgtagtgctagcaccacaaccaaacttgccagatttaccaaataaaaatacaaggcacttagttaaacttgagtttcagatgaamaacaattttttagtaatagtactctaaagtattgcatagaaaaaactcatactaaaaacttatcagtttacctgagcaaacaatttttggtcctatttca

SEQ ID NO: 284686 - DNA, 201 bp, Homo sapiens
aacataaacatttaatttaaaacatttaaatgtatattcacccatttttggatatagggctgagccccttttaatatagattccatatagattttatatayactctaacataacacaggatagaaaataaagattctgtaatccttaagctccttgtaacttaaaattcctgacagatttttagggttcttttaaaaaaaa

SEQ ID NO: 284687 - DNA, 201 bp, Homo sapiens
catgatgctttctaattcattaagcatttctaagcagtcttttggtctgggattcagattcaggctctctttagtgagcacttaagaaatttagaatatgrgatctcacaagggaaggtgaaaaattgaaagcactggaaatgtgggactttttctccttaagctataaagagccacagtgctgcataatatacttaatgt

SEQ ID NO: 284688 - DNA, 201 bp, Homo sapiens
agaaaatgagaaatctgtctttctgtgcctggcttattacacttaataacccccagttccatccatgttgctgcaaatgacaactcattcgttttttatgkctgagtagtgttgcattgtgtgtatatataacacatttccttcattcattcattgatggacacttgggttgatcccctatctttgttattgtgaatagtg

SEQ ID NO: 284689 - DNA, 201 bp, Homo sapiens
  misc_feature (1)...(201): n = A,T,C or G
tatccttacataatcagataatgtattagatttcttgtcctgtatctgaagtgagattcccgcccaacactatctcattaagatataagtcgtcctccatngcaggcaatcgtagacccgagagaaattctcttttcagaggataaatttcccattattactgtacctcagttcccaagattctttagtttctttattatc

SEQ ID NO: 284690 - DNA, 201 bp, Homo sapiens
aaatgacccaactttaaatctagcaacatagactcattcatttatttatttttatagcttgatttatttcagaagttcttgctgagaattaaacttttacracagtatcaaagcactccttatactttgtgatactagctaaacaaaataacagtattaatccaactattaatagtgtttaaaaacttttcatagatattc

SEQ ID NO: 284691 - DNA, 201 bp, Homo sapiens
gtgggagactcagtgaaagatggtatgctcagacatccagtttagttacagtggactgataggtctgttattttgggaatttgatagtctaaaggtaatagtacatgatgtatttctactaaatttttccaactgtagctcatcttttacattttgaatcctcacagcaaaagagacatcttcaatgactaagtcctgagt

SEQ ID NO: 284692 - DNA, 201 bp, Homo sapiens
ctggtctagaactcctgacctcaggtgatccacctgccttggcctcccaaagtgttgggattaaaggtgtgagccaccgtacccagcaaagacggaattcktaaagacagacagagatggcactgctcacctttatgttcccagtgactaaacacagtgtttagtttgtaatagactttcacttaatgcttttgttgttga

SEQ ID NO: 284693 - DNA, 201 bp, Homo sapiens
agagcggtgcatttaataacatggctggcaacagctttgtgccaagtcaattcacgtctgaatcacattggtgctgtgtgtatgtgtcagtctacacacactacatttctacactggatcccattcaactggtaagcagtttctgacaggcttcagaataaggggaaaaaagattagaacatcttgtgtacatctatataa

SEQ ID NO: 284694 - DNA, 201 bp, Homo sapiens
gatttgaagacccttcccaattactgagctgttaacactgtgtgcatttttttaagactaagatgatactcttcagcctcctaggaatttctgggcatctrtagaaattcattgtctagtttttattctgggggtgtgattgcgattatggaaggcagacccagctgtgagtctaaattgaggaagtatttgttagaaatg

SEQ ID NO: 284695 - DNA, 201 bp, Homo sapiens
ttgtaaaattatgtattgcagaaaagcactctaaagaatggcagaaagatagtatctgtgaaaatatttgacctgaaatacctataatttcaatatacaamattcaattttgatatgggcttaccagatactgtgaagagtgctttctcagctgggcatggtggttcacgcctgtaatcccagcactgggaggccgaggtg

SEQ ID NO: 284696 - DNA, 201 bp, Homo sapiens
tgaaaggacacctgaattatcttactgtcataggatttttctattagaataccactgagttaccacaaagtatctctaatatgacacaaatggagagaatrgaccaaagagttaaagtctaaagcatggaattttttttaaagttattaccactaggtaaattgaatatttgaaaccaacttttaagtggataccagtaag

SEQ ID NO: 284697 - DNA, 201 bp, Homo sapiens
tgcacacctgtgctttttatgccttcagtgctcctccctagaggtctacttgatctcttccctcacttcattcagatctgtgctgaactgttacccaccasagagatcttccctgaccattcaatatcaaatattactccttctgttacagtaggtagctagtcaggcatgagcagggcagaagagggctcccctccctca

SEQ ID NO: 284698 - DNA, 201 bp, Homo sapiens
aggtgatgtgattgattattttgaagtgttcctgttaatttataggtttcagaaggttttttgttgttgttgtttattcattttatttttatttttttggkttgtttgtttgtttagagatggggtctcatacttttgcccaagctggagcacagtgtgcaatcacgactcacagcagccttgacttccccagctcaagcg

SEQ ID NO: 284699 - DNA, 201 bp, Homo sapiens
agactaaaatccttattattagattctgtgaagggagaaaataaggtgatgtgattgattattttgaagtgttcctgttaatttataggtttcagaaggtkttttgttgttgttgtttattcattttatttttatttttttggtttgtttgtttgtttagagatggggtctcatacttttgcccaagctggagcacagtgt

SEQ ID NO: 284700 - DNA, 201 bp, Homo sapiens
tgtatacacacacataacctcctccttcaattaaaatatgaagcatttccatcatcccagaaagttccccctttcccctttgcaaagtctttatgactccyggcattctaggttggtagcgtttttaagaattttaaagatttcatttctttgtcttttggcttacattgcttctaaagagaaatcagctgtcattcttat

SEQ ID NO: 284701 - DNA, 201 bp, Homo sapiens
attagactaaaatccttattattagattctgtgaagggagaaaataaggtgatgtgattgattattttgaagtgttcctgttaatttataggtttcagaargttttttgttgttgttgtttattcattttatttttatttttttggtttgtttgtttgtttagagatggggtctcatacttttgcccaagctggagcacag

SEQ ID NO: 284702 - DNA, 201 bp, Homo sapiens
acacatgaagaaattgagtccacataaagatttaggtaacttacctaaggtcacacaatgcattgtggagccaggatttaaaccttactctcttttttttytctttctttttttttttttttttttttgaaatggaatcttgctctattgcccaagttggagtgcagtggtgcaatctcggcccactgcagcctctgcctc

SEQ ID NO: 284703 - DNA, 201 bp, Homo sapiens
aataaataaataaaatctcataatattttacgaaagtttatgaatctgtgttgggccacattgaaagccatcctgggctgcatgctgcccgtaggccgcgygggttggacaagcttgccctatccccttctgcctctactgctaatacttgtgagaattgatccacatatttatatccatcctatttatattctttagaat

SEQ ID NO: 284704 - DNA, 201 bp, Homo sapiens
attatatgcctataaccacagatttataactatttttatgcatttgtcttttaaatcatgtagaaaattaaaagtagaatgagaaaccaagtttataaaamtattgatttttatatttgcccatgtgtttactttctccagagatatttatatattcataaaactttgagttactgtctaattttttttacttcattgcaa

SEQ ID NO: 284705 - DNA, 201 bp, Homo sapiens
tactctaacataacacaggatagaaaataaagattctgtaatccttaagctccttgtaacttaaaattcctgacagatttttagggttcttttaaaaaaaatcatttaaattatgttatctacaccaaatttttgtagtgattcacctttattgaggctttttagggcctcagtattgtttaaagcctcgttagttttata

SEQ ID NO: 284706 - DNA, 201 bp, Homo sapiens
ctctaactctgacaatcactgatgtaatcgttttctatttctgtaaaattggtagtaatatcctctttcatttctgattttagttacttgagctttttttyttagtcattctagctaaacattttgttgatcttttctaagagcttacttttggtttaatttttttgtttttttttttttgtatcctgtattgtatctttg

SEQ ID NO: 284707 - DNA, 201 bp, Homo sapiens
gatattaaatacgtctttttttatttgtttggagctaggcttttgctcttgaagttattaaatccactcatcaatgttggaaagcattgcttatgaagaastgtaatggaggagctataaattggtaagaatttgtcttttctatgtaagtaatgttattttatattaattggtattaaacagccacataataatcagatt

SEQ ID NO: 284708 - DNA, 201 bp, Homo sapiens
taggaagaatcaatatcatgaaaatggccatactacccaaggtaatttatagattcaatgccatccccatcaagctaccaatgactttcttcacagaattrgaaaaaactactttaaagttcatatggaaccaaaaaagagcccgcatcgccaagtcaatcctaagccaaaagaacaaagctggaggcatcacactacctg

SEQ ID NO: 284709 - DNA, 201 bp, Homo sapiens
tttattattcagataattgaaattttaaacctatatggtatttttgcctcagggtaagtctgccaagtcacgaatttgtaaagaatgaggtagtttttggtttttgtttgtttttaacaaatagtaattcttttctgtataaagatgaggtcatttatacaacttcaccagaaaataattgttttatgcattgctttttac

SEQ ID NO: 284710 - DNA, 201 bp, Homo sapiens
ttcctgtacaccaataacagacaaacacagagccaaatcatgagtgaactcccattcacaattgctacaaagagaataaaatacctaggaatccaacttamaagggatgtgaaggacctcttcaaggagaactacaaaccactgctcaactaaataaaagaggacacaaacaaatggaagaacattccatgctcatggata

SEQ ID NO: 284711 - DNA, 201 bp, Homo sapiens
ttttattattcagataattgaaattttaaacctatatggtatttttgcctcagggtaagtctgccaagtcacgaatttgtaaagaatgaggtagtttttggtttttgtttgtttttaacaaatagtaattcttttctgtataaagatgaggtcatttatacaacttcaccagaaaataattgttttatgcattgcttttta

SEQ ID NO: 284712 - DNA, 201 bp, Homo sapiens
agaggaagtcaaattgtccctgtttgcagatgacatgattgtatatttaggaaaccccatcatctcagcccaaaatctccttaagctgataagcaacttcmgcaaagtctcaggatacaaaattaatgtgcaaaaatcatgagcattcctgtacaccaataacagacaaacacagagccaaatcatgagtgaactcccatt

SEQ ID NO: 284713 - DNA, 201 bp, Homo sapiens
attttattattcagataattgaaattttaaacctatatggtatttttgcctcagggtaagtctgccaagtcacgaatttgtaaagaatgaggtagtttttggtttttgtttgtttttaacaaatagtaattcttttctgtataaagatgaggtcatttatacaacttcaccagaaaataattgttttatgcattgcttttt

SEQ ID NO: 284714 - DNA, 201 bp, Homo sapiens
ccacatgattatctcaatagatgcagaaaaggcctttgacaaaattcaacagcccttcatgctaaaaactctcaataaattaggtattgatgggatgtacstcaaaataataagagctatttatgacaaacccacagccaatatcatactgaatgggcaaaaactggaagcatcccctttgaaaactggcacaagacaggg

SEQ ID NO: 284715 - DNA, 201 bp, Homo sapiens
gtggcaggatcttggctcactgcaagctccgcctcccaggttcatgccattctcctgcctcagcctcccgagtagctgagactacaggtgcccgccaccaygcccagctaattttttgtatttttttagtagagacagggtttcaccatgttagccaggatggtctcgatctcctgacctggtgatctgcccgcctcggcc

SEQ ID NO: 284716 - DNA, 201 bp, Homo sapiens
acaaggaagagctggtaccattccttctgaaactattccaattaacagaaaaagaggaatcctccctaactcattttatgaggccagcatcatcctgatasgaaagccttgcagagacacaacagcaaaagagaattttagaccaatatccctgatgaacattgatgcaaaaatcctcaataaaacactggcaaaccgaat

SEQ ID NO: 284717 - DNA, 201 bp, Homo sapiens
tgcttgtagtgcactcctgctggtggcgaattttcttttcttttttttttttttaatatggaacacttcacgaatttgcatgtcatccttgcgcaggggcyatgctaatcttctctgtattgttccaattttagtatatgtatgtgctatttatctaaaataatctttttttgcctttgttttagaaatacaattttgctt

SEQ ID NO: 284718 - DNA, 201 bp, Homo sapiens
cttattctaaaattgaccacatagttggaagtaaagcagtccttagcaaatgtaaaagaacagaaattacaacaaactgtctctcagaccacagtgcaatyaaactagaactcagaattaagaaactcactcaaaactgctcaactacatggaaacagaacaacctgctcctgaatgactactgggtacataatgaaatga

SEQ ID NO: 284719 - DNA, 201 bp, Homo sapiens
ccaaattgtaaagaccatcgatgctatgaagaaactgcatcaactaatgggcaaaataatcagctaacatcataatgataggatcaaattcacacataacratattaacctgaaatgtaaatgggctaaatgatccaattaaaagacacagagtggaaaattggataaagagtcaagacccatcagtgtgctgtattcagg

SEQ ID NO: 284720 - DNA, 201 bp, Homo sapiens
gccaaggcaggaggaacactggagcccaggagttcaagaccagcctgggcaacaaagcaactaaaacaaaacaaagcaattctactggaaaacaaacaaamaaaaaagattagccaagcatggtggtgcacacttgtagtcctagcttcttggaaatcgaaagtggatgaattgattgagccctggaagtcaaggttgcag

SEQ ID NO: 284721 - DNA, 201 bp, Homo sapiens
gattcgatcaactggaagaaaaggtatcagtgattgaagatcaaatgaatgaaatgaagtgagaagagaagtttagagaaaaaagagtaaaaacaaaaaaacaaagcctccaagaaatatgggactatgtgaaaagaccaaatctacgtctgattggtgtacctgaaagtgacagggagaatggaaccaagttggaaaaca

SEQ ID NO: 284722 - DNA, 201 bp, Homo sapiens
cttaaaaaaaaatattgagtgaaaacagatatatcatacacattttttcataccatttatataaaattttaggaaatgcaagctaatgtataatgatgcaraccagatcagagagagccaggaaggaggattttacagtctcttttataagagccatggagaaacttttaggaatagtggtgaatatgtttattatcttga

SEQ ID NO: 284723 - DNA, 201 bp, Homo sapiens
ttccaagtttttgctattgtaaatagtgctgcaataaacgtgagcatgtgtctttatagtaggatgacttataatcctttgtaaatacccagtaatgggaytgctggctcaaatagtatttctggttctagatccttgaggaatcgccacactgtcttccacaatggttggactaatttacactcccaccgacagtgtaaa

SEQ ID NO: 284724 - DNA, 201 bp, Homo sapiens
ctgtcttaactagctatagtttagaatacacatgtaaaatagaaaaaaaaaatgtttttgcttggtgtatgaagtcaaggtcaaacaaaaaaggaagatcrgcaaaatctgacacatctggaccgaaatatatatacttacaatgttagtatatgcatagctttatgtgaatatttgtaagtctataaattcttatgaata

SEQ ID NO: 284725 - DNA, 201 bp, Homo sapiens
tgtgcagtgattttatagttttaaaaaatgaaagatttaaaacaatcgaaatcagaatagttatattgatatggatacattgtggatgaataaatcatatragcaattatttaaaatgagaccgttctgacattttcataggccggcatcacacttgtcctaaaattattaaggtatgtcttttgtatatgtagaatttca

SEQ ID NO: 284726 - DNA, 201 bp, Homo sapiens
tatgtcatctcacttactctttcaacaactctgtgacttggatcaggggttggcaaacttttttctgtaatgggtcatatagaaaatattttaggctttgmagatcgtatgatttctgtcacagctgctcaactctgctatcgtagtactagagcagccataggccaaacacaaacaaatgtgactgttcagtaaaacttt

SEQ ID NO: 284727 - DNA, 201 bp, Homo sapiens
ggtcagtctgacctgagacctgtgcatttagccactttgttatatgcttcaaatcaaaattagattagaaatatttgaattccttccatatacaaggcagstgtatggttttcattttactggtcatgtgaaattacttgtaaactggtaatgaatgtctatattttgagaaaaatctaagtcttttctgagaggtttttc

SEQ ID NO: 284728 - DNA, 201 bp, Homo sapiens
ggagcacaagcctgcccagctcattttgccctccccccatccaagatagagcacatagcctggggatgtggggattgcccaaccaatccaccacctcatgyaactcagcactcctacaggcctgaggttgggccttaactcacagcctgtacctcctcagctggtatatacctgcaagcaccaactgtggacctggagaca

SEQ ID NO: 284729 - DNA, 201 bp, Homo sapiens
taactttttttagtttaagaattttcagaatataagtttcagtatatgtatcatatgcatctagaaaatttaaagtcaagagcttcagaattttaactcaytttaatccatttttctctttatcataacttaatttggaaatatattcagcgttgttagtttttatttcttttgcctttctgtaatgaattgcctatcttt

SEQ ID NO: 284730 - DNA, 201 bp, Homo sapiens
aataagagaaaaagacaggaatgaaaaatatacaaaacaaccagaaaataattagcaatatgataggaacaatacttcccatatcaataataatctttaayataaatagattaaattgtccacttaaatgttgtagaatggctgaatggattttttaaaaaccatgatccaactatatgcttcttacaaaaaattcaccta

SEQ ID NO: 284731 - DNA, 201 bp, Homo sapiens
agcaatcctgagcaaaaagaacaaagctggaagcaccatgttacctaacttcaaaatatattacaagtaaccaaaacagtatggtactggttaaaaaaaawatatatatatatgtgtatatatatatacatatatatatatacgtatatatatatatatacatatatatatacacgtatatatatatatatatatatatgt

SEQ ID NO: 284732 - DNA, 201 bp, Homo sapiens
  misc_feature (1)...(201): n = A,T,C or G
ttattagcagtgtgagaacagactcaacagctgctaagctgtcctcagcccaacttaccaatgtgctgccattctgcatgttgtgcaagtctctgtgggcntgagcacagaagtccaaacatgcagtgacccctgagaatggacggccttccttcagacccagacggcactctggtgctctgtgttcatattcaatctgaa

SEQ ID NO: 284733 - DNA, 201 bp, Homo sapiens
caggctgtcgtctcacaggccgatcttagactgctgcgctagcagtgaacaaggctccgtgggtgtgggacctgctgagccagacacggaagggaattccmtggtctgccagttgtgaagactgtgggaaaagcgcatatttgggtggtagtgtacagttcctccaggtacagtctgtcatggcttcccttgcctaggaaa

SEQ ID NO: 284734 - DNA, 201 bp, Homo sapiens
agtttccacctggtgtcattctctttcagttcaaggactttcacatatgcttgtagtgcactcctgctggtggcgaattttcttttcttttttttttttttaatatggaacacttcacgaatttgcatgtcatccttgcgcaggggccatgctaatcttctctgtattgttccaattttagtatatgtatgtgctatttat

SEQ ID NO: 284735 - DNA, 201 bp, Homo sapiens
ccattttttagatataccacagtttatccattcacattactgttggaaatttgggtttccagttttcagctaatgtgaataaagttgctctgaacagtgaattacaagtcttcatgtgaacatgttttcatttccagtggggaaatactcaggaatagttttgctgagtaagatggtaattatatgtttaacattgtaaga

SEQ ID NO: 284736 - DNA, 201 bp, Homo sapiens
gccgaggggcactgaggtccacccagttcgagcttccaggccgctttgtttacctactcaagcctcagcaatggtggacgcccctcctcccaccaggctgycgtctcacaggccgatcttagactgctgcgctagcagtgaacaaggctccgtgggtgtgggacctgctgagccagacacggaagggaattccctggtctg

SEQ ID NO: 284737 - DNA, 201 bp, Homo sapiens
gtagagaagtccttaaatgacctgatggagctgaaaaccatggcacaagaactacgtgatgaatgcacaagcttcagtagctgattcgatcaactggaagraaaggtatcagtgattgaagatcaaatgaatgaaatgaagtgagaagagaagtttagagaaaaaagagtaaaaacaaaaaaacaaagcctccaagaaata

SEQ ID NO: 284738 - DNA, 201 bp, Homo sapiens
cttcagagctatcagacagggacatttaagtctgcagaagtttctgctgccttttgttcagctatgccctgcccacagaggtggaggctgtaggccttgcmgaggggcactgaggtccacccagttcgagcttccaggccgctttgtttacctactcaagcctcagcaatggtggacgcccctcctcccaccaggctgtcg

SEQ ID NO: 284739 - DNA, 201 bp, Homo sapiens
caaaggagtgcagcagcccctcaccagcaacagaacaaagctggatggagaatgactttgacgagttgagagaagaaggcttcagatgatcaaatttctcygagctaaaggaggaagttcgaacccatcacaaagaagctaaaaatcttaaaaaagattagatgactggctaactagaataaccagtgtagagaagtcctt

SEQ ID NO: 284740 - DNA, 201 bp, Homo sapiens
cactgtttattctagttatccatttgtgtaacctttttcaaggtttttagcttctttgcgatgggttagaacatgttccttaagctcggagaagtttgttrttactgaccttctgaagcctacttctgtccactcatcaaactcattctccatccagctttgttccattgctggcgaggagctgcaattctttggaagagg

SEQ ID NO: 284741 - DNA, 201 bp, Homo sapiens
gattatatttattgatttgtatatgttgaaccagcgttgcatcccagggatgaagctgacttgattgtggtggataagctttttgatgtggcgctggattyggtttgctagtattttattgaggatttttgcattgatgttcatcagggatattggcctgaaattttccttttttgttgtgtctctgcctggttttggtat

SEQ ID NO: 284742 - DNA, 201 bp, Homo sapiens
tttatccaatttgccagtctgtgtcttttaattggggcatttaacccatttacatttaaggttaatattgttatgtgtgaatttagtcctgtcgttataakgttagctggttattttgcccattaatttatgctgtttcttcatagtgttgatggtctttaccatttggcatgtttttgcagtggctggtaccggttattc

SEQ ID NO: 284743 - DNA, 201 bp, Homo sapiens
tgtacaatcatgtcatctacaagcagacaatttgacttgctctcctctcttcctatttgaataaactttatttctttctcttgcctgattgccctggccasaacttccaatagcatgttgaatatgagtggtgagagagggcatccttgtcttgtgctggttttcaaggtgaatgcttccagcttttgcctattcagtatg

SEQ ID NO: 284744 - DNA, 201 bp, Homo sapiens
ggtcttgactctttatccaatttgccagtctgtgtcttttaattggggcatttaacccatttacatttaaggttaatattgttatgtgtgaatttagtccygtcgttataaggttagctggttattttgcccattaatttatgctgtttcttcatagtgttgatggtctttaccatttggcatgtttttgcagtggctggt

SEQ ID NO: 284745 - DNA, 201 bp, Homo sapiens
tggtctcaaactcctgggctcaagtgatccacctgcctcagccttccaaagtgccaggtttacaagtgtgagccaccatgcctggcctgttttttttttttaattaaaaaaactttgaaattatagccaccttggtaggtataaagtgagatctcattgtggttttgaggaattataaaagcagtttttgaatataactat

SEQ ID NO: 284746 - DNA, 201 bp, Homo sapiens
ttagtttaattagatcccatttgtcaattttggcttctattgccattgcttttggtgttttagtcatgaagtctttgcccatgcctatgtcctgaatggtrttgcctaggttttcttcttagccagttttcccagcaccatttattaaataggggatcctttccccattgcttgtttttgtcaggtttttcaaggatcaga

SEQ ID NO: 284747 - DNA, 201 bp, Homo sapiens
gaatgcgtgtgatttttgtacattgatttgtatcctgagactttgctgaagttgcttatcagcttaaggagattttgggctgagacaatggggttttctaratatacaatcatgtcatctgcaaacagggacaatttgacttcttcttttcctaattgaaaaccctttatttccttctgctgcctaattgccctggccaga

SEQ ID NO: 284748 - DNA, 201 bp, Homo sapiens
atggggttgtttttttcttgtaaatttatttaagttctttgtagattctggatattagccctttgtcagatgggtagattgcgaaaattttctcccattcyctaggttgcctcttcactccgacaatagtttcttttgctgtgcagaagctctttagtttaattagatcccatttgtcaattttggcttctattgccattg

SEQ ID NO: 284749 - DNA, 201 bp, Homo sapiens
cagtaccatgctgttttggttactgtagccttgtaatatagtttgaagtcaggtagcgtgatgcctccagctttgttcttttggcttaggattgacttggygatgtgggctcttttttggttccatatgaactttaaagtagttttttctaattctgtgaagaaagtcattggtagcttgatggggatggcattgaatcta

SEQ ID NO: 284750 - DNA, 201 bp, Homo sapiens
ggtattcaataaatgttgggttttattgtcattactgctataagtgtagttgagttaaatcgatcaaagagagagaaatcccttctattccagcctcttcyttccaatacttctaatgatgaggatatcactcctttatgagttgacccattccattgttgggtattggaaaagtcagccttactaatttttctagacata

SEQ ID NO: 284751 - DNA, 201 bp, Homo sapiens
atatgtgccacattttcttaatccagtctatcattgatggacatttgggttagttccaagtctttgctattatgaatagtaccaataaacatacgtgtgcwtgtgtctttatagtagcatgatttataatcctttgggtatatacccagtaatgggatctctgggtcaaatggtatttctggttctagatccttgaggaat

SEQ ID NO: 284752 - DNA, 201 bp, Homo sapiens
atctctgttttggtaccagtaccatgctgttttggttactgtagccttgtaatatagtttgaagtcaggtagcgtgatgcctccagctttgttcttttggcttaggattgacttggtgatgtgggctcttttttggttccatatgaactttaaagtagttttttctaattctgtgaagaaagtcattggtagcttgatggg

SEQ ID NO: 284753 - DNA, 201 bp, Homo sapiens
ggaaatatgaattaaacaatgtgtgaggttctctaatacttggtactgtagtcattttactggaaaaatgatcgaactttatgaggctccacacacaaacyggtggcatacagaactgaggagagagccatattcagtgctaaaggattcccagacttgcctcagacatgtgcacagcctaactccagggatttaaaactc

SEQ ID NO: 284754 - DNA, 201 bp, Homo sapiens
acaaaagtctgaaggtgatatacatatcaatgatgatgctgctctaggtatcataatcaattgtgcttctggttagactgggccccatgtttcctggctcsctcagtccaatgctctgccactaaagggaattaattttggttcttaacaaaacatctttttgtttttttctttacagatattgatgatgttaagaagttc

SEQ ID NO: 284755 - DNA, 201 bp, Homo sapiens
cccgattgcttgtttttctcaggtttgttaaagatcagatagttgtagatatacagcgttatttctgagagctctgttctgttccattgatctatatctcygttttggtaccagtaccatgctgttttggttactgtagccttgtaatatagtttgaagtcaggtagcgtgatgcctccagctttgttcttttggcttagg

SEQ ID NO: 284756 - DNA, 201 bp, Homo sapiens
ggtgttttgaagtaaaaaagtcaagggggaattggaacttcaatataaatgtattatttcttgctacatttggtagatcttatttctcagtaaagcaacartatccatagtgttgtataaaatttggatggttgtcttatagttgatgcaagacttcttagctgaattgtaaaaagcagtgcattcaggaggccaaggcca

SEQ ID NO: 284757 - DNA, 201 bp, Homo sapiens
ttgtaaatgtttgtggagtgcaggaatagtattatacatatgaaaacacaaaagtctgaaggtgatatacatatcaatgatgatgctgctctaggtatcayaatcaattgtgcttctggttagactgggccccatgtttcctggctcgctcagtccaatgctctgccactaaagggaattaattttggttcttaacaaaac

SEQ ID NO: 284758 - DNA, 201 bp, Homo sapiens
ttctagggtttttatggttttaggtctaacatttaagtctttaatccatcttgaattaatttttgtataaggtgtaaggaagggatccagtttcagctttmtacatatggctagccagttttcccagcaccatttattaaatagggaatcctttcccgattgcttgtttttctcaggtttgttaaagatcagatagttgta

SEQ ID NO: 284759 - DNA, 201 bp, Homo sapiens
aatacacagaattaactagggaaattgttagagaactcagatacattgtccccttctttaaacctagtgtattagtatctttaggaagtagaatctaaacrtatatgtttttaaagccccctatgtgattctgatgagcctctctgcttaagaaccatattattattattattattattattattattattattattatta

SEQ ID NO: 284760 - DNA, 201 bp, Homo sapiens
gtcttatgattcccttcaaaaatgggatttcatccaacccttctattcttaaacaatgtgtccaaacctacctttccagcctcatgggctcttccttcctrtccccttgtctttctttggtggacatcttcattttttcgagaagcagtttagatgtcacctctgcacagtttcatttctgttgggctgttgtatcactgc

SEQ ID NO: 284761 - DNA, 201 bp, Homo sapiens
attagattagaaatatttgaattccttccatatacaaggcagctgtatggttttcattttactggtcatgtgaaattacttgtaaactggtaatgaatgtmtatattttgagaaaaatctaagtcttttctgagaggtttttctgctacagtgcatatagtctctatgtagaattaccttgtttggtaatactcactttga

SEQ ID NO: 284762 - DNA, 201 bp, Homo sapiens
gattgttcagcccccacttgtaagtgagaacatgtggtgtttagttttctgctcctgcattagtttgctgaggatgatggtttccagcttcatccatgtcyctgcaaaggacatgatctcattcctttttatggctacatagtatcctatgatgtatatgtaccacatcttctttatccagtccatcactgatgggcattt

SEQ ID NO: 284763 - DNA, 201 bp, Homo sapiens
ggtcatgtgaaattacttgtaaactggtaatgaatgtctatattttgagaaaaatctaagtcttttctgagaggtttttctgctacagtgcatatagtctmtatgtagaattaccttgtttggtaatactcactttgacatgtgttaattccattattttttcatgatgttaatacacatttttagtacaggttttgtctt

SEQ ID NO: 284764 - DNA, 201 bp, Homo sapiens
tgttcagcccccacttgtaagtgagaacatgtggtgtttagttttctgctcctgcattagtttgctgaggatgatggtttccagcttcatccatgtccctgcaaaggacatgatctcattcctttttatggctacatagtatcctatgatgtatatgtaccacatcttctttatccagtccatcactgatgggcatttggg

SEQ ID NO: 284765 - DNA, 201 bp, Homo sapiens
tgtgggagcaacatttatagtactgggatgagagtgttgtgcaaatgaatcaacatcacttcctttagtaaagtggaaactcctttttcatttttcttttytcctcccctttggacaaaattttagcataaggctatatcctggtgtcttttttccccttttatataataagggcaaagagatagggtattacttttatgt

SEQ ID NO: 284766 - DNA, 201 bp, Homo sapiens
gtttagttttctgctcctgcattagtttgctgaggatgatggtttccagcttcatccatgtccctgcaaaggacatgatctcattcctttttatggctacrtagtatcctatgatgtatatgtaccacatcttctttatccagtccatcactgatgggcatttgggttggttctgtgtctttgctattgtgaatagtgctg

SEQ ID NO: 284767 - DNA, 201 bp, Homo sapiens
ggacaaatcgagttaaaaaattataattgagatggaattaaattaccgagaacctgctgtctcttttttgaactttgacctcttacagtttttttttttttggtttcagtcattcccatgatatggtgaagtatgggggaggcctaaattctaaaatcctctttttgtttattaattatctgacctcggaaaagtcataac

SEQ ID NO: 284768 - DNA, 201 bp, Homo sapiens
tagcattaggagatatacctaacgttaaatgacgaattaatgggcgcagcacaccaacatggcacatgtatacatatgtaagcaacctgcacattgtgcayatgtaccctaaaacttaaagtatacataaaacaaaacaaaacaaaacaaaacaaaaaaacagagcactaagaccattttatgccctgtaattaggtttca

SEQ ID NO: 284769 - DNA, 201 bp, Homo sapiens
tggggggagcggggaggaatagcattaggagatatacctaacgttaaatgacgaattaatgggcgcagcacaccaacatggcacatgtatacatatgtaascaacctgcacattgtgcacatgtaccctaaaacttaaagtatacataaaacaaaacaaaacaaaacaaaacaaaaaaacagagcactaagaccattttat

SEQ ID NO: 284770 - DNA, 201 bp, Homo sapiens
cctgaatggtattgcctaggttttcttctagggtttttatggttttaggtctaacatttaagtctttaatccatcttgaattaatttttgtataaggtgtraggaagggatccagtttcagctttctacatatggctagccagttttcccagcaccatttattaaatagggaatcctttcccgattgcttgtttttctcag

SEQ ID NO: 284771 - DNA, 201 bp, Homo sapiens
atggacacaggatggggaacatcacacaccggggcctgttgtggggtggggggagcggggaggaatagcattaggagatatacctaacgttaaatgacgarttaatgggcgcagcacaccaacatggcacatgtatacatatgtaagcaacctgcacattgtgcacatgtaccctaaaacttaaagtatacataaaacaaa

SEQ ID NO: 284772 - DNA, 201 bp, Homo sapiens
tgttcactctgatggtagtttcttttcctgtgcagaaactctttagtttgactagatcccatttgtctattttggtttttgtagaatttcctggtttttttatttttttttctttcttttcttttaattattattatactttaagttttagggtacatgtgtacaacgggcaggttagttacatatgtatagatgtgccat

SEQ ID NO: 284773 - DNA, 201 bp, Homo sapiens
tagtacacagtttgaactcatttctgtctgattctaatgtgtgaattgctcagtactgtattgagcaatatatagcccatctataaatgagcaatatatawccaagcaattcatccttgattctagtaatttatatatttgtaactagaggtattgaaactagatcacataagcctagcatgactccttgagtttcgtaag

SEQ ID NO: 284774 - DNA, 201 bp, Homo sapiens
gatggggttgtttgatttttttcttgtgaatttgtttaagttctttgtagattctggatattagccctttgtcagatgggtagattgtgaaaattttctcycattctgtaggttgcctgttcactctgatggtagtttcttttcctgtgcagaaactctttagtttgactagatcccatttgtctattttggtttttgtag

SEQ ID NO: 284775 - DNA, 201 bp, Homo sapiens
gtaaatagtacacagtttgaactcatttctgtctgattctaatgtgtgaattgctcagtactgtattgagcaatatatagcccatctataaatgagcaatatatatccaagcaattcatccttgattctagtaatttatatatttgtaactagaggtattgaaactagatcacataagcctagcatgactccttgagtttc

SEQ ID NO: 284776 - DNA, 201 bp, Homo sapiens
tcccacctatgagtgagaacatgtggtgtttggttttctgtccttgcaatactttgctgagaatgatggtttccagcttcatccatatccctacaaaggamatgaactcatccttttttatggctgtattccatggtgtatatgtgccacattttcttaatccatctatcattgatggacatttggattggttccaagtct

SEQ ID NO: 284777 - DNA, 201 bp, Homo sapiens
atgtaaatagtacacagtttgaactcatttctgtctgattctaatgtgtgaattgctcagtactgtattgagcaatatatagcccatctataaatgagcaatatatatccaagcaattcatccttgattctagtaatttatatatttgtaactagaggtattgaaactagatcacataagcctagcatgactccttgagtt

SEQ ID NO: 284778 - DNA, 201 bp, Homo sapiens
actctgacactgacccttcctatttgagctccttaggatctagaccaaatatatctttagtgaaatctagtgggtctaaagtgtactcttactcctctgtrctcacagcagttattctctctctatactactaatttggcactgattatatgctgtcttttattgtcattcatgtatgtaaataatattttaagggctaac

SEQ ID NO: 284779 - DNA, 201 bp, Homo sapiens
catgtaaatagtacacagtttgaactcatttctgtctgattctaatgtgtgaattgctcagtactgtattgagcaatatatagcccatctataaatgagcaatatatatccaagcaattcatccttgattctagtaatttatatatttgtaactagaggtattgaaactagatcacataagcctagcatgactccttgagt

SEQ ID NO: 284780 - DNA, 201 bp, Homo sapiens
gcacattgattttgtatcctgagactttgctgaagttgcttatcagcttaaggagattttgggctaagacgatggggttttctagatatacaatcatgtcrtctgcaaacaggaacaatttgacttcctcttttcctaattgaatgccctttatttccttctcctgcctgattgccctggccagaacttccaacactatgt

SEQ ID NO: 284781 - DNA, 201 bp, Homo sapiens
gctgattgaaaatcagtcaaatcatggaggctgcataatttgagggacccagtgtaccatgaaaatttgaggcgtcttgttcaaaaagcaggaatatattrtccaataaggattcacataaacttcctttcttctgtggtctctcttgacttggcctggtgtgttctatttgctatttaatgttttaagttaaaaaaatta

SEQ ID NO: 284782 - DNA, 201 bp, Homo sapiens
agtttatacactttagctggaactttttataatttcagaggggttattgaactgactgttggcattggatataagaatttggcttcaggcatttgctattraggttttaaaaatgtttaaatatcttactgtaatttttttgttttgttatttgggacaatgcagctgttttctcctagggtataattagttgagaatgga

SEQ ID NO: 284783 - DNA, 201 bp, Homo sapiens
acatgtaaatagtacacagtttgaactcatttctgtctgattctaatgtgtgaattgctcagtactgtattgagcaatatatagcccatctataaatgagcaatatatatccaagcaattcatccttgattctagtaatttatatatttgtaactagaggtattgaaactagatcacataagcctagcatgactccttgag

SEQ ID NO: 284784 - DNA, 201 bp, Homo sapiens
agtaccatgctgttttggttactgtagccttgtagtatagtttgaggtcagctagtgtgatgcctccagctttgttcttttggcttaggattgacttggcratgcgggctcttttttgattccatatgaactttaaagtagttttttccaattctgtaaagaaagtcattggtagcttgatgggaatggcattgaatctgt

SEQ ID NO: 284785 - DNA, 201 bp, Homo sapiens
tatcaatactctccaaattgaccaacagattcaacagaaccccagtcaaagtcccagaagggggttggatgtggtggctcatgcctgtaaccccagctctytgggaagcctaggagggaggatctctttagccaggagttcaaaaccagcttgggtaatatagtaagactccagctccaccaaaaaaaaaaaaaaaaaaaa

SEQ ID NO: 284786 - DNA, 201 bp, Homo sapiens
ctatgcagtatagaagaaaaagcagaagtcatggaattagaagtcttgtatttatataatactagttctatcatgagtgagttggatagattttggcaagscttttaaactatcttagctgtagttttcttatgttgaatataaacatacttgtttttaactctcaggaatttcgtgaggaacaagtttaagttttatata

SEQ ID NO: 284787 - DNA, 201 bp, Homo sapiens
aacatgtaaatagtacacagtttgaactcatttctgtctgattctaatgtgtgaattgctcagtactgtattgagcaatatatagcccatctataaatgagcaatatatatccaagcaattcatccttgattctagtaatttatatatttgtaactagaggtattgaaactagatcacataagcctagcatgactccttga

SEQ ID NO: 284788 - DNA, 201 bp, Homo sapiens
aagggatccagtttcagctttctccatatggctagccagttttcccagcaccatttattaaataaggaatcctttccccattgcttgtttttgtcacgttygtcaaagatcagatagttgtagatatgcggcattatttctgagcactctgttctgttccattggtctatatctccgttttggtaccagtaccatgctgtt

SEQ ID NO: 284789 - DNA, 201 bp, Homo sapiens
tcctttaaagaatatttgtttttacaggtagttacttgtgagtcagtttagttgtatccaggcacttttaaaactttgttaggacaggtctagagtaacckttgtttgagagccagtttagtcctaccattaatgcatgcctattataggctcactaatgaatgcccgttgtggtaaatgaggttttcctgggtggttgga

SEQ ID NO: 284790 - DNA, 201 bp, Homo sapiens
aaggaagggatccagtttcagctttctccatatggctagccagttttcccagcaccatttattaaataaggaatcctttccccattgcttgtttttgtcasgtttgtcaaagatcagatagttgtagatatgcggcattatttctgagcactctgttctgttccattggtctatatctccgttttggtaccagtaccatgc

SEQ ID NO: 284791 - DNA, 201 bp, Homo sapiens
ttcctatctatgagtgagaacatgcggtgtttggttttttgtccttgcgatagtttgctgagaatgatggtttccagcttcatccgtgtccctacgaaggrcatgaactcataattttttatggctgcatagtattccatggtgtatatgtgccacattttcttaatccagtctatctttgttggacatttgggttggttc

SEQ ID NO: 284792 - DNA, 201 bp, Homo sapiens
taagggcaaagagatagggtattacttttatgtcactggtttttatctaaaaataaaaaattctcagccgattgtatgctttcttcactttgtgttatggytgggtggagataatccaggtaaagcagcattttaatgttttttcgtcctaacatttgtggaagtatatgtagccctcaatttgtgaaagcggatggaatg

SEQ ID NO: 284793 - DNA, 201 bp, Homo sapiens
  misc_feature (1)...(201): n = A,T,C or G
ttagctgtgtgggaaagcatgtcattctccttgttttggagatgcagggcatgaagagagctgttgaacatgcccggagctgcactgtagttatggattangtgagaaggtgaatgatgttcaccatttttatagtccatgtttggattgctcagattgggtggtaatctagaggtggctcccatgaagtggccatccatc

SEQ ID NO: 284794 - DNA, 201 bp, Homo sapiens
tacaggtcccaaagaaaacgtgtgtgtgtgtgtgtatctttctcctctcagtattcagatttgtgttggtggcctagttgatccagatcagtgacatatayattaccataaaaccatcctacctgttattaatgaaaatagcaacaaaatggtacagggagataagacaaattgacattgcccacccaccctttctctgag

SEQ ID NO: 284795 - DNA, 201 bp, Homo sapiens
atggctttccaactgttcagatactactggataaaatggttatcccttcccaattgaatcatctttgttaaaaatcaattgaccatattatatatgttggrtctacttaaggattctctattctgatccacttgtgtataatggtgtgtatgtaggtatgtcaatatcaaactttttaaaaattttatttatttattgaga

SEQ ID NO: 284796 - DNA, 201 bp, Homo sapiens
caaacatgtaaatagtacacagtttgaactcatttctgtctgattctaatgtgtgaattgctcagtactgtattgagcaatatatagcccatctataaatgagcaatatatatccaagcaattcatccttgattctagtaatttatatatttgtaactagaggtattgaaactagatcacataagcctagcatgactcctt

SEQ ID NO: 284797 - DNA, 201 bp, Homo sapiens
ctctacttccataagatcaacttttggttcccacatatgagtgaatacatgcaatatttgttattctatgcctggctatttcacacaacataatgaccacmagttccatccatggtgctgcaaacgacaggatttcattttttattatggctaaataatattccattgtatatatgtgtgtgtgtgtgtgtgtgtgtgtgt

SEQ ID NO: 284798 - DNA, 201 bp, Homo sapiens
cacccactgtccaaccagtcccaatgagatgaaccaggtacctcagtttgaaatacagaaatcacctgtcttctgcgtcgatctcactgggaactgtagaygggagctgttcctattcggccatcttggaggcaacctcctatttttttaactattaaaataaactttaagtcattatgtatatatataaaacatatatta

SEQ ID NO: 284799 - DNA, 201 bp, Homo sapiens
ttcactaatagtaccagaaagacctcaagtccctctgagtctcagctgtggtcaaaggaggaaaatgccatcctagatttttctgtaacatatttgggacstatttggagagaagatagaggcatacaactttgagtgcttatagaaaacactagtttcaatttgtactgcatgtcacctactgacccgtattgccctcag

SEQ ID NO: 284800 - DNA, 201 bp, Homo sapiens
ttttcattttagggaaaaaaggaagtgcctcttgaagctaacctcagtataactccatttttctttacctttctggtttgtcacatttcagctactgttakgattgttatgagatccagagataatttcttttttaatcatagttagtactttggagtaggtataaaagcaaaggcagtcttgcacatcctgttaaggcaa

SEQ ID NO: 284801 - DNA, 201 bp, Homo sapiens
taggcctgctgagctgtggtgggctctgcccagttcacacttccctgcggctttgtttacactgtaagcatagaactgcctattcaagtctcagtaatggstgacacctctccccctaccaagctcccacatcccaggttgatctcagactgctgcgctagcagtgagcaaggctctgtgggcatgggacccgccgagcca

SEQ ID NO: 284802 - DNA, 201 bp, Homo sapiens
cggggtttcaccatattggtcaggctggtatcaaattcctgacctcgtggtccacccacctcggcctcccaaagtgctgggattacaggcgtgagccaccrtgcccagccaactatacaatttctttcttaaactttgctaacatggtaaagcatatttatcacttatccagtcaatatcttttaaacatatactgtatat

SEQ ID NO: 284803 - DNA, 201 bp, Homo sapiens
tgttgatgttggtgctattcctttctgtttgttagttttccttctaacagacaggtccctcagctgcaggtctgttggagtttgctggaggtccactccasaccctgtttgcctgggtatcaccagcagaggctgcggaacagcaaatattgctgcctgaaacttcgtcccagagggggcacctatctatatgaggtgtct

SEQ ID NO: 284804 - DNA, 201 bp, Homo sapiens
tatttttagtagagacggggtttcaccatattggtcaggctggtatcaaattcctgacctcgtggtccacccacctcggcctcccaaagtgctgggattayaggcgtgagccaccgtgcccagccaactatacaatttctttcttaaactttgctaacatggtaaagcatatttatcacttatccagtcaatatcttttaa

SEQ ID NO: 284805 - DNA, 201 bp, Homo sapiens
caatcctttgtggagaagaggcattctggtttttggaattttcagcctttctgctctggtttctccccattttgtggttttatctacctttggtctttgaygttggtgacctatggatggggttttggcatggatgtcctttttgttgatgttggtgctattcctttctgtttgttagttttccttctaacagacaggtcc

SEQ ID NO: 284806 - DNA, 201 bp, Homo sapiens
gtggcatattcagcactattcacaataacaaagataggggatcaacccaagtgtccatcaatagatgaatggatgaaggaaatgtgttatacacacaatgyaacactactcagccataaaaaatgaatgaggtgtcatttgcagcaacatggatggaactggagtggtgccatctcagctcactgcaacctctgcctccca

SEQ ID NO: 284807 - DNA, 201 bp, Homo sapiens
tttgttattatcgaccttctgaagcctacttttgtcaactcatcaaagtcattcttcatgcagttttgttctgttgctggtgaggagctgcaatcctttgwggagaagaggcattctggtttttggaattttcagcctttctgctctggtttctccccattttgtggttttatctacctttggtctttgacgttggtgacc

SEQ ID NO: 284808 - DNA, 201 bp, Homo sapiens
gttatgtggtgaattcacatacacaaaaagtggcatattcagcactattcacaataacaaagataggggatcaacccaagtgtccatcaatagatgaatgratgaaggaaatgtgttatacacacaatgtaacactactcagccataaaaaatgaatgaggtgtcatttgcagcaacatggatggaactggagtggtgcca

SEQ ID NO: 284809 - DNA, 201 bp, Homo sapiens
ttttttttttttgctttccatttgcttggtagatcttcctctatccctttattttaagcctatctgtgtctctgcacgtgagatgggtcttctgaatacascacactgatgggtcttgactctttatccaatttgccactctgtgtcttttaattggggcatttagcccatttacagttaagattaatattgttatgtatg

SEQ ID NO: 284810 - DNA, 201 bp, Homo sapiens
aaatgaagaaggcacagctatgagaaatgatgcacgtagtgttgatattacatgtttaaactcacatgtgttcggtcttatatgctgttcggccctggggygtctaagtcacccaaataagattgtaaatccttgagaacaattcattctttctttaatacacagtgcctaatatagagccgagtacttaatagaggctaa

SEQ ID NO: 284811 - DNA, 201 bp, Homo sapiens
tattactaacattttttgaatgcttccggtatactagatataatattaactaccttatatgcattacttcattacatcctgaggcagtatttaatgtaggwtgatgtatagctaaggtacagaagtgagtcactgcttctagctgtcatagaaacccatcctgcctccatattcaactctgtggttccttacttgtcctag

SEQ ID NO: 284812 - DNA, 201 bp, Homo sapiens
cactccaccgagctacaggagccaggaacaggtgggagccccacccccttccgagttggcagggtgggatcaccaccttcctggacacagctgcagccacmcagccacagctgtggacctgggcatccctgcactctcgggggcctgagaagcccccacccacctctgcaggctcggaagtgcctgctactgctgcctggc

SEQ ID NO: 284813 - DNA, 201 bp, Homo sapiens
acaagataatgcaatttatgtgttttcactttgctcttttttaacttaatggtctttggttttctcatgtactagcgtgtatatatgtgtgtgtgtgtgtkcatatgtgtgttagtttttagcatatgcagtaatacctacataatgcttattttcatacctttgtatgtattctgaaattgtatgtaaaattttttggcc

SEQ ID NO: 284814 - DNA, 201 bp, Homo sapiens
ttagcacgagcggagtgcagcctgccaggccgagtgggtggaaggagcccagcgggccgagcaaaactcgggaaaaggcgccactggccacagaggtttcmagctggaaaagcgacagctgaagaatcctgtggcactattactgagccataggtttaaagtatttcaaaattttactagatattatcaaattgccttttg

SEQ ID NO: 284815 - DNA, 201 bp, Homo sapiens
catcctccatttttttttaacctcagtgagatccctgtcctcttactgggttcctttctctctgctgtggtttggaatgtgtattgagcagaaaaccaggrcaatcacatctcttctcatttgtttacttctctctgggatcacagtcctgtactgcctgttgtttaatgtctgaaacgagtgatttcatatattttgtcc

SEQ ID NO: 284816 - DNA, 201 bp, Homo sapiens
aattatctcaataaacctaagttctataattgatattgtaggtaactttttgaaaaaattaaaaaattcactcacactgagtagtttctcttttgttgatytgaatttattaatgtaccaaattttaaaaatgtcttctcttgcttaactgtcaagttttaagaacaaaaatataaaagcaaaaaagttagcttctctctg

SEQ ID NO: 284817 - DNA, 201 bp, Homo sapiens
agacaaattatattttaaatgaagaaagtacattctactggtttccctctattccctttttcttccctctcctgtcacctctctttcactttcttcctctycctttcactccttccttccctcctttcttctttccttacttccatgattttgatggtccaactgctgttgggaactgttttgaaagcatcctttgactag

SEQ ID NO: 284818 - DNA, 201 bp, Homo sapiens
aactgttgggattacaggcgtgagccaccacgcccagcctgaaatattactcttaacaagcacctctgctctggctatgagaaagtatctctcccaggcaraaagaagcaggcagtctcccaatggacaagcttagctaaaacgcatgctactaccgaagataggcagtttcaatcctgcttgaattggactgtcagtttt

SEQ ID NO: 284819 - DNA, 201 bp, Homo sapiens
caatgcgggctcttttttgattccatatgaactttaaagtagttttttccaattctgtaaagaaagtcattggtagcttgatgggaatggcattgaatctrtaaattaccttgggcagtatggccattttcatgatattgatttttcctacctatgagcatggaatgttcttccatttgtttgtatcctctttttcttcat

SEQ ID NO: 284820 - DNA, 201 bp, Homo sapiens
aattatttcagcaacccaaatatggtttagccggtatatatttcttttcggtccttagatggtggcaagttttaaaagttgaattaactttaagttgggarttaaagttagctttgtaaaaaatgcgtaagtttaaaagtggataaggatgtttattattgctgtatagaacaatgtgtctattgctttaattctgttttg

SEQ ID NO: 284821 - DNA, 201 bp, Homo sapiens
gttaatagaactacctgtccaaactggaaatttgttgtatctccaaattcttttctcatccatacatctagtcaccaagttctctaagctccaccttagtkagtgtacatacttaattcctgccatttctttaggtccttaaaatctcttgcccaatgattgcaatagctttcttctctctctaatcttacatagatttaa

SEQ ID NO: 284822 - DNA, 201 bp, Homo sapiens
gcctggccatcattatggattttatttgcatttcccaagtgactagtcaggttgagcatcttctcatatacttattgggcatttgtatttcttttttggargaatgtctattcaagttctttgttcatttttaattggtatgattgtttcattgaataacacagttattttaaagtctttacctagtaaatctgtgttttg

SEQ ID NO: 284823 - DNA, 201 bp, Homo sapiens
tgaactcctgggcttaagtgatgctcctgctttggcctctcaacgtgctgggattacaggcacgagccactgctctcagccattacattagtttaaaatgkctaaacaattaagagaaacagaaacaaagtatggcccctataaagtagtcaatagaggctattcctgaaaaagtccagatgttaggccactggacaaaga

SEQ ID NO: 284824 - DNA, 201 bp, Homo sapiens
aacttgacacagtctttttttaaacaaaacctacaactagtatcatacttaatggtgaaaaactaaaaatttctttctaaaatgaataagacaaggatgtytgcagttgttaattgtacctgacattttctggaagttctaactgggtaatcaggcaagaaaaaaacataaagccacccagattggaagtgaagaaacaaa

SEQ ID NO: 284825 - DNA, 201 bp, Homo sapiens
ccagcaccatttattaaatagggaatcctttcccgattgcttgtttttctcaggtttgttaaagatcagatagttgtagatatacagcgttatttctgagrgctctgttctgttccattgatctatatctctgttttggtaccagtaccatgctgttttggttactgtagccttgtaatatagtttgaagtcaggtagcgt

SEQ ID NO: 284826 - DNA, 201 bp, Homo sapiens
gaacctgggaggtggaggtcgcggtgaaccaagatcgcgccattgcactccagcctgggcaacaagagcgaaactccatctcaaaaaaaaaaaaaaaaaaratttctgtgtagcaccgtgaacattcatctattcttttagtgttatacaggattatcagcacagtagaggaatattaaaaatgaggctttttccaactga

SEQ ID NO: 284827 - DNA, 201 bp, Homo sapiens
gagtcaattaaatctctttcctttataaattacccagtcttgcatatgtctttattagcagtgtgagaacagactcaacagctgctaagctgtcctcagcycaacttaccaatgtgctgccattctgcatgttgtgcaagtctctgtgggcatgagcacagaagtccaaacatgcagtgacccctgagaatggacggcctt

SEQ ID NO: 284828 - DNA, 201 bp, Homo sapiens
ggttataggtatgtgacttcatttgtttgttctgtattttgttccattgatctatgtgtttatttttgtaccagtaccatgtttatttttataccagtackacagctatgtggtataatttgttgctgagtaatgtgatgcctccagatttgttctttttgcttaggattgctttgactattctggcttttgtttggttcc

SEQ ID NO: 284829 - DNA, 201 bp, Homo sapiens
cattcaattagtacggagacagtccctgacctataatggcttcgttttttttttactttaggatgggtttattgggggtattaaatggattttcattttayaacggatttataggaatgtagtctcctcataagtcaagaagtatctatactctagactacatgccacccaaaagttgttaaatttatcaatttgcaaatt

SEQ ID NO: 284830 - DNA, 201 bp, Homo sapiens
aatataatttcccatcaaaatctctgaaatttgagaagtaaagattcttgccatgcatttattctatcattcttacaaactatattaaatggtaactaacrgttgatgaggaaaagtcctgtaaagtattccagctaataaatgcaaaaggaattttacaattagaaatgatcactttacacatgtcagcaaaaatggcag

SEQ ID NO: 284831 - DNA, 201 bp, Homo sapiens
tatctatgagaaacaatacaaactttataggagtagttaaaaagaaataaacaacaaccaccagaaacagtaacatattctgggcagggggtagaatctgrttttcagatttaccagattatattattttatttatttttatttttgtagagacagggtctcactatgctgcccaggctagtcttgaactcctgggcttaa

SEQ ID NO: 284832 - DNA, 201 bp, Homo sapiens
tgtaatcccagcactttgggaggccaaggtgggcggatcacttgaggccaggagttccagaccagcctggccaacatggcgaaaccccgtctctactaaamgtacaaaaatcagcaggatgaggtggcacatgcttgcagtcccagttactcaggaggctgaggcatgagaatagcttgaacctgggaggtggaggttgca

SEQ ID NO: 284833 - DNA, 201 bp, Homo sapiens
aatagttttagccataaatgtgaagtagatttttttctagctttgttgagttataattgacatataataaactgtacctatttaaagtgtacacaaattgrtgatttttgatataattacatgcaaaattattatcaaaaataagaaaatgaacatatttatcacccccaaatgttttcttacacttctttgtaatctctt

SEQ ID NO: 284834 - DNA, 201 bp, Homo sapiens
tcctagctacactatcatgtcattagtgaacagagatcatttgacttcctcttttccaatttagataccttttatttccttctcttgggtgattggtctggctaggacttccagtactatgttgaatgggagtggtgagactggacatccttgtcttattctggttcttagggggaatgctttcaactttttcacatttgg

SEQ ID NO: 284835 - DNA, 201 bp, Homo sapiens
gcattttaacaatattgattcttccaatccatgagcatgggatgtttttccctctgtgtcatctatgattcctttcatcagtgttttgtagttcttgcagrgatgttttacccacttgattaaatgtattcctgcggggtgtgtgtgtgtgtgtatgatgcgtgtgtgtgtgtggctgttgcaaatgagattttttaattt

SEQ ID NO: 284836 - DNA, 201 bp, Homo sapiens
tggttccatataaacattaggattgttttttcctaatgctgtgaaaaaatgacattggtaatttgataggaattacactgaatctccagattgctttgagyaatattggcattttaacaatattgattcttccaatccatgagcatgggatgtttttccctctgtgtcatctatgattcctttcatcagtgttttgtagtt

SEQ ID NO: 284837 - DNA, 201 bp, Homo sapiens
agtaccatttattgaatagagtctcctttccccattatttttttgttatttgttgaagatcagttggttataggtatgtgacttcatttgtttgttctgtrttttgttccattgatctatgtgtttatttttgtaccagtaccatgtttatttttataccagtacgacagctatgtggtataatttgttgctgagtaatgt

SEQ ID NO: 284838 - DNA, 201 bp, Homo sapiens
aaatttgtctatttttgttttcattccatttgcttttggggtcttcatcataaattctttgcctaggcgatatccagagagtttttcctagattttcttcrggaatttttatagtttcagatcttaacatttaggtctttaatccatcttgagttaatttttgtatgtggtgagagataggggtccagtttcattcttcag

SEQ ID NO: 284839 - DNA, 201 bp, Homo sapiens
tgcaggggtacctcatgaaagagcatagaaaatgaaacataacagcaggactgtatgtaaggttgctaagataggtatgagacatacttctaaggagcagytattgagaatttattctcagctttgttgtttatctcattatgggcttgcagctttgccatttgtaacctttagtcttatgtagaaaaacttaatataaat

SEQ ID NO: 284840 - DNA, 201 bp, Homo sapiens
tccacagaagatactggggatagaggaataggttaaacaaaagaaccaagatgaaatcggccaaatccagaatgtggggaattttacagagaaaatcacastttctttaaaaaacaaattcaaattcataaagaaaggggaagggctattataaataaaaagaggcttgtgaatcacagaatttatcttctaaatggagag

SEQ ID NO: 284841 - DNA, 201 bp, Homo sapiens
ccaaagtaggtactcaataaatgttttactgtatgaatgaatgcctgttaatagaaaaaaagaagcagtaacgggaagactgggaaagaacagaacctctmtaggaaagttacttaggagattgctcagagtaagagaaggtatttgaaagaagagaaccgtgaagtagatggggttatatttgaaaataaatgccattca

SEQ ID NO: 284842 - DNA, 201 bp, Homo sapiens
ggaatcttgagtgcaggtggcaggtgttctggtcctgttgttaggtcctctgatggtccacatgtgagccagaagccacaggcagggcatgtcaactcctrggcccttgggacagtgttcttggatgccggtggcaggcaggctgggacttttgtccaatctgcatgttcatcagtgtttatcaatatctcctactaaacc

SEQ ID NO: 284843 - DNA, 201 bp, Homo sapiens
tgcacgttatgcacatgtaccctaaaacttaaaagtatcataataattacctttattgcatttgtcacaaatgccatgccatttattataataataataattcttattacctttattgcatttgtcacaaatgccataccatttattaacatgacactctccatggtattgactgtttcctataaatctctgttactggcc

SEQ ID NO: 284844 - DNA, 201 bp, Homo sapiens
ccacaagcccctccctcaacacatggggattacaacttggattacaaatcattatgagatttgggtggggacacagagccaggccatatcacttactctgrtagctcacacgagagctcacatgagagagcctggcaactcccattcttgctctcttgcacccaccctctcttgcctgctctcttgccatgtgacacacct

SEQ ID NO: 284845 - DNA, 201 bp, Homo sapiens
taaaagtgaatgtgaatttattccctgactgaacttggaagatgagtatgtctgcatataccacccacttgcagatgcaattataccagcaactgagagayggaggaaatactataaatctgttttaaatattatgatccttagggacatactggcctgttggccttgggcctatgtaatttctgataatgttttctttgg

SEQ ID NO: 284846 - DNA, 201 bp, Homo sapiens
ctgcacgttatgcacatgtaccctaaaacttaaaagtatcataataattacctttattgcatttgtcacaaatgccatgccatttattataataataataattcttattacctttattgcatttgtcacaaatgccataccatttattaacatgacactctccatggtattgactgtttcctataaatctctgttactggc

SEQ ID NO: 284847 - DNA, 201 bp, Homo sapiens
gataatgttttctttggattattgttatctataaaactttgtgattatgtggaaagattaaagtacattatagtattaacttacatttctgcttttttttwaaaaaaaaattttagacttgggaagatccccatgaaaaagataagagcacgaactgctttggagataatgatcctattgatgtttgcgaaataggctcaa

SEQ ID NO: 284848 - DNA, 201 bp, Homo sapiens
cctgcacgttatgcacatgtaccctaaaacttaaaagtatcataataattacctttattgcatttgtcacaaatgccatgccatttattataataataataattcttattacctttattgcatttgtcacaaatgccataccatttattaacatgacactctccatggtattgactgtttcctataaatctctgttactgg

SEQ ID NO: 284849 - DNA, 201 bp, Homo sapiens
aattctcatgaaagtcatctgatactttttcattttttgtgtgcctgcttccaggttgccacatcctactgaataaaaacaaaatccacaatttcagagaytgatgctccccatcaattcttctatatgtctttggtcagttctttcttctattttctactacgtttattgttactatttcttattctctgcagacattca

SEQ ID NO: 284850 - DNA, 201 bp, Homo sapiens
tcattctcagcaaactatctcaaggacaaaaaaccaaacaccacatgttctcactcataggtaggaattgaacagtgacaacacgcacacaggaaggggarcatcacacactggggactgttgtcgggtggggggaggggggagggatagcattaggagatatacctaatgctaaatgacgagttaatgggtgcagcacag

SEQ ID NO: 284851 - DNA, 201 bp, Homo sapiens
  misc_feature (1)...(201): n = A,T,C or G
ctaacagcaagaactcactcattactctgaggaggcaccaagccattcatgagggatccacccccattatccatacacctcccattaggcctcacttccancactgcggatcaaatttgaacatgagatttgagaggacaaatcccctcaaaccatagcagggtataactcaagaattgatttgtgcctctttaacatggt

SEQ ID NO: 284852 - DNA, 201 bp, Homo sapiens
ggtgtcccatcctggtttccccagcacgttaagattatcattctcagcaaactatctcaaggacaaaaaaccaaacaccacatgttctcactcataggtaggaattgaacagtgacaacacgcacacaggaaggggaacatcacacactggggactgttgtcgggtggggggaggggggagggatagcattaggagatata

SEQ ID NO: 284853 - DNA, 201 bp, Homo sapiens
ttagtgtgtctttttgtagtaaaaactaaggcctgtagatgcagagtattaaaggttggaaataaagagaaccagtctggtatttttgctggtaaggaaaatcatgaagaattggccctaaacataacaatattgtagagtttaagaattttccacttgggtacttaatttctcaacatatggaaccatattgctaggtaa

SEQ ID NO: 284854 - DNA, 201 bp, Homo sapiens
aaaaagtgatggtagtgggaaagtcaaaggtcttccttcgacttgtgataggaatgctggttaatcaggaagatattcttaagaaccacctgtatatatggctttgtatgattcagggattttttaagagacctaaggaccagagtgtggtgattagaaatgtattggccattacttatagattgtaaggtaataatcaca

SEQ ID NO: 284855 - DNA, 201 bp, Homo sapiens
agttgaggccaggagtttaaggttgcagtgagctatggtcacaccactgttcttcagcctgggtggcagagtgaaaccctctcttaaaaaaaaaaaaaaaagtgatggtagtgggaaagtcaaaggtcttccttcgacttgtgataggaatgctggttaatcaggaagatattcttaagaaccacctgtatatatggcttt

SEQ ID NO: 284856 - DNA, 201 bp, Homo sapiens
aaatagacctgcattctgtctgccattttcaattagagatctgtactacttttttaaacctgactgatcttggagagagagagagaaaaagagagagagagtctgtgtgtgtgtgtgtgtgtgtgtgtgtgtgtgaatacaccataaattgcatataagttagttatttatcaaagaaaataactaaattgaatgatgttt

SEQ ID NO: 284857 - DNA, 201 bp, Homo sapiens
ttgttaatttctcccagctagaatgcagacttcatgagggcaggtattctgtctcttttgttcactgatacattctgactacccagcttaatgcctgccayggagtaggtgatcaataactgtgaaatgaataaattaatgcattgtgtatgtgtgtcacatttgtttcataggcgtgtgtggatactttagctgttctat

SEQ ID NO: 284858 - DNA, 201 bp, Homo sapiens
tcccagctagaatgcagacttcatgagggcaggtattctgtctcttttgttcactgatacattctgactacccagcttaatgcctgccatggagtaggtgwtcaataactgtgaaatgaataaattaatgcattgtgtatgtgtgtcacatttgtttcataggcgtgtgtggatactttagctgttctatgattcgtcttg

SEQ ID NO: 284859 - DNA, 201 bp, Homo sapiens
tcttttcggtccttagatggtggcaagttttaaaagttgaattaactttaagttgggagttaaagttagctttgtaaaaaatgcgtaagtttaaaagtggwtaaggatgtttattattgctgtatagaacaatgtgtctattgctttaattctgttttgttttgtttgtttgtgtctttgcagagaatgtaactggtcact

SEQ ID NO: 284860 - DNA, 201 bp, Homo sapiens
ctttttcttatttagttgccaaaactatttctaaagtctggaagctaatcttttgtcatttttgtgaaaccaatattaagattttgaacttctgcttcttratatttcttctccagtgtttgttcttttctagttatttgtctgttaatagttacacacataagactccacaagagggcataaccaaagcttaaatttgtc

SEQ ID NO: 284861 - DNA, 201 bp, Homo sapiens
ggttggaaataaagagaaccagtctggtatttttgctggtaaggaaaatcatgaagaattggccctaaacataacaatattgtagagtttaagaattttcyacttgggtacttaatttctcaacatatggaaccatattgctaggtaatgttgaaattggagttctgaggaccaaccaaccaacagaaatagtcaccacaa

SEQ ID NO: 284862 - DNA, 201 bp, Homo sapiens
atctctcaagtgttctctgaatttcttgtatctgggtgaaaaacatggaacaattcatgaattcacatatcatccttgcatcttatagccagagaagtttwttcctttaattaataagacctgaaataatacttactaaatatgaaataaatatatgactaccatctaaaaaatagttctcggttaggggtatgctccttt

SEQ ID NO: 284863 - DNA, 201 bp, Homo sapiens
gaaatagacctgcattctgtctgccattttcaattagagatctgtactacttttttaaacctgactgatcttggagagagagagagaaaaagagagagagagtctgtgtgtgtgtgtgtgtgtgtgtgtgtgtgtgaatacaccataaattgcatataagttagttatttatcaaagaaaataactaaattgaatgatgtt

SEQ ID NO: 284864 - DNA, 201 bp, Homo sapiens
ggaaatagacctgcattctgtctgccattttcaattagagatctgtactacttttttaaacctgactgatcttggagagagagagagaaaaagagagagagagtctgtgtgtgtgtgtgtgtgtgtgtgtgtgtgtgaatacaccataaattgcatataagttagttatttatcaaagaaaataactaaattgaatgatgt

SEQ ID NO: 284865 - DNA, 201 bp, Homo sapiens
aggaaatagacctgcattctgtctgccattttcaattagagatctgtactacttttttaaacctgactgatcttggagagagagagagaaaaagagagagagagtctgtgtgtgtgtgtgtgtgtgtgtgtgtgtgtgaatacaccataaattgcatataagttagttatttatcaaagaaaataactaaattgaatgatg

SEQ ID NO: 284866 - DNA, 201 bp, Homo sapiens
gtattggggaaatatctgagaagagaggtcttgttttatccaacatgaaaaagcagctgcccgtgtagaataaacattcacaggaaaatttaaaaaaaaaattgttttctaaagagtcaggctgtctctgattcagttagatcacccacatggatacattcttggttaaaatgggcacttctaaagtgatatgctaagaat

SEQ ID NO: 284867 - DNA, 201 bp, Homo sapiens
aataaattttgttttaaaccatatatatgtctatactcaagttcttggagtcaggcatatggaatgttcacatttgacattttgaatacatttttttttttctggtcttgcctattaagtgtcagtgaaaaacttttaagcgaggctttatctacagtcattcctttgaacatgacaagttatgcttttatacacattcat

SEQ ID NO: 284868 - DNA, 201 bp, Homo sapiens
ttggtcaggttggtctcaaactcctgacctcaggtgatcctcccgcctcagcctcccaaaatgctggaattagcgtgagccatcgtgcccggccatgcctytgtttttgttgggcagaatccagggcttatttgttgttgttgttgtttaataaacttcattttggaataattttagattgggttaagctgcaaagttagt

SEQ ID NO: 284869 - DNA, 201 bp, Homo sapiens
ttttttttttttttggaggtggagtcttgtgtcgccaggctggagtgcagtggtgcgatttcggctcaccgcaacctccgcctcctgggttgaagctattytcctgcctcagcttcctgagtagctgagattacaggcatgcaccaccacgcccagctaatttttgtatttttagtacagacggggttttgccatgttggt

SEQ ID NO: 284870 - DNA, 201 bp, Homo sapiens
ccgtggagaagcatgaagctcaactgagcatgcttgcaggttgcagccctttatgagaaataaagctctgctttccaaatttatgaacctcatcattcttcagttgccatttttatgaagctgagtaactagaagtcaggtttttggcctttctagtcgttgctcctgtgcaaatttatagatatattgcccattaaagca

SEQ ID NO: 284871 - DNA, 201 bp, Homo sapiens
cccgtggagaagcatgaagctcaactgagcatgcttgcaggttgcagccctttatgagaaataaagctctgctttccaaatttatgaacctcatcattcttcagttgccatttttatgaagctgagtaactagaagtcaggtttttggcctttctagtcgttgctcctgtgcaaatttatagatatattgcccattaaagc

SEQ ID NO: 284872 - DNA, 201 bp, Homo sapiens
tttgaacatgggtcccgtggagaagcatgaagctcaactgagcatgcttgcaggttgcagccctttatgagaaataaagctctgctttccaaatttatgarcctcatcattcttcagttgccatttttatgaagctgagtaactagaagtcaggtttttggcctttctagtcgttgctcctgtgcaaatttatagatatat

SEQ ID NO: 284873 - DNA, 201 bp, Homo sapiens
cccctgtggctttgcagggtatagtccccctccttgctgctttcatgggctggattgaatgtctgtggcttttctgggtgcatggtggaagctattggtggatctaccattttggggtctggaggacagtggccctcttctcacagctccactaggcagtgccccaatagggactctgtatgggggccccgacctcatatt

SEQ ID NO: 284874 - DNA, 201 bp, Homo sapiens
gcaaacatcaggtgatggtcaggcagttgttaactgtttctctaaaatattaattggttgcagcctgcaccagggaaaggcagtctccaaataaacagaarcacctgaagctggtgatcagcagcttcccatgagatctcaggaactgggtgagtgggctcaagcgtttgcactaagaggcaaaatggcagagtttggtat

SEQ ID NO: 284875 - DNA, 201 bp, Homo sapiens
ccacagcctggctttgcttcccttttcactccctctaaccctaacccttaactctatgctccagaaataccttattacatccagttcctcaaatatactargctatttcatctcttatgggcatgtgctacccttttcatctggagtcactagaccaccatgggcatcatgagcacaggggcaatctgccttgcttcttag

SEQ ID NO: 284876 - DNA, 201 bp, Homo sapiens
tcttgaacaatggaattgactttctctaaatcttccacttgaagccttgaaatcttatggaacttctctttattcatgaagatgatctaaatggttatttkttgtcctcatttgttgacatccctactctcttgagttttcccttacttcactagactcttgttaacaggctcctatctcttctccatgactctgagatcc

SEQ ID NO: 284877 - DNA, 201 bp, Homo sapiens
acaagcagttctatcatggttaagagctggaagcatctttgataacccattagctgtgtgggaaagcatgtcattctccttgttttggagatgcagggcaygaagagagctgttgaacatgcccggagctgcactgtagttatggattatgtgagaaggtgaatgatgttcaccatttttatagtccatgtttggattgct

SEQ ID NO: 284878 - DNA, 201 bp, Homo sapiens
agaggtattgaaactagatcacataagcctagcatgactccttgagtttcgtaagtgttagaataaaaagttttaactctattcattttatttctgttgcrtactcagaatggagatgactttgcactttggacacctttctaaattcctttcatatttgcttttatgaagagatatgcagaaacactaaagccagttgct

SEQ ID NO: 284879 - DNA, 201 bp, Homo sapiens
atagaaaataaagattctgtaatccttaagctccttgtaacttaaaattcctgacagatttttagggttcttttaaaaaaaatcatttaaattatgttatmtacaccaaatttttgtagtgattcacctttattgaggctttttagggcctcagtattgtttaaagcctcgttagttttataacctacttaatgttcatag

SEQ ID NO: 284880 - DNA, 201 bp, Homo sapiens; identical to SEQ ID NO: 58169

SEQ ID NO: 284881 - DNA, 201 bp, Homo sapiens
gcgaaaccccgtctctattaaaaatacaaaaaattagctgggcgtggtggtgggcgcctgtagtcccagttatgtctgtactctctggagtacagagatcrccccactgtactccaacctgggtgacagcgagactctgtctcaaaaaaaaaaaaacaaaaaagaaatttatcataggattgtataaggagactagtttta

SEQ ID NO: 284882 - DNA, 201 bp, Homo sapiens
cagccaccaccctgcgcctgcaccctgcccctgaggccacagtggccgccacgtgtgcgttccccagtgtccaggctgctgtggacagcactgtacacatyctccaggctgcagtgcccgtagcccgcattggtgagctgaggatgggggcagtcagggtgggctccctggaagaggccccctgggaaggccaggcctcac

SEQ ID NO: 284883 - DNA, 201 bp, Homo sapiens
ggatgtgtgtgtgcccatctcccggctgccggagatcgtggtgcagaccaaggaggatctgaatgcctcaggactcacaggttctgcccaccctgctgctsgggagaggtggggaggtgtcagggctgatcagagcctggggcagcaggaggcaagaggaggactgggctggagaatagttctgtcctctgggcccccagg

SEQ ID NO: 284884 - DNA, 201 bp, Homo sapiens
tgtcctctgggcccccaggaagcattgtcgggcatgtgggtgacggcaacttccactgcatcctgctggtcaaccctgatgacgccgaggaactgggcagsgtcaaggcttttgcagaacagctgggcaggtaggagcaaagccagggaggggaagagctgagggcagaggaaagggagccccctgaggatgtctccttcc

SEQ ID NO: 284885 - DNA, 201 bp, Homo sapiens; identical to SEQ ID NO: 58173

SEQ ID NO: 284886 - DNA, 201 bp, Homo sapiens
agaatgaggacattttcccatgaactgcagtaccgttaaatggctattagaggaatggttggtctttgtgagggtctcacgtccaggaacctcatcaaagygtgctaggcccttagcagagagggtagaacctgctcgccggctccctcaccttctctcccatcccagaaaggcagaacaggggcaacacaggattctgga

SEQ ID NO: 284887 - DNA, 201 bp, Homo sapiens
caatgaacattttggccttatttgctttgtgtattttggggggaactatttggaattaaattacacatttcttgaaggcattcacctatataatccagcawctatctcctaagaatgaggacattttcccatgaactgcagtaccgttaaatggctattagaggaatggttggtctttgtgagggtctcacgtccaggaac

SEQ ID NO: 284888 - DNA, 201 bp, Homo sapiens; identical to SEQ ID NO: 58175

SEQ ID NO: 284889 - DNA, 201 bp, Homo sapiens
cacgaaaatgtctgcaagatctgcaagggccaccttaaagcccgtgccaccttaagcaggccccacccctggcctagccaatgggctgacagcagcagtakctgctgccacagtagctgactggtcaccctgccacccagtgctcacaccctctggccagtgcctggctatggcccgactgctcaggtctgcaacctggga

SEQ ID NO: 284890 - DNA, 201 bp, Homo sapiens; identical to SEQ ID NO: 58177

SEQ ID NO: 284891 - DNA, 201 bp, Homo sapiens
ggggccgtggcagcagggggatggtccagcacatcaggcgggcctgagaagggtcagagcagagaggcggtggagtcgtctccctctagagctttccttcrctggctctgcaggaggctctggaatgctgctccgggagcccgctgggcacggggacacaggccaggcctgcactgctgctccctgccccgagctgcctgc

SEQ ID NO: 284892 - DNA, 201 bp, Homo sapiens
agggcaccgtgggagcagggctgtgtctggggttcaggggaccttcctcccccagcccgagggaaaggacctccggtccctgaggctgccttctgtacgcygccctccagacccaggcgcggacgcctctctctgtggcatggcggccaccggggcgtcggggaccaacgcggtccgctacggcaccatgcgggacaacgt

SEQ ID NO: 284893 - DNA, 201 bp, Homo sapiens
gcagggctgtgtctggggttcaggggaccttcctcccccagcccgagggaaaggacctccggtccctgaggctgccttctgtacgccgccctccagacccrggcgcggacgcctctctctgtggcatggcggccaccggggcgtcggggaccaacgcggtccgctacggcaccatgcgggacaacgtgctcaacctggagg

SEQ ID NO: 284894 - DNA, 201 bp, Homo sapiens
ctgattcatcctgagccaactgttctgtaaccgcccttactgctaaactactcaccctgccactccggctggtactcctgctctttttaaaatagtcaatyggaattagcttagactgtgcggtccaaccctatccaataggggaacgacacagcagtaggggctacctgcatgaggaataagaactcctgcccctcccct

SEQ ID NO: 284895 - DNA, 201 bp, Homo sapiens; identical to SEQ ID NO: 58174

SEQ ID NO: 284896 - DNA, 201 bp, Homo sapiens
cctccccgaggcctcccactgccggggtcccaggacccttcccccttcacctggtgacaggaacactcctttcctggtatggaacgtgagctcccgtgacatgatgataggtcttctccttggggcctcccccaataaatctgtaataaacctgaaacccacctacagctacctggaagtcagcaggcagcacttcctccc

SEQ ID NO: 284897 - DNA, 201 bp, Homo sapiens
  misc_feature (1)...(201): n = A,T,C or G
atcagctgagtccccactgctaccatgagtggggctgggggagtcaaatggatgcccctggaataaaacacacctgtggaagaaggccctgaaggaaaggncctgggttccaggccaggctctgtccttaacttggcctccatttctcatctgtaaaatgggaagaaacacatcccccgccccgccgcgccccgcccccca

SEQ ID NO: 284898 - DNA, 201 bp, Homo sapiens
ctccccgaggcctcccactgccggggtcccaggacccttcccccttcacctggtgacaggaacactcctttcctggtatggaacgtgagctcccgtgacatgatgataggtcttctccttggggcctcccccaataaatctgtaataaacctgaaacccacctacagctacctggaagtcagcaggcagcacttcctcccc

SEQ ID NO: 284899 - DNA, 201 bp, Homo sapiens
tccccgaggcctcccactgccggggtcccaggacccttcccccttcacctggtgacaggaacactcctttcctggtatggaacgtgagctcccgtgacatgatgataggtcttctccttggggcctcccccaataaatctgtaataaacctgaaacccacctacagctacctggaagtcagcaggcagcacttcctcccct

SEQ ID NO: 284900 - DNA, 201 bp, Homo sapiens
tggtctcctgtgttgtgtcggggggaggtgagggctgaggcctagagaagagcaggattatttccttgtgtgaggccaagagctgaagcccagtgccctcygacccatcctcagccttgaccacggtgaccccgtacacccaatcaggcaggggtaactcataggcttccctctgaccagggctactccacggatgtgtgt

SEQ ID NO: 284901 - DNA, 201 bp, Homo sapiens
  misc_feature (1)...(201): n = A,T,C or G
ctgggaccctgagggcaccgtgggagcagggctgtgtctggggttcaggggaccttcctcccccagcccgagggaaaggacctccggtccctgaggctgcnttctgtacgccgccctccagacccaggcgcggacgcctctctctgtggcatggcggccaccggggcgtcggggaccaacgcggtccgctacggcaccatg

SEQ ID NO: 284902 - DNA, 201 bp, Homo sapiens
cgcttgaacccaggaggcggaggttgcagtgagccaagatcgcgccattgcactccagcctgggggacaagagcgagactttgtatcaaaaaaaaaaaaaagattaagaaaaatctcttttctgtgtcttgttaaaaggttgggagttgatggaaaggatggagaaccatcaagcaagtcactcatttctgcctttgtcct

SEQ ID NO: 284903 - DNA, 201 bp, Homo sapiens
agcttgttgctcagaaggcctgctcgctgaatcacccactgtccgcccggcactcccctaacaatcacaaacagtggcagggccgccagggctggcagccrgagggggaaggggatgctgaagctttggcccaggtccctccgccggattcctccagagatgccactcagtaccagctccggccggatgggcagacagggg

SEQ ID NO: 284904 - DNA, 201 bp, Homo sapiens
cagcccagatagcggcccctcccctccacaaggtcctggaaccttcccaccccaacagctgaccatgaataagaccctgaggccggtgagtaggagagggrgtggcagagggagggaggaggctgagcagataccagcagtgtctcccaagccagccacatcctcttccccatccttcctcaggctaagccagatgctggc

SEQ ID NO: 284905 - DNA, 201 bp, Homo sapiens
gagcgagctgcaggaagttcccccaaatccagcccagagctcctcccggtcaccgagggttactgcaggcatccctcgagccatggttgccctgttctgcycacgctgaatagctcaggcacagcacggagcttgttgctcagaaggcctgctcgctgaatcacccactgtccgcccggcactcccctaacaatcacaaac

SEQ ID NO: 284906 - DNA, 201 bp, Homo sapiens
ccgcccaaagtcacctctgggcacactagcagcccagatagcggcccctcccctccacaaggtcctggaaccttcccaccccaacagctgaccatgaatamgaccctgaggccggtgagtaggagagggagtggcagagggagggaggaggctgagcagataccagcagtgtctcccaagccagccacatcctcttcccca

SEQ ID NO: 284907 - DNA, 201 bp, Homo sapiens
cttcccaggagggcagagggtgcttttctgcttttttcttttcttttcacttttgactttccaaaaaagggtgctgctgctgcctcgttcacctcacgggmaatcccagctccgttagtgggaacagagaggctgggggagcccgcggtgctccaacctgagccctctctctgttgctgacccaggcagcgggggctgggg

SEQ ID NO: 284908 - DNA, 201 bp, Homo sapiens
cagaagaaaaatggagatggggaaattggaggtgctgggtgtggcttggcaggcagtgcttatggggttatttatttattttgagctggagtctcgctctktcacccaggctggagtacagaggtgcaatcttagctcactgcaacctccaactcctgggttcaagcgattctcccacctcagcctcccaagtagctggaa

SEQ ID NO: 284909 - DNA, 201 bp, Homo sapiens
aataccctttgtgactccggagcaccatgaagtttgttgtaacccattgtcctagaaggataaggacagaagaaaaatggagatggggaaattggaggtgstgggtgtggcttggcaggcagtgcttatggggttatttatttattttgagctggagtctcgctctgtcacccaggctggagtacagaggtgcaatcttag

SEQ ID NO: 284910 - DNA, 201 bp, Homo sapiens
aaacctacaaaatgtaaatctctggagtcaagacctcagaaatctgtattttttgtaaataccctttgtgactccggagcaccatgaagtttgttgtaacycattgtcctagaaggataaggacagaagaaaaatggagatggggaaattggaggtgctgggtgtggcttggcaggcagtgcttatggggttatttattta

SEQ ID NO: 284911 - DNA, 201 bp, Homo sapiens
tttttttgttttttgttttttgttttttgttcttgagatggagtcttgctctgtcacctaggctggagtgcagtggcccaatcttggctcactgcaacctscacctcccaggctcaagtagttctcctgcctcagcctcccacatagctgggactacaggcacgtgccaccacacctggctaatttttgtatttttagtag

SEQ ID NO: 284912 - DNA, 201 bp, Homo sapiens
tctcagctcactgcagccttgacctccccggctcaggtgatcctcccaccttagcctcccaaatagctgggactacaggcacaagccaccactcccagctrgtctttgtattttttttgtagagacagggttttgccatgttgcccaggctggtctcaaactcctgggctgaaacaatccacccacctcagcctcccaaag

SEQ ID NO: 284913 - DNA, 201 bp, Homo sapiens
gaaggagatggaggtggggggtgggagggggccacgtagcctagaaacgaaggccagataaggaattagggtttattccagcttcatgctggggacaataraagacacaggttccccacccttgacttctgccagaatggcctcgggagttgggaaggccaaggggacagatattgacattgtctccacctcttatcccta

SEQ ID NO: 284914 - DNA, 201 bp, Homo sapiens
aacctgccaggtgcaacagagtgggacgtgacctgataaggcaggggaccaaggtgactcatgaactttagtgcagagccaggcagccatgatgagagcakagtttgtaggcagctacctggctttgagccttgcatgcagccaagatcccaaggccttcaggaggattcccctggaatgttctagatacaggaagcggta

SEQ ID NO: 284915 - DNA, 201 bp, Homo sapiens
tgtccctttgaccccaggtctccataggcattctgcatatgctttggtgtcatcttgtccccaatccagttgagttatgtgtctctaagaaagctggaccytgccgggcatggtggctcacgcctgtaatcccaacactttgggaggccaaggtgggtggatcacctgaggtcaggagttcgagaccagcctgacaacatg

SEQ ID NO: 284916 - DNA, 201 bp, Homo sapiens
aggcatgagccactgcatccggcccagaagacagatttttaaggacttgacaagccaatgggaagtggcaaagtggagccatgagtccaacctacgttttyttttctttttttctttttgagacagggtcttgctctgtcatccaggctggagtgcaatggtgcaatcacagctcactgcaggcttgaactgctgggctca

SEQ ID NO: 284917 - DNA, 201 bp, Homo sapiens; identical to SEQ ID NO: 58202

SEQ ID NO: 284918 - DNA, 201 bp, Homo sapiens
tcacagccgcctctgggagaacccatccgcccacagcacagacgcctcaggatccaaccagagaggccgaaggaagttgtgctgtgccatgtcccctcctragaggtgcagaacccagggcaagatggaggccagccagaggaaaggctgcccggccatgcagccggcgagctgggacctggtttccgaacctcaaccccc

SEQ ID NO: 284919 - DNA, 201 bp, Homo sapiens
tttgggaggccgaggcgggcagatcacgaggatcgggagattgagactatcttagccaacatggtgaaaccccttgtctactaaaatacaaaaaattagcrggcgaggtggcatgtgcctgtaatcccagctacttgggaggctgaggcaggggaatcacttgaacccgggaggcggaggttgcagtgagctgagatcgtg

SEQ ID NO: 284920 - DNA, 201 bp, Homo sapiens
atgctgcacttcgtcatgcacggccagcaccacaaggtgagcggggcggggtcccagcccggacctagcatgtgcagcccgagagggcccggcagccagcsgcagcttcaggtgctgcggagcctcctgggagtctggctgtgggttgggagggacgggacgtttgatgtgactcacggggcaactgggttgggcatccga

SEQ ID NO: 284921 - DNA, 201 bp, Homo sapiens
ccccacacagatcacaggagctgaggtaggagcaggggattgggatgctgtaacgaggaaatgggagaacgaatatgggaagacgtgaatatcaaacgtcyacttggcttcatctcttgcaggacctggtggactggcgaaagcctctcctgtggcaggtgggccacttgggagagaagtacgatgagtgggttcaccagc

SEQ ID NO: 284922 - DNA, 201 bp, Homo sapiens
ctcaggacacagaggctgcagtgagacaagatggtgccactgcattctagccagggctacagagcaagactctgtctcaaaaaaaaaaaaaaaaaaaaaaatccattgacagtgactcgataccatccttgtggcttggactgaccagagaggaaataacgcctggtgatgagccaggaattggcgttgtgctgggagcag

SEQ ID NO: 284923 - DNA, 201 bp, Homo sapiens
ttcacgagttcaaaaccagcctgggcaacacggtgaaaccccgtctctgctaaaaatacaaaaaattagccaggcatgttggtgcatgcctgtagtcccarctactcaggaggctgaggcaggagaattgcttgaactcaggacacagaggctgcagtgagacaagatggtgccactgcattctagccagggctacagagc

SEQ ID NO: 284924 - DNA, 201 bp, Homo sapiens
tcactgtagtctgcttcattccctgcagcctccttgatacgaagatgcagtgacaggccaggcactgtggctcatgcctgtaatcccaaggaggccgaggygggcagattgcctgagttcacgagttcaaaaccagcctgggcaacacggtgaaaccccgtctctgctaaaaatacaaaaaattagccaggcatgttggtg

SEQ ID NO: 284925 - DNA, 201 bp, Homo sapiens
agttcagtgactattattgtttttcgtagtataatcatttgccattttgtaaacagtggcaagaacaatatttttctttcttaaattattagataataaawgacgcatttcaaaatattgtttctggaataatggcatatgaggttgtttgtaaatcaatagtcttgattctccttttaaaaatagcaaaatacaggataa

SEQ ID NO: 284926 - DNA, 201 bp, Homo sapiens
cagtggctcaaagttataaacccagcactttgggaggccaaggcgggtgggtcgcctgaggtcaggagttcaagaccagcctgggcaacatagtgaaatcycatctctactaaaaatacaaaaaattagtcaggcatggtggtgcatgcctataatcccagctactcgggaggctgaggcaggaggatcgcttgaacccgg

SEQ ID NO: 284927 - DNA, 201 bp, Homo sapiens
taagcagaagactgacagattttctctacatttgatcagttagctctggctgccatgtggagggcagattgggcttggggggagtcaagagtggaagcagyaagagagttaagaggccattgctattgtccaggtggcagatgggggtggcctggattggtgactgtgaggatggagagaatttgaaattgtcgtggacat

SEQ ID NO: 284928 - DNA, 201 bp, Homo sapiens
gccaaggtaggaggatcacctgaggccaggatttcgaggctaggaggttgagactaacctgggccacatagcgagacccccttttctaccaaaaaaaaaawaataataataataataattgagcccaggagttcaaggctgcagcaagccatgatcacaccactccactccagcctgggcaacgaagtgagaccctgtgtc

SEQ ID NO: 284929 - DNA, 201 bp, Homo sapiens
tgggtcatggccagggatttagattttatgctgagaaccaagggcggccactggaggattttaagcagaagactgacagattttctctacatttgatcagwtagctctggctgccatgtggagggcagattgggcttggggggagtcaagagtggaagcagcaagagagttaagaggccattgctattgtccaggtggcag

SEQ ID NO: 284930 - DNA, 201 bp, Homo sapiens
cttgtccaaggggatacatttcaagaccctcagtggatccttaaaaccacagatagtaccgaatcctatatatgctatgttttttcccatatatgcatatctatgataaagttaaatttataaattaagaacaataggaagagattaacaacaacaataatagaatagttacaacaatatactgtaataagagctatttgt

SEQ ID NO: 284931 - DNA, 201 bp, Homo sapiens
cacagacgcctcaggatccaaccagagaggccgaaggaagttgtgctgtgccatgtcccctcctgagaggtgcagaacccagggcaagatggaggccagcyagaggaaaggctgcccggccatgcagccggcgagctgggacctggtttccgaacctcaacccccagcttgggccctgggcactggcagggtcaggacctc

SEQ ID NO: 284932 - DNA, 201 bp, Homo sapiens
ggcccccttggccctgacactgggaacacagagatcccacctgtcgcatgagatcacagccgcctctgggagaacccatccgcccacagcacagacgcctyaggatccaaccagagaggccgaaggaagttgtgctgtgccatgtcccctcctgagaggtgcagaacccagggcaagatggaggccagccagaggaaaggc

SEQ ID NO: 284933 - DNA, 201 bp, Homo sapiens
gtctcagccgagggtccccaggcctggggtgggtttgcacacctgcccctggggcagaagggcttgctggtgttaactcttctggctttacctccaagctsagtactgtgattgctgccaaagactggagtcctggcctcccggggcccagtttccctggccctagaaggtggggacagagtgggaaggtgtgtgtgagaa

SEQ ID NO: 284934 - DNA, 201 bp, Homo sapiens
gcctggtgcaggggacagtaacccctccccaccaccgccataaagagttattaccccaggaggtggcatgggatgctcgcccaaggaacacaggtgagcaragtggggtggggaccccacaaagctgactgtctgctgggcccccttggccctgacactgggaacacagagatcccacctgtcgcatgagatcacagccgc

SEQ ID NO: 284935 - DNA, 201 bp, Homo sapiens; identical to SEQ ID NO: 58199

SEQ ID NO: 284936 - DNA, 201 bp, Homo sapiens
atctgcaggcacccttcgacggctcccgcctggtcttcccccctgtgccagcctccctggtgatcggcgtcttctacttgtgcatgcagctcatcctgccygaggcagtagggggcactgtgtttgcggggggcctcctgggctacgtcctctatgacatgacccattactacctgcactttggctcgccgcacaagggct

SEQ ID NO: 284937 - DNA, 201 bp, Homo sapiens
tccccagctctctcccttcctccttttcctgagagctggttttccagcacatcactggtcctgttgttcctggtctgaagggagggaggcccacgccagcmtctcattgtgtcactgtcacctgctttctctctctctcctccagcccagagaggctgcaggattctcttctcagactcctcaccaagccatagctaagat

SEQ ID NO: 284938 - DNA, 201 bp, Homo sapiens
agtcacaaggacacagagaaggcaagcgctctctctgcccctccttcggggcagcatgggtttcacttacgtgccagcctgctgtctctggcctcaccctscgtgacgtcagagctggctggggctgtgtgcttttcccagcacatcccgtttccctctgactttacctctttgtgagttcgatttaaccttgagcccact

SEQ ID NO: 284939 - DNA, 201 bp, Homo sapiens
actaccaatcagggctctccctccctccctttatttccccctccctcattccccagctctctcccttcctccttttcctgagagctggttttccagcacaycactggtcctgttgttcctggtctgaagggagggaggcccacgccagcatctcattgtgtcactgtcacctgctttctctctctctcctccagcccagag

SEQ ID NO: 284940 - DNA, 201 bp, Homo sapiens
ctctaggccgggtgcagtggctcatgcctgtaatcccagaactttgggatgctgaggtgggtggatcacaaggtcaggagttcaagaccagcctgaccaayatggtgaaaccccatctctactaaaaatacaaaaattagctgggtgtgatggcatgcacctgtagtcccagttaatcgggaggctgaagcaggaaaattc

SEQ ID NO: 284941 - DNA, 201 bp, Homo sapiens
cgagaagataggtctgcccaaaggaagctacctcccctgtaccccccgctgcttctctgtccctgcattgtgctgtccttggcccatcccaggctgttccscagcccgtctccacactctgttctctgctgggcataaatcagagaaaatatggcagatatgatactttcgggacaccagtttagaccctgatgtcgctga

SEQ ID NO: 284942 - DNA, 201 bp, Homo sapiens
aggtgccataaaaaattcagttgttccttagacccaagtagaagagtccttgaatcctaataaaaggccacttttttaagtttttctactctaggccgggygcagtggctcatgcctgtaatcccagaactttgggatgctgaggtgggtggatcacaaggtcaggagttcaagaccagcctgaccaatatggtgaaaccc

SEQ ID NO: 284943 - DNA, 201 bp, Homo sapiens
gcgacagctattacctcatcatgctgcacttcgtcatgcacggccagcaccacaaggtgagcggggcggggtcccagcccggacctagcatgtgcagcccsagagggcccggcagccagccgcagcttcaggtgctgcggagcctcctgggagtctggctgtgggttgggagggacgggacgtttgatgtgactcacgggg

SEQ ID NO: 284944 - DNA, 201 bp, Homo sapiens
ctgtgttgcccccaaacagggaaaaggacagatcagcttggtttcatggttgctttctcttgtgccaggcaaggtcttctggaaacaaccataatgacttytgctggttggagacaaggtgccataaaaaattcagttgttccttagacccaagtagaagagtccttgaatcctaataaaaggccacttttttaagttttt

SEQ ID NO: 284945 - DNA, 201 bp, Homo sapiens
aggttcctgcgctgacccaggggtgagggttcatgggtgcaggtgagggagatggagtaagggttaaaagagaacggctaggccaagcatgatggctcacwcctgtaatcccagccctttgggaggccaaggtgggtggatcatttgaggtcaggagctcaagaccagcctgaccaacatgttgaaactctgtctctacta

SEQ ID NO: 284946 - DNA, 201 bp, Homo sapiens
ctgtagctgtccaacagagggcagcagctcccgagctgatggggatggtgaggcagggacacctggagctaccaggctgctatgcaccggtcctcacctcrctctccctgccaccctgcagagtacacggtggcagtgcccaagtccatgttccccgggctcttcatgctggggacattcctctggagcctcatcgagtac

SEQ ID NO: 284947 - DNA, 201 bp, Homo sapiens
gtggcgcacgcctgtaatcccggcactttgggaagctgaggaaggcggatcgcttgaggccaggagttcaagaacagcctggccaacatggtgagacctcrtctctactaaaaatacaaaaactagccgggtgtggtggtgcgtgcctgtaatcccagttactcggaaggctgagatacgagaattgcttgaacctgggag

SEQ ID NO: 284948 - DNA, 201 bp, Homo sapiens
gtggctcatatctgtaatcccagcactttgggaggctgaggagggcagatcacttgaggtcaggatttcaagaccagcctggataatatggtgaaaccccmtctctactaaaaatataaaaattagccaggtgtggtggcacacacctgtaatcccggctactcaggagactgaggcaggagaatcacttgaacccgggag

SEQ ID NO: 284949 - DNA, 201 bp, Homo sapiens
agagtgaaccatgcaacctgcaataaacttgcttgaaaattacctaagtaaattagttgtaatttctcctttaagagggggagtagaattctagttctctktgttctcttgtgcccagtaggacctttccagtgttgcttagcattgaatgatgttcagattacctaatgagaaatggaattagagtttttagggatctct

SEQ ID NO: 284950 - DNA, 201 bp, Homo sapiens
ctaatgggtacaggggcttggcggggaagtgataaaaatgttgtaaaattgactggggtgacggtttaacaactttgtgagtgtactaaaaagcactgaawtatatattttatttggatgaattatatggatgtgaattagatttagataaagccgttaagaagagagaagatatggccaaagctatggtttgtagagaaa

SEQ ID NO: 284951 - DNA, 201 bp, Homo sapiens
tagacctgtagcttcctagggttgggagggtctgagaagaaatggggagtggctgctaatgggtacaggggcttggcggggaagtgataaaaatgttgtamaattgactggggtgacggtttaacaactttgtgagtgtactaaaaagcactgaattatatattttatttggatgaattatatggatgtgaattagattta

SEQ ID NO: 284952 - DNA, 201 bp, Homo sapiens
cctccaaaacactattatccaaataacttcagtttcttaccttgatggtatattgcaaagtatttaaacagcaataccaggcaagcaaatttgaaggtggygggatttgctttaacatatttgaagtctgatgcatagaaagtatttttaaaatcctgttacagtaaaactagtagccaccaatttcattcatgaaagtat

SEQ ID NO: 284953 - DNA, 201 bp, Homo sapiens
ttgatgctagcaacactcataaagcttataactgagaaatatgaacttccaactcagtactttatattgtgaaacactgcctccaaaacactattatccarataacttcagtttcttaccttgatggtatattgcaaagtatttaaacagcaataccaggcaagcaaatttgaaggtggtgggatttgctttaacatattt

SEQ ID NO: 284954 - DNA, 201 bp, Homo sapiens
cgtcccatgagtctccttcaggggttagaagtgaagttaaccatagaaaatctcaatcaagacccacattgctctcagggttaagacccccccagtcctcrtgtagctataagtacctgggtgacactcataggtatgtcccaggttgcctgggtttctagtcctgtttactctttctggtgtcttttcatgcaaaattct

SEQ ID NO: 284955 - DNA, 201 bp, Homo sapiens
cccggggggcgagcagctgctgcgggccagggcgggccaggacatcagcgccgacctggacgggccgccgcacaggcactcggccaacgcgcgccgctggytggagcagtactacgtgggagagctccgcggggagcagcaggtacagccgggccggggccccccaccccaacccaggcctccgtcagccttccactcccg

SEQ ID NO: 284956 - DNA, 201 bp, Homo sapiens
gagaactatggtctattgaagaaaaatgactccaagacagagagttcaatgtcgaagactcatgtgaaaagtttgatgcttcacttgagtgaaaaaaatcygtgtgtaactaaagaattaatgtgcgtagattatatttttaaaagattataaggccaccctccaaacctacaaaatgtaaatctctggagtcaagacctc

SEQ ID NO: 284957 - DNA, 201 bp, Homo sapiens
tgcagtgagccgagatggcatcactgcattccagcctgggtgacagagcaagactccatccccacccaccaacaccccccagccctgccaaaaaaaaaaaacacaaatgtattctctcacacttctagaggctggacagcggacatcaagatttcaacagggttggttccctctagaggctgcgaggaagaatccacttca

SEQ ID NO: 284958 - DNA, 201 bp, Homo sapiens
aaaaaatgcccataggtgtacaatttgatatattagcaagttcacagacactctgcaatccaacgtagtaccctcggatattcataagcctcaggttaaaygcctaggcagctgcagattgaagaagagagtagagctaatgtcatatgccacagccagcttagaggtggactaaaaaatatgcttagatttggcaagaaa

SEQ ID NO: 284959 - DNA, 201 bp, Homo sapiens
aatacccaagcggacttcgggagaaggagtatttccagggcccaagatggctctttcccagtggtaaaggggccaactcatcaaggagacataactgggcraccttgggcagattactcagcctcggtttccccaactgcaaaatgacaatagttagaatacacgcctagttaggggtatggcgaggatcaagtgactgaa

SEQ ID NO: 284960 - DNA, 201 bp, Homo sapiens
atctagtggaatgtactaaaggatatcagaaagtgtgctgcaagggaaagaccaccctacctggttttggggtggggcccctgggcaggctcccttcgctygtcttcagccctaagggcagaggtcatgcctgctttctgccagcgctcaagctgtctttcatctctccctgtgtctctggcatttttgctccctatccac

SEQ ID NO: 284961 - DNA, 201 bp, Homo sapiens
tacttggtggggctcatgggtcatggccagggatttagattttatgctgagaaccaagggcggccactggaggattttaagcagaagactgacagattttstctacatttgatcagttagctctggctgccatgtggagggcagattgggcttggggggagtcaagagtggaagcagcaagagagttaagaggccattgct

SEQ ID NO: 284962 - DNA, 201 bp, Homo sapiens
ctcagctgatccgcccacctcagcctcccaaagtgctgcaattacaggcatgagccactgcatccggcccagaagacagatttttaaggacttgacaagcyaatgggaagtggcaaagtggagccatgagtccaacctacgttttcttttctttttttctttttgagacagggtcttgctctgtcatccaggctggagtgc

SEQ ID NO: 284963 - DNA, 201 bp, Homo sapiens
gaggtgcaatcttagctcactgcaacctccaactcctgggttcaagcgattctcccacctcagcctcccaagtagctggaattattacaggtgcgtgccaycacacccagctatttttagtagagacggggttcactatgttggccaggctggtcttaaactcctgacctcatgatccatccgcctcggactcccaaagtg

SEQ ID NO: 284964 - DNA, 201 bp, Homo sapiens
accagcgaccaggttgcagacaaccggcccccactcctctcccgcagccccggctgcctggaagcctgtctccacctctgctcagaaagctgccctggggmaatatgcctgagtttgggtggacatttctttaaacaattgccttagctcatcgctgtgggggtgagcagtgctgctgacactgagcagctaccctgcccc

SEQ ID NO: 284965 - DNA, 201 bp, Homo sapiens
catatcagcaatataattttactccattctttttaacagctgttcctattgatgcttttatctattacgtcagtgtcacaagaagcattcttacacaatcsctttgcatatatatgcaaatcaaccataatacagagtcctggatttggaatttctggatccaaataatacacatcttatattttaatagatagtgccaaa

SEQ ID NO: 284966 - DNA, 201 bp, Homo sapiens
cggccccaactcccagaattaaggctcatgaaggataggggatgtgaggcctgagccccagctgaccagcgaccaggttgcagacaaccggcccccactcytctcccgcagccccggctgcctggaagcctgtctccacctctgctcagaaagctgccctggggcaatatgcctgagtttgggtggacatttctttaaaca

SEQ ID NO: 284967 - DNA, 201 bp, Homo sapiens
atgttctagatacaggaagcggtacctgctgaaagggctgggaaggagatttttcctggactgtttcaaatccactgtgtcctagacacttgcattttttwaaattattttttaatattttgtagagatggggttcttgctctgtggcccaggctagtctcgagctcctggcctcaagtgatctgcacacctcagcctccc

SEQ ID NO: 284968 - DNA, 201 bp, Homo sapiens
ccttccagccctcccctgagctgctgggggctgccagctgctcttgaccatccttggcttggagaggcattgctcccatctctccttccatcttcacacgygtgtgtctgtgtccaaatcaccccttttataaggcccaccgtaatgatctcatcttaactacatctgcaatgaccctgtttccaaagaaggtcacattct

SEQ ID NO: 284969 - DNA, 201 bp, Homo sapiens
gcagtgttgcactgatttttagttgagcaaataatgagtcaagtcgtgttggttttgtgcacatgtgtggtttttccaaaaaaattgtatgggccgggcayggtggctcacgcctgtaatcccaacactttgggaggccgaggcgggtggatcacgaggtcaggaaatcgagaccaccctggctaatacggtgaaaccccg

SEQ ID NO: 284970 - DNA, 201 bp, Homo sapiens
gctgccacgtggggggtgggggaagtgcagaatagaacaaggtttgcactaaagagggcggcgtttgcttcactgctccacgcgcagcgtttccatgtagsgaaaactgcgaagtgacctctcaggccctaaagaaggggaacaaggccgcccctggctgcagatgggcagcagtgggctaggaacggacctatttgaatg

SEQ ID NO: 284971 - DNA, 201 bp, Homo sapiens
ggcaggcggattacctgaggtcaggagtccgagaccagcctggccaacatggtgaaacctcgtctctactaaaaatacaaaaattagccaggtgtggtggygcatgcctataatcccagctacttgggaggctgaggcaggagagtcgcttgaacccaggaggcggaggttgcagtgagccaagatcgcgccattgcactc

SEQ ID NO: 284972 - DNA, 201 bp, Homo sapiens; identical to SEQ ID NO: 58203

SEQ ID NO: 284973 - DNA, 201 bp, Homo sapiens
ccttcccattttgactcaaggaccccagcagtatggcctggccctgtagctgtccaacagagggcagcagctcccgagctgatggggatggtgaggcaggracacctggagctaccaggctgctatgcaccggtcctcacctcgctctccctgccaccctgcagagtacacggtggcagtgcccaagtccatgttccccgg

SEQ ID NO: 284974 - DNA, 201 bp, Homo sapiens
aaaggggagtagagcgtgttcaagggcagtggggagggagctgaacttgaagatgcacagggatcatccatcaggctgtgtctagggtcttgcagaggttmaaggtgccagacccacagctgtgtgagtctccatgctcagcagcttgggtatggggtacaaaggcaggttcctgcgctgacccaggggtgagggttcatg

SEQ ID NO: 284975 - DNA, 201 bp, Homo sapiens
ggggatagttcctccccaaccccagggcctctcttctctgtgaagtaggaagctgggtggaaggagaggcagtaaaggggagtagagcgtgttcaagggcmgtggggagggagctgaacttgaagatgcacagggatcatccatcaggctgtgtctagggtcttgcagaggttaaaggtgccagacccacagctgtgtgag

SEQ ID NO: 284976 - DNA, 201 bp, Homo sapiens
gatgaaataggaagtaatccatggaaggcccttgggcggtgcctggcacacaggaatcagtcaggacacatctgccgttactgttgctctgatcatccagygcccgcgtgccggtgcacacctcttccctgagaagcaaggaggatgcgccagggtaccggcagaatgtggtgtgcttggaagttgggggaagtatgtgga

SEQ ID NO: 284977 - DNA, 201 bp, Homo sapiens
caaaaaaagaaaatataatattaatattattatataatacaatgtatatactcatcatataatcagatactctgttacctccatcctaactacacccctcyaagatgggtagggtgtttccctgaggaaactgtaacacctaggcggtgctgagccaggatttgaatccaggtctgcaaatccaatgcctgtgctctctgc

SEQ ID NO: 284978 - DNA, 201 bp, Homo sapiens
gatgctggggtgagggggcgggcagaggcttgacctataggagaggactttcctgcatggcagggaggatgatttgagggctctatcagccacacggcctyggcagagagctaaaatgtgcctgtcttataaaggtccagtgtagagggttagtaagcctgtgaccatgatgccagtgatgggggcatgagagataacgtc

SEQ ID NO: 284979 - DNA, 201 bp, Homo sapiens
atttttgtatttttactagagacagggtttcaccatgtttgccaggctgatcttgaactcctgacctcacctgcctcggcctcccaaagtgctgggatcayaggtgtgagccaccacacccagcagataacattctttcttatttaacatatttccactgtggctcttgtcttccctattgttttgtctactaatctgtaa

SEQ ID NO: 284980 - DNA, 201 bp, Homo sapiens
ttcctccagagatgccactcagtaccagctccggccggatgggcagacaggggtgatgctggggtgagggggcgggcagaggcttgacctataggagaggwctttcctgcatggcagggaggatgatttgagggctctatcagccacacggcctcggcagagagctaaaatgtgcctgtcttataaaggtccagtgtagag

SEQ ID NO: 284981 - DNA, 201 bp, Homo sapiens
tccaggataatctcatctcaagatctttcacttaatgacatctgcagagtcccttttgaaaagtcaggtagcatattcacagattgtggctcacacaccayccagaccccggttgtgacttctcagtctccattgttagtttctctcacttctcatttcccagaaaggtgcacaaagtttaaacatacagctcagtgattt

SEQ ID NO: 284982 - DNA, 201 bp, Homo sapiens
ctagactcggactggcctatgaacccagcacagattagcagagaacttgggagagaaagatctgggagtgtcctagagtgtgtccaaggcaaaggctcagrcagcagacccccagactgggagtaatggcccactaacctctatgggacacttgccatgtgcggggccacgtgttctcccaggaccgcctcatttacccct

SEQ ID NO: 284983 - DNA, 201 bp, Homo sapiens
ctcggggtcacactggacccacctagatgatccaggataatctcatctcaagatctttcacttaatgacatctgcagagtcccttttgaaaagtcaggtarcatattcacagattgtggctcacacaccatccagaccccggttgtgacttctcagtctccattgttagtttctctcacttctcatttcccagaaaggtgc

SEQ ID NO: 284984 - DNA, 201 bp, Homo sapiens
gaacagagacagcctaagtgggtgtgaggagatcaggcaggatgctgctgcatggctgccactgcagtggctgtgaccatggggggaagggggatgaattygggagagtctctagacaatatgctgggactcagcattgtgtggtgagggcccagtttaatctgagaggttggtgtttggtgtcggctcatgctgaagggt

SEQ ID NO: 284985 - DNA, 201 bp, Homo sapiens
ctccactaaactatcctgcttggcatgccacatctcattgagcacttaatgcaggtaccgttattatttttttatttttgaagagacggagtctcgaactrttgcccaggctggtctcaaactactggcctcaagcagttatcctgcctcagcctcccaaaatgcagggtttacaggcatgagctactgcaaccaacaatt

SEQ ID NO: 284986 - DNA, 201 bp, Homo sapiens
tgcttctctggcaaattatcacaaactcggtggcttaaagcaacacacatttactctcttacagttccaaagtaaaaaatgaatctgcagggaagcattcyttctggatgctctaggggagattcttttttcctgccttttccagctactggaggctgcctgcattccttggctcttggcccagccagcaatctcatcatg

SEQ ID NO: 284987 - DNA, 201 bp, Homo sapiens
aggatgctgctgcatggctgccactgcagtggctgtgaccatggggggaagggggatgaattcgggagagtctctagacaatatgctgggactcagcattstgtggtgagggcccagtttaatctgagaggttggtgtttggtgtcggctcatgctgaagggtttagaagaagatataagaaaaactgagtgcaggaggcc

SEQ ID NO: 284988 - DNA, 201 bp, Homo sapiens
agtacacgtacatccttgccttggagacaacaggcctggagaataagcaactcctggatgtggtacagggtgttctatcatctaagccttcagcagctttyttcctgctgcccacagagcactgttaaggtgccagaaaggccacaaccatattcaactttacatctgtgcccacactccctgtcatcctttcctctctcc

SEQ ID NO: 284989 - DNA, 201 bp, Homo sapiens
gagtcacttgaaccccagaggcagaggttgcagtgagccgaaatcacgccattgcactccagcctgggcaacaagagtgaaactccgtctcaaaaaaaaaagaaagctgtactctgtcaagctcctgtgcatgtatctctctcaccctgatggccttcctgcaggtacagtgtccccatcatctgggtgcccctggtgctg

SEQ ID NO: 284990 - DNA, 201 bp, Homo sapiens
acaataaggaggagatctaagtgcagaaagacttggagtttccaccctacccaggaccgggaacatcttgagctcagcccatcttggaaagccggtctgakaaaaactgatgcttggggaatttgctgaactgccgccaccttctgagcagagtagagccgagaagtcgacttactggaggggttgagatcacttggcctc

SEQ ID NO: 284991 - DNA, 201 bp, Homo sapiens
agaaaatagcagccatgtgtggtggcgcccacctgtagtcctagctactcagaaggctgaggcgggaggattatttgatcttcagaggtcaaggctgtagygagccaagattgggccactgcactcccacttgggtgacagagcaagccctgtctcaaaaaaagaaggaaagaatgagaaaagaaaaccagaggagaccta

SEQ ID NO: 284992 - DNA, 201 bp, Homo sapiens
cttgagcgagtgacagagccgtggctgagcagggaaggagctcagggcggtggggtcaagagcctcaccccaagctcaggcgagagcagtgctctgccagstgcagccacatgttagcagagtatgaagtccacttattgagctgcgaccggcatttttcacaaaagaaatagacaaggaaaggactttaggtctaaacct

SEQ ID NO: 284993 - DNA, 201 bp, Homo sapiens
ctgcctcttctcggggcagctcggggctctgccctcttccctcacccactgtgtataatcctcttgtatcttctccttccagggctccatggagaacgagsctgtagcccttgaggaaactcagaagacagatcctgctatggaaccacggttcaaagtggtggattgggacaaggtacctggcataggatggagtggggt

SEQ ID NO: 284994 - DNA, 201 bp, Homo sapiens
taagagctatttgtatgtggtccctttctctcaaaacatcttatagtactgtactcactcttcttgtgataatgtaagatgataacatgaggccaggcaargtggctgacatctgtaatcctagcactttgggaggccgaggtaagaggatcgctcgagcccaggagttcaagaccagcctgggcaacatagggagacctt

SEQ ID NO: 284995 - DNA, 201 bp, Homo sapiens
agagcaagccctgtctcaaaaaaagaaggaaagaatgagaaaagaaaaccagaggagacctactccaacattaaatgtaaatagatttaatgcttcaattraaaggcagagatggccgggtgtggtggctcatgcctgtaatcccagcactttgggaggtggaagcgggtagaatcacctgaggtcaggagttcaagacca

SEQ ID NO: 284996 - DNA, 201 bp, Homo sapiens
gactttctggggagatggaactggtctgtatcttgatttgggcattggctgtaaggaggcatatcgttgtcagactatacccttacggttgatttttttttaactatatgaaaattacgcttagtagggggaaaagagagccaaataaatttaacaccagctttatagtcactcctaagcaggtgacctcacatttgcaag

SEQ ID NO: 284997 - DNA, 201 bp, Homo sapiens
gaaggatccttaggcggaagctgtttgctttctagacttcataaacttgtcttctaggatgacgtgaggcaatgagtatactcatgtgatggggatttcctggggggagcaggcatgccttcctctgacgtgtcattgactccctgcacgctcagttactgatcaatcagcggatcactccagcttcctggcagctgccct

SEQ ID NO: 284998 - DNA, 201 bp, Homo sapiens
ttctgctggttggagacaaggtgccataaaaaattcagttgttccttagacccaagtagaagagtccttgaatcctaataaaaggccacttttttaagttwttctactctaggccgggtgcagtggctcatgcctgtaatcccagaactttgggatgctgaggtgggtggatcacaaggtcaggagttcaagaccagcctg

SEQ ID NO: 284999 - DNA, 201 bp, Homo sapiens
tgaggggcagactcctggctccacggctcctcggatgcctccctcggttgtcccctcttctggttggattccctctcctttggtggcggtcttgatcccaratgaaactgattagctgattcaggccttgttacaggttttctaggctgctgtaacaaactgtcacaaagtgggtggttgaacaacagaaatgtattgtct

SEQ ID NO: 285000 - DNA, 201 bp, Homo sapiens
tcgcctgtggaattcaagggtgagctggctcaactataaaataaacaccggggcgggagtctggaaaacgtggcccagatcaacgtgtgtggcatgcgtgyggcacagctgctcctggcaggacccagttcctggagtcctggcgtgccccaggtgggaatgggagaccttcttcagaagggtctttgtcttagctgtgtg

SEQ ID NO: 285001 - DNA, 201 bp, Homo sapiens
cctcccaggcaatacagggccaggtggcataggacgctttcctggggaagggtgtgtccagaatctgctccccaaggtggcaaatgtggtgagcgggggcwggcgggggacggggcagctgctcagtgtcagcagcgctgcccacccccatggcaatgagctaaggcaattgtttggtcaggtagagcaggaagcgaaatg

SEQ ID NO: 285002 - DNA, 201 bp, Homo sapiens
cacaggtttcctgctggttttctttcctcctttcctcttgctcccgtgaataccaggacggtggcctgcagggcccatcgccttgcaatgactgcggggasggcgaggggtgggtgggcttcgggggttctgaggcttctcacttgccagatatggtttcttaggccaccacaggcatccagagctcagctcctggccggt

SEQ ID NO: 285003 - DNA, 201 bp, Homo sapiens
tcagagggagttcacttcacgagcagaagcaatgctgggtccgtggtgaatagagtcaacgccccagggcccaagactgtctttttgttctccacacaccygagctggagagttggtcacagctcaggcacaggtttcctgctggttttctttcctcctttcctcttgctcccgtgaataccaggacggtggcctgcaggg

SEQ ID NO: 285004 - DNA, 201 bp, Homo sapiens
cccagtagctgggacgataggcctgcatcactacaactggctaattttttaaattatttatttatccaattatttttgagatggagcctcgctctgtcacrcaggctggagtgcagtggtgcaatctccactcactgcaacatctgacgcctgggttcaagcgattctccagcctcagtcttctaagtagctgggactaca

SEQ ID NO: 285005 - DNA, 201 bp, Homo sapiens
aaggttttggcttgagcaactgggcgatttgatttatggaaatgattaatactggggtgggtgtccatgtttgggataggactatcaaagctcaccggggycaggtttgagatgccagggaaacatcagtagagattttgaatactgattgaatatgtgagtccagagctgagctgtccaaggtgggaaccaccagccata

SEQ ID NO: 285006 - DNA, 201 bp, Homo sapiens
aatagaaaaaaaaagaaacaattaaaattcctttgaagaggaaaagggaaatgaataaattcatatagtggaatatgacatagcagtgaaaactggtgtgrtagcacgtgcctgtcatcccagctactcagcaggctgaggcagaataattggttgaacccaggagacggaggttgaaatgggctcagattgcacctctgc

SEQ ID NO: 285007 - DNA, 201 bp, Homo sapiens
cttggtgctggggacaaaaagacacctggctgagacactcatggggattacctcagaggagtgagacagacatgataattacaggtggcagcaagtgatgsaatagaatagaaacattctgtatggaccaataccctgggtcagaaacattccaggcagagggaacagcaggtgcaaaggccctgaggcatgacaggaccg

SEQ ID NO: 285008 - DNA, 201 bp, Homo sapiens
gccagagtaggggtctggagggcccaacatccaaagggcctccccaaggctgtccatactgggcttagagtccctgagtctcctctctgcctgcctccttrctcagagctcctggcccctcttcagaggagctcagcggtgctcaaaaaataccccaaggcagaaagcaggcaggtgggctgggcactgccctctgcttcc

SEQ ID NO: 285009 - DNA, 201 bp, Homo sapiens
aaggtcctggaaccttcccaccccaacagctgaccatgaataagaccctgaggccggtgagtaggagagggagtggcagagggagggaggaggctgagcasataccagcagtgtctcccaagccagccacatcctcttccccatccttcctcaggctaagccagatgctggcataaccagctgctggggctggccaatggg

SEQ ID NO: 285010 - DNA, 201 bp, Homo sapiens
taaggatcctgatccagctgtgacccggatctggcccataccagctcacaagagcacccatgcacatcctttcctgtttctgttccagtgacgccacctcrgcgcttgaaagcgccagggcagttttcacactgcaggaattggcaaacactaccaatcagggctctccctccctccctttatttccccctccctcattcc

SEQ ID NO: 285011 - DNA, 201 bp, Homo sapiens
ggagtcccttgggagggagggtgggaggaggcggctgagggctttgcactgccgagcagggggagcctggcaagtcatggactttgggcctccacgtcctyaatcatgcaggcaatgcagggcttcccttgtaaggctgtggtgagatgaaataggaagtaatccatggaaggcccttgggcggtgcctggcacacaggaa

SEQ ID NO: 285012 - DNA, 201 bp, Homo sapiens
tgtactgtttgctgcggagctatttaaagattttggaataaatatacaaaactacggttgtgaaataaaaacttaaattgtatattttgaaaaataaaacmctgaaaagaaaccaacaaaaatgagttgttcatcagactccctcgtggttgggaaggggcagtggtgtggggagggatagaggggcagaggattggtccc

SEQ ID NO: 285013 - DNA, 201 bp, Homo sapiens
ccaggagaaaaggagagactgaaggagcccagaggagtcccttgggagggagggtgggaggaggcggctgagggctttgcactgccgagcagggggagccwggcaagtcatggactttgggcctccacgtcctcaatcatgcaggcaatgcagggcttcccttgtaaggctgtggtgagatgaaataggaagtaatccatg

SEQ ID NO: 285014 - DNA, 201 bp, Homo sapiens
gctgggaagagtgagaggacaacaggccaggggagccagggcagagttagaaggatctgaaaagacaggaagaagggccaggaagcaaaccctggtgcccygctctgctcagaggtgagggatggtcttacttttgggctctgtgtggaattttaccagaacagtttctaaatcatcccttcagtcacccagccaggcagg

SEQ ID NO: 285015 - DNA, 201 bp, Homo sapiens
aagtatgtcattatatacttagagtgaaccatgcaacctgcaataaacttgcttgaaaattacctaagtaaattagttgtaatttctcctttaagagggggagtagaattctagttctctgtgttctcttgtgcccagtaggacctttccagtgttgcttagcattgaatgatgttcagattacctaatgagaaatggaat

SEQ ID NO: 285016 - DNA, 201 bp, Homo sapiens
tgcataatgggatttgggctttggtacaagaactgtgacccccaaccctgataaaagagatggaaggagctgtccctgcctgtgtcactgtttgtcactgyccaggctggctggtttgggcatgaatgtctgcatcactaaatccagagcttgtcttgctccctcattgtgcagatggaggaaatgaggactaaggcccca

SEQ ID NO: 285017 - DNA, 201 bp, Homo sapiens
agcatgaggcagaaaggggttagggccccagagctaccgcctccagagcccagttagccccaccagtcacgcacaatgcttcacatgcacctcctcacttyctcctcgctcgattctgaggtcagcatcatgattgtcttccttttacaattgaggaaataggctcagaaaggctaactggccggggggatttgacctcaa

SEQ ID NO: 285018 - DNA, 201 bp, Homo sapiens
agggtgtgagaggggctctgggttgaggcccctgcctacctcggaggaacccagccctctgcccagcagacagaacagcagctgctctggggaggaaaacrgatcaggcccgtgccaaggcaaactgcccaaagcggggtggggggggagcttcctgtccctgccagtgggcacggggggtgacagacaaggccagacagc

SEQ ID NO: 285019 - DNA, 201 bp, Homo sapiens
aactgcaggttcattacttcagttgacagatgtttggtggctgctggggcgcctgaaaataagtctggtgggggaacaggcccagccagatcattccagtyatgagtcacagcccaggtgcacaggtagaggtaagcctggctcctgggagagagatgtgggcaggagcattggctggaagccagggcttgtcattggaca

SEQ ID NO: 285020 - DNA, 201 bp, Homo sapiens
cctgttacctacccgtgttccatactctccctgccctcccccacgttcagtcggtcggtcggggtctgtgcccacagagacatgaggctgagctggttccrggtcctgacagtactgtccatctgcctgagcgccgtggccacggccacgggggccgagggcaaaaggaagctgcagatcggggtcaagaagcgggtggac

SEQ ID NO: 285021 - DNA, 201 bp, Homo sapiens
tcccatcaaatcgcgcaaaggggatgtcctgcacatgcactacacggtgagtgggttgggcgggccttttgggagtgggtggggcttccgaggaccagagrgtgcttgggagtctggttctccataagccaggtaggtgaccttgggcaagtcccctctcgcctctaagccagtttccatggttctgccttgcccttgcct

SEQ ID NO: 285022 - DNA, 201 bp, Homo sapiens
aggtgagtcttttggactccagctgagtaggggtatggggagtacaagtgagtccagaagctgttgctcctctttctcctcccacccgtcccccactttcycttttcctctgctccccaagcctgtgttctctgccccgaccccagctctagggaagactcttccttcccaccccagacatgtcgcttctcctccctaggg

SEQ ID NO: 285023 - DNA, 201 bp, Homo sapiens; identical to SEQ ID NO: 58217

SEQ ID NO: 285024 - DNA, 201 bp, Homo sapiens
tggcagcccgggcatcgtcactctccatgtccaggagctcatccacgtcaatctccagttctgggatctcctcttcctggggtgggggtgggggaggaggragagacataagcctgagttggagagagggtgtgagaggggctctgggttgaggcccctgcctacctcggaggaacccagccctctgcccagcagacagaa

SEQ ID NO: 285025 - DNA, 201 bp, Homo sapiens
cacgttcagtcggtcggtcggggtctgtgcccacagagacatgaggctgagctggttccgggtcctgacagtactgtccatctgcctgagcgccgtggccrcggccacgggggccgagggcaaaaggaagctgcagatcggggtcaagaagcgggtggaccactgtcccatcaaatcgcgcaaaggggatgtcctgcacat

SEQ ID NO: 285026 - DNA, 201 bp, Homo sapiens
tgagctggcagaagtcaaagagcagtgtgcccccctaaaagagaccagccgagcctgttagctgcaccaaaggcgtatcctagctttattaaagggcccgygccgcagagtcaatataaaaacacaaaaagtcccatcagtttaataacaataaaaaaccccaaaagtggaaaactgagggggcaggggaagagacccctg

SEQ ID NO: 285027 - DNA, 201 bp, Homo sapiens
gattccaggtagtaaaccttttgatacctcccatcacctgcagccagcccacctccctgtggccctggttggcattttgactccccttctcccctacaggyggtgcaaccctggtgttcgaggtggagctgctcaaaatagagcgacgaactgagctgtaaccagactggggaggggcagggggagaggcccccatcaggg

SEQ ID NO: 285028 - DNA, 201 bp, Homo sapiens
gggcagggggagaggcccccatcagggaccagactgttccaaaaaaaaaacaaaaaacaaaaacaaacaaaaaaacacttaaaagcccaaggagtaagcctgtgtgtgtttgtgggccctgagagactcagagacctcagctccagcataccccaccaccttctcctttcccgactgtggagccttgggggtctaggctca

SEQ ID NO: 285029 - DNA, 201 bp, Homo sapiens
ggcagggggagaggcccccatcagggaccagactgttccaaaaaaaaaacaaaaaacaaaaacaaacaaaaaaacacttaaaagcccaaggagtaagcctgtgtgtgtttgtgggccctgagagactcagagacctcagctccagcataccccaccaccttctcctttcccgactgtggagccttgggggtctaggctcaa

SEQ ID NO: 285030 - DNA, 201 bp, Homo sapiens
caccaggcctggccgcagggtcccccggtattgctgttgctacgaggttggggggcagcgattgtcctgtgggagccaccgttctcctgggtcggggaccstcacttcttctggggtgtgctcagcttctgcatgccccggatcttgtccagcaggccagaaatgaaggcctggatggggtgggagggtaaacattaagga

SEQ ID NO: 285031 - DNA, 201 bp, Homo sapiens
gccctgccaggctccatcctgacccagcttcctgtcccctccagaggcgccaagggcaagccatacctgacgctggagcagctcatggacttcatcaaccrgaagcaacgcgacccgagactcaacgaagtgctgtacccgcccctgcggccctcccaggcccggctgctcatcgaaaagtatgagcccaaccagcagttt

SEQ ID NO: 285032 - DNA, 201 bp, Homo sapiens
accccacactcctcgacctccagagtgagtccatccggcctgatgagttttccttggaaatctttgagcggttcctgaacaagctgtgtctgcggccggayattgacaagatcctgctggagatgtgagtgggcccggcctgcctcacaacccctgtgctctgtgtttagcttctgcttagcgtgcctctagctcaatggg

SEQ ID NO: 285033 - DNA, 201 bp, Homo sapiens
gaacacctgctgtgttctaggctgctctgtgacctactgtgtaccagaggcagttgtggacctgggttgtggctgggcagcccctgtgtcccccactcacygcctccccgtgtatactggccccccaggtctggtctgaggagctattcaagctggctatgaacatcctggctcagaacgcctcccggaacaccttcctgc

SEQ ID NO: 285034 - DNA, 201 bp, Homo sapiens
ccacacaggacctgtggactggatgaggtttcgtcttagctcatgggcaggaactctggggtgcatgatgggagggccccaggggccaggcctgcaccacwgccctcacttcctgacccctgctgccctgtgctgtcctcaggagacctccagtcggaacctggtgaccctgcgtgtggaccccaatggcttcttcttgta

SEQ ID NO: 285035 - DNA, 201 bp, Homo sapiens
tggctttgttctgagggccacaggcagccacacaggacctgtggactggatgaggtttcgtcttagctcatgggcaggaactctggggtgcatgatgggarggccccaggggccaggcctgcaccacagccctcacttcctgacccctgctgccctgtgctgtcctcaggagacctccagtcggaacctggtgaccctgcg

SEQ ID NO: 285036 - DNA, 201 bp, Homo sapiens
caagaggctgaaagagatgaacgagaggtgaaagccgaggattgtctatgggaagggctggggacttctagtaccagaaggagggcagagtctgtgcttcygccgctgacccctcctcttcccctgccggcttctccagggagaagaaggagctgcagaagatcctggacagaaagcgccataacagcatctcggaggcca

SEQ ID NO: 285037 - DNA, 201 bp, Homo sapiens
gtgcccagggagaacctgtcggtgatgttcctgtactcagacccgccgtttctgcccctcagttacaggcagctctgggctaaccctgtgccagggttggkttaatcagcccactctgcaatggggtccaagcctcaggtgtgttgtgaggtctggaagcgaggggtggtgggctgaccacttggcagctcctaagccctg

SEQ ID NO: 285038 - DNA, 201 bp, Homo sapiens
cacagggctatcgtgatgtcccaagggatgcagaagggcagtgggagtcagacttctcactttcatgccttaaacattctgcagtggggtggattgggggsctgccactgtcacagagctctcagcacttctggggaaactgagcccaggatgggggctggggacctcttccagggggtgggtcagatttcacgggtggag

SEQ ID NO: 285039 - DNA, 201 bp, Homo sapiens
  misc_feature (1)...(201): n = A,T,C or G
ctgcgggaggcccaggtggacgcagaggcccagcggaggctggaacacctgagacaggtagggggcctgcagtggccagggaaagcctgctggatagaccngtcgtcagcccggcatcacctgtcagctccctgtgtccacaggctctgcagcggctcagggaggtcgtccttgatgcaaacacaactcagttcaagaggc

SEQ ID NO: 285040 - DNA, 201 bp, Homo sapiens
gcagaggtggggccgctgatgtggaggacacgaaggagggggaggacgaggcaaagcggtatcaggagttccagaacagacaggtgcagagcctgctggarctgcgggaggcccaggtggacgcagaggcccagcggaggctggaacacctgagacaggtagggggcctgcagtggccagggaaagcctgctggatagacc

SEQ ID NO: 285041 - DNA, 201 bp, Homo sapiens
ggctgtttgagggaggaagagctcactgcccagtcctgagagtagggcaagtccccttctagggggactgttcttctacgagatggggatgagctttgagkctgtgaggaccccggcagatgtggtaaggtggataatgggctttgaggcagaccacagggctatcgtgatgtcccaagggatgcagaagggcagtgggag

SEQ ID NO: 285042 - DNA, 201 bp, Homo sapiens
ctttgttctgagggccacaggcagccacacaggacctgtggactggatgaggtttcgtcttagctcatgggcaggaactctggggtgcatgatgggagggycccaggggccaggcctgcaccacagccctcacttcctgacccctgctgccctgtgctgtcctcaggagacctccagtcggaacctggtgaccctgcgtgt

SEQ ID NO: 285043 - DNA, 201 bp, Homo sapiens
gccccagggtacccacatcatacccaaagccaactgtctgtaccagtgtccctggctttggcgtccttgggcccagtcctctcacaaccctgatacattgscctgggagccttcgcccacctgacttctttttctttgagacagagtctcactctgtcgcccaggctggagtgcagtggcgcgatcttggctcactgcaac

SEQ ID NO: 285044 - DNA, 201 bp, Homo sapiens
cctcaaggttcttctagggcctttctcaagtgcccaacagccccagggtacccacatcatacccaaagccaactgtctgtaccagtgtccctggctttggsgtccttgggcccagtcctctcacaaccctgatacattgccctgggagccttcgcccacctgacttctttttctttgagacagagtctcactctgtcgccc

SEQ ID NO: 285045 - DNA, 201 bp, Homo sapiens
tgggatggtgtctgccatcgcttgccaggatgtgcccccctacacaccctccccatcccagtccatgtgacgggcccaggcatcacccagaggggttctcytcgcagaggtggggccgctgatgtggaggacacgaaggagggggaggacgaggcaaagcggtatcaggagttccagaacagacaggtgcagagcctgctg

SEQ ID NO: 285046 - DNA, 201 bp, Homo sapiens
tccatccgtcgggtgagtcaggctcccgggccaccctaccccacctcccttccttcactcatcagacacccatctccatgcctggcctggtgccacgttgscctcaaggttcttctagggcctttctcaagtgcccaacagccccagggtacccacatcatacccaaagccaactgtctgtaccagtgtccctggctttgg

SEQ ID NO: 285047 - DNA, 201 bp, Homo sapiens
tggagaaggaagggcagggtgtcctggcaaagggaacatgagacaaagccctgggaaaggtcaggtagaatcctagggccagagggaggtgaggctgggargaggctttgaggtaggtgtgacactaaatgtcacacctaggaccttggctttgttctgagggccacaggcagccacacaggacctgtggactggatgagg

SEQ ID NO: 285048 - DNA, 201 bp, Homo sapiens
ctccaggcgccgtgacacttcatcccagacccccagcccaccctcctgcctcgctgtgcgcctgttcccacaaccggcctgtctcctcaccacctgtcggytggtgtggggcctctgacccctgacctcaggtgcacgtctcacccagctgcaccccaactcctgactcccaacctcagcctctcacctctcagagccttc

SEQ ID NO: 285049 - DNA, 201 bp, Homo sapiens
ctaaaaagggagacactatctcaaaaaaaaaaaaaaaaaaaaaaaagacatcattgctataaagacaattactggagcaattagtgaaatttaaagatggrctacatattagataatatgttaatgttttgtttcctgaatttaattattgtattggagttatagaagagaatgtccatatatgctgaagtatttatgggt

SEQ ID NO: 285050 - DNA, 201 bp, Homo sapiens
tcactttcatgccttaaacattctgcagtggggtggattggggggctgccactgtcacagagctctcagcacttctggggaaactgagcccaggatggggsctggggacctcttccagggggtgggtcagatttcacgggtggagaaggaagggcagggtgtcctggcaaagggaacatgagacaaagccctgggaaaggt

SEQ ID NO: 285051 - DNA, 201 bp, Homo sapiens
ctgagcgagagctccgcggccaccgagccctcctccccgcagctgggtaggccccagcccggcccgccaccctgacttgaccctagcctctggcctcatgytccaggcgccgtgacacttcatcccagacccccagcccaccctcctgcctcgctgtgcgcctgttcccacaaccggcctgtctcctcaccacctgtcggc

SEQ ID NO: 285052 - DNA, 201 bp, Homo sapiens
cagagagttatcccaggccccacaatggggtgtggctgaggccaggagccgggagcctggcagaagtctccgctccctgcttcccaggtcacaggacgctrcaaccacactgcctgcaagcaggtcctggctccagtgatctcgggcaggctacgaagtgtccctgtaactcagtgtcctcatctgtaaaatgggagtgac

SEQ ID NO: 285053 - DNA, 201 bp, Homo sapiens
tgggggaaagcccggagcctgagggcggggccacggagccacttccggcggctgtgggcggaaaacccaaaacttccgatgggaccaagccttccgtggcttcacacgcaccggaagggaatctgggtcagccctccctccaaaggagacagcacggatcctctttttgcataggcctgagggaagtacttccgcccatat

SEQ ID NO: 285054 - DNA, 201 bp, Homo sapiens
taccccggcctgccggagccccagtcgacgcacagaaaagcctcggcggcacagacgcgggctttattaacatttggtagtgagcacggcccccagggcaycgcgggggctcgggtcccggtgacgcaacggttaaacctggctcgcgacttagcgcaggcgcctgggggaaagcccggagcctgagggcggggccacgga

SEQ ID NO: 285055 - DNA, 201 bp, Homo sapiens
ggacctgggctgcctttgaggtccagacccctggggagaggtgggagggaaacactaggggcagtacccatagactccccgctctgcacaccattcggggscctcaggcccagggtagggttgggaatccggagaagtgctggggctgggtgtcagcacactgaagtggggaggcccatgcatccccaaattttgggggcc

SEQ ID NO: 285056 - DNA, 201 bp, Homo sapiens
ggggcggcctggtacttcaggtcctggcacgctggggactggcgctcaccttaaaggagtccacaaactcgtcactcatcctccggagctcgcggccatakcgctgtgctgcccagaggttggggggcgccgagcgcgagcggccccgaaaggggctgggctcctcccccatcccttcgtcgtcctccgtccccgcggggt

SEQ ID NO: 285057 - DNA, 201 bp, Homo sapiens
gcttggggcaggagagcaggggacctgggctgcctttgaggtccagacccctggggagaggtgggagggaaacactaggggcagtacccatagactcccckctctgcacaccattcgggggcctcaggcccagggtagggttgggaatccggagaagtgctggggctgggtgtcagcacactgaagtggggaggcccatgc

SEQ ID NO: 285058 - DNA, 201 bp, Homo sapiens
ccgggggagacccctccccccaggctggcctgaagggaaaagtttcttcttttcattccactgtgataaacccaaataaggaagtgggaacagggagaggsccctgggggtggggtggggggtgctgacggaggcttggggcaggagagcaggggacctgggctgcctttgaggtccagacccctggggagaggtgggagg

SEQ ID NO: 285059 - DNA, 201 bp, Homo sapiens
gctggggggaggagatgggggcgtggcctgaagcggcaggtgtgcgaggtggggtgcctgggggccccaggggccgggggagacccctccccccaggctgkcctgaagggaaaagtttcttcttttcattccactgtgataaacccaaataaggaagtgggaacagggagagggccctgggggtggggtggggggtgctga

SEQ ID NO: 285060 - DNA, 201 bp, Homo sapiens
tccccctgttctggttggcaccccttcgccctgcttctggatcccagcccagctccctgttcagatgggagcacccagtcaccccctagtggagactttgscccccaagttcctccacccctgggaactttgctccccactccttaggcttgggaccttgaaccccaatacatcctggcccccctttccctgtcctgcccc

SEQ ID NO: 285061 - DNA, 201 bp, Homo sapiens
tctttctgggtttctaggtgacttggctggcccctctggatgagttctactttaaacctgctgctgttactgcctctgtattgggggggctcccacagggscccccaggcaggaaccccccccaccagctaagccctgcgggaggggctgcagcccccacccatcccattgcccatgcgccttccccgctcccatctctgg

SEQ ID NO: 285062 - DNA, 201 bp, Homo sapiens
gcattcagctaagtgcggcagaagagggtgggcgacagggctgtgcagcgaccccccggcccaagtctagccctccgctggtactgcagccctagtcgctmggaaacctcagtgggctgatcccggaccgccttaagcagcgccctctacacccagtccctccagctgctccccaacagccacttcggcccccagcgccct

SEQ ID NO: 285063 - DNA, 201 bp, Homo sapiens
gcccatcttttgtaagcaaagcctgccatgggtggggctggtgcaatccccattctccagaagaggaaactgaggtctggaaagcagagagttatcccagsccccacaatggggtgtggctgaggccaggagccgggagcctggcagaagtctccgctccctgcttcccaggtcacaggacgctgcaaccacactgcctgc

SEQ ID NO: 285064 - DNA, 201 bp, Homo sapiens
gctgagagcgaggagatccgccaggttagagttgatggagaacttggcggggtgtggaggaaggccagggccaggcagggctccttgtggaggtctcagascctggggcaaaggggcctgcaggggagctcctcctttgctgacccctcctcccccagagccagctgcatctctttctgggtttctaggtgacttggctgg

SEQ ID NO: 285065 - DNA, 201 bp, Homo sapiens
aactcctcgcataacacctatctcactggtgagtggggagcaagggtggcacccgtgacctctgccctgtgacccttgcacagccccactcctcctggggsacagtccttttggcccatttgctcattcattggccagtgctggggatgcaggcagggaacaggcagccagccctgagcagtggggcctcatggtggcttt

SEQ ID NO: 285066 - DNA, 201 bp, Homo sapiens
tcaagtggagatcataatcacaccccacagggccagggctgagagcgaggagatccgccaggttagagttgatggagaacttggcggggtgtggaggaagrccagggccaggcagggctccttgtggaggtctcagagcctggggcaaaggggcctgcaggggagctcctcctttgctgacccctcctcccccagagccag

SEQ ID NO: 285067 - DNA, 201 bp, Homo sapiens
gccaggttagagttgatggagaacttggcggggtgtggaggaaggccagggccaggcagggctccttgtggaggtctcagagcctggggcaaaggggcctscaggggagctcctcctttgctgacccctcctcccccagagccagctgcatctctttctgggtttctaggtgacttggctggcccctctggatgagttcta

SEQ ID NO: 285068 - DNA, 201 bp, Homo sapiens
  misc_feature (1)...(201): n = A,T,C or G
atggtcagtaggtcagctcgtctgaaggtctgctttgttaagctttgatggctgtggttagctgtggcctggtagccacagtggcccagggtcagccctgnggctcagctccagtctggcccacaggtggtgctgcccacgctggcttcacttcgcattgcagcctttgaggaggggggtaaattcgtagggcaccggatc

SEQ ID NO: 285069 - DNA, 201 bp, Homo sapiens
gcccaggatgggggctggggacctcttccagggggtgggtcagatttcacgggtggagaaggaagggcagggtgtcctggcaaagggaacatgagacaaasccctgggaaaggtcaggtagaatcctagggccagagggaggtgaggctgggaagaggctttgaggtaggtgtgacactaaatgtcacacctaggaccttg

SEQ ID NO: 285070 - DNA, 201 bp, Homo sapiens
gccactgagtgcctacttcatcaactcctcgcataacacctatctcactggtgagtggggagcaagggtggcacccgtgacctctgccctgtgacccttgsacagccccactcctcctggggcacagtccttttggcccatttgctcattcattggccagtgctggggatgcaggcagggaacaggcagccagccctgagc

SEQ ID NO: 285071 - DNA, 201 bp, Homo sapiens
cttgaagcagaggctctggggagggtcctgtgggtcaagaccgctccttcaatcaagggtagagtccggaaaggctgcctgccttcaccattactgcctgstgagataccctattaccattaccaaggatggaagaaagtgtctgggaaggaaggagccctgtaatgggggctgccctggcctccagagacacagggttgg

SEQ ID NO: 285072 - DNA, 201 bp, Homo sapiens
agcgtgatgatctcatcgccagcatcctctcaggtagggggcggggtacctggaggcagggggttgccttggaggttcccccaccccccgcccacctttgstctgccgctcccagaggtggcccccaccccgctggatgagctccgaggtcacaaggctctggtcaagctccggagccggcaagagcgagacctgcgggag

SEQ ID NO: 285073 - DNA, 201 bp, Homo sapiens
ctcctcacagggcctctgctccccagggcagcgtgatgatctcatcgccagcatcctctcaggtagggggcggggtacctggaggcagggggttgccttgsaggttcccccaccccccgcccacctttgctctgccgctcccagaggtggcccccaccccgctggatgagctccgaggtcacaaggctctggtcaagctcc

SEQ ID NO: 285074 - DNA, 201 bp, Homo sapiens
gttggccatgactcacccagagtcccactcactgggtgccagatccagggccaggccttctgactcccttgcccagggcaagggcttggcgacggggtggragccctgccaggctccatcctgacccagcttcctgtcccctccagaggcgccaagggcaagccatacctgacgctggagcagctcatggacttcatcaac

SEQ ID NO: 285075 - DNA, 201 bp, Homo sapiens
tgtccgagcgtcagtctccctgccctccttagggtaagagaccagggtgagaaggtgagatgggggttggggggtgtcagctagacgtcttgtgtcccctscgaggagtggacacagcctaccctgtctccgaggcaggagctgaggtcacaaccccaagctcatatccgctcttcagcaccccgcacggccctgcatgga

SEQ ID NO: 285076 - DNA, 201 bp, Homo sapiens
tcctccagctcctcacagggcctctgctccccagggcagcgtgatgatctcatcgccagcatcctctcaggtagggggcggggtacctggaggcagggggytgccttggaggttcccccaccccccgcccacctttgctctgccgctcccagaggtggcccccaccccgctggatgagctccgaggtcacaaggctctggt

SEQ ID NO: 285077 - DNA, 201 bp, Homo sapiens
agcggcatgaccgtcttgtggctgggcagcagcaggtcctgcaacagctggcagaagaggagcccaaggtgaggccatgggcgaacaggtgggcagacggkgtgcaaggcagccaggcctcgcctgtgatgcccatccttctcccacagctgctggcccagctggcccaggagtgtcaggagcagcgggcaaggctccccc

SEQ ID NO: 285078 - DNA, 201 bp, Homo sapiens
cacttgggtggagctaacaggcctcctggtttgcataacagacctggccccatgggatggtgtctgccatcgcttgccaggatgtgcccccctacacaccmtccccatcccagtccatgtgacgggcccaggcatcacccagaggggttctcctcgcagaggtggggccgctgatgtggaggacacgaaggagggggagga

SEQ ID NO: 285079 - DNA, 201 bp, Homo sapiens
cacctactcaggaccccaagatccgggaagttctgggctttgggggtcccgatgcccggctggaggagaagctgatgacggtggtgtctgggccagacccrgtgaacacagtgttcttgaacttcatggccgtgcaggatgacacagccaaggtgggctggcaccaaggggacgaagggggagtcactgtcttattctgtg

SEQ ID NO: 285080 - DNA, 201 bp, Homo sapiens
gttggtttaatcagcccactctgcaatggggtccaagcctcaggtgtgttgtgaggtctggaagcgaggggtggtgggctgaccacttggcagctcctaarccctggccattgctggtgcccactagtctgctgccttgacaatcctgagtagtcaggagagtaaagggggaaactgaggcccagaggttggccatgactc

SEQ ID NO: 285081 - DNA, 201 bp, Homo sapiens
  misc_feature (1)...(201): n = A,T,C or G
ctcccaggcccggctgctcatcgaaaagtatgagcccaaccagcagtttctggagcgaggtgagctggctggggtgcaggtgggtgggggcaggtgggacnccagctgaccctgctgatcctctcccaccccagaccagatgtccatggagggctttagccgctacctgggaggcgaggagaatggcatcctgcccctgga

SEQ ID NO: 285082 - DNA, 201 bp, Homo sapiens
gcagccctgggattttgaggagatgaaaaccacccatttgcattcaggaggccttcaggtcacacctgggctggaattcctccagctccatgtaggcttgsagtgggggtacaggggtctcagccacttcatcagggcagtgcgaagccacagaagctgttcagacgtggtgtcctgggagtcatgaggagggcagtggct

SEQ ID NO: 285083 - DNA, 201 bp, Homo sapiens
tcagttacaggcagctctgggctaaccctgtgccagggttggtttaatcagcccactctgcaatggggtccaagcctcaggtgtgttgtgaggtctggaarcgaggggtggtgggctgaccacttggcagctcctaagccctggccattgctggtgcccactagtctgctgccttgacaatcctgagtagtcaggagagta

SEQ ID NO: 285084 - DNA, 201 bp, Homo sapiens
cgaggctctccctgttctctcttttctgaggctcaggcctctgcttcaggaagccttccctgccccgcttcctgtggcctgatatgacccaaacgcctagyatcttccgctggggctgctctgggcccccgacaggcagttgactctatcaggtgatggatcggccagggtggagcagggcagctcagaacctgcccaaca

SEQ ID NO: 285085 - DNA, 201 bp, Homo sapiens
gtcggtgatgttcctgtactcagacccgccgtttctgcccctcagttacaggcagctctgggctaaccctgtgccagggttggtttaatcagcccactctkcaatggggtccaagcctcaggtgtgttgtgaggtctggaagcgaggggtggtgggctgaccacttggcagctcctaagccctggccattgctggtgccca

SEQ ID NO: 285086 - DNA, 201 bp, Homo sapiens
tggcgctcaccttaaaggagtccacaaactcgtcactcatcctccggagctcgcggccatagcgctgtgctgcccagaggttggggggcgccgagcgcgarcggccccgaaaggggctgggctcctcccccatcccttcgtcgtcctccgtccccgcggggtaggagctgtggcgactccggatctccacagccccagcgc

SEQ ID NO: 285087 - DNA, 201 bp, Homo sapiens
gggcagacggggtgcaaggcagccaggcctcgcctgtgatgcccatccttctcccacagctgctggcccagctggcccaggagtgtcaggagcagcgggcraggctcccccaggagatccgccggagcctgctgggcgagatgccggaggggctgggggacgggcctctggtggcctgtgccagcaacggtcacgcacccg

SEQ ID NO: 285088 - DNA, 201 bp, Homo sapiens
agctgcattccagggctgggctagggtaggcaggcagcaccgggcaaacccactcctccaccctgccccccggggcctgagtcaccgtctgaacaaccagrgagtcatgggggtggagaagcagagcccagaaagcgggctagcctgcacgcacgccaagatggagctccaggctagcccacagaacagcccagccgcagc

SEQ ID NO: 285089 - DNA, 201 bp, Homo sapiens
agggagtctaccctgggcagggaggtggggcagggagacctcaggaagggggacagcatgtacaaaggtcctggggcagggccagggggtgcaggagcggkgagcattgtcatggggagcattgagtagctgtgaggaatggtacagaaaaaatcagtctgagctgggcgtggtggctcacacctgtgatcccagctactc

SEQ ID NO: 285090 - DNA, 201 bp, Homo sapiens
ccagggcagtgggaacgggtggagtttcgggatgtggagcgaaggtcactgggagggggcggagcttcccctgcccaagttccgatcccaccaggactggragactcgcgtccagctggagctttgccgcatctgcgttgctgtgcccgcgctcttcgggcgaggaagtcccttctggtggagggagaaaagggttacatg

SEQ ID NO: 285091 - DNA, 201 bp, Homo sapiens
ggctgtatgcaagtcacttacctgctcagagcctcttcagggggcttatggtcctgacctcctgtggttgggggcccatgcccagccctggccctcctgcmtgagccctactgggactggagtgtaccactgctcctcctccttctagcctcagtctgtggcctccccagccctaccccttccagggccccagcccccctc

SEQ ID NO: 285092 - DNA, 201 bp, Homo sapiens
ccctcttccccccaccgcgccatgcccaggcacacccagattcctgtccagttcccatggctatccacccgagaccacttggtgcaggtgggcatgctggyctgccaccttcttggaagctgggccacagaaccttagccttggagtagaaatactgggttcaaatcctggctctgccccatgggctgagaggctgtatgc

SEQ ID NO: 285093 - DNA, 201 bp, Homo sapiens
gacatcacccctgcctcctggggctcagtgtgggtgtgagtgaaggtgggaggagggctcttcagtcatcaggcatggaaacaagcatacagttctgctgrtgatgtggcctgggaggtgcgagttagggtacagaactggcagaggatagggagtctaccctgggcagggaggtggggcagggagacctcaggaaggggg

SEQ ID NO: 285094 - DNA, 201 bp, Homo sapiens
aacagacagaccccaaaaagccaactacagatgaggtcaggcccacagggtgggcaggtcggggaggtagcatctatttacctcccagggggctgggtctraccatcaacaagactgacatcacccctgcctcctggggctcagtgtgggtgtgagtgaaggtgggaggagggctcttcagtcatcaggcatggaaacaag

SEQ ID NO: 285095 - DNA, 201 bp, Homo sapiens
cagaaagtggggggtgccatgggtcccccaggacctgcctgtccgagcgtcagtctccctgccctccttagggtaagagaccagggtgagaaggtgagatkggggttggggggtgtcagctagacgtcttgtgtcccctgcgaggagtggacacagcctaccctgtctccgaggcaggagctgaggtcacaaccccaagct

SEQ ID NO: 285096 - DNA, 201 bp, Homo sapiens
cactggatgcctccccccgccggccccctggccccaccacctcccctgccagcacctccctcagcagcccaggtaaggagtggcctgggtcgggggtgggytgcagggaggcaccccccaccctgtcctccagctcctcacagggcctctgctccccagggcagcgtgatgatctcatcgccagcatcctctcaggtaggg

SEQ ID NO: 285097 - DNA, 201 bp, Homo sapiens
aagcctgccatgggtggggctggtgcaatccccattctccagaagaggaaactgaggtctggaaagcagagagttatcccaggccccacaatggggtgtgkctgaggccaggagccgggagcctggcagaagtctccgctccctgcttcccaggtcacaggacgctgcaaccacactgcctgcaagcaggtcctggctcca

SEQ ID NO: 285098 - DNA, 201 bp, Homo sapiens
tgacaatcctgagtagtcaggagagtaaagggggaaactgaggcccagaggttggccatgactcacccagagtcccactcactgggtgccagatccagggscaggccttctgactcccttgcccagggcaagggcttggcgacggggtgggagccctgccaggctccatcctgacccagcttcctgtcccctccagaggcg

SEQ ID NO: 285099 - DNA, 201 bp, Homo sapiens
cacagcctaccctgtctccgaggcaggagctgaggtcacaaccccaagctcatatccgctcttcagcaccccgcacggccctgcatggacgcggcctctgytcccagcctgggcatgtgtgttcttggtttcctgctcatgactcactcccgtttctaaactggcaatgaccagaactgtctgtgggggccctggaggggc

SEQ ID NO: 285100 - DNA, 201 bp, Homo sapiens
ctgcggccctcccaggcccggctgctcatcgaaaagtatgagcccaaccagcagtttctggagcgaggtgagctggctggggtgcaggtgggtgggggcasgtgggaccccagctgaccctgctgatcctctcccaccccagaccagatgtccatggagggctttagccgctacctgggaggcgaggagaatggcatcctg

SEQ ID NO: 285101 - DNA, 201 bp, Homo sapiens
actccccccagctcacgctggtgggatggacaggtggtgggtatccatctgagagatggagagccctctgcaaatccagcatgtcctggttccaggtgggrccggggtggtgaggagctgggctggtgggcggcctcggtgacagagcctcgccgccccagcggggcagctggctgggacctcgtcggtggagatgtaccg

SEQ ID NO: 285102 - DNA, 201 bp, Homo sapiens
ctgaggaggaacccttcattacccacggcttcaccatgaccacagaggtgcctctgcgcgacgtgctggaggccattgccgagactgccttcaagacctcrccctaccccgtcatcctctccttcgagaaccatgtggactcgtgagtgagcccctggcatgaaaccccatggaccgggggacagtcttccagcttcagtg

SEQ ID NO: 285103 - DNA, 201 bp, Homo sapiens
ggcgcctcactgggccctcatcgtccgccccgcccgggccctctcctgcggccccgggggggctctgaaagtagacgcgtggtcctgggccgccactgccyggcccgggggccggggccgccaacgccgcgccccccgcggtgccgctgtccgccatggcggccgccggggccacgtgcgagcgtcgggcccctccctgcg

SEQ ID NO: 285104 - DNA, 201 bp, Homo sapiens
  misc_feature (1)...(201): n = A,T,C or G
ttgccgagactgccttcaagacctcgccctaccccgtcatcctctccttcgagaaccatgtggactcgtgagtgagcccctggcatgaaaccccatggacngggggacagtcttccagcttcagtgctgttggactgctcagggacctccaaccctgcgaacggccactgacatgtcccgtagacctcagcttcctctctg

SEQ ID NO: 285105 - DNA, 201 bp, Homo sapiens
cagtggggagctatagtgagtctcagggatgactccccccagctcacgctggtgggatggacaggtggtgggtatccatctgagagatggagagccctctscaaatccagcatgtcctggttccaggtggggccggggtggtgaggagctgggctggtgggcggcctcggtgacagagcctcgccgccccagcggggcagc

SEQ ID NO: 285106 - DNA, 201 bp, Homo sapiens
agagcgaggttccgtctcaaaaaaaaaaaaaaaagagattggattggaggcagggagggctggagtcttccacacaggaggtggtgtgagctgtgccaggrctgaggtgggtggagggagtgaggagagggagggattgttgaggcagtggggagctatagtgagtctcagggatgactccccccagctcacgctggtggg

SEQ ID NO: 285107 - DNA, 201 bp, Homo sapiens
ggtgacagagcgaggttccgtctcaaaaaaaaaaaaaaaagagattggattggaggcagggagggctggagtcttccacacaggaggtggtgtgagctgtsccagggctgaggtgggtggagggagtgaggagagggagggattgttgaggcagtggggagctatagtgagtctcagggatgactccccccagctcacgct

SEQ ID NO: 285108 - DNA, 201 bp, Homo sapiens
agcagcggcatgaccgtcttgtggctgggcagcagcaggtcctgcaacagctggcagaagaggagcccaaggtgaggccatgggcgaacaggtgggcagayggggtgcaaggcagccaggcctcgcctgtgatgcccatccttctcccacagctgctggcccagctggcccaggagtgtcaggagcagcgggcaaggctcc

SEQ ID NO: 285109 - DNA, 201 bp, Homo sapiens
gagactgcgctggaatcctgtggcctcaaattcaaccgggtgtgtggggtggggacaggggcggggtggggtgtcacggtgggcacccacccttacggggstgcccgcccctggcttctcaccccacactcctcgacctccagagtgagtccatccggcctgatgagttttccttggaaatctttgagcggttcctgaaca

SEQ ID NO: 285110 - DNA, 201 bp, Homo sapiens
gcagacaagaagcgggtggagactgcgctggaatcctgtggcctcaaattcaaccgggtgtgtggggtggggacaggggcggggtggggtgtcacggtggrcacccacccttacggggctgcccgcccctggcttctcaccccacactcctcgacctccagagtgagtccatccggcctgatgagttttccttggaaatct

SEQ ID NO: 285111 - DNA, 201 bp, Homo sapiens
ggacacactggacatcagttccatcagggacacacggacaggccggtacgcccgcctgcccaaggtgagtgatgagcctgggagtgaagaccacagcgagrctgtgcgggagccccctcttcacccttcgctgtcacctactcaggaccccaagatccgggaagttctgggctttgggggtcccgatgcccggctggagga

SEQ ID NO: 285112 - DNA, 201 bp, Homo sapiens
agccactgcacccggcctcgcccacctgacttctatacccagccagagcctcgaggctctagcccctccctcagggcccctcagctgagcccttgcccacscctgtagctggaggaggcccagaagcagcggcatgaccgtcttgtggctgggcagcagcaggtcctgcaacagctggcagaagaggagcccaaggtgagg

SEQ ID NO: 285113 - DNA, 201 bp, Homo sapiens
tacccacatcatacccaaagccaactgtctgtaccagtgtccctggctttggcgtccttgggcccagtcctctcacaaccctgatacattgccctgggagscttcgcccacctgacttctttttctttgagacagagtctcactctgtcgcccaggctggagtgcagtggcgcgatcttggctcactgcaacctcttgggt

SEQ ID NO: 285114 - DNA, 201 bp, Homo sapiens
agccacactgccctgagagtaccccttgaattccccactgagtcacctcggcacacactgggaaaaacccctccagacttcctaagcagctgtgtggtccygacccctcaccctgtggccctgtcctctgcagggtctcccagctctgacagctgcccaggcctgagcaatggggaggaggtagggcttgagaagcccagc

SEQ ID NO: 285115 - DNA, 201 bp, Homo sapiens
tcactgcagacctttacctttgacctatgacccctctcaacccatactgggttaataccatctgacctcgacctcttggcctctccccaagccacactgcyctgagagtaccccttgaattccccactgagtcacctcggcacacactgggaaaaacccctccagacttcctaagcagctgtgtggtcctgacccctcacc

SEQ ID NO: 285116 - DNA, 201 bp, Homo sapiens
tgacgctggagcagctcatggacttcatcaaccagaagcaacgcgacccgagactcaacgaagtgctgtacccgcccctgcggccctcccaggcccggctrctcatcgaaaagtatgagcccaaccagcagtttctggagcgaggtgagctggctggggtgcaggtgggtgggggcaggtgggaccccagctgaccctgct

SEQ ID NO: 285117 - DNA, 201 bp, Homo sapiens
ctggtacttcaggtcctggcacgctggggactggcgctcaccttaaaggagtccacaaactcgtcactcatcctccggagctcgcggccatagcgctgtgmtgcccagaggttggggggcgccgagcgcgagcggccccgaaaggggctgggctcctcccccatcccttcgtcgtcctccgtccccgcggggtaggagctg

SEQ ID NO: 285118 - DNA, 201 bp, Homo sapiens
acttgaccctagcctctggcctcatgctccaggcgccgtgacacttcatcccagacccccagcccaccctcctgcctcgctgtgcgcctgttcccacaacyggcctgtctcctcaccacctgtcggctggtgtggggcctctgacccctgacctcaggtgcacgtctcacccagctgcaccccaactcctgactcccaacc

SEQ ID NO: 285119 - DNA, 201 bp, Homo sapiens
ttatagaagagaatgtccatatatgctgaagtatttatgggtaaagggtcatgatgtctataatttactcccaaatgattcagtaaaagtaatgataattrtaacacctatatgggccaggcgaggtggctcatgcctgtaatcccagcactttgggaggctgaggtgggcgagtcacctgaggttgggaggttccagacc

SEQ ID NO: 285120 - DNA, 201 bp, Homo sapiens
taatcccagaactttgaaaggctgaggcgtgtggatcacctgaggtcaggagttcgagaccagcctggccaacatggtgaaaccccatctctactaaaaawacaaaaattagccaggcatggtggtgggcaactgtaatcccagctactcgggaggctgaggcaggagaatcgcttgaaccagggaggcggaggttgcagt

SEQ ID NO: 285121 - DNA, 201 bp, Homo sapiens
gcggcggccggacaagtccttcgaccccttcactgaggtcatcgtggatggcatcgtggccaatgccttgcgggtcaaggtggggcttgcgggcggctcargccaggggtgtcctgggggcaggactctcagcatccgcctcaccctccttggcccacccccaggtgatctcagggcagttcctgtccgacaggaaggtgg

SEQ ID NO: 285122 - DNA, 201 bp, Homo sapiens
tcccagaactttgaaaggctgaggcgtgtggatcacctgaggtcaggagttcgagaccagcctggccaacatggtgaaaccccatctctactaaaaatacmaaaattagccaggcatggtggtgggcaactgtaatcccagctactcgggaggctgaggcaggagaatcgcttgaaccagggaggcggaggttgcagtgaa

SEQ ID NO: 285123 - DNA, 201 bp, Homo sapiens
aaaatacaaaaattagccaggcatggtggtgggcaactgtaatcccagctactcgggaggctgaggcaggagaatcgcttgaaccagggaggcggaggttkcagtgaaccgaggttgtgccactgcactccagcctgggtgacagagcgaggttccgtctcaaaaaaaaaaaaaaaagagattggattggaggcagggagg

SEQ ID NO: 285124 - DNA, 201 bp, Homo sapiens
cgttgccttcctgaccacccaggataccactacgtctgcctgcggaacgaggccaaccaaccgctgtgcctgccggccctgctcatctacaccgaagcctyggactacattcctgacgaccaccagggtgagctgggggtgggcggggcctgcctggccagggagtgtgagggacaagggccacccccagggcctgggagt

SEQ ID NO: 285125 - DNA, 201 bp, Homo sapiens
aggcatggtggtgggcaactgtaatcccagctactcgggaggctgaggcaggagaatcgcttgaaccagggaggcggaggttgcagtgaaccgaggttgtkccactgcactccagcctgggtgacagagcgaggttccgtctcaaaaaaaaaaaaaaaagagattggattggaggcagggagggctggagtcttccacaca

SEQ ID NO: 285126 - DNA, 201 bp, Homo sapiens
cctggctcagccgctccctcccgccccgcgaggtacccgggcggcgctggccccgggccggccacacagtagctgctggaaagggctgacccaaataggarcgagtgaccctctctggggggccgcggcacggtttgcagagcgcgggatcgggctgccggcagcgctgcggtcccaatgcgcgtgctggggacttggacc

SEQ ID NO: 285127 - DNA, 201 bp, Homo sapiens
gcaactgtaatcccagctactcgggaggctgaggcaggagaatcgcttgaaccagggaggcggaggttgcagtgaaccgaggttgtgccactgcactccarcctgggtgacagagcgaggttccgtctcaaaaaaaaaaaaaaaagagattggattggaggcagggagggctggagtcttccacacaggaggtggtgtgag

SEQ ID NO: 285128 - DNA, 201 bp, Homo sapiens
gaggcaggagaatcgcttgaaccagggaggcggaggttgcagtgaaccgaggttgtgccactgcactccagcctgggtgacagagcgaggttccgtctcaaaaaaaaaaaaaaaagagattggattggaggcagggagggctggagtcttccacacaggaggtggtgtgagctgtgccagggctgaggtgggtggagggag

SEQ ID NO: 285129 - DNA, 201 bp, Homo sapiens
agccccatggagtttgtggagtatcctttgaaggtgctgtgggcgggcaggccagggtggggcgctcggaggccggctccggtgttctgtccccacatatrccacctgcacagggtgctggccctccggcggccctcctgcaccctggcctggggcttgggcagatccaggcagtctcagggggcatggctaggctaagaa

SEQ ID NO: 285130 - DNA, 201 bp, Homo sapiens
tgaggcatgagaatcccttgaacctgggaggtggaggttgcagtgagctgagattgcaccattgcactccaacgtgggctaaaaagggagacactatctcaaaaaaaaaaaaaaaaaaaaaaaagacatcattgctataaagacaattactggagcaattagtgaaatttaaagatggactacatattagataatatgtta

SEQ ID NO: 285131 - DNA, 201 bp, Homo sapiens
tgaggagctattcaagctggctatgaacatcctggctcagaacgcctcccggaacaccttcctgcgcaaagcgtgagccccaggccacccgagggggagcsggggggttcacgtggccgttttcagggtgtgacctcttcatctgccttcccagatacacgaagctgaagctgcaggtgaaccaggatggtcggatccccg

SEQ ID NO: 285132 - DNA, 201 bp, Homo sapiens
atcctgtggcctcaaattcaaccgggtgtgtggggtggggacaggggcggggtggggtgtcacggtgggcacccacccttacggggctgcccgcccctggyttctcaccccacactcctcgacctccagagtgagtccatccggcctgatgagttttccttggaaatctttgagcggttcctgaacaagctgtgtctgcgg

SEQ ID NO: 285133 - DNA, 201 bp, Homo sapiens
caactgaccaagagccccatggagtttgtggagtatcctttgaaggtgctgtgggcgggcaggccagggtggggcgctcggaggccggctccggtgttctrtccccacatatgccacctgcacagggtgctggccctccggcggccctcctgcaccctggcctggggcttgggcagatccaggcagtctcagggggcatgg

SEQ ID NO: 285134 - DNA, 201 bp, Homo sapiens
ttatgggtaaagggtcatgatgtctataatttactcccaaatgattcagtaaaagtaatgataattgtaacacctatatgggccaggcgaggtggctcatrcctgtaatcccagcactttgggaggctgaggtgggcgagtcacctgaggttgggaggttccagaccagcctggccaacatggtgaaaccccatctctact

SEQ ID NO: 285135 - DNA, 201 bp, Homo sapiens
agggctatcgtgatgtcccaagggatgcagaagggcagtgggagtcagacttctcactttcatgccttaaacattctgcagtggggtggattggggggctsccactgtcacagagctctcagcacttctggggaaactgagcccaggatgggggctggggacctcttccagggggtgggtcagatttcacgggtggagaag

SEQ ID NO: 285136 - DNA, 201 bp, Homo sapiens
ctccctcagggttggtgtgaaggtctccagccatgtccgtgtccacaggtcaggcattctttctgactctccctcttccccccaccgcgccatgcccaggsacacccagattcctgtccagttcccatggctatccacccgagaccacttggtgcaggtgggcatgctggcctgccaccttcttggaagctgggccacaga

SEQ ID NO: 285137 - DNA, 201 bp, Homo sapiens
tgcttcgagatgtcgtcctttgtggagaccaaggccatggagcaactgaccaagagccccatggagtttgtggagtatcctttgaaggtgctgtgggcggrcaggccagggtggggcgctcggaggccggctccggtgttctgtccccacatatgccacctgcacagggtgctggccctccggcggccctcctgcaccctg

SEQ ID NO: 285138 - DNA, 201 bp, Homo sapiens
gtcatgatgtctataatttactcccaaatgattcagtaaaagtaatgataattgtaacacctatatgggccaggcgaggtggctcatgcctgtaatcccakcactttgggaggctgaggtgggcgagtcacctgaggttgggaggttccagaccagcctggccaacatggtgaaaccccatctctactaaaaatacataaa

SEQ ID NO: 285139 - DNA, 201 bp, Homo sapiens
taatgggctttgaggcagaccacagggctatcgtgatgtcccaagggatgcagaagggcagtgggagtcagacttctcactttcatgccttaaacattctkcagtggggtggattggggggctgccactgtcacagagctctcagcacttctggggaaactgagcccaggatgggggctggggacctcttccagggggtgg

SEQ ID NO: 285140 - DNA, 201 bp, Homo sapiens
tttgggaggctgaggtgggcgagtcacctgaggttgggaggttccagaccagcctggccaacatggtgaaaccccatctctactaaaaatacataaattakccgggcaaggtggcgggcgcctgtaatcccagctacttgggaggctgaggcaggaaaattgcttgagctgggtggtgtccagggcgcatcagtgagaccc

SEQ ID NO: 285141 - DNA, 201 bp, Homo sapiens
gcctgcaagcaggtcctggctccagtgatctcgggcaggctacgaagtgtccctgtaactcagtgtcctcatctgtaaaatgggagtgacaacagcacatrcctcttaggctggttaggaggcctttgtgtgctcgaagatgctaggtgcatagaactgtacctggtgcgcagtaggggcggtgtgcgtatatgagatgta

SEQ ID NO: 285142 - DNA, 201 bp, Homo sapiens
cccaggtcacaggacgctgcaaccacactgcctgcaagcaggtcctggctccagtgatctcgggcaggctacgaagtgtccctgtaactcagtgtcctcayctgtaaaatgggagtgacaacagcacatgcctcttaggctggttaggaggcctttgtgtgctcgaagatgctaggtgcatagaactgtacctggtgcgca

SEQ ID NO: 285143 - DNA, 201 bp, Homo sapiens
gggttatttgtgtaaaacagaagttttaatgattgtgaattttgataacaaaaggaaatcagtatgtttatagtaaagtacaatttactttcaaacctctrtgttttatgattatgacttaaacgctttttaaacttattttcacttggagacttcattcattccctttgtcttctaggtatcattgttactaccactttc

SEQ ID NO: 285144 - DNA, 201 bp, Homo sapiens
tgagtatatcaaatttctacggtcaataagaccagataacatgtctgagtatagtaagcagatgcagagatgtacgtttctaagtaaaaagtagttttgcwttgataaatgtaaattagtatttttaggagcttagaatgatctaaatctgaatatttttcctgttggtctaatatgttacagttatttactgatttgaaa

SEQ ID NO: 285145 - DNA, 201 bp, Homo sapiens
aggaaatttgcccaattcttcaattattaagacttagaagtgtggccaggcactatggcccaggcctgtaatccctccactttgggaggctgaggtgggcrgatctcttgagcccaggagtttgagaccaggctaggcaacatggcaaaaccccatctctacagaaaaaaaattagccagatgtggtggcatgcatctgta

SEQ ID NO: 285146 - DNA, 201 bp, Homo sapiens
gctgaaaatgaagttaactaaaattagaggtgtgataccaacaaaatcaagtatttatgttattagaagcatggattttgtaaaagctgattgtttatccygtactgttatcaaatatgtaggagagaggacaaaaaagtttttggggttgtttccattaaacaaacaaaaggtgtatttagggaggactttgaaagattt

SEQ ID NO: 285147 - DNA, 201 bp, Homo sapiens
cttttcctttaaccatttaaaaaagttccccctaccctaggctttcatggttctggagaacaactcagtatagcaacaactcagtgtagcatattaagtatttttttttttttttttttttttacaataattgttaatctgcctgtgctgctgaaaagagttgacctgggactgttacaaaataataacacataaaattaa

SEQ ID NO: 285148 - DNA, 201 bp, Homo sapiens
tatgatgggtctttttaactttattagatattttgtttttttctaaaggatttgaaacattaagttactgattattcttttttttttttttaatttttaatttttttgtcaggatgggatattgcttggttgcccaggctggtctcgaactcctggcttcaagtgatcctgtcacctctgcctctcagaagtgctgagctt

SEQ ID NO: 285149 - DNA, 201 bp, Homo sapiens
cctgttaattttgatcctgtagtatgtgaaaaactgatttagagataatgatccaatttttcctatgtctatcaaattgaagttatgtgaataagccagctttttttttttttttttaaactagagagttagtaatctataacatctgacacatttagttctgttcttttacttgtggattcactcctcaataggctacat

SEQ ID NO: 285150 - DNA, 201 bp, Homo sapiens
aaatatgtaggagagaggacaaaaaagtttttggggttgtttccattaaacaaacaaaaggtgtatttagggaggactttgaaagatttagtggataaatygcattttttattctagcttttattgtaatatataaacccgtgttgaaatgatagacttcaaaccattaaaatagcttgactgtcctgaccctgtggggaa

SEQ ID NO: 285151 - DNA, 201 bp, Homo sapiens
acctgaaaattgaaaaaaattttggtaactcatttggaatcaaaatcttaacctgaatcaatgtgaggctatttatgatctttattcctctgtgaataccrtgaatattcacacttttttgctgtagaaatattaatgtttgattatatcatgccacccaaactctaggctattacataatatatggcaggtgtaccatat

SEQ ID NO: 285152 - DNA, 201 bp, Homo sapiens
gagaccttgtctgcaaaaaatttaaaaattagccgggcatggtggcatacacttgtagtcctaacgcgcagaggctgaggcaggaggattgccaggagttygaggctgcagtgagctatgatcttgccactgcactctagtctgggcaacaaagagagaccttttaatatataggtttagctagaccaaagatgaaatttt

SEQ ID NO: 285153 - DNA, 201 bp, Homo sapiens
ggtgggtggatcacctaggttgggagtttgagaccagcctgttgaacatggaggaaaccctgtctctactaaagatacaaaattagcctggcatggtggcrcatgcctgtaatcccagccactcggtaggctgaggcaggagaattgcttgaacctgggaggcggaggttgcagtgagctgagatcacgccattgcgcctc

SEQ ID NO: 285154 - DNA, 201 bp, Homo sapiens
actttttattatagaatattctctaagatcagtttaattatgtattttaggatattggtgctggaaaaggcaaatactatgctgtcaattttccaatgagwgatggtatagatgatgagtcatatgggcagatatttaagcctgtaagtattattgttttcacaattggaatggaatttcagaatgttattggagatgcta

SEQ ID NO: 285155 - DNA, 201 bp, Homo sapiens
agaatacatttgtcaacaaccattacatcctagtggaagtcaagcaaaagtcttctctgttttaagcttaaagaataagacagtatctttgcagtgtgatsctagtttatctcagaagtggaaaatggaagcttcatttaatttctgacaggtggatgtcactatggtctcatctcagttattattcaaaattcttacagt

SEQ ID NO: 285156 - DNA, 201 bp, Homo sapiens
aaaattatctctgagttgttgaaggagttatttttccttatctgtggctgcagtttgagagagagatctatagaggtacttaggaatttggatgttcgcartgttagttattttttgccatcagttatgacacatcttagcagattctactttgtattatactgagctagtgttttttgcttgtagttattccatgcatgc

SEQ ID NO: 285157 - DNA, 201 bp, Homo sapiens
aaattagccgggcgtggtggtgggcgcttgtagtcccagctactggggaggctgaggcaggagaatggcgtgaacccgggaggcggagcttgctgtgagcygagatcgctccactgcactccagcctgggcgacacagcaagactcagccaaaaaaaaaaaaaaaagattttacagttgctgatgttttcaggataacatt

SEQ ID NO: 285158 - DNA, 201 bp, Homo sapiens
ttcatctgtgttttaactgtgcagtaggactgtaaagttttcacaatactttggcttttccatatttgtatggtttgtatttagttaatcttaataaaaayttagacttcaagaaaaattgggagaggaggtgtgtaattttgcttgctttctcctcgttggatgttgggtctcataactctaatattgagggtaaatttt

SEQ ID NO: 285159 - DNA, 201 bp, Homo sapiens
taacttccatatctgaatgaggctttgttctctactgatggatataaaattatctctgagttgttgaaggagttatttttccttatctgtggctgcagttkgagagagagatctatagaggtacttaggaatttggatgttcgcaatgttagttattttttgccatcagttatgacacatcttagcagattctactttgta

SEQ ID NO: 285160 - DNA, 201 bp, Homo sapiens
ttgagcccaggagtttgagaccaggctaggcaacatggcaaaaccccatctctacagaaaaaaaattagccagatgtggtggcatgcatctgtagtcccarctacccaggaggctgaggtgggagtacctgagcccaggaagttgagtctgcaggaagccatgttcctgccactacactctagcctgggcaacagtgtgag

SEQ ID NO: 285161 - DNA, 201 bp, Homo sapiens; identical to SEQ ID NO: 58233

SEQ ID NO: 285162 - DNA, 201 bp, Homo sapiens
ttagtaatctataacatctgacacatttagttctgttcttttacttgtggattcactcctcaataggctacatacagaaatttataattttaacttcccartgtattacaatgatggcttcagtctatatttgtaactgattgacatccaaaaattcaagccatgactgaattaaggacgacttaactttagctgtaggat

SEQ ID NO: 285163 - DNA, 201 bp, Homo sapiens
tatacaaatgtcgaaatttattcaataatttaaacagctgtttttagttcagcctggattatatgggagatttatatggcattgaacaaagttttaaactrttttattaagattatttttcacatctgtggtatatcattacagtttagcaaccaaagtttaaagagttgccataaagtattcttaagctgtatggctttt

SEQ ID NO: 285164 - DNA, 201 bp, Homo sapiens
ttctctcccttctcccgcccaccattcgtggcaacgcaggtttggggtgccccgcgtcggcctcctaccccctcgacccgtcccccgcgaggcaaaatttstatcccggccttgactctacacaaagccccgcggccgcgagagctccgcccctcccgtccccttccctcctcctcgcctgctcgcctcccctaccctgcg

SEQ ID NO: 285165 - DNA, 201 bp, Homo sapiens
aaaaaagttaccaagatgatacctcccaacgtactccttcttcagcaaattatagaaattctacttggcagccaacgattgtcagattttcttagacttgyatttatgagtagtaccaaagtcttttgctgaataacctttaatacaactacatgggttcttagctgtggtataaatctttattatccgtgaaataggtaa

SEQ ID NO: 285166 - DNA, 201 bp, Homo sapiens
attagggataatctgtattttgatgcaaatcagtaacatttaaaatgcccaaattattaatacattactgaccatttaaatgatgaataaaaattgtaggstcttaaaacttcttagcctttttatactttatgaaaaagtgggctgggcacagtggctcacatctgtaatcccagcactttgggaggctgaggcgggcag

SEQ ID NO: 285167 - DNA, 201 bp, Homo sapiens
ttgatgattgcatcaagcaaaaaagtatttgtgggaaatagtttttgtaagaaaaggctttcattaatttgcagaatgtgttgaaattaatgaaatccatmttccacagttaatgttggagaagattgtccagtgtttgatggactctttgagttttgtcagctctcaactggcggttcagttggtaagtgctaatgcaat

SEQ ID NO: 285168 - DNA, 201 bp, Homo sapiens
tgttggtctaatatgttacagttatttactgatttgaaaagtcattttaacactactaaagctacttaagaaaaaagtaaacctatctgaagcttattggyttgcaaaactgctgtttgggtattcttctactcctagtttgctcccctgataactttgggttaatacatattggtagggagacctcactcccttactccc

SEQ ID NO: 285169 - DNA, 201 bp, Homo sapiens
ttctgaacagcgctcttgtcctgggcccatttatgataaccttcgttgtgggaatgggagcaggcacgggtacccgggaaaggatgcaagcttgataagtrgggtggaaatatttgtcttgtgattgtgacttaatatgatactttattgtagcccattcacctgcttacgtgatggccagcaacaagtgaatagctgata

SEQ ID NO: 285170 - DNA, 201 bp, Homo sapiens
attttgttaagtagtaaatgccttctaatgatagacatacataaattcaaatagttcatggagggtctcttgtctgtattgtttagtttgtgtcttttctrttttaggtgatattggaaattattattatggacagggtcatcccatgaagcctcatagaatccgcatgacccataacttgctgttaaattatggcttata

SEQ ID NO: 285171 - DNA, 201 bp, Homo sapiens
agtttgaaagttgcaaaataaatctaagttgctaaggttttaaataaattttgttaagtagtaaatgccttctaatgatagacatacataaattcaaatarttcatggagggtctcttgtctgtattgtttagtttgtgtcttttctattttaggtgatattggaaattattattatggacagggtcatcccatgaagcct

SEQ ID NO: 285172 - DNA, 201 bp, Homo sapiens
aaaggagttttagacttgacattttttacatttttatttgtttttaaaatatttagaaaacccattttggttgagtaacatttgcacttattatctttttwaaatttatttttcgaactgttgcagtatgcagattttgttgttacccaaatcttcttgtcttaggtcatgctaaatgtgtagaagttgtaaaaactttta

SEQ ID NO: 285173 - DNA, 201 bp, Homo sapiens
aggcaaatactatgctgtcaattttccaatgagagatggtatagatgatgagtcatatgggcagatatttaagcctgtaagtattattgttttcacaattrgaatggaatttcagaatgttattggagatgctaacatttgttatcttgtgtgtagattatctcaaaggtgatggagatgtatcaacctagtgctgtggta

SEQ ID NO: 285174 - DNA, 201 bp, Homo sapiens
aaactttttattatagaatattctctaagatcagtttaattatgtattttaggatattggtgctggaaaaggcaaatactatgctgtcaattttccaatgwgagatggtatagatgatgagtcatatgggcagatatttaagcctgtaagtattattgttttcacaattggaatggaatttcagaatgttattggagatgc

SEQ ID NO: 285175 - DNA, 201 bp, Homo sapiens
gcatataatacatatggaatactgtgttagtgtggccaagcatagtacagataacacaagtgcaacagctgccttaatgtttttgtagataaagatgaggrtatgtataaacaaatacagacacgacaattagctatttggggagaaaagaaatatttaaaacaattaatgctaggcaatatatgtgaatatgtgaattat

SEQ ID NO: 285176 - DNA, 201 bp, Homo sapiens
tttggaatttatatattttgttctggtagacttggttcttttgaggggaccgataggggaatttgtatatttgtttgataatactgatataaccggttgtwattccacagttctgacatttatttctcttcacagaggccccataaagccactgccgaagaaatgacaaaatatcacagtgatgagtatatcaaatttcta

SEQ ID NO: 285177 - DNA, 201 bp, Homo sapiens; identical to SEQ ID NO: 58236

SEQ ID NO: 285178 - DNA, 201 bp, Homo sapiens
gtataaaaggccagtgccgtggctcatgcctgtaatcccagcactttgggaggacgaggtgggtggattatgaggtcaggggtttgagaccagcctgaccmacatggtgaaaccccatcctactaaaaatagaaaaattagccgggcgtggtggcgtgcgcctgtaatcccagctactcaggaggctgaggtgggagaatt

SEQ ID NO: 285179 - DNA, 201 bp, Homo sapiens
cactatggcccaggcctgtaatccctccactttgggaggctgaggtgggcggatctcttgagcccaggagtttgagaccaggctaggcaacatggcaaaaycccatctctacagaaaaaaaattagccagatgtggtggcatgcatctgtagtcccaactacccaggaggctgaggtgggagtacctgagcccaggaagtt

SEQ ID NO: 285180 - DNA, 201 bp, Homo sapiens
tggaatggagtagctggttgataaggtcttcaaagtccacgacagctctgaatgttgtaatttaggatggggttctagcccagcctccccgaggccctctmcctcctcacccagagtttcagcggggcaggaagaatgaggcagattggccaggcagtgcccagcggtcctgagctgccctgtcctgtaccagggccggaa

SEQ ID NO: 285181 - DNA, 201 bp, Homo sapiens
gactccagtgtttcccctggaagttccttggcctcctctccattctccctggcctctgcctggcccccagcttcccctctgggcccgggggcatctccttyagcctctgcctggcccccagcttcccctctgggcccaggggcatctcctttagcctctgcctggccctcagcttcccctctgggccctggaacatctcca

SEQ ID NO: 285182 - DNA, 201 bp, Homo sapiens; identical to SEQ ID NO: 58242

SEQ ID NO: 285183 - DNA, 201 bp, Homo sapiens; identical to SEQ ID NO: 58243

SEQ ID NO: 285184 - DNA, 201 bp, Homo sapiens
ctcccagggtgagtatggcagcaggaggggaaaaggactgggacctgtccctgccccaaacacctggctgacctagctacttgcccctcctccagggaggrgcgtgcaggaagcactgagattcgggtgccaggtggccggcaagaagtgtggcctgcagggctttgatggcatcgtgtgagagcaggtgccggctcctca

SEQ ID NO: 285185 - DNA, 201 bp, Homo sapiens
gtgtctccttgcccttttcctggcccggcctccaccctaagcttcctggtggccgacttcaggcggcggggcgtggacgtgtctcaggtggcctggcagascaagggggacacccccagctcctgctgcatcatcaacaactccaatggcaaccgtaccattgtgctccatgacacgtaaggcccccgggcctcgccctgc

SEQ ID NO: 285186 - DNA, 201 bp, Homo sapiens
cagtcagcagaggaagccttgaggggcttgtatggtcgtgtgaggaaagggtgagccggggaagccaggaaggggctttagaaggtacaggatgagcctgractccaggagtccgccctggagctgggaggatggctggggggacggggtgggctaacacccagctgagtggagccgtcttgcagggctgtgcttgtctgt

SEQ ID NO: 285187 - DNA, 201 bp, Homo sapiens
cagcttctcttccactgcccacaggtgtttgtcagcaaagatgtggccaagcacttggggttccagtcagcagaggaagccttgaggggcttgtatggtcrtgtgaggaaagggtgagccggggaagccaggaaggggctttagaaggtacaggatgagcctggactccaggagtccgccctggagctgggaggatggctg

SEQ ID NO: 285188 - DNA, 201 bp, Homo sapiens
taattttttttttttttttagagacaagagctccctttggttgcccaggctggtctcgaacttctgggctcaagtgatcctcctgctttggcctcccaaastgctgggattataggcataagccactgtgcctgtcctactatcattttttttctaatgacatcgtgctccccttttcccaaaactgaagtttcgcgtaca

SEQ ID NO: 285189 - DNA, 201 bp, Homo sapiens
gaaaaaagaaaaccacgttcccgtgggacagtgagatgctacgttggggatctatgtggacatgttgggggagtcgtgttgtaatgggggcaacgctaggytgctgttggtgaatgacgagttagaagtgaccaccagcttctcttccactgcccacaggtgtttgtcagcaaagatgtggccaagcacttggggttccag

SEQ ID NO: 285190 - DNA, 201 bp, Homo sapiens
caattggaatagtggttcctggtttggtggtgtttgaagatgggggatgggggttaaagcaaagaagtagacccctagccttgggctccagtgcaggcctyagcagtgagcaaggagtagaatgtctccaccccaggtgggtgcataggtgtaagaatgcccagagggcttgggtagggcttaaacagccacagggcaagc

SEQ ID NO: 285191 - DNA, 201 bp, Homo sapiens
ttaaagggagccagaatccttttatcctgcctaccacaattggaatagtggttcctggtttggtggtgtttgaagatgggggatgggggttaaagcaaagmagtagacccctagccttgggctccagtgcaggcctcagcagtgagcaaggagtagaatgtctccaccccaggtgggtgcataggtgtaagaatgcccaga

SEQ ID NO: 285192 - DNA, 201 bp, Homo sapiens
cggcctccaccctaagcttcctggtggccgacttcaggcggcggggcgtggacgtgtctcaggtggcctggcagagcaagggggacacccccagctcctgstgcatcatcaacaactccaatggcaaccgtaccattgtgctccatgacacgtaaggcccccgggcctcgccctgctacaacccaccaatcagttggctca

SEQ ID NO: 285193 - DNA, 201 bp, Homo sapiens
cctggcccggcctccaccctaagcttcctggtggccgacttcaggcggcggggcgtggacgtgtctcaggtggcctggcagagcaagggggacacccccakctcctgctgcatcatcaacaactccaatggcaaccgtaccattgtgctccatgacacgtaaggcccccgggcctcgccctgctacaacccaccaatcagt

SEQ ID NO: 285194 - DNA, 201 bp, Homo sapiens; identical to SEQ ID NO: 58255

SEQ ID NO: 285195 - DNA, 201 bp, Homo sapiens; identical to SEQ ID NO: 58256

SEQ ID NO: 285196 - DNA, 201 bp, Homo sapiens; identical to SEQ ID NO: 58257

SEQ ID NO: 285197 - DNA, 201 bp, Homo sapiens
cagttccccggctgtcagggctatagccctaaatggctcatgcacgccctccatgttggctgctgcagggacctcagagccctttgacccctggcgctgcygactcagcaagcacttatcgggaggtgaggcccacactttgcacactgtgggcacgggggcaggctgccaggttgctggcctgtgaagggcagccctttg

SEQ ID NO: 285198 - DNA, 201 bp, Homo sapiens
gcagagaccccgcagtgaggccctgagaacccggcttcaaggccggacccgcgccctctacccgggaatcctgggggggctcccagcatgacagaagagargaaggaattgaggcctttaataagaagacccaggatttaatagcatcgtgttagccaatttccatttcaactcaggcatcaggtgtcaggtgtcaggcat

SEQ ID NO: 285199 - DNA, 201 bp, Homo sapiens
ttgaatcatgaagtaccttagagataaatgaacccaaccccctcattctctctccatctttccttatgtcttcaggtgaggaaactaaggcccagaaagaytagatgacttactcaaggtcacacagcagaacgtaagcacagctggctccaggcaaagtcctgtgctttctgtgctacgggctgccccattgcctccaac

SEQ ID NO: 285200 - DNA, 201 bp, Homo sapiens
gttctgcctccttggtttctttgaatcatgaagtaccttagagataaatgaacccaaccccctcattctctctccatctttccttatgtcttcaggtgagraaactaaggcccagaaagattagatgacttactcaaggtcacacagcagaacgtaagcacagctggctccaggcaaagtcctgtgctttctgtgctacgg

SEQ ID NO: 285201 - DNA, 201 bp, Homo sapiens
gcacttagtccccgaggtccttggagttgctccagctctcaaggaggaggccaaaggtgcagcgtctggagcagctctgactggggtgaaaggtgaggagragatgacctggagttagtgggtctctcgaatagtgatggacccaagtgagtggtttcctgttgccctaggaacagatggaaatattgaaaggaactgctg

SEQ ID NO: 285202 - DNA, 201 bp, Homo sapiens
cttgcacccctgcctttcagggtccctagtggccctgccagctaccctccagtccccaaaacccttgtcgaactgcacccccttcgggttactccgccctrgcagttttgtcctggatgacctccgccgctattctgtggacctacgctacacagtctttcagaccacaggctccgtccccatcgccacggtcatcatcaa

SEQ ID NO: 285203 - DNA, 201 bp, Homo sapiens
gacccaagtgagtggtttcctgttgccctaggaacagatggaaatattgaaaggaactgctgtcagcttgaatttagcctgggctggggaggtagacaccrctctcagccaagctccttcccttggccggcctcggctgccccgggtacaaagtgagacgtcggcctagatgctttctgagaggagtccccagctgttaca

SEQ ID NO: 285204 - DNA, 201 bp, Homo sapiens; identical to SEQ ID NO: 58247

SEQ ID NO: 285205 - DNA, 201 bp, Homo sapiens; identical to SEQ ID NO: 58244

SEQ ID NO: 285206 - DNA, 201 bp, Homo sapiens
cctgtgcgtggggctagtggtgctggacgtcatcagcctggtggacaagtaccctaaggaggactcggagataaggtaggggcgcccaggtcccctagggraccccaggggctgctgcagtccagcatttgtgccagcgaccgaggctgcagagaccccgcagtgaggccctgagaacccggcttcaaggccggacccgcg

SEQ ID NO: 285207 - DNA, 201 bp, Homo sapiens
atattgaaaggaactgctgtcagcttgaatttagcctgggctggggaggtagacaccgctctcagccaagctccttcccttggccggcctcggctgccccrggtacaaagtgagacgtcggcctagatgctttctgagaggagtccccagctgttacattctgtaggcccctatacaggagactgtgcttgggatcagcct

SEQ ID NO: 285208 - DNA, 201 bp, Homo sapiens
  misc_feature (1)...(201): n = A,T,C or G
ttgggatcagcctgctggggctgcagggaccctccctgtgctttgcaggtgtttgtcccagagatggcagcgcggaggcaacgcgtccaactcctgcaccnttctctccctgctcggagccccctgtgccttcatgggctcaatggctcctggccatgttgctgagtaagtccaggagggagagcccactggggaaggcct

SEQ ID NO: 285209 - DNA, 201 bp, Homo sapiens
gcctctgcctggcccccagcttcccctctgggcccgggggcatctccttcagcctctgcctggcccccagcttcccctctgggcccaggggcatctccttyagcctctgcctggccctcagcttcccctctgggccctggaacatctccatcagcctctgcctggcccccaggctcctggacaggatccaaagactccctt

SEQ ID NO: 285210 - DNA, 201 bp, Homo sapiens
tggaagttccttggcctcctctccattctccctggcctctgcctggcccccagcttcccctctgggcccgggggcatctccttcagcctctgcctggcccycagcttcccctctgggcccaggggcatctcctttagcctctgcctggccctcagcttcccctctgggccctggaacatctccatcagcctctgcctggcc

SEQ ID NO: 285211 - DNA, 201 bp, Homo sapiens
gtggatgtgcctttgccttatcttaagtcccttatcctggccatgcttgaggcagaaggcagttagggacacgtggtacccatcctcccccaggtccaggyccacagtttctgtcccagttgagaggcagggctggtgctcatgtccctgttgttcactgaagcagtgagagtaccctgttcaaggacaccctgaagccac

SEQ ID NO: 285212 - DNA, 201 bp, Homo sapiens
aggccaagtgtagtggctcacacttgtaatcccagagctttgggaagctgaggtaggaggattgcttgatgccaggagtccaagaccagcctggacaacakagcaagacccctgtctctatgaaaataaattaggccaagagcagtgactcatacctgtaatcccagcaccttgggaggccaatgcaggaggatcacttca

SEQ ID NO: 285213 - DNA, 201 bp, Homo sapiens
cacacttgtaatcccagagctttgggaagctgaggtaggaggattgcttgatgccaggagtccaagaccagcctggacaacatagcaagacccctgtctcyatgaaaataaattaggccaagagcagtgactcatacctgtaatcccagcaccttgggaggccaatgcaggaggatcacttcagccagtcattcaagattg

SEQ ID NO: 285214 - DNA, 201 bp, Homo sapiens
gcgatcttggctcactgcaacctccgcctccagagttcaagcaattctcctgcctcagcatcccgagtagctgggattacaggcatgtgccaccacacccractaattttgtactttcagtagagatggggtttctccatgttggtcaggatggtctcgaactcccgacgtcaggcgatccgcctgcctcagcctcccaaa

SEQ ID NO: 285215 - DNA, 201 bp, Homo sapiens; identical to SEQ ID NO: 58253

SEQ ID NO: 285216 - DNA, 201 bp, Homo sapiens; identical to SEQ ID NO: 58272

SEQ ID NO: 285217 - DNA, 201 bp, Homo sapiens
atttatttggaatttctctttttttttttttctttgttagtctggctagagatttttcaattttgtttaacttttcaaaaaaaacaactttttgtttcatkgctcttttgtattattttctttctgtcttttttttttttttctgagacagagtatcactctgtcacccaggctggagtgcagtaggctggagtgcagtgg

SEQ ID NO: 285218 - DNA, 201 bp, Homo sapiens
gaatttccttcaagaactttcctgttgtattcacaacttggcttttaccctgaattttatggtaattactttcttgctttcctttatagttttataacctaatattctataataaatatattttttatttttttgacttcatataaatggcatcatatagtagtagaaatagaatgagaaaagtttcagtatgctaactta

SEQ ID NO: 285219 - DNA, 201 bp, Homo sapiens
caaactgtttttgataaactctagtatttattaaattataaattttgtaatcaaaaagaaaaatgcagaccaaaaaaacctcaaactataagactagacakcaaagcctatgggaacaccatgaagtgtgttacaaacattctgaaacataagttactggctgttttcatttccatttcaataactttactataaaatagt

SEQ ID NO: 285220 - DNA, 201 bp, Homo sapiens
atgcctgcaatcccagcattttggaaggccaaggcaggaggattgcttgagctcaggagttggagaccagcctgggcaacatagtgagacacaaaaaataaaaaaaaatagccaggcatggtggcacacgcctgtagtcccattcctgagggaggatgaggcaggaggatcgcttgaggccaggaggtcaaggctgcattg

SEQ ID NO: 285221 - DNA, 201 bp, Homo sapiens
ccaaagtgctgggattgcaggcatgagccactgcgcacagcccatttatattaaagtgaagttgattatagtttcatatgtcttaaggaccattaaaaaawtttttttggtgaattatttattcatattttgcttatttctcaacaggatatttgtttttttccttcaattttttaaagttcttcaagtattagggataat

SEQ ID NO: 285222 - DNA, 201 bp, Homo sapiens
tttttgccacacaagcctttttaaaaaaacatggtccactgtgggaggccgaggcaggcggatcacaagatcaggagtttgagaccagcctggccagtatrgtgaaaccctgtctctactaaaaatgtataaaaatttagccgggtgtgatggcgcacgtgtagttgcagctactctggaggctgaggcaggagagtcact

SEQ ID NO: 285223 - DNA, 201 bp, Homo sapiens
attgcatttggctttttcatagataaatctgaagttattatttttttaaataatcctttctacatgggagcagtgtatattaggaaattttcaattacttyagacctgcacctttgcattgtaggtcagaacctacaaaaattccatcttggaaaacattttagatttaccttgtattcacacacccctgcaaagtgggtc

SEQ ID NO: 285224 - DNA, 201 bp, Homo sapiens
agcctatgataaatctagaaatgaggggtaagggattgcatttctgttaggcaatactaaggagtacaggcataaggtctgaattagagatagaaatgtgwgattcatgtcttgtaggttttaggaaagttgtgagcagaagaataaaagatctctaacaaattaataaaaaggcaaataaatagaaataatgggcaaaaa

SEQ ID NO: 285225 - DNA, 201 bp, Homo sapiens
ttccacctcgtctagctattatgtgtaccatgaagataactgaagccaacctgcctgggtttaaatcctagctctgcaatagctgtattgccagttccttaaaaaaaaaaaaaaaaaaaaggtataagagctttgaaatgctaaataagctcttcatgcacatggcaactagagcagcccttgtaaaatgtcagatgttaa

SEQ ID NO: 285226 - DNA, 201 bp, Homo sapiens
cccggctccgcggcttgtcccttgcaagcgccgcgcaggcctgccccgcgctggacgtggagacgcggtgccgagcgccacgggccggctgtgcgccggcsggggaaagagggcgaggggaagagatgaatcggtcttcccagagcgcgccgcgaggtcgcgagattacactttaaaaagcatgaggaggcttgctttcta

SEQ ID NO: 285227 - DNA, 201 bp, Homo sapiens
caacatcaaagagttttaaatggaaatgtcattgtttaaaaaagacatatttttggcttcattactttctaaaaccttaatttaaaaaatttaatgtaatrtatttgcattatacctttgtgtttctgcttatttttatttaaaggatggaatggccgtatgcatgttcatgcaaaacaccttaacaagatttatgaggta

SEQ ID NO: 285228 - DNA, 201 bp, Homo sapiens
ctttcccacaaaatgctaatgcttttataagtccctcctccttattttctagattaactccttgtttcttcctctaaacagaggattatggcagacaggcmaaaaaaaaaaaacttttaaagcaactatctaagtccttaccaagtttctttagcacttttattctaaagttatcaaggtggaaattggggcctctgcccc

SEQ ID NO: 285229 - DNA, 201 bp, Homo sapiens
ttgcattccctctagtctgtttcacttagccttgtcaacagagcctactattaagctttggaatttgccaatttcatgggtaaggaacaatatttcagcayagttttaatatgcatttcttttttttctctttttttttctttttgaggcaaggtcttgctctgtctcacccaggctggggtgtatagtggtacgatcact

SEQ ID NO: 285230 - DNA, 201 bp, Homo sapiens
aaggctgcattgagccattatggcaccactgcactccagcctgcgggacagagtgagaccctttctcaaaaaaaaaaaaaatatagtacagtaaatacccraaccattaacatggtcatttattattatcaagtattatgtaacatacataattgtatgtgctatacttctgtacaggtagcagtgcagtaagtttgtttt

SEQ ID NO: 285231 - DNA, 201 bp, Homo sapiens
gtatttgtgtatctaaatgaaaaggtacagtaaaaatactgtataaaagataaaaaattgaatgctcatatagggtatttatggtgaatcgagcttgcagkactgaaagtctctctgggtaagtgagtgagtgagtggcaagtgaatgtgaaggcctaggacattactgtacacttagaatgtactccttttacttttaca

SEQ ID NO: 285232 - DNA, 201 bp, Homo sapiens
tttgaatttccttcaagaactttcctgttgtattcacaacttggcttttaccctgaattttatggtaattactttcttgctttcctttatagttttataasctaatattctataataaatatattttttatttttttgacttcatataaatggcatcatatagtagtagaaatagaatgagaaaagtttcagtatgctaac

SEQ ID NO: 285233 - DNA, 201 bp, Homo sapiens
tttcacttccttggttaattcctaggtatttaattttatgtgtggctattgtaaatgggattactgttttgatttctttttcaaattgttcactgtttacrtatagaaaagctactgatttttgtatgttgattttttattttgcaactttaggctttttccagacatagattgtataatctacaaacaaggataatttga

SEQ ID NO: 285234 - DNA, 201 bp, Homo sapiens
ggtgaaaccctatctctactcaaaatacaaaaattagccaggtgtggtggcacatgcctgtagtcctacaacttgggagtctgaggtggaaggattgcttraacctgggaggtggaggttacagtgagccaagatcacaccattgcactccagcctgggcaacagagtgagactctgtctcaaataaataaataaataaat

SEQ ID NO: 285235 - DNA, 201 bp, Homo sapiens
gcctatcaaggtatgtttgaggttacaaactgacatgttttggttgattagctttctactttcacattccgaatgtagacaaatttaaaattatgaaaagkaaggaaattcttatttaagcaaggttattaattggacattactgtatttttggtacctattgtatctgagagtctagagagagtaatagaatcataacat

SEQ ID NO: 285236 - DNA, 201 bp, Homo sapiens
atggtgaatcgagcttgcaggactgaaagtctctctgggtaagtgagtgagtgagtggcaagtgaatgtgaaggcctaggacattactgtacacttagaawgtactccttttacttttacacataaaaaattaaatgtaaacagcctcaggcaggtccttcagaagaaattccagaagacagtattaactgtaacttttgt

SEQ ID NO: 285237 - DNA, 201 bp, Homo sapiens
cctacactaaagcttatttatatttaaatcagtgattccaaactttaaatgtataacatcatgttaattttgtaacatcaatggttttctttaaaatttcmagatatttatcttgttacttgtattggacagttctaagaaatcttagagggataactgtcttacctgttttttaaaaaagatcagcttgcaatcttctgc

SEQ ID NO: 285238 - DNA, 201 bp, Homo sapiens
ggaaagacaaaggaataaaatagaaaaaaatatatttaaatattaagacttggatttgatgccacagatgtcctgtaggctataagaagtttcttttcagrgggaataagtaatcaaagtgcagttataagcttcagaatatggagaaataaaaacctgcttagtcttcaatggatcagtataatgcctcaaggaaaagtc

SEQ ID NO: 285239 - DNA, 201 bp, Homo sapiens
tgggaccaccatggtatatgtgatacattgttggtgcatgactgtaggtcataattagccataagaaagaatagctgcattagtcatttgtgagttagtakcattaacataacatttactgtggagccacctcactcctggctacttcagaaaatggcaaagaaaataatagttcttgacattgtgggatttatattccaa

SEQ ID NO: 285240 - DNA, 201 bp, Homo sapiens
atggagaaggtgtggctctttggcaagctgaccagaggccagtgaaagattatttatttatttggctgactatgataccctcacttgtagccacacccccygggtttgcattttttaaaaaccccaacagtgaaatagttcttttttctttttctttctttctttttttttttttttgagacagagtctctcgctctgtca

SEQ ID NO: 285241 - DNA, 201 bp, Homo sapiens
ggaatttctctttttttttttttctttgttagtctggctagagatttttcaattttgtttaacttttcaaaaaaaacaactttttgtttcattgctctttkgtattattttctttctgtcttttttttttttttctgagacagagtatcactctgtcacccaggctggagtgcagtaggctggagtgcagtggtgtaatct

SEQ ID NO: 285242 - DNA, 201 bp, Homo sapiens
tttttttttttttctttgttagtctggctagagatttttcaattttgtttaacttttcaaaaaaaacaactttttgtttcattgctcttttgtattatttyctttctgtcttttttttttttttctgagacagagtatcactctgtcacccaggctggagtgcagtaggctggagtgcagtggtgtaatctcagctcactg

SEQ ID NO: 285243 - DNA, 201 bp, Homo sapiens
ttccactttttttttcttttaagtgtaactgatcccataagaagttgatcgcgtcttggtatgctttggttattgtgcaggaaaagagctccaactgtccytattaggcagttaattcttggttcagatggtagaggccaggagatccactaggataacacaaacattaaccctgctgaaaagttatgtattggaaagaca

SEQ ID NO: 285244 - DNA, 201 bp, Homo sapiens
ggtagatcgcatatgcgaaagcttgagatggcgaaaaaatcaaaaggatttcaggaactgaaagttgtgcattttggctgtgtgagggagagagttgtggrtggcatgtaatgaaccttgaaaggtagtttatgttatgacagcctacaaccgaatcagaacttttacaaacaggcgatatacagacagtctgaaatcaaa

SEQ ID NO: 285245 - DNA, 201 bp, Homo sapiens
aggctgagatgggtggatcatttgaggtcaggagttcgagaccagcctggttaacatggtgaaaccctgcctctactaaaaatataaaaattagccaggcrtggtcatgggtgcctgtagtctcaggtaattgggaagctgagataggagaatcgtttgaagctgggaggcagaggtttcagtgagctgagagcttcactg

SEQ ID NO: 285246 - DNA, 201 bp, Homo sapiens
accccgaagaaagcttataaaattgtaaatgcttcagaaccttttcatcttcctgtgattctggaagaaatccaaaaaaaaccaatcgtttaactacatacttctacagaacctgaatcttaagctttgttcactttatactattagatactatagtaggttaataatgactaacaccttgtcatctcatcactgagcttt

SEQ ID NO: 285247 - DNA, 201 bp, Homo sapiens
ttcttcaggaggccttagataccttaaaatctgttaataccatagaatcagttaataccgtatcattttctaatttgacagaacaggtgatgggatggaakgatgtctcataagttatactgtatgagttttggaaaaggagtatggaattgccaatagatgaagacattaaagtattgaaaatactaaatatttagatat

SEQ ID NO: 285248 - DNA, 201 bp, Homo sapiens
gaaaatatcctagaatgttgcaaaatcatgtttgatcattgttccctctagctttctagttcttcaggaggccttagataccttaaaatctgttaataccrtagaatcagttaataccgtatcattttctaatttgacagaacaggtgatgggatggaaggatgtctcataagttatactgtatgagttttggaaaaggag

SEQ ID NO: 285249 - DNA, 201 bp, Homo sapiens
cagatggactttctttcctcttttcagtggcttggtagtgagcttgttcagctccactgaatcttctttgtggtggggctgcaagacatcctgcatggcargttttaaacataagttttaccccgaagaaagcttataaaattgtaaatgcttcagaaccttttcatcttcctgtgattctggaagaaatccaaaaaaaac

SEQ ID NO: 285250 - DNA, 201 bp, Homo sapiens
tggctgactatgataccctcacttgtagccacaccccctgggtttgcattttttaaaaaccccaacagtgaaatagttcttttttctttttctttctttctttttttttttttttgagacagagtctctcgctctgtcaccatggctggagtgcagtggtgtgatcttggctcactgcaatttccgtttcctgggttcaag

SEQ ID NO: 285251 - DNA, 201 bp, Homo sapiens
tttcaagaacgaaagatgagcaactcctttctggtagaggttctttcattggagaatttttgagctacaataatccttttaacgctgcgcacacatacagkgattacacgtgtaggggattaaaaacacagttaagtttaggttgaaggtgctgttaaggacttcaggcaacattaaatcaacactcagttctttgctctg

SEQ ID NO: 285252 - DNA, 201 bp, Homo sapiens
ggctgactatgataccctcacttgtagccacaccccctgggtttgcattttttaaaaaccccaacagtgaaatagttcttttttctttttctttctttctttttttttttttttgagacagagtctctcgctctgtcaccatggctggagtgcagtggtgtgatcttggctcactgcaatttccgtttcctgggttcaagt

SEQ ID NO: 285253 - DNA, 201 bp, Homo sapiens
aggtaaagaagcaaagaggaaaaattcttcttggcctatcaaggtatgtttgaggttacaaactgacatgttttggttgattagctttctactttcacatkccgaatgtagacaaatttaaaattatgaaaagtaaggaaattcttatttaagcaaggttattaattggacattactgtatttttggtacctattgtatct

SEQ ID NO: 285254 - DNA, 201 bp, Homo sapiens
cctccccggctccgcggcttgtcccttgcaagcgccgcgcaggcctgccccgcgctggacgtggagacgcggtgccgagcgccacgggccggctgtgcgcsggccggggaaagagggcgaggggaagagatgaatcggtcttcccagagcgcgccgcgaggtcgcgagattacactttaaaaagcatgaggaggcttgctt

SEQ ID NO: 285255 - DNA, 201 bp, Homo sapiens
atgtaatgaagtttgaactgtattagtaataggagagggaaagatcagaaggaagtaaccattttggagggccattgcatacggacctccaaatagtggtrgagaaggagactgggttgatttagaggttttctggcatagattacagggttgatgatacaatgaatagttcagggaaagaaggagtaatgggttttacgt

SEQ ID NO: 285256 - DNA, 201 bp, Homo sapiens
atacctccttcccagtttgtccataaggaaattccttgtgatccttaagatctttaccctaaaactaacttctgttgaatttcactctgacatttaaacckatagcttatgttcataggtgctggacagaaagccatccctctgggctgggcgtggtggctcacacctgtaatcccagcactttgggaagccaaggtgggt

SEQ ID NO: 285257 - DNA, 201 bp, Homo sapiens
tgcaaacttgaaaagattagtttaacagtaactactggtatggatttttcttattctcgtggccagcatttcagcatcataggaaaggtttaaaaaaaaaycagcaccataggaaaggttttaaaacaaaggccaacattgttttttttatttatttatttttattttatttattttactttttttgagatggagtctcac

SEQ ID NO: 285258 - DNA, 201 bp, Homo sapiens; identical to SEQ ID NO: 58273

SEQ ID NO: 285259 - DNA, 201 bp, Homo sapiens
attccatactgatcatttcctgaaagagtgcttttagaaatggggaagtggccagatgggacagctcacgcctataatcccagcactttgggaggctgagrtgggtggatcatttgaggtcaggagttcgagaccagcctggttaacatggtgaaaccctgcctctactaaaaatataaaaattagccaggcgtggtcatg

SEQ ID NO: 285260 - DNA, 201 bp, Homo sapiens
gtgttctcaggtttttctggcacagacaaggaatataagaggaggagagaaaaggagagacagtagtgggagggaatagaatgagagaagatagaaaatayggaattaatagagaaaggatacatgaagtattacaagattttcttggaaaaattggcatttcagtgatggatcaaagatgtctaatgaggcaaaatacta

SEQ ID NO: 285261 - DNA, 201 bp, Homo sapiens; identical to SEQ ID NO: 58274

SEQ ID NO: 285262 - DNA, 201 bp, Homo sapiens
acctgagactgggtaatttataaagaagagaggtttaattggctcatagtcccacaggctgtacaggaagcatggctggggaatcctcaggaaatgtacamtcatggcagaagatgaaggggaagcaggcacgtcctacatggctggagcaggagaaagagagaaaaggggaagggtactacacacttttaaacaaaatct

SEQ ID NO: 285263 - DNA, 201 bp, Homo sapiens
tagcagaaaacgtgcttacagggcagactgactggatgaacacatgtttgcagacaaatggcacattcagggacggttaaagaaggtgcagtattagaacrggactcgttcgctttcctgtttgtaggaagcatgtttattgaatgatcaatttcaccacagccagccatcctaagaaaaaatacatataatattaaagtc

SEQ ID NO: 285264 - DNA, 201 bp, Homo sapiens
agctaaaaaaaagacaaggcaatgagtttggactactcttaggaaatttgtttgtgaaaattataagttgtggcaataccaagataaagccttagaaatatttttttaaaaatcaaagcttaacataacttttcccttctttcccttcttctcttatatgtttatcatcttaaggataacagatgggtatatcttatgcct

SEQ ID NO: 285265 - DNA, 201 bp, Homo sapiens
agagtagaaatactatcatcttcctttatcaatcctccaaggaacttgttttcatgaattcagtgctccttccccctctaccacatcttctaggaaaaacaaagaaaagaaaagaaaggaaggaaatgaaattagaaagggaaaaaagtaaagttttcatgatattccataagtctcatgccactgtatgtagtatatgat

SEQ ID NO: 285266 - DNA, 201 bp, Homo sapiens
gagtagaaatactatcatcttcctttatcaatcctccaaggaacttgttttcatgaattcagtgctccttccccctctaccacatcttctaggaaaaacaaagaaaagaaaagaaaggaaggaaatgaaattagaaagggaaaaaagtaaagttttcatgatattccataagtctcatgccactgtatgtagtatatgatt

SEQ ID NO: 285267 - DNA, 201 bp, Homo sapiens
agtagaaatactatcatcttcctttatcaatcctccaaggaacttgttttcatgaattcagtgctccttccccctctaccacatcttctaggaaaaacaaagaaaagaaaagaaaggaaggaaatgaaattagaaagggaaaaaagtaaagttttcatgatattccataagtctcatgccactgtatgtagtatatgatta

SEQ ID NO: 285268 - DNA, 201 bp, Homo sapiens
gtagaaatactatcatcttcctttatcaatcctccaaggaacttgttttcatgaattcagtgctccttccccctctaccacatcttctaggaaaaacaaagaaaagaaaagaaaggaaggaaatgaaattagaaagggaaaaaagtaaagttttcatgatattccataagtctcatgccactgtatgtagtatatgattat

SEQ ID NO: 285269 - DNA, 201 bp, Homo sapiens
tagaaatactatcatcttcctttatcaatcctccaaggaacttgttttcatgaattcagtgctccttccccctctaccacatcttctaggaaaaacaaagaaaagaaaagaaaggaaggaaatgaaattagaaagggaaaaaagtaaagttttcatgatattccataagtctcatgccactgtatgtagtatatgattatt

SEQ ID NO: 285270 - DNA, 201 bp, Homo sapiens
cagggtgagttgtgaggattataaacagggtagttggagagttgatttgtggccagattcttaagcccctgtttagtcttaagaatattatctttaggcaytgcaaatgccctcttgcagctaagactaatgggaagaactggttaaaaaactaattacagcaaagagtgagtgagagtggtgatgagagatacagatgtt

SEQ ID NO: 285271 - DNA, 201 bp, Homo sapiens
ggttgtttctgtctctttagatcatgtgaccacgattctttttctatatatttagagatggaagtggaaacatgcttattgttttatatatacatcattgatatatatatatatacacacatatatatatagtatatatacatcattggtctggcataagtcatgcaggaaaacatggagagagtttttattccagcttca

SEQ ID NO: 285272 - DNA, 201 bp, Homo sapiens
taatcccagctactcagaaggctgaggcaggagaatcacttgaacccaggaggtggaggttgcagtgagccaagatcacgccactgcacttcagcctgggwgacagagcaatactctagcaaaaaaaaaactattttaattttctctaagctcttccatgtattttgaggaaattaataaatccatacaacaagcacttaa

SEQ ID NO: 285273 - DNA, 201 bp, Homo sapiens
gttgtttctgtctctttagatcatgtgaccacgattctttttctatatatttagagatggaagtggaaacatgcttattgttttatatatacatcattgawatatatatatatacacacatatatatatagtatatatacatcattggtctggcataagtcatgcaggaaaacatggagagagtttttattccagcttcaa

SEQ ID NO: 285274 - DNA, 201 bp, Homo sapiens
gagcgcgccgcgaggtcgcgagattacactttaaaaagcatgaggaggcttgctttctacatgctgatttaatttcggaatacattcgaggccctgtgctragttaggtaatgttccctataattgtcttttatgtataagttgtcttgcctaactaaaacttttcttacttgtatcgtgcagccaacttttcaagaacga

SEQ ID NO: 285275 - DNA, 201 bp, Homo sapiens
agccactaataatccttgaatttctgcagtatcagttataatgtctcctttttcatgtctggttttatttatttggaatttctctttttttttttttcttkgttagtctggctagagatttttcaattttgtttaacttttcaaaaaaaacaactttttgtttcattgctcttttgtattattttctttctgtcttttttt

SEQ ID NO: 285276 - DNA, 201 bp, Homo sapiens
ctcagaatcttattttatttaaaacattgatctcgttttattttattgagacagagtcttgctctgtcacccaggctggagtgcagtggcagcgatctcgrctcactgcaacctccgcctcctgggttcaagtgattctcctgcttcagcctcctaagtagctgggattacaggcgtgggccaccatgcccagctaatttt

SEQ ID NO: 285277 - DNA, 201 bp, Homo sapiens
gttttaaatactattagtaaattaaattctagatgaaacagccatatttttcaaacattgtttttaatatacctacctataaagatctatggagaattcayatcagatcatgaatggatagtactttatgattagagcatacagagagagttacaattaagcttttcttttttcttttacaggttaatgactccagagagt

SEQ ID NO: 285278 - DNA, 201 bp, Homo sapiens
gtttctccttctttgatgttgaaatggtctggggtgaatggtctcgttgtctgaggtgttatccgagctccttgtctcacaatcaagaaaactaaggagcrtggacgcaagggggaggttggagtcaaagtttaataagtgaaagaagaaagctctttgtagtggagagggggcctgagtgggttgctgtttttacagttg

SEQ ID NO: 285279 - DNA, 201 bp, Homo sapiens
gaaggaattcctgaacaggacatctgtcaatatttggaatgatactcttctatttaaaaagaaaaagtttcctgagaagtaaatgtagcacacatacctaragagtaaaatgtataagatgaatttaaagaacaacaacaaaagaaataactgtggatgcattatctaggttaagaaatagaacatacccgtattttgaaa

SEQ ID NO: 285280 - DNA, 201 bp, Homo sapiens
gaaatctctgaagtcatagtataagaaatatatagcataaaagtaagcactttgaatatggataattttaagaattgtaacaatacatataaagtatggartgtgtttatcacattatgattttaaaattaacaagaactagaaatagtttatgtaaagttcccgatatttccatgtttcctataaactatattcctatat

SEQ ID NO: 285281 - DNA, 201 bp, Homo sapiens
tatttttgtttctaaataagatacttctacaggctgggcatttttccactctaaacatggcttagagtacatatgatgttaatcattccttttggcatttkggttgagcattgttcttcttatccttgttttatgagaaggagctagaggagtagggttggatctcaggtatcatccagatagcatgaaaatatcactgtc

SEQ ID NO: 285282 - DNA, 201 bp, Homo sapiens
cagtggtttgttcatcttattgcttagtagtattgctttctatgcctatatagcacagtaagtgttatacattaatgggcacatgagctatttcttgtttwggcctattataaataaagctgttgtgaacattcatgtataagtatttgtgtgggcatatgttgtcatatcttttgggtgaaaatctaagagtggaattgc

SEQ ID NO: 285283 - DNA, 201 bp, Homo sapiens
tctgtatactccatagtgccagtgcagtaggcatttgatagacactcagtaaatatttataaaatataggacctaagagtatgcttgacacttgtgatttrtaaattatttctgtttttccagtcaccttcatatatttgtgatttcccacttccatctctggcaggtgttatgatgctacaacttctggaaaaagtaatt

SEQ ID NO: 285284 - DNA, 201 bp, Homo sapiens
atgtactatttttttgtgccgtagaggataatcatttaattacatgttaatgaagtatatacatatgtattttaaaaataagagaaatgaaagataagaaraatttaagacatatcccctaaagagcttatataactagctgtatttaggaatagatactgggaaagttaaatactggtattagagcagaataataaagac

SEQ ID NO: 285285 - DNA, 201 bp, Homo sapiens
aactcccctttattgttatactttcttattaatcatcctattcataaaaatcccatgactggggaaaatgaacccgttagggaaactcactgctatcagtytaatccaagccactatcaataactttcttactggtatccctgcttccacctcgtctagctattatgtgtaccatgaagataactgaagccaacctgcctg

SEQ ID NO: 285286 - DNA, 201 bp, Homo sapiens
gacacacacacacaaaagtagtcatatctatcaatctttttaaaagttgcatctggatttcaagtggtagtttaaaagcctttccatatatcaaggttatrgaaaagttcatgcgtgtttcttctagtacttgaatggttttgtgttttacatttatatatctaatccattttgagcttattttcatgtatgctgtgagta

SEQ ID NO: 285287 - DNA, 201 bp, Homo sapiens
agatatccttttatgaagttaagattatacattaaatttaatggaactctctagtagagctcaataaaaggagatactttgctctattttcaattagatawttgagttatttttgctttatgtgtgcatattttgtttctctgacaaaactgaaaacttttaaagatgctttctctctgaaatcgctaacaatggggtgat

SEQ ID NO: 285288 - DNA, 201 bp, Homo sapiens
ttcttttacttgtcaaaataagcaagtttaatatggttttataaattgagtctgtcattagtcttcaaaattataagagctaagtcttccattactctacrtagattatcccttgcaataattatattactaggtaactgcatctaaactctagaaagaattagtgtataatcctgtagggtctatcaggaaactattttg

SEQ ID NO: 285289 - DNA, 201 bp, Homo sapiens
tgattaatctcatctcctttgccccaggatgtcagaggaaattttaaacattgccaatgattatgctattaaacagttagaagacacttatcattcttttrcttgtcaaaataagcaagtttaatatggttttataaattgagtctgtcattagtcttcaaaattataagagctaagtcttccattactctacgtagatta

SEQ ID NO: 285290 - DNA, 201 bp, Homo sapiens
atttgttgagctacaaattatatacaataaaatgaatccattttaattgtatgctgtaaatggattttgatgaatatatacacccatgtaaccacctccamaatcaagattgagaacatttttatcacccctatctatatgttttcatatgcctcttcccagtcagttcatatctctatttcaaggtaaacactgatcact

SEQ ID NO: 285291 - DNA, 201 bp, Homo sapiens
tttttctttgttagtctggctagagatttttcaattttgtttaacttttcaaaaaaaacaactttttgtttcattgctcttttgtattattttctttctgkcttttttttttttttctgagacagagtatcactctgtcacccaggctggagtgcagtaggctggagtgcagtggtgtaatctcagctcactgcaacctcc

SEQ ID NO: 285292 - DNA, 201 bp, Homo sapiens
ctggttttatttatttggaatttctctttttttttttttctttgttagtctggctagagatttttcaattttgtttaacttttcaaaaaaaacaacttttkgtttcattgctcttttgtattattttctttctgtcttttttttttttttctgagacagagtatcactctgtcacccaggctggagtgcagtaggctggag

SEQ ID NO: 285293 - DNA, 201 bp, Homo sapiens
ataacaattaaactcctgaacttgtaaatatataaaagcagagagatagatgctcatcttcagtggggagggaagggtttgttattcatgttacaataggmaaactatccctcaattttaaatacagaggattctagtgtggttggctgtagataacaagtccacttgcaacagagattggaacattaggaggggttgact

SEQ ID NO: 285294 - DNA, 201 bp, Homo sapiens
aggtcactggtcagctactgattggccacacttgggctgtggtgaatccttggtccaaccagttttggctgtggtggttggttcttaccttttagagcagrgccattccaactcaaggtcagcgtggggctgttttctttaccagaggtctgtggacatggacagcattgcataaggcctgacaaacttctggattctcta

SEQ ID NO: 285295 - DNA, 201 bp, Homo sapiens
agtgagaggtcacatgatttgctgcctgggctgtggggaccacccaggggctgtgtggagggaaccatccctacgttagcgctgagctcataaccatgacstcaacctagattccaaatctaggtgctcacattcatttcacaccattagcaagttaaaaatgatagagccaggccaagcgcggtggctcattcctgtaat

SEQ ID NO: 285296 - DNA, 201 bp, Homo sapiens
tttttttttcagaaactttctgcttctcttaaaatgcagttattttatagcaatgcttaactatactttaagttacactttagtctttgtttagtacagaygaaatccaagtgataataggtgggttgtatgtgagcgtacagggttggggtggtgtctgaagaagtctagagggatgagggtttctgaatctagttttgt

SEQ ID NO: 285297 - DNA, 201 bp, Homo sapiens
tctcttttaagctaagaaaaagaaatcattcatggccagggaggtccctgaagctggcctgtaataagcagaaggatacctggtctggggctgggcaattkccatttcacacccccgagtgtctgacagtgtcttattttttgttttatctgctgaagccaagactgaaatattagccttttctcatctgtattattacaa

SEQ ID NO: 285298 - DNA, 201 bp, Homo sapiens
ttgccatttcacacccccgagtgtctgacagtgtcttattttttgttttatctgctgaagccaagactgaaatattagccttttctcatctgtattattamaatgcaaattgtaattgcaggcagagcatggttttcaaagattaaaataaaaggctacggtggaagcagaaatacttataatgaagtctttcatgtacag

SEQ ID NO: 285299 - DNA, 201 bp, Homo sapiens
gggaattgagtgtaaatatccttataccacatggtaaacttggtagaattcaaaaatgattaaaaacaccattgacatctctgttgagtatttatttgggrgatggggtgggtagggacagatacatgtaatgatgatattggccttgaaattaaaacaccatttttactttctaggatttgcattgtattggttggcatc

SEQ ID NO: 285300 - DNA, 201 bp, Homo sapiens
ccctctattttgctcactctcttccagccacactggctttctttgcacatatttatggggtatggtgtgatatttccgtacatttatacaatatgtaatgrtcaaattagagtaattagcatatccatcacctcaaacatttatttcttagtggtgagaacatttaaaatcctctcttctggctattttgcaaggtactta

SEQ ID NO: 285301 - DNA, 201 bp, Homo sapiens
acaacaagatagagccatttactaagcagattggcaggtgagggacgctggttttagctagtacagtgaatgagtgtgtgagtgtgtgtgtgtgtgtgtgkgtggggggtgtattcttagtcccttttacactgacagttgaaaaactgacctttgcccttctctctcccatgttatttctgatgttagtaggcagtttgt

SEQ ID NO: 285302 - DNA, 201 bp, Homo sapiens
gtcactactgtgcaatggaacaccataatttattcctccttatctcttaattcttagctcaaatgtcattttctcagaaaagccttccctaactactctcsccatacattcctttgtcacatagccatgttttatttccatcttcctgcttagaagtattgaaaaatactttgcttgaactttttaattgctgtcctcttt

SEQ ID NO: 285303 - DNA, 201 bp, Homo sapiens
aagcaatcctcctgcttcagcctcccaagtagctgggactacatgcacatgccaccacaccctgctaattttatgttttgtagagatagaatattgtgatrtttcccaggctgactccccacttcttgcaacactgcttctcttgatttctgggacaccacccccttctctcttcttcctacatctctgactctttcttcc

SEQ ID NO: 285304 - DNA, 201 bp, Homo sapiens
tactgtgcaatggaacaccataatttattcctccttatctcttaattcttagctcaaatgtcattttctcagaaaagccttccctaactactctccccatmcattcctttgtcacatagccatgttttatttccatcttcctgcttagaagtattgaaaaatactttgcttgaactttttaattgctgtcctcttttactc

SEQ ID NO: 285305 - DNA, 201 bp, Homo sapiens
gtgcaatggaacaccataatttattcctccttatctcttaattcttagctcaaatgtcattttctcagaaaagccttccctaactactctccccatacatycctttgtcacatagccatgttttatttccatcttcctgcttagaagtattgaaaaatactttgcttgaactttttaattgctgtcctcttttactcctca

SEQ ID NO: 285306 - DNA, 201 bp, Homo sapiens
ggtggggttgctcaaagaattgcaatttgcttacgggcagccctgtttactgttaccattaatactctcaataggatgttgccatgtaaatgcctatctartattttgtgcaactgaagcagagatgactttgctgatataaaacgtgtcacggctggaggtgggaagtgtacagcttctaaaacagcactagagggaact

SEQ ID NO: 285307 - DNA, 201 bp, Homo sapiens
atttggatttctctaaggattagtgatgttgaacacctttttatatgcttgttggccgcgtatatgtcttcttttgaaaagtgtctgttcacgtcctttgyctgctttctaatggggtgtttatttttttgcttgttaagttccttataaattctgaatgttagaccttcgttggatgcatagtttgcaaatatcttctcc

SEQ ID NO: 285308 - DNA, 201 bp, Homo sapiens
agctggataaaaacaaatatttctaatgactactcaaggtatagctgacaactgtttggggaacaaaacaacaagagaaaaaaaatgatctgtttatgccaaaagggccccctgaagtagattttgtcaccattgtgaatgtggagacaaacgtcctctgacttgctgtgtgcaagttcacttgtcctgcgccattacaaa

SEQ ID NO: 285309 - DNA, 201 bp, Homo sapiens
tcttttgaaaagtgtctgttcacgtcctttgtctgctttctaatggggtgtttatttttttgcttgttaagttccttataaattctgaatgttagaccttygttggatgcatagtttgcaaatatcttctcccattctgtaggttgtctgtttgctgtcttgatagtttcttttgctgtgcagaagttctttaattagatc

SEQ ID NO: 285310 - DNA, 201 bp, Homo sapiens
ggggagctgcatactggaattaacatggtttttgccttaataaggcaatgaggttttcggtgcaggcagggtacagcccatgtgtgagattaatttgcctgtgtgtgtgtgtgtgtgtgtgtgtgtgtgtgtgtgtgtgtttactcacatgaatacttacgttcaagtcaatatggctgttcttgtttgtggaaagaataa

SEQ ID NO: 285311 - DNA, 201 bp, Homo sapiens
gggagctgcatactggaattaacatggtttttgccttaataaggcaatgaggttttcggtgcaggcagggtacagcccatgtgtgagattaatttgcctgkgtgtgtgtgtgtgtgtgtgtgtgtgtgtgtgtgtgtgtttactcacatgaatacttacgttcaagtcaatatggctgttcttgtttgtggaaagaataat

SEQ ID NO: 285312 - DNA, 201 bp, Homo sapiens
ggagctgcatactggaattaacatggtttttgccttaataaggcaatgaggttttcggtgcaggcagggtacagcccatgtgtgagattaatttgcctgtktgtgtgtgtgtgtgtgtgtgtgtgtgtgtgtgtgtgtttactcacatgaatacttacgttcaagtcaatatggctgttcttgtttgtggaaagaataatg

SEQ ID NO: 285313 - DNA, 201 bp, Homo sapiens
aagcttcttaacaatgtatattgtgtatcctctgagtcagcccatagagtctttacatgtactctgaaactagagagggaaaaagccagcaacttccttcytgttctcctttatcaatagtacattttagcctgggagaggaagaataccatcaaaaggaacaattatatgtatgcatagtgtgtgcttgtatatgtgtta

SEQ ID NO: 285314 - DNA, 201 bp, Homo sapiens
gagctgcatactggaattaacatggtttttgccttaataaggcaatgaggttttcggtgcaggcagggtacagcccatgtgtgagattaatttgcctgtgtgtgtgtgtgtgtgtgtgtgtgtgtgtgtgtgtgtgtttactcacatgaatacttacgttcaagtcaatatggctgttcttgtttgtggaaagaataatga

SEQ ID NO: 285315 - DNA, 201 bp, Homo sapiens
cctcacatttttatgaggcaaaggacagtggacttatctacaacattgttatttctgtttatataatagaataataattgctaacgatcattagagttttycatgtatggcaggcattgttctaaagaatttagaggtattatctctcttaatctcacaaaaaatctatgaggtgagtacaattattatagccattttatg

SEQ ID NO: 285316 - DNA, 201 bp, Homo sapiens
ttatctacaacattgttatttctgtttatataatagaataataattgctaacgatcattagagttttccatgtatggcaggcattgttctaaagaatttakaggtattatctctcttaatctcacaaaaaatctatgaggtgagtacaattattatagccattttatggatgaggaaactgaggcacccagtgatcttgcc

SEQ ID NO: 285317 - DNA, 201 bp, Homo sapiens
accagaatgtgtcttttctgattctggtgccttgattcggaagacccaaagaagagatgcaggttgtgattcctggaaccacagaacagaaagatgactgytattcctccttcataaaaaaagagaaaacagaagtttatatcatgtttcaatgtacactcttcacaacacagcctttcagttttgcttcttttattagtt

SEQ ID NO: 285318 - DNA, 201 bp, Homo sapiens
ttaaaagtaatactctgaaaatgaaggaggatatagtctcattactaatagattttttataaatggaaagattcctttaaaaatatagtagtacatatacwttatacatatctctgtaaaacagactctggtagatgcattttaaatgttagtcaaatttttaataaaatatagatagtaccaagatacttattatatata

SEQ ID NO: 285319 - DNA, 201 bp, Homo sapiens
tagggatgttgtaatgaatgattgaatgaacatgtataaagcacaaagagtgaccacactgagcaagcacttcatatgttggtctgttattattattactsaagagttgcacttttcaaagtggatgtgacttcacttttttttttaaatttatgttctgggatacatgtgcagaatgtgcagttttgttgagcagactca

SEQ ID NO: 285320 - DNA, 201 bp, Homo sapiens
gaagtatctttgcttgtatagtaatagaacctaaaaaaagaactgtctgctggcatgtgcccaaacagagctcggtgtttaaaaacaagatgctgtattcytggggtatggaaacttccttcacatgtgggtacagcaatgtctttggacacattttctgtgtaaggggaaaattatcagcatcttgaggagtggcaaaat

SEQ ID NO: 285321 - DNA, 201 bp, Homo sapiens
atatttaaggaacttgagaatgaaaggaaataatcttcattctagttagcaaatatatatgtaagagcaatctgatttacaaatgtaccaagtttaataaragtcatcttgttttaaatgatctgaaaagatgagccactgcagaaccatagaatcgaaacctagtttttttgcttagaaggaaagtaagagctagaggaa

SEQ ID NO: 285322 - DNA, 201 bp, Homo sapiens
agcaaatatatatgtaagagcaatctgatttacaaatgtaccaagtttaataagagtcatcttgttttaaatgatctgaaaagatgagccactgcagaacyatagaatcgaaacctagtttttttgcttagaaggaaagtaagagctagaggaattattccagtgttctgaaaaggagaggacaaaaaaagtctagagtag

SEQ ID NO: 285323 - DNA, 201 bp, Homo sapiens
acaaattgggtataccagaaagaagtgggacattttagagaaaatcagaatattcaccataaagctggaattaagcatatgactgattggaactgaatttkttccagttttaaaatatatttttaaaatgtaaaatacacttaacaacaaataatcacttatagttataaaatatgtattctctctagacagtgttctaag

SEQ ID NO: 285324 - DNA, 201 bp, Homo sapiens
ttgcacacacatatgtgggtagcagacagagagaagaaataagtatcacaaaagcaaaacggggaaaaaagtgattatgtaaatggatggatgcatctggsaatacaaagctgaataagattgagtccctgctctactggaattacaatttactggagaagtaacaagatggaaataatataggtaaagaataaatcataa

SEQ ID NO: 285325 - DNA, 201 bp, Homo sapiens
ttcttgaagtgagactgcatgtgacgatgcagggaacacatctcctagaaagaagaggagccactgaatgggcagcctcatggaatctcaggatagaagayccttcacatttgaagcaggctttagaggactgtgttatcttttccttttccatttcccctttccttgccttaagagcaagaattgtagattttcactcta

SEQ ID NO: 285326 - DNA, 201 bp, Homo sapiens
accacttgccttgatattgcagtaatctttgatgttaagggagtggaattaggtatttatgaatatgacctgggacataaggaatgtatatacatttattygacagctacttatttggtgcccactgtgtgccaagcatgttacacaagagagtaatcataaggaaggtgacactagcctcagtgttaggatggatggggg

SEQ ID NO: 285327 - DNA, 201 bp, Homo sapiens
tatcctgattgtggtggtgttttcacatgttagacatatgtcaaaatttaaattgtatactttgaatatgtgcagtttgttttatggaattatatctcaawaaagctcttagaaatacataggagcacctctcagttaataattttaaggcagcttttaaaaaatataatagttgaatttgtctgggtgcagtggctcacg

SEQ ID NO: 285328 - DNA, 201 bp, Homo sapiens
acattgcatatgctataccaagcacacacactatcttactcatgacaactctgcaaagtaatcatcattatatccgatttatagatgaggcatctgagatkctgagagactgagtgacttaccctaggtgccatatcaacacgcggtggagctgccctttgaatccagaccaaacttttaaaatggtgcttttcactggct

SEQ ID NO: 285329 - DNA, 201 bp, Homo sapiens
ctggatgccctgaaaatatgacttgggtttcagcaacaaattctgatttccttgggtcagaaatatgggtctctatcagtcattttctgttttttttttctttttttttttcagattcaattgggcttcacttttttgtaagcaaagatatatagaaagggaaggttgaatgtgttagaattactcatgttctctggtggt

SEQ ID NO: 285330 - DNA, 201 bp, Homo sapiens
cacaaaagaaaatattattaagccttataaagtgtagagtatacatttagaaggcatagcatctatctgggggttataaactaagtttgatatatttatcygtggacgaggtatctgaaaagatactcctagacacatttgtagaatcttgttattgtttggctaattagtgcaaaataaagacccttctctcccacctca

SEQ ID NO: 285331 - DNA, 201 bp, Homo sapiens
tatatagaaagggaaggttgaatgtgttagaattactcatgttctctggtggtacattattgtaacagaagtttattcctccaaactgcttggatgggcasaatttgaacatatgctgaaacagtcctatagacacttgagagttccatacagtttatttgctggtgaaatcatggatggttacacaccgcttcctcattc

SEQ ID NO: 285332 - DNA, 201 bp, Homo sapiens
tctttgcagtaagtaaggtcttttgaggaacacaaaaggatgaggggatttcttaaccatccctgatttcctggaacacagggctcagataaagttgagcrttgtcaacatatgcatttatatattgtattatgctgctaataaagatatacctgagactggttactttataaaagaaagaggtttaatggactcacagtt

SEQ ID NO: 285333 - DNA, 201 bp, Homo sapiens
ttgattcagtttgtaacttgacaacagaaactgtaggcatttggaaaataatatcaagtcctcttttcaaatctaatacatccttcttgtgtaagaaaatttaattaaattcatttaatcttctgaaaaaaatgctctaaattcatttaagagagttaaaaataaataaatcttttaaaaagcctaagacttgagtgagag

SEQ ID NO: 285334 - DNA, 201 bp, Homo sapiens
tctcattagcttaaaaggcaaatgaaatggttagctttaaaagctgagtcacagtctcatttaccatcagaattcacagttttcttctttattttaattartagattaatcctgtctcagcaatgccattaggtgcctgccttgatggtgtggaaaaatacacacaaacatctgatatttctgagcatttgggttgtgaca

SEQ ID NO: 285335 - DNA, 201 bp, Homo sapiens
tgattcagtttgtaacttgacaacagaaactgtaggcatttggaaaataatatcaagtcctcttttcaaatctaatacatccttcttgtgtaagaaaatttaattaaattcatttaatcttctgaaaaaaatgctctaaattcatttaagagagttaaaaataaataaatcttttaaaaagcctaagacttgagtgagaga

SEQ ID NO: 285336 - DNA, 201 bp, Homo sapiens
cttaagatttatagatgttttttaacttaaggatgaggaaactgaccactataggataattaaaaacagcaactctttgtaaatgcaggagctaagttgtyaaatgccagggcaccaacaggcaatattctgtaatctaaattgggtaatttatatcattgtcacttgaagatctgatataaattggagtcactgaatcat

SEQ ID NO: 285337 - DNA, 201 bp, Homo sapiens
gaagtgacaaaggaatgccattgattagtcagatggagggtggtgagcagtagcatcctgctaccttgaggaaaaaagcccaagtgaaatgcactccagtrtacaacccctgccattctgttttcctgatcaccatgatacaaatcaaacatgacattcatgatcagccagtacttagttgtgtgactatcccagtggtct

SEQ ID NO: 285338 - DNA, 201 bp, Homo sapiens
gattcagtttgtaacttgacaacagaaactgtaggcatttggaaaataatatcaagtcctcttttcaaatctaatacatccttcttgtgtaagaaaatttaattaaattcatttaatcttctgaaaaaaatgctctaaattcatttaagagagttaaaaataaataaatcttttaaaaagcctaagacttgagtgagagaa

SEQ ID NO: 285339 - DNA, 201 bp, Homo sapiens
actgtaagaaataagcccaaagcattctccaaggtgacttctgtgctaccttatttaacattaacataaaagttaaaactttactatggtaagaacaattktttttaaatttgttgttaaaaaaaggaaatcaaaacaatctagagaacataagtcaagggttatttaatcttttactaagtcagttgggggtgatttgga

SEQ ID NO: 285340 - DNA, 201 bp, Homo sapiens
attcagtttgtaacttgacaacagaaactgtaggcatttggaaaataatatcaagtcctcttttcaaatctaatacatccttcttgtgtaagaaaatttaattaaattcatttaatcttctgaaaaaaatgctctaaattcatttaagagagttaaaaataaataaatcttttaaaaagcctaagacttgagtgagagaaa

SEQ ID NO: 285341 - DNA, 201 bp, Homo sapiens
taattacaaattaatttaatcatccaccttctaaaatataatctgcagcgaagttttataaccatgtgtatccataaaattcatttaatagcttatagttrcagaggaggatgttataaggttggtttctgagaaatttctacaatttaaagctgaaaagatgcagagagagagagagagttatataatatagaatattag

SEQ ID NO: 285342 - DNA, 201 bp, Homo sapiens
tttcagttttttgaggaagctccaaattgttctccatagtggctgtactaatttacattcctgccaacagtgtatgagggttcccttttctccatatcttmgccagcattttttattgcctgtcttttggatataagtcattttaactggggtgagatgatatctcattgtagttttgttttgcatttctctgatgatcag

SEQ ID NO: 285343 - DNA, 201 bp, Homo sapiens; identical to SEQ ID NO: 58286

SEQ ID NO: 285344 - DNA, 201 bp, Homo sapiens
tgaagtgggcagatcccttgagctcaggagttccagtccagcctgggtaacctggtgagaccccagctctacaaaaaatacaaaaattagctgggcatggyggcacatatctatagtctcagcttcttgggaggctgaggagagagtcgcttgagtcttggagggtgaggctgcagtgagacatgattgcacctctgcaca

SEQ ID NO: 285345 - DNA, 201 bp, Homo sapiens
aacaagatagagccatttactaagcagattggcaggtgagggacgctggttttagctagtacagtgaatgagtgtgtgagtgtgtgtgtgtgtgtgtgtgkggggggtgtattcttagtcccttttacactgacagttgaaaaactgacctttgcccttctctctcccatgttatttctgatgttagtaggcagtttgtag

SEQ ID NO: 285346 - DNA, 201 bp, Homo sapiens
ggctgttttaaatacaatttagcctaatgcattgactgttgtcaatttgtgcataaggacagctacttggtgggatgaacagaatgaaaaggataattcartttagggatttggaaattatgagaagacaggaatgtgaaattatattttactgataatattttcattataagatgcccatttttctgagatatatactca

SEQ ID NO: 285347 - DNA, 201 bp, Homo sapiens
ctgtgctaccttatttaacattaacataaaagttaaaactttactatggtaagaacaattttttttaaatttgttgttaaaaaaaggaaatcaaaacaatytagagaacataagtcaagggttatttaatcttttactaagtcagttgggggtgatttggagagcagttgatagtgctagagtgagcaggaatctagcaaa

SEQ ID NO: 285348 - DNA, 201 bp, Homo sapiens
ctgggtctgtttccttattcagcaatgggcagtaagaacatagagtgatgtcactcagcacatgcctggcccataactgtcttctttgatgcctgtttttwtctgtttgtagggccaaggagatctgttgaagaatgccaagaatgaagctatagaaaacatgaagcagatccagctggcatgcctgtcctgtggactgag

SEQ ID NO: 285349 - DNA, 201 bp, Homo sapiens
acaagtttcttcatacaccctaaggaaaaagcatttactggcctttcataaaataggtaaattatcctttctctgagcctctgctttgtagaataatgctmcagcaatcgtcataaccccatatccacccatattgtcctttcaaggtcacactttcaggcactgccatgagaatggagaggagagggaagaagctacttc

SEQ ID NO: 285350 - DNA, 201 bp, Homo sapiens
gaatatcggtcttaaaaccattgatgacatctttaaaatagcggttcatccattacgagaagccatagatatgagagaaaatatgcaggtaggagaaacaytcacactctccttccctatccctgcttattcctacccgtataatgttttattaataatctgatttgcaaaaatttatcagaaagattgtttaagtctggg

SEQ ID NO: 285351 - DNA, 201 bp, Homo sapiens
ggcactccctacctaagtccaaagcaggggagccacctgctggacagtgtgaaaaatcttcattttctggaggtagtcatccctgcttttttacttttaartttaggtagatttacttacatataaatttatgtactttttattttgctgagtaaatttctcacttcacacaaataaagcggctctaaaataaggagaaaa

SEQ ID NO: 285352 - DNA, 201 bp, Homo sapiens
ggaagtggtacttaggaaggagtgagatcagaaggaccagaacctactggtagctgagtgggacttcaagcccacctttgagtgctgcttgagagaattcrgagaagataggagatacttcatttttttggtgggagtggggtgggggagagacagggaggataaaatggagcagataatatttttaaaggtgactttgct

SEQ ID NO: 285353 - DNA, 201 bp, Homo sapiens
ttccgattattaatcccttgtcagataggtagtttgcaaatattttcttccattctatagtttgtctcttcacttttgggttgttgcctttgctgtgcagraactttttaacttgatgtgatttcagttgtccagttttgctttggtttcttgtgcttgtggggtattacttaagacacatttccccagacaaatgttctg

SEQ ID NO: 285354 - DNA, 201 bp, Homo sapiens
gagtcttagatcatttagtcctatgatagacttttcacagtgacttataacacacttcttctaccacctctgccacctggtactcagcagaattttatttscaaatacatttgaaagaaaaatattatctgactttatatactttcttctttagatggccgagcttttccttttcagtgttctcacctttctaatttttca

SEQ ID NO: 285355 - DNA, 201 bp, Homo sapiens
ctgagtcgtgctgacttcccggctcagggattatctgaggacatcttctcaccttctctgcttggcttttgcgctttgtattttatttccatcagtatcakttagagatcttggaaggaggtgaaactcaaatcgaccattttttctccctgacaacttagataaattacttagttgagaggaaaatttgaaatttttgac

SEQ ID NO: 285356 - DNA, 201 bp, Homo sapiens
atgcataatgataacattttccacatgctaaatcatgctaatgacccctaccaagtagaggaaagaatgttgtcttataataccaacagattatttaaacytgagagctttacatcatgttagattaagttgtgtatattaaaattttccaaacagtaagtataaagatactgtcttatacatataagaggtatggctatt

SEQ ID NO: 285357 - DNA, 201 bp, Homo sapiens
tgacttcccggctcagggattatctgaggacatcttctcaccttctctgcttggcttttgcgctttgtattttatttccatcagtatcatttagagatctwggaaggaggtgaaactcaaatcgaccattttttctccctgacaacttagataaattacttagttgagaggaaaatttgaaatttttgacttaaattgtgg

SEQ ID NO: 285358 - DNA, 201 bp, Homo sapiens
gaaactcaaatcgaccattttttctccctgacaacttagataaattacttagttgagaggaaaatttgaaatttttgacttaaattgtggtttggattatyggtacattttagctattcatctcatttgttttttctatagctactaataattgaaagctgactgcagaaaatagaataaatttataattctcaatacaat

SEQ ID NO: 285359 - DNA, 201 bp, Homo sapiens
tgattttatgttctgagaatattaatgataagatatgtgaggacacaatttgagacttttattactaaaagatttctggttatttctgaggaatctcaaasagaagcttgttttgaggtaaaattatactcgattatctctttatgacgtttattagacaatgggaaaaacagaaacaacttataccatggggttaacaaa

SEQ ID NO: 285360 - DNA, 201 bp, Homo sapiens
gggtgtgtttagagaagcgtgattcatccatgtcaactgagacttaggggaactggaacaccatagttctaggttagaaaaattttacttcattcagtaascaagggagaaaatgacaaagccaggaattagtactgtagttttggatgatgattctggaagtggtacttaggaaggagtgagatcagaaggaccagaacc

SEQ ID NO: 285361 - DNA, 201 bp, Homo sapiens
cattgggtccaggcagcctagtgcaggaataagaatgcaggccctgtgtgattacctgatagtggtgagactagccaagttatataatctccctcagggtrgtaataatacctacatctcagattttgtgagaattaaatgagataatacatacaaaagatgtaagtcacagtgcacaaaactagacagcatatatgttag

SEQ ID NO: 285362 - DNA, 201 bp, Homo sapiens
cttgcagtaacattaatctggtgtttaaatgaatgctttgctgaatctggggcaccgagagtgaatatctcattaatgaccaaatctccaaaccagtcatkgtggaggaagctgagttggccacatccttgatttaactaagaagtagcatgttttattttatagctgccttagcctcattcattaaaacctgactcattg

SEQ ID NO: 285363 - DNA, 201 bp, Homo sapiens
tcaagaagtatctttgcttgtatagtaatagaacctaaaaaaagaactgtctgctggcatgtgcccaaacagagctcggtgtttaaaaacaagatgctgtrttcttggggtatggaaacttccttcacatgtgggtacagcaatgtctttggacacattttctgtgtaaggggaaaattatcagcatcttgaggagtggca

SEQ ID NO: 285364 - DNA, 201 bp, Homo sapiens
agatagagccatttactaagcagattggcaggtgagggacgctggttttagctagtacagtgaatgagtgtgtgagtgtgtgtgtgtgtgtgtgtgtgggkggtgtattcttagtcccttttacactgacagttgaaaaactgacctttgcccttctctctcccatgttatttctgatgttagtaggcagtttgtagcaca

SEQ ID NO: 285365 - DNA, 201 bp, Homo sapiens
gcaactgtgttggtatcaagaaatcaaaaatcaaatgtatttgtagcaaaatgggcctattgacgtggcagaatttcagaagaaagggaaggcacactctcccctgtcttagcacatcttacttaaagtatacgttttctgtctgcttcctgggacttgaaatttcaaaattacaaccagttccctagggttaagactttt

SEQ ID NO: 285366 - DNA, 201 bp, Homo sapiens
tgggttcatgccattctcctgcctccgcctccccagtagctgggacaacaaacacccaccaccatgcccagctaattttttgtatttttagtagagacagrgtttcaccatgttagccaggatggtcttgatctcctgacctcgtgatctgcccgccttggcctcccaaagtgctgggattacaggtgtgagccaccgtgc

SEQ ID NO: 285367 - DNA, 201 bp, Homo sapiens
tcatgccattctcctgcctccgcctccccagtagctgggacaacaaacacccaccaccatgcccagctaattttttgtatttttagtagagacagggtttyaccatgttagccaggatggtcttgatctcctgacctcgtgatctgcccgccttggcctcccaaagtgctgggattacaggtgtgagccaccgtgcccagc

SEQ ID NO: 285368 - DNA, 201 bp, Homo sapiens
ctgtgttggtatcaagaaatcaaaaatcaaatgtatttgtagcaaaatgggcctattgacgtggcagaatttcagaagaaagggaaggcacactctcccctgtcttagcacatcttacttaaagtatacgttttctgtctgcttcctgggacttgaaatttcaaaattacaaccagttccctagggttaagactttttatc

SEQ ID NO: 285369 - DNA, 201 bp, Homo sapiens
ctgcttcctgggacttgaaatttcaaaattacaaccagttccctagggttaagactttttatcttttttaaaatgcagcaacatccctgtgagtaataacrcactgggttatcagtaattcattcttactttcgagtaaatttagcagatcctgttctacaagcaggttttaacctgggagaagcgagagatggtaatgac

SEQ ID NO: 285370 - DNA, 201 bp, Homo sapiens
gtcctttccccaagagctggacaaatgacctcctttgaatttgaattattagctgagagaaaaagagcctgggctctgttggagactttttattccagtgrtgctgctctaagaagatatctttttctatacgattcttcctttagttcttatgcattagatctgaaacacttgattcccaattaattctccagacttgct

SEQ ID NO: 285371 - DNA, 201 bp, Homo sapiens
gagtaaatttagcagatcctgttctacaagcaggttttaacctgggagaagcgagagatggtaatgacagagggttcaccaagtctgggtaaggtgaaggyggggttgctcaaagaattgcaatttgcttacgggcagccctgtttactgttaccattaatactctcaataggatgttgccatgtaaatgcctatctagta

SEQ ID NO: 285372 - DNA, 201 bp, Homo sapiens
ttcaagagccatgcctctagcaaaaactttacaaaggctatactcctttcatattccttcctcatgccccctcctccacagccacagttctactgttcagrcctacaatctgtcctttatcaactgaggagttacagcagaatctattctgtgtctcctctaggcaacatttacttcttcaattttcattttgttgtaaag

SEQ ID NO: 285373 - DNA, 201 bp, Homo sapiens
atttaccttgcttccagttggttgaatgattaataaccatcctggaaagacataatcactgaattaggaggctgtggtacaattctgcgttgcctactgaraaagtttccttatacatgatttagactagtattccctactatctagagagagggagtgggaattaaccaattctggttaaatgtgttggtttgtatttct

SEQ ID NO: 285374 - DNA, 201 bp, Homo sapiens; identical to SEQ ID NO: 58287

SEQ ID NO: 285375 - DNA, 201 bp, Homo sapiens
ttgcagtaacattaatctggtgtttaaatgaatgctttgctgaatctggggcaccgagagtgaatatctcattaatgaccaaatctccaaaccagtcattrtggaggaagctgagttggccacatccttgatttaactaagaagtagcatgttttattttatagctgccttagcctcattcattaaaacctgactcattgg

SEQ ID NO: 285376 - DNA, 201 bp, Homo sapiens
cgagtaaatttagcagatcctgttctacaagcaggttttaacctgggagaagcgagagatggtaatgacagagggttcaccaagtctgggtaaggtgaagrtggggttgctcaaagaattgcaatttgcttacgggcagccctgtttactgttaccattaatactctcaataggatgttgccatgtaaatgcctatctagt

SEQ ID NO: 285377 - DNA, 201 bp, Homo sapiens
tccaacttataatttaatgcattccaatgtgtgccatgattctgggctgcttttataaatttatgtttagtatatgtgactattacttttccccataacgyttttgctttttatcactacttaagcctttgctccttctgcttttatctaaaacattttcaatttccgtgggaagagcagagattgaagcttctcacttct

SEQ ID NO: 285378 - DNA, 201 bp, Homo sapiens
tgagtttgatgtcttaactctgcattaagtatttcttacagtgatataagtggaaagaaaacattgataaccaaattgtttcattctggttccttacagcycttgtaggttttatactcacaagctccttttctgatattgttactcaaggaagacaaaaatgggctacatctatctaatttccttattgttaatccaaat

SEQ ID NO: 285379 - DNA, 201 bp, Homo sapiens
ccagggcctaaggggaagagagaagcctaattaaagtttggccaagtccaggtagtaggtatcaatattttctccagattggttagtggacacaaacagamaaacagttcagctagtcatttatgaggcaagaaagggaatttgaaaggtctgtgtctggccatgtcacagataaacaagggagattccatgagtcttagc

SEQ ID NO: 285380 - DNA, 201 bp, Homo sapiens; identical to SEQ ID NO: 58285

SEQ ID NO: 285381 - DNA, 201 bp, Homo sapiens
tgacatgctgactctgataggactctctccatctcacaaatgaggaaattgaggcttgtgggggttgaaatttcttgcctggagtcacacagctagtaaayagccagcctgcaatttttaactcacgcccatggttctatccactacactgttctgcctcctctaaaactccatccatgtggctgagtccctgtattagtc

SEQ ID NO: 285382 - DNA, 201 bp, Homo sapiens
tatgtacctgcaaaagttaaaaattaaagaaaataaatccaggattgcctaataccaaaatccatttccattatcattcatgtgcagaaccacaaacccayggcacagttaaatacttgtggtaggttgtcttagccaccatttaaaaaatagagtcccaatatcagcatattctatgtaactttttctgacataattcta

SEQ ID NO: 285383 - DNA, 201 bp, Homo sapiens
ttaagcaaatggatactctcattcatctacttctagtggaaaaataaattgatatagtatttcttggagaaacaattggcaatacaatttaaaatgcttaygagtttgatctatagagttccttttcttggatttattctaagccagtagagagaagcataaacatttatgttaataattcaacatagaaagattagctaa

SEQ ID NO: 285384 - DNA, 201 bp, Homo sapiens
cagttattttatagcaatgcttaactatactttaagttacactttagtctttgtttagtacagacgaaatccaagtgataataggtgggttgtatgtgagygtacagggttggggtggtgtctgaagaagtctagagggatgagggtttctgaatctagttttgtggtttggaaccccatcaaaaccttctactgctggta

SEQ ID NO: 285385 - DNA, 201 bp, Homo sapiens
catattttttaaattatatgaaataaactttattggacatagttttacgttaccattttttctctctttcaccaaattgtgaaagcaaatagctagatatrctttctccctttgaagaggcatgacagtttcaggttttgctaagaaagatagtttccatctgaaaatgtgtgtacatagtgtttacttctaatttaaatg

SEQ ID NO: 285386 - DNA, 201 bp, Homo sapiens
attcaggcttcttgaagtgagactgcatgtgacgatgcagggaacacatctcctagaaagaagaggagccactgaatgggcagcctcatggaatctcaggmtagaagacccttcacatttgaagcaggctttagaggactgtgttatcttttccttttccatttcccctttccttgccttaagagcaagaattgtagattt

SEQ ID NO: 285387 - DNA, 201 bp, Homo sapiens
aattgcttttttatctttcacgagacagtctctattattgtaagcaattaggtgatgaattttaacatagcaattttaacctgagccccaattaataaacmgtagacatttagcatatgaggtcaaatcaaagaacgtctcgtcaaatccccatgttttggagaaaaggaaactgctgcccacaggagttagggacatttc

SEQ ID NO: 285388 - DNA, 201 bp, Homo sapiens
ttttattttatagctgccttagcctcattcattaaaacctgactcattgggcggagggtggaagaagttgcccctttagaaatatcttgctaataactctktggccacttcagctaacacagaacctggaactcatgccagcatagaagggtggctacaaggctatgggatgggccagccgtacacatgccatgattcact

SEQ ID NO: 285389 - DNA, 201 bp, Homo sapiens
actgaagcttcttaacaatgtatattgtgtatcctctgagtcagcccatagagtctttacatgtactctgaaactagagagggaaaaagccagcaacttcyttcctgttctcctttatcaatagtacattttagcctgggagaggaagaataccatcaaaaggaacaattatatgtatgcatagtgtgtgcttgtatatgt

SEQ ID NO: 285390 - DNA, 201 bp, Homo sapiens
tgcactgagctcctggagccagacgtttgctggtgatgggcggtcagggtcacccttgagccgcgcacactaaatgacgggagggcatcccgcgtcagtcrccagtgtcgaggcgtcagcagccctccctgcagggaggtggccggtctctttgactgccgtgatcggggcctggcagtttgttagtgcggcctttgtgac

SEQ ID NO: 285391 - DNA, 201 bp, Homo sapiens
acagcggtgccactgacccatcacaccctcccacactgcctgttcaggtagtgtatgcagacacacgcgtatatatgtggacacactcatgcatgcacgcwcacacacacgcttgaggaaagtcctctctcttgctgaactattctcagccccagtgcataacaggtctcctagtggggtctggcttctgacactttcagg

SEQ ID NO: 285392 - DNA, 201 bp, Homo sapiens
ctgggtgtgttcactgctggttctttgtattcctgcggttgcactgagctcctggagccagacgtttgctggtgatgggcggtcagggtcacccttgagcygcgcacactaaatgacgggagggcatcccgcgtcagtcaccagtgtcgaggcgtcagcagccctccctgcagggaggtggccggtctctttgactgccgt

SEQ ID NO: 285393 - DNA, 201 bp, Homo sapiens
ctacagcggtgccactgacccatcacaccctcccacactgcctgttcaggtagtgtatgcagacacacgcgtatatatgtggacacactcatgcatgcacbcacacacacacgcttgaggaaagtcctctctcttgctgaactattctcagccccagtgcataacaggtctcctagtggggtctggcttctgacactttca

SEQ ID NO: 285394 - DNA, 201 bp, Homo sapiens
tagtctcagtcagatttataaaacttggaagaaagtctaacgatcgtgctcgcgtcctccttcctttccacctcacagtagtaactgttcagtgctttctyctttggatttcatgtaaatcagtgaatatgtaggcggacccctggtattccccacatggatgagtggaagcttcctgtccacttacccactgcctggcat

SEQ ID NO: 285395 - DNA, 201 bp, Homo sapiens
tgcttcctttagaaaggcttggactgtcagaaataatggttataaagtgaggtttatttatcccaggacccagaggaaaatagttggaactgtgaattcaygagccccaggttcacatgctggtggctttgtttgtgagctggcgagatgggctttatttcctccctcatgcagctccccagcttcgtctttgcttctcta

SEQ ID NO: 285396 - DNA, 201 bp, Homo sapiens
cctttccccaggtgaaagcaggtgagaatggagccttgagtctgaacccagagcggggctttgtgttgtggctgggtgtgttcactgccggagcttggccrtgtgaacccggagccgggctctgtgtcgtggctgggtgtgttcactgctggttctttgtattcctgcggttgcactgagctcctggagccagacgtttgc

SEQ ID NO: 285397 - DNA, 201 bp, Homo sapiens
ttgtgtagcttctggtttctggttggtgtagcatagggtagtgggaaacaacttaaaccaaacagaatcaggattggcgaagccagtgaggggtgggtacrggatagtgtgatagtagtgtctgtgaccggcagctcacccagggcgtcctggttgtgacctcaacgctccagccggcctagcctccagtgccttccccca

SEQ ID NO: 285398 - DNA, 201 bp, Homo sapiens
tgaacttgacatttggaaggtggaaaccgatggatgttgaaaggatttgcaggccctttggtttcttttggcagtgatcgtggagaaggggaggtttctcytagtgtggatgcggtatggtttcttttagtggtgaccgtggagaaggggagaaaccgatggatgtggggagggttcgcaggccctttggtttcttttggc

SEQ ID NO: 285399 - DNA, 201 bp, Homo sapiens
agaatatggaaatatgacatcattccttttgaattttttcaggacaaagaaacaaaaaccggcacatgcggttactgtgggctccagttcagacagcaccmccactagagcgtgtggcacgccgggggtcccgcagcatcctgtgagcatttccgcggggaagctgagcacgtgaagctcgctggttctgtgcgaagggta

SEQ ID NO: 285400 - DNA, 201 bp, Homo sapiens
gacaccctcttttctaatgttcgtctgtgcctttgttttttcctaagtctcaccagaggttgtcagtaacatttgtatttctaagcgaccttcagcttggygatccactctgttgtatttttggtttctacttaatgtctgctcgttattttcagtttctacattcttgctgtttattttactgttctgtttataactttc

SEQ ID NO: 285401 - DNA, 201 bp, Homo sapiens
gggctgtgaggtcgcgttcgggagccgccagttctcccgccccggggtcgctggacaccccctcctgtcgccaggtcgggcgcccacggtcggacccgcaycccccaaccctggccctctgagaccgccaggccccggcccacgctcctctgaccgcagcccactcggggagacacgcccgagggtcccaaggtggccggc

SEQ ID NO: 285402 - DNA, 201 bp, Homo sapiens
tttgaattgttagtgtattcccagtagaagcatctgttccatgtgccacattctccaatgctgtatcccagtgattcacacaaaggagctcatggcattgygaatgggacatttcttccgtgtgcaggctgtcctgggcattcttgttaggtatatgaacttgacatttggaaggtggaaaccgatggatgttgaaaggat

SEQ ID NO: 285403 - DNA, 201 bp, Homo sapiens
ggagaccagggtgtatgtctcaacccttctcactagaatgcaaacaagacccccagtttgcaggtatcagacgttcacagacttggagcctgctgaggaarggggactggaagtctggagccaccaacctgtttaaggtacttttaactgttttccagagtaatggtgacctggaaaggagaataattagactcttctatg

SEQ ID NO: 285404 - DNA, 201 bp, Homo sapiens
attttttcaggacaaagaaacaaaaaccggcacatgcggttactgtgggctccagttcagacagcaccaccactagagcgtgtggcacgccgggggtcccscagcatcctgtgagcatttccgcggggaagctgagcacgtgaagctcgctggttctgtgcgaagggtattcctggtgctgaataaagggtgttgctgtca

SEQ ID NO: 285405 - DNA, 201 bp, Homo sapiens
gtttttgtttgtttgtttgtttgttttttgcgacaaagtcttgctctgtcacctaggctggagtgcaatggtacgatcttggttcacagcagcctccaccyaccgggttcaagtgattctcgtgcctcagcctcccgagtagctgggattacaggcgcgcaccaccacgcccggctaatttttgtatttttagtagagatg

SEQ ID NO: 285406 - DNA, 201 bp, Homo sapiens
ggagtgcaatggtacgatcttggttcacagcagcctccacccaccgggttcaagtgattctcgtgcctcagcctcccgagtagctgggattacaggcgcgyaccaccacgcccggctaatttttgtatttttagtagagatggggtttcgccatgtcggccaggctggtctcaaactcctgacctcaagtggtctgcctgc

SEQ ID NO: 285407 - DNA, 201 bp, Homo sapiens
tgcccgttgtgaattctgcgaccacttctggtaagttctcaacaagtaggcgtagcacaaagcaagcattcgtgttctcagatcccaagttgtcttttctwcaaaagccagtgacaatttagaaacggagaaagtgaccttgctctccaagaagcaaatgaaaatagtgggagcagcatccttgctggccttcttagaaag

SEQ ID NO: 285408 - DNA, 201 bp, Homo sapiens
ctggccttcttagaaagcagtgtatgaatgtatcttctcatgctttcaacagtcaccacaatttaaaaaatacagtatcaggagaactaaactgacccagktgattatgttgaagcatcttttttttttttaacttcaagttcttttagcaaagtgaatccatattccacctgattatgatttattccaagaaatcaatca

SEQ ID NO: 285409 - DNA, 201 bp, Homo sapiens
atcaatcatctacgacggatgagctgagcaggagatgtcgttccagagtgaattaactggtcaacagtcaaccatcgttttccattttgtgtccagacccrgacactggtggttcccagccttgggtttcagaggtcagcacaaggaagtcaggaagcaagtttcctcctgtggttgcttctgtggccagggaggggcgtc

SEQ ID NO: 285410 - DNA, 201 bp, Homo sapiens
  misc_feature (1)...(201): n = A,T,C or G
agcctgcccctgggcgccaggtgtttcggggtgcgggtctcgccgaccggggagaaggtcacgcacactggccaggtaacggccgctgggtacaggatgcnccttcctccagccgcacctcgggcgactggtggcagtgggctcgccgggcatccgcggccctggttctgcgccggcagcgcaggtcgtggtaaggttgtg

SEQ ID NO: 285411 - DNA, 201 bp, Homo sapiens
caagcgtgccatgaaatccatgccttctttattccttcctgttggctcctgtgccacgctgccttgctggggatttgtctgtgcaattgtcaagaggccaygactgtgtgcccacgtttgcatggcacgtaagcacatcacacccaactgcaggcatgcagccggtggtcaggtctccccccagagcactgcgtactgcag

SEQ ID NO: 285412 - DNA, 201 bp, Homo sapiens
ggaagtggcttcaggcccacgcaggaattgaccagaggttcctccctgaggcttctgtggctggtgtcgctcattcttatttctcccaagaggccggcagrgcagggcacactcgggtggggaagcaagtgaggctgaggctgggcccacgcggcacctccagaggctctgcacacccgtggtggtaacttgtgttatcac

SEQ ID NO: 285413 - DNA, 201 bp, Homo sapiens
  misc_feature (1)...(201): n = A,T,C or G
ctcaggccatatgccaaagaaggttgggggcggttctcctcggtcaggatttgtctctcctccttagctccaccttcccgggctatgtctctgtgctgctntctgatccaggtgaccacccgttttcatcccaggtatctcgctaaaaatgcccctgattacaccgagtactgtgcacttgtttgacttttcatcaatggc

SEQ ID NO: 285414 - DNA, 201 bp, Homo sapiens
actgcgtatttttgtttctgacagtctaagttttatacatacattttcaatgcttaatatctagatttgaagtagaatatggaaatatgacatcattcctyttgaattttttcaggacaaagaaacaaaaaccggcacatgcggttactgtgggctccagttcagacagcaccaccactagagcgtgtggcacgccggggg

SEQ ID NO: 285415 - DNA, 201 bp, Homo sapiens
cgtctctaatataccacatgcttgtccttcatctgttgggctaccatgctgcttttctttacacgtgttgacatggtgagtgacgttagtcagtcctgcaygttccaaggtggacctgagtgtaggggcaagtcttgcttttaattcccctttaaacactgtcctccttgggtcttcgtgtcagggccgtgctcactttga

SEQ ID NO: 285416 - DNA, 201 bp, Homo sapiens
aaggcactggcaaaattagtcactggattccaacattctcaaagcaagtttgaacatgttgtacagacagctcaattgtggtttttagagcattttctatraagttacttagtttaaaaattaatttgaatgaaaacttcagttttgcctgtgatttaagaattatatacttatatagacatgtatacacacgtttagctt

SEQ ID NO: 285417 - DNA, 201 bp, Homo sapiens
tggctcataaatggatcatggctccgtcccgggctgggggtgcccataggagaactcacccacaaccccgaaccctccgggcagagatggagcctggggcrcagaacagtgtggaccccacaggttccagagggttgggagcgattagacccctcgggatgaaatgtggatggagaaattggcagactgagattctaaaca

SEQ ID NO: 285418 - DNA, 201 bp, Homo sapiens
aaaaattaatttgaatgaaaacttcagttttgcctgtgatttaagaattatatacttatatagacatgtatacacacgtttagcttaaataattattggcrttcatgttcagaatgcctgatgttctaaataattgaactgagcttttactttattttaaacttttattttaaatgtccatgaatggggtcggtattctac

SEQ ID NO: 285419 - DNA, 201 bp, Homo sapiens
tcatgtcaatgagctcctgaattcgtaattagatcaggcatgcctccatgattcctgaatttgcttcctgaaggatgctgtgaagtgtccttcacagccascttattcattctttttcccactttggttagcctggtgttcttcttgttaacaccgtagctatccctaaatcatgtattttcccttctccttcaatcttgg

SEQ ID NO: 285420 - DNA, 201 bp, Homo sapiens
tccctaaatcatgtattttcccttctccttcaatcttggttacgttatccattcccagtgtgtagtttttgtacgtctattccagagctacagggcattcyagaaaagctcacatgatcatgaattgactataaattcacattctcaaaattcagctggttcactgttgtgtggtttgatgggtgggtgtcagaaaagttt

SEQ ID NO: 285421 - DNA, 201 bp, Homo sapiens
ttttagtggtgaccgtggagaaggggagaaaccgatggatgtggggagggttcgcaggccctttggtttcttttggcagtgaccgtggtgacggaggtttyctgggcatcgatgggtggttgttactgaggtagtggctggactctacatccttgctttgtgggtgttatggcacggtcgtgggggcaaggtaggagcccc

SEQ ID NO: 285422 - DNA, 201 bp, Homo sapiens
gtggaagaaacttgtgacatctttcgtctacattgagccatctcttgaggccagcgcagcaccacccgaaccatgttggctctcgtgcgtgcacacacacrctgttggtcacaggagggatgccaccagagagctgagagggagtgctgaggtacccaggggtcagtagctgcaggaagcagccactattcctaggacttg

SEQ ID NO: 285423 - DNA, 201 bp, Homo sapiens
tgcttttttggttagtagctggggctgccctgcctggccgcatccggattcaggctcctgcgctgatgggcttatgagggctgtgtgcttcagtgacttakcttgtaggctcgtgggcactgagtccgtgtagatgaggaaaggcttggagcagcgcctgtcccagggaagcctctagtgtgtgttcgccttactctgctg

SEQ ID NO: 285424 - DNA, 201 bp, Homo sapiens
tttcttcctctagcttactttattataagaatccaatatataatacttgtaacatgcaaaatatatgttaatcgaccatttatgttattggcaaacattckggtcagcatcaggctatgagtaaattgtgggggagtcaaaaataatatgcagattttcaattgtgttgggggtggttcccccaacccctgagttgttcaa

SEQ ID NO: 285425 - DNA, 201 bp, Homo sapiens
gactgcgtgattcctctaacacgagggaccagaacagtcgcttcttagaagtactgtatgaggtactcagaggtactgcgtgaggtactcagaggtactgygtgaggtactcagaggtactgcgtgaggtactcagaggtactgtgtgaacactgtgtgattcctctgatacgggggaccagaacagtcgcttcttagagg

SEQ ID NO: 285426 - DNA, 201 bp, Homo sapiens
ttagaagtactgtatgaggtactcagaggtactgcgtgaggtactcagaggtactgcgtgaggtactcagaggtactgcgtgaggtactcagaggtactgygtgaacactgtgtgattcctctgatacgggggaccagaacagtcgcttcttagaggtagcaagtagttggtggttgccgggggcggggggtgaatttgga

SEQ ID NO: 285427 - DNA, 201 bp, Homo sapiens
ttccagtgaaaagtagatgtgtgtgtaggccctgaatttaataaggtctacaatgataatagttaaatgaagcatgcaccatagattcgtgctgatggtayatgaatttgtgtgtggtgggttaaattgtagttagcaagtttgtgtatttgtttacgtaagtctttcttcttgttccaggtgaatgaaaactttgccatt

SEQ ID NO: 285428 - DNA, 201 bp, Homo sapiens
gaggtcgcgttcgggagccgccagttctcccgccccggggtcgctggacaccccctcctgtcgccaggtcgggcgcccacggtcggacccgcaccccccamccctggccctctgagaccgccaggccccggcccacgctcctctgaccgcagcccactcggggagacacgcccgagggtcccaaggtggccggccccaccc

SEQ ID NO: 285429 - DNA, 201 bp, Homo sapiens
tcatgcctttcctcctctttatcatcttccccgccactcatccatctctagtgttttgttcttggagtcacgtggtcctcaggctctgaccacagcaaaakaaaagctggatgctggagcttaagctgggatttatacccaagtcaactctaagcaaaacgggcctttttagaggctgtatttgcatgctgtaaaatcagt

SEQ ID NO: 285430 - DNA, 201 bp, Homo sapiens
tttgtgtgtggtgggttaaattgtagttagcaagtttgtgtatttgtttacgtaagtctttcttcttgttccaggtgaatgaaaactttgccattgatttsatagcagagcagcccgtgagcgaggtggagactcgggtgatagcgtgcgatggcggcgggggagctcttggccacccaaaagtgtatataaacttggtgc

SEQ ID NO: 285431 - DNA, 201 bp, Homo sapiens
ctgtgtcacagaatcacatattttatgttttatctttaatagatgtaatctcagtttgacacaataggactttgactcctaaagatttaaacctacatatytttatgcccaatcatttgatcatcaagaggtcaatggaaagagtgtttcctattttttacattagtgacgggcgagggactcattttacagtggttggac

SEQ ID NO: 285432 - DNA, 201 bp, Homo sapiens
ctacatatttttatgcccaatcatttgatcatcaagaggtcaatggaaagagtgtttcctattttttacattagtgacgggcgagggactcattttacagwggttggacacttcactgtgtatgatgtgccgtgtgcttaacaagagatggcgtgcgggctgctgtgacggttctcccttgattccctcgtgaagtgcagc

SEQ ID NO: 285433 - DNA, 201 bp, Homo sapiens
tggcagcctgtagcggtgggtctcgtccttccagggcctgcgggctctggaacgggaagtctccccagcgggcagcacttgctgtggactggctgcccatrggcgatttgtggcagccgattatttgggtcagaacgtttagaatttgtgtaatattcaataataaattttagtaacctgagaagtcggttgtagtccaag

SEQ ID NO: 285434 - DNA, 201 bp, Homo sapiens
gagaaaggagtcttgctagaatgatccaggagtctggcctgtgagtaacgggaattccagaggaggaaataccagagcagagggaaggtaagagggaaggygagacggaaggtgagagggaaggcgagagggaaggcgagtgggaaggcgagagggaaggcgagtgggaaggcgagagggaaggcgagagggaaggcgaga

SEQ ID NO: 285435 - DNA, 201 bp, Homo sapiens
aggcgagtgggaaggcgagagggaaggcgagagggaaggcgagagggaaggcgagtgggaaggcgagagggaaggcgagtgggaaggcgagagggaaggcragagggaaggtgagagggaaggtgagagggatggtgagagggaaggtgaggcagaaacagcagaaacacatttcccaagccaaagaaaaacccacagatc

SEQ ID NO: 285436 - DNA, 201 bp, Homo sapiens
ggatcacctgaggtcaggagtttgagaccggcctggccaacatggtgaaaccctgtctttactaaaaatacaaaaaatagctgggcatggtggtgcgcgcctgtaatcccagctactcgggaggctgaggtgaggcagaagaatcgcttaaacccgggaggtggaggttgcagtgagccgagatcgcgccactgcactcca

SEQ ID NO: 285437 - DNA, 201 bp, Homo sapiens
aaaaccggcacatgcggttactgtgggctccagttcagacagcaccaccactagagcgtgtggcacgccgggggtcccgcagcatcctgtgagcatttccrcggggaagctgagcacgtgaagctcgctggttctgtgcgaagggtattcctggtgctgaataaagggtgttgctgtcaaggctgacaatttgtaagtttg

SEQ ID NO: 285438 - DNA, 201 bp, Homo sapiens
ggtgggcggatcacctgaggtcaggagtttgagaccggcctggccaacatggtgaaaccctgtctttactaaaaatacaaaaaatagctgggcatggtggygcgcgcctgtaatcccagctactcgggaggctgaggtgaggcagaagaatcgcttaaacccgggaggtggaggttgcagtgagccgagatcgcgccactg

SEQ ID NO: 285439 - DNA, 201 bp, Homo sapiens
tggagcagttcccatccggacatttctcatcctgttatactgctcattccctgggtctccggccagagacagcaggcttttgcaggacatttttgggggtyggggggtgcggtttgcatccattggtctttctgtgttgctggcttcttcatctgtcagggatctatgaggaaaaagcccagggctccccagaatgccatt

SEQ ID NO: 285440 - DNA, 201 bp, Homo sapiens
gtggaactcgcaggaaagtcttctgggcctgggtttgttgtgggaaagtgggtatctaagatcaagtctccttgagtagttacaggacgttcagccttctygagccagtgttgtagattgtgttttttctaaaacttggactctcttgccgagactttcagagttttactggcatggagatgaagctcaagtattttcaag

SEQ ID NO: 285441 - DNA, 201 bp, Homo sapiens
aaggcgagagggaaggcgagtgggaaggcgagagggaaggcgagtgggaaggcgagagggaaggcgagagggaaggtgagagggaaggtgagagggatggygagagggaaggtgaggcagaaacagcagaaacacatttcccaagccaaagaaaaacccacagatcacagggctcaccaagttcctagcagtattggtgag

SEQ ID NO: 285442 - DNA, 201 bp, Homo sapiens
tgatccaggagtctggcctgtgagtaacgggaattccagaggaggaaataccagagcagagggaaggtaagagggaaggtgagacggaaggtgagagggawggcgagagggaaggcgagtgggaaggcgagagggaaggcgagtgggaaggcgagagggaaggcgagagggaaggcgagagggaaggcgagtgggaaggcg

SEQ ID NO: 285443 - DNA, 201 bp, Homo sapiens
tagaatgatccaggagtctggcctgtgagtaacgggaattccagaggaggaaataccagagcagagggaaggtaagagggaaggtgagacggaaggtgagwgggaaggcgagagggaaggcgagtgggaaggcgagagggaaggcgagtgggaaggcgagagggaaggcgagagggaaggcgagagggaaggcgagtggga

SEQ ID NO: 285444 - DNA, 201 bp, Homo sapiens
tccctcgtccttcctcagtcatccttggacttccttggcattctttgctttgtgtcttcatcgctttattctctgtgttcgtctttatgtggccttcttcytgtgtgtgtctgtcttcatatggctttataatagacaccattcattggatttagggccctccctaacccagtatgacctcgtcttaactaaatctacaaa

SEQ ID NO: 285445 - DNA, 201 bp, Homo sapiens
aaacaaattgtagtggaaaagtgatcagcgatcaggtatccacctctttgtctttgatgctggaggctggaagagtgaaacattgtccacaatcttcatgyataaccaaagttaaattccttatcctgagaggaagacattcttggatgtgggagagttcagaggtcatcatcctggaccccactggggaagataccttga

SEQ ID NO: 285446 - DNA, 201 bp, Homo sapiens
agtccagttgtgaccctgtggcctcacctgcctggccctcagttcttcagtagcagacttcaaggtgcgtggtgccaccaggattaggagcagttgcacgyggtgcaaatgtctacctggcgtgctgttttgttgcgataatgtgaagttttatccttctgagaagagtgtgtagatttcgttaatggaaataattgagta

SEQ ID NO: 285447 - DNA, 201 bp, Homo sapiens
ggttgggggcggttctcctcggtcaggatttgtctctcctccttagctccaccttcccgggctatgtctctgtgctgctttctgatccaggtgaccacccrttttcatcccaggtatctcgctaaaaatgcccctgattacaccgagtactgtgcacttgtttgacttttcatcaatggcctaaaagttaagaaaaacact

SEQ ID NO: 285448 - DNA, 201 bp, Homo sapiens
ttgtgttgggggtggttcccccaacccctgagttgttcaaggattaactgtaccttcaaaagatactaacattcagatcttacagggaagtaaaaaaaaamcaaaataacaaaatatattaacatgacaacaatataattatcacaccttaaaaattatactttctttaagttaaatatctaagtggtgttaaatattctt

SEQ ID NO: 285449 - DNA, 201 bp, Homo sapiens
tgcaggctgacagtgatgtccctgggggtcctaggggatggctgcgtagcccggggtgggagcctgaggccaggggcttcggtcagcctggaaccgagatygacagtctgcattcttacttcagtagtaactgcgtatttttgtttctgacagtctaagttttatacatacattttcaatgcttaatatctagatttgaag

SEQ ID NO: 285450 - DNA, 201 bp, Homo sapiens
tcccaagccaaagaaaaacccacagatcacagggctcaccaagttcctagcagtattggtgagaaaagacaactaggcatattctggtttaagaaaagaaytaagctgtaaactttagagtctagaaaaaagaaaaccttttaagcgcatggatgaaaacaaattgtagtggaaaagtgatcagcgatcaggtatccacct

SEQ ID NO: 285451 - DNA, 201 bp, Homo sapiens
gtgaatgaaaactttgccattgatttgatagcagagcagcccgtgagcgaggtggagactcgggtgatagcgtgcgatggcggcgggggagctcttggccmcccaaaagtgtatataaacttggtgcgtagctggccacctgtgcacatgttagggcagcctgctcgtcctcatactccccttcactcccagtgcctgttc

SEQ ID NO: 285452 - DNA, 201 bp, Homo sapiens
cccaaagctccaccctgggctacggatgcacccccgccgtctctaatataccacatgcttgtccttcatctgttgggctaccatgctgcttttctttacaygtgttgacatggtgagtgacgttagtcagtcctgcatgttccaaggtggacctgagtgtaggggcaagtcttgcttttaattcccctttaaacactgtcc

SEQ ID NO: 285453 - DNA, 201 bp, Homo sapiens
agtgtaggggcaagtcttgcttttaattcccctttaaacactgtcctccttgggtcttcgtgtcagggccgtgctcactttgagttgggaaactgcccacrttttctgttctctggaagagaaggtgtaggattgggattcctgtttcttgcctggtggaactcgcaggaaagtcttctgggcctgggtttgttgtgggaa

SEQ ID NO: 285454 - DNA, 201 bp, Homo sapiens
agtagaatatggaaatatgacatcattccttttgaattttttcaggacaaagaaacaaaaaccggcacatgcggttactgtgggctccagttcagacagcmccaccactagagcgtgtggcacgccgggggtcccgcagcatcctgtgagcatttccgcggggaagctgagcacgtgaagctcgctggttctgtgcgaagg

SEQ ID NO: 285455 - DNA, 201 bp, Homo sapiens
gccgggactgatgtggtctgcatggctgagccccccagatccgagtgttgaaaccctcggtggggttatgaggaggcgggtatgaagtggtatgaggaggmgggtccctcaggaatgggattcgtgcccttataaaagggactccagagagcttcccgccccttccacaaagtgaggacacagcgagaaggggctgtccgt

SEQ ID NO: 285456 - DNA, 201 bp, Homo sapiens
acgtttagcttaaataattattggcattcatgttcagaatgcctgatgttctaaataattgaactgagcttttactttattttaaacttttattttaaatrtccatgaatggggtcggtattctacagtgtcgatgatccagctggtggacttttcccttctgcgttggttttgatgctgtgtcacagaatcacatatttt

SEQ ID NO: 285457 - DNA, 201 bp, Homo sapiens
aggactgggagtcggggatgggtgctagggtgaggcccccagccagacagtggtggctgagaaggtcctccgtgagaggaagattgaattgaggggcctcsgaattccaccctccgcctttgcaggtcatctggttggtggcagaggtggagctctgtgcttgcttccaggttcatccttagagggtttaagaggggaggt

SEQ ID NO: 285458 - DNA, 201 bp, Homo sapiens
cgggggtcccgcagcatcctgtgagcatttccgcggggaagctgagcacgtgaagctcgctggttctgtgcgaagggtattcctggtgctgaataaagggygttgctgtcaaggctgacaatttgtaagtttgtttctttcatagtctgggctttggaagtgaacatccacgtggacatgggtagacatgcgagtggaagc

SEQ ID NO: 285459 - DNA, 201 bp, Homo sapiens
ttcatcccaggtatctcgctaaaaatgcccctgattacaccgagtactgtgcacttgtttgacttttcatcaatggcctaaaagttaagaaaaacactttsctgtaatatttatgattgatatgaagtgactttcagaattaggccgtaaaagtcacacatggtctttttgtttttttccaggtttatgatgataaagact

SEQ ID NO: 285460 - DNA, 201 bp, Homo sapiens
cattgtaagggaagatcagttcaggtgcctgtgagtgaccactggagaaagaatgttgaaattagaatccttctgcctaaatcagcctattttttttttttacctgactccttctctatcactcatgtcaatgagctcctgaattcgtaattagatcaggcatgcctccatgattcctgaatttgcttcctgaaggatgct

SEQ ID NO: 285461 - DNA, 201 bp, Homo sapiens
tcattgtatgccccttgccttttattagccaggcttttaagcctggcatttagatttcagcaaattacagccttttatctgtttagtttgaataaactacytatttacaaaatatgccttgtagtttctcaagccctttatttttactttttttccctttgtgtgtgtgtgatttccaaagccttgatctgattcattcac

SEQ ID NO: 285462 - DNA, 201 bp, Homo sapiens
gcgacagagtgttgactagaagttttagcatttggaacaaaggcccaggttgacaaggaaaacaggaatgtttggatggactgagatgaagtatataggcytaggaaatctggggaccaaaatggtatcggttacttaatgaggttagagactgcagtttctacttcaagttcaaatgccttgctaattacaagattctta

SEQ ID NO: 285463 - DNA, 201 bp, Homo sapiens
ttggattttcccaaggaggtgatatttcagttgagaggagtttggcagaaccatgctccctgcagaggggctagctaatttcagaatctcaaagaaggctrgtgtggttgaactggggagagcaaggggagagggagatacaaagaggaactggagaaggaggcaaggattagattatgtagcaacttgaggctgtggtaa

SEQ ID NO: 285464 - DNA, 201 bp, Homo sapiens
tatattcacaaattcataacttattttttaataatgatcatcttggccggacatggtggctcacgcctataatcccaacactttcagagactgaggcaggyggatcacatcaggtcaagagttcgagatcagtctggccaacatgatgaaaacgcatctctactaaaaatacaaaaattaaccaggcgtggtggcgggcac

SEQ ID NO: 285465 - DNA, 201 bp, Homo sapiens
attttatttttattgctagtttaggctctcagtaccactgactggaaaagatctcctaatagtcttgtaacagattttccttctcttgtaatctattcttygacttattgttaaaagtcttcctaaagtacagaaactttcagaggtctctcattgcttacagaaatatcaacttattattcagcactttctactctgtaa

SEQ ID NO: 285466 - DNA, 201 bp, Homo sapiens
gattcttaacctttaagtccctaacattgtaagcacttcaggaaatagctctcatgggattttcaaagaggtctatgaccaccaaaaaagttaatcaccarcagtctaattggtacttttcacagagtgacagtgtaatggggagtgggaattaagtgacttggccaaggatactgctgttagctagataggactaatcct

SEQ ID NO: 285467 - DNA, 201 bp, Homo sapiens
ctttttttttgagacaagagtctggctctgttgcttaggctggagtgcagtggcgtgatcttggcttactgcagcctctgcctcccgggttcaagtgattstcctacctcagcctcctcagtagctgggattacaggcatatgccaccatgcctggctaatttttgtatttttggtagagatgggtttcaccacattggcc

SEQ ID NO: 285468 - DNA, 201 bp, Homo sapiens
ttgaaatagaatcactacttagctaaataggtgtagtttctgataaaatcacatgatataaatgaaaatatttaaaggaattgtggctaatatttgttgakagatgtcatttctatttgtaagtaagggtgttgaatttgcacagtgatagtccagagctcctgaaatatatgtagttgttggatttaatttccctttgac

SEQ ID NO: 285469 - DNA, 201 bp, Homo sapiens
agaccacctgagcctgggagatcaaggctgtggtgagctgtgaatgtgccactgcactcaagcttgggcaatagtgagatgccatgtctcaaaaaataagtaaataaataaaaatggacaaagttattaataaccatttaggtttgtcatataggagaatgtttctttaatttactcttgaaggacatatacagtatgtag

SEQ ID NO: 285470 - DNA, 201 bp, Homo sapiens
ttaaaagtcttcctaaagtacagaaactttcagaggtctctcattgcttacagaaatatcaacttattattcagcactttctactctgtaatccaaacctrccttttcaggcttatctctaactgcattataagtacgctgtatgccaataaaagtgatctgccttctccagttgctttaacatgtcttgaatttcctact

SEQ ID NO: 285471 - DNA, 201 bp, Homo sapiens
gaccacctgagcctgggagatcaaggctgtggtgagctgtgaatgtgccactgcactcaagcttgggcaatagtgagatgccatgtctcaaaaaataagtaaataaataaaaatggacaaagttattaataaccatttaggtttgtcatataggagaatgtttctttaatttactcttgaaggacatatacagtatgtagt

SEQ ID NO: 285472 - DNA, 201 bp, Homo sapiens
ttagcaacataaatatatttcacatatttaatgtatgacttattcctttggaaacagaatttcgcaggtgcttttaaaaaaacttacttggataaactccratttaaattcatcaaagaagttaaagcttattcataaagaatattaaatatattcagtatttgaaagatgtttcttagatgaatatgctaagtgactaaa

SEQ ID NO: 285473 - DNA, 201 bp, Homo sapiens
ctgaagatgtgggaattcatgatatttcagagagaaattaagaagagagaacagaggcaaggtgagagctttcaagagaatctatatttaggggacaactrgaagaaataacttagaaaaggagagagtcaaagcaaagctagtaaattttaatgacaagggaagcttagagagcaaagaattccaggagggaggtagtga

SEQ ID NO: 285474 - DNA, 201 bp, Homo sapiens
acatagaactatttgacacttctactcagaaatgtttgatggcttcccattgtcctcagaacataatctggatttttagcatggtatcgaggtttattcayggaacatagcttgaacctttcttgcctccacaaagcccagttacataggtttccccaaatgatctatttatttaagctgttctctgtctggaatgttttt

SEQ ID NO: 285475 - DNA, 201 bp, Homo sapiens
accacctgagcctgggagatcaaggctgtggtgagctgtgaatgtgccactgcactcaagcttgggcaatagtgagatgccatgtctcaaaaaataagtaaataaataaaaatggacaaagttattaataaccatttaggtttgtcatataggagaatgtttctttaatttactcttgaaggacatatacagtatgtagtg

SEQ ID NO: 285476 - DNA, 201 bp, Homo sapiens
gcggccatgaattcaaaatgagtccacgctctgtggtggtgttttttttctgtcaactcgttcaactgtgtgggtatggtctggaatagtcagaaagttgrctttaagcagctttccgtgttgacaagtaagtactatgaagtaagcaagggcaagggaacgactgtaataacaggcatggagttttaaaagctgggaaaa

SEQ ID NO: 285477 - DNA, 201 bp, Homo sapiens
gttgaggcagtccgtgcctccataccttaactttttcattcatgtcaaataagtatttctaaaacattatagagactgtgttgacattgtaattaatttawcattttattaatcagtccaatggacttttctctcatttcccttgactgctctgtagtattaggtagtgttaactacttattttgaatagttgcatttgct

SEQ ID NO: 285478 - DNA, 201 bp, Homo sapiens
ccacctgagcctgggagatcaaggctgtggtgagctgtgaatgtgccactgcactcaagcttgggcaatagtgagatgccatgtctcaaaaaataagtaaataaataaaaatggacaaagttattaataaccatttaggtttgtcatataggagaatgtttctttaatttactcttgaaggacatatacagtatgtagtga

SEQ ID NO: 285479 - DNA, 201 bp, Homo sapiens
gtattaagggtctagttgaggtaagcggccatgaattcaaaatgagtccacgctctgtggtggtgttttttttctgtcaactcgttcaactgtgtgggtayggtctggaatagtcagaaagttggctttaagcagctttccgtgttgacaagtaagtactatgaagtaagcaagggcaagggaacgactgtaataacaggc

SEQ ID NO: 285480 - DNA, 201 bp, Homo sapiens
aagtatatatatgatatatacatatataaaaaatatgaaatatatatttttcacgtgctataataaaaagtacagtgaactgtgtatatatatatatattwtatataaatttttagaatctcgccgtgtcacccaggctggagtgcagtggcgtgatcttagctcgctgcaaccttcacctcctgggttcaagcagttctc

SEQ ID NO: 285481 - DNA, 201 bp, Homo sapiens
ggcttcaagtgatccacctgcctcagcctccggaagtgctggtattacaggcggaaccacgatgcctggccaagtctgtttcatctgaaattaggatagcmaaccatagtttttttttttgttttccatttgcttggtaggtttttctctatccctttactttgagcctatatattatctccttattttagtgtgaatata

SEQ ID NO: 285482 - DNA, 201 bp, Homo sapiens
ccgggcatggtggcgcatgcctgtaatcccagctacttgggaggctgaggcaggagaattgcttgaacccgggaggcagaggttgcagtagccaagatcgygccattgcactccagcctgggcaacaagagtgaaactctgtctccaaaaaaataaataaataaataaagaataggaacatttggccaggtgtggtggctc

SEQ ID NO: 285483 - DNA, 201 bp, Homo sapiens
gctacttgggaggctgaggcaggagaattgcttgaacccgggaggcagaggttgcagtagccaagatcgtgccattgcactccagcctgggcaacaagagygaaactctgtctccaaaaaaataaataaataaataaagaataggaacatttggccaggtgtggtggctcatgcctataatcacagcactttgggaggcca

SEQ ID NO: 285484 - DNA, 201 bp, Homo sapiens
gtgcgctgagatcgcaccattgcactccagcctgggcgacagagtgagactctgtctcaaaaaaaaaaaaaaaaaaaaaggaatatttgaagtcttactgtttccttccacctcctgaatatgcttagcacaggtccacactgaatatttagtgaattaatgtctgttatattaacatcaaattgggttccacaaatgaat

SEQ ID NO: 285485 - DNA, 201 bp, Homo sapiens
aaagttctataggaatttaagaaagtaaaagtaactgtagagtgattacttataatggaagaagtagatacttcaggcagggttgtttgatgtggtgggarggtacaaggtacaaagaacttctctttccatcctcatctgctcttttatccattcacccttattcaactatttgtagtatctgagatgttctgtagactt

SEQ ID NO: 285486 - DNA, 201 bp, Homo sapiens
acacttttgctagaaagactgattctttgaatctgagactgcaaagtataagttgcagtacctggatttgttattttctctctcttagatttatttacttyatacttgggctctaaagagccatttggtttctttctttctttcttttttttttttggtgagagtcttgctctgttgcccaggctggagtgcagtggtatg

SEQ ID NO: 285487 - DNA, 201 bp, Homo sapiens
gtgataaggacatgagtttccttgacctgctattttgctggagaaggataaagatacagtatacattcaccaagtgagagtttgtatttggagagaattttctttacctttgaattttgtttgccttctgacagaaaataggatgtttttttttctttgcctgagattaagaggatagtatcatttcattcattacctgat

SEQ ID NO: 285488 - DNA, 201 bp, Homo sapiens
agctttactgagtactgtttttgagaattataaacagagaagtatgtaaaaggtgtgttaccattttttcctcattaaggttttatcatggattcatcctkaaagtcaagccacaatcactcggtgtagccagcccatggttggagtgagtggaaagcgaagcaaagaagatgaaaaataccttcaagctatcatggattc

SEQ ID NO: 285489 - DNA, 201 bp, Homo sapiens
tcaaaaataaaattttgttctctgttctctgttaccaatattagataacaacattcttttatcataaccaaaggcattgcctcaaaatagcaacactgaaracaagccttgctttcctagtggtagacagttatagtaataataatgttaatattaaacacaacaataatataaatagcacaacatttattgcatgcttac

SEQ ID NO: 285490 - DNA, 201 bp, Homo sapiens
tacattatagagctgaatgaaaagtacttttagggcctagtgctttgcttaattttaatttaattagtggatgccttcttaaaagtagacttcctattctsttcttgtatttccacaatgctatttgttgaacactttctaccagttcagtacttaacactaagtactttctatagatcttgctttttgatccttattaaa

SEQ ID NO: 285491 - DNA, 201 bp, Homo sapiens
attcacgactgccttctctgacatccccaccttcctctgtgcccccatagcactgtgtataccgctactaccactgcaattcacattatattggaatgaayaattcacatgtctaccacaagtctgtaaacataaccttatttgaaatgaattgcaataaagctctgttacaacgtaagtggatggatgacacattcctct

SEQ ID NO: 285492 - DNA, 201 bp, Homo sapiens
agaagaagatgactaagcaaccaaaaagtctagcaggtgtctttagaaattataaaaatgaggactactctttgagaatctgggaagaaattgctgtcccrggagcattcagtgtagaactttggaaagcaggtgtctaaagaaaagaggtaaattattactgaaaaaaaataagttgaagtgtaaatgaacaactatacc

SEQ ID NO: 285493 - DNA, 201 bp, Homo sapiens
ttcagtgcatacaaaatcagcttctgttgtatcatcagattccatttcaacttctgccgacaacttttctcctgatttgagggtatgtatactattttaawgttctgatgaagtactttctgttaaatatttgtggccaacactatcaatataactaatttagcaggagatactgatggagtattctcatagatcccggtc

SEQ ID NO: 285494 - DNA, 201 bp, Homo sapiens
ttttgctataaagaagctcagagaaatgaagcactatttggagggattaagatgagagaaataatactttgtttctatgctgattagcgagattgagtagwgagggaaaattttatgatgcagtaactggaggagagaattgctggagagattttcttgtgtaaacaagaggagatagagtttaatgagggattttgtttg

SEQ ID NO: 285495 - DNA, 201 bp, Homo sapiens; identical to SEQ ID NO: 58304

SEQ ID NO: 285496 - DNA, 201 bp, Homo sapiens
aattcggggtgagtccatagagtaaagtgaaagcaagtttattaagtaaaggaataaagaatagctacctactccataggcagagcagccccaagggctgyggcttgcccatttttatggttatttcttgattatatactaaacaaggggtggattattcatgattgccatggtacttgagggagtgtagcagtaaggaca

SEQ ID NO: 285497 - DNA, 201 bp, Homo sapiens
gaaattgatcatttatctagtggggtaaacgtttttgcttgttttggaaagcattaagatatccctaacatgactagtctggagtcagagctagctatttstcaagtgtctgacccagtcttttctgtgatctccactgggaaacatcggatatcattcagtgatgtccacgggtgtttctgggcaggcgttttcctaaat

SEQ ID NO: 285498 - DNA, 201 bp, Homo sapiens; identical to SEQ ID NO: 58305

SEQ ID NO: 285499 - DNA, 201 bp, Homo sapiens
caagagagggttcttagatcttgctcaagaaagaattcggggtgagtccatagagtaaagtgaaagcaagtttattaagtaaaggaataaagaatagctasctactccataggcagagcagccccaagggctgtggcttgcccatttttatggttatttcttgattatatactaaacaaggggtggattattcatgattgc

SEQ ID NO: 285500 - DNA, 201 bp, Homo sapiens
ttttcattcatgcagtgcaactttgtctccttaaaagcagctggaaagattatctgtgcatatttaaaactttactccttacccattgatagttaacaatygtatagtagaaaaatactacactggggcagggtaatcagtatacctggttcttaggactgcttgtatgacattggacaaatcactgctctcttttcttgc

SEQ ID NO: 285501 - DNA, 201 bp, Homo sapiens
cggccccggtccgtagcactccgccctccgcttctcccgccctgtagccgcgaagactgcttcagcctttccctgtgctgcccctgccgcgcgatggagamgagctcgagctgcgagagtcttggctcccagccggcggcggctcggccgcccagcgtggactccttgtccaggtaaccaggacgcccagggccccgccca

SEQ ID NO: 285502 - DNA, 201 bp, Homo sapiens
ctcaggacattacttacaagaaaatcactttttaaaaagaaccttttctttttacggaatattgaagaaaaattgaattggcagcaagagtgaaacagttwaaggcaagtggtttagatcttattgtaatgactatggtcagtagaaatgcagcctctcctaaatcttctagaggcatttgtttactaggatatatgaaaa

SEQ ID NO: 285503 - DNA, 201 bp, Homo sapiens
gtgggatattacataaggtggaatccacggatgaaaccacaggtatgtgccttacaatatacaatgggagttttcattcatgcagtgcaactttgtctccktaaaagcagctggaaagattatctgtgcatatttaaaactttactccttacccattgatagttaacaattgtatagtagaaaaatactacactggggcag

SEQ ID NO: 285504 - DNA, 201 bp, Homo sapiens
ttctgtcaatcagatgccatgatgatcatttatataatcgtttttatcttatgaattggctaagtttaatgcagggttctggcacagcatttttaaacatwattaaaaattataaattaatttgttttgggggggttgtttttctgttttgaggatcctgcaaatattctgacaataagtcttttgtgtctcaaatgtttt

SEQ ID NO: 285505 - DNA, 201 bp, Homo sapiens
agccgcaattatttttgcaccatctaaatatttaataggttggttgacttgtaaattatctgccttagatgtttacttttgtgtattgctgacattttctkgagacattattggcattttgtgtgtaatccttaaaaaagaaaaacaactatgttcttgaaaatttaaagaatcttaatgttgtttgtggtcattttgggc

SEQ ID NO: 285506 - DNA, 201 bp, Homo sapiens
ctgtgccttacacactgtgctagattctgaattcctaaaagcttggtgctgaaatgaattatatcatcttttcacactcttagagggattagagatcaacyaattagtgtttttcaactgtggctgaggaccacctatgtatttcagtcaactgtgaacttggtgaacatttaacttcctaggtttcagcgtggacattct

SEQ ID NO: 285507 - DNA, 201 bp, Homo sapiens
gtggcttacaagggactctggtttgatgggatggatgttccctgaaaagtttacgtcggtgcaaaagtaattgccatttcaatggcaaaagccgcaattayttttgcaccatctaaatatttaataggttggttgacttgtaaattatctgccttagatgtttacttttgtgtattgctgacattttctggagacattatt

SEQ ID NO: 285508 - DNA, 201 bp, Homo sapiens
ctagtgccgaataggtgctgagtgaacatctaaataaaagaatgttgacggaatgttcaccactggtcttgtttgttgttcccattcaaaggattaaaaargattccttctgttgaatttggcctgaacacttgcaatttcaggtctaagctgaagttatttttatgggagactggacatcttgagctgattttactgttc

SEQ ID NO: 285509 - DNA, 201 bp, Homo sapiens
tcatagaacactcatatcacactgataagcagtaaatcaacattgcctgaatgaatgaatgaatgaacaaatatatgatcaagtaaaatctaaaatccttkggccttgctaccacctcagtcttaaaaaatttcaagacagaaagcagcagcttctcaaacgacctgttttcttctttactgtctaatttggcacactgat

SEQ ID NO: 285510 - DNA, 201 bp, Homo sapiens
aaaatcatttgcacagagatggtaactgaagatgtgggaattcatgatatttcagagagaaattaagaagagagaacagaggcaaggtgagagctttcaaragaatctatatttaggggacaactagaagaaataacttagaaaaggagagagtcaaagcaaagctagtaaattttaatgacaagggaagcttagagagca

SEQ ID NO: 285511 - DNA, 201 bp, Homo sapiens
gtccttatggctttcctgtatcctaacagaaaaatcctagcagaagcatttcccctttacccagttcctgttctcttatcacagttctattcctccacacycccttcctgctaggcacgggaatttgaaagggcagggaaaaatcggtgaaagtttgtcttctacttgggtaatccaacaccaccgcatccagtagtatat

SEQ ID NO: 285512 - DNA, 201 bp, Homo sapiens
gcatacacctgtacaacccaaatccctgtcaagatatagaacttgtcaccccagatactttcatcatgccccttttcagtccacactctcattctcatccycatagcaacaactgttttgaagtttttgtactatagtttagtctgttgcagaatttcatataaatggacccatacgatatggactgtcttgctgaaggca

SEQ ID NO: 285513 - DNA, 201 bp, Homo sapiens
cacagaattgcatgattcttcactgaaaaagtttgctgtgtgtattagtcactatttatttatcttattgtatattctttagtcatgatgataaatgttcttttttttttttaagtcctagaaagaacaccttacagatttataactggatcttagaaagatgagcttaaataattttaggtacaaaattcatagattcta

SEQ ID NO: 285514 - DNA, 201 bp, Homo sapiens
tatgaagaatatctaaccatatacagatatgtaagtggaaaagcagaaagtattttaatagctttttcagggaattgtagatattcttctttgatactacrccagaacttgataaatggtagtttcttagaggttagttgttatatggaatccaaaatcaagttaatgaattttttttatcattaaattccattggtctca

SEQ ID NO: 285515 - DNA, 201 bp, Homo sapiens
tcttccctgaactttctggccagaattggctgcttccttttcttttctcccatagatatttgtatgtatgtggggtgtttgtgtgtgtgtgtgtgtgtgtwtgtgtgtgtgtatgtgtttctatttagagtcataacactgcaccactttatttacttgtctgtgtcacaggcttgtgagcttcatgaacatggggatgat

SEQ ID NO: 285516 - DNA, 201 bp, Homo sapiens
ttaattctgactcaaaccatctcgaaaccctgttgaatgcagctcattgggagataattatttacccaagggtttattagaccccaaaacaactggaagtstgaattgtttttatttagattgccatatgaatttaaagtagggcaagtgctggctctgcctggctttggatcatatttatttaggagcatatttttagct

SEQ ID NO: 285517 - DNA, 201 bp, Homo sapiens
cagtatatcaactacctaagtccctacaatccttttttggatgtttgacccaaaacattaggaccccacttttgactgttaccatattcagttttaaatarcctttgactcttggtagaaataaaattcgccatcaaaggagtaggaaagctctttgaaactgtggtattgttgatggttgtgtgtactgctttccaaggt

SEQ ID NO: 285518 - DNA, 201 bp, Homo sapiens
ctttgaggcagtatatcaactacctaagtccctacaatccttttttggatgtttgacccaaaacattaggaccccacttttgactgttaccatattcagtyttaaatagcctttgactcttggtagaaataaaattcgccatcaaaggagtaggaaagctctttgaaactgtggtattgttgatggttgtgtgtactgctt

SEQ ID NO: 285519 - DNA, 201 bp, Homo sapiens
ttgggaggtaagaggaaggagaggtgcagtgtttaatactttcttggattaggtttgactttttcctttggaattggctttgaggcagtatatcaactacmtaagtccctacaatccttttttggatgtttgacccaaaacattaggaccccacttttgactgttaccatattcagttttaaatagcctttgactcttggt

SEQ ID NO: 285520 - DNA, 201 bp, Homo sapiens
gtgaattatttagaaactgttgggttaaatgaagcatttttgtagctatgactatgatatgatgagactagtattttagcatatatactgaaaaggtgtayacaattcagttttggtttataaatcagacctttggtgtgttgggaggtaagaggaaggagaggtgcagtgtttaatactttcttggattaggtttgactt

SEQ ID NO: 285521 - DNA, 201 bp, Homo sapiens
aaacaatacaataaatgctatagagtattttaaagagatccagtattattgctttcaggtacttatcccaatttggtttaagcattgttttaaatcataamaaggcttcaattgctatatcaattatttttatttaaatagatgatggaatatttgattcttagaaacagatctctttagaacttttctaagaagaatctt

SEQ ID NO: 285522 - DNA, 201 bp, Homo sapiens
gtgcttgctgtatgctctgtgacataaaaatctttagtcaaaacaatacaataaatgctatagagtattttaaagagatccagtattattgctttcaggtrcttatcccaatttggtttaagcattgttttaaatcataacaaggcttcaattgctatatcaattatttttatttaaatagatgatggaatatttgattct

SEQ ID NO: 285523 - DNA, 201 bp, Homo sapiens
tcatgcatagtgttacagaaaagtagctcactctaaagtttatactgtgcttgctgtatgctctgtgacataaaaatctttagtcaaaacaatacaataamtgctatagagtattttaaagagatccagtattattgctttcaggtacttatcccaatttggtttaagcattgttttaaatcataacaaggcttcaattgc

SEQ ID NO: 285524 - DNA, 201 bp, Homo sapiens
actattgtttccctttgagaagcttagaagcttgaaaatcacaaagtataaacactactcagagagcatgttcatgtggcccattcattaaattatgtgaygtgtaaatatacagccttaggcttgatttggaactaacataaatcgctgtgtttgattctgaaaactccagatatttaatttgcagtttcaacatggtct

SEQ ID NO: 285525 - DNA, 201 bp, Homo sapiens
cttctgatctcatgatccgcccacctcggcccccccgagagtgttgggattacaggcgtgagccaccgcgcctggccaattggattattagactatgtccrtgaatgtgatattgacatgtactgaaaatatgcagatctatttagaatgagttaaggagtctcatagagcttatgttagatagtaaacagtgtctatcac

SEQ ID NO: 285526 - DNA, 201 bp, Homo sapiens
aacaaaactttcattatttatagaggattgtctgtatgggaaatctgagaaaatctatatacaaactaccagaactaattgtatagcttaccactgttgcyggatacaagataacataaaaagatcatgcttttgtaccttagcaaaaatgtttagaaaatgtgatttaaagaagatcccagttacaacagcaacaaaagt

SEQ ID NO: 285527 - DNA, 201 bp, Homo sapiens
aaaatgctgaactagttttcctggatatccacaatattcatgttatgagagaatcattacgaaaacttaaggagattgtgtaccccaacattgaggaaacycactggttgtctaacttggaatctactcattggctagaacatattaaggtgggtgtgtgttactatatcccaaacaaagactctctctacccctttgttt

SEQ ID NO: 285528 - DNA, 201 bp, Homo sapiens
gggtaaatcaatagtctggaggtgtaaaatattttcaaatatatctgttaattgaatataattccaaaaaaattcaaaagtttgttttgcagaacttggcmaaattttagctgactctaaaatttatatgcaagggtaaaaggtcaagattaacccagaggaaaaataaagtggggagattcacccaatcaggcataagct

SEQ ID NO: 285529 - DNA, 201 bp, Homo sapiens
tgtctgaagtatagctcagaaggacacatcagaaggtgtggggctcgtccttatggatggagaagtggggctatattggtgtggggaatgaaaggatgagmcaggacaaaatgtagaaatagattaaatatgagagtcaaggaagcattaaattatgacttagctgatgtatagaataatatgttaccctttagagataca

SEQ ID NO: 285530 - DNA, 201 bp, Homo sapiens
atctgaaattgatcatttatctagtggggtaaacgtttttgcttgttttggaaagcattaagatatccctaacatgactagtctggagtcagagctagctrtttgtcaagtgtctgacccagtcttttctgtgatctccactgggaaacatcggatatcattcagtgatgtccacgggtgtttctgggcaggcgttttcct

SEQ ID NO: 285531 - DNA, 201 bp, Homo sapiens
ttcagcaactcttgtatatcttgctgttggccattcttcatgtatatctatccccacagaaagagagagggagttgtggaaaacttcactttagcatcctrataatctagttatattctgtaattttacttttgttgggtgtgctctgattcttgatataagtatgactttataagatataggtaaaataatactgtaggt

SEQ ID NO: 285532 - DNA, 201 bp, Homo sapiens
gaggctgaggtaccagaattacttgaacctgggaggccaaggttgcagtgagccaagaacgcaccactgcactccagagtgggcaatagagtgagactccrtctcaaacaaaaacaaaaaaaacaatagttgtctttggtgagtcctgcttaatattgccatacttcagtaaactgttcagcaactcttgtatatcttgct

SEQ ID NO: 285533 - DNA, 201 bp, Homo sapiens
tggtctcatagctatgttaagtgtctatctagattgtttaagttatttcttttgtttcattagcctttgacaaagcaaaattattgctgtttggcctatawtatctcagtttttgcagaaatgattcccttaaattgtagtttatttttatgctttctgtttttatacagaggcctaattgggaaactgcctttggaattt

SEQ ID NO: 285534 - DNA, 201 bp, Homo sapiens
tgtgtaattcattcagaaaacaggttggaaaattcgaattttatgggaaagttacaaatgacaactatgcctcagaatagcataagaggcaaccagtactytcatccaaggcagagaagttagaaccacatgaagcagcacagtatgttagaaagaaggaagtactggaagttaggaagctcccatgctgaagtctctggc

SEQ ID NO: 285535 - DNA, 201 bp, Homo sapiens
tcttccagctgaaagtcagtatcaaggaatctgagtggtttttatccccagtgataggtttaagaaaacaaaatgaggggtagttttcttccttcttgtgytactggttctccacgttgtcatttctcttgtaacagatgggaattttatcctggaattttgaggaggactttatgcagctttgcagagagcttttatgaa

SEQ ID NO: 285536 - DNA, 201 bp, Homo sapiens
aatcttccagctgaaagtcagtatcaaggaatctgagtggtttttatccccagtgataggtttaagaaaacaaaatgaggggtagttttcttccttcttgkgttactggttctccacgttgtcatttctcttgtaacagatgggaattttatcctggaattttgaggaggactttatgcagctttgcagagagcttttatg

SEQ ID NO: 285537 - DNA, 201 bp, Homo sapiens
ctcctgtgcttctcttttctaaatcttccagctgaaagtcagtatcaaggaatctgagtggtttttatccccagtgataggtttaagaaaacaaaatgagkggtagttttcttccttcttgtgttactggttctccacgttgtcatttctcttgtaacagatgggaattttatcctggaattttgaggaggactttatgca

SEQ ID NO: 285538 - DNA, 201 bp, Homo sapiens
ttactcaatcactctcttctggtctctgctcaaatatcacctttctgagagagacctttcccagcctctttacaaaataagagttctaccagcattccctrtaacttctatggagcgttttcacttattgccatctggtatactgtatatttccttgtttatttgtgactggtgggcctcacccaaatagaatgtaaactt

SEQ ID NO: 285539 - DNA, 201 bp, Homo sapiens
agatcagatgattgtaggaaggcagcattatttctgggctctctattctgttccattggtctgtgtgtctgttgtttttgtaccagtatcatgctgttttygttattgtagccttgtagtatagtttgaagttgggcaatgtgatgcctccagatttgttctttttgtttagaattgctgtggctattcgggcttcttttt

SEQ ID NO: 285540 - DNA, 201 bp, Homo sapiens
atagtgaggccccatctctaaaaaagaaagactttttaaaataagtaaaaatattttaaaaaatgaaaatgacatactccattgaagttggattacaggctgttgtgcaatctgtagttcacaataaacatgtgatgagtcttactaagtatctgtagtcatttcagagttctcttgtctccagttatgccttctaggtca

SEQ ID NO: 285541 - DNA, 201 bp, Homo sapiens
tagtgaggccccatctctaaaaaagaaagactttttaaaataagtaaaaatattttaaaaaatgaaaatgacatactccattgaagttggattacaggctgttgtgcaatctgtagttcacaataaacatgtgatgagtcttactaagtatctgtagtcatttcagagttctcttgtctccagttatgccttctaggtcat

SEQ ID NO: 285542 - DNA, 201 bp, Homo sapiens
agagtaacatgctgtataggtttgtagcctaggagcaataagctataagcttagcacactcttatgttagcacaaggaaaagaaaatcgcctaatgatgtmtttctcagagcacatctttgtcattcagtgatgcatgactgtatatcataagttctcaaagaaataaaacttaaatataaaccttggtcttcaaaacatt

SEQ ID NO: 285543 - DNA, 201 bp, Homo sapiens
ggctatattggtgtggggaatgaaaggatgagacaggacaaaatgtagaaatagattaaatatgagagtcaaggaagcattaaattatgacttagctgatrtatagaataatatgttaccctttagagatacaggattttttgtagaagtttttgcagaaaagtgaaggaattgatatttattacgttgactgtaccttgt

SEQ ID NO: 285544 - DNA, 201 bp, Homo sapiens
tttaattctacgtaccacttctccaggtcactgttattaaggcctaattaactaacacccatgcacattgagattctacatcacattgttcctttcttttyattctgccagtgccaaaagaaacagcatgtgtataattcaagatactttgttatgctaatcttagaagttttgtgactctggtattaaagctaatgactt

SEQ ID NO: 285545 - DNA, 201 bp, Homo sapiens
ttattcataaagaatattaaatatattcagtatttgaaagatgtttcttagatgaatatgctaagtgactaaaagtgtcttctttcttaatccacttaccmattctcaatgaacaaatgtcttcagtaaagaagtatctcctgtagatatttatctatgatacacttagtgtcatcatttaatatttgaattaaagtgttt

SEQ ID NO: 285546 - DNA, 201 bp, Homo sapiens
ttacaggatgccggtcccctttccccagcctgcatttttgtttttaagcagtggtatgtgttgtgttgtgtgtgtgtgtgtgtgtgtgtgtgtgtgtgtgygcgcgcaggtgcgtgcgtgtgtgtgtaagaatatcacactttagacggtattttcacatcagagaactgtgaggctggatgagatcattaaggagaggag

SEQ ID NO: 285547 - DNA, 201 bp, Homo sapiens
tagggctgctataataacagagtaccacaaactgggtagcttaaaacaacagaaatttattctttcatagttctggagcctagacatcagaaatcaaggtrttagcagggttggcacctgccaaccaagagagctttgagggagaatctattccatacctttctcctagctgctcatgagggttagccatctttgatgttc

SEQ ID NO: 285548 - DNA, 201 bp, Homo sapiens
taagttggtttatcactgaagtctccaagtccacttcctctaaagagattttaatgacaacaaagtacttcttcacaaatttcatctaaagtgtaaatggyttatgtggtggagaatctttacctatttttcctgcctacagaatcttcctaaaaggactgtgtcactgtggtcttacataaacagccagctggaagactt

SEQ ID NO: 285549 - DNA, 201 bp, Homo sapiens
aataactgaagattttttctccttttttctccaggtctcagtttcataaaatctttcttatttgtggtccctgtgattccagaacggctgctgctgtttcyttcttcatcaagagtctttttggtagcttttaattccttcttctgcttctctaacttctgtttctccagctataccaaataaccaaggcaggaaggaaaa

SEQ ID NO: 285550 - DNA, 201 bp, Homo sapiens
tctttatttctattaccatagactaatccaggattctatttctttcgtagattatcatcatttcatcttcttccttttcatttctttgccctccttgaccrtgccatctgcccctatcaaaggcctgcagtgttttgtttttttttacatgactggtcaagtttaaagtccttaacttctccccagtattttattataaaa

SEQ ID NO: 285551 - DNA, 201 bp, Homo sapiens
ttaagtgtacattctatgagtttagaaaaatgcatacacctgtacaacccaaatccctgtcaagatatagaacttgtcaccccagatactttcatcatgcyccttttcagtccacactctcattctcatccccatagcaacaactgttttgaagtttttgtactatagtttagtctgttgcagaatttcatataaatggac

SEQ ID NO: 285552 - DNA, 201 bp, Homo sapiens
atgatggggttacatccagataaacccattgtaagttgaaaataccataagttgaaccactgtaagtcagggactgtctgtatttttttttttttcatttycatggtgttttgcaaatctctttatggtgcagttatcttgatttcatagttgctaacttttaaggtgggtattaatatcatgttaataacatgaatggtg

SEQ ID NO: 285553 - DNA, 201 bp, Homo sapiens
ttttttttttttcattttcatggtgttttgcaaatctctttatggtgcagttatcttgatttcatagttgctaacttttaaggtgggtattaatatcatgktaataacatgaatggtgaaactaagactcagagcgtagtatggtggtagtgaatgtggagtttttttaggggttcttaggatatgaaacataaggttttg

SEQ ID NO: 285554 - DNA, 201 bp, Homo sapiens
agcaccagtgtaccaatttttccatgtagaatggaaatcctttacagcaggtgcagaaaaatttaattagcagaaaatgtatattcgagtgaataggcagytcaaattcccaagtatatcctacttattgagacattttaggttaagtttttgagttttttaagttgtaaagtaataccataaaaaaattcaaatacggaa

SEQ ID NO: 285555 - DNA, 201 bp, Homo sapiens
tgatagcattctgtgcttttatccttgttctgtctttttatttaaagagaattatgtggttaaaaaagaagcaggtcattttgattgcaaagagtttattyctcagatatgaagattaaaatgaggtgaagaggcagggaggtgaagaagcataggtgaaccagacatgtggtctcagcacatgaaacttacagtctggta

SEQ ID NO: 285556 - DNA, 201 bp, Homo sapiens; identical to SEQ ID NO: 58317

SEQ ID NO: 285557 - DNA, 201 bp, Homo sapiens
tgttcagttattcttagcttcccacttctccaaagttgacaactaactgagcttatgactcactgaagtccctgtatagtactgctctaggaatagcgaastagtgttctcggtgactagtggtgccctcttctgaccgtcctccacctgaacaagttattcagactgaagaattggcagttagctgtagctgattgttcc

SEQ ID NO: 285558 - DNA, 201 bp, Homo sapiens
ttgccttgcattcctcccttacttttctaatatattttagattagcaacatccattagtattataatacctcagtgaaaaatgtactttacgtatgtaagygatagctgtgcatgtagcactctggtggacacttggtgcctgacttctgatatttatttgtatagatgaatggcaacaaagtcaatcatccagtcaaact

SEQ ID NO: 285559 - DNA, 201 bp, Homo sapiens
aaatgggcaaaggctgggcgcagtggctcacacctgtaatcccagcactttgggaggccgaggcaggcaggtcgcttgagcccaggagtttgagaccagcrtgggcaacatagtgaaacaccatctatacaaaaaaataaaaattagccaggtgtggcatgcacctgtagtcccagctacttgggaggctgaggtgggaag

SEQ ID NO: 285560 - DNA, 201 bp, Homo sapiens
ttgtgaggctctgaaaaacagatatcatgactggctttatcatgtgctgccactaaaaaaatgaaagctacattcattcaacagatctacacttaatagtsttaaaagaaattagactatatctcttcaaaaatgggcaaaggctgggcgcagtggctcacacctgtaatcccagcactttgggaggccgaggcaggcagg

SEQ ID NO: 285561 - DNA, 201 bp, Homo sapiens
acaggatgccggtcccctttccccagcctgcatttttgtttttaagcagtggtatgtgttgtgttgtgtgtgtgtgtgtgtgtgtgtgtgtgtgtgtgcgygcgcaggtgcgtgcgtgtgtgtgtaagaatatcacactttagacggtattttcacatcagagaactgtgaggctggatgagatcattaaggagaggagga

SEQ ID NO: 285562 - DNA, 201 bp, Homo sapiens
tcataggtatttaattctacgtaccacttctccaggtcactgttattaaggcctaattaactaacacccatgcacattgagattctacatcacattgttcytttctttttattctgccagtgccaaaagaaacagcatgtgtataattcaagatactttgttatgctaatcttagaagttttgtgactctggtattaaagc

SEQ ID NO: 285563 - DNA, 201 bp, Homo sapiens
cctctgatgtatacttctcaagtgatctgacctttagctctgactccatgttttctaagaaaacttcagaaactaattttgcttcatatggaaacttcctrtggttcactgatttattcattcatgcatttatcaaattcatataataccttctaaatactagtggctaaaatatgaaacaaaatgataaagtccaggttc

SEQ ID NO: 285564 - DNA, 201 bp, Homo sapiens
tcttatgttcttatttactggcattctttaaatgcgttgatacttgaatgaaacatagattgttacatttttaccattaagtcataggtatttaattctaygtaccacttctccaggtcactgttattaaggcctaattaactaacacccatgcacattgagattctacatcacattgttcctttctttttattctgccag

SEQ ID NO: 285565 - DNA, 201 bp, Homo sapiens
agtgaggccccatctctaaaaaagaaagactttttaaaataagtaaaaatattttaaaaaatgaaaatgacatactccattgaagttggattacaggctgttgtgcaatctgtagttcacaataaacatgtgatgagtcttactaagtatctgtagtcatttcagagttctcttgtctccagttatgccttctaggtcatc

SEQ ID NO: 285566 - DNA, 201 bp, Homo sapiens
agatctgatgcttttgcccacaaaagggcaatttcattcttcatatgatatccaggtagtagtttcctaaccagctatagttatgtcatcctgcatctttaaaaaaaaaaaaaaaaaagtaatcgtcagctgggcgtggtggcacgcacctgtaaccctaactacttgggaggctgaggtaccagaattacttgaacctgg

SEQ ID NO: 285567 - DNA, 201 bp, Homo sapiens
gatctgatgcttttgcccacaaaagggcaatttcattcttcatatgatatccaggtagtagtttcctaaccagctatagttatgtcatcctgcatctttaaaaaaaaaaaaaaaaaagtaatcgtcagctgggcgtggtggcacgcacctgtaaccctaactacttgggaggctgaggtaccagaattacttgaacctggg

SEQ ID NO: 285568 - DNA, 201 bp, Homo sapiens
agtgataaggacatgagtttccttgacctgctattttgctggagaaggataaagatacagtatacattcaccaagtgagagtttgtatttggagagaattttctttacctttgaattttgtttgccttctgacagaaaataggatgtttttttttctttgcctgagattaagaggatagtatcatttcattcattacctga

SEQ ID NO: 285569 - DNA, 201 bp, Homo sapiens
taaccaatgcaatttgttgctaattgcatacagattttatttctgctattacatttttaaatgtccttgcagtcattctcattcatttctcttgtttcatkgtgtctctctccttatgactttctgtttctactctatttcttttttttctttttctttttctttcttttttttttttttttttttttttttagcacaggg

SEQ ID NO: 285570 - DNA, 201 bp, Homo sapiens
tgataaggacatgagtttccttgacctgctattttgctggagaaggataaagatacagtatacattcaccaagtgagagtttgtatttggagagaattttctttacctttgaattttgtttgccttctgacagaaaataggatgtttttttttctttgcctgagattaagaggatagtatcatttcattcattacctgatg

SEQ ID NO: 285571 - DNA, 201 bp, Homo sapiens
tcttttctttgtaagtcttttttttttttttctaggccttttttttcctagtctcttttctcctgtttgattaaggatagatttgtctagaatcagtgttkgtcaacaaacacagggtctagattgccccatccctgttctgttcacttgagtgctagttggagttccttttcctatctccagtgtagaattagttgttta

SEQ ID NO: 285572 - DNA, 201 bp, Homo sapiens
aaatgcagcctctcctaaatcttctagaggcatttgtttactaggatatatgaaaagatagatgacttgaagtttccaggttgttttcactttagagtatrtactctaaagtgtatatactctttatatgtttgttcatctgcatctttaattttcagaaatactttttcaattttataaaaaatatttttgttaaattat

SEQ ID NO: 285573 - DNA, 201 bp, Homo sapiens
gataaggacatgagtttccttgacctgctattttgctggagaaggataaagatacagtatacattcaccaagtgagagtttgtatttggagagaattttctttacctttgaattttgtttgccttctgacagaaaataggatgtttttttttctttgcctgagattaagaggatagtatcatttcattcattacctgatga

SEQ ID NO: 285574 - DNA, 201 bp, Homo sapiens
ttacttactttgcaatgctctttaaaagactttctgaaaatttttatgtatttgagacagggccttgctgtcatgcaggctggagtgcagtgatgcgaccrtagttcactgtagtcctgtacttttgggcgcaagccagcctcccaccttagcctcctgaaagctaggactacaggtgcacgccaccatgcctggctttta

SEQ ID NO: 285575 - DNA, 201 bp, Homo sapiens
attgctgtggctattcgggcttctttttggttccagatgaattttagaatagtttttttctaattttgtgaagaatatcattggtaatttggtaggaatcrcactgaatctgtaaattgcttagggtagtataatcattttaacaatattgattcttcctatccatgagcatggaatgtgtttcaatttgcttgcatcgtc

SEQ ID NO: 285576 - DNA, 201 bp, Homo sapiens
ctgtgtataccgctactaccactgcaattcacattatattggaatgaacaattcacatgtctaccacaagtctgtaaacataaccttatttgaaatgaatwgcaataaagctctgttacaacgtaagtggatggatgacacattcctctactgtaaacttgcagataagaaaatggaagcagtattttttcacttctcacc

SEQ ID NO: 285577 - DNA, 201 bp, Homo sapiens
tttaaagtctgttttgtttgtttgtttgtttttgagacagagtctcgctgtattgcctaggctggagtgtaatggcactatctcggctcactgcaacctcygcctcctgggttcaagggattctcgtgcctcagcctcctgaataactaagattacaggcgtgtgccaccacacctggctaacttttgtatttttagtgga

SEQ ID NO: 285578 - DNA, 201 bp, Homo sapiens; identical to SEQ ID NO: 58303

SEQ ID NO: 285579 - DNA, 201 bp, Homo sapiens
gtgtgtgtgcgtgcacacgcacatgcacacacacacacctctcccaaagtagactggatggggcagaatgatgtgcatgagaggaaggattggctttgaacctaaaaaaaaaaaatgttatctacaaaaggaaggaagggtgcgtttggatataggtaagtttattgaaggaagggcaagaagttgaggcagtccgtgcct

SEQ ID NO: 285580 - DNA, 201 bp, Homo sapiens; identical to SEQ ID NO: 58306

SEQ ID NO: 285581 - DNA, 201 bp, Homo sapiens
tgtgtgcgtgcacacgcacatgcacacacacacacctctcccaaagtagactggatggggcagaatgatgtgcatgagaggaaggattggctttgaacctwaaaaaaaaaaatgttatctacaaaaggaaggaagggtgcgtttggatataggtaagtttattgaaggaagggcaagaagttgaggcagtccgtgcctcca

SEQ ID NO: 285582 - DNA, 201 bp, Homo sapiens; identical to SEQ ID NO: 58307

SEQ ID NO: 285583 - DNA, 201 bp, Homo sapiens
aagtaccagtttcaggagcacctacacagcaggttattctttggaaatactcaggggcactgggaaagccagtgaaaagattagtggtgtccacagtccckgtatttaatttcactgatgggttggaaaggtgccattggttccaacagctgaaaaaacatacactgcaacatttagggaatgatttgacctggctttggt

SEQ ID NO: 285584 - DNA, 201 bp, Homo sapiens
catctaaagtgtaaatggcttatgtggtggagaatctttacctatttttcctgcctacagaatcttcctaaaaggactgtgtcactgtggtcttacataarcagccagctggaagacttcactaatcctctctatgggagctattccaatcatgtcctttatccagtagccagcatgcgccacctagagctctgggtggga

SEQ ID NO: 285585 - DNA, 201 bp, Homo sapiens
tgctagctagctgtctgctgagttcatgagtgggaagtggtttctgctaaagagaactgaagtacgtgaaatctaaggagcaccagtgtaccaatttttcyatgtagaatggaaatcctttacagcaggtgcagaaaaatttaattagcagaaaatgtatattcgagtgaataggcagctcaaattcccaagtatatccta

SEQ ID NO: 285586 - DNA, 201 bp, Homo sapiens
tcaatctgcttcttctgaaaatttttattttaagggaaaaatgtttatatagaaagcataacaagggaggcacatactacatccagttctttttatttttkggcatagagagagctattatggcttttagaacttctaacaaatttatttgaaatattaatataaatgaatttaatcttttggaaagagtagaggggactg

SEQ ID NO: 285587 - DNA, 201 bp, Homo sapiens
ttttttttttaagataccatacttttgtgtttcttttttggttatatctaattatgtttagttttaactcaagattgacttcagaaaaggtaagttatttkgcaaaggatttctgcatatttaaaaaaataagagctgaagttattttaagtaacagattgacatattctgtgaattttcatgcatagtgttacagaaaag

SEQ ID NO: 285588 - DNA, 201 bp, Homo sapiens
agtttttaataggtatgaattaaagatgaatgtgctgagggaggcgtatatccaggaagagtgggaataatctagaaagtcttcctgagaaaattactttkgtttcttagccccgtacatatttgttttttgctctaaatttatgtcttatgcattttaacagtaacttcattttctgcattttagcactgttgtcaatta

SEQ ID NO: 285589 - DNA, 201 bp, Homo sapiens
caaggcttcaattgctatatcaattatttttatttaaatagatgatggaatatttgattcttagaaacagatctctttagaacttttctaagaagaatctwacaccatgatttatgtagcacccaaaggtacttttgatttggctatttcgttgggcaaattaataggagtcagcaattatgaggtttttctagttttaaa

SEQ ID NO: 285590 - DNA, 201 bp, Homo sapiens
ggaagcttgggttgtaggattctgaggtctctggaaattactggttctgttatttttcagcataaattagtctaggaatcataacaattttataagatgakatagcaggttttaatagcacataatgtatagtaaactgtggacttcttgctttttcagccaaagatgtaacttatatatgtccattcactggcgctgtac

SEQ ID NO: 285591 - DNA, 201 bp, Homo sapiens
tggccccaagttttcccagaagcccgttgaaagggtcttagaaagttgttgctccacagaattgtcccttacttccttggaatgatgaagatactcctttwtctgctgatttggtgtaataatgacatactaggaatttatgaatattttaagatataaaaaccatgtattggaaattatgaactgtggcattttaaataa

SEQ ID NO: 285592 - DNA, 201 bp, Homo sapiens
cgttctactgtgcagaatgttcagtactctcagcatacagagaataaactggctgtcagagacacctcctgtctggcagaactctttacctgcagtcttcycagcatcttagtgtgttctacaaacgtaagcctagacccgctgctagtgtttgtgtttgaactcctgggaaacatgcaaattgaattatactttgcctct

SEQ ID NO: 285593 - DNA, 201 bp, Homo sapiens
agacatcatattctgttattgaatgttagaactttttttttttttgagatgaagtctcattctatcatccaggctggagtgcagtggtgcaatcttggctyacgcaactgcctcccgggttcaagcaattctcctgcctctgcctcctgagtagctgggattacaggtgcctgccaccacatctgactaatcttcgtattt

SEQ ID NO: 285594 - DNA, 201 bp, Homo sapiens
aaatttatgtcttatgcattttaacagtaacttcattttctgcattttagcactgttgtcaattacaggatgccggtcccctttccccagcctgcattttkgtttttaagcagtggtatgtgttgtgttgtgtgtgtgtgtgtgtgtgtgtgtgtgtgtgtgcgcgcgcaggtgcgtgcgtgtgtgtgtaagaatatcaca

SEQ ID NO: 285595 - DNA, 201 bp, Homo sapiens
ccagcttattcttgcaggggctcttaggattgctgacaaggtagagtcagggaagacgtctgtggtagtgcattgcagtgatggttgggatcgcacagctyagctcacttcccttgccatgctcatgttggatggatactatcgaaccatccgaggatttgaagtccttgtggagaaagaatggctaagttttggacatcg

SEQ ID NO: 285596 - DNA, 201 bp, Homo sapiens
tcctactaacaagtcactggccagcaaatatgacatctttcaagcttgcctcagcttttcccagtcatatttagtcctttcctcctctgcgctcctgtagtttttttttttttaaccattcttatagcattcatcacaatcagattcatagacagttaaaaaggagtctatctctcccatgaggctataatttgggagcat

SEQ ID NO: 285597 - DNA, 201 bp, Homo sapiens
cctactaacaagtcactggccagcaaatatgacatctttcaagcttgcctcagcttttcccagtcatatttagtcctttcctcctctgcgctcctgtagtttttttttttttaaccattcttatagcattcatcacaatcagattcatagacagttaaaaaggagtctatctctcccatgaggctataatttgggagcata

SEQ ID NO: 285598 - DNA, 201 bp, Homo sapiens
tgctattttgctggagaaggataaagatacagtatacattcaccaagtgagagtttgtatttggagagaattttctttacctttgaattttgtttgccttstgacagaaaataggatgtttttttttctttgcctgagattaagaggatagtatcatttcattcattacctgatgattaagagggtagtatcggtagtatc

SEQ ID NO: 285599 - DNA, 201 bp, Homo sapiens
taggaataagttaaaacgagatatagaagaactttatgaagaaagttataaaactttattaaagaagctaaaaggatatctaaataaatggatgggtaaatcaatagtctggaggtgtaaaatattttcaaatatatctgttaattgaatataattccaaaaaaattcaaaagtttgttttgcagaacttggcaaaatttt

SEQ ID NO: 285600 - DNA, 201 bp, Homo sapiens
tatctatctagctaagtaaatttcaataaacaaaacatactatatattgattatagacatatatgcagttgagaaaatacaagctcctcctaaaacacacragtaatgtattgagtatcttacagtttctctcttgcttcaccacatcaccaaaggcctgtttacctcagttctttttacctagtaccttttacatgtctg

SEQ ID NO: 285601 - DNA, 201 bp, Homo sapiens
aacatatgcgacagagtgttgactagaagttttagcatttggaacaaaggcccaggttgacaaggaaaacaggaatgtttggatggactgagatgaagtayataggcctaggaaatctggggaccaaaatggtatcggttacttaatgaggttagagactgcagtttctacttcaagttcaaatgccttgctaattacaag

SEQ ID NO: 285602 - DNA, 201 bp, Homo sapiens
aagttaaaaaccttgaaaaaaaaattagacgaatggctaactagaataaccaatgcagtgaagtcctgaaaggacctgatggagctgaaaaccgtggcatkagaactacgtgacgaatgcacaagcctcagtagctgattcgatcaactggaataaagggtatcagtgatggaagatcaaatgaatgaaatgaagcgagaa

SEQ ID NO: 285603 - DNA, 201 bp, Homo sapiens
agtataagttgcagtacctggatttgttattttctctctcttagatttatttactttatacttgggctctaaagagccatttggtttctttctttctttcttttttttttttggtgagagtcttgctctgttgcccaggctggagtgcagtggtatgatctcagctcactgcaacctctacctgccaggttcaaatgattc

SEQ ID NO: 285604 - DNA, 201 bp, Homo sapiens
ctctttttggatgactcccacatttttacctctggttctgatctctttctcagcctctggtccttcatatcccttgcttgcttgggatgttatcatgttaygatcatggtcttagtgtaatcagacatctgttcaattccagccactgttgggagatatatgtcaccttggaaaagttccttaacttctataagggtcaat

SEQ ID NO: 285605 - DNA, 201 bp, Homo sapiens
ttcaagaccagcctggccaacatggtgaaacctcgtctctacaaaaatacaaaaattagccaggtatgggggcaggtgcctgtaatcccagctactcaggmgtctgagacaggagaatcgcttgaacctgggaggcggaggttgcagtgaccggagatcgcaccattgcactccagcctgggtgacaagagtgaaactctg

SEQ ID NO: 285606 - DNA, 201 bp, Homo sapiens
gaatttgttggcttttttttttttggcagcatgagaaactgtctctgagtcaactaaaaggtctaatggagaggacactgtatttgtagttagaagctgtrgttttaagatttttttcttggatatattttaagtttattacagaagaaaatgaagatgatctcttaaaattaaggactaatgataaagcatcagattatt

SEQ ID NO: 285607 - DNA, 201 bp, Homo sapiens
gaatttcaatctgcttcttctgaaaatttttattttaagggaaaaatgtttatatagaaagcataacaagggaggcacatactacatccagttctttttaytttttggcatagagagagctattatggcttttagaacttctaacaaatttatttgaaatattaatataaatgaatttaatcttttggaaagagtagaggg

SEQ ID NO: 285608 - DNA, 201 bp, Homo sapiens
gtgtggtgcatttgttgcaactgatgaaacgatactgatacatttttatattaatactaaaatacatagtttgcattagggttcatactttgtggtgtacrttctgcgggttttgacgaaggtatggtggcatatattcattgttactgtatcatgtagaatagttttagtgccctaaaaatcccctttgcgtcacctctt

SEQ ID NO: 285609 - DNA, 201 bp, Homo sapiens
tgtaatcccagcactttgggaggccgagatgggcggatcacgaggtcaggagatcgagaccatcctggctaacacggtgaaaccccgtctctctaaaaatmcaaaaaaaaaaaaaaaaaaattagctggatgtggtggcgggcgcctgtagtcccagctactcgggaggctgaggcaggaaaatggcgtgaacccgggagg

SEQ ID NO: 285610 - DNA, 201 bp, Homo sapiens
atgcatacattaatttttctttcaagtaaaaatgatgagaaagtgctatctcctaccatactacatgcagtagcaaagagttaacacatatttcccgtttkgtcacacaggccattaaaaaaaaagtgtacttaagggatgagatttaataaaatcagtaatttttactgcgttgttaagtacactggcataagagaaatg

SEQ ID NO: 285611 - DNA, 201 bp, Homo sapiens
tgtcttgtcttgaagtatgtaataggcttaaatcaggcaaacgtgtctgtcttcaaaatctgtgttatgcatatttcctttgcaaactaaaggccagaaattattttattttattttattttattttattttattttagagggagtctcgctctatcccctaggctggagtgcattggcgccatctcggctcatttgcaac

SEQ ID NO: 285612 - DNA, 201 bp, Homo sapiens
gtacttttgatttggctatttcgttgggcaaattaataggagtcagcaattatgaggtttttctagttttaaaagcaaaatttatatatcttctaccattwaaaaaaattcttcttaggaagggacaaatgtttttcctcatgttattgaaataatgatccctgataagctgtattagtaaattttgaagaaggaagtatt

SEQ ID NO: 285613 - DNA, 201 bp, Homo sapiens
gtcttgtcttgaagtatgtaataggcttaaatcaggcaaacgtgtctgtcttcaaaatctgtgttatgcatatttcctttgcaaactaaaggccagaaattattttattttattttattttattttattttattttagagggagtctcgctctatcccctaggctggagtgcattggcgccatctcggctcatttgcaacc

SEQ ID NO: 285614 - DNA, 201 bp, Homo sapiens
atcaaaggcctgcagtgttttgtttttttttacatgactggtcaagtttaaagtccttaacttctccccagtattttattataaaaatttctgaacacaamataaagtttacaaaggaccctgctgtatccaccatcagaatttttccattaacgttttaccctacttccttgtttttatctgacatccatcatctgtgtg

SEQ ID NO: 285615 - DNA, 201 bp, Homo sapiens
aggagctagggcagcactatccgtgtgaataggtacccaataaatattagttgatttgtgaagttaaaaccattctgatcagggaaatgaggtggagtggytgcatgagccacactgagtgctaagtcattcgcagagcacatgtcagtgctaatttacctaacatgctaatttaatctagttatattttcagatatggtc

SEQ ID NO: 285616 - DNA, 201 bp, Homo sapiens
tcttgtcttgaagtatgtaataggcttaaatcaggcaaacgtgtctgtcttcaaaatctgtgttatgcatatttcctttgcaaactaaaggccagaaattattttattttattttattttattttattttattttagagggagtctcgctctatcccctaggctggagtgcattggcgccatctcggctcatttgcaacct

SEQ ID NO: 285617 - DNA, 201 bp, Homo sapiens
gactctcagtgtcagaaaggaagctgaacttctgttctttcagtagtttgttgctggttatgagttggtggttttgttgtttcaaaggtgtgggtcatatratcacttaattttgtataatttactgctccagtattttcctaatttgtttctattagggctctaagaagtataattttacacgagttaggtaggagatag

SEQ ID NO: 285618 - DNA, 201 bp, Homo sapiens
ttgaaggaaaggtgatgatttttcttagcagcctcagatgtcctttcatggccaggctttggatccaattagaaagcagagctttactgagtactgttttkgagaattataaacagagaagtatgtaaaaggtgtgttaccattttttcctcattaaggttttatcatggattcatcctgaaagtcaagccacaatcactc

SEQ ID NO: 285619 - DNA, 201 bp, Homo sapiens
actaaagaattagaccaagttttccacatcccagaattggcttgaaggaaaggtgatgatttttcttagcagcctcagatgtcctttcatggccaggcttkggatccaattagaaagcagagctttactgagtactgtttttgagaattataaacagagaagtatgtaaaaggtgtgttaccattttttcctcattaaggt

SEQ ID NO: 285620 - DNA, 201 bp, Homo sapiens
gtatccctacattagaatatctaatcctgaaagcctgataccacaggctgacaacaactatcccaacactttaggagatggatagtagaggtcagagagaytgaacaggatggcttctgtcctggtgtcgtttaatattttagttatatagtaatttgtcttatgtttcatttcacatgtagggaattccaaatgaaagct

SEQ ID NO: 285621 - DNA, 201 bp, Homo sapiens
ataagtatatatatgatatatacatatataaaaaatatgaaatatatatttttcacgtgctataataaaaagtacagtgaactgtgtatatatatatatawtatatataaatttttagaatctcgccgtgtcacccaggctggagtgcagtggcgtgatcttagctcgctgcaaccttcacctcctgggttcaagcagttc

SEQ ID NO: 285622 - DNA, 201 bp, Homo sapiens
tataagtatatatatgatatatacatatataaaaaatatgaaatatatatttttcacgtgctataataaaaagtacagtgaactgtgtatatatatatatwttatatataaatttttagaatctcgccgtgtcacccaggctggagtgcagtggcgtgatcttagctcgctgcaaccttcacctcctgggttcaagcagtt

SEQ ID NO: 285623 - DNA, 201 bp, Homo sapiens
ccctgactgtgttatataaaaaaaaaaaaaaaaaaaaaaaaaaaaaaaaaggcttccctgtgcttgatcttgaatgtactttgaaatgtgtaaccactaaratctatcccagatgccagtctgtggctctaccttgttagaatttttgtttgcatggttcatttggccacttcgtggcttgtcagtcaagttgtagagaaa

SEQ ID NO: 285624 - DNA, 201 bp, Homo sapiens
tgtgtgtgcgtgcacacgcacatgcacacacacacacctctcccaaagtagactggatggggcagaatgatgtgcatgagaggaaggattggctttgaacytaaaaaaaaaaaatgttatctacaaaaggaaggaagggtgcgtttggatataggtaagtttattgaaggaagggcaagaagttgaggcagtccgtgcctc

SEQ ID NO: 285625 - DNA, 201 bp, Homo sapiens
attttcctaagttgtgtcagactctttggaatattgcagctgtcttcagtcctcataagaaatgaaagaaagggaaaagatttgctgctttccttacaacmgtgagatgcttactattctgtagctaaatctagaatatagtagttaggagtcagggagagattgatttatggttccctatatgacatgctttctcaaata

SEQ ID NO: 285626 - DNA, 201 bp, Homo sapiens
aaccaaaattattgttggaactccagctattatatcttcaggaggaagggaagaagaggagcatactctctctctttgaaggatacttttttggcagtcayatgtcattttttttaacttacatccagttggctaaaacatggatggtcccatggccatacgtaggtaaacaagaggctgggataggcagtctcatctgtg

SEQ ID NO: 285627 - DNA, 201 bp, Homo sapiens
tttgttgcctctgcatcagtaaagcagaatggaaaatgggctggggatggaactagtctagatatatcttgaactttgatttttcaagtggaattatattkgtattacttttttgccttgttatccttgtttgttatggaaaaagtcttatacagatgtaatctggtagatgtgttttggaaaaattgggcacgaatccag

SEQ ID NO: 285628 - DNA, 201 bp, Homo sapiens
cttgtcttgaagtatgtaataggcttaaatcaggcaaacgtgtctgtcttcaaaatctgtgttatgcatatttcctttgcaaactaaaggccagaaattattttattttattttattttattttattttattttagagggagtctcgctctatcccctaggctggagtgcattggcgccatctcggctcatttgcaacctc

SEQ ID NO: 285629 - DNA, 201 bp, Homo sapiens
ttgtcttgaagtatgtaataggcttaaatcaggcaaacgtgtctgtcttcaaaatctgtgttatgcatatttcctttgcaaactaaaggccagaaattattttattttattttattttattttattttattttagagggagtctcgctctatcccctaggctggagtgcattggcgccatctcggctcatttgcaacctct

SEQ ID NO: 285630 - DNA, 201 bp, Homo sapiens
gataccagtcatattgaattaggggcccaccctacaccagtatgacctcatcttaactaattatatctgcaacaaccctatttccaaattaggtcacattytaaggcactggtggttagacttcaacaacgttattagagggcacagttcaacccatagcatgaagtgatgctttctagaccattcttctttagatagtca

SEQ ID NO: 285631 - DNA, 201 bp, Homo sapiens
aacgttttccagctttggctagttgtggtttcagctgaaaaaccaaaatgtccctgactgtgttatataaaaaaaaaaaaaaaaaaaaaaaaaaaaaaaarggcttccctgtgcttgatcttgaatgtactttgaaatgtgtaaccactaagatctatcccagatgccagtctgtggctctaccttgttagaatttttgtt

SEQ ID NO: 285632 - DNA, 201 bp, Homo sapiens
gcctcctcaagtgggtctctgaccccagagtagcctaactgggaggcatcccccagtaggggcagactgacacctcacatggccgggtacttctctgagayaaaacttccagaggaacgatcaggcagcaacatttgctgttcaccaatatctactgttctgcagactccgctgctgatacccaggcaaagagggtctaga

SEQ ID NO: 285633 - DNA, 201 bp, Homo sapiens
ttcgatcaactggaataaagggtatcagtgatggaagatcaaatgaatgaaatgaagcgagaagagaagtttagagaaaaaagaatgaaaagaaatgaacaaagcctccaagaaatatgggactatgtgaaaagaccaaatctatgtctgattggtgtacctgaaagtgacggggagaatggaaccaagttggaaaacatt

SEQ ID NO: 285634 - DNA, 201 bp, Homo sapiens
tggtacattaggccctctgatgtatacttctcaagtgatctgacctttagctctgactccatgttttctaagaaaacttcagaaactaattttgcttcatrtggaaacttcctgtggttcactgatttattcattcatgcatttatcaaattcatataataccttctaaatactagtggctaaaatatgaaacaaaatgat

SEQ ID NO: 285635 - DNA, 201 bp, Homo sapiens
tcctcgagaagagcaactccaagacacgtaattgtcagattcaccaaagttgaaatgaaggaaaaaatgttaagggcagccagagagaaaggtcaggttayccacaaagggaagcccatcagactaacagctgatctctcggcagaaactctacaagccagaagagagtgggggccaatattcaacattcttaaagaaaag

SEQ ID NO: 285636 - DNA, 201 bp, Homo sapiens
acgtgaataatgtgacattccccatgagaacagtggttctcctggtagtgtttttacaaggatatgggaagtggggtgggagagagacaggagtacctttmtgggttgggggatggtacattaggccctctgatgtatacttctcaagtgatctgacctttagctctgactccatgttttctaagaaaacttcagaaacta

SEQ ID NO: 285637 - DNA, 201 bp, Homo sapiens
ttcaccaaagttgaaatgaaggaaaaaatgttaagggcagccagagagaaaggtcaggttatccacaaagggaagcccatcagactaacagctgatctctyggcagaaactctacaagccagaagagagtgggggccaatattcaacattcttaaagaaaagaattttcaacccagaatttcatatccagccaaactaagc

SEQ ID NO: 285638 - DNA, 201 bp, Homo sapiens
caggagttcaagacaagcctgggcaacatggtgaaaccctgtctctaccaaaaatacaaaaattagccaggtgtggtgacacatgcttgtagtcacagctmtccaggggggttgaggcaggaggattgatggagccctggagctcgaggctgcagtgagccctgagcatgccactgcactccagcctggatgacagagtga

SEQ ID NO: 285639 - DNA, 201 bp, Homo sapiens
actaagctccataagtgaaggagaaataaaatcctttacagacaagcaaatgctgagagatttttgtcaccgccaggcctgccctacaagcgctcctgaargaaacactaaacagggaaaggaacaactggtaccagccactgcaaaaacatgccaaattgtaaagaccattgaggctaggaagaaaaagcatcaactaac

SEQ ID NO: 285640 - DNA, 201 bp, Homo sapiens
ataaaatggtatggatgctttatggtctttgacttactagatgaatttgttggcttttttttttttggcagcatgagaaactgtctctgagtcaactaaamggtctaatggagaggacactgtatttgtagttagaagctgtagttttaagatttttttcttggatatattttaagtttattacagaagaaaatgaagatg

SEQ ID NO: 285641 - DNA, 201 bp, Homo sapiens
gaagaaaaagcatcaactaacgagcaaaataaccagctaacatcataatgacaggatcaaattcacacataacaatattaagcttaaatgtaaacaggctraatgctccaattaaaagacacagactggcaaattggataaagagtcaagacccatcagtgtgctgtattcaggaaacccatctcacgtgcagagacacac

SEQ ID NO: 285642 - DNA, 201 bp, Homo sapiens
gcaggttttaatagcacataatgtatagtaaactgtggacttcttgctttttcagccaaagatgtaacttatatatgtccattcactggcgctgtacgagraactctgactgtcacgaattataggttatatttcaaaagcatggaacgggtaagagtcagattagatttttgtatgtacatgagtgtgttgtttgtagct

SEQ ID NO: 285643 - DNA, 201 bp, Homo sapiens
tttctggatttatctacttttctataactgcttgtctatgaatgattgagaaaatgaattatatgtgtagtgctaaccctttaactttacttcataatcgttttttttttctccaaaaaacacgaaacaataaacatttatttctcatggttctggaagctgggaagtccaagatcaaggtgctggcaaatccattatctg

SEQ ID NO: 285644 - DNA, 201 bp, Homo sapiens
gcccctttgtttacttccattctgtctcatgggatgagaagtccctccaccttttcagcctatcccatttaattctgtgtttcttccccagattagtgcarggatggaagcttgggttgtaggattctgaggtctctggaaattactggttctgttatttttcagcataaattagtctaggaatcataacaattttataag

SEQ ID NO: 285645 - DNA, 201 bp, Homo sapiens
aatatcctcttcttatactgttatttttctaagaaattatattttaaatgtgtgtcatttcacctgtaaaattttccccataagtattaatcagatcaggmgtttgtggaataacatatgttttggacattgcatttttagaagaatgttgacaaactggacaggaaattggtgaggttacatagaaactgcaatgagatg

SEQ ID NO: 285646 - DNA, 201 bp, Homo sapiens
taacctggtaaaatgtttcctgtctttggaaaatttgtgctataattattgatgtcgtataaagaaacttgtctaggctgtctagaatctctacatttacrtccctgctttgacatttaaccagatgtatagtgtaagtgtaacttagtctcttagatcaatttctttaggtatgaaataaaggaagctggactagctgat

SEQ ID NO: 285647 - DNA, 201 bp, Homo sapiens
tctaatgaaatatgcatttcctgtctctaataacctggtaaaatgtttcctgtctttggaaaatttgtgctataattattgatgtcgtataaagaaacttstctaggctgtctagaatctctacatttacatccctgctttgacatttaaccagatgtatagtgtaagtgtaacttagtctcttagatcaatttctttagg

SEQ ID NO: 285648 - DNA, 201 bp, Homo sapiens
ctggtttctgaaggctacgccggaattccttccccgggacttgggaaccacttctgcctccctccctggggcgtggaggctgaggaaaaggaggttaaaaytcgctgcttctttatcgattcctctacctttcatattccgatctcgttttctccccgatggaggtggtcccagttaattactttctcctgtctttcattc

SEQ ID NO: 285649 - DNA, 201 bp, Homo sapiens
tggattgttgccccaattcgcggattctggtttctgaaggctacgccggaattccttccccgggacttgggaaccacttctgcctccctccctggggcgtrgaggctgaggaaaaggaggttaaaactcgctgcttctttatcgattcctctacctttcatattccgatctcgttttctccccgatggaggtggtcccagt

SEQ ID NO: 285650 - DNA, 201 bp, Homo sapiens
cagtcaatttcaaattggagttctttttcttcaaaatttcaagaaactcttttgaaaactttaatcttctatgatagtttcacttttaaactgcatttgcwatgccaagacacatgcttccatagtgggaataatatttatttttctaatacttcaaacataatgccatccacgagacgtaagttcttattttgtaaacat

SEQ ID NO: 285651 - DNA, 201 bp, Homo sapiens
gccgcgcgatggagacgagctcgagctgcgagagtcttggctcccagccggcggcggctcggccgcccagcgtggactccttgtccaggtaaccaggacgyccagggccccgcccagcgtccgaaggggatggagaggggccggggacctgctggattgttgccccaattcgcggattctggtttctgaaggctacgccgg

SEQ ID NO: 285652 - DNA, 201 bp, Homo sapiens
cttcttctttttagtcctttttaggacttaagagttttctttatgtagaagaaaagtaattttaagcagtcaatttcaaattggagttctttttcttcaawatttcaagaaactcttttgaaaactttaatcttctatgatagtttcacttttaaactgcatttgcaatgccaagacacatgcttccatagtgggaataat

SEQ ID NO: 285653 - DNA, 201 bp, Homo sapiens
aaagaacatgaaaattgtttcttcatgaaattatcttgtataattggagtgtctgtcagtgggagtaaacagttttgggaaatgtaatgtagaaaacagtwacaggcaaaaggagcattcgatttttactcatattttctcagagaaaagttattattggtgatgtaatcatgtaccctcttcccttggtactgtcttctt

SEQ ID NO: 285654 - DNA, 201 bp, Homo sapiens
tgggttggaaaggtgccattggttccaacagctgaaaaaacatacactgcaacatttagggaatgatttgacctggctttggtcaggattgcctagttgartattttatgttttgctcttgcaggaacctattcacaacagatacaaagaacttcttgctaaacgagcagagcttcagaaaaaagtagaggaactacagag

SEQ ID NO: 285655 - DNA, 201 bp, Homo sapiens
gatgagtagtatcttacatattgtaggcactaaaaaaggcattggttaaactgagaaatgggataaccaaaataatatgctgctgaagggagatgatcatktatagaatcagaactaagaaaaaaactttttttttttttttttaaaaaccaaccaggccattagtaattatagaaagaacaatttcagggcatcacttga

SEQ ID NO: 285656 - DNA, 201 bp, Homo sapiens
agtgcaactttgtctccttaaaagcagctggaaagattatctgtgcatatttaaaactttactccttacccattgatagttaacaattgtatagtagaaamatactacactggggcagggtaatcagtatacctggttcttaggactgcttgtatgacattggacaaatcactgctctcttttcttgcatcttccctcctc

SEQ ID NO: 285657 - DNA, 201 bp, Homo sapiens
aatcctctctatgggagctattccaatcatgtcctttatccagtagccagcatgcgccacctagagctctgggtgggatattacataaggtggaatccacrgatgaaaccacaggtatgtgccttacaatatacaatgggagttttcattcatgcagtgcaactttgtctccttaaaagcagctggaaagattatctgtgc

SEQ ID NO: 285658 - DNA, 201 bp, Homo sapiens
tgaatgattgagaaaatgaattatatgtgtagtgctaaccctttaactttacttcataatcgttttttttttctccaaaaaacacgaaacaataaacattwatttctcatggttctggaagctgggaagtccaagatcaaggtgctggcaaatccattatctgatgagggtatgtcttcttgtatcctcacctgatggaca

SEQ ID NO: 285659 - DNA, 201 bp, Homo sapiens
gtagttagaagctgtagttttaagatttttttcttggatatattttaagtttattacagaagaaaatgaagatgatctcttaaaattaaggactaatgatwaagcatcagattattcacttccccccctttaaataaaaaaaaaaaaggaagtggtaatacttgcattctgtacaaaattcaaaaggtccagcagggtata

SEQ ID NO: 285660 - DNA, 201 bp, Homo sapiens
atgcagtccagttcgggagctaagtcacttaaacactgtgtgatagttcctacacatctcattatagtttgtaagtattcctctatttattaaaggtctcrtttctatgaaattaaccacattagtgatatcctgtagcactctgtacatttctggatttatctacttttctataactgcttgtctatgaatgattgagaa

SEQ ID NO: 285661 - DNA, 201 bp, Homo sapiens
tcctgtagtttttttttttttaaccattcttatagcattcatcacaatcagattcatagacagttaaaaaggagtctatctctcccatgaggctataattkgggagcatatataacattgttgtatcacacttatatcttcatagaacactcatatcacactgataagcagtaaatcaacattgcctgaatgaatgaatga

SEQ ID NO: 285662 - DNA, 201 bp, Homo sapiens
atgtaaacaggctaaatgctccaattaaaagacacagactggcaaattggataaagagtcaagacccatcagtgtgctgtattcaggaaacccatctcacrtgcagagacacacataggctcaaaataaagggatggaggaagatctaccaagcaaatggaaaacaaaaaaaggcaggggttgcaatcctagtctctgata

SEQ ID NO: 285663 - DNA, 201 bp, Homo sapiens
gtatatgtggatttcttttgtggggaaggttgtggtgggagaagggatgtgcttctaacaattaaaaaaagtctagcctgctattatgatagatattcgtrcatgactcatctcttttagctttctcaacaatcctgtgatccagttgttattattcccatttgacaaatgagaaacctgacagtcagaaagggtgaatga

SEQ ID NO: 285664 - DNA, 201 bp, Homo sapiens
ccaacactatcaatataactaatttagcaggagatactgatggagtattctcatagatcccggtctacaaaatatcccagaataggccagcaaatttggartgcttacttatttgtaaaagaaaaatgtgtaattcatctctgaggttgatcacctctaagttctttgccaaaagatgattaatgaattttttgtggtata

SEQ ID NO: 285665 - DNA, 201 bp, Homo sapiens
gggaagatcaccaccgatcccacagaaatacaaactaccatcagagaatactataaacacctctatgcaaataaactagaaaatctagaagaaatggatamattcctcgacacatacactctcccaaggctaaaccaggaagaagttgaatccctgaatagaccaataacaggctctgaaattgaggcaataattaatagc

SEQ ID NO: 285666 - DNA, 201 bp, Homo sapiens
gaaaacaatagctagccactaggtgtgtttagttgttattttttttacaaaagaaaaagtaacaaagccttttccttctgaagcaaaagatcattttgcamatgtacaatctggagataatacgatgggtagggtgattataaatgcaaatttgtctagaatagttgtcccttcaggtttaacgttagacgtaagtgtcct

SEQ ID NO: 285667 - DNA, 201 bp, Homo sapiens
tgtgtcacaggcttgtgagcttcatgaacatggggatgatgtcatatttattttcaaatcacagtgcctggtgtagtggttttgtacattggaccactcartgaatgttctttggatgaatgaatggatgggtgaatggataaaaagaaggaattagcctggagtgtcttcatgagtattgggagtctatccagagggaac

SEQ ID NO: 285668 - DNA, 201 bp, Homo sapiens
tcaccaccgatcccacagaaatacaaactaccatcagagaatactataaacacctctatgcaaataaactagaaaatctagaagaaatggataaattcctygacacatacactctcccaaggctaaaccaggaagaagttgaatccctgaatagaccaataacaggctctgaaattgaggcaataattaatagcttaccaa

SEQ ID NO: 285669 - DNA, 201 bp, Homo sapiens
ttacaatccagaacgactttattgattccagcttcaaattgagagttctttcagtcagatcttttgttcctttgctatgctctcgtcattgtgttttttgwgcacttgcttactttctggcacgacaagatgctccagactcataatatatatttcctccctcagttctagaatcatcatccagttttcataggagccctg

SEQ ID NO: 285670 - DNA, 201 bp, Homo sapiens
gggaggctgagtgagaggatcgtttgaggccaggagtttgaggagaacagcctggataacatagtgagacctcatttctcccccgcccccctccccccccmaaaaagacataatttttgttcttggggcactagttggtgagacaaaataaacaataaaagcgtgatcaggtatcgaaagtttggccaggcgcagtggctc

SEQ ID NO: 285671 - DNA, 201 bp, Homo sapiens
ataccaaaacctggcagagacacaacaaaaaaagagaattttagaccagtattcctgatgaacattgatgcaaaaatcctcaataaaatactggcaaaccraatccagcagcacatcaaaaagcttatccaccatgatcaagtgggatgtacatccctgggatgtaaggctggttcaacatacacaaatcaataaacgtaa

SEQ ID NO: 285672 - DNA, 201 bp, Homo sapiens
ttgttccacataatgaaccaatactgatacgttattattaaagtccacactttattgagatatccttagtttttacctaatgttctttttgttccaggatsctacccatgcaggatgccacattacatttagtagttatgtctccttaggtttctcttggctgggacagtttctcagacttttttgtttttgatgactgtg

SEQ ID NO: 285673 - DNA, 201 bp, Homo sapiens
tcttgttataggcaggtttgtaatgaataaatgggattcattttaaagctaaatggttcttaatattatcacaactcaaaggtgaagtatttcatcaaaayctagtgaaaaaaattttgcattctggtataaggaagacttttaatatgttttagaaaaatacatttttgaaaatctgaactttaacacccaattcaaagt

SEQ ID NO: 285674 - DNA, 201 bp, Homo sapiens
gtacatccctgggatgtaaggctggttcaacatacacaaatcaataaacgtaatccagcatataaacagaatcaatgacaaaaaccacatgattatctcartggatgcagaaaaggcctttgacaaaattcaacaacgcttcatgctaaaaactctcaatacattaggtattgatgggacgtatctcaaaataataagagc

SEQ ID NO: 285675 - DNA, 201 bp, Homo sapiens
tatcttttgagactcagtttgaatatcatctcctctgagaagtcttccctgaactttctggccagaattggctgcttccttttcttttctcccatagatayttgtatgtatgtggggtgtttgtgtgtgtgtgtgtgtgtgtatgtgtgtgtgtatgtgtttctatttagagtcataacactgcaccactttatttacttg

SEQ ID NO: 285676 - DNA, 201 bp, Homo sapiens
ttattcttgttataggcaggtttgtaatgaataaatgggattcattttaaagctaaatggttcttaatattatcacaactcaaaggtgaagtatttcatcmaaatctagtgaaaaaaattttgcattctggtataaggaagacttttaatatgttttagaaaaatacatttttgaaaatctgaactttaacacccaattca

SEQ ID NO: 285677 - DNA, 201 bp, Homo sapiens
ttcttatacaccaataacagacaaacagccaaatcatgaactcccattcacagttgcttcaaagagaataaaatatctaggaatccaacttacaagggacstgaaggacctcttcaaggagaactacaaaccactgctcaatgaaataaaagaggatacaaacaaatggatgaacattccatgctcatgggtaggaagaat

SEQ ID NO: 285678 - DNA, 201 bp, Homo sapiens
aatttttgtattgtacttagaactttagaagcatctttatatgtatattatctcatgattttagaataaaggggaagatgtaacagaaaagcactggcctragaatgacattcctgtggtgggatataggataataaggctgagttttcttacatgagtaagaaaattgactgtggaaggaatccagaaatgttttagtaa

SEQ ID NO: 285679 - DNA, 201 bp, Homo sapiens
catcacagcctatcactttttctttccttacattataaaactatgtaatataatttcttatgactgcttttttgtataatagtataggttgttggaaatastatgttgtgtttgcactggaatgccacttttcattcatttaaatgaagtgacaatttcttttttggggaggtgattttcacattgtataagtaatttagt

SEQ ID NO: 285680 - DNA, 201 bp, Homo sapiens
agaaaacctaggcaataccattcaggacataggcatggtcaaggacttcatgtctaaaacagcaaaagcaatggcaacaaaagccaaaattgacaaattgsatctaattaaactaaagagcttctgcacagcaaaagaaactaccatcagagtgaacaggcaacctgcagaatgggagaaaatttttgcaatctactcatc

SEQ ID NO: 285681 - DNA, 201 bp, Homo sapiens
gaatttttgtattgtacttagaactttagaagcatctttatatgtatattatctcatgattttagaataaaggggaagatgtaacagaaaagcactggccygagaatgacattcctgtggtgggatataggataataaggctgagttttcttacatgagtaagaaaattgactgtggaaggaatccagaaatgttttagta

SEQ ID NO: 285682 - DNA, 201 bp, Homo sapiens
atcacaagaacagtactatgatgtattcccacactgtacccctccagttcaatatttgcctggagagtaaaaccctttgtagactggttatacagaaatayacattagtgcttattaaactataacactgtggatcataatatctacctatgtttatgtgtgtctgaagagaagttaataattaaaggctgtttaccacac

SEQ ID NO: 285683 - DNA, 201 bp, Homo sapiens; identical to SEQ ID NO: 58310

SEQ ID NO: 285684 - DNA, 201 bp, Homo sapiens
ggggactgtaaactagttcaaccattgtggaagtcagtgtggcgattcctcagggatctagaactagaaataccatttgacccagccatcccattactggktatatacccaagggattataaatcacgctgctataaacacacatgcacacgttatgtttattgtggcactattcacaatagcaaagacttggaaccaacc

SEQ ID NO: 285685 - DNA, 201 bp, Homo sapiens
taaactctttttcaacaagatgatttatcaacatcatttctaaattctctaaacattaaatctacacaagaacttaattttgtctgagtttaaatgtactrtggcccttcagcatggctttggaatccattcaactgtagttcagatctacacactggcactttaactatgtgatcttgaactaattaccactttcggctg

SEQ ID NO: 285686 - DNA, 201 bp, Homo sapiens
aaagttaaatatttagaaagggttggcatctagtcaaagattaatttcctcaagtttaagattatagtggcagggtaattcccagaagtgataaagtccamggtgtaatgacaagatgcacattgctgaagtgggaatgtgtatgaggttatgtaggaattgaggaattttgagctaggttgttgacagtttatctttatg

SEQ ID NO: 285687 - DNA, 201 bp, Homo sapiens; identical to SEQ ID NO: 58311

SEQ ID NO: 285688 - DNA, 201 bp, Homo sapiens
aatgggtgcaacacactaacatggcacatgtatacatatgtaacaaacctgcacattgtgcacatgtaccctgaaacttaaagtataataaaaaaaaaaaraaaaagaaaaaaagaaccttaaaaaaaaaaaagaagataggttcctggtgtttttgagttgcctctcttgttttgacctcacttcatttattcattgaat

SEQ ID NO: 285689 - DNA, 201 bp, Homo sapiens
attgtgtctcccatgtttctgtgtgcctttgccagaactaccctcttctcttctgtacataacataaatattttccgggggttgctggtcctttctgaatrtagaaatgtagagaaaaaggaagtcatgtggagcagtgctgtagcagccacaagaaggtatacatatgcaatatgggaactactgcccagcgttataagt

SEQ ID NO: 285690 - DNA, 201 bp, Homo sapiens; identical to SEQ ID NO: 58313

SEQ ID NO: 285691 - DNA, 201 bp, Homo sapiens
accttatacatgcttttacaaatgcctatagagaattattttcagaagactgctttcttttttaaagtttcgggttgatattctcttttctttgtaagtcttttttttttttttctaggccttttttttcctagtctcttttctcctgtttgattaaggatagatttgtctagaatcagtgtttgtcaacaaacacagggt

SEQ ID NO: 285692 - DNA, 201 bp, Homo sapiens; identical to SEQ ID NO: 58315

SEQ ID NO: 285693 - DNA, 201 bp, Homo sapiens
actattaccatttccttcgggtttttttttttttctcctggcccttgtttgtacctctcatggtattattgatatgcttgtgtggtataatgtctcttatkggtcagaaatctgaagtgcagaggctgtttcataacccaatgttttgtatatagaaagggcgtggtaataaaatttttttgcaggaagaaaagaacatga

SEQ ID NO: 285694 - DNA, 201 bp, Homo sapiens
taatcctctctatgggagctattccaatcatgtcctttatccagtagccagcatgcgccacctagagctctgggtgggatattacataaggtggaatccamggatgaaaccacaggtatgtgccttacaatatacaatgggagttttcattcatgcagtgcaactttgtctccttaaaagcagctggaaagattatctgtg

SEQ ID NO: 285695 - DNA, 201 bp, Homo sapiens
taagtatatatatgatatatacatatataaaaaatatgaaatatatatttttcacgtgctataataaaaagtacagtgaactgtgtatatatatatatatwatatataaatttttagaatctcgccgtgtcacccaggctggagtgcagtggcgtgatcttagctcgctgcaaccttcacctcctgggttcaagcagttct

SEQ ID NO: 285696 - DNA, 201 bp, Homo sapiens
atataagttggtttatcactgaagtctccaagtccacttcctctaaagagattttaatgacaacaaagtacttcttcacaaatttcatctaaagtgtaaayggcttatgtggtggagaatctttacctatttttcctgcctacagaatcttcctaaaaggactgtgtcactgtggtcttacataaacagccagctggaaga

SEQ ID NO: 285697 - DNA, 201 bp, Homo sapiens
aaggatctacccatgacagggatgaatatgcttgaagaatgtcttaatttatgtgtttgtgatgtttgatttgcagtttcctaccgcatttgaattcaatsagtattttctcattaccattttggaccacctatacagctgcttattcggaacattcctctgtaatagtgaacaacagagaggaaaagaggtaaaatatga

SEQ ID NO: 285698 - DNA, 201 bp, Homo sapiens
gagtcagcaattatgaggtttttctagttttaaaagcaaaatttatatatcttctaccatttaaaaaaattcttcttaggaagggacaaatgtttttcctyatgttattgaaataatgatccctgataagctgtattagtaaattttgaagaaggaagtatttaccttgtttaaaaacaatgtattaaaaaatctgttttc

SEQ ID NO: 285699 - DNA, 201 bp, Homo sapiens
aaccaatgagaacaaagacacaacataccagaatctctgggacacattcaaagcagtgtgtagagggaaatttatagcactaaatgcccacaagagaaagyggaaagatctaaaattgacaccctaacatcacaattaaaagaactagagaagcaagagcaaacattcaaaagctagcagaaggcaagaagtaactaagat

SEQ ID NO: 285700 - DNA, 201 bp, Homo sapiens
cagtttttcccaataaaccattataatttccctgtctccaggagctgatgtctgatttatttttgtatcccacattcacagatcttaacattttacaagayagttccaagtaaccttatttattcatttaagtaagtagtgaacaattattaacttggttcctaaatcttttctaggatattaggaatttacgatttgctc

SEQ ID NO: 285701 - DNA, 201 bp, Homo sapiens
atattcattttgtaaagaagaacacaagaaagcgagtggttgtgctaaataagttgtcctgagccatccacattttcctgtggagttttccttgtctccartaatatgtatcatcttttatgctattggatattttatgtcacttgtttacagatgtgcattcatttatgattttccatgatgtgtgcttttttccaggca

SEQ ID NO: 285702 - DNA, 201 bp, Homo sapiens
aactcctcattaataccgttggaggagggaggtgttactgacaacttcttacttttaccacctcgtgaagatacttgctttgccaaaggaatactgttgaygactcgatcattgcacaaagctttactgtgttgcttcattagatgcaagacaagctgaacattggctaccacggcatggctagggcttgtggactaaagg

SEQ ID NO: 285703 - DNA, 201 bp, Homo sapiens
aaaactcacaagctcatttgcccaaattcatcctgtaaagtctgtaagacttctgacaactcctcattaataccgttggaggagggaggtgttactgacarcttcttacttttaccacctcgtgaagatacttgctttgccaaaggaatactgttgatgactcgatcattgcacaaagctttactgtgttgcttcattaga

SEQ ID NO: 285704 - DNA, 201 bp, Homo sapiens
gaataaccagctctagtgtgccgaggtcacaaagttagagtaagtttgtgaatcacagactaagaagacttgtaaacgtaaccttgttgaacgctggcaarggtgatgtcctggagtcaatagagtttacgttagtctggtccagtttagtctgattaaatcatttagagagaagagttactgaaccaaccgtgtatgtat

SEQ ID NO: 285705 - DNA, 201 bp, Homo sapiens
atctatttcacctattaaacagtgtacatccaggtggtagacactattgttcatttctgtatcctggaataataggaagcactaaattacatgtctatcaygtgtgtaagaaaaacctgatagacttctcaaagatattttgcttttgttttaaacactaaaccaacaatctcaatgtactattccactttataaatagat

SEQ ID NO: 285706 - DNA, 201 bp, Homo sapiens
gagtggaatatatcatacttataaaaatgcttaattctatgaaaccaacaatttaacatacagtgtaaccttaaggccataaaatccaaagatcaggaatsctttgctgccatagaacctgtttaggtagaatctcatgagcaaattgaggctggaataaaagctgaagtgccaactacagaaaatcatgattaaatctac

SEQ ID NO: 285707 - DNA, 201 bp, Homo sapiens
tttccttttgtcactagtgaagacaaacagaaaatcagatgtttatttcacatttttttttaaacagagtcttgctctgtcacccaggttagagtgcagtrgcatgatcatagctcactgaagcctcaaactcctgggctcaagcaatcctcctgcctcagcctcctgagtagctaggatttaaaggcatgtgccactgca

SEQ ID NO: 285708 - DNA, 201 bp, Homo sapiens
cgtgatcacatgcccaattctgatggggaaattggcagttttggtttttttgtgtgtggtgttgtttttagaagacttgtctttcattcacaggaagtggyatttatgcaccaaatggtcccaaagtgtatcattatgacatgaagacagagttgggaaaacttctcctttcagaggtggattcacatcccctatcctcgc

SEQ ID NO: 285709 - DNA, 201 bp, Homo sapiens
tttagatattttttctacactgcagaccattttattaactgttgattccatttattatattagactaagtttttttttagtttacctagaaggaatcgggraattaaatacatttctatggtaattttgaaaggtgggcaagagtcactgagattactttggatgggacactaaagagagagatgacatctctcacctgac

SEQ ID NO: 285710 - DNA, 201 bp, Homo sapiens
atgtatttttgtgtgtgtatttataaagtgcaacaatttcaaaatgctttcttcataattttgtggattttgacagcttcttttcatatatatcactgcayttcactttcttcttaaaatgtgtctcatagtaaaaatagaaaggtcagtgcttccattttcttgcttgggagattgtttgcattatttgtattatctttc

SEQ ID NO: 285711 - DNA, 201 bp, Homo sapiens
caagcagtcctcccaccttggcctcccaaaatgctgagattagaggcatgagccactgagcacagccataatctaaatactatttaatattgaaatggtakaaagatgtttcaaaattgtatgaatcagctttgcataagttaatttgctatcaaaccacaaaataccttattttctacaccagctaatttaattaccatc

SEQ ID NO: 285712 - DNA, 201 bp, Homo sapiens
gtggaggcttatgcctgtaagcccagcactttgggaggctgaggcaggtggatcacttgaggccaggaatttgagaccagtctggccaacattgtgaaacyccgtctctactaaaaaatacaaaaattagcggggcgtgatggcacatgcctgtagtcccagctatgtgggagctgaagcaggagacttgcttgaacccag

SEQ ID NO: 285713 - DNA, 201 bp, Homo sapiens
aggacaatacccagggtaggagaggatggctttggaagactgcctggcattgagtgtcaagactggatgtacatctgtcttgtgatctcttcatttccctrtcccctcaaacctttcactcttgaacctccagagggcgatccaatgtctgaggaggacaaatggcctgcaattcccttcccggagcagtgccaggacaga

SEQ ID NO: 285714 - DNA, 201 bp, Homo sapiens
gactggctgcagtgactgacacctataatctcagcactttcagaagccaaggtgggtggattgcttgagctcgggagtttgaaacaagcctgggcaacatrgtgaaacttcctctctacaaaaaataacaaaaattagcctgacatgttggtgcgtacctggtgttccagctactagcgaggctgaggtggaaggatcact

SEQ ID NO: 285715 - DNA, 201 bp, Homo sapiens
caccagtacaagcaagactcagctgcctggccaaggacaactctatctatgtcttggcaaatttgggggacaaaaagccatgtaattcccgtgactccacrtgtcctcctaatggctactttcaatacaataccaatgtggtgtataatacagaaggaaaactcgtggcacgttaccataaggtaagagagagtgacggac

SEQ ID NO: 285716 - DNA, 201 bp, Homo sapiens
aaatacgaaaaaattagccgggcatagtggcacgtgcctgtaatcccagctactcgcttgaactcaggaggtggagattgcagtgagccgaaatcatgccmctgcactccagcctgggtgatagagcgaggctccgtctcagaaaaataaaattaaattaaatttaaaaaaagcttacggactttggggtttatggggggg

SEQ ID NO: 285717 - DNA, 201 bp, Homo sapiens; identical to SEQ ID NO: 58332

SEQ ID NO: 285718 - DNA, 201 bp, Homo sapiens
acatttttttaaattatttttaattattattattatttgagatggcgtctcgctgtgttgcccagactggagtgcagtggtgcaatctcagctcactgcawactctgcctcttgggttcaagcgattctcctgcctcagcctcataagtagctgggactacaggtgcatgccaccacgcccagctactttttgtatttttg

SEQ ID NO: 285719 - DNA, 201 bp, Homo sapiens
gcattccagcctgggtgacagagcaaactccgcctcaaaaaaaaaaaaaaaaaaaaaagaagaagaagaagaagaagaagaagaagaagaagaagaaaaawgatgataaagtaaaaggccagtaactggcagccacatgttatgcaaacattctcccctctgtaaatactacatgaatgttatttttgctttcagaaatca

SEQ ID NO: 285720 - DNA, 201 bp, Homo sapiens
tcttctccactccaactaatttcccaattttcaatttcttctccattccaactccatttccacaactaatgggttcattttcttttattcttgttctgttyattgactgtctatgcatgtttccttctgttcttgttcaattgctttgtacatattcctctcttatgaaaactccactgtggcttcaggctagatctagtc

SEQ ID NO: 285721 - DNA, 201 bp, Homo sapiens
ggatcactattgcagagatttcaacacacttgttgtgtatcctcaacccccaccaccactttagttttatgttaaaagggtggtgttactcaccatgcccrcaaatgtggaaacatcttgctttagcaccttaggcaactctggtgtattgtcagaagcactggcagagtctgttctctgtaactaactagttagataacc

SEQ ID NO: 285722 - DNA, 201 bp, Homo sapiens
acttcaaggaagtgagagagagaaatcagggtcaccaaggtaaacttaggaggacatagggtctagccatattgatgcattatattctgtaagcctgaagrtttaaactgagcacacaatctaattttctcgtactactttgccactttttccatgtcttgtactcatagaaatctatctctttgaggaattgtcccatag

SEQ ID NO: 285723 - DNA, 201 bp, Homo sapiens
atcctctcaaaagtacaaatgatagatcagtttgttttgtgagtgcagaattaaaacaaaaggagttgggcattcttggaaaagatttccaagaacccacrgaagcctgaggcaatgtgattcttctctttagggctggtgatctgaagaccatgtaggatcaaggtgcccactttcctcaaaaagagccaaaaaaaagtc

SEQ ID NO: 285724 - DNA, 201 bp, Homo sapiens
aaatactacatgaatgttatttttgctttcagaaatcactaaaccttggccatggtcacttcctcttttccaatctctgtggcagtttttgccctaataamcctgcaggttggtactcaggacagttttatagctgcagtgtatgaacatgctgtcattttgccaaataaaacagaaacaccagtttctcaggaggatgcc

SEQ ID NO: 285725 - DNA, 201 bp, Homo sapiens
tgaaaggtaaattccaggttaactttttatatttgttccagaaaaccaggtgcttttccttggcttgactccatgcattgatggcaacacacacacacacaacacacacacacacacgtgcatttatgcacgtacatacactgggataaaatatttacaatgggaattaagtataatcttattgcttgctttaagcatatt

SEQ ID NO: 285726 - DNA, 201 bp, Homo sapiens
tttgcaagttctttgcaaatctctgcttgcaccgtgtttgcaaatgttgcatcaacacaggaagttacatgagcagtggtgattcaaatggtagagaaatgaagaactcagacctctcaatgggaagagctataaaatcacacggcaaaaggacatgggtcaaggaggggaaaatattgtgatcattttttcaatttataa

SEQ ID NO: 285727 - DNA, 201 bp, Homo sapiens
ttgcaagttctttgcaaatctctgcttgcaccgtgtttgcaaatgttgcatcaacacaggaagttacatgagcagtggtgattcaaatggtagagaaatgaagaactcagacctctcaatgggaagagctataaaatcacacggcaaaaggacatgggtcaaggaggggaaaatattgtgatcattttttcaatttataac

SEQ ID NO: 285728 - DNA, 201 bp, Homo sapiens
aggttaggtttcatcttatatttttaagtgcagagaaatgaatgcctcagttatgacttgtattaattttttgcttattggaaattcttactgtgtttgtmatagtttcacaatagaaaaaaaaagctagcacttgattataagctatggttatactaagacctttatgtgtattattcatttaattattacaataattat

SEQ ID NO: 285729 - DNA, 201 bp, Homo sapiens; identical to SEQ ID NO: 58325

SEQ ID NO: 285730 - DNA, 201 bp, Homo sapiens
tgcaagttctttgcaaatctctgcttgcaccgtgtttgcaaatgttgcatcaacacaggaagttacatgagcagtggtgattcaaatggtagagaaatgaagaactcagacctctcaatgggaagagctataaaatcacacggcaaaaggacatgggtcaaggaggggaaaatattgtgatcattttttcaatttataaca

SEQ ID NO: 285731 - DNA, 201 bp, Homo sapiens
gtctgtcaaaaggagctttgctgtcatttaagctacagaatgttacaaaaagaagagaatgaagtatacgttctaggagcttttacaggattacatggccraaggagaagagagtactggcaggtaatttcagttcaaatgaaagggcattcaagtgaaaggtaaattccaggttaactttttatatttgttccagaaaac

SEQ ID NO: 285732 - DNA, 201 bp, Homo sapiens
atttaccagggaaactgttttcccttatctggaggatatcccagaccctcaggtgaactggattccgtgtcaagacccccacaggtattttaactatcttrgtcttttgtgcaaaagtaactctctaaaatgcgcacgttcaccaaagcaaaatgattgctcttgaattaccatatatgtggtatatgttatggttatatt

SEQ ID NO: 285733 - DNA, 201 bp, Homo sapiens
gcttcgctgtagttaaaaactaaggcaacatttctggtatgagtaacttcaatgtaaggcattgcgttttatctgcgtttgttccacataggtctgcacamtgctgaagtgcaaaactactaatttgacaacttgtggacggccagtagaaactgcttctacaagatttgaaatgttctccctcagtggcacatttggaac

SEQ ID NO: 285734 - DNA, 201 bp, Homo sapiens
aaaaagaagagaatgaagtatacgttctaggagcttttacaggattacatggccgaaggagaagagagtactggcaggtaatttcagttcaaatgaaaggkcattcaagtgaaaggtaaattccaggttaactttttatatttgttccagaaaaccaggtgcttttccttggcttgactccatgcattgatggcaacacac

SEQ ID NO: 285735 - DNA, 201 bp, Homo sapiens
tgcttgctttaagcatatttaaaaaattattaacctaaccatgatgagtttcgatttgactaataaaccagcctactgtggagaacatcaagaagacttcyttaagtgggtttgccaacatatctaaattataaacagtcttattttcacttgcaaaactaacagtaaatagagatactacttttattttagtttctcttc

SEQ ID NO: 285736 - DNA, 201 bp, Homo sapiens
gcacgttaccataaggtaagagagagtgacggacgtgtaaaatggagcgtgttgtgagtggtcaatgctgggtttaggagtttgaatttcattccctataygatacaatattactagagggtttttttgttttgttttgttttttgttttttgaaagtgggcaataaagaaaatgacacttttggctgggcgtggaggctt

SEQ ID NO: 285737 - DNA, 201 bp, Homo sapiens
actaactagttagataaccttgggaaagtcacttaacctctgaatttcctactcatagaagagaatattttcctcactgatttggtgaggatcaaatatgrtaatgcatgtgaagacactttgtgaatggtgaagtacaatcattatcttctaggatatttagtcattttctcctcccagttgtaaagcatctgttttcct

SEQ ID NO: 285738 - DNA, 201 bp, Homo sapiens
attaaaacaaaaggagttgggcattcttggaaaagatttccaagaacccacagaagcctgaggcaatgtgattcttctctttagggctggtgatctgaagrccatgtaggatcaaggtgcccactttcctcaaaaagagccaaaaaaaagtccaataacccattcttggtttttttagtgcttcttttctctagagacctt

SEQ ID NO: 285739 - DNA, 201 bp, Homo sapiens
gtctttattttgtaagtgtagattctctgtggcatgactttcactgaagttcatcaggttctaaggaacagatactaatcaaatttgcaagatagataagsgagaacaccaacttgttattttaaaaaataggttcccttagctgggaacaatgaactgtatgtcaaggagactcttcattggcaaatcctctcaaaagta

SEQ ID NO: 285740 - DNA, 201 bp, Homo sapiens
agcaataagtaagtcagagtgtagatttgggtaaattttgttatcaatattgtcctgtgttacattttcttagtagtaagtatttaatattttcccccccrtctaaaaataaacacaatgtaagtgactcaacagaaccaaaaaaattgttgtcaatttttaaatttaataaatgagatatttgttgggatgtgatttttt

SEQ ID NO: 285741 - DNA, 201 bp, Homo sapiens
gaagttgtagtgagctgagcttgcgccactgcattccagcctgggtgacagagcaaactccgcctcaaaaaaaaaaaaaaaaaaaaaagaagaagaagaagaagaagaagaagaagaagaagaagaaaaaagatgataaagtaaaaggccagtaactggcagccacatgttatgcaaacattctcccctctgtaaatacta

SEQ ID NO: 285742 - DNA, 201 bp, Homo sapiens
gttgtagtgagctgagcttgcgccactgcattccagcctgggtgacagagcaaactccgcctcaaaaaaaaaaaaaaaaaaaaaagaagaagaagaagaagaagaagaagaagaagaagaagaaaaaagatgataaagtaaaaggccagtaactggcagccacatgttatgcaaacattctcccctctgtaaatactacat

SEQ ID NO: 285743 - DNA, 201 bp, Homo sapiens
aattatttttagttttctgctctatagagataagaaaagttattcctttaatagaaacttctattcaaagcagaaaatatgagcagatcttatttatagcycctaggccccattcttaacaaaacatttatctcagtaagaaggaaagcacagaataaactttgtttaatcgtacctactcttctatgctgtctaaaagca

SEQ ID NO: 285744 - DNA, 201 bp, Homo sapiens
tagtgagctgagcttgcgccactgcattccagcctgggtgacagagcaaactccgcctcaaaaaaaaaaaaaaaaaaaaaagaagaagaagaagaagaagaagaagaagaagaagaagaaaaaagatgataaagtaaaaggccagtaactggcagccacatgttatgcaaacattctcccctctgtaaatactacatgaat

SEQ ID NO: 285745 - DNA, 201 bp, Homo sapiens; identical to SEQ ID NO: 58327

SEQ ID NO: 285746 - DNA, 201 bp, Homo sapiens
gttattcctttaatagaaacttctattcaaagcagaaaatatgagcagatcttatttatagcccctaggccccattcttaacaaaacatttatctcagtawgaaggaaagcacagaataaactttgtttaatcgtacctactcttctatgctgtctaaaagcatttccgtgacttttaccaaagggctggataaaaataaa

SEQ ID NO: 285747 - DNA, 201 bp, Homo sapiens
ttttgagaaaatgtgtaaatagggtattcctgcaagaaaaactaagggaagagatctcatagatacaagtagtaacttaatttctgaagtagacagtggaytgtgttaggaatacattccaaagcctctgctgaagggacaccctttcaatgttatagagtctctccattccagagttgcttcttaggcagaaagacttca

SEQ ID NO: 285748 - DNA, 201 bp, Homo sapiens
gagaccagcctggccaatattgtgaaaccccatctctactaaaaatacaaaaattagctggacgtggtggcgcgcacctgtagtcctagctgtttcagagrctgaagaaggacaatcgcttgaacctgggaggtggaagttgtagtgagctgagcttgcgccactgcattccagcctgggtgacagagcaaactccgcctc

SEQ ID NO: 285749 - DNA, 201 bp, Homo sapiens
agtgagctgagcttgcgccactgcattccagcctgggtgacagagcaaactccgcctcaaaaaaaaaaaaaaaaaaaaaagaagaagaagaagaagaagaagaagaagaagaagaagaaaaaagatgataaagtaaaaggccagtaactggcagccacatgttatgcaaacattctcccctctgtaaatactacatgaatg

SEQ ID NO: 285750 - DNA, 201 bp, Homo sapiens
gagtaggaggagaaggagaagtagggggaggatggggagggaagggtgaaagagagaaagaaggaaagaagcggagtatcctgaggcctggggcccctgarctgagattcctcctctggcctaggtgcctcggggtattgttgctgtaggcactaactatacagcagtgaacaaaccagacacaaaatcctgcttttctgg

SEQ ID NO: 285751 - DNA, 201 bp, Homo sapiens
taaaccttggccatggtcacttcctcttttccaatctctgtggcagtttttgccctaataaccctgcaggttggtactcaggacagttttatagctgcagygtatgaacatgctgtcattttgccaaataaaacagaaacaccagtttctcaggaggatgccttgaatctcatgaacgagaatatagacattctggagaca

SEQ ID NO: 285752 - DNA, 201 bp, Homo sapiens
agaaaatgtgtaaatagggtattcctgcaagaaaaactaagggaagagatctcatagatacaagtagtaacttaatttctgaagtagacagtggattgtgktaggaatacattccaaagcctctgctgaagggacaccctttcaatgttatagagtctctccattccagagttgcttcttaggcagaaagacttcaccatg

SEQ ID NO: 285753 - DNA, 201 bp, Homo sapiens
acattctggagacagcgatcaagcaggcagctgagcaggtattctcttatttctgttaatcataatgtacacgaggggcatgggagctggtggaagacgasagagctgaattgtctgtgttgtacatggaaaaatcatttttattttgcttgttttgaacagggtgctcgaatcattgtgactccagaagatgcactttat

SEQ ID NO: 285754 - DNA, 201 bp, Homo sapiens
ggtggatggatcacaagatcaggagtttgagaccagcctggccaatattgtgaaaccccatctctactaaaaatacaaaaattagctggacgtggtggcgygcacctgtagtcctagctgtttcagaggctgaagaaggacaatcgcttgaacctgggaggtggaagttgtagtgagctgagcttgcgccactgcattcca

SEQ ID NO: 285755 - DNA, 201 bp, Homo sapiens
tcatcaagtgtataatcatctgtggcttttaaagtatgatatttttaggcatagtttttgtattaacttaagttccacttaagtggttacagttgctatcrtttccatataaagtgactaaaatatttttttaaaattgaaatttcttaattataatttggtttagatttggtcacacaccagtacaagcaagactcagct

SEQ ID NO: 285756 - DNA, 201 bp, Homo sapiens
tttctcctatccatttgttgtagtaccacctgtactctgagcctcagtttaatgtccctgaaaagccggagttggtgactttcaacaccgcatttggaagktttggcattttcacgtgctttgatatattcttctatgatcctggtgttaccctggtgaaagatttccatgtggacaccatactgtttcccacagcttgga

SEQ ID NO: 285757 - DNA, 201 bp, Homo sapiens
tcactggccatttttaataaagcagttaattataagacacatgatccaaatcccttttcagagaaagataatgtttgcttcgctgtagttaaaaactaagkcaacatttctggtatgagtaacttcaatgtaaggcattgcgttttatctgcgtttgttccacataggtctgcacaatgctgaagtgcaaaactactaatt

SEQ ID NO: 285758 - DNA, 201 bp, Homo sapiens
cctaaatcagaaatgatttgactatacattatatctaggatggtttcaaaatgattaatttgcttttaacttctatgttaagaaagctgactgtacttttyccaccttttctttaggtgctgaaagatgggcgtttggtaaacaagaatggatcatctgggcctatactaacagtgtcactctttgggaggtggtacacaa

SEQ ID NO: 285759 - DNA, 201 bp, Homo sapiens
acacatgcacatacacgcatacatacacatattccagtggtttgaatattaatgtcttctctgaattgtggcaaacagtggcagggtttcagtaactaggrtgaaatcattgcatattctataaaatagggtccaagttaattcaatcaaggcatcaagtaaggaagtctttaaaattgcagattgcttatggtcatgtat

SEQ ID NO: 285760 - DNA, 201 bp, Homo sapiens
ggccaagtgcagtggctcacgcctgtaatcccagcactttgagaggctgaggtggatggatcacaagatcaggagtttgagaccagcctggccaatattgygaaaccccatctctactaaaaatacaaaaattagctggacgtggtggcgcgcacctgtagtcctagctgtttcagaggctgaagaaggacaatcgcttga

SEQ ID NO: 285761 - DNA, 201 bp, Homo sapiens
agtcatttcttcaacaaataaggttttactggttttctcctatccatttgttgtagtaccacctgtactctgagcctcagtttaatgtccctgaaaagccrgagttggtgactttcaacaccgcatttggaaggtttggcattttcacgtgctttgatatattcttctatgatcctggtgttaccctggtgaaagatttcc

SEQ ID NO: 285762 - DNA, 201 bp, Homo sapiens
tgttcaatccctgtaatactttctgattgtcttaaatggactgcaacttttctttctttaaaagtggtcagatatattgcgttcttaagattataaagtargccaagtgcagtggctcacgcctgtaatcccagcactttgagaggctgaggtggatggatcacaagatcaggagtttgagaccagcctggccaatattgt

SEQ ID NO: 285763 - DNA, 201 bp, Homo sapiens; identical to SEQ ID NO: 58331

SEQ ID NO: 285764 - DNA, 201 bp, Homo sapiens
attaattttttgcttattggaaattcttactgtgtttgtcatagtttcacaatagaaaaaaaaagctagcacttgattataagctatggttatactaagayctttatgtgtattattcatttaattattacaataattatatgagatagatagtgtcatcccaattttgcagatgagaaaattgacatacagagagtgcaa

SEQ ID NO: 285765 - DNA, 201 bp, Homo sapiens
tgcttaattctatgaaaccaacaatttaacatacagtgtaaccttaaggccataaaatccaaagatcaggaatgctttgctgccatagaacctgtttaggyagaatctcatgagcaaattgaggctggaataaaagctgaagtgccaactacagaaaatcatgattaaatctacagcaaggagtctggggctaaaatccag

SEQ ID NO: 285766 - DNA, 201 bp, Homo sapiens
gaggtgtgaaaggcccattgccctgtaagatcttctgaattcttatgtctgaatcatagtttttctgtctgctgttgggttgctctcatttgatttcagcwattcccttatctgtttttgaggagctgcagacatagaaaccaacatgtttagtttattaggcacgtgtaaagtaatagccaatggcttctgtgtgagagc

SEQ ID NO: 285767 - DNA, 201 bp, Homo sapiens
tgtccagaatgataataaagataatgtctttctttggaaccaagggcaggcttgtttactgcccattataaaaaatatttgatgtccctacattcagggtygtttgctgcaatacaatcaattgcatgtacaggtgtcatgtcaccttgagggaactggggatcagagaactgtcacaagaaaatgctgatacctgggctt

SEQ ID NO: 285768 - DNA, 201 bp, Homo sapiens
ctttatagattgaggtgttttataatcctattttggtggtccgggatattacttcagattttttctcatccaaaacattcatatcaacatgagatggagtytggcctaaattaatgatcaagccagcaggtttgaaaagaaatatattttattaatgttaagtattgtatgttataaagtaaaacattcgtgaatattaag

SEQ ID NO: 285769 - DNA, 201 bp, Homo sapiens
gtagaggatgtagattctcgagccagaatgcttaatttgaaacatggatttaccacttgctagctatacagtgttggacaagttatttaatctctttgtgycttcttggtttccctaaccacatacaggatgataataacaatatctacctcatatgtttccatgaggtttaaatggtttacactgtcaaagcttttagga

SEQ ID NO: 285770 - DNA, 201 bp, Homo sapiens
gcggcgatcccactttaatagtttttatgtggcgtggactgaatgtctcctgcagtttgccagggtcggtgaaattagaggcgccttgtcagagcagtcgygttcattggctcgagtagcgggtgccatggaaggcttataacttctccaaaggaagggacctggctgggtagagcaggtttttctctccttccaagcctg

SEQ ID NO: 285771 - DNA, 201 bp, Homo sapiens
atttcggtttcctgtggactggaatgtagaatgccaaggctatttttattttgaggtttttgtttttcaggggtaacattttctgtttcttctctgctcckttctatggtgtgtgcttcatccttttattcctgaccggtgttccttctttactcatcttgtatgtcgtccagattggctatgagcccctacactactttg

SEQ ID NO: 285772 - DNA, 201 bp, Homo sapiens
ctagcctgtgggaatctttgaagattctttgtattctaagaactgtcccaagaacaaagtagatgctcaagcaatgtttgctgaactagactacatttgaktccatgtaaccaaatgactttatctacatttttttctattccttttattcattagcacccactaaatatactccactattctaggaatagggaaaaaaat

SEQ ID NO: 285773 - DNA, 201 bp, Homo sapiens
caaaccaggctgttttattgtctgtgttgtagaagtgattgtagtaataaaatttatgaaggatgcactgtaggccaacctttggatacttttttttgtgygatcttatttaattcacacattagccttccagaggatattattatctccaatattgagactaaggtcccatgactggtaaatgaggcagagtttaaaatt

SEQ ID NO: 285774 - DNA, 201 bp, Homo sapiens
aagctaatgtactcttcagtctacactgacaagtgagagttgtaatagccttgccatattttggaccacaactgtgtgactatggggaccactgttaaagmagaatcctggagatcttatggaagagaatgctaggaaagtaaaagagtttgagatggactgagtggactgagggaattggagatgccctccctgagagag

SEQ ID NO: 285775 - DNA, 201 bp, Homo sapiens
gcagaagttacagaatgatttcattttggaaaataagtgaaaagtaaagataacacatgagcccaataaaatagtccattttcttgattttttttttttttgccaatatctttttcatgagggcagaccatggtgcattattccacccccgcccccagcatttgcaaaccaccagtcatttccttagggaccttaacaaac

SEQ ID NO: 285776 - DNA, 201 bp, Homo sapiens
tatatgagtagattgtgtgatgctgaggtttagggtgtgaatgatcccatcacccagattgtgaacacagcacccaacagttagttttcaacccttgcccctccctccttcccacctcgattagtccctagtgtctattgttcccatctttatgtccatgagtactcaatgtttagctcccacttgtaagtgagaacatgc

SEQ ID NO: 285777 - DNA, 201 bp, Homo sapiens
cattcatcaaggttcagttataaagcacctactacttggtatatacctagggctgagtgaataactaagattctgttataagtatagcctgctggaaaaaatttagatgaacaattatgatgacaaaatttaagagtgattagagggaaaggagtgaacactttggaatctattctgctagaaatgctgattgtacttggt

SEQ ID NO: 285778 - DNA, 201 bp, Homo sapiens
aagggagctttggttaccttgggggagatttccttgaaagagaaaagctcccataggaagccatggatgaggtattgactagtctttgggccgttattgtyctagaatgggtttgtaatgctgatgaagattacctattggaaaatgagaaactgacctaatgaaatctagacaaattcttaccgtcacccctgttgcctc

SEQ ID NO: 285779 - DNA, 201 bp, Homo sapiens
ctgaaaattttccccagggggtaaactggagcaatcatagggctcaccagatttgttttccatttcccagggagcactgtctcatgctgcctgatgttcartatcttgagaaacattattatctgtattttatttagctctttttagtttttttcaggtggaaagataagttagttccctgttactccatcttaggtaaaa

SEQ ID NO: 285780 - DNA, 201 bp, Homo sapiens
ggttctgaatacatgctgtgctgacatcggcagcgtaaatgtgtgttgtgtggtctgagtctcagtttgtggatacctccagcgggaacctggggcttaargttgaatagtgtctgtagcagagagagtctttgtgcttgatttaaactacacagaatggatggctgtggaacaccagtgaggaggctatgcggtagacct

SEQ ID NO: 285781 - DNA, 201 bp, Homo sapiens
tgtatatattgggtagttaaacacagcttaaatggaaaaacagaccttcagaaagtactgtagtacattaattttgcacaaagtagcactaatttgatacrcatctctaattgctctcacttaaagcagtttcaagacaaataataaactctttttaattgcaacgttgtaaaaaacacttttctatgctgtttattctct

SEQ ID NO: 285782 - DNA, 201 bp, Homo sapiens
ttttggcaaaatctgcaatctaattaggaaaacaaagcaagcacacctaagaaattaaagtgcacagagcagttgacctgaatggaaatcagtaatataakaatatccatcttctacccaaaggtcatgacacccccccaacctcgccatcagcacttacttggaagtctcccttctttcagttcaaggcatcctaaatta

SEQ ID NO: 285783 - DNA, 201 bp, Homo sapiens
ggtgcataaagtagttgctaaaaacaacaagtaggtttggaagagtgctcctgggcttgatagaatttagcaaccagtaggggtagaggttagtactaatrtaagtggtgaaaagacttaaaagagaaggggaagttacgtcacactatcagaagtaatcatatccattacaggggttaaaacgaaattgtctctaatgtt

SEQ ID NO: 285784 - DNA, 201 bp, Homo sapiens
gtcaagagagagggggcaaattattctgcttctcattctgccatcttcctgatttcagttctcacgctttaaattcttttttattgcgatctttttcttamtagtttaaccagtattttcccgcgctttcttcaccaaattcgtttctttccatcagcttgcggagttatattttttgatcgaactgctggggttacaagt

SEQ ID NO: 285785 - DNA, 201 bp, Homo sapiens
gcattaggaaatggatgaaccactaaatgttttcctacaaagcagagtagttctaggatgtgcgaacagaagggaagactggggctctattccttggaggmacctccttcctaagtatttgcagacctatataagtgacctacctataacttgctttttaaggatgatatatgtaattagataatttttgcaagcagctgg

SEQ ID NO: 285786 - DNA, 201 bp, Homo sapiens
taaaacttggcaagctctcttacaggtattgagagctcaccaatggatttctgatcaggtaatgatataattaaaattgtactggtgatgacagatcaacygtgactcaggtgcttggaggcagggagaccagctatgaaacttacataaaaggctggagagacacttagcaaattgtggttattttggggcggcattaca

SEQ ID NO: 285787 - DNA, 201 bp, Homo sapiens
ggaaaatttagtttgcatgtggaataatttccctttgcaagtcaattgtgatttattaaatttccttgtccttcacaagatgtcaatggtgttatctcttratacacctcaggacacgtcttgtctgtttgtcgtcactaggccttcatgatatacagcctttatgatatgtcttcctgaactctgaactcttgtaggaaa

SEQ ID NO: 285788 - DNA, 201 bp, Homo sapiens
tagcttcttttgaggcaccagcctttgctggtgagaggtgaatacctgaataaaaattaagattctgttaggtaaaaggaagtgagacagttaatgcatakcagacaacaaggagcactacagaagcattagtaagcttaggagggagaaaggttgaggagaagttattaacattgtcatataccaaatgggtcaagggaa

SEQ ID NO: 285789 - DNA, 201 bp, Homo sapiens
ggtaaagcctttgctaatcccttaaggataagttggagtctgtcaggtaaaaagaggtaaggttttccgagtagagtgaatctttgtgcaaggatatgggrtcagaatcagcatgccttgtagaggacactaagatgtgatactctgggcagtgagaactcatggaaggatgcttgttaagggagtgccatgggcagatga

SEQ ID NO: 285790 - DNA, 201 bp, Homo sapiens
agaaagttaatttgtgttcatgaataatacatatgtagaacaaaaatgtctctgaagaggagattgttggctttgctgtccttactgtccacagctgtacrtgactcttggttcttttagtgtttcagcattagctcttccagattattaacccggaacctatctaggttaatcactaaacgatattcacagacactattc

SEQ ID NO: 285791 - DNA, 201 bp, Homo sapiens
tctatgtggacatctctccatggcaaaagaagactcagacaaaccaaactattatactaccaccaaaaaagtctgtgcaattaaaaaacagtgcaacacartgcaacaatgcatccagccatgatggtctgaataggtgcaatctcattaaggcagaacacccccatgactgcttcatcttgcatctgtggtgcctagcat

SEQ ID NO: 285792 - DNA, 201 bp, Homo sapiens
ttactaattttcaggaaaaaaaaataaaagaaaaatactgctgctattttctaaagcttccttataaaggtatttcttattgaaaccaactcatatttctyaaattcctagaccactatctgtcatgcaatttgagtctgttttccaaatggtagagtgccagagaatcaaaagctgcttgttttgcttgcctgattttct

SEQ ID NO: 285793 - DNA, 201 bp, Homo sapiens
tgctttctaagatatgttccacctctgaaatgctgtgattctcctatttgtattgctaattagccaatgaatatagtgtgtgaaagatatgacagcacaawtgattgctctgtaattataaattaccccctctgctaattacaatgaagttttttgaagattttttaaatgaagcagtacatttctttatgggaagatcat

SEQ ID NO: 285794 - DNA, 201 bp, Homo sapiens
gataagacatctcaaaaaactcatagtctaatgggaggaaacagacacacaacaagtataaaacagcgtggaagggcaatagtagagatatgtatagggarcatcacaagcatttagtttattctgaatggctcaataaacacttccagcaaatggtaaagcctttgctaatcccttaaggataagttggagtctgtcagg

SEQ ID NO: 285795 - DNA, 201 bp, Homo sapiens
atgcttaataaatgtatggggaacacagcattcagagaaagatttatttggactaattgaatcagaatgcagaaaagcctgacagggcaaaaaaaaaaaaagttaatattaagaacatgaaagtaaatgaatagttgtcacatcctgcacagcttctgactcgtggcacaggcagagctgcatggatagcagaaagtccaa

SEQ ID NO: 285796 - DNA, 201 bp, Homo sapiens
tctgagttcagtgattttttcaatttcagtgcatgtgcatgagagagagagagagagagtgtgtgtgtgagtgtgtgtgtgtgtgtgtgtgtgtgtgtgtgttgggatgagagaaggttgctgcttctcagaataaacaggagaccctatctcaccacccatctcttctcatagcaactgataatccccacagaatggtta

SEQ ID NO: 285797 - DNA, 201 bp, Homo sapiens
ttgcacagagactcatatgtactaatccacatcttttctagcagtttacctgcctctcaggagatagttaccagttcagtattctgtattgcacacttacyatagcttttgtaaactttctgcaaaataaatctatatgaacaaattgttaaggaaaggaatggagttattaacttattgctgacctacttcagtagtata

SEQ ID NO: 285798 - DNA, 201 bp, Homo sapiens
gtttttagctttgtctatattaagctatattaagctttgtcttctgacaagtaatgataaaattgcgttgaagtctagtcttcctaaattacactttgggygaatctgcattgtcatttggttttagtataggtaatgaggtaatggatatttctaaacagatgtgaaggtaataattttgtttaacaaccatttacaaga

SEQ ID NO: 285799 - DNA, 201 bp, Homo sapiens
  misc_feature (1)...(201): n = A,T,C or G
tttcagtggcactacctgagacctagaagttcagtaaatattcattgacggaatcaatggatattcaattcagaaacgaaggatcaatatggacataaatntgtatctctctgcatttctgatatatactgaaataaaaatgatctattccagacagaagggaatctaaactagatattctgagacaatattcatctctcg

SEQ ID NO: 285800 - DNA, 201 bp, Homo sapiens
gcccaactattcctccagacctcaaatatcacagtcccttggaataagatccaggcaggggcatgttcaaagctctttagatgattgagatccactgtgcyagattgtaggatcagtgagggcagagactggggccacttttcagtggcactacctgagacctagaagttcagtaaatattcattgacggaatcaatggat

SEQ ID NO: 285801 - DNA, 201 bp, Homo sapiens
gaagcccaactattcctccagacctcaaatatcacagtcccttggaataagatccaggcaggggcatgttcaaagctctttagatgattgagatccactgygctagattgtaggatcagtgagggcagagactggggccacttttcagtggcactacctgagacctagaagttcagtaaatattcattgacggaatcaatg

SEQ ID NO: 285802 - DNA, 201 bp, Homo sapiens
gatgtatttagttcaagggcaagaaaagtatttcccattgactggttctgcattttggacttaaagtagaaacctaaaattaaacccacagtttttcatakaacagtcactgctgaattctacttttataatgaaaacataccttatgttcaataagagacagctggtttttctgatttagagataagcctaatgaaataa

SEQ ID NO: 285803 - DNA, 201 bp, Homo sapiens
aagcaatctgttgatgaagcagtttgttgtcattgttcctattctgatcgttatttgaaacagttgtcttggctatcgatttttgcaatgatgtttttgakgtgtcatttgaatgtgaaacttaaaattaagaatattagagttggaagagatccagaatcatttagagcaaatctactgaatttattgatggggtaatta

SEQ ID NO: 285804 - DNA, 201 bp, Homo sapiens
atcccacaccctcttatctgcttttccagatttaagttgccttaagctattggtttcctctgtttgacagcatacaccatagtgtttagagatgtagtgcrttatggcattaattttgcctggggtctttctcgagctattcatccttcagcagctggaggagagccatatacactctaaatctgtgtactacctagcgaa

SEQ ID NO: 285805 - DNA, 201 bp, Homo sapiens
taagttgccttaagctattggtttcctctgtttgacagcatacaccatagtgtttagagatgtagtgcattatggcattaattttgcctggggtctttctygagctattcatccttcagcagctggaggagagccatatacactctaaatctgtgtactacctagcgaaatctgtaaagccaagcttcccatccaggtcat

SEQ ID NO: 285806 - DNA, 201 bp, Homo sapiens
agttaaagagtgcatgatggacttctggaggcaggtttaaattataatggagctgcccatattttggaaatacattcaatttatctggttatcgcatgtgwaaggttttctgtaggtaaatacttttgctgttaataacctgttttacaattttatagtatttttccactgaagcagtggttttcatttttttatttactt

SEQ ID NO: 285807 - DNA, 201 bp, Homo sapiens
accctacctaatgggttaagctggatatgcatctgtgggagggagatatgttttgtgggtataatacacatgcaagcaaaccttaatattgtacaagataygcttctgaaaatttacttgcagtttgaaaatctggaagccaaacagtagaccaactgttgtgagtgttagaatttagtgtaatggcactttctgtgaccc

SEQ ID NO: 285808 - DNA, 201 bp, Homo sapiens
ctctgtcgccagtgttgccaggctggagtgcagtggctttatctcagctaactgctacctccgcctcccgggttcaagctattcccctgcctcagcctccygagtagctgggactacaggcatgtgccaccacgcccagctaaatttttttttttttttttttttttttgtattttagcagagacggggtttcaccatgtt

SEQ ID NO: 285809 - DNA, 201 bp, Homo sapiens
tatcaaggaaattgaaaatgcactcccccctttcctaattagagacaactcaatggctattcattttactactatagagacttagagcttgatttcatagrtcaggcatctacaaaccgtgatctgaaagtagagattgctggagacagacctttaagtggagtggcagcgaaactgcaaagtaagaggaactcagttccc

SEQ ID NO: 285810 - DNA, 201 bp, Homo sapiens
tttgagaccagtcttgctctgtcgccagtgttgccaggctggagtgcagtggctttatctcagctaactgctacctccgcctcccgggttcaagctattcycctgcctcagcctcctgagtagctgggactacaggcatgtgccaccacgcccagctaaatttttttttttttttttttttttttgtattttagcagagac

SEQ ID NO: 285811 - DNA, 201 bp, Homo sapiens
ttcttaaatatagattacttgctgctgctttttaaattggatataaactttaaagtgaacagcattgtaggaagttgaagaggaagaaaatatattatttygagaaggtattatttaaatctatataaatccaacttaataaaggacattggataattactattaaggtcacaaatttataaaaatttacaaactaacatg

SEQ ID NO: 285812 - DNA, 201 bp, Homo sapiens
tttggcaattggaaagtgccaagacttcttccactttgaggctttctttttttttgagaccagtcttgctctgtcgccagtgttgccaggctggagtgcartggctttatctcagctaactgctacctccgcctcccgggttcaagctattcccctgcctcagcctcctgagtagctgggactacaggcatgtgccaccac

SEQ ID NO: 285813 - DNA, 201 bp, Homo sapiens
ttactatactcaaagttgtatctttggttcctttacatatcacgcttacagaaatgtcttcctatgtcttcatagcattccattattttataatatctcaygctcatgcagtttttagctttgtctatattaagctatattaagctttgtcttctgacaagtaatgataaaattgcgttgaagtctagtcttcctaaatta

SEQ ID NO: 285814 - DNA, 201 bp, Homo sapiens
tgcagctgagcaccaattgcaatgtacagtgtctgtgctgcaaaactctaaaataggagcttgtaaattcgacaggatgtagaccaggaatcatccatcaygttagagtttatttctattccctgattgtgtatatcattttacctgataacttgcagtgattccttttgttttcaggggagggtgaagaaagctatataa

SEQ ID NO: 285815 - DNA, 201 bp, Homo sapiens
atggtgagtggtgccacttccacttccacccttgattcgtgaacccgtgaatcctggctatgggagagacagtgccatatattggatgctgattcagagcrtacatggctttctagagaactttgccccagccctgcaaagtattgtcacctagttggcattgtaattgtgacttcaaaaggccattccaccattctgtca

SEQ ID NO: 285816 - DNA, 201 bp, Homo sapiens
agtacatttattctgttattagtttaatacatttggattcccttctgactgaaactgtagaagcctctagtggtaagttgtgtgatgatccccttcatcayacaatttaagcttgacaacattaactactgttcaactgcaaatatgttgcttacactgaacacttgaattgtgaacaaaatcttttaattcaaaatgtgc

SEQ ID NO: 285817 - DNA, 201 bp, Homo sapiens
tgcagagctttagcatgactgatgcgtggacccacctcagataatccgatttagttggtatggggtgtggcccgagcaacaggcattgtgaaagctccacmggtgttccccatgcatggtggagtctgagaactcctgtcttatatgtcatcctcccagcttggagtcctccttatgtaccactataaccctacttttcca

SEQ ID NO: 285818 - DNA, 201 bp, Homo sapiens
aaagataagttagttccctgttactccatcttaggtaaaagcagaagttacaccatgtctgttacctgtttgaggtgggtgacgttatatgtcagttatgracttttattgatatacttagagaataacttaaagatgaagggacatcagaaataagcatttctggagcctttattttatgccatattttttatgtacatg

SEQ ID NO: 285819 - DNA, 201 bp, Homo sapiens
aatcccatcaaaaataaatataaacagttattaatgtcatttcaaagactttcaacaggtttattttatcttttaaaaaaatcatgttttatgtcagtgtrtcattctcatgcatagtgtcaactatgattatcatagtttttaaaagttcaaataatctgtaggtaatatcaaaaccattttataccccttcatatattt

SEQ ID NO: 285820 - DNA, 201 bp, Homo sapiens
attcctcaagagagtaactctaacattagcttattatgttgtcattgttgatgttgaatatttaagctctcagggtgcttttcttaaaaaaaaaaaaaaaaccgaaccatctaatttgacactccattctttcagtagatactgcaacatatatagtagcagctgttcctcacataattccttaaaagatacaaatttaaa

SEQ ID NO: 285821 - DNA, 201 bp, Homo sapiens
taaactaaaaacacagtcactctacccagagttaaccacactttggcacatttaattttccatatatgtgtgtgtgtgtatctgtatatctgtctatctayatatatatatatttggtctttttttaatttttgtttcataaaatgtatgactcagtctatcttgctttttaaaaactctacattatcttatgaatatttc

SEQ ID NO: 285822 - DNA, 201 bp, Homo sapiens
  misc_feature (1)...(201): n = A,T,C or G
cctcgagaaaacagaaagataaaaattcagctcaagagaagcataaagttcttgtcaagaggaaaaattgtatatacaaatataagcagaaagttaatttntgttcatgaataatacatatgtagaacaaaaatgtctctgaagaggagattgttggctttgctgtccttactgtccacagctgtacatgactcttggttc

SEQ ID NO: 285823 - DNA, 201 bp, Homo sapiens
ttgcattacatttccccaagttgagatacatttcttgaaatgccaactattagaacgttgaaaacacaatttcggctctctcttctcaaatccctgcagtytggctcctggcccagccactcaacccaaatcaccctctgaggtcttccaaaataacttcccagccaaaaccaatagtatccttctagacttgtcagcttt

SEQ ID NO: 285824 - DNA, 201 bp, Homo sapiens
atttagagataagcctaatgaaataaagtgggatctaaatatccaaaacttaaaaggtgcagttattcattactgtactgattaaaggataattattcaaycatgtatagtattgggtcaagaaaagcctagggcaattttgtaatgactgatgttacttggaaattgcaaatagcattccattatttaatttaccttatt

SEQ ID NO: 285825 - DNA, 201 bp, Homo sapiens
gttttcatggctatagaacacaggatgacatctcaaatatgtttacactttagggcttccccctcaaaacatgatgaaaggaaatataggaataaaatggrttatcatagtggaggtgtggaatgaagagtggtttctccttgcaaatggaatcagttcagggtgtagatgaatactgcttggcctgacctgggttgcagg

SEQ ID NO: 285826 - DNA, 201 bp, Homo sapiens
tttttaaaagtacattgactttgtgagaatttttatgtaaataaacaaattctggttttcatttctaatgctatttgattattttgtataaccaaacgggkttttttttttttttttttttgcaccagaaccagaagtagtgtaatgattaatatatcccgcctcatacttattttaaagttgaaattttaggtttttaat

SEQ ID NO: 285827 - DNA, 201 bp, Homo sapiens
taatcatgcgagttaatatttaatgtcagaggaatttctctaaaaattacaatgagaggatattaaatagagaaataacttctgattaccagggaaatttrcaaggattcctccacttttttgaatgtcattaatttattataaaagagaaacacagaagttatttacatgtggaaagatttcagagcttcaatggaatgg

SEQ ID NO: 285828 - DNA, 201 bp, Homo sapiens
cggtgtttttgtatgatacagtcttgatttagggactatgaatattctgaatttatatatcttagatatttcttcaaagaaactcattgcatttttttcaygatcatgaaaaagaaattaagacattaagaaaaccaagctggattgtccaagtgtgggccatagcagtgtctatgggcagcacctgaagctaattcagga

SEQ ID NO: 285829 - DNA, 201 bp, Homo sapiens
taatctcctttggcaacaccctcacagacatacccaggatcaatactttgtatccttcaatccaatcaagttgacactcagtattaaccaccacagtgtcygattgtttctttagattgtaatactcttttccatttaaattgtattttcagaaatatttaatgtcagtagatatttcttgaaatgtgacttcaatgatta

SEQ ID NO: 285830 - DNA, 201 bp, Homo sapiens
tgatacttttctgttagaagtaatttttattacttagcaaatgaaatggagaggtaataaatatgactgatatttatttcttgagtaaagtattattttayatcagattcgaccagttacctttatcctttttggaaaatgtattatacaaactaccacagtattttgcctattaatcagggaagctaaaaaacgttttat

SEQ ID NO: 285831 - DNA, 201 bp, Homo sapiens
atgcatcaaaatccagaaaattgctactcaaatgctggctaaagtaatctgatagatacagttttaaaatgaagtatattaatcagttgattttgttgttmgatttttatatgtagaaaattctgtctccagaatattcagttcttgtagtttttggttaagattttgattaatcttcaatggttatctagtgcctttaaa

SEQ ID NO: 285832 - DNA, 201 bp, Homo sapiens
tggaattgctgggtcaaatggtatttctagttctagatgcttgaggagttgccacactgtcttccacaatggttgaactaatttacactcccaccaacacrccagttagaaagtttttttttttaaatgacaaggtcttaaatccagtttgagttatatttgagacatgagagtaaaaatgagtggttcagtacattccat

SEQ ID NO: 285833 - DNA, 201 bp, Homo sapiens
cacttgaaatattgtgtttgaagagatttgtgtataattttgctatgctattgtccaatatgatacagtttcctttagtagttactttaaatatattttttattattaaaacaatataatattcttttataggttatgaaaaaaatccctaaatggtgaaattaaagatattgaagttgaggtttaatgcagaactgcact

SEQ ID NO: 285834 - DNA, 201 bp, Homo sapiens
cttttcatttcttagatcagtcttatttccacaatatgcatgttagagtgtaacaacattttggtatagcatagtgatttttttgattattttagccagagattcctctacacacatatgaccgagagcatcactgtatagaacatctaagggcagaactgctctaggtaaaatgtacagatgggggactggagagatccc

SEQ ID NO: 285835 - DNA, 201 bp, Homo sapiens
gcagtgggttatgcctgtaatcccagcactttgggaggccgaggtgggcagatcacgaggtcaggagatcaagaccatcctagctaacatggtgaaacccygtctctactaaaaaatacaaaaaattagccaggcatggtggcgggtgcctgtagttccagctactcgggaggctgaggcaggagaagggcgtgaacctgg

SEQ ID NO: 285836 - DNA, 201 bp, Homo sapiens
caacttttattttagatttggggtacatgtgtaagtttgtgacatgggtatattgtttgatgctgaggtttggggtttgattgatccactcactcaggtaktaggcatagtactgtataattactttttcaatcattctctctccctccttcccctttctaatggctcccagtgtctgttgttaccatctttgtgtccatg

SEQ ID NO: 285837 - DNA, 201 bp, Homo sapiens
tattcagagaaggaaattcatgctgctaaagcaagtttttttttttaatctgttacttaaaaaatacaaataagtcatactttgtataacatattaaaacrgagatgatagaggttacttttgagaggaatgaccagagggagcaagagagaggctttggaatgctgattatgtcttttatcttggtttggttgctggtca

SEQ ID NO: 285838 - DNA, 201 bp, Homo sapiens
cttgtatgagtcattttttagcatagtgcagtacatgattgcactacatcatgacaaagcatatttgctctgtgtttcagtgggtcactttatttatcagmgtcagatgatcagatcagaagagagatctagcctaacccttccattttgcagatgagatgttgtattatgtgaccttaagaccttaagtcatttactcag

SEQ ID NO: 285839 - DNA, 201 bp, Homo sapiens
aaaagtaggagacgttttgaatcctctcattgaagagctgaacaaacctctatcaaaacaccttcttcttttttcagtgagaatataatcttgacagtttytttttctaaatggatattattcttacatgtactaaatgctaaactcttataacgtgcctccctgtagagtatcttaaactaattatattcagaaatacag

SEQ ID NO: 285840 - DNA, 201 bp, Homo sapiens
tgagggaaattacatcttttttttcaggcacaattgaggaagtaaaaaaattttgtttagtttttagtggtttgtttttaggcattttccatacaaagatkagcaagacccttcaaaaaccaccaatttgcttatttaggggggaaagtcttcctatgtccagaaataacattaaattaagattattgtttccaatagttt

SEQ ID NO: 285841 - DNA, 201 bp, Homo sapiens
ggggctcattgtatgtgtctgtcttctagagagactatgaactcacagaggggagagatcatatctttttccctccgtaacctcaacacctggagatgttratggaaattaagtgactgcactattccatgcatatctttaaagggcattaggtcccaaaccagacatctgcaaaggatgaatcctgttaactttttggaa

SEQ ID NO: 285842 - DNA, 201 bp, Homo sapiens
tctgttcccttcttcagagtcatttaagtggatatttaaaaaatagagttattaagcttttgaaacacttcaaatacgtcagcctatgcatattaaaattktaatgcagcaaatttactaatatttgcaaaaccagtttagatagagataatatatagatatatagtcagattctgaccatgtcctaagtgttcttagtat

SEQ ID NO: 285843 - DNA, 201 bp, Homo sapiens
agagatggggtttcaccgtgttagccagggcggtctcgatctcctgacttcgtgatcggcccgcctcagcctcccgaagtgctgggattacaggcctgagscaccgtgcccggccaaatttcaatgactttttatggtgggtgttggtgacacagactaagcatttgttgcatgatctcttctgttaagaataaactattt

SEQ ID NO: 285844 - DNA, 201 bp, Homo sapiens
cagcaggcccggcgcagtgggttatgcctgtaatcccagcactttgggaggccgaggtgggcagatcacgaggtcaggagatcaagaccatcctagctaayatggtgaaaccccgtctctactaaaaaatacaaaaaattagccaggcatggtggcgggtgcctgtagttccagctactcgggaggctgaggcaggagaag

SEQ ID NO: 285845 - DNA, 201 bp, Homo sapiens
attgggcacatcatccagacacacaatcaacaaagaaacactggacttaatctgcacaggcttagaccaaatggacctaatagatatttacagaacatttmatacaacaactgcagaatatacattcttctcctacacacatggatcattctcatgatagaccacatgttaggccacaatacaagtctttaaaaattaaaa

SEQ ID NO: 285846 - DNA, 201 bp, Homo sapiens
cattgggcacatcatccagacacacaatcaacaaagaaacactggacttaatctgcacaggcttagaccaaatggacctaatagatatttacagaacattwaatacaacaactgcagaatatacattcttctcctacacacatggatcattctcatgatagaccacatgttaggccacaatacaagtctttaaaaattaaa

SEQ ID NO: 285847 - DNA, 201 bp, Homo sapiens
tgtgtttcatattttacacactttgactgtaatgagactggcatatccatgtgagtcacgctgatgaacaggatgtgtgtttgtatttacgttctgtatgagggttttttggaatatgtgaattattataatcataagagtatattaaaccatcttgataagaaattttaaacatgtaaactattcattcaaaaaaacatt

SEQ ID NO: 285848 - DNA, 201 bp, Homo sapiens
gatttcacatcatttactaattgatgcctaagtaggcagggtagaggtacttgaaaacacacacacacacacacacacacacacacacacacacacacacactcactctctctctctcacttcctttgatttgtgctttaattttgaaatgtgtgcttaggtggcaaagggctgcaaatacagcatactgtgtttgaccaa

SEQ ID NO: 285849 - DNA, 201 bp, Homo sapiens
agggtccccaaactgcttgcttattttagacaacatctcatattaacagcagtgctggcaaaataatatgtttatcagaattaatcaattgattgcttgtrtattgaacagtctacacacatttgtgcagaaaaatacttctaacatagcatttggctggattttaaatgataggctagtcatgaagataaatgctgatgt

SEQ ID NO: 285850 - DNA, 201 bp, Homo sapiens
ttgccacttctccagtttctccattattaaaagacaataatgaaggacctaattcaccgggttggagtgaggtttaagtcagacacacacacacacacacacgcatatatatatatacacacataaatatatataatgtttcataataaagagctttgacaaatcaataagaaaaagacaaacagcctagttttcttaatg

SEQ ID NO: 285851 - DNA, 201 bp, Homo sapiens
cctgtctatggaagagtctcagtgttatttagttattagttagccctgtaaacccgagaagatatttggaaacccatctacacacacccattaactttttytaggtggtggatcacagacttaaattcatgttcctgattcctaatccatattgttatctaataaaagcacattccttatgtagattttatcatgaaattt

SEQ ID NO: 285852 - DNA, 201 bp, Homo sapiens
ttgagcccagtaagaatttgtggatcaaacagtgagctctatatagattcaaattcaacttagggttctgatgtttgttactaattttcaggaaaaaaaaataaaagaaaaatactgctgctattttctaaagcttccttataaaggtatttcttattgaaaccaactcatatttctcaaattcctagaccactatctgtc

SEQ ID NO: 285853 - DNA, 201 bp, Homo sapiens
ggttctgactgaataacatatttattttggtagcagaaaatgccattgtttgggaaaactcaaggccatctactaacttctttattcttgcattgtcgtgrtgatgtgactgatttccacagatctcataaaaatcattctcggtattctatattctatttcctatgtatgaaaggtgaatactcttgagtcattaattca

SEQ ID NO: 285854 - DNA, 201 bp, Homo sapiens
tataaattagatagaagaaataagagctggtgttcaacacgtcagtagggtgagtatagttaatattaatctattgtacatttcaaaatctctaaaagagaataattggaatgttcctagcataaagaaaatacaaatatttaagatgatggatatcccaaataccctgatttgattatatgaatgtatcaaattatcaca

SEQ ID NO: 285855 - DNA, 201 bp, Homo sapiens
atataaattagatagaagaaataagagctggtgttcaacacgtcagtagggtgagtatagttaatattaatctattgtacatttcaaaatctctaaaagagaataattggaatgttcctagcataaagaaaatacaaatatttaagatgatggatatcccaaataccctgatttgattatatgaatgtatcaaattatcac

SEQ ID NO: 285856 - DNA, 201 bp, Homo sapiens
tattggttgcagctactgttgtcagccagttgaagcagaaaaaggaagttttagtatctattattttttgggttttgtttttgtttttgtttttgtttttgtttttttttttgagatggagtttcgctcttgttgcccaggctggagggctggagtgcaatggcatgatcttggctcaccacaacctccacctcccgggtt

SEQ ID NO: 285857 - DNA, 201 bp, Homo sapiens
gagtgagccaagcagagagctggtggaagtacactcccttcagtaaaagcctgcgtggcatgttcaggtgacagaagagggaaggacagtgtggctagaakagagtgagcccagagttcaaaatttgaaatagcaatattctagaaaaagctactatttctagtcttttccacattttggaaatatttacttgtaatttca

SEQ ID NO: 285858 - DNA, 201 bp, Homo sapiens
gcttttgtggtccacttcatgcttggccaactctagatggtaatagaaagggggatatagtggttttcctctcagtagttcaattaaatgcttattctccyccttaaaggtactatttattgagcatctactatgggtcaggcaccaaatgcttgagatacgtcagtaaacaaaacaagagcatacatggtaaaggagtat

SEQ ID NO: 285859 - DNA, 201 bp, Homo sapiens
ctacaaaccgtgatctgaaagtagagattgctggagacagacctttaagtggagtggcagcgaaactgcaaagtaagaggaactcagttcccctctttatrtaaactcttgtaccaatttttggcctccctatacccatccccaagctgaccagttcctattcaagggacccagtcttctcttcggctctcaaataccaat

SEQ ID NO: 285860 - DNA, 201 bp, Homo sapiens
cttatagttctccagcccagtttgccattcagtccgtgaaaatgagtcagtcttggggaggatatttcccacatggcttaataactttaaacttacaagasaacagaaattcgaattagcagatgcatatgctaaaagaaaaacatcttttttaaaaaatccgattttaaagactaaattgtctgtgatgtgcctcaaagg

SEQ ID NO: 285861 - DNA, 201 bp, Homo sapiens
gctggagggctggagtgcaatggcatgatcttggctcaccacaacctccacctcccgggttcaagcgattctcctgcttcagcctcctgagtagctgggaytacaggcatgcacctaagcaaaggattaatttcttaactcgggaaaagagggcttgctgaatttcagaaggtatgggagacacagattatctccctgttc

SEQ ID NO: 285862 - DNA, 201 bp, Homo sapiens
ggctctatgtatactaaggaaatctttcttttaattggtaaaattccactgattggtaaaattccactgctctcagctatgtttcaatcttgaccacttastgtaattaaaaagacagagcagaacaacattgagcctccttatagttctccagcccagtttgccattcagtccgtgaaaatgagtcagtcttggggagga

SEQ ID NO: 285863 - DNA, 201 bp, Homo sapiens
ttttgtttttttttttgagatggagtttcgctcttgttgcccaggctggagggctggagtgcaatggcatgatcttggctcaccacaacctccacctcccrggttcaagcgattctcctgcttcagcctcctgagtagctgggattacaggcatgcacctaagcaaaggattaatttcttaactcgggaaaagagggcttg

SEQ ID NO: 285864 - DNA, 201 bp, Homo sapiens
tgaattttacagttttctatagttttagctcttacatttaggtctttagttcattttgagttaaattttattgaggaagatttttttttaaacttcaacttagtttagatttcaggggtacgtgtgcaggtttttgtcatgggtatattgtgtgacactgaggtttggggtatgattgatgccagcacctaggtagtgaga

SEQ ID NO: 285865 - DNA, 201 bp, Homo sapiens
gtgattggagatggccgagatgaggagcatgccgctaaccaggtaacttcactctgaactttatctcatttatcttccaggaaaagaaagttgctttgaaygaataatgcaaaggtttggcagaaaagtagtgtatgttgtaattggggatggtgtagaagaagaacaggcagcaaaaaaggtaacctgtctcaaacaatg

SEQ ID NO: 285866 - DNA, 201 bp, Homo sapiens
atggaaattccaggtcagagggaaggactttttaacttctcagtgaccccaagaaatgggagaggtggaagggaaaatgggagaggtggaagggaagatgrgagaggtggaagggaagatgggagaggtggaagggaagatgagagaggtggaagggaagatgagagagggtttgactaatgaagcatgacttcctaggag

SEQ ID NO: 285867 - DNA, 201 bp, Homo sapiens
atggaagcaaatagtatctagatggaaattccaggtcagagggaaggactttttaacttctcagtgaccccaagaaatgggagaggtggaagggaaaatgrgagaggtggaagggaagatgggagaggtggaagggaagatgggagaggtggaagggaagatgagagaggtggaagggaagatgagagagggtttgactaa

SEQ ID NO: 285868 - DNA, 201 bp, Homo sapiens
gaaaatggaagcaaatagtatctagatggaaattccaggtcagagggaaggactttttaacttctcagtgaccccaagaaatgggagaggtggaagggaaratgggagaggtggaagggaagatgggagaggtggaagggaagatgggagaggtggaagggaagatgagagaggtggaagggaagatgagagagggtttga

SEQ ID NO: 285869 - DNA, 201 bp, Homo sapiens
gaatgaaacccatttgtgtactcagatacggtatatgctacgtggagctttgtgtaaaatgttgcttttgctccaatttccatataatcacgagaaagctwctctgcaggaaaaacacagatggttactttccttattagaataatcagtattgaaaatagctattttattcctattaaatatattaaatgcaggcaggta

SEQ ID NO: 285870 - DNA, 201 bp, Homo sapiens
agttgtgatttaataatgtttaatgtattaaattatacatagttatttgctagtaaaataattattgcagtacttccggaagactgaaatgtttatctgcrtataattgcctgtctcaaaattaaatgctgtattgttttcaaagcagggaaagctgagggctcctttgtgaaacatgcatagcatttcactgtgtcaaat

SEQ ID NO: 285871 - DNA, 201 bp, Homo sapiens
agaaacaacgcagaagttgtttttcacattagtttttttttttttttttttggctgtttttggggtggtggcggaggtggatgctagagatatctggataattttgcttacatggagtttaaatgttactagtgcttggtaaaaactggttacttcagtagtctagtttaaaggattcctttaatgactgatgtattataa

SEQ ID NO: 285872 - DNA, 201 bp, Homo sapiens
ttcactgtgtcaaatcagaggtccatctagcccaatattctgtctccaagaagtaccaaaaatcattactgccagtttatgtttttctcaaacctggaagkttggaatatagttctaaataccttaaattctctcaataacatgatctggttgtacagtccacagaattgggtaaccatttcttggacttaattatattat

SEQ ID NO: 285873 - DNA, 201 bp, Homo sapiens
attttgtaacatttgcctacgtatgacttttaatagcatattgttttgacgaaatattttgtagaactttaagcatcacagtatagtcatgggtttgtatmttcttcttaataatctgccattattggaggagtgtctgtctgctgataggcaatagtaatgaattttgaaagggaccattaattaaggaatttagagacc

SEQ ID NO: 285874 - DNA, 201 bp, Homo sapiens
ttcagtaaagccttgctgaatgagcaaatcttgatattttggacagaaaaagaaacaacgcagaagttgtttttcacattagtttttttttttttttttttggctgtttttggggtggtggcggaggtggatgctagagatatctggataattttgcttacatggagtttaaatgttactagtgcttggtaaaaactggtt

SEQ ID NO: 285875 - DNA, 201 bp, Homo sapiens
cactgcaggctccgcctcccgggttcacgccattctcctgcctcagcctccccagcagctgggactacaggcgcacgctgccacgcctggctattttttttgtatttttagtagagacagggtttcactgtgttagccaggatggtctggatcttctgacctcatgatccgcccgccttggcctcccaaagtgctgggatt

SEQ ID NO: 285876 - DNA, 201 bp, Homo sapiens
cataagattgctaaagattagtttactatctattagcatttgaagtgtcaaagcattattcagtgtgtgtgtgtgtgtgtgtgtgtgtgtgtgtgtgtgtrtatatatatattttatttttattttttttgagacggattctcactctgttgcccaggctggaatgcaatggcatgatctcggctcactgcaccctgtgcc

SEQ ID NO: 285877 - DNA, 201 bp, Homo sapiens
agcataagattgctaaagattagtttactatctattagcatttgaagtgtcaaagcattattcagtgtgtgtgtgtgtgtgtgtgtgtgtgtgtgtgtgtrtgtatatatatattttatttttattttttttgagacggattctcactctgttgcccaggctggaatgcaatggcatgatctcggctcactgcaccctgtg

SEQ ID NO: 285878 - DNA, 201 bp, Homo sapiens
aaaaaatctcctctactattagaaatgacaaatatcaaaactacaattttatactgagatttatatatatatatatatatacacacacacacacacacacmtacttttttgggggggataagaagcattaaaataaattaagtagaataattaaaagctgtatgtttagctggtaatttttggagtggcacagattttgtt

SEQ ID NO: 285879 - DNA, 201 bp, Homo sapiens
aaggaatttcagagctctctgatccgttttgtagacaagagaagttaaaagtggttaaggccatacagtcaaggcctcacagctggtcagtggtataaacraatctaaaaccatgtccttatgatcagtccctgggtcctttctgtaatgccccatcagaaaatagatggaaaaagaaataggcatgaacaatcatcctgt

SEQ ID NO: 285880 - DNA, 201 bp, Homo sapiens
tttatagtatgttggttttggatttgaaatgattagaataaatgcagatggaaagtgtttttacagtagggaaataattaaattgggtgtggagactttgrcaagagaattcttgaagtgacatatgtgtatcagcaaattctttttcttgcttggccttaattcttttgggaagaaatgcttgggctgcagatgtaatgg

SEQ ID NO: 285881 - DNA, 201 bp, Homo sapiens
tttgaaaagaaatatattttattaatgttaagtattgtatgttataaagtaaaacattcgtgaatattaagtaaaactaagtaaaatgaataagttacagyaggattgctttccctaaatgttatgcattacgggcctgaacattcatatgtatttccacattgttactaaatcaattcacttatattgttggtggcatga

SEQ ID NO: 285882 - DNA, 201 bp, Homo sapiens
atgcacagttttaaattctaagtgaaggaatatatcgaaaatgtttaacaaagtacctgccactgtattatgtgaatttaaatgactgctcttattacaartaggcatagtgatagtattgacaagtgacagtctaatgacaaaaagacaaaaatagcgaagcataaatgtaagaatgcaaaatgcttagtcacatgagat

SEQ ID NO: 285883 - DNA, 201 bp, Homo sapiens
ccaataaatgtgacaaactttttagactccttcctctgtggattgcctcttgcttttgcttcctgcccatcgccataaaagaagataatgacaacaaaacrataacaacacaaatgtaaacgtaccttttcctcttaacttttccatatcatcaatttctcatgaattaaggtgtgatacctgaaagtcacatttgcctta

SEQ ID NO: 285884 - DNA, 201 bp, Homo sapiens
taataggaattggtgaatgaatgaatgaggagctagtttttatattttggggagagaagtggcaagttcttcaagtctttacctacactagtcgcactacygtatgccatataagaaggtttaaatgtcatctgtaaataagatcaaatctaaggaagacctctaagtttgggctgtggtggctcccgcctgtaatcccag

SEQ ID NO: 285885 - DNA, 201 bp, Homo sapiens
agggactccttttacttgagaaaaggagaaggaagaataaaggggacttcctcttgcagtttaggtaccagcttggcaacagtgggatagggcaccaagtyggcatgtggggtccctgattccaggccatggctcttggatggcatttctgcacctgccttaggtcagaggggtgcccactgccctgaagggagagcccta

SEQ ID NO: 285886 - DNA, 201 bp, Homo sapiens
caggtaattggaatgagtcagggtggagcaggtaatcagaatgagtcagggtggaacaggtaattgaaaagggttgctttatgaggaagttaagtttaaargtagaaggcaaagaatcaatactgacatattgattctttgaaaagaaatttagaactcatatctaacaatacatatatttttatatatatgttatataca

SEQ ID NO: 285887 - DNA, 201 bp, Homo sapiens
ggaattcagaatcctataaaataaatttaacaaagatattgaagtaaaaatcaagcagaaattctggaattgaaaatgtaatggacatattgaagaatgcmtgagtctcttaacagcagaattgataaagcagaaaaaagaattagtgagcttgaagacaggctatttgaaaatacacagccaggggagacaaaagaaaaa

SEQ ID NO: 285888 - DNA, 201 bp, Homo sapiens
ggcacctgcatcatatctcctttctatctatatctatatctatctatttatatcacatctccttggaacttctgaactatagcaatttgctattcaaagcraatagaagttacaatgtacatattttctctctatatatcggaatctatattttcccccctaccctatactagaatataagctccacaaaggcagagaatt

SEQ ID NO: 285889 - DNA, 201 bp, Homo sapiens
taaaagaacctggaggtatttcacagctttggagatgaagggtgcttgatagattactagacaagtagtcttactaaactgctcaccaagtgcccccatamcctggatccttgggtcttcttcctatatccgtgcaactgaggctactgtgttagcttacaagcagggtaaaatctcagactttttgtgattcttgctgcc

SEQ ID NO: 285890 - DNA, 201 bp, Homo sapiens
atttgttttctagaagaacgtgtacacaaatgacaataagttaagacagagtgtgaaaagtgctgcagaggaaggtaaaaataatataacaaaaatatgayagtatgaccaggtcacttctggttttgaggaccagaaaaagctgtttggagaaagtagcatttctgaggtatttaaacattgattaagatggttttcagg

SEQ ID NO: 285891 - DNA, 201 bp, Homo sapiens
agccgacaagtctaaattgttgttcacagtaattctgtatcgttttctatgtttacaaagagtttggcatgcaataatctgtaatataatctccatttttkgaaaaaaatatttttctatctgcttatccatgttttccttaagcaatagtgcatttaatctcatttacattatattttatattttctacacagttcagtg

SEQ ID NO: 285892 - DNA, 201 bp, Homo sapiens
gattttgtaaatcccatttaaaaaatctcctctactattagaaatgacaaatatcaaaactacaattttatactgagatttatatatatatatatatatayacacacacacacacacacatacttttttgggggggataagaagcattaaaataaattaagtagaataattaaaagctgtatgtttagctggtaatttttg

SEQ ID NO: 285893 - DNA, 201 bp, Homo sapiens
gttcagttttggaaaaaaaaattaaatttattattacaaaggcaatctagtagaggatgtagattctcgagccagaatgcttaatttgaaacatggatttrccacttgctagctatacagtgttggacaagttatttaatctctttgtgccttcttggtttccctaaccacatacaggatgataataacaatatctacctc

SEQ ID NO: 285894 - DNA, 201 bp, Homo sapiens
taatgactggttttcttgggagagtattaaagagtaatttctctttcaaacacacacatctcaattattgtttcaggattatccatcctatacagcctttrgccaaaaccagtatgcacagtattattcagcatcaacgtatggagcgtatatgacatcgaataacacagccgatggcacaccctcttcaacctctactta

SEQ ID NO: 285895 - DNA, 201 bp, Homo sapiens
cactttatttctctctgcttatttgaaagctatacagcatggttttctttctttagggatcactcttccactttactttttaaagatggataaattttatrcatttaaaaaatttaatctgtatttatatcttcttcctgagtggaccttagcatgttataaatgctcactgaataattctcattgttaattagagtttgg

SEQ ID NO: 285896 - DNA, 201 bp, Homo sapiens
atatgagatctaccttaggcaaatcacttaaccttttgaattgcagattcctatctcatttgaaaaacacacctaaaaatgcctaactcattatggtgaaygtcaaatggaattgtaaaaatacgttataaactgtgagttggtattggtatacatgtagatgattgtagttaactatttctcagatatttccttgtattc

SEQ ID NO: 285897 - DNA, 201 bp, Homo sapiens
catatgaaggacatgtctgttatatttctgccattattggtaactcttaagtaataatgattatctatgtgcttaatagatgtcattgtgtgtgtgtgtgtatttgttcttctaaatggtatgtttgatatgatcacagacgacattgtgccaaatgtaaccacttttcctggcggttttaatggtgttgcaagagtctgt

SEQ ID NO: 285898 - DNA, 201 bp, Homo sapiens
gcatatgaaggacatgtctgttatatttctgccattattggtaactcttaagtaataatgattatctatgtgcttaatagatgtcattgtgtgtgtgtgtgtatttgttcttctaaatggtatgtttgatatgatcacagacgacattgtgccaaatgtaaccacttttcctggcggttttaatggtgttgcaagagtctg

SEQ ID NO: 285899 - DNA, 201 bp, Homo sapiens
agcatatgaaggacatgtctgttatatttctgccattattggtaactcttaagtaataatgattatctatgtgcttaatagatgtcattgtgtgtgtgtgtgtatttgttcttctaaatggtatgtttgatatgatcacagacgacattgtgccaaatgtaaccacttttcctggcggttttaatggtgttgcaagagtct

SEQ ID NO: 285900 - DNA, 201 bp, Homo sapiens
aagcatatgaaggacatgtctgttatatttctgccattattggtaactcttaagtaataatgattatctatgtgcttaatagatgtcattgtgtgtgtgtgtgtatttgttcttctaaatggtatgtttgatatgatcacagacgacattgtgccaaatgtaaccacttttcctggcggttttaatggtgttgcaagagtc

SEQ ID NO: 285901 - DNA, 201 bp, Homo sapiens
tctatcaaagaataaaatatgtaaggaaagaagcatatgaaggacatgtctgttatatttctgccattattggtaactcttaagtaataatgattatctatgtgcttaatagatgtcattgtgtgtgtgtgtgtatttgttcttctaaatggtatgtttgatatgatcacagacgacattgtgccaaatgtaaccactttt

SEQ ID NO: 285902 - DNA, 201 bp, Homo sapiens
caagcatatattacaataaaatatcactgtgggtagtaatttctttactttggaataaatttcacatgtaaaaaccatgtctgtaagttgtgctgagaatrtttattctcccacaatgaagataactttcctgaacaatgtatcatgatagttattgcattatcctctatgtctacttgacccataagtttctcaattatc

SEQ ID NO: 285903 - DNA, 201 bp, Homo sapiens
attgtgccactgcactccagcctgggtgacaaagcaagactctgtctcaaaaaaaaaaaaaaaaacccacaaaatatatatattttatacatatatatatwttttttctctctcctctgtgtgtgtatgtatgctctctctctgtgtgtgtgtgtgtgtgtgtgtgtgtgtgtgtgtgtgtgtgtgagagagagagagaga

SEQ ID NO: 285904 - DNA, 201 bp, Homo sapiens
tatcaaaaacaagcaaacaaatacaataatttttcttaaaatgtgagatggaaagaccttcaagaagacctagagtcatttgttggttcaagtttgcccasacgttttgataatgacaggtctcctctcctgacctgtggtacaatggtcaatctccacactctggtcaatatctatcaataacataaaaatgtgactgtt

SEQ ID NO: 285905 - DNA, 201 bp, Homo sapiens
aaagtatcgtaaatactatgacaataataaacacatgttcttactatgctatgagtgatatgacttaacctatgtgtattcagttgagagatgggtctcgktttattttgtcctacttgctcccgcatatagtgcatgtagtgattttcttggtacatgaaaacattgcatatctaggtaaaatgttaatggccaaggcca

SEQ ID NO: 285906 - DNA, 201 bp, Homo sapiens
attaaccaagagatttttgaagtttagtctactctgcatatacttttaagaccataataatcagatatagatataagtgcttgaagtgcaattgtgaaaakctatggatttcaccatctttagaggatgtaccacatacttttgtccagaaatagatagcatggcctagaagtatgagttattctcatcctttacctctgt

SEQ ID NO: 285907 - DNA, 201 bp, Homo sapiens
agtttcttttttgacgggtgactggcagatgagttacttgtcattttgctataatttatttttttcttttaataaggctctttgggttaaaaaaaaaaaaaggaaaaacaagtactccatttctaagagtttcctttttatttatgttgtactttggggtgtaaataaattttacatagccacgggaaatagagtatccaa

SEQ ID NO: 285908 - DNA, 201 bp, Homo sapiens
aagaatgtatatagcagctttattcatagtagcctaaaattgtgaataacccaaatgtccatcaacagaatggatacagtgtaatagatacagtgtaatakatatatacatgaagaagttctagccacattaaggaaaggacaactgctatcccaggctagaatatggattatctcacagcagtgaatgaagccaaacaca

SEQ ID NO: 285909 - DNA, 201 bp, Homo sapiens
cttctcagtgttactatatgggaactgggaagaaaattgtatatatctaagcactgtgcctggcatgtggaaaacactcaaaaattttagctgttattcayccattccttcatctcaaaaatttagaattttgatatttatgttttcattgaatactaatagttgcttttcttaaaatagttaaatatttaactctttttc

SEQ ID NO: 285910 - DNA, 201 bp, Homo sapiens
gctatttgcctgagaaagtatagccaaatggttaaaggaggagttctgcagtcataccagtgttgcatcatacaagctatttaattttgttaaattaattsccacttctccagtttctccattattaaaagacaataatgaaggacctaattcaccgggttggagtgaggtttaagtcagacacacacacacacacacacg

SEQ ID NO: 285911 - DNA, 201 bp, Homo sapiens
ccagtcctctctactcctttattctgctttattttcatctcagcacttaaccactgctggcattgtattgttcatttaccagtttacttatttcttgtatrtctcctccactagaggaggaggtgtttgttgggcagacaggtgtttgttggtctaggtgagtgctgttcagtagaaaaatgatacaaatcctatgcgtat

SEQ ID NO: 285912 - DNA, 201 bp, Homo sapiens
aaagacaagctatagacttggagaaaatatttataatacacatactgatacaggaattatataaatatataaagaactgtcaaaattcactaagaaaaatkaggttaagaaatttttaaaatatcattaatttgttcaagtatatttttctgccttcagttatttgcaagatccaaattcatctctacttctttcttattc

SEQ ID NO: 285913 - DNA, 201 bp, Homo sapiens
ataatagctattacttcagatattctgctttattatttttataaaatgtattcaacttgtcagaaaatatggtccaatttttatatcagaatgtgtgtttrtagagattatgtatacacttatatatagactgtattttaaattattcacaatttgaaattttgtagatccatctagccaataaatttagaattatatgac

SEQ ID NO: 285914 - DNA, 201 bp, Homo sapiens
tcaagtgctatttttattatttccattactaattttgtgtttatgcattttgtggaaaaggaaacatgaacattgtgtggttcaaatagccaaaaaaaaawtaaaatgtgattacactaaattagaatttatgtgattttattgcacctgaaggttaacatgattctgggattctaataacaaaaaagctttaaaaccatc

SEQ ID NO: 285915 - DNA, 201 bp, Homo sapiens
aaggtggtgtctctgggcatcacttggctcttttgtaaattgattgtcacttcatttttatcgttatcagtaaaccttattaggtgctgaaatcagtgctsggggtgcagggtcaggtaaggaaagcatgtgctgtgtatcaggagacctggccacaaacttgtcatatgtctctacataagttattattgatgaaatcat

SEQ ID NO: 285916 - DNA, 201 bp, Homo sapiens
aaagttgtaatattatcttccttatgactgatattatttcttttgtgctaaagagactgcataagcccttcacctttgtaagttgtcagtagctctagccmgtgaacatttcctacattcctgggatttgtagaatcagtgataggtagtttaatatctttgtgtgatcagtgtgtatttaaaatccattgtgtgtttcat

SEQ ID NO: 285917 - DNA, 201 bp, Homo sapiens
ttctatcaaagaataaaatatgtaaggaaagaagcatatgaaggacatgtctgttatatttctgccattattggtaactcttaagtaataatgattatctatgtgcttaatagatgtcattgtgtgtgtgtgtgtatttgttcttctaaatggtatgtttgatatgatcacagacgacattgtgccaaatgtaaccacttt

SEQ ID NO: 285918 - DNA, 201 bp, Homo sapiens
attctatcaaagaataaaatatgtaaggaaagaagcatatgaaggacatgtctgttatatttctgccattattggtaactcttaagtaataatgattatctatgtgcttaatagatgtcattgtgtgtgtgtgtgtatttgttcttctaaatggtatgtttgatatgatcacagacgacattgtgccaaatgtaaccactt

SEQ ID NO: 285919 - DNA, 201 bp, Homo sapiens
gattctatcaaagaataaaatatgtaaggaaagaagcatatgaaggacatgtctgttatatttctgccattattggtaactcttaagtaataatgattatctatgtgcttaatagatgtcattgtgtgtgtgtgtgtatttgttcttctaaatggtatgtttgatatgatcacagacgacattgtgccaaatgtaaccact

SEQ ID NO: 285920 - DNA, 201 bp, Homo sapiens
ataatcgtttctcaattgaatgtgtttggaacttattcagccagaagctttgatactctagaaacaaaattgtttatagcaaacaatccgttatacttgtktttttagcctagctcttagcttctgcaatgaagttgagacttttaagaaaatatatacacagtacacacaaacacacacatgcttacacaacaacttact

SEQ ID NO: 285921 - DNA, 201 bp, Homo sapiens
cactgcaacctcctcgtcctgagctcaagtgattctcctgcctcagcctccagagtacctgggactacaggcatgaaccaccatgcgtggctaatttttgktattttattttatttttttagtagagatggggtttcaccacgttggccagacttgtctcaagctcctaacctcaagtaatccacctgcctcggcctccca

SEQ ID NO: 285922 - DNA, 201 bp, Homo sapiens
ctggagtgcaatggctgttcacagacgcagttataactcctgggttcaggtggtcgtcccgcctcagcctccttagtagctggtgtgtgtcaccactctctgctcagtctcttgccctttgtgttgtcattcaacatcgaaatacatttcttcttctttttttaattttattttgaaatggagtcttgctctgtcacccaa

SEQ ID NO: 285923 - DNA, 201 bp, Homo sapiens
gctggagtgcaatggctgttcacagacgcagttataactcctgggttcaggtggtcgtcccgcctcagcctccttagtagctggtgtgtgtcaccactctctgctcagtctcttgccctttgtgttgtcattcaacatcgaaatacatttcttcttctttttttaattttattttgaaatggagtcttgctctgtcaccca

SEQ ID NO: 285924 - DNA, 201 bp, Homo sapiens
ttacattatttaatttaaaattcaaatatggataacttgtaagtattagaaaatatgaaaaatgtcacatagccatggacatttcaagaagtcttttattytcgctaaattagaagccaaaggtaactaaagttagataccattctgcttaatcaggcaataatttacaacaattttattcaacccagtcataaaattcat

SEQ ID NO: 285925 - DNA, 201 bp, Homo sapiens
acttccaggtatgcagtagagtcctctcactttcatagtcaataaatggtgatttgggcttttagaaacacggttttggttttgccagggagaagcttggwtaaggaatgataaagaggttgaaaagtgatatagtaagaaaatggaggaataaatagacttccctaactacatgaaaagaatttcagaaatgtatacatt

SEQ ID NO: 285926 - DNA, 201 bp, Homo sapiens
tttgccttcaggtttttggtggtggattttatttattaattatctaactccactattcttaataggtatgttattttgtctactgttgcacttagagtatytgatagtatctttgatgtgtagcagttaaagaagggttatggcaggttttctttgaatggaagtagatgcagacttccaggtatgcagtagagtcctctc

SEQ ID NO: 285927 - DNA, 201 bp, Homo sapiens
atgaccaaggatttgtcatcactgataacattttgggctgacacatgctagatatcttaaacaccaattatcacaacaaatccttactcatcatcctactrtgtaaaaggattttgaatcattttaaggttcttaaaatttttaaataaaaagcaggtcaggggtgttgattcagtgctttcatttttctctgtaacaaag

SEQ ID NO: 285928 - DNA, 201 bp, Homo sapiens
ctggaaggccctcgcattaaaggccagaaatcaagtgagatcttgcctgtgacagcccaatactaaaggagtaaaataattttgccttcaggtttttggtrgtggattttatttattaattatctaactccactattcttaataggtatgttattttgtctactgttgcacttagagtatttgatagtatctttgatgtgt

SEQ ID NO: 285929 - DNA, 201 bp, Homo sapiens
cataggattatactacagactatataacattttcagtcctaaaaagtgtcctttgttactaaacaaaatgcctcaaagactactgttggcttttaaataayttttctgttttttagttttatgaatacttttaataaatgtttgattcccactttcctgacagctgcaactttttgcttttgtcactgtgcctgcctctgg

SEQ ID NO: 285930 - DNA, 201 bp, Homo sapiens
cctggaaggccctcgcattaaaggccagaaatcaagtgagatcttgcctgtgacagcccaatactaaaggagtaaaataattttgccttcaggtttttggyggtggattttatttattaattatctaactccactattcttaataggtatgttattttgtctactgttgcacttagagtatttgatagtatctttgatgtg

SEQ ID NO: 285931 - DNA, 201 bp, Homo sapiens
cacacaccttaatctatgtttaaactacactgatttatgaagatgaaatgtaaatgtaaattatgtgggttacctttcgaggatgaagcctgaattgcaayatatgaatatgaactttgagttatgataataaaacagactttctctaaaagtaattaatcgacattaatgttatacttaacttctaaagacaatttaagg

SEQ ID NO: 285932 - DNA, 201 bp, Homo sapiens
tctcctgcctcagtctcctgagtagctgggactacagacacacgccaccacgcccatcaggctaatttttgtactttacttagtagaggctgggtttcacyacgttggccaggctggtcctgaactcctcacctcaggtgatctgactacctaggcctcccaaagtgtcgggattacaggcgtgggccactacacccagcc

SEQ ID NO: 285933 - DNA, 201 bp, Homo sapiens
ctgcttgaaagtatttggctgcaaagacattatttttagtgatcctaaccatactaggaacaaagaattgcgtctgtcaaaatgggatctctggcgctctraaataatccacatgctttgtgaactttgatgaagtcaggcagctctctgtcatataaatatcatagtggcatcaaaacctgggctgaccatgtgctgcag

SEQ ID NO: 285934 - DNA, 201 bp, Homo sapiens
tatttataaagtcttcaccacactttgtttgttgttcctacctcgccccgctttaagattagggaagaaaattacaatccacccaggcttctttaatgcaygaagaacttattctcccagagttttaggcaaggttcactgggcctctattgtaacaggaacagacatatattttgcttcagtgagtgtttcttgagctca

SEQ ID NO: 285935 - DNA, 201 bp, Homo sapiens
gggcatcctagacatctctgtttataaaatgttattaaaaatcatctatgcaattttcccacttggttataatggtacaaagtaaagggataccatttctstgtttctaggaacactttggtgtcctggtgtaagctgagataaagattatatttctcatcagaaaaattatagttatttgtactctttaaaaattgaaac

SEQ ID NO: 285936 - DNA, 201 bp, Homo sapiens
ttcacaaattatttggaagtgtagtgtttaattttcaaatgttggggattttttatatgtcttattaccattgctttctaaattaattcattgtggtcagwtaccataccctgtgaaatttcaactttaaaatctatcaatatttactttatagcccacctatatcccaggtctgtcctcttgatagatgttccatgtgca

SEQ ID NO: 285937 - DNA, 201 bp, Homo sapiens
acctacaggatgtcataataattagcagcattgaatgattgctatgtgcttggttttaaacatggggtaatgaaaaccgttattgttaaataaaatatatrtggaagatggagtctttcagaatgtgtggttcatattcaaaaataaatactggcactctgagatggaaacctctatgtttgttcccaggtcacataatta

SEQ ID NO: 285938 - DNA, 201 bp, Homo sapiens
tttttttttgttttgtttttgttttttttgtttttttttttaagagacagtcttacttcattgcccaggctggagtgcaatggctgttcacagacgcagtyataactcctgggttcaggtggtcgtcccgcctcagcctccttagtagctggtgtgtgtcaccactctctgctcagtctcttgccctttgtgttgtcattc

SEQ ID NO: 285939 - DNA, 201 bp, Homo sapiens
aactacataggacacaatgtatatgctttagtccactgaggaaatataaagaaaaaggatattcttggtctcttgctctttctgttttttttttgttttgyttttgttttttttgtttttttttttaagagacagtcttacttcattgcccaggctggagtgcaatggctgttcacagacgcagttataactcctgggttc

SEQ ID NO: 285940 - DNA, 201 bp, Homo sapiens
ataactacataggacacaatgtatatgctttagtccactgaggaaatataaagaaaaaggatattcttggtctcttgctctttctgttttttttttgttttgtttttgttttttttgtttttttttttaagagacagtcttacttcattgcccaggctggagtgcaatggctgttcacagacgcagttataactcctgggt

SEQ ID NO: 285941 - DNA, 201 bp, Homo sapiens
tcgaaataactacataggacacaatgtatatgctttagtccactgaggaaatataaagaaaaaggatattcttggtctcttgctctttctgttttttttttgttttgtttttgttttttttgtttttttttttaagagacagtcttacttcattgcccaggctggagtgcaatggctgttcacagacgcagttataactcc

SEQ ID NO: 285942 - DNA, 201 bp, Homo sapiens
ttttacatatatatattacatatatatataaaattcctgtgctccctagggtgattttatatatatatatatatatatatatatatatatatatatatatataattctattctatatataacattctactgtagatatatattttaaaaaactgttagatattatgatattatgagttgcgacagtgatgatgatcatcat

SEQ ID NO: 285943 - DNA, 201 bp, Homo sapiens
attttacatatatatattacatatatatataaaattcctgtgctccctagggtgattttatatatatatatatatatatatatatatatatatatatatatataattctattctatatataacattctactgtagatatatattttaaaaaactgttagatattatgatattatgagttgcgacagtgatgatgatcatca

SEQ ID NO: 285944 - DNA, 201 bp, Homo sapiens
tattttacatatatatattacatatatatataaaattcctgtgctccctagggtgattttatatatatatatatatatatatatatatatatatatatatatataattctattctatatataacattctactgtagatatatattttaaaaaactgttagatattatgatattatgagttgcgacagtgatgatgatcatc

SEQ ID NO: 285945 - DNA, 201 bp, Homo sapiens
tttttgttatttttatatgtcagtgataacatgtttatttttgtgttagtaataacatgttttccatattatgttataatatgttataataacgtgttatsttattacaaaccggttatgaggcttaacttactagggaagcttttcttatttatttatgcatttgtttgtatgtttgtttctcatgaactggcatgttca

SEQ ID NO: 285946 - DNA, 201 bp, Homo sapiens; identical to SEQ ID NO: 58351

SEQ ID NO: 285947 - DNA, 201 bp, Homo sapiens
ttattttacatatatatattacatatatatataaaattcctgtgctccctagggtgattttatatatatatatatatatatatatatatatatatatatatatataattctattctatatataacattctactgtagatatatattttaaaaaactgttagatattatgatattatgagttgcgacagtgatgatgatcat

SEQ ID NO: 285948 - DNA, 201 bp, Homo sapiens
tgtatttttaaaaataacattatcccaagaaacaaaaagcagtagtaacaagagacagattgttttgtgtggagcaagactgccagaatctgatttttatrgcaacaatatcgaaagcagacataactacacccacatttattgttataaaccgtaaaaatagtttgttccacctgattaaaagttgtaagtcattcaaag

SEQ ID NO: 285949 - DNA, 201 bp, Homo sapiens
attattttacatatatatattacatatatatataaaattcctgtgctccctagggtgattttatatatatatatatatatatatatatatatatatatatwtatataattctattctatatataacattctactgtagatatatattttaaaaaactgttagatattatgatattatgagttgcgacagtgatgatgatca

SEQ ID NO: 285950 - DNA, 201 bp, Homo sapiens
catgagtgaactcccattcacaattgcttcaaagagaataaaatacctaggaatccaacttacaagggatgtgaaggacctcttcaaggagaactacaaamcactgctcaaggaaataaaagaggatacaaacaaatggaagaacattccatgctcatgggtaggaagaatcaatatcgtgaaaatggccatactgcccaa

SEQ ID NO: 285951 - DNA, 201 bp, Homo sapiens
tgcaaggagaaaaaccaaataaagcagggaggaggataggaagtgcttgcgggcagggtaggtaggtgaagggacagctgtggttttttgtttttttttttgtttgtttgttttttgagatggagtctcactctgtcccccaagctggagtgcagtggcgcgagctcggctcactgcaagctccacctcccgggttcacgc

SEQ ID NO: 285952 - DNA, 201 bp, Homo sapiens
gtgtgcatttctctgagaaggaggttgatagctttcattatttctaaaagatgtcttctatataagttaaaaaagatgattacattattagattatatatwctatataatatatacagattaattattaaacagatggctttaaggcaactaaaggaatatgtgatattccagaaataaataaagatataacaaggaaggg

SEQ ID NO: 285953 - DNA, 201 bp, Homo sapiens
tgtctgactggggaagccatggcagcttagtttgtcagttctagggaccatattccagtgggggctgtggcagggttgaagcagcctgtgtcaagtgtggyagtcacgggtttggactgtgggaaccacctaaaagaaacagatggaaggaggagccagagagcttagtcagaagagtcatgtgcagaaccaagattacca

SEQ ID NO: 285954 - DNA, 201 bp, Homo sapiens
ctgagttcagtgattttttcaatttcagtgcatgtgcatgagagagagagagagagagtgtgtgtgtgagtgtgtgtgtgtgtgtgtgtgtgtgtgtgtgttgggatgagagaaggttgctgcttctcagaataaacaggagaccctatctcaccacccatctcttctcatagcaactgataatccccacagaatggttac

SEQ ID NO: 285955 - DNA, 201 bp, Homo sapiens
ttttaattcctagactgttttagactttaagggacctaacaattctgagttcagtgattttttcaatttcagtgcatgtgcatgagagagagagagagagwgtgtgtgtgtgagtgtgtgtgtgtgtgtgtgtgtgtgtgtgtgttgggatgagagaaggttgctgcttctcagaataaacaggagaccctatctcaccac

SEQ ID NO: 285956 - DNA, 201 bp, Homo sapiens
taaggctgtactggtttttaagaatatccagttcctttgattttggctatcttattaactattaataattcgtacctacaggatgtcataataattagcarcattgaatgattgctatgtgcttggttttaaacatggggtaatgaaaaccgttattgttaaataaaatatatatggaagatggagtctttcagaatgtgt

SEQ ID NO: 285957 - DNA, 201 bp, Homo sapiens
attagtaaatatgtgaaagttttagtatcagtgctttttgctttgaaagggaatacaattattaattttacccatttcttattatgatattgcaaacagayaacagcagagacaaatacacatgtgtacccacttgctacctatataaggccttataatcattttatattcactatagatcgtaaaaataaacactacaga

SEQ ID NO: 285958 - DNA, 201 bp, Homo sapiens
ctttgcttatattataacaacatccaaagcagggacaaccttgatgaccttgaccaactttaacacttgtgtaaatacaagaaaaatcaactttgctaaasttgtggtgtgcccataggtgacagtaagctaaaatgctaactccatggcataactgcatttgctacatgcagacagatagagttgatgtttgtcatggta

SEQ ID NO: 285959 - DNA, 201 bp, Homo sapiens
ggcagcatccctggtgagctctcccttcctctgtctcacaactcactgccaaactggcacctccgtgtttggcacatacctgcacccacccacctgctgcrggccttttgcactcaccattccttccacttgaaaaggttttcacccagatctttgcatcacctatgccctgggtttcttcagttcttaaagaacaccttt

SEQ ID NO: 285960 - DNA, 201 bp, Homo sapiens
aaaatgtaagttttctctcctgattatgatttttgccattactacaaacaatatgttgcatttgcatacaacttacaattttgaaagcatcgtctcaaacrtacattattcttcactccatcttccttgttaggacaagagctgtttttctggtttcatacatgaaagcctaaataatgtctctcacctgggaaaaagtag

SEQ ID NO: 285961 - DNA, 201 bp, Homo sapiens
tgaacacttattcagtatcccctctgggcagagctgattgataaacatcctggtgttaggcaaagactatagaaagaaggggtaccttgtgtaaaatgtargttttctctcctgattatgatttttgccattactacaaacaatatgttgcatttgcatacaacttacaattttgaaagcatcgtctcaaacatacattat

SEQ ID NO: 285962 - DNA, 201 bp, Homo sapiens
aaaacagcgtggaagggcaatagtagagatatgtatagggaacatcacaagcatttagtttattctgaatggctcaataaacacttccagcaaatggtaawgcctttgctaatcccttaaggataagttggagtctgtcaggtaaaaagaggtaaggttttccgagtagagtgaatctttgtgcaaggatatgggatcaga

SEQ ID NO: 285963 - DNA, 201 bp, Homo sapiens
tcagaataaatgcccaagaacttacaatagtctgaaagtccaatgcagcctagccccccatgatatctttggctccacttcctcctcttctctcactgctyggtcttttctgggctgctggcctttgctctgtctgagcctgccagacgtgcctcctctcacagcctttacgcaggctgttctgtttggaattttcttccc

SEQ ID NO: 285964 - DNA, 201 bp, Homo sapiens
tagggctcaccagatttgttttccatttcccagggagcactgtctcatgctgcctgatgttcaatatcttgagaaacattattatctgtattttatttagytctttttagtttttttcaggtggaaagataagttagttccctgttactccatcttaggtaaaagcagaagttacaccatgtctgttacctgtttgaggtg

SEQ ID NO: 285965 - DNA, 201 bp, Homo sapiens
taaatggccaattctctctatatatattctgggtctcctaccatttcagaggttaccaaaaacttttgtgttaacccagtgattttttttttttttttggkcctttactttcttaacctctgctaaatttatcactattgacgtgttaactacttcttaaaatattctttttttagctttctaagacagtatctttctggc

SEQ ID NO: 285966 - DNA, 201 bp, Homo sapiens
atagaattgaaagttatttgcataatatatcagagcacataataatttatgtatgtaatcattttcttatttggggatatttctgttcctttcagaatttrtcctcttataaataattcattgaatatatttgtgcataaatcttctcatattcctgattttcttagagtgaacttctagaaatgcaatttcaggtcaaag

SEQ ID NO: 285967 - DNA, 201 bp, Homo sapiens
agtcactctacccagagttaaccacactttggcacatttaattttccatatatgtgtgtgtgtgtatctgtatatctgtctatctacatatatatatattyggtctttttttaatttttgtttcataaaatgtatgactcagtctatcttgctttttaaaaactctacattatcttatgaatatttcaccatagaattgaa

SEQ ID NO: 285968 - DNA, 201 bp, Homo sapiens
gactccaagtccaaagctctctccataacatcgacgtgcctcattgcctttgggttatgcatattgtggcatttatagaaatgtcaaaaaaaaaaaaaaaagaaaagaaaaagaatcagcccctttacatggaaataatttctctttgaatgaaatctttatatgattctaaattttgtggagtatattaatgtctcaaaa

SEQ ID NO: 285969 - DNA, 201 bp, Homo sapiens
tgactccaagtccaaagctctctccataacatcgacgtgcctcattgcctttgggttatgcatattgtggcatttatagaaatgtcaaaaaaaaaaaaaaaagaaaagaaaaagaatcagcccctttacatggaaataatttctctttgaatgaaatctttatatgattctaaattttgtggagtatattaatgtctcaaa

SEQ ID NO: 285970 - DNA, 201 bp, Homo sapiens
ctgactccaagtccaaagctctctccataacatcgacgtgcctcattgcctttgggttatgcatattgtggcatttatagaaatgtcaaaaaaaaaaaaaaaagaaaagaaaaagaatcagcccctttacatggaaataatttctctttgaatgaaatctttatatgattctaaattttgtggagtatattaatgtctcaa

SEQ ID NO: 285971 - DNA, 201 bp, Homo sapiens
tatatccatatacatcatgagggtggggctatgtgtctggtcaccttgtatccccagtgcctagcagtgaaacacataagagatgctcaacagatacatartaactgtaagagaacaaaaaatgtagagccaaagaggataataatgttagcaacaaaagggagcttagatatggaagacattcatttccaaaaagaaatt

SEQ ID NO: 285972 - DNA, 201 bp, Homo sapiens
tctgactccaagtccaaagctctctccataacatcgacgtgcctcattgcctttgggttatgcatattgtggcatttatagaaatgtcaaaaaaaaaaaaaaaagaaaagaaaaagaatcagcccctttacatggaaataatttctctttgaatgaaatctttatatgattctaaattttgtggagtatattaatgtctca

SEQ ID NO: 285973 - DNA, 201 bp, Homo sapiens
taggtatttctcctaatgttatccctctcctagccctccaccccatcacaggccccagtgtgtggtgttcccctccctgtgtccatgtgttctcattattcaactcccacttatgagtgagaacatgcattgtttggttttctgttcttatgttagtttgctgagaatgacgatttccagcttcatacatgtccctgcaaa

SEQ ID NO: 285974 - DNA, 201 bp, Homo sapiens
aaattctctcaaagtgcaacacattttcctcaggatgatcataaagtcatcagatgtgtgttaagcaatatatatagtcatatactcttgatcaaaaaagrtttccaggttacacagaagagagatttatggctgagaaaaaggcagattgcttctaagaaaggcttcaaatatattctcttctgacaggctacaggagag

SEQ ID NO: 285975 - DNA, 201 bp, Homo sapiens
ttatacactggcaacatctggcttagaaccacacatttaaaggccaagagctatttattttcttcatcttcctcttctctctctctctctctctctctctyactctctctctctctctattcagtaaaatgtctggggaatagtttcagtattttgatagagcagtacacagaataaattggcagtagttcaatttgcttc

SEQ ID NO: 285976 - DNA, 201 bp, Homo sapiens
acatttgccttatcagttatattcatatagttcctttgtcttattgatgtatctctcatattatccctcatatccacttctccaggcctttttccaccccatgtcagtctagattctcttggcttctcacttggagcgtcacagcagcctttaagttgccacttaactccacttcttgttcatcttgtttgtcagaaatct

SEQ ID NO: 285977 - DNA, 201 bp, Homo sapiens
tcagaatacagcctggaaggcagtcgactagctgaaggagcactgaactaaaagtcagaaggacctcctgtgcctggctgtgcctaagggcaaactgtttgacctctgagcctgtttcatctgaaaatggttataattcatttccttccaggggttacggggtggcttaaatgagataatgtacgtatataaaaatgacac

SEQ ID NO: 285978 - DNA, 201 bp, Homo sapiens
cacatttgccttatcagttatattcatatagttcctttgtcttattgatgtatctctcatattatccctcatatccacttctccaggcctttttccaccccatgtcagtctagattctcttggcttctcacttggagcgtcacagcagcctttaagttgccacttaactccacttcttgttcatcttgtttgtcagaaatc

SEQ ID NO: 285979 - DNA, 201 bp, Homo sapiens
ctcagaatacagcctggaaggcagtcgactagctgaaggagcactgaactaaaagtcagaaggacctcctgtgcctggctgtgcctaagggcaaactgtttgacctctgagcctgtttcatctgaaaatggttataattcatttccttccaggggttacggggtggcttaaatgagataatgtacgtatataaaaatgaca

SEQ ID NO: 285980 - DNA, 201 bp, Homo sapiens
tcacatttgccttatcagttatattcatatagttcctttgtcttattgatgtatctctcatattatccctcatatccacttctccaggcctttttccaccccatgtcagtctagattctcttggcttctcacttggagcgtcacagcagcctttaagttgccacttaactccacttcttgttcatcttgtttgtcagaaat

SEQ ID NO: 285981 - DNA, 201 bp, Homo sapiens
gctcagaatacagcctggaaggcagtcgactagctgaaggagcactgaactaaaagtcagaaggacctcctgtgcctggctgtgcctaagggcaaactgtttgacctctgagcctgtttcatctgaaaatggttataattcatttccttccaggggttacggggtggcttaaatgagataatgtacgtatataaaaatgac

SEQ ID NO: 285982 - DNA, 201 bp, Homo sapiens
tgctcagaatacagcctggaaggcagtcgactagctgaaggagcactgaactaaaagtcagaaggacctcctgtgcctggctgtgcctaagggcaaactgtttgacctctgagcctgtttcatctgaaaatggttataattcatttccttccaggggttacggggtggcttaaatgagataatgtacgtatataaaaatga

SEQ ID NO: 285983 - DNA, 201 bp, Homo sapiens
ttttaaaatgaaagggacatttcttgtgaaagactacaattaaatcataaaaatttacattcatgtgccattaagtttaattctactcacaaaagcaacastacagagtttgaaattctatccctaatcaagtaggtgtaccacataccgggagggctcattatgcacaaggtcatatatacaattcacagacctctgcat

SEQ ID NO: 285984 - DNA, 201 bp, Homo sapiens
tgtatcccatgtgtatatacacctactatgtacccacaaaaataaaaaatactacagagatatatttatttatttataaataaatataaatatattcatttatttataaataaatataaagaaatatattcatttatttataaataaatataaagaaatatattcatttatttataaataaatataaagaaatatagaaga

SEQ ID NO: 285985 - DNA, 201 bp, Homo sapiens
tggccaacacggcaaaaccccgtctctgctaaaaataaaaaaattagccaggtgtggtggtgggcacctgtaatgccagctactcaggaggctgaggcagsagaatcgcctgaaccccagaggcagaggttgcagtgagctgagatggctccactgcattccagcctgggcaacagagtgagactctgtctcaaaaaaaag

SEQ ID NO: 285986 - DNA, 201 bp, Homo sapiens
aggaagtaaatatttatttgaatcatctatgtgtcttttcttccggttatttgtcagtagatagtttggatttatttttaaataatgaccattgcctttcyatttctgtgggtaaatattcagtaataagaaacttttattttatttagtctgtagtgttagaaaaggtaaagttactgataatcacaactgctgaagatt

SEQ ID NO: 285987 - DNA, 201 bp, Homo sapiens
cagcacactagccccaagcacgtcctgtatgaggtcagggctgcagcctcaagaaatacggctttcattgctgactactacttcaaatgcttccagtcacrctgaactgaaatatcttctggagtttgtcaatgtcctgagtccatgttgtgatttttcttattggcaccatagttatacacaacaaagagcagccaatga

SEQ ID NO: 285988 - DNA, 201 bp, Homo sapiens
aagcagttccacagcatgccaacccccctcacttttgaataatccagagactccctgtgccacagataacatgcaatcataaatcttctcagcttcagcarttttcgtcttctaaattcaattaagttgagcccagtaagaatttgtggatcaaacagtgagctctatatagattcaaattcaacttagggttctgatgtt

SEQ ID NO: 285989 - DNA, 201 bp, Homo sapiens
gcgatttttaattctagaaggttttctattaaaatgaaaatgaaatgtatgaaatctgtctcttattatttcagtcttctataggttttcgagtgtaaatkagggagaaatgcagaataatttaaaattaaagttacttatagagaaagctgaatagaaaaataatgtgtatatagcatttgtttttctagaataaagtaa

SEQ ID NO: 285990 - DNA, 201 bp, Homo sapiens
gagaaaaagcaggaaaagaagagagagaatgaatggggggaagggggtgacaattttgcattgcctggccagggaaggccttagtgagagctgggtctcastaaggaggaaatgagggctgggtcatgcagctgtctgggagaagagtcccaggaagagagaacagcatgtgcaaaggtcctgaggtgagagcatgtctgt

SEQ ID NO: 285991 - DNA, 201 bp, Homo sapiens
tctcggtattctatattctatttcctatgtatgaaaggtgaatactcttgagtcattaattcaacaaattaattcaacagttatttattgaatgtcaattwtgttccaggcacaattttaggtggggctacagcaaagtataaaacagacaaaagtttctcctttggggtttacattccagtggagagaggcaagcaataa

SEQ ID NO: 285992 - DNA, 201 bp, Homo sapiens
aacttctttattcttgcattgtcgtgatgatgtgactgatttccacagatctcataaaaatcattctcggtattctatattctatttcctatgtatgaaakgtgaatactcttgagtcattaattcaacaaattaattcaacagttatttattgaatgtcaattatgttccaggcacaattttaggtggggctacagcaaa

SEQ ID NO: 285993 - DNA, 201 bp, Homo sapiens
tctctagtttcagcacccacagtcttctagtcatagagagcaattccagttgttggcttgaatagtaaagcttttttctaacacaaaacatttgagactastaacttcctatgcatttagttatcagttaatgtaagtctgtgtgtaataaatacgactttcattgagtttcgggatgtccttcgtgttcacgtgtagccc

SEQ ID NO: 285994 - DNA, 201 bp, Homo sapiens
acaagtagctactcctagtttaataatttttgtaaaactttcagagctgttttttttttcgtattacaaatttactacattggatctactacactgtagaytcttcagacagaaaatacatatggtcatgctaaataaaacaaaaataatctctagtttcagcacccacagtcttctagtcatagagagcaattccagttg

SEQ ID NO: 285995 - DNA, 201 bp, Homo sapiens
acaaaaaagacaaagcacatcatctcttttctaatgtggatgttactcagtgatgaggggagagcagataagatccccagttaccaaagcgattaataacrtcattctgtccattcacactcattcagccagtgtttattgaagagctttgtttgtctctgtcactgtgatcctacaggaaagacaatacctcctcttaac

SEQ ID NO: 285996 - DNA, 201 bp, Homo sapiens
gtcacatttgccttatcagttatattcatatagttcctttgtcttattgatgtatctctcatattatccctcatatccacttctccaggcctttttccaccccatgtcagtctagattctcttggcttctcacttggagcgtcacagcagcctttaagttgccacttaactccacttcttgttcatcttgtttgtcagaaa

SEQ ID NO: 285997 - DNA, 201 bp, Homo sapiens
agtcacatttgccttatcagttatattcatatagttcctttgtcttattgatgtatctctcatattatccctcatatccacttctccaggcctttttccaccccatgtcagtctagattctcttggcttctcacttggagcgtcacagcagcctttaagttgccacttaactccacttcttgttcatcttgtttgtcagaa

SEQ ID NO: 285998 - DNA, 201 bp, Homo sapiens
gacccagagtccttcggagggtcacaggcgcctgggctttcccggtgccgggtgcgtgtgtactttaaaggctcgcgttctaatctccaggcactgatcgsgcttttcaactgcggcgatcccactttaatagtttttatgtggcgtggactgaatgtctcctgcagtttgccagggtcggtgaaattagaggcgccttgt

SEQ ID NO: 285999 - DNA, 201 bp, Homo sapiens
acgccaggtgcggtggctcacgcctataatcccagcactttgggaggccgaagtgggcagatcatctgaggtcaggagttcaagaccagcctggccaacayggcaaaaccccgtctctgctaaaaataaaaaaattagccaggtgtggtggtgggcacctgtaatgccagctactcaggaggctgaggcagcagaatcgcc

SEQ ID NO: 286000 - DNA, 201 bp, Homo sapiens
taacaaaatggcaggaataagtccttacttatcagtaataacactgaatgtaaatggactaaactctccaatgaaaagacatagagtggctgaatagattwaaaaaaaacaaaaaaaaacaaaaaaccgtgacccagcgatctcttgcctacaagaaatacacttcacctataaaggcacacagagactgaaaataatggg

SEQ ID NO: 286001 - DNA, 201 bp, Homo sapiens
atttcacatcatttactaattgatgcctaagtaggcagggtagaggtacttgaaaacacacacacacacacacacacacacacacacacacacacacacactcactctctctctctcacttcctttgatttgtgctttaattttgaaatgtgtgcttaggtggcaaagggctgcaaatacagcatactgtgtttgaccaaa

SEQ ID NO: 286002 - DNA, 201 bp, Homo sapiens
gtaaaaattactatttctcagaaaaagtgatgcctagtttgttcagatttgtttatttagattaataactgcttggttttcctcagaattgttttattttaatttttaaatttaatgataaaaaataatagccataatatctttttgtttaaaaatcatgtaatttaaatttaatgtagtttaccttctgtcttggaaatt

SEQ ID NO: 286003 - DNA, 201 bp, Homo sapiens
agatttcacatcatttactaattgatgcctaagtaggcagggtagaggtacttgaaaacacacacacacacacacacacacacacacacacacacacacacactcactctctctctctcacttcctttgatttgtgctttaattttgaaatgtgtgcttaggtggcaaagggctgcaaatacagcatactgtgtttgacca

SEQ ID NO: 286004 - DNA, 201 bp, Homo sapiens
tgtaaaaattactatttctcagaaaaagtgatgcctagtttgttcagatttgtttatttagattaataactgcttggttttcctcagaattgttttattttaatttttaaatttaatgataaaaaataatagccataatatctttttgtttaaaaatcatgtaatttaaatttaatgtagtttaccttctgtcttggaaat

SEQ ID NO: 286005 - DNA, 201 bp, Homo sapiens
gagatttcacatcatttactaattgatgcctaagtaggcagggtagaggtacttgaaaacacacacacacacacacacacacacacacacacacacacacacactcactctctctctctcacttcctttgatttgtgctttaattttgaaatgtgtgcttaggtggcaaagggctgcaaatacagcatactgtgtttgacc

SEQ ID NO: 286006 - DNA, 201 bp, Homo sapiens
atgtaaaaattactatttctcagaaaaagtgatgcctagtttgttcagatttgtttatttagattaataactgcttggttttcctcagaattgttttattttaatttttaaatttaatgataaaaaataatagccataatatctttttgtttaaaaatcatgtaatttaaatttaatgtagtttaccttctgtcttggaaa

SEQ ID NO: 286007 - DNA, 201 bp, Homo sapiens
gtattcaaattagctttaggtggacaattgtcctatacacacttgttcgtattaatgttgtcataacaaatatagttataatatcttgatgcctctcctgrgggcccattctggactgtgttgaagctgtctctaacactctctcacgtccctaagatattcaaccacatttgttcatgatttttatgaggtccctcctgg

SEQ ID NO: 286008 - DNA, 201 bp, Homo sapiens
catgtaaaaattactatttctcagaaaaagtgatgcctagtttgttcagatttgtttatttagattaataactgcttggttttcctcagaattgttttattttaatttttaaatttaatgataaaaaataatagccataatatctttttgtttaaaaatcatgtaatttaaatttaatgtagtttaccttctgtcttggaa

SEQ ID NO: 286009 - DNA, 201 bp, Homo sapiens
tccagtaatctaaaacaatgcttctagtaggtaacttaagcatgcaaacctcaataaacctgtcaagaacggcaattctactgttttattttgtttttttktttgtttgtttgtttttgcattaactttagttgataagatgatggtactgttatttttcttagttgactcatgaagaattttaatttaggtctagttttt

SEQ ID NO: 286010 - DNA, 201 bp, Homo sapiens
ccatgtaaaaattactatttctcagaaaaagtgatgcctagtttgttcagatttgtttatttagattaataactgcttggttttcctcagaattgttttattttaatttttaaatttaatgataaaaaataatagccataatatctttttgtttaaaaatcatgtaatttaaatttaatgtagtttaccttctgtcttgga

SEQ ID NO: 286011 - DNA, 201 bp, Homo sapiens
tcataattactcatcaagaaaattataattaaaaccacagtgagataccatcaatcacacacccaaaatggtgaaaataaaaaaacgctaacaatatcaagtattgacaaggatgtggaacaactgaaactctcattgtggtaagagtaaattaatactgtctttaaattaataaaaatgagcagtgggttagcatggtcg

SEQ ID NO: 286012 - DNA, 201 bp, Homo sapiens
agtttctccattattaaaagacaataatgaaggacctaattcaccgggttggagtgaggtttaagtcagacacacacacacacacacacgcatatatatatatacacacataaatatatataatgtttcataataaagagctttgacaaatcaataagaaaaagacaaacagcctagttttcttaatgggcaaaagattta

SEQ ID NO: 286013 - DNA, 201 bp, Homo sapiens
tgccacttctccagtttctccattattaaaagacaataatgaaggacctaattcaccgggttggagtgaggtttaagtcagacacacacacacacacacacgcatatatatatatacacacataaatatatataatgtttcataataaagagctttgacaaatcaataagaaaaagacaaacagcctagttttcttaatgg

SEQ ID NO: 286014 - DNA, 201 bp, Homo sapiens
taggcacaaagaagagaaacaggatacatcagtgcatgttgcaggagggttggatttgttgaaagattaatcataaagtatgtggacaaaagtgaattaartaagtataagatacaatgtcactacctatttattcatcttttagctaaatatatgccttcccatgtctgcggacttttcctctcttattttgaccagcgc

SEQ ID NO: 286015 - DNA, 201 bp, Homo sapiens
tctatagcttctgacaatgaaccatggcatggctgcccagatacttaacattgcaatgagggcatccacatgacagtataggcagcaaagcacaacccctyaataccttagaaaagcaactcacagttggtttcccagtaacatcatttgactgtaggtgctgcttagaaagagtcaataagctccagatcctgaattcaa

SEQ ID NO: 286016 - DNA, 201 bp, Homo sapiens
tctccaaaggggatttagaagggttaattctttctgcgcagggctgacagcacatgacacaactatccaaccatgccttcttccagatctcagtagcagtyccagtcacagtgagaaccccaaactccctgccgtgttttcacactctcctggctacccaagagatgcatgattttcatcagagaaagatactgtgtatcc

SEQ ID NO: 286017 - DNA, 201 bp, Homo sapiens
ctaggttctagttttgcaccatcatctactatttatgcaaataattcagtttccaattcaacgaatttcagtggttcacaacaggtatagtagctttttgygtttatgctttttatatgtatttcagatttttgaagagtactctcaggttgccatatatgtgcatactctcccagaataaggtttctttatttaaaaatt

SEQ ID NO: 286018 - DNA, 201 bp, Homo sapiens
cttggcttccataggaagctcttctaatgcattctgtcatgtgattaatttgtcaaaattccatacctgtcagaaataatgtaatcttttcaagaacatasacagtcttattacatgaagtgatgtaatcctatactatttatctcctctgtattcctcattctcttattttctattattcttcaaatagaagagctaaag

SEQ ID NO: 286019 - DNA, 201 bp, Homo sapiens
aagtttcttttttgacgggtgactggcagatgagttacttgtcattttgctataatttatttttttcttttaataaggctctttgggttaaaaaaaaaaaaaggaaaaacaagtactccatttctaagagtttcctttttatttatgttgtactttggggtgtaaataaattttacatagccacgggaaatagagtatcca

SEQ ID NO: 286020 - DNA, 201 bp, Homo sapiens
  misc_feature (1)...(201): n = A,T,C or G
attttacatcagattcgaccagttacctttatcctttttggaaaatgtattatacaaactaccacagtattttgcctattaatcagggaagctaaaaaacnttttataaacgttgaatcaaaactctcactgctgtgagggaattaaatttcaagcaatatactccttttatagggtgagaaactgaagtatggagaaatt

SEQ ID NO: 286021 - DNA, 201 bp, Homo sapiens
ctggcggcctcccccgaggcccccggcggcctcacgagcccgcagtagccggtggcgacgtcgcccccgccccacctccctgcgcaagtgcgaggctgccsgcagcgcggcgcacgctccggccgttcccggcttccgcgcaaaacttccatcctgtccacgtgaagttgtcgctgccttagagagggggaaagagctgcg

SEQ ID NO: 286022 - DNA, 201 bp, Homo sapiens
tgttttcagtatgttgaaagtgatgatgacttgggggaatcagcagatctctacattacctaattcttttctcttacatttgaatgcaaatgtatattcaygtgcggttatgactcaagtcattcttgctaaatttaatgacgttgtaggtgaatcacattcagatttccttttgcaggttttccagtaatctaaaacaat

SEQ ID NO: 286023 - DNA, 201 bp, Homo sapiens
  misc_feature (1)...(201): n = A,T,C or G
gaatcacattcagatttccttttgcaggttttccagtaatctaaaacaatgcttctagtaggtaacttaagcatgcaaacctcaataaacctgtcaagaanggcaattctactgttttattttgtttttttttttgtttgtttgtttttgcattaactttagttgataagatgatggtactgttatttttcttagttgact

SEQ ID NO: 286024 - DNA, 201 bp, Homo sapiens
gcagagattgtgacactgaacatcccctccttgagactgggaacagtgagaagggcagtgactattacaaggtgggactacctcaataacaacctcagggrgttttggtataaacccagtagaattgcagctgtgaatccaggcttaggttatatgtatgtatacgtgaatgtagaaatgtgtttatttcttaccactggg

SEQ ID NO: 286025 - DNA, 201 bp, Homo sapiens
ataaatgaatgtatatataatataaatgcattaactcatttaattctcatgacgatttgatgaggtgagctctatctcccagtttctagatgagggattgmccaacttgtgggtaggggagcagaatcttaccccgggaagtgtggcttgagagttggcaattgtaactgctggacagatttgttagaaaaataccttatt

SEQ ID NO: 286026 - DNA, 201 bp, Homo sapiens
  misc_feature (1)...(201): n = A,T,C or G
tggctgtaacccttggactccgcatggaagaaatgatttttaatcttgctgatactcatttgttttttaatgatttagaggtaagaattttacaaggtacnaatagttgtatccaacaccagacctcctagatggtttctgtatctgtagataacctcgagaaaacagaaagataaaaattcagctcaagagaagcataaa

SEQ ID NO: 286027 - DNA, 201 bp, Homo sapiens
aaaagagaataattggaatgttcctagcataaagaaaatacaaatatttaagatgatggatatcccaaataccctgatttgattatatgaatgtatcaaaytatcacacgtaccctcaaaatgtgtccttctgttacgtaccaactttaaaaagaaaataacatcatataacaactatagcccttagatgcaaaaagacct

SEQ ID NO: 286028 - DNA, 201 bp, Homo sapiens
ttgactgccagatactttcaagcccaataatgaatataaatagtagctttcaaaaaacctttgtttagtatggtgtattttcaaatttaatgatttttttwaaaaattaattttgaatgctaagcactatgtatatagtcagaagctgtaagtatgagtaaaatactttgagggggactaaggaggcccaagatgctaaac

SEQ ID NO: 286029 - DNA, 201 bp, Homo sapiens
gaagacttgccatcaaatgaacttatgacaaatgacccaaatgattctcacaaagtagagcttgttgtaacttttagcatgagaagtatgaaccccattaycattttttaaacattttgagttaaatggaccgttttgcaaagtccatgttctatctttatagacagctcaaaaatagctcagcatctagtttgtaggttg

SEQ ID NO: 286030 - DNA, 201 bp, Homo sapiens
attatgcttttgtggctgactgaattcccttataattccctgttgggaaacaaagatttttttttaaattgaagaagtggtcttgttaaccaggggcaccrtacttaacttgagagaaaaagattaggaatgacaggaatgacagcatactcctaatatctaacagcctgccatacatgtgaaagcaggacacatagcagg

SEQ ID NO: 286031 - DNA, 201 bp, Homo sapiens
agaatgctacctttctgttgtcacatttttgaatagaatgctcatagcacctacagtgtagcttattctaagtaaaccatgcataattactggatgtgctrtagtatttttagaaaattgcagacataataactgcattaatgtttgtggtattaagaacaaggttatatatgctctagaaatccttatttacagcttctg

SEQ ID NO: 286032 - DNA, 201 bp, Homo sapiens
tccctcctgccaccctccacccttccaagaggccccagtgcctgtcgttccccactatgtgtttgtgcattctcttccacccagcaatcccattactggaygtatacccaaagaaatataaatcattctgttataaagacacatgaacaggtagtttattgcagcactattcacaatagcaaagacatggaattagcctaa

SEQ ID NO: 286033 - DNA, 201 bp, Homo sapiens
atgtagctaaaattaagctctactttttctaaatatttacatttccaatgagagaatctccaacataagaatagttggaaaaatgtatatataagcttgtrttttttttttttttttttttggtcatcgaatgatttaatccactcttaaaattctagaaaaagttatatcaaacaaatacttgtcttgcttgggtagtaa

SEQ ID NO: 286034 - DNA, 201 bp, Homo sapiens
ataatttccaagtgtactatgcgatttttaattctagaaggttttctattaaaatgaaaatgaaatgtatgaaatctgtctcttattatttcagtcttctrtaggttttcgagtgtaaattagggagaaatgcagaataatttaaaattaaagttacttatagagaaagctgaatagaaaaataatgtgtatatagcattt

SEQ ID NO: 286035 - DNA, 201 bp, Homo sapiens
taaaggtacagagattctgcttattatcttacatttaatcatcacatttcagttgtcttagcaacctacacagtattctcatttggttttcaataagccartggatgaatgggttctttgttcacgtgtttatgaatttctatcacctgatacttgaagtctttcaggcatgcttactgtgccaaataactgtctttatat

SEQ ID NO: 286036 - DNA, 201 bp, Homo sapiens; identical to SEQ ID NO: 58348

SEQ ID NO: 286037 - DNA, 201 bp, Homo sapiens
tcatttgactgtaggtgctgcttagaaagagtcaataagctccagatcctgaattcaaagccttttcctgacactggaagaagagcagtgtgaggcttcarattgtttccaaaacacctacatttccagcatcttttctctttccattccatttccaatcagctgcattccatctagcaaattcttgatattagggcatac

SEQ ID NO: 286038 - DNA, 201 bp, Homo sapiens
aatttttgtaaaactttcagagctgttttttttttcgtattacaaatttactacattggatctactacactgtagattcttcagacagaaaatacatatgktcatgctaaataaaacaaaaataatctctagtttcagcacccacagtcttctagtcatagagagcaattccagttgttggcttgaatagtaaagcttttt

SEQ ID NO: 286039 - DNA, 201 bp, Homo sapiens
gcaaaaccagtttagatagagataatatatagatatatagtcagattctgaccatgtcctaagtgttcttagtatctattgatgaatagatttcattaatktaatgagatgatagtatactaaaacttgtctaagtaaatggttggcgtccttgaaacttcctattgaatacaacatgagtaaaatgttcgtgtaaagtaa

SEQ ID NO: 286040 - DNA, 201 bp, Homo sapiens
gttgtggtgtgcccataggtgacagtaagctaaaatgctaactccatggcataactgcatttgctacatgcagacagatagagttgatgtttgtcatggtrtgagcccagggaatcagacaagtacttctctaaactcttcccactcaacttaatacaaggtaagcaggtcctgcagtagttcaaggacctgctgcacact

SEQ ID NO: 286041 - DNA, 201 bp, Homo sapiens
tcatcacacacttttctgaagtgtaattttgaccatgctgctttgttgcttctacctctccatttgctcctcattgcctgtaggctaaaattcagacttcrtgggatagcactgaagatgctctatgcttttcacgctttctccctgacctctatcatgcagaaatatttaactgcttgcaggaacgtgaacacacgatgc

SEQ ID NO: 286042 - DNA, 201 bp, Homo sapiens
agcttcttttgaggcaccagcctttgctggtgagaggtgaatacctgaataaaaattaagattctgttaggtaaaaggaagtgagacagttaatgcatagsagacaacaaggagcactacagaagcattagtaagcttaggagggagaaaggttgaggagaagttattaacattgtcatataccaaatgggtcaagggaag

SEQ ID NO: 286043 - DNA, 201 bp, Homo sapiens
ccactgcctggctttcaaaagctctagctactctaataatcagacttttttctattgtataacacagtctccatttcagctaacccattcttcccacttgyccataacaagctctgttccttccagcttgtgtgccggtgctcacatttatccttttgcctgaatacccttgtcctctcttcccatctgtctgaattctac

SEQ ID NO: 286044 - DNA, 201 bp, Homo sapiens
tatactctgatttgtatattactgcatgttcgtctttttttttcaaggttttatttttgtttgctaaggtcagggacttatcacagggccctctcatcacrtttcacattctgatccctcgtggcaggtgctaacttccttgctctcaaactgaatgggttgagtaacctcataaagatacagaatgtcttggcagagaaa

SEQ ID NO: 286045 - DNA, 201 bp, Homo sapiens
ttagtccgaggcctgaggtcaccctggcagatgggtcacttgcactgcaagcactcatgctggcctcagggacagggatgaggtcactggcacatttcaaraacagcttcctttctttatgcatacaccactttcctggtccttgttaagggtctccttcctcttgcggttcccatctctgcagctgaccccagttctgac

SEQ ID NO: 286046 - DNA, 201 bp, Homo sapiens
tcttctttgtcttcagcatcctcaattcctcctacttcattttgcagaaatttagctgtctttgttatgccctcaccatccaatgtatgcccagataactrtgcctttttcatccaaagatccactaaaagatgacagtgtttttattttttatgagacacatcacctgcagaatgatttttttttctattacagttgaca

SEQ ID NO: 286047 - DNA, 201 bp, Homo sapiens
tacggggtggcttaaatgagataatgtacgtatataaaaatgacactacacggtgaaaactatcatctacctcctaggttagagaaaattcataaaaatayaccttctttctccaaaatgagaaataactaaaggcagatgttttcagacctgcaaggtcaatgtttactcctgcaccatgtgaagtggcactgcagtggc

SEQ ID NO: 286048 - DNA, 201 bp, Homo sapiens
agtagaagtttatttgattgagccctgagccagctgccaatcaaaactgaaagtaaataaatcttgtttactaacatagaactgttctctccctctctgcycctgattccccctcctcggactctacttcagctttagcttctttaaggaggaaagaatggagctgggttctctctgtcctgaaagaggtccacagttctt

SEQ ID NO: 286049 - DNA, 201 bp, Homo sapiens
tatcaataccatacatttttaatctaaatgtgtgtatttatgtcagcaggactaatagaaagaaggtaattttgcttttttgatgaatcaaataattttayagcagaataaacatttattttagtaaagacaatattctttctgttggcgaaatagttccttatattctttaatctgaaacaaaatcatttttattttttc

SEQ ID NO: 286050 - DNA, 201 bp, Homo sapiens
acctgataacttgcagtgattccttttgttttcaggggagggtgaagaaagctatataaattgtgctttagggatttggtttatcttggatcattaatgtrtcatgtgctatgaagctatgatactctaaagttattccacagtaaggacacagaggaaatagcccaagtcagggggaaaaagtgaaggaactgcaggaaa

SEQ ID NO: 286051 - DNA, 201 bp, Homo sapiens
gagagtggttttggtatatattatataaaaggaatgattacagaatttgcaagactcaaaaaatgcataatgtttttactggtagcttatagtaagtttgwgtgtgcatgtgtatgtatatagtgtgtacataaatatcatacatatgcatgtgaaaataaagccaaatcaaagacagtgacatatctcgaactcttccct

SEQ ID NO: 286052 - DNA, 201 bp, Homo sapiens
agagtggttttggtatatattatataaaaggaatgattacagaatttgcaagactcaaaaaatgcataatgtttttactggtagcttatagtaagtttgtktgtgcatgtgtatgtatatagtgtgtacataaatatcatacatatgcatgtgaaaataaagccaaatcaaagacagtgacatatctcgaactcttcccta

SEQ ID NO: 286053 - DNA, 201 bp, Homo sapiens
ggtaaggaactttactggtgggctctatgtatactaaggaaatctttcttttaattggtaaaattccactgattggtaaaattccactgctctcagctatstttcaatcttgaccacttagtgtaattaaaaagacagagcagaacaacattgagcctccttatagttctccagcccagtttgccattcagtccgtgaaaa

SEQ ID NO: 286054 - DNA, 201 bp, Homo sapiens
ttccctgttgggaaacaaagatttttttttaaattgaagaagtggtcttgttaaccaggggcaccgtacttaacttgagagaaaaagattaggaatgacakgaatgacagcatactcctaatatctaacagcctgccatacatgtgaaagcaggacacatagcagggaagcataacgttgagttgactcaaaacaccaaat

SEQ ID NO: 286055 - DNA, 201 bp, Homo sapiens
ttcccagttacaaatgatattttgccaaaatgcttactaagtcctggctctcacagagtgtgtgatgtggaatctccacagcttgaaaaacaaatgaccarccctcccagtgccgtggggttgcattccagtggagtgctcaactacagtttttatcacaccacatgccatgcttgcttgctagcagattcttgcattttg

SEQ ID NO: 286056 - DNA, 201 bp, Homo sapiens
cttgaagtcaggcaaggtgctcattactattcatccagatctgtttcttggacacctcagctgtttttcttttctacggccagggaggagagtcatgtgchtagtccaagaatgtgcatctccatgtctctgaacagttggccatagaattggagctaggtgttctttgtgccattggctttcctctctggcatgcttccc

SEQ ID NO: 286057 - DNA, 201 bp, Homo sapiens
agtcctaggaaactaatgcaacatgctatgttgtaaataaacagtagttctaattggtataaataataattttaagtatattttattattaggtcaggtgrgtaggaaattgcctggtagactaattatcaatgttgtattttctgaaaagttaaaatattcccattcagtaaataatacttgtctaaaagtttctatctg

SEQ ID NO: 286058 - DNA, 201 bp, Homo sapiens
aaaatgcaaaaattagccaggcgtggtggcacgctcctgtagtcccagctacttgggaggctgagtcacaacagtcacttgaacccacgaggcagaggtcrcagtgagctgagattatgccactgcactacaacctgggcgacagagcaggacttcatctcaaagacacaaaacaaacaaaaaaaccgaatgtgtactgca

SEQ ID NO: 286059 - DNA, 201 bp, Homo sapiens
ctagtgggccacttttggtaagcagaactggcactgtgggaggagccaaacgctgggttaaggcacccgatgctgatgctcattagacaccccactcttgktaccaaaatctgtattagggttctctatagggacagaactaataggagatatatatatgtatatatatatatatatataaagggaagtttattaaatatt

SEQ ID NO: 286060 - DNA, 201 bp, Homo sapiens
actggcccagttagggatcatcctctttttgtcctttcttggttatgatcaggatgaaaataggttatctagaactattttgaaaattcaggatatcatcstgaccatttctagacatgatgaatctttctttctcctaatacctatctcaggctagactgtttggtacatctgctgggtggcagcctggtcaaaagatgg

SEQ ID NO: 286061 - DNA, 201 bp, Homo sapiens
gttcaccccatggctcctgtcttgagtcttcaccacctctcactgacagattgaatggttcaaagtagcatttggggaacacctactcagggctggggatrtaatgatgtaccagatcaatgccatctctgccttcatggaacttctactatccgttttgttgcattaggcttttcccaactttcagccctcacctcatcc

SEQ ID NO: 286062 - DNA, 201 bp, Homo sapiens
ttatatgtactcgaaataactacataggacacaatgtatatgctttagtccactgaggaaatataaagaaaaaggatattcttggtctcttgctctttctkttttttttttgttttgtttttgttttttttgtttttttttttaagagacagtcttacttcattgcccaggctggagtgcaatggctgttcacagacgcag

SEQ ID NO: 286063 - DNA, 201 bp, Homo sapiens
cacagtaattctgtatcgttttctatgtttacaaagagtttggcatgcaataatctgtaatataatctccatttttggaaaaaaatatttttctatctgcytatccatgttttccttaagcaatagtgcatttaatctcatttacattatattttatattttctacacagttcagtgaagaagtagtcttaccatccataa

SEQ ID NO: 286064 - DNA, 201 bp, Homo sapiens
cattattttacatgtatctgctttgtaaaatgcacgggtattattgccttacatttgtatattcattcattaagtctttaacaaatatttgttgagtgctmttctgctccaggcactgtgctaagccttgtacataaactgatggaaaaatggacatacagagtgtatgaactagtaggaagacacgcactcaagaggtaa

SEQ ID NO: 286065 - DNA, 201 bp, Homo sapiens
aaggtgttaaggcctgcctaggactgtggctaggttagaattactgaatcagaagctctgtgggcatgaggttgtgaggcagtgggaaatctggctgagargcactgagactagactgaaaaggactttgaagccaagctgagatgttttcgtgttcttgggtggccaccatgatgctcattactgcacaaaagacagaga

SEQ ID NO: 286066 - DNA, 201 bp, Homo sapiens
aaatgatgttttaggaaaattaaccagatggtagggagattactgaaggtgggaaattgagagtacgagagatggcttaggggatcttgaaggagtttgcrcatgaactcagaaaggcttaaaccaagtggccgggcacggtggctcatgcctgtaatcccagcactttgggaggccgaggtgggcggatcacctgaggtc

SEQ ID NO: 286067 - DNA, 201 bp, Homo sapiens
ttaggaaaattaaccagatggtagggagattactgaaggtgggaaattgagagtacgagagatggcttaggggatcttgaaggagtttgcgcatgaactcmgaaaggcttaaaccaagtggccgggcacggtggctcatgcctgtaatcccagcactttgggaggccgaggtgggcggatcacctgaggtcaggtgaccag

SEQ ID NO: 286068 - DNA, 201 bp, Homo sapiens
tgctgccaagccttcacatatgatcatcccgcctttaaactctctcccctgaacttgggtggaccacacatccctgtgtgtgctgctgcttcattgagacratggttgtgatctctctccatgcctcattccttccccttctctctcccatccctccttctcctaaccacacagcacaacatgcccttctggaggatatcc

SEQ ID NO: 286069 - DNA, 201 bp, Homo sapiens
gtataaagaagatttgcagtagccattgttataaaaaaatagtaggtgatctcctagaactcaatacttggattattgagacatactcagttttcttttarcaaaatatctctcattgactaggacttaaggctatactgctagcattgaaaatttattttattttgtattgaaacaattaagaagataaaggggaaaaat

SEQ ID NO: 286070 - DNA, 201 bp, Homo sapiens
atttattttattttgtattgaaacaattaagaagataaaggggaaaaataaacacttctaagattaatgaatatgcctctcgttatctttggaagaaactrtgtggcctgttttccttggatattagcatctccaacaaatagaagagcctatgttcataaatatgattgggtcaaatttgacaatagagtcagactaaag

SEQ ID NO: 286071 - DNA, 201 bp, Homo sapiens
  misc_feature (1)...(201): n = A,T,C or G
tgcctaaactgttgtggttgacacacgtggacagtagattataactagattctgagccccagatgcccacagctaacacttatgtaatgctcattgtgtgncatgggctaagtgctataaatgaatgtatatataatataaatgcattaactcatttaattctcatgacgatttgatgaggtgagctctatctcccagttt

SEQ ID NO: 286072 - DNA, 201 bp, Homo sapiens
gcctaaactgttgtggttgacacacgtggacagtagattataactagattctgagccccagatgcccacagctaacacttatgtaatgctcattgtgtgcsatgggctaagtgctataaatgaatgtatatataatataaatgcattaactcatttaattctcatgacgatttgatgaggtgagctctatctcccagtttc

SEQ ID NO: 286073 - DNA, 201 bp, Homo sapiens
ttctacaccagggtttttagggagattctaaatagagcacactctcatttgtttcaattaaatgccttgcccacttaatctccttttcgtattgccatgcytgatacagagggctccaggactagtttactaggtggtaggacctttagagattatgctgtccaaatcctttacgttagtttaacagatgcaaaaatggag

SEQ ID NO: 286074 - DNA, 201 bp, Homo sapiens
gcttaatttttggatgatgcagacacattccgttgcacaaaattactctgcaaaagtaagtcaggaatcactcatgataatttcaggttatgcatacttaytttagaatgttgaatcaatttgctaatcttcaaaggagtaaattttacaccaattgcgtctggtttaataggcttaatattttcataatgccagagtaat

SEQ ID NO: 286075 - DNA, 201 bp, Homo sapiens
aaaaagaagggtatctctatgatttgctgacaattaacaagtcttaaacagacaatcttctcttaatatgaggttttatgtgatgttgtgagggagcctgrtattcacaccagtggcctcagttatcacacagcagcgaaagtgaggaggtcaattttacttatttggcaatttaacgtgaaagcactgggttgtgttttg

SEQ ID NO: 286076 - DNA, 201 bp, Homo sapiens
ggagagaatatgcagggagggggttttctagaggaaaaatctgcatgttcaaagcctgtaggggcaggagcagactgtggctagaaggcaggagcattggyggttacctgctgttaaggatttctaataagctgaatgtggggaggggtgaggaaaagggaggaattagtaggcttttggttaagcacttgggtggatctt

SEQ ID NO: 286077 - DNA, 201 bp, Homo sapiens
tcttggcaaacattaacatttggagaggttcaagtcttggtggtacttgtgtgtgtgtgagagagaggcgcgtgcacacacacacacacacacacacacasagagataaagcaagagaatatgagatctaccttaggcaaatcacttaaccttttgaattgcagattcctatctcatttgaaaaacacacctaaaaatgcc

SEQ ID NO: 286078 - DNA, 201 bp, Homo sapiens
acaatggtctaagggtgggtggctttcttttaattttagttttgaataatactttagctggacataacagtctagattacaaattgttttcttctcggcasttcaaagatgttatcctattgtcttccgcctaggacacaataaacaaaaatatttttgaatgaatgacacgttgttgctaataagaatctgctgtcagtc

SEQ ID NO: 286079 - DNA, 201 bp, Homo sapiens
aagaaactataatagctatttctgtattgttataaatgctgaagagtcctgctctcagattacaagatacgcctcaaggaagaagtagtacaaacacaagsttcttaatataggtccataagaagtggcatgatgtaatatctggatatctgggtggtcactcttatttctcacacaataagaatgaactttttgggatta

SEQ ID NO: 286080 - DNA, 201 bp, Homo sapiens
ggtttcaccgtgttagccaggatggtctcaatctcctgaccttgtgatccgcccgcttttacttgagccactgtgcccagcctcaaaaactattttgataraggtggtgtaatcttctaaagccagctggcacatttataggatgccaggctagcccatcagatgaagtgtccattgtggcagccacagatccacatcaga

SEQ ID NO: 286081 - DNA, 201 bp, Homo sapiens
ggcagaattagttcttttctctgtgtaataccatagcactttttttggactgttaatataacagcagattgtgttggggctcattgtatgtgtctgtcttytagagagactatgaactcacagaggggagagatcatatctttttccctccgtaacctcaacacctggagatgttaatggaaattaagtgactgcactatt

SEQ ID NO: 286082 - DNA, 201 bp, Homo sapiens
tagactcttaacccttgaatgttggcctcactccttatgaagactgttcccatgtgcttctgtttagctcaacagattcaataggaaagggtttaccagcygttacaagagggagagagctaagcctattttctgtataaatgtctcaacttcaaatttcactgtcttcacgacaaatttcaaagtgtttctctcacagaa

SEQ ID NO: 286083 - DNA, 201 bp, Homo sapiens
aataaaatgaaatataatggtgcttggtgtttctcaaaaggcctcatatttccccataaataacctgggtctaacatacttgacatctgctgttgtagtartgtacaatatatactcacatataaattggcatggtacaaatcacataagaactaataggaattatttatagacgtgaatggtgacgtgatgtcaaataat

SEQ ID NO: 286084 - DNA, 201 bp, Homo sapiens
gaaagatatgacagcacaattgattgctctgtaattataaattaccccctctgctaattacaatgaagttttttgaagattttttaaatgaagcagtacayttctttatgggaagatcatgtcacattttctaactgattttgtaaatcccatttaaaaaatctcctctactattagaaatgacaaatatcaaaactacaa

SEQ ID NO: 286085 - DNA, 201 bp, Homo sapiens
aattgattgctctgtaattataaattaccccctctgctaattacaatgaagttttttgaagattttttaaatgaagcagtacatttctttatgggaagatyatgtcacattttctaactgattttgtaaatcccatttaaaaaatctcctctactattagaaatgacaaatatcaaaactacaattttatactgagattta

SEQ ID NO: 286086 - DNA, 201 bp, Homo sapiens
gaagcagtacatttctttatgggaagatcatgtcacattttctaactgattttgtaaatcccatttaaaaaatctcctctactattagaaatgacaaataycaaaactacaattttatactgagatttatatatatatatatatatacacacacacacacacacacatacttttttgggggggataagaagcattaaaata

SEQ ID NO: 286087 - DNA, 201 bp, Homo sapiens
aagtacattgactttgtgagaatttttatgtaaataaacaaattctggttttcatttctaatgctatttgattattttgtataaccaaacgggtttttttytttttttttttttgcaccagaaccagaagtagtgtaatgattaatatatcccgcctcatacttattttaaagttgaaattttaggtttttaattcaaaga

SEQ ID NO: 286088 - DNA, 201 bp, Homo sapiens
cagttgctcctacagatttgctactactcagtactctctacctcctaagatactttctcacaagctttaatcatttcagagttttagatatctatgggacrtacagaagtcaattggattctgaaactgaattaaagtctgaaacttaggatgtggcctagttggaggtataggtttatatgtgagtcatcacagagaggg

SEQ ID NO: 286089 - DNA, 201 bp, Homo sapiens
cagatatatagagatatatgttgttaaatttaaaattgctttaaaattttgtgtgcattctatcaatttgtttttaaagttaaagaatttctaattttttwaaaagttatggtgatactattgggcacattaggagagtttttatatatacttttaaaatgttttttaaagtttaggcatatatatgtacttatacagaca

SEQ ID NO: 286090 - DNA, 201 bp, Homo sapiens
tcaaattattttatgtacttttgaaagtaaatggttaattcaaactcttgattgttaatctgtcaattgcttgatgacatacctccctcagtaaaatagtrtattaactgtttattgcagactgtgtttagtgcagactatggatatttttgttgatctgtagaattcctgactagctgttcacataccccacttttacca

SEQ ID NO: 286091 - DNA, 201 bp, Homo sapiens
gtgatccgcccgcttttacttgagccactgtgcccagcctcaaaaactattttgatagaggtggtgtaatcttctaaagccagctggcacatttataggakgccaggctagcccatcagatgaagtgtccattgtggcagccacagatccacatcagatgggaagagtgtgatcagtgctgcatgcatgtttaatcaggta

SEQ ID NO: 286092 - DNA, 201 bp, Homo sapiens
ctgtttgcatgcactttcatgtataaatctgcatctggaaagactgatatttctctaaggcaggggtcagcagatgttttttgtaaggggcaaggtagtawatgttttggaccatagagccatggctgcagttacccagctctactgttgcaatgaaaaagcagccatccacgagatgcaaatgaaaggtgtagctgttag

SEQ ID NO: 286093 - DNA, 201 bp, Homo sapiens
ctgtgagtgcttctccgaagactgatgcaactctgaaaggctttttggctagaaacacagctgtttaggcaataactgtttaagtcttagactctgtaggsctcataatcaaactaaagccaactcagaacatgttggcttactgtcagttactatactcaaagttgtatctttggttcctttacatatcacgcttacaga

SEQ ID NO: 286094 - DNA, 201 bp, Homo sapiens
tctgccccagtggggtcactgcctccgaccagggttatatgggtaataaggagacggcaaatcagtggacttacttataattcagtgggaactcaacagtkccccggaagtactagctctctgcgtggtcaccaaacagaagccttcctggagactctggccatgtcgcccaattcttgtggcttctcctttcccttagtt

SEQ ID NO: 286095 - DNA, 201 bp, Homo sapiens
ctgccccagtggggtcactgcctccgaccagggttatatgggtaataaggagacggcaaatcagtggacttacttataattcagtgggaactcaacagtgycccggaagtactagctctctgcgtggtcaccaaacagaagccttcctggagactctggccatgtcgcccaattcttgtggcttctcctttcccttagttg

SEQ ID NO: 286096 - DNA, 201 bp, Homo sapiens
tttttttttttttttttgtattttagcagagacggggtttcaccatgttggccaggatggtctcaatctcctgacctcgtgatccgcccgcgttggcctcscagagtgctgggattacaggcatgaaccaccgcgcccagcctgaggctttcttatttgcagttgtttagtcagttcagtttctgctgctttctcttggat

SEQ ID NO: 286097 - DNA, 201 bp, Homo sapiens
ataaagaatattttatgatccagttgtctttggttgaaaatttgcttttactgctgaaatttaaaaatcaagccagctacatatagctacaaatagctacrtatagctctagctaataaataatactctttagctagttttaggaatgagaagtcatcaaagtgctaattgaccatttgatatagcttttgctatggtaca

SEQ ID NO: 286098 - DNA, 201 bp, Homo sapiens
atagagttattaagcttttgaaacacttcaaatacgtcagcctatgcatattaaaattttaatgcagcaaatttactaatatttgcaaaaccagtttagayagagataatatatagatatatagtcagattctgaccatgtcctaagtgttcttagtatctattgatgaatagatttcattaatttaatgagatgatagta

SEQ ID NO: 286099 - DNA, 201 bp, Homo sapiens
atggcaggctgggtagttacttgcttcaccctatgcatctggccgaaaacagtttctggtccttggctaactacagctgttgggtaaatctttcaccaacwcagaaagtcaccccaacatctaaaatcccaatctgcgaaattctccaggttctgaatacatgctgtgctgacatcggcagcgtaaatgtgtgttgtgtgg

SEQ ID NO: 286100 - DNA, 201 bp, Homo sapiens
agcacttgcgaaggttctactctatagtttaggaggtgctttccccattgagaatatttacagtgcaactaaaataggtaaggaaattattttaaactctstatggaatgtgtccacatctgtgtgtctctgcctagttccctttttcagcaatttcacttagtacatgaaacaaatttggataaagttcaaattacaaag

SEQ ID NO: 286101 - DNA, 201 bp, Homo sapiens
aagtcaccccaacatctaaaatcccaatctgcgaaattctccaggttctgaatacatgctgtgctgacatcggcagcgtaaatgtgtgttgtgtggtctgmgtctcagtttgtggatacctccagcgggaacctggggcttaaagttgaatagtgtctgtagcagagagagtctttgtgcttgatttaaactacacagaat

SEQ ID NO: 286102 - DNA, 201 bp, Homo sapiens
attgcttcttttttttttttgtcttctcagaaatgggcagatggattatgtactaaaaatataaacccttaagaatcaggtttatcctgtaaagaaggtgrtgtctctgggcatcacttggctcttttgtaaattgattgtcacttcatttttatcgttatcagtaaaccttattaggtgctgaaatcagtgctcggggtg

SEQ ID NO: 286103 - DNA, 201 bp, Homo sapiens
  misc_feature (1)...(201): n = A,T,C or G
ccaactaccacttaaggggaaaaaaaaacttaccattcaacaagtgaaatagttagtgtggaatggatagcatctttgaaatttgattttcagcagtctcnccaagtgactgaatacattttttcaaactatttacttttgtatcatgtcttctcatggtcaaattcaggatgaattttatgacaggatttggtctaatgc

SEQ ID NO: 286104 - DNA, 201 bp, Homo sapiens
taaaaattaaaattgagagtaatgataattaaattgttaatctgtctgttaacttagtcaactataagaaaactgattttttagaaaggggtaaagtaatmaaaatagtctattcattagattctcccttaattttaaaggaaaagtctcttataatacattttgaggcatattttcctattttcttctgcacactgctat

SEQ ID NO: 286105 - DNA, 201 bp, Homo sapiens
ttgaggctctacacaaacaggcccttagttgcacctttgacattgtctgttatctgtctcctcctcagttaattcaccctagccaaaatagcaggatgtgrtctttgaatgtgccagacgtatgcacctgcctcagggcttttgcacttactttcctctatgtctaaaacgttcatctcttaagtgtttgtataactcact

SEQ ID NO: 286106 - DNA, 201 bp, Homo sapiens
tacatctttatatacactttcattctatctttaaattgtcctaaacataagtgaaaataattagtaacattattcattgggttcatttaatttgttcaackgatatttattgaggatcctactaaatgccaggcactgttcctgatgaacaaatgacagactctgttcttgccctcatgttgcttgcaatcaagttgttaa

SEQ ID NO: 286107 - DNA, 201 bp, Homo sapiens
atggggtgctggggagaatctctgatttcctgatttgctctagtgctctgtacatgatgcttttgtaaaatcaaataagtagattttctagttaaaatcartggtagataatatgttttaactttaaaataaatatccccttgggaaatctgagttaatttttatcattcagatgtcatcatttccttcttgcggtgtatt

SEQ ID NO: 286108 - DNA, 201 bp, Homo sapiens
gtaagtgtatgaaatgctttgagtgcaaataatataggaatgtgggggctgtaataaaccacagggttaacccctaatcagtgggctacatctcattgctrtcataggcaaacagtgccttgccatttgacttagaagaagcagctgcaaatccagatttttatgagagctccagcaattcataaatatcgatttccaatt

SEQ ID NO: 286109 - DNA, 201 bp, Homo sapiens
tctggggaaatgggttggtgagggcctccttctgggactatctgtccacctgatcagtgatatagacactgtgccgcggagaggagccacatctcccagcsagcctgccagcagagtaattggctcagggttacaagttgtgacaagtggtttttggatcctaatctgaaatatgtcggtttaacatgacctggcattgtt

SEQ ID NO: 286110 - DNA, 201 bp, Homo sapiens
taataaattttagtttttttgttttgttactcttttctgtctccatcaattagtatataagtgttatgagggtatagattttgtagatttttatttcagtkttgtatacttaaccacctaggacagtccttgacacatattatgcacttaataaacatttgttgaattcatgtatgaataaatgaatgaaagaatggcatt

SEQ ID NO: 286111 - DNA, 201 bp, Homo sapiens
tcttgacactacaagttttcaaatagacaaaccaggctgttttattgtctgtgttgtagaagtgattgtagtaataaaatttatgaaggatgcactgtagrccaacctttggatacttttttttgtgtgatcttatttaattcacacattagccttccagaggatattattatctccaatattgagactaaggtcccatga

SEQ ID NO: 286112 - DNA, 201 bp, Homo sapiens
tagtgagcgactgggaggacacagggctctcaagcatcacatgggacaaagacttgagaatttcactggctgggtttaggcatgaattaggactgcacagwgtctgaggacaaagctaatgtactcttcagtctacactgacaagtgagagttgtaatagccttgccatattttggaccacaactgtgtgactatggggac

SEQ ID NO: 286113 - DNA, 201 bp, Homo sapiens
tcgtacacaacttcaaccattgcttgctatggagtggaactttaatggctcctattcagggacagacaaatatactctgatttgtatattactgcatgttygtctttttttttcaaggttttatttttgtttgctaaggtcagggacttatcacagggccctctcatcacatttcacattctgatccctcgtggcaggtgc

SEQ ID NO: 286114 - DNA, 201 bp, Homo sapiens
tgtatccttccaagtaagtggtcagtagattcttgctttaaattggcaaacatttatgtctatacatgttttatagatggttggataatacttggatagaytacatatatagataaatatcctgtacaaatttgaaatggagacacccacatgtatcttgatgattcccttgaatatttatgtataccttgagaaaaatat

SEQ ID NO: 286115 - DNA, 201 bp, Homo sapiens
cccagatcagcacatcagtattccccacagctgtatccttccaagtaagtggtcagtagattcttgctttaaattggcaaacatttatgtctatacatgtwttatagatggttggataatacttggatagattacatatatagataaatatcctgtacaaatttgaaatggagacacccacatgtatcttgatgattccct

SEQ ID NO: 286116 - DNA, 201 bp, Homo sapiens
aggggtaaggccattttgcaagtctttcctaaattccatgattgttaaaaggaaaaaattaaagctcactctattgaagtccttagctcaaaatttgacaygtactagatatgtgttaaatagttgaatggaagccattggagaaccattttttttaagaggagggggacttcagaagggcagtgacatagttccagttga

SEQ ID NO: 286117 - DNA, 201 bp, Homo sapiens
cagtttaattaggagaaagtgtttaggcagctgtttccttttagaaaatgaatttctggaaacatgtatttaacatggtaatttcttcaaattggttatgyacactctagtgaaatgtatttatgaagcaacctttggtgcactggtatttttgtgtcttacagtaattacaagtagtggctacagccccagatcagcaca

SEQ ID NO: 286118 - DNA, 201 bp, Homo sapiens
agccacagttctactcagtgatcacgctggctcaagtccagccgtcctgtggaagcaccacagaggcttaactcttggaaagccagaaggtcatgccagcwctgatttttcttaactatcccagtctctcattataatatcttatagaccagtatttattcaaaagtaacatgtatatgaatcacctgataatcttgttaa

SEQ ID NO: 286119 - DNA, 201 bp, Homo sapiens
atttcctcggaagaaaagcactttgaagaaagtatgaacaaatttgaatttctgaattttaaagtatgtgatactttagaggcaatttcttgagtggaatyacaaaaccatattcacttatctaaaatgtagcattaaagttctgaattttagaaccacttctgaacgtcatgatttctgtacaagatagtgtcaattagt

SEQ ID NO: 286120 - DNA, 201 bp, Homo sapiens
ccatcttctacccaaaggtcatgacacccccccaacctcgccatcagcacttacttggaagtctcccttctttcagttcaaggcatcctaaattaaatcaytcatctttcactgaaaacagtccctccactttcttcctgttttgttcaaatcttttcctaactactgagttcaaaacctgaattatttttgtaatgtccc

SEQ ID NO: 286121 - DNA, 201 bp, Homo sapiens
cctcttacccatctagatcataagaaagaatttagaagaatttaaaatggcaaaacttcatgctgtgttaaagaaaaaaaaaaaaacaggagaagatagtrtttattgaatctcttctttatttatttggtacttattcttgaactatagatctcaatctgttttattatcacagaaaccttacaacttaatctttttgaa

SEQ ID NO: 286122 - DNA, 201 bp, Homo sapiens
aatacaatcaattgcatgtacaggtgtcatgtcaccttgagggaactggggatcagagaactgtcacaagaaaatgctgatacctgggcttcctttattgkaagtaataagtctcattattgtgagtaataagtctctgaccgagaagtcttgtgtatcctgccagcatctgtgaaattgtggcaggctaacttattagct

SEQ ID NO: 286123 - DNA, 201 bp, Homo sapiens
gtgtcatgtcaccttgagggaactggggatcagagaactgtcacaagaaaatgctgatacctgggcttcctttattggaagtaataagtctcattattgtragtaataagtctctgaccgagaagtcttgtgtatcctgccagcatctgtgaaattgtggcaggctaacttattagcttgtgaataagataaaactcaaac

SEQ ID NO: 286124 - DNA, 201 bp, Homo sapiens
attttcatattgtgtaagtgtatacacaagatgcaaaagagactacagagttaatcaagaaaataattgatttcccagattataaaaatgtctagactttktattaaaagcaaaagacgggatttttgaaaatgtagggtttttgtgagtttgtttgttaaggatttttctgaaacagaggaggaaaaaattactttgtga

SEQ ID NO: 286125 - DNA, 201 bp, Homo sapiens
atccatcttctacccaaaggtcatgacacccccccaacctcgccatcagcacttacttggaagtctcccttctttcagttcaaggcatcctaaattaaatmattcatctttcactgaaaacagtccctccactttcttcctgttttgttcaaatcttttcctaactactgagttcaaaacctgaattatttttgtaatgtc

SEQ ID NO: 286126 - DNA, 201 bp, Homo sapiens
gtcttttatttgtgcagttccttaattactactatttctacaaaataactgctaatatttattgagtgcctcctgtgtcacttcatactaagtcctcctcrtaatttatttccttctgtcttcctatcactttcatctggcaggtatgctcattttcctgttctcgggcaataatttgccccaggtggcttacctggtgag

SEQ ID NO: 286127 - DNA, 201 bp, Homo sapiens
gtacacagacaagtgaagagtgaacaagataaagatgagttttatttagtgtcacaacagctcagaggagacccacagtgggtggctcctctctgtaggtrtgtcatccgtggagtgttcagttctcagcagagaggaggctctggagagagtagcctgtctctgcagctggttgtccagatggctgcagctctcagcaga

SEQ ID NO: 286128 - DNA, 201 bp, Homo sapiens
tttctctggatttctaaatgtttcattacaggaagggtgttgggtacaagttctttaacatggtcatgaatgatgttgagaaagattcttttcccataacrttttattatggaaattttcaaatgtgtacagaggtagagaaaggaacctaatgaacccttatgcccaccatccatctttaacaattagctacatggtgcc

SEQ ID NO: 286129 - DNA, 201 bp, Homo sapiens
cgataggtataggccctgcacggccttacaaatgagtaagggatacagcccaggagcaatgtccagctgcactgtttttacttacataaactcatgaacartgtgtcagccagctttacacactgtgaccgtgagggatgtattttcccaaacattactgatcctttattgaaatggaaaatttagtttgcatgtggaata

SEQ ID NO: 286130 - DNA, 201 bp, Homo sapiens
ttcttcatggatgtgacagttgtggcttctctttgggctttgttaggcataggctagactgttagacatcttacaaatctcctctccccacagtgccttasacagcaccttgtctgtattaattgctcaaaaacattgttgaatgcatggttaatgaaagttattattggcattattctgtggacttttttctttgacatt

SEQ ID NO: 286131 - DNA, 201 bp, Homo sapiens
taggagtttgtgcatagaagcttgactcttcagtatggtgtctgagtaacagatcacattcttcatggatgtgacagttgtggcttctctttgggctttgktaggcataggctagactgttagacatcttacaaatctcctctccccacagtgccttacacagcaccttgtctgtattaattgctcaaaaacattgttgaa

SEQ ID NO: 286132 - DNA, 201 bp, Homo sapiens
cattattggaggagtgtctgtctgctgataggcaatagtaatgaattttgaaagggaccattaattaaggaatttagagaccacagtgacaattttaaatmtattagaagttatttagtattagaaaacaaacatgtatatttcctccctattttaggagtaactgcataaatgtcttggtaacgacaactcaactgatcc

SEQ ID NO: 286133 - DNA, 201 bp, Homo sapiens
gtcaatagaataatatttgtaatctattaaaaaataactgctgcaatttcaacttttctctgctgcttactgctctaccaggtctatggaaatgcaggacytagcaagtcctcatactcttgttggaggtggtgatactccaggtagctccaaactggaaaaatctaatctcagcagcacatcagttactacaaatgggac

SEQ ID NO: 286134 - DNA, 201 bp, Homo sapiens
aataatatttgtaatctattaaaaaataactgctgcaatttcaacttttctctgctgcttactgctctaccaggtctatggaaatgcaggacctagcaagycctcatactcttgttggaggtggtgatactccaggtagctccaaactggaaaaatctaatctcagcagcacatcagttactacaaatgggacaggaggta

SEQ ID NO: 286135 - DNA, 201 bp, Homo sapiens
caagactcccctaaggagaattgcagtttcggagcactagtaagatgttatacctgagacacaattgtgatttgaaacattgagcttcttgaagaacttaycttgatggaaactgtatatcatgctggctagcgtaccactactcataatattagtcaaagggactgtgattgaagtcagttttaaggaacaatagtggaa

SEQ ID NO: 286136 - DNA, 201 bp, Homo sapiens
ccatattttttatgtacatgaatttatttcatccaatttggtaaatcttattgtcctgttttacagatgggcaaattgtaactaaccctgtaactaaccaragttcacaaagctagtcacatccagctttcaaactcaggcttggctgctatcaaacctgcctcctttctcacttacccacactgctggtttggtaaattc

SEQ ID NO: 286137 - DNA, 201 bp, Homo sapiens
  misc_feature (1)...(201): n = A,T,C or G
attgcagactgtgtttagtgcagactatggatatttttgttgatctgtagaattcctgactagctgttcacataccccacttttaccatgacactattttnaagatcattaattgcatcagatatggagacaatattagtggattttcttcttgagagaatgctcctacaagttactaattaccatgctatgtcttgatat

SEQ ID NO: 286138 - DNA, 201 bp, Homo sapiens
cgttatatgtcagttatggacttttattgatatacttagagaataacttaaagatgaagggacatcagaaataagcatttctggagcctttattttatgcyatattttttatgtacatgaatttatttcatccaatttggtaaatcttattgtcctgttttacagatgggcaaattgtaactaaccctgtaactaaccaaa

SEQ ID NO: 286139 - DNA, 201 bp, Homo sapiens
tctacaaactgtgatatgaaaggagagattgctagggacagacctttaagtggagtggctgccaaactcctgaagaagctcagtgctttaaggaagccttycctatccagccaactagtccagccccactgtcataaggccacagggtaccatgttcttctccttcagagattctgcatgtggtagatgcctcctcagttc

SEQ ID NO: 286140 - DNA, 201 bp, Homo sapiens
tttaataataactgtctctctaaatggaaaagtagccagagttcctggaaatcagcagttagttgctgtggattagctgctgcttaaagtttcctaatctrtaatgtaaatgggtaaaatcaggcaaatcaatttctaagaacttcataactttgtgatatcaaaaacaagcaaacaaatacaataatttttcttaaaatg

SEQ ID NO: 286141 - DNA, 201 bp, Homo sapiens
ttcttatcttggtgcatcgtgccttcttcatcacagaaatctggatgtccatcctgattcttttttcatgctctctcctcgtatttaatcaatcacaattycctagaaaaatgtgtcttcttaaaatttctagaatctattgactttcattgatctctactgttactactccagttcatacccataatctgtcaccttggt

SEQ ID NO: 286142 - DNA, 201 bp, Homo sapiens
gaagtggctatttccatactcaccacagcccagcagctggatgtggtaaggacagggagaacaagcctgcacacctctcttacactcccttccattagatrggatgcagtcatgtgtacacttacatataagagatattctaaagtacagaattatggttgggggcccaggagcacaacttaaatcctatttattgcaaag

SEQ ID NO: 286143 - DNA, 201 bp, Homo sapiens
tcctaattatataattacatctgcagatttatatggaacatagattttcctttgaaattgttagcacttgtaaaattattaaagtgtaaaatatagagatrgcataaatgcaagcataccttagcaaataaagcagaggtcaggccttgtgggctgtctgctctctgttgtcgctatttagctctgctattgttgcacaaa

SEQ ID NO: 286144 - DNA, 201 bp, Homo sapiens
ctggagtgctatttcagatatgagcaagaattgtagacctggaagagacacaggtgtaaaatctaaatcaaatttctacttttacaggtgtggtatagacrtagggagtttaaatcatttgtctatggtcactagattggcttgtagcagagcctgagctcctgacattcagactgttgctttttcctatattgttaaaat

SEQ ID NO: 286145 - DNA, 201 bp, Homo sapiens
cactaatcttccaacagtcttaagttcctgtctccttttctcttcatcttctttacattgtggcctttggctgctggttgtttttgctgtcctcttcatcrgacttcctttggtgggtttgaagtggctatttccatactcaccacagcccagcagctggatgtggtaaggacagggagaacaagcctgcacacctctctt

SEQ ID NO: 286146 - DNA, 201 bp, Homo sapiens
ccactaatcttccaacagtcttaagttcctgtctccttttctcttcatcttctttacattgtggcctttggctgctggttgtttttgctgtcctcttcatyggacttcctttggtgggtttgaagtggctatttccatactcaccacagcccagcagctggatgtggtaaggacagggagaacaagcctgcacacctctct

SEQ ID NO: 286147 - DNA, 201 bp, Homo sapiens
gcttgaacctggggggcggaggttgcagtgagccgtaatcatgccactgcactccagcctgggcaacagagtgagactcggtctcaaaaaaaaaaaaaaaagtctcaaaacatagactattgtttcctaaatgtcttatcacatatgtgcccaatcgacccttccagtagctcattgggaactcctggtaacttatcttta

SEQ ID NO: 286148 - DNA, 201 bp, Homo sapiens
gtgagggcagagactggggccacttttcagtggcactacctgagacctagaagttcagtaaatattcattgacggaatcaatggatattcaattcagaaaygaaggatcaatatggacataaatctgtatctctctgcatttctgatatatactgaaataaaaatgatctattccagacagaagggaatctaaactagata

SEQ ID NO: 286149 - DNA, 201 bp, Homo sapiens
ctgtatctctctgcatttctgatatatactgaaataaaaatgatctattccagacagaagggaatctaaactagatattctgagacaatattcatctctcractctgccttggttttttggtgttgcaggactccttggccctgccaagagggatgcctggctacagttaagggcagagattgaaggtctgacagattcct

SEQ ID NO: 286150 - DNA, 201 bp, Homo sapiens
gcatggtttttaaatatctgtaatcagtaaagtattgcatgttctttttagaaaatcagaaaatactcaatttattaaactaaaaacacagtcactctacmcagagttaaccacactttggcacatttaattttccatatatgtgtgtgtgtgtatctgtatatctgtctatctacatatatatatatttggtcttttttt

SEQ ID NO: 286151 - DNA, 201 bp, Homo sapiens
aagttctgactgacttgtgtgtgcttgggattataaatctcttttttgccatcaggaggtttctattgtataggaatttgttaagataattaataatgaaractcatacttgatctaaaaatgaagtgctattcttgacctaagtcatgttatctataggagagttcgataccatgcagagtccctccacacccatcaaag

SEQ ID NO: 286152 - DNA, 201 bp, Homo sapiens
aggacttactatttttttgattcggtggtttttgaacatacactctattctctgtaagacactgtgggggaaggttatgatgagcaagagactccttgttyccaggcagtgctgagtgaaatagttaataaatttttatggagcgggacccaattattacttgtgttatagagcacaaatatgaaactccatgagaaaagc

SEQ ID NO: 286153 - DNA, 201 bp, Homo sapiens
agatgaggacttactatttttttgattcggtggtttttgaacatacactctattctctgtaagacactgtgggggaaggttatgatgagcaagagactccytgttcccaggcagtgctgagtgaaatagttaataaatttttatggagcgggacccaattattacttgtgttatagagcacaaatatgaaactccatgaga

SEQ ID NO: 286154 - DNA, 201 bp, Homo sapiens
ttttcagttcctttgatctcagttgatgatcatttaatctcatatcttgagaaggtgggggattagaacattaacttaccttaagtattctttaaccatcwtcaaccctctcctaggcatttcctcctatagccatctcctaacatgtcaatcacctttctcctggagtcctgaggagcctcgtgaggtgtgtgtatttgc

SEQ ID NO: 286155 - DNA, 201 bp, Homo sapiens
cttatgtatagtccacttatagtttgagtaactcttgttttgttgtatgcagtatgatattcctataattgattcctgtgcatattatattaaaatgattrcatatggattttccctttggatcatgaagagcatatgatatgatatcagatttttgatctttgatctttgttctgtgtaattagctatcaaaatggaact

SEQ ID NO: 286156 - DNA, 201 bp, Homo sapiens
gtggcctcaagtatagtgagctgggagctgcacctatgaagaccagagatgtcaatcatatcctgaaattaccatacctacctgcatatctacctgtcttkcttcctctccccgcacccataattagtgggcaatactgagtatcatttttttactggttactgtgcgcctggcccttggctgagtgtcctgtgaaatgca

SEQ ID NO: 286157 - DNA, 201 bp, Homo sapiens
taaaagcaagttttcacaagctgatctattttattccagtctttatttggaatcactaaacttacattccctttagcaaaactatcgtttacatttctagkgtttcaagagttcaatgctaaacttgggagatctattcttaaattctctcaaagtgcaacacattttcctcaggatgatcataaagtcatcagatgtgtg

SEQ ID NO: 286158 - DNA, 201 bp, Homo sapiens
tcatttttttgttctaatttctttttataatgttttgaatctaaaattgtgccagatactgaataactgtcaaatctgtgtttacaaaaaaaaaaaaaaaactatgatatttctttttctttgcagtgaaacattgctagattttgagaatgttgtcaaattaggaaactcatagttaatttggcattctcgtttgggttg

SEQ ID NO: 286159 - DNA, 201 bp, Homo sapiens
acagacaaaatagaacaccttgtttggacctgcttgtcaaaaatcaaatgatcataatttataattccaggaagacttgccatcaaatgaacttatgacaratgacccaaatgattctcacaaagtagagcttgttgtaacttttagcatgagaagtatgaaccccattatcattttttaaacattttgagttaaatggac

SEQ ID NO: 286160 - DNA, 201 bp, Homo sapiens
agtccatgttctatctttatagacagctcaaaaatagctcagcatctagtttgtaggttggctccatttaaggagcttgaagtcaggcaaggtgctcattrctattcatccagatctgtttcttggacacctcagctgtttttcttttctacggccagggaggagagtcatgtgcatagtccaagaatgtgcatctccatg

SEQ ID NO: 286161 - DNA, 201 bp, Homo sapiens
agctgtccactttagaggggtgcctccatatcatgcagaaccatttgtgaatcaggccctagtcttctcttcctctgtcaactgatcatagggaactcccratgagggcatcgatgcagccttggggagagaaggtagggtggcaggagtagagaccatggacatttgagccacttcctcatgaacttacttgtgccttca

SEQ ID NO: 286162 - DNA, 201 bp, Homo sapiens
gatggcaatccttttaagattctgatttcccaagggaaaggctctttgcaacctttcctcctagcttgttagtggtgtctctgtgacagtagttctttagygtgtggaactagaggcagtgggagggcttccctcacacccccacgccttcacactactggaagctgtcgtttgagctgttttgcatacggacaactcatg

SEQ ID NO: 286163 - DNA, 201 bp, Homo sapiens
gttttcagtatgttgaaagtgatgatgacttgggggaatcagcagatctctacattacctaattcttttctcttacatttgaatgcaaatgtatattcatrtgcggttatgactcaagtcattcttgctaaatttaatgacgttgtaggtgaatcacattcagatttccttttgcaggttttccagtaatctaaaacaatg

SEQ ID NO: 286164 - DNA, 201 bp, Homo sapiens
cttttctggaaataatatatgagtgggagtaacagaatacctgagagagagtatgtaggaagtaaatatttatttgaatcatctatgtgtcttttcttccrgttatttgtcagtagatagtttggatttatttttaaataatgaccattgcctttccatttctgtgggtaaatattcagtaataagaaacttttattttat

SEQ ID NO: 286165 - DNA, 201 bp, Homo sapiens
tcatttagtgggcatttaaacttcgcctcactaatttttatgtcctcagtaagtgtatatatagtcacatttatttactaaagatattttccataatctgktgtatccttttacttttggggctgtttttctttattcagaaatgcaaaggttttgctttgttttgtttatgtaggcaatgaattgtatggtctctttgca

SEQ ID NO: 286166 - DNA, 201 bp, Homo sapiens
ggcaatgaattgtatggtctctttgcaatccaatgcagtatttttgccatttatgtaatccatgtatctatcagagtaagaaggaacatcagattttcctyggaaagagagcacttggctaatttgttatcaaggtaatgaggagaaaatggctctaaaggagaaggccagccacagttcagtctgggagaatagagggat

SEQ ID NO: 286167 - DNA, 201 bp, Homo sapiens
taagatcaagtttaattttaactttttaaagaatcctgtagtgtttagtgaggtttaccttcctttagatgtgtactgagcacatactttgatttaaaacyttgatgtggaaggctttggtatgctttggtttaaattatttaaatatatctttgtgtctttctcaagaagaagaagtgtaaattgctgttttgctgcatc

SEQ ID NO: 286168 - DNA, 201 bp, Homo sapiens
tgatctggttgtacagtccacagaattgggtaaccatttcttggacttaattatattatcatatattatctttttgactaatgaacccaggaaattactawtcacaatgcaaagtaataattaattcctttaattattaaaaaacacctctttcaaattataaggcatacttcccctgaaaatgatagatattctaatagt

SEQ ID NO: 286169 - DNA, 201 bp, Homo sapiens
attttactactatagagacttagagcttgatttcataggtcaggcatctacaaaccgtgatctgaaagtagagattgctggagacagacctttaagtggartggcagcgaaactgcaaagtaagaggaactcagttcccctctttatataaactcttgtaccaatttttggcctccctatacccatccccaagctgaccag

SEQ ID NO: 286170 - DNA, 201 bp, Homo sapiens
gtgtactaggccactttgttaccaagcaaagattttgccaaaatacaccattaccacgtagaaataacatattaaaatgagttttcaaaaggtgtacttgytgctgtagaagtcatctctttttctacgcttatctctaaacatattaaaaattgttatgccattaaagtatgaagcccaacaccttatagctcgtgagtc

SEQ ID NO: 286171 - DNA, 201 bp, Homo sapiens
tttccaaatcaccagggctttggctgttactcactcacccccgccttccttgctcttggagccttcagatttttccccagtagcttcaccttacagcaagsttagcagaagcagttccacagcatgccaacccccctcacttttgaataatccagagactccctgtgccacagataacatgcaatcataaatcttctcagc

SEQ ID NO: 286172 - DNA, 201 bp, Homo sapiens
catataacaactatagcccttagatgcaaaaagacctgagtgcaaatatcattccctttcttactaacatctaagtttcatatagtcttttagcttcatcstttaaccccgaaatctggtaccatcctcttctattttcttgatgactaaattagatggcattatgtgtactgtttgacacatagttaacactcaatgaaa

SEQ ID NO: 286173 - DNA, 201 bp, Homo sapiens
tctgaccatgtcctaagtgttcttagtatctattgatgaatagatttcattaatttaatgagatgatagtatactaaaacttgtctaagtaaatggttggygtccttgaaacttcctattgaatacaacatgagtaaaatgttcgtgtaaagtaaatatttttcaaatagggatgtgttattggtgtttcttaaatataga

SEQ ID NO: 286174 - DNA, 201 bp, Homo sapiens
ctttttcatgctaacatgagcaactcaagcatctggatcacttagggattttttttttttttttctccaatccaggtcaggtacctagcacagtgtgtggmacatagtaggagtgcaataaatatttataataggaattggtgaatgaatgaatgaggagctagtttttatattttggggagagaagtggcaagttcttca

SEQ ID NO: 286175 - DNA, 201 bp, Homo sapiens
ttcaattgatgatgaatttagatatagagtttgtggaaagggaggactcagtgactcctgtttccggctttacctaaatgaaacattttggacggtaaatrtagcattggtagagaaataataaagagttcagcactggacatgttcaagttccatatggctgtgagattatttatgtagaggtataagttaggcaggaga

SEQ ID NO: 286176 - DNA, 201 bp, Homo sapiens
ttatacatatatatattttttttctctctcctctgtgtgtgtatgtatgctctctctctgtgtgtgtgtgtgtgtgtgtgtgtgtgtgtgtgtgtgtgtgwgagagagagagagagagattcagattgagatttaaagcccggggctaggtagttttattctaaacaaatatcaaataaagaattgaactcaaagtgaaat

SEQ ID NO: 286177 - DNA, 201 bp, Homo sapiens
ttgacctgcttctctcttttaaataaccatcttggcttctgaatgtatgtgagtttgtcagccttaataggcaaagaaggaagacagttaagcaaatggcwaatgaaatgattgcattgatttctacgtggtatttgttatacagtggcatggacatgatttgttaagtgtttaactaaaagtagtcccttaggttttgga

SEQ ID NO: 286178 - DNA, 201 bp, Homo sapiens
atataaactttaaagtgaacagcattgtaggaagttgaagaggaagaaaatatattattttgagaaggtattatttaaatctatataaatccaacttaatwaaggacattggataattactattaaggtcacaaatttataaaaatttacaaactaacatgaagtttaacagctttattcaagagtaaagttcatgaattg

SEQ ID NO: 286179 - DNA, 201 bp, Homo sapiens
agtggatatttaaaaaatagagttattaagcttttgaaacacttcaaatacgtcagcctatgcatattaaaattttaatgcagcaaatttactaatatttrcaaaaccagtttagatagagataatatatagatatatagtcagattctgaccatgtcctaagtgttcttagtatctattgatgaatagatttcattaatt

SEQ ID NO: 286180 - DNA, 201 bp, Homo sapiens
gaggtttaaatggtttacactgtcaaagcttttaggacagtgcctggcgcgactaagtactcagtgagtgttagtcatgatgtcatgattattcatggtaktcaccagacaagaatatgttctcatttgtgtatgatttaggattaaatttgggactaatattgagtggttcaatgctaattttgataaggctcatggagg

SEQ ID NO: 286181 - DNA, 201 bp, Homo sapiens
taagattgtctaagcttgaaattattatgggtccttaaaattattatgggtccttaattcttttcatttcttagatcagtcttatttccacaatatgcatkttagagtgtaacaacattttggtatagcatagtgatttttttgattattttagccagagattcctctacacacatatgaccgagagcatcactgtataga

SEQ ID NO: 286182 - DNA, 201 bp, Homo sapiens
tacagaacagtgcctatagcaacaatataggcactaatattgtatactttaaaattcactaagagagtagatttatattatgttcacacacacacacacamaatttgggaggaaatttttggaagtgatggatatgttcacagcatagattacagtggtagtttcacaggtgcattcttatctcaaactcatcaagttgta

SEQ ID NO: 286183 - DNA, 201 bp, Homo sapiens
ataatgtgtatatagcatttgtttttctagaataaagtaagcacttatttagcttttaggtttcaactatattgtctttctcttgagcagattttacatasagctggtatgacatatctcagtgtaatacataatatattactaatgtctttaaattcagaagataagaaaaaactttgagatcaagtttttaatttggga

SEQ ID NO: 286184 - DNA, 201 bp, Homo sapiens
cctgtttcttatactttaacaaaataatttccaagtgtactatgcgatttttaattctagaaggttttctattaaaatgaaaatgaaatgtatgaaatctstctcttattatttcagtcttctataggttttcgagtgtaaattagggagaaatgcagaataatttaaaattaaagttacttatagagaaagctgaataga

SEQ ID NO: 286185 - DNA, 201 bp, Homo sapiens
tatattaatgtctcaaaatattttgaaaaatgatagcatttattaagatatagaacaagtaggggtggaattaaaataaagttcatagttagatgaaagtraatttactcatatcattgctattttagttcaagagggattctttgggtgtagacatagcagtaggagtcatttgtggcacatgcacactgcatctagcat

SEQ ID NO: 286186 - DNA, 201 bp, Homo sapiens
ctaggtattttaaggaaagtaaaatctattagatatagttcttgcccaaaagaagtttacgaaataatcagagataagacacatacaggactcatgacacragatgagctctcataaggaaatgactactcattggccagagaaacagctagagaatgacatctgggcttcttggaagagatggcatcaaactgcaccttg

SEQ ID NO: 286187 - DNA, 201 bp, Homo sapiens
attatgcattgtatacttgtatcaaaatatctcatgacgccaggtgcggtggctcacgcctataatcccagcactttgggaggccgaagtgggcagatcayctgaggtcaggagttcaagaccagcctggccaacacggcaaaaccccgtctctgctaaaaataaaaaaattagccaggtgtggtggtgggcacctgtaat

SEQ ID NO: 286188 - DNA, 201 bp, Homo sapiens
tcatttgtggcacatgcacactgcatctagcattttccatatacttgctccaattcttaccatgtattccttcattgcaatttttaaggccactattttayagatgaaactgtgacctagagagtgtcaaggtcaaacagctgttaagtagtagagatcagaattaaaccaacttctctctggccccaaaacttttaatgg

SEQ ID NO: 286189 - DNA, 201 bp, Homo sapiens
tgtgaagaaatctatcagaacaaaattgtacatatgaaaagatataattcttgcatgtgactcctcaactgtatttaccaggatgaccctgtgacctttcwtttactttagattgattgttgatttatttcttactcatttgttcacacttttactctgtccccaccctgtgccatccttgagctcaatgctttctcttgc

SEQ ID NO: 286190 - DNA, 201 bp, Homo sapiens
ctttatatatatattgtataggctgtcaaacttcattcatatttttatttactaattgaccaggcagttatttaccacctaccatgggccaggttctatcytaggtattttaaggaaagtaaaatctattagatatagttcttgcccaaaagaagtttacgaaataatcagagataagacacatacaggactcatgacaca

SEQ ID NO: 286191 - DNA, 201 bp, Homo sapiens
agtactattcagccataaaaaatgagatcctgtcatttttagcaacatggatggaactggagctcttttagtgaaataagccaggcacaaggtgacaaacwttacatattcttacttatttggaagctaaaaaacgaactaatggtgacagagtagaacaatggttactagaggttgggaagggtagttgttgaggggtgc

SEQ ID NO: 286192 - DNA, 201 bp, Homo sapiens
tcctttgatgcacagaagttttaaatttgagtccagtttatctatttttttcttttgtcacttgcgcttttagtgttgtgtataagaaatctttgcctaayccagggtcacaaagatttactcctatgatttcatttctctatgatttctcatatgtaagcgagaacatgtgatatttgactttctatatctgagttgctt

SEQ ID NO: 286193 - DNA, 201 bp, Homo sapiens
ccattgtttgggaaaactcaaggccatctactaacttctttattcttgcattgtcgtgatgatgtgactgatttccacagatctcataaaaatcattctcrgtattctatattctatttcctatgtatgaaaggtgaatactcttgagtcattaattcaacaaattaattcaacagttatttattgaatgtcaattatgtt

SEQ ID NO: 286194 - DNA, 201 bp, Homo sapiens
cacatggcaaacaggtacatgaaaaggtgttcccatcattgatcatcagagaaactcaaaactacaatgagatatcatcttaagacacttaaaatggtttrtatccaaaagacaggcaatgccaatgaggttgtacagaaaagggaaccctcatacaccgtttgtgggaatgtaaattagtaccaccactatggagaacag

SEQ ID NO: 286195 - DNA, 201 bp, Homo sapiens
ccttgatctgatgcttgaactcagcttcacctgctatcctggatcactgttgttgtttttcattcctcggtgcttcccgagttccctagcagatagcctcmccctagctcaacaataccaccaccaccaccagcacccccgccaccaccccccccacccaccccaccacccttgaccctctccatacacactctggtagac

SEQ ID NO: 286196 - DNA, 201 bp, Homo sapiens
cttgcgcttttagtgttgtgtataagaaatctttgcctaatccagggtcacaaagatttactcctatgatttcatttctctatgatttctcatatgtaagygagaacatgtgatatttgactttctatatctgagttgcttcagttaagataatggccttcacaaatacttactcctatgatttcttatatgaattttaca

SEQ ID NO: 286197 - DNA, 201 bp, Homo sapiens
ggggagagaacagtctcttcaataaatgatgctgggataatggagatccacgtgaagaagaacgaaactagacccctatctcttgccacatacaaaaatcmaatcaaaatggactaaagacttaaatataagatctcaaactataaaactactacaataaaacattggggacactctccaggacattggactagggaaaga

SEQ ID NO: 286198 - DNA, 201 bp, Homo sapiens
aattttacagttttctatagttttagctcttacatttaggtctttagttcattttgagttaaattttattgaggaagatttttttttaaacttcaacttaktttagatttcaggggtacgtgtgcaggtttttgtcatgggtatattgtgtgacactgaggtttggggtatgattgatgccagcacctaggtagtgagaat

SEQ ID NO: 286199 - DNA, 201 bp, Homo sapiens
aatagactatgatgacaagagcagagactggctattttaactatccagatgaaaaatcaacaaagtagcattggaggtagtaagtcgttgcattggggttratctaagatgacttgctaatgtatgggttatggattatgatagaaagaaaggtgtcagacataacttcaaggtctttgtgcagagaaatgggaaggatgg

SEQ ID NO: 286200 - DNA, 201 bp, Homo sapiens
tgagaagccccagaatgattctttggtctctgtgttctcctagggtgatgaaggaggaggaggcctcagggaaacaatggggatccccagttatgaagaaygctggattgctagtgcactgcatggggggcacattctgaggggagtgttaaccaactaagctaattaaacgcatgtgaaattttactttctcttaggcat

SEQ ID NO: 286201 - DNA, 201 bp, Homo sapiens
cgttcaaacggaatgttctagaaatgagtggagttggccggggcccactgccctctgtggttacgccactgtgggtgcagggtaggtttgggtgtatgccraacacctactgcccatgtgaaggagagcaaagcaatctgttgatgaagcagtttgttgtcattgttcctattctgatcgttatttgaaacagttgtcttg

SEQ ID NO: 286202 - DNA, 201 bp, Homo sapiens
ttagcttcttttgaggcaccagcctttgctggtgagaggtgaatacctgaataaaaattaagattctgttaggtaaaaggaagtgagacagttaatgcatrgcagacaacaaggagcactacagaagcattagtaagcttaggagggagaaaggttgaggagaagttattaacattgtcatataccaaatgggtcaaggga

SEQ ID NO: 286203 - DNA, 201 bp, Homo sapiens
agtacacagaataaattggcagtagttcaatttgcttcctattaaactctgttgtagacactttgaaccttttggaactgttataatatgtataatatatwtcagaacttccacaaaaccctgttagtgcctttattatcccacttttttcctctatccaagattttgctatcacctcattttagaccctaaactcaacat

SEQ ID NO: 286204 - DNA, 201 bp, Homo sapiens
tcacagacatcctgtggcagcttcttttttttcatttgttttctagaagaacgtgtacacaaatgacaataagttaagacagagtgtgaaaagtgctgcasaggaaggtaaaaataatataacaaaaatatgacagtatgaccaggtcacttctggttttgaggaccagaaaaagctgtttggagaaagtagcatttctga

SEQ ID NO: 286205 - DNA, 201 bp, Homo sapiens
ccaacctggtctccagaaggaaaaccttttaaatcagatatttctgaactcctatctgaaatatatatctttagggcagtaatcatcagaaacataacagwctagtgtggagctcagttttattgtcttgcatcagtgaacattcctcagaagcacagagcgtcactaatggaattatatgttttcatgctataattacat

SEQ ID NO: 286206 - DNA, 201 bp, Homo sapiens
tgcttcagtttggataatttgcattggcccagcttcagatatcctggtcctttcttttgcaatgtccaatatgctgttaagtccactcaaataatacttaygtaatatattgttattttcattctagaaattttatttagttcttttttaagagtttccatttcttctccctatgcaatatagagatacatactgttataa

SEQ ID NO: 286207 - DNA, 201 bp, Homo sapiens
aatttggataaagttcaaattacaaagtcccctacaactcattgtacatgtatgaattttttgagaactgttgcctagtgacattaagaactcagtatctsagtatagatatttcattcttgtatttcacagaatattacagcccatgttatctaaataatatgtaatacctctagccatagtatttaatagtttaattag

SEQ ID NO: 286208 - DNA, 201 bp, Homo sapiens
cttaataggtaaatgatggtgtactagagtatattacataatgattgatattttatgtttggaaacatatgtaactatgcctgtggccaaattcttttgamgtttaatgaccaagatgagctgcatttgttaagtggtagagcactggcttgtctggggtccttttgtgcttggcagatcttgataaatgggtgagttttt

SEQ ID NO: 286209 - DNA, 201 bp, Homo sapiens
ttaatggacataagacttgtgggatttggagttaattttatgtttacatttttaaaaaagtatttctccctccccaccctttccccttttctcctcctackccttattcctcttcctcctcctccttgttcctcttcctcctcctcctcctcttcttcttcttccctcccctcccctcccgttacttccttccttcctttt

SEQ ID NO: 286210 - DNA, 201 bp, Homo sapiens
gtatgctttctagttcctaagtgggaaacctggttctttggtttctttgttcctggttaggcttatccccagttatttcagctgaacattttacatactartggagtccagggaagtgtatttggcagctgttcatgggataataatgaaatacactatttagtactgtatgctgctgctgtaaagtgtggggggtatttt

SEQ ID NO: 286211 - DNA, 201 bp, Homo sapiens
aaaatttaaaaactcaagcactctaggaacagactggtgaagttcactaatcatcatatgtatatatttgactgaactaaaacagacctgataaactaaartgttgaagtcatacagtgcagttataattttggctaaaaggtcagaaaccagtgcaagcattgaagattattcatatccactcagcaggcattcagacaa

SEQ ID NO: 286212 - DNA, 201 bp, Homo sapiens
aaaatcattactgccagtttatgtttttctcaaacctggaagtttggaatatagttctaaataccttaaattctctcaataacatgatctggttgtacagwccacagaattgggtaaccatttcttggacttaattatattatcatatattatctttttgactaatgaacccaggaaattactaatcacaatgcaaagtaa

SEQ ID NO: 286213 - DNA, 201 bp, Homo sapiens
gataggtagtttaatatctttgtgtgatcagtgtgtatttaaaatccattgtgtgtttcattatctgaaacttgcagtatttgaattgcatttgcgacacrtaatttgacacagctgaagtatttaaagttaaaagcaaatgtaacagagactcagtataatcctaagaaaagttccaggactttttggagaaattattga

SEQ ID NO: 286214 - DNA, 201 bp, Homo sapiens
aatttgacacagctgaagtatttaaagttaaaagcaaatgtaacagagactcagtataatcctaagaaaagttccaggactttttggagaaattattgagrtgattctaaaatcacaaggaaaggtggatgaattagaatagtcaaaactatttttaaaaataagaacgaagtttgaagactcagattacctgatttaaag

SEQ ID NO: 286215 - DNA, 201 bp, Homo sapiens
cacgtgtagccctgcctcatcacccaccttaaagtggattgcttgtatccagtttctggtctccttggctcttcgcatgaggagagagagaaatgggaaaycctaattccctgttcacttgattcaacatctacgatttcattctattttaaaactctaccctggcagtaccctgcttactcattcgtagctgccttcaga

SEQ ID NO: 286216 - DNA, 201 bp, Homo sapiens
tcaggaaacaacaggtgctggagaggatgtggagaaataggaacacttttacactgttagtgggactgtaaactagttcaaccattgtggaagtcagtgtkgcgattcctcagggatctagaactggaaataccatttgacccagccatcccattactgggtatatacccaaaggactataaatcatgctgctataaagac

SEQ ID NO: 286217 - DNA, 201 bp, Homo sapiens
aataaatacgactttcattgagtttcgggatgtccttcgtgttcacgtgtagccctgcctcatcacccaccttaaagtggattgcttgtatccagtttctrgtctccttggctcttcgcatgaggagagagagaaatgggaaaccctaattccctgttcacttgattcaacatctacgatttcattctattttaaaactct

SEQ ID NO: 286218 - DNA, 201 bp, Homo sapiens
agattcttcagacagaaaatacatatggtcatgctaaataaaacaaaaataatctctagtttcagcacccacagtcttctagtcatagagagcaattccarttgttggcttgaatagtaaagcttttttctaacacaaaacatttgagactactaacttcctatgcatttagttatcagttaatgtaagtctgtgtgtaat

SEQ ID NO: 286219 - DNA, 201 bp, Homo sapiens
agacctagcctaaacaatagtatttttagaggacatagtcacataaataatctttctcattttgctctaaatgcctgctttaaccacagggggaaaaaatwcaactttgttcttgtatgtttaagtcaaagatagtacacatagtatataatgttaattccatattaaaatgaccatttgaagaaagtgttcattaagaaa

SEQ ID NO: 286220 - DNA, 201 bp, Homo sapiens
aatgctaaagggagttcttcaatctgaaagaaagggatgttaatgagcagtaagaactcatctgaaggtaaaaaactcacaggtaacaataagtacacagraaaacacagaatagtgtaacactgtaattgtggtatgtaagctactcatactttaagtagaaagactaaaagatgaaccaattaaaaataataactgaca

SEQ ID NO: 286221 - DNA, 201 bp, Homo sapiens
tgcattttgtggaaaaggaaacatgaacattgtgtggttcaaatagccaaaaaaaaaataaaatgtgattacactaaattagaatttatgtgattttattrcacctgaaggttaacatgattctgggattctaataacaaaaaagctttaaaaccatcttgatttgtttatacagaaaaacaggaattggcctgatagaga

SEQ ID NO: 286222 - DNA, 201 bp, Homo sapiens
agaaccaaaagccaggtgagcaatcacacaatacctagttttaactcatattactgaaggaggcactgaagagggtaagaaagacagtcttgacttgctgwcaccaccaccccacaccagtcttccagcagcagctgaatggcacagagagagaatctgtgcacttgggggagggagagctcagtgagtgtaggtttttgc

SEQ ID NO: 286223 - DNA, 201 bp, Homo sapiens
attataatattaaaattaagaacaaataacagtataaaaatgatcttgatttacagattattggcctgagataattgcaagttttgatctaaattggcacsgacaaattttaaaactatagccattgtttgtgggatacttttctatgtagcactgtattcgatagcactaaagtaatggaagatgtccaaatgggtcatt

SEQ ID NO: 286224 - DNA, 201 bp, Homo sapiens
tgcaatgaaaagccaaagacataatatagaatttaagcaagaaagcaaaataatattgcaaaggtaacagtactatgctatcagcatggaaaatgtgttcrataaaagacaagaaaggaattatagatagactaggttacaccttcaatgggtcttgaaaggcagaatgaatttgtatggacagaagagaacctatcctgg

SEQ ID NO: 286225 - DNA, 201 bp, Homo sapiens
caagaggaaaaggggaaggaactgaggagttgcccaccagctgtttctactgactgtgggaggaatttcctttgctcttttgttctaaaagatatctagaycatttcagcaaaaacccatatttttaaatcaaaaaaaagatctatatgattctagggacacagacacacacacacatacacacacacataccccttcttt

SEQ ID NO: 286226 - DNA, 201 bp, Homo sapiens
ctgcactgcactccagcctgggcgacagagtgagactccatttcaataaaaaaaaggcttaagtcagggattggcaatttttttgaaatgtgaaaacagcygtagacattaagtaaatgaatgggcatggttgtgttccagtaaaattttatttacaaaagcatgtggcaggtggtgggccatactttgacaacccctggc

SEQ ID NO: 286227 - DNA, 201 bp, Homo sapiens
gaggtgctgtttaagagaatcacacacagcacagagatcctggaagacaaggactgagtctgtctattgcatttgtcaacaaggtgatttctggggactaytagcaggagtatttttatcgcattttggggaactgaagctagattatgataaattggatatcaataagtggggacagatatgccgtccagtgctgcagcc

SEQ ID NO: 286228 - DNA, 201 bp, Homo sapiens
ataactctagagaaatattagttgacctattgaaatgtggcacaatccagggctcacccctctcaggatcattagcattagattgagggtatttccctgcrtacctctctctaataccagaaactcaatattttagtagtcacagggaaaagatgatagcaacagtgccatgggtgaactgtactctttttctgttctttg

SEQ ID NO: 286229 - DNA, 201 bp, Homo sapiens
ccttcatcaaaaaagtttgaaatgttttcagttcatacataagaagaaaaaaatttgatatgggtttattttcccctattaacattttctttgatttacartctgttgtatcagacatgatgtgaaaggggtagacaacaacctagactatatttatttttcaatctgctaatgtgaagaaaaaaggggaggagttaggtg

SEQ ID NO: 286230 - DNA, 201 bp, Homo sapiens
tggtcacctcagctcactctctgtaggactgactgcttcccctttcttctgtgatttgcatagtattatccacattgattcatgtttggggtgattgtttycatcctcactgtgagattatgaacttcttattttctttccatgaaataaagttttcattggctgggatcccagctagactgatttttttttccttttttc

SEQ ID NO: 286231 - DNA, 201 bp, Homo sapiens
gaaataagagctggtgttcaacacgtcagtagggtgagtatagttaatattaatctattgtacatttcaaaatctctaaaagagaataattggaatgttcstagcataaagaaaatacaaatatttaagatgatggatatcccaaataccctgatttgattatatgaatgtatcaaattatcacacgtaccctcaaaatgt

SEQ ID NO: 286232 - DNA, 201 bp, Homo sapiens
tgttgatgttgggattttaaacgggaagttgctttgctgttagattccatcacattgaatgtatcaacatttatacaaggaaattgggaagaaatgtactytcagtccctggttgctctttgtttgtgaaaagtaacaaatttaggagttgatctaaaaggaaaatttttgtgttaatgtttttaaaacattaaagcatct

SEQ ID NO: 286233 - DNA, 201 bp, Homo sapiens
aaaaaccttattactctgctatctactctcaccgaggtgataacatagacccatgaaatgaactatgctggcaatattttaagtgcaaataatatttggarcacaggcatatttttttgatcatgtgctgacatgcacagtgtttcccaaagaaaatgttagaggttacccatgtaaaaattactatttctcagaaaaagt

SEQ ID NO: 286234 - DNA, 201 bp, Homo sapiens
ggaaaggacaactgctatcccaggctagaatatggattatctcacagcagtgaatgaagccaaacacatatatttcaataaaaaaaatttttaaagaacartgcatgacatgtactaaggggtgaataaatgtagagttacccttcatagttttctaaaaaggctgtctttatccccatcaaaacacttctgcagatattt

SEQ ID NO: 286235 - DNA, 201 bp, Homo sapiens
tttgtgttaatgtttttaaaacattaaagcatctttaaacaatatttttgtctcagatgtctagatgcatatttatacccccagaaatttgaataagtctktttaaatatttttgtccttttcctgaatgtcaaccctttggcagagtgtttatatgttaaagcttgaagagcaagtagagatcacacagtccaactctgt

SEQ ID NO: 286236 - DNA, 201 bp, Homo sapiens
ttcacatgtagacaaacatttgatgaattcctttttttatatatatacttgggaaataggtaaattttctgctatcaataatctctcagaaacacttgatractgaatactatagttaaaaatcatgaatgagaataagaaaggcaacatagtattttaggagggacattatcccactcattgaattaccatataacctgt

SEQ ID NO: 286237 - DNA, 201 bp, Homo sapiens
gagaataagaaaggcaacatagtattttaggagggacattatcccactcattgaattaccatataacctgtcatagcaccttaactgctctgaacctcttwcctcgtctataaccttcatcctggcctgcactggagtcagagttaaactgtgccttgtaaaacataaagttctttataaatataacagttagagcctggg

SEQ ID NO: 286238 - DNA, 201 bp, Homo sapiens
acctctttcctcgtctataaccttcatcctggcctgcactggagtcagagttaaactgtgccttgtaaaacataaagttctttataaatataacagttagrgcctgggcgcatgcctgtaatcccagcattttgggaggctgaggccaggggatttcttgagcccaggggttcgacaccagcctgggcaacatggtgaaac

SEQ ID NO: 286239 - DNA, 201 bp, Homo sapiens
gtcaggaaacaacaggtgctggagaggatgtggagaaataggaacacttttacactgttagtgggactgtaaactagttcaaccattgtggaagtcagtgyggcgattcctcagggatctagaactggaaataccatttgacccagccatcccattactgggtatatacccaaaggactataaatcatgctgctataaaga

SEQ ID NO: 286240 - DNA, 201 bp, Homo sapiens
agctcaactcaataggaaaatatttaataatctgaataaaaaccggtcaagaaatttgaatagatatttctcagaagacatacacatggcaaacaggtacrtgaaaaggtgttcccatcattgatcatcagagaaactcaaaactacaatgagatatcatcttaagacacttaaaatggtttatatccaaaagacaggcaa

SEQ ID NO: 286241 - DNA, 201 bp, Homo sapiens
agacatagagtggctgaatagattaaaaaaaaacaaaaaaaaacaaaaaaccgtgacccagcgatctcttgcctacaagaaatacacttcacctataaagrcacacagagactgaaaataatgggatggaaaaatatatttcctgaaaatgaaaactaaaaaagagctagagtagctatacttataatcatcaaagtggat

SEQ ID NO: 286242 - DNA, 201 bp, Homo sapiens
cttgggcattgaatgaacatctgtgatagctacacattacttgccatgggcctggagcagtcaatagtggtcatgggagagaattttctgcttgtggaaarggtagggaaaagtgggaaggacttcattttgtggcttgggtgctagctcaaccacagtagaatagagcaacaggtagtttcctaatagagcaccaggtag

SEQ ID NO: 286243 - DNA, 201 bp, Homo sapiens
ctgattccaggccatggctcttggatggcatttctgcacctgccttaggtcagaggggtgcccactgccctgaagggagagccctaggcatgaaagcattygccacaagctgactgaagagcccttgggcattgaatgaacatctgtgatagctacacattacttgccatgggcctggagcagtcaatagtggtcatggga

SEQ ID NO: 286244 - DNA, 201 bp, Homo sapiens
ggctagagtgcagtgacatgatcttggctcactgcaacctctgcttcccgtgctcaaatgatccacctgcctcagcctctcgagtagctgggatcacaggygcccgccaccatgcctggctaatttttgtatttttagtagagacggggtttcaccatgttggccaggctggtctcgaactcctgacctcaagtgatctgc

SEQ ID NO: 286245 - DNA, 201 bp, Homo sapiens
tgacagttttatacatgtttggtagttccttctgctttccttctccttcctgccaccttgtgaagaaggtgccttgcttccccttccccttctgccatgaytgtaagtttcctgaggcttcctcagccatgctcaactgagtcagctaaacctctttcctttgtaaattacccagtctcgagtagttctttatagcgatgt

SEQ ID NO: 286246 - DNA, 201 bp, Homo sapiens
ccacatttcctttgtccgtttatccattgatgaacacttaggttgactccatatcttggctatttgtgaataatgctgcaatgaacatggaagtgcagatrtctcttcaacatactgatttcatttcctttgatatatacccagcggtgtgattgctggatcatatggtagttccgtttttaggaacttccatagcatttt

SEQ ID NO: 286247 - DNA, 201 bp, Homo sapiens
ttaggatagttagctcctcttgttgaattgatccctttaccattatgtaatggccttctttgtctcttttgatctttgttggtttaaagtctgttttatcmgagactaggattgcaacccctgcctttttttgttttccattggcttggtagatcttcctccatccttttaaaaagacaagctatagacttggagaaaata

SEQ ID NO: 286248 - DNA, 201 bp, Homo sapiens
agagatagtctgttataatttctgttcttttacatttgctgaggagagctttacttccaagtatgtggtcaattttggaataggtgtggtgtggtgctgaraaaaatgtatattctgttgatttggggtggagagttctgtagatgtctattaggtctgcttggtgcagagctgagttcaattcctgggtatccttgttga

SEQ ID NO: 286249 - DNA, 201 bp, Homo sapiens
aaattagatagaagaaataagagctggtgttcaacacgtcagtagggtgagtatagttaatattaatctattgtacatttcaaaatctctaaaagagaatrattggaatgttcctagcataaagaaaatacaaatatttaagatgatggatatcccaaataccctgatttgattatatgaatgtatcaaattatcacacgt

SEQ ID NO: 286250 - DNA, 201 bp, Homo sapiens
gctggtgcccacactggatcatgctaaattcaggtcagcatgcaaagggaatcagcctgcttagctagtggattttctaggcataatttatacatacatamtttttagtgtcaggccaagcattttcatttttataatttcttctttctgatagtaaaccatttaatttggagcaaatataaatgattcctaatgaagcac

SEQ ID NO: 286251 - DNA, 201 bp, Homo sapiens
tgctgcttagaaagagtcaataagctccagatcctgaattcaaagccttttcctgacactggaagaagagcagtgtgaggcttcaaattgtttccaaaacrcctacatttccagcatcttttctctttccattccatttccaatcagctgcattccatctagcaaattcttgatattagggcatacagatttttagaaaat

SEQ ID NO: 286252 - DNA, 201 bp, Homo sapiens
catctcacagaaattatataatgcccatgtgacttttattttaatttattgtttaactgacaaataaaaaagtatatatattggtgcagtgatgggcaccygtaatctcagctactctggaggctgaggcgagaagattgcttgagtccaggagtctgagtctttaaaaagaaattgtatctatttttgtgtataacccat

SEQ ID NO: 286253 - DNA, 201 bp, Homo sapiens
gaagtaatgaggagtggtagaattctggatctatttcagaggtagagccaaccagataagctgatggtggatgtggggtctgaggaaaaggaagggtcagyaatgactgtcagtttttgaccctaagtattatgatgagaagcttttcgggagggaagatgggaaaaaaaagagttcagtttttgtatgatgtggggtagg

SEQ ID NO: 286254 - DNA, 201 bp, Homo sapiens
aaatattttaaacatctttaaaatcaaatacagttagtcttgtataacaatattatgttttaccctgacactttgacaaacattacaatacattagctaaytgaacctaacaggtgctctagaaaagtaaaggatagagtaagatcatttcactctctgaaaagaagccagtttcttaggcagaacacagcagccttttga

SEQ ID NO: 286255 - DNA, 201 bp, Homo sapiens
gcagtcccagtcacagtgagaaccccaaactccctgccgtgttttcacactctcctggctacccaagagatgcatgattttcatcagagaaagatactgtrtatcctaaaaattcacatctcatggacttaaaaagatctggaaaatgcaaggcttagaaaatgttagtgaagcagacttttaatggcccagaatgaatca

SEQ ID NO: 286256 - DNA, 201 bp, Homo sapiens
agatctcagtagcagtcccagtcacagtgagaaccccaaactccctgccgtgttttcacactctcctggctacccaagagatgcatgattttcatcagagraagatactgtgtatcctaaaaattcacatctcatggacttaaaaagatctggaaaatgcaaggcttagaaaatgttagtgaagcagacttttaatggccc

SEQ ID NO: 286257 - DNA, 201 bp, Homo sapiens
attttacttcattctctttctaaaggtctttctttaaagtaaaatttatattgggtatatcagattttttatttgtattaagaaagtttgaggacagattygcacatgaagatgagaaatatttttatagcgcctccttttcaaatattttaaacatctttaaaatcaaatacagttagtcttgtataacaatattatgtt

SEQ ID NO: 286258 - DNA, 201 bp, Homo sapiens
tacttattacaccgaggctacaatatggtgattttcaaattctattatttcttttacatttattagttgcctttttttctgtaaagaaaagagtttttccycagcatctctttacttttttcttgtcttgtgttctcatggatcattttttaatttgacgtgttatacttctttactatgataattattttgatactcaaa

SEQ ID NO: 286259 - DNA, 201 bp, Homo sapiens
acagtggatttaaagaaacactaccatgctgattaagagcagacattttacttcattctctttctaaaggtctttctttaaagtaaaatttatattgggtmtatcagattttttatttgtattaagaaagtttgaggacagattcgcacatgaagatgagaaatatttttatagcgcctccttttcaaatattttaaacat

SEQ ID NO: 286260 - DNA, 201 bp, Homo sapiens
ttttgctgtgcttcactaaagtctttgagtctatctttgctttttggcagaataagatgtcccaggctggctttatactttgtctgctccagatctggaakcagccaatttttctgacgaatccggcttcttttgatgagaagcgacattcagaaaccaaaattggagttctggatgtacctgttcctacaagtgtcattg

SEQ ID NO: 286261 - DNA, 201 bp, Homo sapiens
tttgataggattaaacggtgtaatttagcattaggaaaatgatgtcttaaaacactaaacatcagagccagtgtatacattttattttttaaaattgaggktttttttgtaacttgattttatgcatttatttattggtccagcaagcatttattgagcacttgctatatgttagatttttggctagggattgaagattca

SEQ ID NO: 286262 - DNA, 201 bp, Homo sapiens
catcttgataagaaattttaaacatgtaaactattcattcaaaaaaacatttacagagaatttccttaaggaaaacctgatgaatggatgtttatcttttraacattatatgattgtattaataacacatgatgaaaattctatccactgttatctttggctggtgagtttttcctttgtgtacattctgaatttccaggt

SEQ ID NO: 286263 - DNA, 201 bp, Homo sapiens
attagactaaactaattccagcactgcattgtgtactactttaatctttttgaaaagtgaatgaacagcagatggcctaataaagacactctgtgtgctckctcagtgtggattggctctaagggaactggctcacactttagagtccatatatttgcaaaacatctgtcttagtcaaggcagatagttaaaggaaagaga

SEQ ID NO: 286264 - DNA, 201 bp, Homo sapiens
taaatggtatgtttgatatgatcacagacgacattgtgccaaatgtaaccacttttcctggcggttttaatggtgttgcaagagtctgtgatgcttctggktccttttctgtccgatgtagacaatgcattcatattgcatgatgattagtacaaagtacaaacaaggagactagagaaaagagaggctaaatgaccaaag

SEQ ID NO: 286265 - DNA, 201 bp, Homo sapiens
gaagacctaaggagctaggacaagactctgctttgcatcacaggggtaattagaatgttgtcgattgagggcaacaaccatctctgagtattctccaagaytgcttaggggttattaagcatcttaaatccttattttgcacttagagcatctgtagtgcagaaattctagactcagtgtgagtagaaacatagaagcttt

SEQ ID NO: 286266 - DNA, 201 bp, Homo sapiens
gggctctgttctgttccattgatctatatctctgttttggtaccagtaccatgctgttttggttactgtagccttgtagtatagtttgaagtcaggtagcrtgatgcctccagctttgttcttttggcttaggagtgacttggcaatgcgggctcttttttggttccatatgaactttaaagtagttttttccaattctgt

SEQ ID NO: 286267 - DNA, 201 bp, Homo sapiens
gagtcttgctctgtcacccaggctggagtgcagtggcgcgatctccgctcactgcaagctccgcctcccgggttcatgccattctcctgcctcagcctccygagtagctgggactacaggcacccgccacgacacccagctaattttttgtatttttagtagagatggggtttcaccgtgttagccagggcggtctcgatc

SEQ ID NO: 286268 - DNA, 201 bp, Homo sapiens
agaccagcctggccaacatggtgaaaccccgtctccactaaaaatacaaaaattagccaggcgtggtggcacgtgcctataatcccagctactcaggaagytgaggcaggagaattgcttgaactcggaaggcggaggttgcagtgagccaagatcgtgccgttgcactccagctctgggcgacagagcaagactccgtct

SEQ ID NO: 286269 - DNA, 201 bp, Homo sapiens
gcccataacaagctctgttccttccagcttgtgtgccggtgctcacatttatccttttgcctgaatacccttgtcctctcttcccatctgtctgaattctrctgactatttatgccttgctaaagttggcacctgcatcatatctcctttctatctatatctatatctatctatttatatcacatctccttggaacttctg

SEQ ID NO: 286270 - DNA, 201 bp, Homo sapiens
agtcaagataattaacttattcatcaaccccaaaagtttgctcctgccccttaataatttattcctctctacttattgttacgggatctttggggtgtcarttttctagccagaaacctctgtgaccgtggcgcctttacccaggttcttgtcctgcatccaggaagaatgaggtacacagacaagtgaagagtgaacaag

SEQ ID NO: 286271 - DNA, 201 bp, Homo sapiens
ttttgtatttttagtagagatggggtttctccatgttggtcaggctggtctcaaactcccgacctcaggtgatccacccgcctcagcctcccaaagtgctragattacaggcgtgagccactgtgcccggcctcctgtcatgtatttttaacaggagtgtctcaggaatttaagccctttatttggactgactcccctgtt

SEQ ID NO: 286272 - DNA, 201 bp, Homo sapiens
aggctggagtgcaatggcatgattttggctcaccacaacctctgcccccggagttcaagcaattctcctgcctcagcctcacgagtacgtgggattacagktgtgcgtgtgccaccacacctgggtaattttgtatttttagtagagatggggtttctccatgttggtcaggctggtctcaaactcccgacctcaggtgat

SEQ ID NO: 286273 - DNA, 201 bp, Homo sapiens
tttgtttgtttgtgtgtttttctttgagatggagtttcgcctttgttacccaggctggagtgcaatggcatgattttggctcaccacaacctctgcccccrgagttcaagcaattctcctgcctcagcctcacgagtacgtgggattacaggtgtgcgtgtgccaccacacctgggtaattttgtatttttagtagagatg

SEQ ID NO: 286274 - DNA, 201 bp, Homo sapiens
ggaattatcttttcctgtcatgttttttgtttttgtttgtttgtgtgtttttctttgagatggagtttcgcctttgttacccaggctggagtgcaatggcrtgattttggctcaccacaacctctgcccccggagttcaagcaattctcctgcctcagcctcacgagtacgtgggattacaggtgtgcgtgtgccaccaca

SEQ ID NO: 286275 - DNA, 201 bp, Homo sapiens
actaaactctcatataaggaaggaagccactctacaagtcatatttctgaactgggaattatcttttcctgtcatgttttttgtttttgtttgtttgtgtrtttttctttgagatggagtttcgcctttgttacccaggctggagtgcaatggcatgattttggctcaccacaacctctgcccccggagttcaagcaattc

SEQ ID NO: 286276 - DNA, 201 bp, Homo sapiens
aagctattttcgtacctgaaggcagcctgatacggtggaaagatcctgcatactagagctaaaaacctgagttcaaatcttagctctaccgtctcctgcaytggaacttatgcaggcttttcagcccccctgaacttcagtttccttgtctataaaatggttatagtgatttgtattaattagagttgttttaaggattag

SEQ ID NO: 286277 - DNA, 201 bp, Homo sapiens
aaaagtatatagtaggtgtaatttaaagtgcagaaacaaaagcaagataaaagaaaaaagaatacatttcaaatatatttctagcttcagtgaaaataackttgttttccaagctttatctataattattatataatgtttactttatactagttaactgttatataaatatcaagataatacttcttcgtattctaacat

SEQ ID NO: 286278 - DNA, 201 bp, Homo sapiens
aagagggaatagtcattttacccctccattgacctgtcagtagatgagggctgccctcagaaagagtgtgctcttgggcacagtgaccccgtttagttgasggcaagttttggaaaggaactcagtagaaagctaccagttggtaacactctcagcagctatgggaatgagttcttcaggatgtctgggcagcgtactaaa

SEQ ID NO: 286279 - DNA, 201 bp, Homo sapiens
atgttccatgtgcacttgaaaatagtgtgcattttataattattgggtattagtgtcctggaactgtcaattaggtcacattggtgataacgctttccaamtcttacgtgtatattttttaaaatttatttttgtctacttttcttctgttggttactgtgaaaactgtgtcataaaagctccaactatgatcatagactt

SEQ ID NO: 286280 - DNA, 201 bp, Homo sapiens
aggaggtctgcattcaccactgctacttgcctctctccacagaggctgggactctccttccctttcagtttctcctttcccctcccacctttgcttacctrcatcatttcaaatcatcttccagatgttttgcgcccgttgcagcactctccccttctctaattagagacaacttaatggttattcatttcactagtatag

SEQ ID NO: 286281 - DNA, 201 bp, Homo sapiens
caaattatttggaagtgtagtgtttaattttcaaatgttggggattttttatatgtcttattaccattgctttctaaattaattcattgtggtcagatacyataccctgtgaaatttcaactttaaaatctatcaatatttactttatagcccacctatatcccaggtctgtcctcttgatagatgttccatgtgcacttg

SEQ ID NO: 286282 - DNA, 201 bp, Homo sapiens
tgtcaaattttttttgcactcatggaaataatattatgttaatatattgaattacattgatttccacatgtgaaatcagctttacattactggcataaagygcacttggtcatgatttttttctattgctgggtttgatttgagaatattttgttaaatattttctcatctatgtttataagaaatatatatccatatttt

SEQ ID NO: 286283 - DNA, 201 bp, Homo sapiens
acttctaattccaaattcagtaattaaaaaaaacttcaacttttattttagatttggggtacatgtgtaagtttgtgacatgggtatattgtttgatgctkaggtttggggtttgattgatccactcactcaggtagtaggcatagtactgtataattactttttcaatcattctctctccctccttcccctttctaatgg

SEQ ID NO: 286284 - DNA, 201 bp, Homo sapiens
ccaaaaagtggtagttctttcctctggcagttaaggtgaggatctgttcactgagacccttcctagagttgagcttaactggagctagactatgattagcmcaacttccatccctctgaaaaatcactgcttttatatttcaacatttgaactggagaggcattgactgaagttataattttttagggttttttttagtta

SEQ ID NO: 286285 - DNA, 201 bp, Homo sapiens
gtcataaacaggtctgcttttatttactgtgttttctgtccactaggagtcatatttttctgctttttgttaggtcacaaaatatttataatgttctgaayattatatacaataaatcaatagcgattgaagcatagtatttcttttgtgttttatttccccaaaaagtggtagttctttcctctggcagttaaggtgagg

SEQ ID NO: 286286 - DNA, 201 bp, Homo sapiens
ttaaaccccattgtaatgtacggtctgtctggcctagagcttcatcttattcttgtgattatgaaacagtattctgtcctgacgaagaaggtagtggggaraagtttctgggatttgtaggagagtagaaaagaaagatatttgggaaggatatttttaaaaaagaagggtatctctatgatttgctgacaattaacaagt

SEQ ID NO: 286287 - DNA, 201 bp, Homo sapiens
aatatttttcttctagctttggtgagtgaattattaattgccattgtaaagaaaaatgtatcatataactgacatgagaaatgatcgtcaaatatttggtratagttttttgaggacttacgaacttgaatatggcactaagatttggttaacagtatttccattgatttcaagacttcagtgactaaaagatatttggag

SEQ ID NO: 286288 - DNA, 201 bp, Homo sapiens
atcaatactgacatattgattctttgaaaagaaatttagaactcatatctaacaatacatatatttttatatatatgttatatacatatatgtattgatcyatatatgacagatgtatatatggcagatatgtatatattaatacctatatatggcatataaatatttatataccttttgtgtgtatcttttcctataagt

SEQ ID NO: 286289 - DNA, 201 bp, Homo sapiens
gttttttgaggacttacgaacttgaatatggcactaagatttggttaacagtatttccattgatttcaagacttcagtgactaaaagatatttggaggagwcttggggaaaactaaattgtgaaaaacgctgaaaagaaatttgtagcattgcagactgtagcagagttatatgatttagatgccttgtgtttagccaaat

SEQ ID NO: 286290 - DNA, 201 bp, Homo sapiens
cagtcttaattacgtgaatagaagctattgttgttattcttacttttcaggtaaggagaattgaggcttttgtcacataggaagaaaaaattatgagcaastcttgcccttaaaatcattctgatggtcaaatgcaaatttgctattttggtggactcttgagaatgtgggaaatagacccatgtccactttatgcaaaga

SEQ ID NO: 286291 - DNA, 201 bp, Homo sapiens
cttattttaagttgtagaaagcttgtatgttttatgttagtatctgagtaaagctatcaatggaggtacatatgtggttaaagtgatgaaaatataactayggttaaatcattcatctgttgcaaattacttatgacttctgatacagattaaatgaaatgctaggaaaaaaatatagatgagaaaaatataagtagcacc

SEQ ID NO: 286292 - DNA, 201 bp, Homo sapiens
gcttcagactaggaatatccaatcatgaaggtagttttaagctttatcacagctcacacaatttctaaagaaagataactagacagaaacacgatgaaatrgttgagtatacgtcaggaaacatgacctataccaaacttaaatacttaagtttaagctgcgtaacatcagcaggaaaccaagtccaagcaaagcaactcc

SEQ ID NO: 286293 - DNA, 201 bp, Homo sapiens
aagaaacgcgccactgatagaaaagtgggaagatactgaagcaatgttgggaacagaaatgatcagggtgactgaagcagagtcatagagccttgaaataraagtaaaaatgtaaaccacggagacaaacaggaagcttgtggaagtgaatgatggtgagaaatgtgttctacagtaagatcatgaggtatatggattctt

SEQ ID NO: 286294 - DNA, 201 bp, Homo sapiens
gggtgacagagcaagacttcgtctaaaaaattaaaataaaataaaaaccctctaagtttgctctaacaagtagagtaactctgtatcccagcttaccccaygtagagtcccagtttacacttggtatctcagcatcccttttggatagagagtttactttcaagaaagtcttgtttgcatgatgaatttaatggttattct

SEQ ID NO: 286295 - DNA, 201 bp, Homo sapiens
gactcattggcttcagactaggaatatccaatcatgaaggtagttttaagctttatcacagctcacacaatttctaaagaaagataactagacagaaacaygatgaaatggttgagtatacgtcaggaaacatgacctataccaaacttaaatacttaagtttaagctgcgtaacatcagcaggaaaccaagtccaagcaa

SEQ ID NO: 286296 - DNA, 201 bp, Homo sapiens
cttgaaatagaagtaaaaatgtaaaccacggagacaaacaggaagcttgtggaagtgaatgatggtgagaaatgtgttctacagtaagatcatgaggtatrtggattcttattttacattcattttaaaagcatttttccaactgctaagatttatattattggaaagatgttttgcatcttctaatagaaattcattttg

SEQ ID NO: 286297 - DNA, 201 bp, Homo sapiens
aggtagttttaagctttatcacagctcacacaatttctaaagaaagataactagacagaaacacgatgaaatggttgagtatacgtcaggaaacatgacckataccaaacttaaatacttaagtttaagctgcgtaacatcagcaggaaaccaagtccaagcaaagcaactcccaagccagacaccaggtcagccacacat

SEQ ID NO: 286298 - DNA, 201 bp, Homo sapiens
tttaatggttattctaattaaagtcatcacgtccttaccaaaggtttttgaaataaaaatgtaataatcaagaatttccctttttctgtctcccccttctyttctcccttccccttctttcctatcttaggatgacttttaccatgggcattgcacttttatctttaatacaagacaatatgtgaaaaagctctttgaaag

SEQ ID NO: 286299 - DNA, 201 bp, Homo sapiens
atgcaggcaggtagatattctgagtatgtgactttggatgtgacacattcacatatggaattctgacattcactatcagaatgctgcaatttcatcaggcyttcattggttgctgaggtcaagaaatatagtttgacatcattttcagattttattagactgtctgttgaatttaaagaaggaattaattctacttataac

SEQ ID NO: 286300 - DNA, 201 bp, Homo sapiens
aaaagtatacactgatacagatgcgagttagaaaattatatgcggtggggcgtggtggctcatgcctgtaatcccagcacttctggaggccaaggtgggcrgatcaagaggtcaggagttcgagaccagcctggccaacatggtgaaaccctgtctctactgaaaatacaaaaattagtagggtgtggtggcgcacgcctg

SEQ ID NO: 286301 - DNA, 201 bp, Homo sapiens
ccatgacttctaattccaaattcagtaattaaaaaaaacttcaacttttattttagatttggggtacatgtgtaagtttgtgacatgggtatattgtttgrtgctgaggtttggggtttgattgatccactcactcaggtagtaggcatagtactgtataattactttttcaatcattctctctccctccttcccctttct

SEQ ID NO: 286302 - DNA, 201 bp, Homo sapiens
atttgaattcaggagtttgagaccagcctggccaacatggtgaaaccccatctctactaaaaatacaaaaaattagccaggcgtgctgttgcgtgcctgtwgtccctggtactcagcaggctgagacagaagaatcgcttgaacccgagaggtggaggttgcagtgagccaagattgtgccattgcactccagcctgggtg

SEQ ID NO: 286303 - DNA, 201 bp, Homo sapiens
atagctaggatcagagaggttaaataactcacccaaatcacatatgtaataaatagaaaaaggagctgaatccatgacttctaattccaaattcagtaatyaaaaaaaacttcaacttttattttagatttggggtacatgtgtaagtttgtgacatgggtatattgtttgatgctgaggtttggggtttgattgatccac

SEQ ID NO: 286304 - DNA, 201 bp, Homo sapiens
caaggcaggcagattatttgaattcaggagtttgagaccagcctggccaacatggtgaaaccccatctctactaaaaatacaaaaaattagccaggcgtgstgttgcgtgcctgtagtccctggtactcagcaggctgagacagaagaatcgcttgaacccgagaggtggaggttgcagtgagccaagattgtgccattgc

SEQ ID NO: 286305 - DNA, 201 bp, Homo sapiens
acatggtgagaccccgtctctactaaaaatacaaaaattagtagggcatagtggtgggcacctgtaatcccagctacttgggaggctgaggcacgagaatygcttgaacctggggggcggaggttgcagtgagccgtaatcatgccactgcactccagcctgggcaacagagtgagactcggtctcaaaaaaaaaaaaaaa

SEQ ID NO: 286306 - DNA, 201 bp, Homo sapiens
ttgggaggctgaggcgggtggatcatctgaggttgggagttcgagaccagcctggccaacatggtgagaccccgtctctactaaaaatacaaaaattagtmgggcatagtggtgggcacctgtaatcccagctacttgggaggctgaggcacgagaattgcttgaacctggggggcggaggttgcagtgagccgtaatcat

SEQ ID NO: 286307 - DNA, 201 bp, Homo sapiens
ctgtctcaaaaaaaaaaaaaaaaacccacaaaatatatatattttatacatatatatattttttttctctctcctctgtgtgtgtatgtatgctctctctstgtgtgtgtgtgtgtgtgtgtgtgtgtgtgtgtgtgtgtgtgtgagagagagagagagagattcagattgagatttaaagcccggggctaggtagtttta

SEQ ID NO: 286308 - DNA, 201 bp, Homo sapiens
ctctgtctcaaaaaaaaaaaaaaaaacccacaaaatatatatattttatacatatatatattttttttctctctcctctgtgtgtgtatgtatgctctctstctgtgtgtgtgtgtgtgtgtgtgtgtgtgtgtgtgtgtgtgtgtgagagagagagagagagattcagattgagatttaaagcccggggctaggtagttt

SEQ ID NO: 286309 - DNA, 201 bp, Homo sapiens
ttactcgggagggtgaggtggaagaatcacttgaacctgggaggcggaggttgcagtgagccgagattgtgccattgcactccagcctgggcgacagagcragactccatctcaaaaaaaaaaaaaaaaaaaaaaaaaaaaaatgtaatggccattatgtttttctttttgtagagtaagtgtatcttatgtatagtccac

SEQ ID NO: 286310 - DNA, 201 bp, Homo sapiens
tttcttggtacatgaaaacattgcatatctaggtaaaatgttaatggccaaggccaaggtgggtggatcacctgaggtcaggagttcaagaccagcctggmcaatatggtgaaaccccatctctacaaaaatacaaaaattagccaggcatgatggatggtgggtgcctgtaatcccagttactcgggagggtgaggtgga

SEQ ID NO: 286311 - DNA, 201 bp, Homo sapiens
catttttcatattaaccaagagatttttgaagtttagtctactctgcatatacttttaagaccataataatcagatatagatataagtgcttgaagtgcarttgtgaaaagctatggatttcaccatctttagaggatgtaccacatacttttgtccagaaatagatagcatggcctagaagtatgagttattctcatcct

SEQ ID NO: 286312 - DNA, 201 bp, Homo sapiens
taaatgtatattgtacatttttcatattaaccaagagatttttgaagtttagtctactctgcatatacttttaagaccataataatcagatatagatatawgtgcttgaagtgcaattgtgaaaagctatggatttcaccatctttagaggatgtaccacatacttttgtccagaaatagatagcatggcctagaagtatg

SEQ ID NO: 286313 - DNA, 201 bp, Homo sapiens
taatttgttctatgaacactcacaatactttagatagacttcccctagagtagtcatggtatcctaaatattattcttctctcatttgaccaagaacaaakgaatgaaacctctaaaaataaccactctgctaaatggttattttaatatctaaaggaatttctaattcattctttcatcacatgcctgttaagcattggt

SEQ ID NO: 286314 - DNA, 201 bp, Homo sapiens
ttggctaagttaatttgttctatgaacactcacaatactttagatagacttcccctagagtagtcatggtatcctaaatattattcttctctcatttgacmaagaacaaatgaatgaaacctctaaaaataaccactctgctaaatggttattttaatatctaaaggaatttctaattcattctttcatcacatgcctgtt

SEQ ID NO: 286315 - DNA, 201 bp, Homo sapiens
ggtgggtatacgatacgtatgctggtcaagaggctgtccctaattctcacttcagtaagctgaaaactccctaattctcttaaaagcctgaaaactttacrtttttctcagcaaatagttgatattagtgaaggcctatttagagatttctttgatattataaagtgtgctgatgatcatagaaaaaaaaataagctgcat

SEQ ID NO: 286316 - DNA, 201 bp, Homo sapiens
tgaccaaaggttaaattccaaattctttaccgtatataagggcttcataatatgcttcctctggcaaacttcttgacactgaaatacctactatttcccayatacagtctctgaagactcaattcagaacttactttcttcattgccttctccatcttcctttggctaagttaatttgttctatgaacactcacaatactt

SEQ ID NO: 286317 - DNA, 201 bp, Homo sapiens
ctgtcgttttcttctttagttactttccattaattgactacgctacccctctttggccctgctgtacttgtacatggctatttattcatactgtgttttgyctctcattcatgccacaccaacagatgcataaagtgtccatctctctattttcctctgaaaacacgattttgatgcatctggcatggccttctttttcct

SEQ ID NO: 286318 - DNA, 201 bp, Homo sapiens
acacacacacaatttgggaggaaatttttggaagtgatggatatgttcacagcatagattacagtggtagtttcacaggtgcattcttatctcaaactcaycaagttgtatacattaaataggtgtacctttttgtatatcaatcatacctcaataaagtgagattttaaaaagaaaggaaagtaaactaatgaacacaac

SEQ ID NO: 286319 - DNA, 201 bp, Homo sapiens
gcataaagtgtccatctctctattttcctctgaaaacacgattttgatgcatctggcatggccttctttttccttgtgcatattagttgaaggtacgtgtsagctggagctagggctctcaccacttcctaactgccttgtgttggccgagaggtgctctggagccttccctgggtcctagtggcttactaggacctagta

SEQ ID NO: 286320 - DNA, 201 bp, Homo sapiens
taaaattcactaagagagtagatttatattatgttcacacacacacacacacaatttgggaggaaatttttggaagtgatggatatgttcacagcatagawtacagtggtagtttcacaggtgcattcttatctcaaactcatcaagttgtatacattaaataggtgtacctttttgtatatcaatcatacctcaataaag

SEQ ID NO: 286321 - DNA, 201 bp, Homo sapiens
aggtaataatcacctaatagttgggtatctgaatttctatatgatcattctcaatctcactctcaatcatctccccttttgtccatccatccagccccccrttcatctatccatccctagattcaccagttcccccatcctcccatgcccgcatccaggcatccacagattcacccatccctccatcccccggtgccccat

SEQ ID NO: 286322 - DNA, 201 bp, Homo sapiens
tttttgctgaagcatggcaatttgtgagcaatttaagtctctgccttgtggtaggggttggacccttctatgggtgtgactcttcttttttattgacttcrctgatgatagaacttaggggaaaattatgagaggaattaccacaagtgtagaatcggaattttaaatctgaaaaggcttggagattgttcagaatttgat

SEQ ID NO: 286323 - DNA, 201 bp, Homo sapiens
gctgaagcatggcaatttgtgagcaatttaagtctctgccttgtggtaggggttggacccttctatgggtgtgactcttcttttttattgacttcgctgakgatagaacttaggggaaaattatgagaggaattaccacaagtgtagaatcggaattttaaatctgaaaaggcttggagattgttcagaatttgatgtaaa

SEQ ID NO: 286324 - DNA, 201 bp, Homo sapiens
ttggagattgttcagaatttgatgtaaacatttttctggcagtgaatgaactgttaaaactgtgatttgccggtggaggtaaacaaaaaccaaagactttytctttgcttgtcctaatttcagatcctagttcgcttggtgcctgtgtcttcatcttcgtatctattctgtcttcccatctgataaaacttgaggttggtt

SEQ ID NO: 286325 - DNA, 201 bp, Homo sapiens
agctttgaggatattcacatggtgatagcttttaaaagatagagaatttcagaacaaggcataagccggaagttgtgactctgcatgcagaattagcagtyagaatttagaggtacataagtatctgtaattgccaggaaactagatgagtaaaaatcttccctatggattgcgcctttttttcttacttcatagctctgt

SEQ ID NO: 286326 - DNA, 201 bp, Homo sapiens
tcaggctggagcacagtggtacaatcagagctcactgcagcctcaatttcccagctcaagcgatcctcccatctcagccccccagagtagctgggactatyggtgtgtgccaccatgcctagctaatttttttgtatttttagtagagacagagttttgtagcccagctggtcttgaactcctgggctcaagcaatccacc

SEQ ID NO: 286327 - DNA, 201 bp, Homo sapiens
taaaaatagctctgataatttctgtatttgaatagggagtttgttatttacatttattgtatttgtgtgtttgtatgtattcatattctattgagttttcratgaccattccttttttttttttttgctcctttttttcccaacttcttgctttctattggattgttagggatttctgtttttcactttatttctctctgc

SEQ ID NO: 286328 - DNA, 201 bp, Homo sapiens
tgttcttagtatctattgatgaatagatttcattaatttaatgagatgatagtatactaaaacttgtctaagtaaatggttggcgtccttgaaacttcctrttgaatacaacatgagtaaaatgttcgtgtaaagtaaatatttttcaaatagggatgtgttattggtgtttcttaaatatagattacttgctgctgcttt

SEQ ID NO: 286329 - DNA, 201 bp, Homo sapiens
tgtttcttaaagttggactaaatgttgaatgggaggataggaggagaaggcgatggaccctacaggtgcaaactctttccaaatcaccagggctttggctsttactcactcacccccgccttccttgctcttggagccttcagatttttccccagtagcttcaccttacagcaagcttagcagaagcagttccacagcatg

SEQ ID NO: 286330 - DNA, 201 bp, Homo sapiens
ttaatttttcggatgaagaatttcacacaactggtatgcagcagaaagggaaaacaaattctttgctctctgattctaaatatgtactaatttccattgcygtatattgcttctttttctgtaaaaccttttataagaatttccgtgaaaattttaaaatacatttttgttaggacttctggaacaagaatattttataga

SEQ ID NO: 286331 - DNA, 201 bp, Homo sapiens
gcatctttgaaatttgattttcagcagtctccccaagtgactgaatacattttttcaaactatttacttttgtatcatgtcttctcatggtcaaattcagsatgaattttatgacaggatttggtctaatgctgctgaattgtctcataaatatcttgacaagtcatttgaaacatgctgggcctctaaagaggctgactg

SEQ ID NO: 286332 - DNA, 201 bp, Homo sapiens
gtcttgctctgtcgccagtgttgccaggctggagtgcagtggctttatctcagctaactgctacctccgcctcccgggttcaagctattcccctgcctcarcctcctgagtagctgggactacaggcatgtgccaccacgcccagctaaatttttttttttttttttttttttttgtattttagcagagacggggtttcac

SEQ ID NO: 286333 - DNA, 201 bp, Homo sapiens
tataaagggaagtttattaaatattaactcacatgttcacaaggtttcacaataggctgcttgcaagctgaggagcaaggagagccagtccgattccccaractgaagcacttggagtccagtgtttgagggcaggaggcatctagcacgggagaaagatgtaggctgggaagctaggcccgtctctttttttcacacttt

SEQ ID NO: 286334 - DNA, 201 bp, Homo sapiens
aggccctagtcttctcttcctctgtcaactgatcatagggaactcccgatgagggcatcgatgcagccttggggagagaaggtagggtggcaggagtagaraccatggacatttgagccacttcctcatgaacttacttgtgccttcaggacctgctcaaacctgatcacatatatgctactttcatttgatgatagaatg

SEQ ID NO: 286335 - DNA, 201 bp, Homo sapiens
tccgtggatggtagtcttggcagaagcattgcgtgcagaataggcagacccatatccacagtaagtgtctattccagtgaggacaaacctcttccctttcyatgatggaagaggtccaatataatcaacctgccaccaggtagctggctgatcaccccgaggaatggtgccacatcgagggctcagtgttgctctctgctg

SEQ ID NO: 286336 - DNA, 201 bp, Homo sapiens
catatattggatgctgattcagagcgtacatggctttctagagaactttgccccagccctgcaaagtattgtcacctagttggcattgtaattgtgacttmaaaaggccattccaccattctgtcaatccagctgcttcaggatgatggggtacatggtgagaccagtgaattctgtgagcatgagcccattgtcgcactt

SEQ ID NO: 286337 - DNA, 201 bp, Homo sapiens
atccccaacccaaatactattacataaagttaacaatatttaaatgccgatatgaagtcaataaatcttatgtcacatgataaaggaaaaggaaataaagrtattttcttagtacaagtgtatacatgcacaaacatgtttttaacaaaagaaggaggaaatactcatgacaattacagtccccgtttctgcagtggtctc

SEQ ID NO: 286338 - DNA, 201 bp, Homo sapiens
attagaagttatttagtattagaaaacaaacatgtatatttcctccctattttaggagtaactgcataaatgtcttggtaacgacaactcaactgatcccrgcacttgcgaaggttctactctatagtttaggaggtgctttccccattgagaatatttacagtgcaactaaaataggtaaggaaattattttaaactctg

SEQ ID NO: 286339 - DNA, 201 bp, Homo sapiens
caaaactctcataattcttttggtgaagcagtgatagaacatgagatgttataataatggggcagtaaatgccctcaattgaaacagactccttaaaaaawatagctgctgcgcaggtcaagcccaaatcagacaaatggaacaaattctatagccacagccagaaagtggttatggctgctaagtctaggggttcccaga

SEQ ID NO: 286340 - DNA, 201 bp, Homo sapiens
tgtattcacgaaacggaggctagctaccatgttagcttgcacatagggtaaaatctcagacctttcataattcttgacatctacttatgtattgaaatagytttagccacttcctgccgaatggattgaagagttaatggtacaaattgggagtttatcagttgtaccaggggattttaatttatggaggtgactgagtga

SEQ ID NO: 286341 - DNA, 201 bp, Homo sapiens
aagctatacagcatggttttctttctttagggatcactcttccactttactttttaaagatggataaattttatacatttaaaaaatttaatctgtatttrtatcttcttcctgagtggaccttagcatgttataaatgctcactgaataattctcattgttaattagagtttggttttatttttttaaatgcaatgtact

SEQ ID NO: 286342 - DNA, 201 bp, Homo sapiens
gccagagaaacagctagagaatgacatctgggcttcttggaagagatggcatcaaactgcaccttgagaggcatacaatgccaacggcacatcatatgcartggtgtaaacgggggcacacccactgagtcactggcagtgcaggatctgtgaaggcaggagtgataggtaaggtcaaaaggaaagctttggtcagcattt

SEQ ID NO: 286343 - DNA, 201 bp, Homo sapiens
ggtacatgtgaaggtttattatatagacatattgtgtaatgatgaggtctgggcttccagcatacccatcacccaaacagtgaacattgaacctaataggyaatttttcaatctttaccctcctttaaccctcccctctttttggatttcccatgtctattaatttcatctttatgttcatgtgtacccattgtttaggtc

SEQ ID NO: 286344 - DNA, 201 bp, Homo sapiens
ttttattagatagatgatggagcctctcagttgttctgtgctgtctgctcatttcagcagctttaaatttcctttctcatgttttaaatttataatgcttwtatctcatgttctttttacatttctgccagttgttgtttgcagaagttttacttttgagggaggaagacaaggaactttcccccttactacctatttgaa

SEQ ID NO: 286345 - DNA, 201 bp, Homo sapiens
tgttttggaattttggtgtgctggcttgtatttgagttggaagattccagcaaaagtcttttctttcccccacagcatcttttcacattagatgaaattgrgtatgagatgggaaaatgagcaccacacgagttcagtttcatggagtcatcctaggtgtgtcctctctactgtttgagctcccttaggctcatggtctca

SEQ ID NO: 286346 - DNA, 201 bp, Homo sapiens
tggaagttgaggctagacttggggaataactgctgagaaaaaatttaaaagggtaagcattgattattgatcaagtgactatatcatttaatattcacacycagatacctttgagagtgacagaagacattattagtagtgatataggattataagtgtaagccagagctattataggaatgtagaattgtgtagtcgttg

SEQ ID NO: 286347 - DNA, 201 bp, Homo sapiens
tgtgcccagcctcaaaaactattttgatagaggtggtgtaatcttctaaagccagctggcacatttataggatgccaggctagcccatcagatgaagtgtmcattgtggcagccacagatccacatcagatgggaagagtgtgatcagtgctgcatgcatgtttaatcaggtaacaatgggagctgtacaggaagaggatt

SEQ ID NO: 286348 - DNA, 201 bp, Homo sapiens
tggataagggacaacctgtatatacagaaagagaactgaaataatgtgtctttttggtgtgtgttattggtgtggaccaatttattagttatcagcgttaytattgttgacacccacatctgggcaaggctgtgtaactggcaaactggaccctccaccctctcgggttcacaggcctttcttcctctgcagggagtggga

SEQ ID NO: 286349 - DNA, 201 bp, Homo sapiens
gaaggttctggatagatgaggttatctagaattattcctttttcatgctaacatgagcaactcaagcatctggatcacttagggattttttttttttttttctccaatccaggtcaggtacctagcacagtgtgtggcacatagtaggagtgcaataaatatttataataggaattggtgaatgaatgaatgaggagctag

SEQ ID NO: 286350 - DNA, 201 bp, Homo sapiens
tcttgccaccttccatccctcctgcccctgtgccttgacctctcgctgacccttgttcctgagggctcttgccttcactgtcagaccagcatgagttttgycaaaatacagattcttttcagtggagtggtatataatttgatttttttgtttaaactcctacattttatagtcattggtagttaaattacaaataaatct

SEQ ID NO: 286351 - DNA, 201 bp, Homo sapiens
agggccacctgagtgcaaagaaattttcccactcagtgtgtttctgtgtatcttttttaatttgtctaaatctttttaaaacttttaagcagaagcctctsttagggtaatatgatccttcactttaaatctgaagttaaatttccttttatttgctccaactgtacatttctctggtgtcaacaacaattaattctagta

SEQ ID NO: 286352 - DNA, 201 bp, Homo sapiens
tcaacatctacgatttcattctattttaaaactctaccctggcagtaccctgcttactcattcgtagctgccttcagacatgctattctctgcttgaacayagtcgctcttagttcctcaacttttattttctcacttaagagcctgcttcactgagaatcatttcctagtgtcatgattctgaggtgccttttccatcca

SEQ ID NO: 286353 - DNA, 201 bp, Homo sapiens
actccccagtatgaggccagcacccttatccttaagcgtgtgctgggctcttgcttccatcagtcatataccaccatttttaggtggtacctgaacatttygttttaataatacttatattttatgtaaggataactagatattagaaaaatttgttaaattttgtattaaacctgtaacttcatgggcaatattgtttga

SEQ ID NO: 286354 - DNA, 201 bp, Homo sapiens
ttttattttatttagtctgtagtgttagaaaaggtaaagttactgataatcacaactgctgaagattaaaatacttagtgagttaaattatttgtttgtartgagaaattttcaaaagaattatgtgtagctttcagttgtaaccacaagttcaagatcttgagttaataacatttgtacagctagaagaaagtaaaaata

SEQ ID NO: 286355 - DNA, 201 bp, Homo sapiens
ataattatacctaacataatacagctgtcctttgtataaccggaaatgcaccaatccccaacccaaatactattacataaagttaacaatatttaaatgcygatatgaagtcaataaatcttatgtcacatgataaaggaaaaggaaataaaggtattttcttagtacaagtgtatacatgcacaaacatgtttttaacaa

SEQ ID NO: 286356 - DNA, 201 bp, Homo sapiens
cctctgttagggtaatatgatccttcactttaaatctgaagttaaatttccttttatttgctccaactgtacatttctctggtgtcaacaacaattaattstagtaaaatatgatttgatgattcttaggtctgtttttatatcatccaaactttttaaagttgttaaatttttctgaacttattttttccaatgtgtatt

SEQ ID NO: 286357 - DNA, 201 bp, Homo sapiens
aataacctgggtctaacatacttgacatctgctgttgtagtagtgtacaatatatactcacatataaattggcatggtacaaatcacataagaactaatargaattatttatagacgtgaatggtgacgtgatgtcaaataattctgaagtggtgtgtttgggatcaattctaaaggagaaggaacatgatttgtcagaaa

SEQ ID NO: 286358 - DNA, 201 bp, Homo sapiens
actttggagaaggataatgcatagtagtgatcagtatcatttattatcagcagaatggcagaacccaataaataattcactttcttaaggacctactgatrcctagtgaatccctgtgtcatcatcagcattatttaaaagatggcacagaaggaaacatctgggagccaattcatcatttaattaaattatcctgtaatg

SEQ ID NO: 286359 - DNA, 201 bp, Homo sapiens
tgtaatgagattaattttaattattaatcaggagttgacatgggcacaaggcatcattaataataaatgaaaggctttgtctgttccatttctaagaaagracctagtttactgcaacggtgctttttatacagccatgctgagtcctcacaatgtggccatccaagaagatggcttgatttttatttcagaacctagaga

SEQ ID NO: 286360 - DNA, 201 bp, Homo sapiens
acagaggtgcataaagtagttgctaaaaacaacaagtaggtttggaagagtgctcctgggcttgatagaatttagcaaccagtaggggtagaggttagtaytaatataagtggtgaaaagacttaaaagagaaggggaagttacgtcacactatcagaagtaatcatatccattacaggggttaaaacgaaattgtctcta

SEQ ID NO: 286361 - DNA, 201 bp, Homo sapiens
cacctttgacattgtctgttatctgtctcctcctcagttaattcaccctagccaaaatagcaggatgtggtctttgaatgtgccagacgtatgcacctgcytcagggcttttgcacttactttcctctatgtctaaaacgttcatctcttaagtgtttgtataactcactccctcagccccttcgggtgttttccaaaata

SEQ ID NO: 286362 - DNA, 201 bp, Homo sapiens
gtgcctgtcgttccccactatgtgtttgtgcattctcttccacccagcaatcccattactggatgtatacccaaagaaatataaatcattctgttataaaracacatgaacaggtagtttattgcagcactattcacaatagcaaagacatggaattagcctaaatgcccatcaataatagactggatcaagaaaatgtgg

SEQ ID NO: 286363 - DNA, 201 bp, Homo sapiens
tatctggtgcctcttgttataaaggcattaatcccatcgtgatgaccctgctcctcatgacgtcatataagcctaattatctatcaaaggcccatctccawataatctcacattggaagttagggcttcaacatgtgaactttggggcaatgcagacattcagcccataacgaacatcatcagtttagtatcaccaacatt

SEQ ID NO: 286364 - DNA, 201 bp, Homo sapiens
ttctcagttttgctgaaaaaagttgcgataacactactgaaaatcatacgtaaaagagatatattgtaagaagtaagtttttcattaaatatatttttaartgatttttgaatttcctttcaaagaccatgaaacagacctttggagatttatgccgtttctgcttaatgatgatgtcacattttgatgtcttctttgatt

SEQ ID NO: 286365 - DNA, 201 bp, Homo sapiens
acatcagaaagaagaacattaaacctaggaaagtatttgtggtaattgaatctcggttctgttattctactttaatacattttacatttatccatgtgctcatgttataaggatttttttgtcagtatgttttgtgtaaaaatagttgagatatgtcttagagtattatgtcattatagcatatatttgatttttacagat

SEQ ID NO: 286366 - DNA, 201 bp, Homo sapiens
tttgaattacataaaaactgccttctgtttaacattcgagatgtaaaactatccatttgattccttctaaataaccttgtttcctctctgggtttaaaaaactcctcctgtgtaagcagctgagtgacaagtattaaaggttaatgggctgcaggagagcacatgctggttgcattagaacccagcctctgagagcgctcg

SEQ ID NO: 286367 - DNA, 201 bp, Homo sapiens
aaatgaaagaaccttgaaaaatataatttcaccccactttttgctgttgttgtcacatattatataagtccctgtatacagtgcaattatttttgcttcartaggctgtctttcatgaattaagagaaaaataaaagataatcttttatatttacctatatatttacatttatgttattcttaattctttcctgtaggtct

SEQ ID NO: 286368 - DNA, 201 bp, Homo sapiens
cagtcacctccaaccagaccccacctccaacactggggactccagttcaacatgagatttgggcaaggacaaatatcgaaactctaccacccccacacccrtgagcacagtcagtttcccttgctgtggggaacttccaaggaaaagctggtgaagcagtcattttaagcttatccaagtacaaaaagaaaataagccata

SEQ ID NO: 286369 - DNA, 201 bp, Homo sapiens
cgtgcatccagatgcactgtgcaatccctgtgccagcattcactgatttttttcaggccatttggtctttgaaatacactgccgttacccaaccacatctkgtgagcaccctgccacctagaaagaggcaaaaaatagcaaatacctcctgcaaacaactgcttatctaatgatggggagatttatgacagtggttaccat

SEQ ID NO: 286370 - DNA, 201 bp, Homo sapiens
gtgggtctccgtcctcaccaagtggaagttgtctgctgcctggtgccatgtcttattgatgtaagggtttcctgagacactcatgagcaccgtccccaccmccaggtggatctactgttctcaggattccacattttccaaacataaccccaaagagtactgtacataaagtcaagagaacaggttctcctacagacattg

SEQ ID NO: 286371 - DNA, 201 bp, Homo sapiens
aatgcagcccagtagctccaagccttatcttacccagcccctattcaagatggagttgctctggttcaaacgcctctgacaacacttggcagctttcttcygaatactggtacccttgatactggagccaccttgccatgtgtcctgcacagagagctgggagtgcctgtgaattcacctctggcaaggtagtccttaacc

SEQ ID NO: 286372 - DNA, 201 bp, Homo sapiens; identical to SEQ ID NO: 58353

SEQ ID NO: 286373 - DNA, 201 bp, Homo sapiens
agggatgggcaattcccagaggtgagagttcctcccatttttagaccatgtagggtaacttcctgacattgccgtggcatttgtaatctgtcatggcactrgtgggagtatcttttaacattctaatgctttctaattatcgtataatgagcagtgaggatgaccagaggttactttcattgccatcttggttttggtgcg

SEQ ID NO: 286374 - DNA, 201 bp, Homo sapiens
ggaggtggaggttgcattgagccgagatcgtgccactgcactccagcctgggcaacagagcaagactccatctcaataatgaataaataaataaaaataaataaataaataaaagagaattgtctaacaaacaataatataggaaatctagacaatactacaaactcaaccaacggggtctctagtttcttttgtttcacc

SEQ ID NO: 286375 - DNA, 201 bp, Homo sapiens
cctgggaggtggaggttgcattgagccgagatcgtgccactgcactccagcctgggcaacagagcaagactccatctcaataatgaataaataaataaaaataaataaataaataaaagagaattgtctaacaaacaataatataggaaatctagacaatactacaaactcaaccaacggggtctctagtttcttttgttt

SEQ ID NO: 286376 - DNA, 201 bp, Homo sapiens
ccggatctcatgagaactcactcactatcatggggacagtgccaagatgatggtgctaaaccatgcgtgagaaatctgcccctgtgatccagtcacctccmaccagaccccacctccaacactggggactccagttcaacatgagatttgggcaaggacaaatatcgaaactctaccacccccacacccgtgagcacagtc

SEQ ID NO: 286377 - DNA, 201 bp, Homo sapiens
ctataacgaaatacctgaggctgggtatggtggctcaagcatgtaatcccagcactttgagaggccaaggtgggaggatcacgaggtcagcagttcgagamaagcctgaccaacatagtgaaaccccatctctactaaaaatacaaaagaattagccaggcatggtggcacacacctgtaatcccagctactcaggaggct

SEQ ID NO: 286378 - DNA, 201 bp, Homo sapiens
aataatgggctgggaatggagtttctggctcaccccttgtattggtccattcttgcattgctataacgaaatacctgaggctgggtatggtggctcaagcmtgtaatcccagcactttgagaggccaaggtgggaggatcacgaggtcagcagttcgagacaagcctgaccaacatagtgaaaccccatctctactaaaaa

SEQ ID NO: 286379 - DNA, 201 bp, Homo sapiens
gccctgtgtgattaatttatgtttctaccatttgactgtgagctccacgtgtcttttcgctagctgtgggatctgcacccagtgcatacaggtggtcggtraacaggtgctgacagcagttccaaaaagttgaatgaatcaccttaaccttccagcaacagcgaatgcgagtgtaaaatattatcacctcaccaacactgt

SEQ ID NO: 286380 - DNA, 201 bp, Homo sapiens
agaaataatgggctgggaatggagtttctggctcaccccttgtattggtccattcttgcattgctataacgaaatacctgaggctgggtatggtggctcamgcatgtaatcccagcactttgagaggccaaggtgggaggatcacgaggtcagcagttcgagacaagcctgaccaacatagtgaaaccccatctctactaa

SEQ ID NO: 286381 - DNA, 201 bp, Homo sapiens
aatgatgtcactttacagaaataatgggctgggaatggagtttctggctcaccccttgtattggtccattcttgcattgctataacgaaatacctgaggcygggtatggtggctcaagcatgtaatcccagcactttgagaggccaaggtgggaggatcacgaggtcagcagttcgagacaagcctgaccaacatagtgaa

SEQ ID NO: 286382 - DNA, 201 bp, Homo sapiens
catactttatgtttcaaagagaacctgtgtactaaactgtgtgcttagaaggtttttttgtcattttcatcttgcgaacaaccacgcaatttagatagtaycatttctgtcgtgttattgaaaaatacacagagagtcagaaatggcaaactcctaaatacacaacaaagcagaaacagaggcaggactataagcttttta

SEQ ID NO: 286383 - DNA, 201 bp, Homo sapiens
aacattcaggccattgcaggcatctagtttatccttacatagatatatggcctaggtgctaaaaatggcaacatgatctcttgattgagcttctcaatgtycaggactgaccttacaagttctcattattaaatatttaatgtggccacgcaccattcccgtgcatccgctccatcctcatggaacaatcttcacagctct

SEQ ID NO: 286384 - DNA, 201 bp, Homo sapiens
aggtgcgtttgtccctggctgccttggagttgaacgttctaacaataaagcactgtttcagagttgctgtaacattaggtgtatttcttacgcatttggtragacatatttgcagtcgctggtgagtgttcaagacagtagaaatatgtccatcagccttcttttcacctgtttttacaactgtaattgatgtgaagatgt

SEQ ID NO: 286385 - DNA, 201 bp, Homo sapiens
ttcttccccttctcccaggttcggtgtattttcttagctcacctagaagtggcatgattttaggatttgaagcagtatcacttcacttcttaatttgtctrttttgttttctgcttttagacagatacattgataactccatttgtgggtttaatagaccacaacttccaggcccagccgaatcctgctgaagttaaggat

SEQ ID NO: 286386 - DNA, 201 bp, Homo sapiens
ttagctgtgcaaaagctttttagttgaagtaaccccatgttttatttttgctttcattgcctgtgcttttggggtcatattttaaaaatcattgcccagcycaaggataacattttcttgagagcaatgttctcactaatccaaaatgatcttttccaattcctattacctattaattggaataggtgtacaaggcaaatt

SEQ ID NO: 286387 - DNA, 201 bp, Homo sapiens
ttacattcccaccaagagtgtgtgatagttcccttttttccatatcctcaacaacacttacgttttgttttttagataatggccattctaaaaggtgtgasgtaatgtctctctgtggttttaatttgaattttcctggtgattagtgatgttaagcatttttttcatataccttttgagaaatgtctatttagttccttt

SEQ ID NO: 286388 - DNA, 201 bp, Homo sapiens
atgcaaaattagctgggtgtggtggtgcacacctgtagttccagctactcgcgaggctgaggcaggagaatcgcttgaacctagaaggcagaggttgcagkgaaccgagattatcccactgcactccagcctgggcaacagagcgagactctatctcaataaataaataaataaataaattttaaatcaacagataaaatt

SEQ ID NO: 286389 - DNA, 201 bp, Homo sapiens
atttataaagaaaagaggtttcattgagtcatggttctgcaggctgtacaggaagcatgacacaggcatctgctcagtttctggaaaggcctcagggagtktaccatcatggcagagggggagcaggagcaagagagagagcagggaaataccacacacttttaaatggccccggatctcatgagaactcactcactatca

SEQ ID NO: 286390 - DNA, 201 bp, Homo sapiens
tttaaatttaattcaatctgattgtaaacactatctggctgtaggggtgagaaattccctctggagctctactggagctctgcccctcacacaagcagggsgctggtaggagatttccccccagtggatggggaaagcaaggcaagaagtgggttaacccttctcaaatgtgcaatctcccactagctctggaacctcgaa

SEQ ID NO: 286391 - DNA, 201 bp, Homo sapiens
ggctgtacaggaagcatgacacaggcatctgctcagtttctggaaaggcctcagggagtgtaccatcatggcagagggggagcaggagcaagagagagagsagggaaataccacacacttttaaatggccccggatctcatgagaactcactcactatcatggggacagtgccaagatgatggtgctaaaccatgcgtgag

SEQ ID NO: 286392 - DNA, 201 bp, Homo sapiens
ttacatacacgctgctccccttcccagccggcttggctgttctgcaatccgcgtctccagagttggaccccaggacccccgacagtggcacagacccgcascaggcagccccggattcaagtcccccggtggctactttcagttgtgaccttgggtctgtcagtttcgtaaactctctgagcctggaggtgaccctgtgat

SEQ ID NO: 286393 - DNA, 201 bp, Homo sapiens
acagctctccgggaagcccaggaggaagtgggtctccgtcctcaccaagtggaagttgtctgctgcctggtgccatgtcttattgatgtaagggtttcctsagacactcatgagcaccgtccccacccccaggtggatctactgttctcaggattccacattttccaaacataaccccaaagagtactgtacataaagtca

SEQ ID NO: 286394 - DNA, 201 bp, Homo sapiens
aataagcacaggagaagcacttacatatattttttaaaattatcagatatggccgtgtgcggtggctcacgcctgtaatcccagcactttgggaggctgargtgggcggatcacctgaggtcaggagttcgagaccagtctggccaacatggcgaaaccctgtctctactaaaaatacaaaaaattagccaggcgtggtgg

SEQ ID NO: 286395 - DNA, 201 bp, Homo sapiens
atcacagcgatgtttcatcggtatcacagtttgtaaaccttggatattataaacatcacagcgatatttcatttatatcacgatgtgtaaacactggataytataaatatcacagcgatgtttgcttaatatcacggtgtgtaaacactgtatattacaaatatcacagccatattttattaatatcacggtgtgtacaca

SEQ ID NO: 286396 - DNA, 201 bp, Homo sapiens
cgtgaactcaggacatgatagaaatccaggttccagggggaaatacttaaatggaaaccaggggaccagtgtctgttcccacctctgccaataagcacagragaagcacttacatatattttttaaaattatcagatatggccgtgtgcggtggctcacgcctgtaatcccagcactttgggaggctgaggtgggcggatc

SEQ ID NO: 286397 - DNA, 201 bp, Homo sapiens
ggagttttgtggacgtggaagtagacttgtgtggattgtgttcggtctgagccaggcagaaatgccgtgaactcaggacatgatagaaatccaggttccarggggaaatacttaaatggaaaccaggggaccagtgtctgttcccacctctgccaataagcacaggagaagcacttacatatattttttaaaattatcaga

SEQ ID NO: 286398 - DNA, 201 bp, Homo sapiens
agaaaaattttcaaggttcatttcttaaaaaggattcaagaaaacacatttgtgggcaataggggtcttgataccaccacctgggtaagaatggtctctgstacaaaatagaagttcagtaagtatttgttgaatgcataaatagttccaaaattagaatcccacattgtagcgctgttctttctatatccagctaagaag

SEQ ID NO: 286399 - DNA, 201 bp, Homo sapiens; identical to SEQ ID NO: 58352

SEQ ID NO: 286400 - DNA, 201 bp, Homo sapiens
atttgtgggcaataggggtcttgataccaccacctgggtaagaatggtctctggtacaaaatagaagttcagtaagtatttgttgaatgcataaatagttscaaaattagaatcccacattgtagcgctgttctttctatatccagctaagaagggcccctggagaagtttgcttccctggaggtaagcgtgaccctacag

SEQ ID NO: 286401 - DNA, 201 bp, Homo sapiens
cagcttaacagaaggtagtcttctaaccttctaaccttaacaatgactttttcatcaaacctgtcttctctgaatataattatgggtttcaaaattcaacygttgcattattgaaaaaacattttaccatactttatgtttcaaagagaacctgtgtactaaactgtgtgcttagaaggtttttttgtcattttcatcttg

SEQ ID NO: 286402 - DNA, 201 bp, Homo sapiens
ttcctgacattgccgtggcatttgtaatctgtcatggcactggtgggagtatcttttaacattctaatgctttctaattatcgtataatgagcagtgaggmtgaccagaggttactttcattgccatcttggttttggtgcgttttgatggccttctttactgtaaggtctttatgacttgtatctcagtctcatctggtg

SEQ ID NO: 286403 - DNA, 201 bp, Homo sapiens
tgctagataccaaattttagccccttggagaccaccaatgcattacttctgccgtaaggatattcatttttctacatactatagaataaagcctctctgtratacattaattgaatagaaccgtgaaatcactaggcaagctatttaaaaactattactattcataactgcatttgtgttggatcaggatttccttgatag

SEQ ID NO: 286404 - DNA, 201 bp, Homo sapiens
gcccctggagaagtttgcttccctggaggtaagcgtgaccctacagacatggatgatgcagccacagctctccgggaagcccaggaggaagtgggtctccrtcctcaccaagtggaagttgtctgctgcctggtgccatgtcttattgatgtaagggtttcctgagacactcatgagcaccgtccccacccccaggtggat

SEQ ID NO: 286405 - DNA, 201 bp, Homo sapiens
  misc_feature (1)...(201): n = A,T,C or G
aggtaaaggctttccgggccctggcaccccgagcttggtcaggcccggccttgatcgtagcggaggccaccggggccttttggccgggactgattttgcanctcccgccagtccacctgcgagcgccggatgggggagcactcgcctccagcaacccgcagggtccccgaacctttgcactgctctggccaggaacagagc

SEQ ID NO: 286406 - DNA, 201 bp, Homo sapiens
gttcatttcttaaaaaggattcaagaaaacacatttgtgggcaataggggtcttgataccaccacctgggtaagaatggtctctggtacaaaatagaagtycagtaagtatttgttgaatgcataaatagttccaaaattagaatcccacattgtagcgctgttctttctatatccagctaagaagggcccctggagaagt

SEQ ID NO: 286407 - DNA, 201 bp, Homo sapiens
ctctctctgtctcccgctccagccatgtgaagtgcttgctcctcctttaccttccgccatgattgtaagtttcctgaggtctccccagaagccaagcagaygccagcatcatgctccctgtacggcctgcgagactgtgagccaaccaaacctcttttctttataaactacccagtctcagttatttatttatagcagtgc

SEQ ID NO: 286408 - DNA, 201 bp, Homo sapiens
aacccagaagcagtagctacaccatatagcctaggtttatagtagtctatattatccaggtttgtgcaagtgcaccctgtgttgtttacacgatgatgaartcgcctaatgcatttttcagaacgtgtccctgttgttgagtaacacgtgactgtacatttaaaacaggcatcatatcaggtctgtttctgtcaagcctga

SEQ ID NO: 286409 - DNA, 201 bp, Homo sapiens
gaggggaatgagaatcaactgttgtatggggtttccttctgggatgatgaaaatattctggaatgagatagtagggatgattgtacaacacagtaaatgtrttaaacgtctctgctttttttcactttaaaatggttacttttatgtgaatttcacctcgttcaaaaattagtagcttataggactgttctgaggacccag

SEQ ID NO: 286410 - DNA, 201 bp, Homo sapiens
accaggcctcctatatacatttgaagccaattctgggtatcttaaatagctgattctgcccactatgcaaagctgccttcccacagaaaaagtaaaatcarctgttccttttctagggctgccataacagagtaccacacactgggtgttttaaaacaatagaaatggtctctcatggctatgaagcctggaagtccaaaa

SEQ ID NO: 286411 - DNA, 201 bp, Homo sapiens
ttgaattgattgacaccgacatagaaaaacaacagacactcagtgcctcagtccccaattctatctggcctaacatgggtcacctggaaggtttccaggawcccaaaaatatgttcaaaggcaagggctaagtggggactagatggacatcccaaaacatctaatctctccagtccctagattttataaatgctctagatt

SEQ ID NO: 286412 - DNA, 201 bp, Homo sapiens
cagtatgtagttagaatccttgcctcttttccagttgccttctattgtctgaaaaagtaaaagccattcaaaaatgaaaactatgttcatagtgttgcatrttttcacccacaatatgttaataatatttttcttacacatataataaagaatatctggcacatactaggcccttaataaagattttttgaatatataacc

SEQ ID NO: 286413 - DNA, 201 bp, Homo sapiens; identical to SEQ ID NO: 58359

SEQ ID NO: 286414 - DNA, 201 bp, Homo sapiens
ggtttcaaaattcaactgttgcattattgaaaaaacattttaccatactttatgtttcaaagagaacctgtgtactaaactgtgtgcttagaaggtttttytgtcattttcatcttgcgaacaaccacgcaatttagatagtatcatttctgtcgtgttattgaaaaatacacagagagtcagaaatggcaaactcctaaa

SEQ ID NO: 286415 - DNA, 201 bp, Homo sapiens
tcagcctcctgagtagctgggattacaggcacgcaccaccacacccggctaatttgtgtatttttagtagagacgggatttcatcatgttggctaggctgstctcaaactcctgacctcaggtggtccgcccacctcagcctcccaaagtgctgggattacaggcgtgagccaccacacccggccactcatgttcatttgc

SEQ ID NO: 286416 - DNA, 201 bp, Homo sapiens
atacaaaggcaggcagctcttaccagttcccacatcctcactcagccccaggcctccctctcagggtttccagtataacaaaacagtctttcatttgacarcactcatgttcatttgcttttttacttttatatatttatttttatttttgagactgggcctctctctgtcacccaggctggagtgcagtggcatgatctc

SEQ ID NO: 286417 - DNA, 201 bp, Homo sapiens
agcctgaggaacagcgagactccatctcaaaaaaagaaagaaagaaagaaaaagaaatatctgagtctgggtaatttataaagaaaagaggtttcattgastcatggttctgcaggctgtacaggaagcatgacacaggcatctgctcagtttctggaaaggcctcagggagtgtaccatcatggcagagggggagcagga

SEQ ID NO: 286418 - DNA, 201 bp, Homo sapiens
ataataatagtataagagtagcttatggctgggtgcggtggctcacgcctgtaatgccagcactttgggaggccgaggagggcagatcacgaggtcagaakatcgagaccagtctggctaacatggtgaaaccccgtctctactaaaaatacaaaaaattagccgggcatgctggtgggcacctgtagtcccagctactca

SEQ ID NO: 286419 - DNA, 201 bp, Homo sapiens
actgagtgaacttggtcaggttatttaacctctgtgagcctaagttcctttgtctgaaaatggaaataataatagtataagagtagcttatggctgggtgyggtggctcacgcctgtaatgccagcactttgggaggccgaggagggcagatcacgaggtcagaagatcgagaccagtctggctaacatggtgaaaccccg

SEQ ID NO: 286420 - DNA, 201 bp, Homo sapiens
cgttgaatccaggctctctccttgccagctgtgactttggcctcgttacttgccctctctgtacttcagtcttttcacttgtaaaatgaggacaaaatatyagtaactgcttcatacagctgctatgaacatttcacagggtaacaaatgtaaagcacctatataacccaggtacttggcaaggaagaattcagtaagttt

SEQ ID NO: 286421 - DNA, 201 bp, Homo sapiens
tgaggcagcagaatcgcttggacctgggaggcggcggttgcagtgagccgagattgtgccactgcaccccagcctgggtgacagagtgagactccatcttaaataataataataataataataataataataataataataataataataataattccctctacttccagcccctggaagccaccattctactttctgttt

SEQ ID NO: 286422 - DNA, 201 bp, Homo sapiens
tcagagagacagaattaataggagatatatatctatatctatatctgtatctatctaactatatctatatctatctatctatctatctatgtagagagagrcgggggagatataagaaaggatttattaggggaattgactcacttgattatgtaggctgagaagtttcataacagatcatctgtaagctggagtgccagg

SEQ ID NO: 286423 - DNA, 201 bp, Homo sapiens
aacagggtaatttggttttgatattttttctttctaaccacgaaacatcccaagatcttttttcatgtatagactctggttctctcttgcctctctgcctkccctcttgtatcagcagtacatgatcttacttctatcttttaaaacttaactctgtgtctcatgctgtcagtcaatgccctttacttgccaaaagttact

SEQ ID NO: 286424 - DNA, 201 bp, Homo sapiens
agatgcacctggggtagcccaatcattagaatcaaatgctaaatcacttgggtttcccttttacagaagggagacatgatcagtttctactgaagcattgrgaataatttgtactttatcagctgctgggtatcccttaatccagtcaaggtcacatccaaaatcaaccatcatagcacccttgtcaaaaatcatttaacc

SEQ ID NO: 286425 - DNA, 201 bp, Homo sapiens
caaccacaggcctctcacagtggtacctgttctgaaaagacagcagaagggctgagctgtacgcatcctttggcaggtcctgctcccagattgacccatcrggtaattcacatttccttgcctgaggaggaatgggtgagggacagtggaagggcttgcagtgatgctctaatgaagggccctcagccagctgtaggggga

SEQ ID NO: 286426 - DNA, 201 bp, Homo sapiens
ggattgtattgagtcaatagattgtgttggtagtatggacatttgaaaaatattgtcttccagtccatgaacatggaatgttttccatttttatattcttytttaacttctttcagcaatattttataattttttactgtacaagtctttcacgtctttagttaattcctaagtattttatttgttttgatgctatcgtaa

SEQ ID NO: 286427 - DNA, 201 bp, Homo sapiens
atatattaatcacatgtcttagaatatcctggagcacctgtcctctcacctacctaaaatacttgattcccaatggtcaatgactttttaaaaaaaggggrggggggggattggtatgtacatagatattgtgggaacgtacaattttttaaaaagtgatgataaagttctataggtaccttcacaaaccactctgttcta

SEQ ID NO: 286428 - DNA, 201 bp, Homo sapiens; identical to SEQ ID NO: 58361

SEQ ID NO: 286429 - DNA, 201 bp, Homo sapiens
taacattttatagtattttccaacattatcacagatttcttaatatctgcttatttcatctactgtaaaaataataatttacctatatattcatttatagytggacatttaatttgtcttggggtgaggctaggttcattgaagctgtgatgtacattttttgcatctaaattcttttcaaaggttagatctattttctta

SEQ ID NO: 286430 - DNA, 201 bp, Homo sapiens
tttcagtgatattaacttttagactaataattgtttttttaaaaagtattagtttcttaaatcatgtacagaacacaaagtcaagaaacattgttataatmataccaccttttacaatgtccctatgtttaccttcattgatatttttatttctttatatagattctagttactgtatagtatgctttcattttaacctgc

SEQ ID NO: 286431 - DNA, 201 bp, Homo sapiens; identical to SEQ ID NO: 58362

SEQ ID NO: 286432 - DNA, 201 bp, Homo sapiens
aggttaaataacttccttgcccaaggtcacacaataacgaggaatcagagttcaaacccaggcagtatgactccagatctcaggctcttcaggtatgatartaaactgttgtatacttgttggataaatgcgacctcattcttgctttttaaaaactatatttattcttaaaattattatgtaaaaattttttaaattata

SEQ ID NO: 286433 - DNA, 201 bp, Homo sapiens
actttcctctcttcagaatctattgttgtggctgtttggattctttagccacatggaaatgactgctgcctaagcacattgcctaatcccactgccaaagkcatttgaagtcaagagttatctcacctcttttttttttttttttttttttttaatgtttttttttttattatactctaagttttagggtacatgtgcaca

SEQ ID NO: 286434 - DNA, 201 bp, Homo sapiens
gtgggagtaaattttgttgtgagttgtgttgcctggtgttgcaggaggaatggcacaagcacttccttagccaccctggctggtgtccaatgttcactgaytctaagcccagcacagcactaggacttgcccaggaattgcagtccttgtggcctagactgcctctcaagtttgtttaggatcccagagcacttaagccca

SEQ ID NO: 286435 - DNA, 201 bp, Homo sapiens
gccaaacactctgagtaaataatttactcatcctcataccaacccatttaggtaggcacgcccattttgcaggtggaaaactggagcaagaaaaggttaartaacttccttgcccaaggtcacacaataacgaggaatcagagttcaaacccaggcagtatgactccagatctcaggctcttcaggtatgataataaactg

SEQ ID NO: 286436 - DNA, 201 bp, Homo sapiens
ggaattgcagtccttgtggcctagactgcctctcaagtttgtttaggatcccagagcacttaagcccatggtggtaagtcttgtgaaaattcaagttccarctgctgggatgggtgattcccctctggctagggctgatctatatgctccctgtgtgtgttggcattggctgagtttagcccagctttactttccattgtg

SEQ ID NO: 286437 - DNA, 201 bp, Homo sapiens; identical to SEQ ID NO: 58366

SEQ ID NO: 286438 - DNA, 201 bp, Homo sapiens
accacaatctggacacatttaaaaaaaatttctcctttctctcttctttgtcaaggtgtcttcttatttattttgggaatgggaataaacattcatagtgwctatatattgcgccagctcaggaagcctggagaaatcagctacaggattccacaaggtaatgtctcccctgcccccagactctcactcttccctggagcc

SEQ ID NO: 286439 - DNA, 201 bp, Homo sapiens
agtagatctgctgttaggtctttttcaggggcagtttctgttgactattttttcctttgaatgggctatattttcctcttttttttttgaatgccttgtgtttttttttgttgaaagttgggtatttcaatttaatgatgtggtaactctgggatgcagactcttctttttcctcaaggttgtttgctttttgttattgtt

SEQ ID NO: 286440 - DNA, 201 bp, Homo sapiens
tgaggcaggagaattgcttgaaccctggaggtggaggttgcagtgagccgagatcgtgccactgcactccagcctgggcaacagaatgagactctatctcaaaaaaaaaaaaaaaaattgactcacacataatgcaacacctgtctgcatacttttgccagtcactccataatttaaaatgtgcttcttcataggaagcat

SEQ ID NO: 286441 - DNA, 201 bp, Homo sapiens
tgggctgtaataatgccttttgggatgcaggatctagcatccctgatcctggctgtcctcacctcagaacagggccctttctgtaccagtggatagtgcaygtggagacacctccaggatatgtggctaagtaagataaataaaaatgtgaacagtgtgtgtagtatgctacttttaatgtcagaatgtgtgtgtgtgtgt

SEQ ID NO: 286442 - DNA, 201 bp, Homo sapiens
ccttgcccctctccctccttttcccttttggaatccctggtgtgtattgttcccatctttgtatcaggacaatatttaaatgtaggtggaaactttttaamagttctcaaatttatggcaatatctaggcctcattgctgcaaaactgtacagagctgtttgcttccaaataacatcagaagacttgggattgttaatggg

SEQ ID NO: 286443 - DNA, 201 bp, Homo sapiens
attatttttcatggctgcataatattccatggtgtatatatgccacattttctttatccagtccaccattgatggatatttaggttgatttcatgtctttrctgttgtgaatactgctgcaatgagcatgcacatgcatgtgtctttatggtagaacaatatatattcctttggggatatacccaataatgggattgctga

SEQ ID NO: 286444 - DNA, 201 bp, Homo sapiens
cttttttaacagtgaatcctaacctttcctccctgtgtgtcccaggacatttgtgtactcactgctcaatcgagggaggccttatccagctatactcattstcagaggcactgccttctgcactggaaatggagtccttcaaggctactatctgatttactgtgctgaataccctgatgggtggtacacagacatacggtt

SEQ ID NO: 286445 - DNA, 201 bp, Homo sapiens
tgcacctttggtagcatatccaagaaatcactgccagatacagtatcatgatgcttttgtcctacgttttcttttaagaattttatagtttttttcttatrtttaggtctttgatcaattttgagttaatttttctatatagtattaggtaagggtctaatttatttattttgcatatggatatccagttttcccagcatg

SEQ ID NO: 286446 - DNA, 201 bp, Homo sapiens
tgtctccagttgcaaaaatgacctcttcatctccgtaatcacagtgctcattttcacagtggagttgctattaggtagggcaagtaccatctgattatgawttgattaaagcattcatattaagcatgtgtgagtgacaggctcaacttttttttcagggagttagtgtttatcttcaatcttctagattgaggtaagaca

SEQ ID NO: 286447 - DNA, 201 bp, Homo sapiens
tcaaaatgattcagttgcaatgattgaccttccgattcttctgcacgcaggtggcttgtttacgtatgtttctggagccaatttcctcggtgagatcattraatggatcggctatgccctggccacttggtccctcccagcacttgcatttgcatttttctcactttgtttccttgggctgcgagcttttcaccaccatag

SEQ ID NO: 286448 - DNA, 201 bp, Homo sapiens
tttaatgtcaaaatgattcagttgcaatgattgaccttccgattcttctgcacgcaggtggcttgtttacgtatgtttctggagccaatttcctcggtgasatcattgaatggatcggctatgccctggccacttggtccctcccagcacttgcatttgcatttttctcactttgtttccttgggctgcgagcttttcacc

SEQ ID NO: 286449 - DNA, 201 bp, Homo sapiens
ttcagttgcaatgattgaccttccgattcttctgcacgcaggtggcttgtttacgtatgtttctggagccaatttcctcggtgagatcattgaatggatcrgctatgccctggccacttggtccctcccagcacttgcatttgcatttttctcactttgtttccttgggctgcgagcttttcaccaccataggtaaatttt

SEQ ID NO: 286450 - DNA, 201 bp, Homo sapiens
ctgcaaacctctacagcctgttactgtactgactactgtaggcaattggggtacaataatctaatgagactataatcatatatttagtgtgccattgaccraaatgtcattatgatgcatgactgtagttaagatgaggtcatactggattaggtaggttctaaatccaatgtgactagtgtcctcataagaggagagaaa

SEQ ID NO: 286451 - DNA, 201 bp, Homo sapiens
atatctggctcccaaaaggagaaaaagagaaaaatgaaaaagggagtggaaatagggtgccagccctttaaatctctggaagtcatttcagctggatgggraggggtttgcaacaatggaataaggtgtaacagcaaagacccaccacctctttgtctgtacctctctgatcagaagcagcaatcatcaatctaagcacat

SEQ ID NO: 286452 - DNA, 201 bp, Homo sapiens
ttctggactcggcagcaggtcaagccaaagtggcaacatttgcagcctggagatcacacagtctgggagctcaaacatttaggcaataaaagctgatggamgccaaaaagccacgccactggcatctggtgtcagggtagctgctgggggagatctggccatggtggtggggcccagccatataaacaagttcagaggtag

SEQ ID NO: 286453 - DNA, 201 bp, Homo sapiens
ggttcaggagaactttgctttctgctctgggaaggaaagacaggaaagagaccaagggatgtcagggttcagagaaagactgtccagcctcagtaaagtctcacagggaaagggaagaacgaacacattgttaaattgcctaccatgcccaatcgtttagtatctatggtctcacttaactctgttgtaaccttttgagag

SEQ ID NO: 286454 - DNA, 201 bp, Homo sapiens
tattttaatttttagctccagatgttctttttaggttttcaaaatctttatttgtattgtcattttgttttatacattgttttcttgacttcatccacatktacttttagtttatttatttatttatttattgagacaggttcttgctctgtcatccaggctgtagtacatggttcagttagctcactgcagcctcaacct

SEQ ID NO: 286455 - DNA, 201 bp, Homo sapiens
cagtggatagtgcatgtggagacacctccaggatatgtggctaagtaagataaataaaaatgtgaacagtgtgtgtagtatgctacttttaatgtcagaatgtgtgtgtgtgtgtgtgtgtgtgtgtgtgtgtgtgtgtgaactggcagtgatggaagtcagtttgttagtggccacgcctccaaactagctcacgttatt

SEQ ID NO: 286456 - DNA, 201 bp, Homo sapiens
gcgggcgggaggcgacctggaaagctcaggttggggagacctattggacaggactgttccttaactgcgcgcaggcggcggttacctgtggcatatcgcgycccgccccgcttccctttcttccttcaccttttccttgcagggtggggacagattagttctgggatcttgggagagtcttacgcgtttggcatctcccga

SEQ ID NO: 286457 - DNA, 201 bp, Homo sapiens
atctatgaattcatcttacttggagttaattgagcttcttggaggtttatgttcatgtcttttttcaaattcgaagaatttttcaccattatttcttcctrtattctctctactcctttctttctctctgcgttgtctgggactctcatggtgtgtatgttgagccccttgatgatgtctcacaggtctcttgggctctgc

SEQ ID NO: 286458 - DNA, 201 bp, Homo sapiens
tgaaaaccatcccatgtcaatatttgtattttcttgattttgtaataatcagttagcatgagtggctgagcaactgttgtttcatgatgccaaaatccacytcaagttgatcaatttatagaaaacggtaaactagttattcaaataagttgatttagttactcaggccatgaagttgatctgattctctttgattttgat

SEQ ID NO: 286459 - DNA, 201 bp, Homo sapiens
aaagaaacattgtttcttaaaacaatgttttaagaaagtgtacgaatttgtgtcaggccacatccaaaactgtcctgggctgcatgtggcccacaggctgygggttggacaagcctggcctagaaggctttgcccccatgtattcatgggggttggttcctcactttatttagttccctaccaatttgcacctcctcaaag

SEQ ID NO: 286460 - DNA, 201 bp, Homo sapiens
agtggatagtgcatgtggagacacctccaggatatgtggctaagtaagataaataaaaatgtgaacagtgtgtgtagtatgctacttttaatgtcagaatgtgtgtgtgtgtgtgtgtgtgtgtgtgtgtgtgtgtgtgaactggcagtgatggaagtcagtttgttagtggccacgcctccaaactagctcacgttattt

SEQ ID NO: 286461 - DNA, 201 bp, Homo sapiens
gagataccaacagatggttatgaatgattggtttgaaactttcacatggaaaattatgttgcagaaacctcagattgtgcttttgttctttttttgtttgstccaaatgaacaatggaatggaggtagatgtaggagggagatatgctgaggtagatcaatctttgaatgttgcctttgatcagggctactgaatccctgg

SEQ ID NO: 286462 - DNA, 201 bp, Homo sapiens
cttccatttccaccttcagtttcatcccctcccaccacatttctggaagtgtgctccagaggtgggaccatggccagcactttccaaagctccacagatatttatttatttatttatttatttatttatttttgagtcggagtctcactctgatgcccaggctgaagtgcaatggggcgatcttgcctcactgcagccttc

SEQ ID NO: 286463 - DNA, 201 bp, Homo sapiens
ataaataggaagtaagggtgtgcttgttcttggcctgagcctgaagaggccttgtgtgtttcttctactctcgtacttttgttattaacattatatagacrtggtggagctagctcactcatcccaggatgagagcctcagctaagtttctccatccaaacacagcctggagctgggctctaacttgttacacagatgaat

SEQ ID NO: 286464 - DNA, 201 bp, Homo sapiens
aatataaaccagctttggagatcgtgaccacttcacttttaccacactgaagaaaggaccaactttttgtccatttaaaatctaatttaatgtcacttaaraagaacaaacaaaataaagaattacgatgggaattcaaggattcagactggcaaagtgacatgtaccaagttacatggcaagaaagggcagagtggagct

SEQ ID NO: 286465 - DNA, 201 bp, Homo sapiens
ttccatttccaccttcagtttcatcccctcccaccacatttctggaagtgtgctccagaggtgggaccatggccagcactttccaaagctccacagatatttatttatttatttatttatttatttatttttgagtcggagtctcactctgatgcccaggctgaagtgcaatggggcgatcttgcctcactgcagccttca

SEQ ID NO: 286466 - DNA, 201 bp, Homo sapiens
catttctggaagtgtgctccagaggtgggaccatggccagcactttccaaagctccacagatatttatttatttatttatttatttatttatttttgagtyggagtctcactctgatgcccaggctgaagtgcaatggggcgatcttgcctcactgcagccttcacctcccaggttcaagtgattctcccacctcagcctt

SEQ ID NO: 286467 - DNA, 201 bp, Homo sapiens
ttacatctggcaatcaagacaggaagaaagacgaagtaggggcaccggtcttgcctgcaccttttatcagaaaagcaaacgatttccaaggaagtcccccmaccaagacttcactttacatcttattggtggaactagctcatgtgaccccctttctcagtgcaacctctgtagtgggggatggcaaaagaaaaggggctg

SEQ ID NO: 286468 - DNA, 201 bp, Homo sapiens
ggcagatactcttattttctttccttactttctcccaaacagagtccctctgtcagttctgagacacctgaagctaggagtggagtgaaaccagcacccckgaggacaccaccactatgactgtgctcagccagacttgaagccagcacaacactgggtcttccctgctgtaaccactccctggccactgcctatgtttgc

SEQ ID NO: 286469 - DNA, 201 bp, Homo sapiens
ttaatgattagtgttttgtgacaatcctattaatgtaatctttaggcttgtttttgaaatcaaaaggcactttgcacaatacattatgaccggtgcatttaaaaaaaaacccaaaggagtaattatgcataaaacaaatatctacatattgtccttcttcagaggaaattttaaaatattagtaaaggacttggagattca

SEQ ID NO: 286470 - DNA, 201 bp, Homo sapiens
cctgtagcatgagccaagtgcagcctgccaggctgagtggacagattgagctcagtgggcatgagcaatactcaggcagaaggcactactggccacagagktttccagctggtgaagtgacaccccaaggatctcgtgacacaaagacttgtatacaaatgtttgtagtagctttatttgtacaagccaaaaactaggagt

SEQ ID NO: 286471 - DNA, 201 bp, Homo sapiens
tcctgaggacacaagagggacaagaaggtagaactacaaagggtatgaagaaccttttgttgtgatggatgtgttcattatttttatgtcacatggcttcrtgtgacatgaaatatatctaccaaactgcactggtagatatatatatatatatatatacacacacacacacacacacacacaccaaattgcaccctttaa

SEQ ID NO: 286472 - DNA, 201 bp, Homo sapiens
aagggtatgaagaaccttttgttgtgatggatgtgttcattatttttatgtcacatggcttcatgtgacatgaaatatatctaccaaactgcactggtagwtatatatatatatatatatacacacacacacacacacacacacaccaaattgcaccctttaaataggttcagttgactgaatagtaatttacttcaataa

SEQ ID NO: 286473 - DNA, 201 bp, Homo sapiens
attgcttatctgattttctgtttttacgaaggtgctttttgtgtgtgtagatagttgttaaattggtcttcctgcagtggggatcattgttgcaggtttcmgtttggccatcttgctccaccctccctcttttccagttcttaaagtatcttcaagacagttattttaaagtcttttttgagtagatctgctgttaggtct

SEQ ID NO: 286474 - DNA, 201 bp, Homo sapiens
gttgtgatggatgtgttcattatttttatgtcacatggcttcatgtgacatgaaatatatctaccaaactgcactggtagatatatatatatatatatatacacacacacacacacacacacacaccaaattgcaccctttaaataggttcagttgactgaatagtaatttacttcaataaaaataagaaaactaggtagg

SEQ ID NO: 286475 - DNA, 201 bp, Homo sapiens
tgtgattgcttatctgattttctgtttttacgaaggtgctttttgtgtgtgtagatagttgttaaattggtcttcctgcagtggggatcattgttgcaggkttccgtttggccatcttgctccaccctccctcttttccagttcttaaagtatcttcaagacagttattttaaagtcttttttgagtagatctgctgttag

SEQ ID NO: 286476 - DNA, 201 bp, Homo sapiens
atgaacacagtctgattgataccgaagaaccatctgtccctacatatttttcatggtcctgaaacatgttggaaatttctaccatttgagtaatggaaggmatgtttaaagcaacatgtttccagagagccaggtgaaaaatgcaaattgatgccagggaaaagcaaaatgaaatcctgcatcactgactactccttatcc

SEQ ID NO: 286477 - DNA, 201 bp, Homo sapiens
actcatctgctgagaatcagaatgagaattaatggctactttggaaacaatagacaaatctctcctcttagagattaagaaaaaaaaagcccaagcaagawaagcaacattcctgtgatcacttaatcatgtgttaaggatgttcctgaatcataatttaaataaattaagattaattgaaggatttttttagaatgagag

SEQ ID NO: 286478 - DNA, 201 bp, Homo sapiens
aacagtgaatcctaacctttcctccctgtgtgtcccaggacatttgtgtactcactgctcaatcgagggaggccttatccagctatactcattctcagagrcactgccttctgcactggaaatggagtccttcaaggctactatctgatttactgtgctgaataccctgatgggtggtacacagacatacggtttagcttg

SEQ ID NO: 286479 - DNA, 201 bp, Homo sapiens
tatctatgaattcatcttacttggagttaattgagcttcttggaggtttatgttcatgtcttttttcaaattcgaagaatttttcaccattatttcttccyatattctctctactcctttctttctctctgcgttgtctgggactctcatggtgtgtatgttgagccccttgatgatgtctcacaggtctcttgggctctg

SEQ ID NO: 286480 - DNA, 201 bp, Homo sapiens
cttacagctcaaatgttcttctagatttaaaaaatccgggttcaggagaactttgctttctgctctgggaaggaaagacaggaaagagaccaagggatgtyagggttcagagaaagactgtccagcctcagtaaagtctcacagggaaagggaagaacgaacacattgttaaattgcctaccatgcccaatcgtttagtat

SEQ ID NO: 286481 - DNA, 201 bp, Homo sapiens
cccaggacatttgtgtactcactgctcaatcgagggaggccttatccagctatactcattctcagaggcactgccttctgcactggaaatggagtccttcraggctactatctgatttactgtgctgaataccctgatgggtggtacacagacatacggtttagcttgggtaagtgaatctgcccacttctcacctacttc

SEQ ID NO: 286482 - DNA, 201 bp, Homo sapiens
acatctgctcttttttcatttccatttgcatgaaatgtcatcttccatttttccactttcaatttatttgtgtctttggagctaaagtgagtctcttgtaracagcatatatttggatcatttaaaaaatccattctgctcatctatattggttgaagagtttaatacattttcatgtatgctattactgaaaaggaggaa

SEQ ID NO: 286483 - DNA, 201 bp, Homo sapiens
gggcctcttctgcgtacattacttccacaggtagcgtttttcccttgcgggcgcccagtgcagcgcactgccctgctcccggcgtccaggagcgcagcgtrgagcgcgcaccgaggaacgccaaggaggcagcgtggggcgctgtgaggaacgcggaggccagcctgcctggcgcacctggcgggggccggggccggggct

SEQ ID NO: 286484 - DNA, 201 bp, Homo sapiens
attgaccttccgattcttctgcacgcaggtggcttgtttacgtatgtttctggagccaatttcctcggtgagatcattgaatggatcggctatgccctggmcacttggtccctcccagcacttgcatttgcatttttctcactttgtttccttgggctgcgagcttttcaccaccataggtaaatttttcaataaaagcgg

SEQ ID NO: 286485 - DNA, 201 bp, Homo sapiens
gcaggtggcttgtttacgtatgtttctggagccaatttcctcggtgagatcattgaatggatcggctatgccctggccacttggtccctcccagcacttgyatttgcatttttctcactttgtttccttgggctgcgagcttttcaccaccataggtaaatttttcaataaaagcggcagcattcacgtagctttcttctt

SEQ ID NO: 286486 - DNA, 201 bp, Homo sapiens
ttgtttccttgggctgcgagcttttcaccaccataggtaaatttttcaataaaagcggcagcattcacgtagctttcttcttctccaaacaggcttttaasccgcagaggaagattgagaaaccgaagatatttaattttttaagggaaggttgatactataatctgggttagcatattctgacttgctgggcttgtattg

SEQ ID NO: 286487 - DNA, 201 bp, Homo sapiens
ataatactgtattacaaaattttaagatgtattttacaaactgaccatgcaattaaatctcagcagagatatgacaccccataagtagttactgttctgarggattttaaaagtcacacttcgtgtgtgagatctcccccactgagctgctatgacacaacccacttatgaaattgtcatctttctatttctcctttgtat

SEQ ID NO: 286488 - DNA, 201 bp, Homo sapiens
cttctgcacgcaggtggcttgtttacgtatgtttctggagccaatttcctcggtgagatcattgaatggatcggctatgccctggccacttggtccctccsagcacttgcatttgcatttttctcactttgtttccttgggctgcgagcttttcaccaccataggtaaatttttcaataaaagcggcagcattcacgtagc

SEQ ID NO: 286489 - DNA, 201 bp, Homo sapiens
ttccacattttagctattgtgaataatgcttctatcaatgtgtgcacaaatattgcttcaagaccctgttttcagttcttttagatgcatattcagaagtrgatttgctatgtcatgtagtaattctatttttaatttttgagtaaccaccatattgttttcctcagtggctgcaccattttacatttctactatcagggc

SEQ ID NO: 286490 - DNA, 201 bp, Homo sapiens
ttctatgcttttgactacttttaactacctcatataagtgaatcatatggaatttgtcttctcgtgactggcttatttcacttagcacattgctctcaggkttcatccatgttatagtacgtgttagaattttcttcctttataaagccattgtaagtatataccacattttgcttatccatttattcatctgtcaataga

SEQ ID NO: 286491 - DNA, 201 bp, Homo sapiens
tagtcttgatcactataactatttaataagtcttaaatctgataggaactctgactttttttttccaattattttagttatccaagttcctttgactttcygtatacagatggtccctgaaattcaacagttctacttaaaactttttgactatatgaaggtatgaaagcaaaatgcattcagtagaaaccatacgcagtg

SEQ ID NO: 286492 - DNA, 201 bp, Homo sapiens
tctgagacctctttgcttagtcctagatcctgaggattgtctcctgactgaaaggctaattttcctccattgatttgcttctccacctttataaaaaatcwtttgagcctatttttatggctctatttctgggtcctatattctgttttgtcaatctatgtgtctatcccaccaccaacagcacatagtcttgatcactat

SEQ ID NO: 286493 - DNA, 201 bp, Homo sapiens
gatcaattctgtgtttgaagctttctattgattgtttttctttcagcaattagattcctcagatgcagaatttgtctggttctttgtatagttcctatctktttactgagaatctcatttttcaggtattactttcctgatttcctttggttgttcatatgtttcctctcgtaactcattaaacttctttatgataagtat

SEQ ID NO: 286494 - DNA, 201 bp, Homo sapiens
ctttctgtatacagatggtccctgaaattcaacagttctacttaaaactttttgactatatgaaggtatgaaagcaaaatgcattcagtagaaaccatacrcagtgtccacacactgttctgtttttcacttttagcacagtactattaaataaattgcatgacatattcaacactttattataaaataggctttgtgcta

SEQ ID NO: 286495 - DNA, 201 bp, Homo sapiens
ttgtgatggatgtgttcattatttttatgtcacatggcttcatgtgacatgaaatatatctaccaaactgcactggtagatatatatatatatatatatacacacacacacacacacacacacaccaaattgcaccctttaaataggttcagttgactgaatagtaatttacttcaataaaaataagaaaactaggtaggc

SEQ ID NO: 286496 - DNA, 201 bp, Homo sapiens
gctcatgccctttcataaacctatttgacagaatagagagttttccctcattggtgtagtcaagacaacatgtgtgttcagcatggaaaaaaggtttcagrtcataaacccccttatccctaatgcttactttcataaagaacaacagtggctccactgtattctaaaaggaaaaaggagctctaatgagaaatacgcaat

SEQ ID NO: 286497 - DNA, 201 bp, Homo sapiens
tgtgatggatgtgttcattatttttatgtcacatggcttcatgtgacatgaaatatatctaccaaactgcactggtagatatatatatatatatatatacmcacacacacacacacacacacaccaaattgcaccctttaaataggttcagttgactgaatagtaatttacttcaataaaaataagaaaactaggtaggcc

SEQ ID NO: 286498 - DNA, 201 bp, Homo sapiens
gtgatggatgtgttcattatttttatgtcacatggcttcatgtgacatgaaatatatctaccaaactgcactggtagatatatatatatatatatatacayacacacacacacacacacacaccaaattgcaccctttaaataggttcagttgactgaatagtaatttacttcaataaaaataagaaaactaggtaggcct

SEQ ID NO: 286499 - DNA, 201 bp, Homo sapiens
tttgacaaatgagcaccagtggtactaagcacagaaactcactatataagtcacataggaaacttgaaaggtctgaggatgatgtagattactgaaaaatrcaaattgcaatcatataaataagtgtttttgttgttcattaaatacctttaaatcatggatgttaagcagttttgtttgaattaaaatatcctgggactt

SEQ ID NO: 286500 - DNA, 201 bp, Homo sapiens
tttgttctgggatgaagttaagttacttggaaacaatttgatcatttcaggttttgatctgatttgttcagtggttccagaagagtgttaatgctagggctaattaataatttcctctgaggtaaagcctttttgagtattctacccaatgtcttatatgagcttttctatctggcttatgggtacaggctctatttgtgg

SEQ ID NO: 286501 - DNA, 201 bp, Homo sapiens; identical to SEQ ID NO: 58369

SEQ ID NO: 286502 - DNA, 201 bp, Homo sapiens
gaaactttgagattactcttcagagcttactttggtggttggggtgtgttgtatggctttgtgtgtgtgtgtgtgtgtgtgtgtgtgtgtgtgtgtgtgtgtggtttgtttacttttacttatgggcactgatgtattggttactagaaagttcatagataaatttttgtcctattcagtagacaaacatacctgacttgt

SEQ ID NO: 286503 - DNA, 201 bp, Homo sapiens
cattatttttcatggctgcataatattccatggtgtatatatgccacattttctttatccagtccaccattgatggatatttaggttgatttcatgtcttkgctgttgtgaatactgctgcaatgagcatgcacatgcatgtgtctttatggtagaacaatatatattcctttggggatatacccaataatgggattgctg

SEQ ID NO: 286504 - DNA, 201 bp, Homo sapiens
aaactttgagattactcttcagagcttactttggtggttggggtgtgttgtatggctttgtgtgtgtgtgtgtgtgtgtgtgtgtgtgtgtgtgtgtgtgtggtttgtttacttttacttatgggcactgatgtattggttactagaaagttcatagataaatttttgtcctattcagtagacaaacatacctgacttgtt

SEQ ID NO: 286505 - DNA, 201 bp, Homo sapiens
ttgcctggaacatagtacgcaatatataaatattagttgtctgtcgtcctttgctgacatttcccttactggatgtctgaactgaaattgatctcaatagkgtaatattactccaacaagttatattaacttcctgtgactgctgtaataaattaccacaaagtggcttaaaacaaaataaatcttactcttactattctg

SEQ ID NO: 286506 - DNA, 201 bp, Homo sapiens; identical to SEQ ID NO: 58372

SEQ ID NO: 286507 - DNA, 201 bp, Homo sapiens
ctctgctgcctctttgtagctgtgtggccttgggcacattaccttatgtctgtaagctttaaattcttcactggcctggcggtaacacacacacacacatmcacacacacacacacacacacacacacacacacacacacacacgatcaggatagaggccatcttaccaggactattcatcaccagggcacataaacagaa

SEQ ID NO: 286508 - DNA, 201 bp, Homo sapiens
tttgcatttctctaatgattagtgatgccgagcattttttcatatccttgttggccacatatatcttgttttgaaaagtatctgttgatgtcctttgcccrcttttaattgaattgtttggtttttgcttgtaaattagtttaaattccttatagatgctggatattagacctttgtcagatgcacagtttgcagatattt

SEQ ID NO: 286509 - DNA, 201 bp, Homo sapiens
tatatattcctttggggatatacccaataatgggattgctgagttcaatggtgattctgttttaaattatttgagaaattcctcctagcagtgtataggcrttcccttttctccataaccttgccagcatttattatttttgactttttaatagtagctattctgattgatgtgagatgatattttatggtggttttgatt

SEQ ID NO: 286510 - DNA, 201 bp, Homo sapiens
ttcttttttaacagtgaatcctaacctttcctccctgtgtgtcccaggacatttgtgtactcactgctcaatcgagggaggccttatccagctatactcawtctcagaggcactgccttctgcactggaaatggagtccttcaaggctactatctgatttactgtgctgaataccctgatgggtggtacacagacatacgg

SEQ ID NO: 286511 - DNA, 201 bp, Homo sapiens
aggcttcctggtggttttgctccaaagagaacaattttttgagaaactctattttgtgctaaaatgtgtacccaaaatctcaccaatgatggctgtttttkattttgttttcattttagagatatgatctcactatattgcccaggctggccttgaactcctgggctcaagagatcttcctactttaccctcccgagtagc

SEQ ID NO: 286512 - DNA, 201 bp, Homo sapiens
gagaatataaggaagctggtcctattttagaagcaataacagcctttgagtttgctctagggcaattgcaaaatcaagagcccccagggtgctgtactccrgatttctaggtcacagatatccagaccagagttgaccagaaattggccagaatgggttctggggatgtggatgaatttccatttctcatccattcctact

SEQ ID NO: 286513 - DNA, 201 bp, Homo sapiens
acatctattttaatgtagaggcaggaagaaagatactgagtggacagttccaaggtctcccagtattaccaggacatgccataaatacttaaaaacataarcagggaacttaaaggttttctgctgtattttagatattcacaagctaatcatctcaaagattttgcatgatttaaatggatctgccagattaggaccatt

SEQ ID NO: 286514 - DNA, 201 bp, Homo sapiens
acaattatttttatcttcaaattaactactgtatgttggcaacataagcaatatttttatgaggtcatttcatcttaatgattagtgttttgtgacaatcmtattaatgtaatctttaggcttgtttttgaaatcaaaaggcactttgcacaatacattatgaccggtgcatttaaaaaaaaacccaaaggagtaattatg

SEQ ID NO: 286515 - DNA, 201 bp, Homo sapiens
atcttctggggtattaaaaatttttttaaaatggagccagtggtcagtagcatgcctatgggaggtttcactccaatgatcattattctttctatcattcyggggaatcctcaaagttttttaaaaccttggtaattcattagatgtttggattgaacatctattttaatgtagaggcaggaagaaagatactgagtggac

SEQ ID NO: 286516 - DNA, 201 bp, Homo sapiens
gtattttcttgattttgtaataatcagttagcatgagtggctgagcaactgttgtttcatgatgccaaaatccacctcaagttgatcaatttatagaaaamggtaaactagttattcaaataagttgatttagttactcaggccatgaagttgatctgattctctttgattttgatcttctggggtattaaaaattttttt

SEQ ID NO: 286517 - DNA, 201 bp, Homo sapiens
gtagatttatgaggctagtgagtgctggaggcattggaggttatttattttacataaggtggtcagggaagctaacatttgagcagagtggctgcagtgaratggacaaagacaaaagtggtagaagagagcagagatgtagttggggaatcagattgtctagggtcttgaaggcagtcaagaatttgggctttcatttag

SEQ ID NO: 286518 - DNA, 201 bp, Homo sapiens
gctttttacttcaagctgaaaaccatcccatgtcaatatttgtattttcttgattttgtaataatcagttagcatgagtggctgagcaactgttgtttcaygatgccaaaatccacctcaagttgatcaatttatagaaaacggtaaactagttattcaaataagttgatttagttactcaggccatgaagttgatctgat

SEQ ID NO: 286519 - DNA, 201 bp, Homo sapiens
catttagtcatgaaggaggttttcagagagaagtaatatgatccagtttacagctttattggtctgctatatggagaatagattgcggtggagtaaatgtrgtggtcaaatgaggaggcttttacaaatacccgggagaggtttaatgagagattaaactcagatggaataatggagttagtgagatgtggccagattctg

SEQ ID NO: 286520 - DNA, 201 bp, Homo sapiens
acctcattgggtgttggatatttttgtgtttctataaatattcttgagctttgttctgggatgaagttaagttacttggaaacaatttgatcatttcaggytttgatctgatttgttcagtggttccagaagagtgttaatgctagggctaattaataatttcctctgaggtaaagcctttttgagtattctacccaatgt

SEQ ID NO: 286521 - DNA, 201 bp, Homo sapiens
gggatcctcgcccggcagcccctctccctcttcgggccacctgggacggtacttctgggcctcttctgcgtacattacttccacaggtagcgtttttcccytgcgggcgcccagtgcagcgcactgccctgctcccggcgtccaggagcgcagcgtggagcgcgcaccgaggaacgccaaggaggcagcgtggggcgctgt

SEQ ID NO: 286522 - DNA, 201 bp, Homo sapiens
ggaactgcccactttgggtctcccgagagcctctctgtcactcactgaagctcctctctgccttgctcatcctccagttgtttgcgtacctcattgttccyggacacgggacaagaaatcaggacctgctgaatgcggggactgaaagagctgtaacacaaacaggtctgaaacatgcccccctgcttgtcacattgcagg

SEQ ID NO: 286523 - DNA, 201 bp, Homo sapiens
gcaggagctgccttccttcgcggtgcccgcggggatcctcgcccggcagcccctctccctcttcgggccacctgggacggtacttctgggcctcttctgcstacattacttccacaggtagcgtttttcccttgcgggcgcccagtgcagcgcactgccctgctcccggcgtccaggagcgcagcgtggagcgcgcaccga

SEQ ID NO: 286524 - DNA, 201 bp, Homo sapiens
gccgcgccagggctggacgcggcgaggtgggaggcaggatggaggggcgggagccaaggccgagggggcggacacgggtggcgtctggcgctccataaagsggttgcgggggccgcgctctcttctgggagggcagcggccaccggcgaggaacacggcgcgatgcaggttcagtgccagcagagcccagtgctggcaggc

SEQ ID NO: 286525 - DNA, 201 bp, Homo sapiens
actgtgattgcttatctgattttctgtttttacgaaggtgctttttgtgtgtgtagatagttgttaaattggtcttcctgcagtggggatcattgttgcargtttccgtttggccatcttgctccaccctccctcttttccagttcttaaagtatcttcaagacagttattttaaagtcttttttgagtagatctgctgtt

SEQ ID NO: 286526 - DNA, 201 bp, Homo sapiens
ctctttcagcaatatgaagttaaaaccaagtactgtgattgcttatctgattttctgtttttacgaaggtgctttttgtgtgtgtagatagttgttaaatwggtcttcctgcagtggggatcattgttgcaggtttccgtttggccatcttgctccaccctccctcttttccagttcttaaagtatcttcaagacagttat

SEQ ID NO: 286527 - DNA, 201 bp, Homo sapiens
gggcatcattggcaattcaagactatgtttcttaccttcttcagtgcctctttcagcaatatgaagttaaaaccaagtactgtgattgcttatctgatttyctgtttttacgaaggtgctttttgtgtgtgtagatagttgttaaattggtcttcctgcagtggggatcattgttgcaggtttccgtttggccatcttgct

SEQ ID NO: 286528 - DNA, 201 bp, Homo sapiens
ctcaatgcctagttttgaagatttaactaagaatgagttcctttttttctgattagaattgttcgaggacaacagttctgaaatgaatgaagcaacagctmgtgacctattcctaccacctcctagactctgtgaggaggggtggcagagggttcctagcccataaaagagtcataacagttcttaccatttcaggctggg

SEQ ID NO: 286529 - DNA, 201 bp, Homo sapiens
tagactccagatttccaaaacagttatatcagacatactctgtcagtgcaattattgcctaagcagggagacagattcctcgtgtttcttactcttgcagytccccaggatgctctccctaccttcctttatttaatgtttttatgatacatcttttcccctttttattacgtttaccctgactatattgttatatttgag

SEQ ID NO: 286530 - DNA, 201 bp, Homo sapiens
aaacaaaaataatttaggaggttaagatgtgccgtttactgtcttcatagaaaatttataggccctttgctttagatccgtggttcctcccagggcgtagrgaatcacaggttgggaaccactgacgcagtctcatcttcaagaaagattcaactctaaggggctttgattttaaaaacattcactccataactagataaa

SEQ ID NO: 286531 - DNA, 201 bp, Homo sapiens
gcattcctgtggttgcttactgacaccattaataactcaggcactttgtgtctcccctattcttagcatgtttacctgtggtcctcttattcatcacttcrtggttgcaagatgttgactgtagctcaaggcattacatctggcaatcaagacaggaagaaagacgaagtaggggcaccggtcttgcctgcaccttttatc

SEQ ID NO: 286532 - DNA, 201 bp, Homo sapiens
ttctcttttttgagtctatcactcattcacatacagtgacagtacatctttttgaaaatgccaattcaagagtaattagaaaggtttaatgtagaaaactrggattatcagaagacctagattttgctcttactctatcactaataggctttataatttttgataaattatttttatttagttctttttcaagtatttttt

SEQ ID NO: 286533 - DNA, 201 bp, Homo sapiens
tgtcttcttatttattttgggaatgggaataaacattcatagtgactatatattgcgccagctcaggaagcctggagaaatcagctacaggattccacaargtaatgtctcccctgcccccagactctcactcttccctggagcctgtcccagggatgatgctatggtagcagatggagaggggacagtgagggcacgaat

SEQ ID NO: 286534 - DNA, 201 bp, Homo sapiens
acattgagggcagatcttctccacccagtccaccaactcaaatgccaatctcttccagaaacaccctcacagatgcacctggggtagcccaatcattagartcaaatgctaaatcacttgggtttcccttttacagaagggagacatgatcagtttctactgaagcattgagaataatttgtactttatcagctgctgggt

SEQ ID NO: 286535 - DNA, 201 bp, Homo sapiens
ttcctcggtgagatcattgaatggatcggctatgccctggccacttggtccctcccagcacttgcatttgcatttttctcactttgtttccttgggctgcragcttttcaccaccataggtaaatttttcaataaaagcggcagcattcacgtagctttcttcttctccaaacaggcttttaacccgcagaggaagattga

SEQ ID NO: 286536 - DNA, 201 bp, Homo sapiens
tttcctcggtgagatcattgaatggatcggctatgccctggccacttggtccctcccagcacttgcatttgcatttttctcactttgtttccttgggctgygagcttttcaccaccataggtaaatttttcaataaaagcggcagcattcacgtagctttcttcttctccaaacaggcttttaacccgcagaggaagattg

SEQ ID NO: 286537 - DNA, 201 bp, Homo sapiens
cctcggtgagatcattgaatggatcggctatgccctggccacttggtccctcccagcacttgcatttgcatttttctcactttgtttccttgggctgcgarcttttcaccaccataggtaaatttttcaataaaagcggcagcattcacgtagctttcttcttctccaaacaggcttttaacccgcagaggaagattgaga

SEQ ID NO: 286538 - DNA, 201 bp, Homo sapiens
ctcttttttgaattctttctttgaagccactggagtgtgtgatctgttattatttgagtgcttacagggtgttacactctgtgtgccaaacactctgagtwaataatttactcatcctcataccaacccatttaggtaggcacgcccattttgcaggtggaaaactggagcaagaaaaggttaaataacttccttgcccaa

SEQ ID NO: 286539 - DNA, 201 bp, Homo sapiens
gcacattaaaatcatctgggggaacccttaaaatgacttctgctcaaagtcatgtgcccaaggttgtgattaatttgtcttcagggtgattcctccccttyaatatttctaaagccactcaggtgacttgcttgtgcaaccaggggtgtaatcctctgatgtggacatgtgactgcaatagaggaaaatgctagagagcag

SEQ ID NO: 286540 - DNA, 201 bp, Homo sapiens
atcattgaatggatcggctatgccctggccacttggtccctcccagcacttgcatttgcatttttctcactttgtttccttgggctgcgagcttttcaccrccataggtaaatttttcaataaaagcggcagcattcacgtagctttcttcttctccaaacaggcttttaacccgcagaggaagattgagaaaccgaagat

SEQ ID NO: 286541 - DNA, 201 bp, Homo sapiens
tctttgtcatcagtgagcaagtccccaaagaccacggtcttgtccattgtcaggataattcactccacaagctggggctccaggtgctgccctacccagcrgtgcttctcacccacacagtggtcatactttggcaggggctggtgcagtgtgaagacctcggtgttttgcatgtgcttcatctcttgcaaggtcctccgg

SEQ ID NO: 286542 - DNA, 201 bp, Homo sapiens
taataaattgaggtatatttccagcagtcaaagtgattgaactacagctacaagaatcaacatctatcaagatatacaaaagaaaagaaaaaaaaagaatsaacatggatgaatctccaaaccactgttgagtgaaacagtcaaaccctaggagaacacattcagtatcattccatttagatacagttcaaaaactaggca

SEQ ID NO: 286543 - DNA, 201 bp, Homo sapiens
ctatgatctccctgttaccattccaggagagcagccgcgtccctatgcatggcaggaccaggtactattgtggcctctcctcttggcctcgaatggtatcyttgtcatcagtgagcaagtccccaaagaccacggtcttgtccattgtcaggataattcactccacaagctggggctccaggtgctgccctacccagcggt

SEQ ID NO: 286544 - DNA, 201 bp, Homo sapiens
agaaaaaaaaagaatgaacatggatgaatctccaaaccactgttgagtgaaacagtcaaaccctaggagaacacattcagtatcattccatttagatacarttcaaaaactaggcaaaataaaatattaaggtacataatctaagtggtaatactatgaagaaaaccaagagtgatacacagaaagtccaggatactggaa

SEQ ID NO: 286545 - DNA, 201 bp, Homo sapiens; identical to SEQ ID NO: 58389

SEQ ID NO: 286546 - DNA, 201 bp, Homo sapiens
ttggccaggctggtctcgaactcctgacctcaggtgatccacccgtctcagcctcccaaagtgctgggattacaggcgtgagccaccggacccagcctgcmttattactatttaattttgtgtgaaacacaaaacctttaatgtaaatgataaaaatatcagtaagtggagtcattcagaatgagtagccttttgagtctg

SEQ ID NO: 286547 - DNA, 201 bp, Homo sapiens
caaagttgcaaatctgggtaaatggtagaacctagattcagactcaggttcaactaacttccagggtggacacaactcaccatattccactgtttgtggartcattcttcttctttttcctttgtccctttctcaggtaaaaggtccaggagttgggctgcttggaatttccaaagggggtgagctctgcctttccatggc

SEQ ID NO: 286548 - DNA, 201 bp, Homo sapiens; identical to SEQ ID NO: 58390

SEQ ID NO: 286549 - DNA, 201 bp, Homo sapiens; identical to SEQ ID NO: 58398

SEQ ID NO: 286550 - DNA, 201 bp, Homo sapiens
ggtttgaagcctacacatttatagctttctctaattacacaggtaggaaattataaaatcaggtacaagggcttggcaggggcctaaagcttaagtgatgaaaaaaaaaaacaccacacctctggtgaaaccaatagcttacgaaaaagtagaaaaaagcgcgatgcatggggagctccggtagtcctttgaggtatttga

SEQ ID NO: 286551 - DNA, 201 bp, Homo sapiens
gctgcagctgctgccccctgcagggcctgttcgttcctgctgcctagctccccgctggctggctatgatctccctgttaccattccaggagagcagccgcstccctatgcatggcaggaccaggtactattgtggcctctcctcttggcctcgaatggtatctttgtcatcagtgagcaagtccccaaagaccacggtctt

SEQ ID NO: 286552 - DNA, 201 bp, Homo sapiens
tgccaggtggctgggcctgtgacagtgcagaggttttggtgcctgcccgcccaccattgctccagctgcagctgctgccccctgcagggcctgttcgttcstgctgcctagctccccgctggctggctatgatctccctgttaccattccaggagagcagccgcgtccctatgcatggcaggaccaggtactattgtggcc

SEQ ID NO: 286553 - DNA, 201 bp, Homo sapiens
aattttatttgatcatgtggcctctctgttgctaatctctcctggaaacatctgccacatttagtgtgtgtatgtgtattcattcttttgtttttaataaytaaagttttttcccctcattattaaaatgaatttaccagtaagaatgagtttttaagatttttataaactgtatactttatcagtttgggaagggagtaa

SEQ ID NO: 286554 - DNA, 201 bp, Homo sapiens
gctgctgccccctgcagggcctgttcgttcctgctgcctagctccccgctggctggctatgatctccctgttaccattccaggagagcagccgcgtccctrtgcatggcaggaccaggtactattgtggcctctcctcttggcctcgaatggtatctttgtcatcagtgagcaagtccccaaagaccacggtcttgtccat

SEQ ID NO: 286555 - DNA, 201 bp, Homo sapiens
aaattttatttgatcatgtggcctctctgttgctaatctctcctggaaacatctgccacatttagtgtgtgtatgtgtattcattcttttgtttttaatamctaaagttttttcccctcattattaaaatgaatttaccagtaagaatgagtttttaagatttttataaactgtatactttatcagtttgggaagggagta

SEQ ID NO: 286556 - DNA, 201 bp, Homo sapiens; identical to SEQ ID NO: 58386

SEQ ID NO: 286557 - DNA, 201 bp, Homo sapiens
ctccatctggagtactttgaagaagccatgaactacttgctcagtcatcccgaggttagttcttctttcagatttatgggctatgatgtatcaggtctctycttaaatggtctgggttttcacagaagttagctcattcatgacagccattccctaccccaacacacactaccttttttagtcacttcttatagacagttt

SEQ ID NO: 286558 - DNA, 201 bp, Homo sapiens; identical to SEQ ID NO: 58394

SEQ ID NO: 286559 - DNA, 201 bp, Homo sapiens
aagtgtaaattttatttgatcatgtggcctctctgttgctaatctctcctggaaacatctgccacatttagtgtgtgtatgtgtattcattcttttgtttwtaataactaaagttttttcccctcattattaaaatgaatttaccagtaagaatgagtttttaagatttttataaactgtatactttatcagtttgggaag

SEQ ID NO: 286560 - DNA, 201 bp, Homo sapiens
gcggtgcttctcacccacacagtggtcatactttggcaggggctggtgcagtgtgaagacctcggtgttttgcatgtgcttcatctcttgcaaggtcctcyggggttgggcttcaagactagggaaaagcctgggcttcacacccatgggccactttatccaccaggtccggcagcagggtgaggtactgcttccagacca

SEQ ID NO: 286561 - DNA, 201 bp, Homo sapiens
aaagtgatgggtggggcagggggttgtttttgttttaagagacaggctctggccaggctggagtgcagtggcgctatcatagctcattgcagcctcaaacwcctgggggctcaacccatcctcccacttcagcctcctgagtagctgagactataggtatttgccaccatgcccagctaatttttaattttttgtagaaac

SEQ ID NO: 286562 - DNA, 201 bp, Homo sapiens
acccagcggtgcttctcacccacacagtggtcatactttggcaggggctggtgcagtgtgaagacctcggtgttttgcatgtgcttcatctcttgcaaggycctccggggttgggcttcaagactagggaaaagcctgggcttcacacccatgggccactttatccaccaggtccggcagcagggtgaggtactgcttcca

SEQ ID NO: 286563 - DNA, 201 bp, Homo sapiens
cagctgcagctgctgccccctgcagggcctgttcgttcctgctgcctagctccccgctggctggctatgatctccctgttaccattccaggagagcagccrcgtccctatgcatggcaggaccaggtactattgtggcctctcctcttggcctcgaatggtatctttgtcatcagtgagcaagtccccaaagaccacggtc

SEQ ID NO: 286564 - DNA, 201 bp, Homo sapiens
ctgtgacagtgcagaggttttggtgcctgcccgcccaccattgctccagctgcagctgctgccccctgcagggcctgttcgttcctgctgcctagctcccygctggctggctatgatctccctgttaccattccaggagagcagccgcgtccctatgcatggcaggaccaggtactattgtggcctctcctcttggcctcg

SEQ ID NO: 286565 - DNA, 201 bp, Homo sapiens
aaagttgcaaatctgggtaaatggtagaacctagattcagactcaggttcaactaacttccagggtggacacaactcaccatattccactgtttgtggaaycattcttcttctttttcctttgtccctttctcaggtaaaaggtccaggagttgggctgcttggaatttccaaagggggtgagctctgcctttccatggcc

SEQ ID NO: 286566 - DNA, 201 bp, Homo sapiens
ggaacacattccggacgcatctgaacatcagaggaaacaaactccagacacactacttttcagaactgtattaagaactgtaacagtcactgcgagggtcygcggcttcattcttgatgtcagcgagaccaagaatccaccagaaggaaccaattccagacacagaattatttgccttcttacttcctgagagttctaggc

SEQ ID NO: 286567 - DNA, 201 bp, Homo sapiens; identical to SEQ ID NO: 58399

SEQ ID NO: 286568 - DNA, 201 bp, Homo sapiens
agcctgggggacaagagtgactctatcttaaaaaaaaaaaaaaaattcaggtagtttcaattttttaatgttcttatttatgtattgactaggaagccactttttttttttttttaataagaattccgactggttttctcactgtatttccatggcagctaggaggtgccaggtggctgggcctgtgacagtgcagaggtt

SEQ ID NO: 286569 - DNA, 201 bp, Homo sapiens
cgaccccgaccccgggcggctgctgtgccagacgcggcacgagcgctacttcctcccgcccggggtgcggcgcgagccggtgcgcgtgggccgggtgcgakgcacgctcttcctgccgccaggtgactcacctccgctaattgttccgtgttcgttcgcctttcactttgtgtgtctcccccgccccacgcttttcgctta

SEQ ID NO: 286570 - DNA, 201 bp, Homo sapiens; identical to SEQ ID NO: 58401

SEQ ID NO: 286571 - DNA, 201 bp, Homo sapiens; identical to SEQ ID NO: 58402

SEQ ID NO: 286572 - DNA, 201 bp, Homo sapiens
tccgggactgggccccacggcagacacacaaggtgcccctctgcccgcaggccctccaggacccccactccttggggtgagggcactgcttcctgggggtkgggggcctggggctgtcagaggtggaggaggtggtcttctctctcgggagtccccctggccgctccctttctgcaggtggggagatcctggggacctctc

SEQ ID NO: 286573 - DNA, 201 bp, Homo sapiens
ccacccgggccttgccatctgtaaacactcttcaatgaggggtgggcgccagggtgcacgtgacccccatggccctcagaggtgacctggtgccatccccraccaggagacgcaggtgcccgcgctgctggaggccggcttccggagggagaacatccgtacggaggtgatggcgctggtcccaccggccgactgccgcta

SEQ ID NO: 286574 - DNA, 201 bp, Homo sapiens
gagacagctgtccccggggtggccctggcctgcctggcgtcagacgctaagggctgctaagaaaggactccctggccccacacaggccccgtccaggggtygggcctcagtgttcccaccctgaaaatgggcacgtccagtgtccagtgccaatcaggattgagcggggggcccatgtgtggcccactggggaccagtcct

SEQ ID NO: 286575 - DNA, 201 bp, Homo sapiens
cccgtccaggggtcgggcctcagtgttcccaccctgaaaatgggcacgtccagtgtccagtgccaatcaggattgagcggggggcccatgtgtggcccacyggggaccagtccttcccctcccagatagtctcaagtccaggtcttgcctggccactcttgcaaatccaactttcggatagagggagggggagagaaaagt

SEQ ID NO: 286576 - DNA, 201 bp, Homo sapiens
tgggatggcggagcaccggggatgggcatgctcacggaggggccctggaggcgatctcggggttctcaagcctgtgtgggagccccacctctacccacggycccgtctcactgcacctccacccgctgggggatgagccgggtgaggctgggtgaggcgctgagcccggccctgaccgcgtgggcttctgttctccgtgca

SEQ ID NO: 286577 - DNA, 201 bp, Homo sapiens
gacccccatggccctcagaggtgacctggtgccatccccgaccaggagacgcaggtgcccgcgctgctggaggccggcttccggagggagaacatccgtayggaggtgatggcgctggtcccaccggccgactgccgctactacgccttcccacagatgatcacgcccctggtgaccaaaggctgagcccccaccccggcc

SEQ ID NO: 286578 - DNA, 201 bp, Homo sapiens; identical to SEQ ID NO: 58404

SEQ ID NO: 286579 - DNA, 201 bp, Homo sapiens; identical to SEQ ID NO: 58406

SEQ ID NO: 286580 - DNA, 201 bp, Homo sapiens; identical to SEQ ID NO: 58405

SEQ ID NO: 286581 - DNA, 201 bp, Homo sapiens
cacacctgggcttccagggctgccctgccacgtgcccacgggagctgcagccgcccacccgggccttgccatctgtaaacactcttcaatgaggggtgggygccagggtgcacgtgacccccatggccctcagaggtgacctggtgccatccccgaccaggagacgcaggtgcccgcgctgctggaggccggcttccggag

SEQ ID NO: 286582 - DNA, 201 bp, Homo sapiens
tggcacacacaccagttcaacttcatcaaggtggttctctctgacttgctgggatgcgggaggccctcggggaagcccctctgcccacacccccacctccrtcctgaccactggccactccccttccacagaaccacgcctttcgcctgctgaagccggggggcgtcctcacctactgcaacctcacctcctggggggagc

SEQ ID NO: 286583 - DNA, 201 bp, Homo sapiens
aggaaggggtcgtgccagggagaggctgcccttctgcctgcctgggagagcagccccgactcgcccggctaagaatagcactcggaaagctgagctcaggragacagctgtccccggggtggccctggcctgcctggcgtcagacgctaagggctgctaagaaaggactccctggccccacacaggccccgtccaggggtc

SEQ ID NO: 286584 - DNA, 201 bp, Homo sapiens
tgaaaggcctgtgggaggatgtggcacccaccctgcctgacggtcactttgatggtgaggggtgaggggacgtatcacagggtgggcctccccagctccartgcagcccctcctttgcttgtgggggtccctctgatgtgcactggggggacagagcccaagtgggtgtgggcctggctgtgggatggcggagcaccgggg

SEQ ID NO: 286585 - DNA, 201 bp, Homo sapiens; identical to SEQ ID NO: 58407

SEQ ID NO: 286586 - DNA, 201 bp, Homo sapiens
caggacacagacttggatgtttgtggagctcctggttcacagggggctctggacttgaccaggggagtccctgaggctgtgcagccctttggggtctcacrccttccccccgccccattcccccagtgagcagcggttccatcgcagtgaacgccgactcttcggtgcagttgttggccgaagaggccgtgacgctggaca

SEQ ID NO: 286587 - DNA, 201 bp, Homo sapiens
ggcctgacctgcttattaatgatctcaaatgtctgctaaataacccccggccccagagtgggattctcactctgttgcccaggctaggcagtggcgcaatsatagctcactgcagcctcaatctccttaggcccaagcgatgctcccgcctcagcctccccagtagctgggaccacaggcgtgcatcaccacgcccggcta

SEQ ID NO: 286588 - DNA, 201 bp, Homo sapiens
acgtccggcaggtggacgtgcccacgctgaccggagccttcggcatcctggcggcccacgtgcccacgctgcaggtcctgcggccggggctggtcgtggtscatgcagaggacggcaccacctccaaatactttggtgagtccggtggagggctgcagggccaggccaggctggggctccacatcccaggtcagtctccgt

SEQ ID NO: 286589 - DNA, 201 bp, Homo sapiens
cgaggtgcgccgcgtgcgcaggagggggtggggtccgggggggcacggactcccctctcacgttgcttggtccgtgggggttctggggcggcacagccagsgcccctcggccacaattcccctttaagctgcacagcccagggtctctggacacaggcgccccgcctgcttccccacgcaggtcccctctggcactgtgga

SEQ ID NO: 286590 - DNA, 201 bp, Homo sapiens
tgccctgtacccaggcctctgtccatgcagccagagattcaccccggtttccttcaactccttccccagcttcacagtctcggcgcttctgctcttggctyccagcccatgcctgggtcccctcctctgctacgtccctccaaggccctatgccttgcgccttgcctgttcctgtgtgctgtggggccaccactccgatag

SEQ ID NO: 286591 - DNA, 201 bp, Homo sapiens
tggagccgcagcccggcggcgcccggagctgccggcgcggggcccccggcggcgcctgcgagctgggcccggcggccgaggcggcgcccatgagcctcgcyatccacagcaccacgggcacccgctacgacctggccgtgccgcccgacgagacggtggaggggctgcgcaagcggttgtcccagcgcctcaaagtgccca

SEQ ID NO: 286592 - DNA, 201 bp, Homo sapiens
tggccccaaccagatgtccttcaccttcgcctctcccacgcaggttcgggcgctgcgggtcgggaccctccgtggccgccgcccccggagtccagggtccycacccccagggcgcgacccccgcttccgggcccccggacccgcgcgccccggaagccgaggctactcagccctggaccctcggccctgcctctgctgccc

SEQ ID NO: 286593 - DNA, 201 bp, Homo sapiens; identical to SEQ ID NO: 58422

SEQ ID NO: 286594 - DNA, 201 bp, Homo sapiens
cttccgcctctcaagatccccccagcctgacgggccgcttaccatcccctctgccctgcagagccagccgccaaggttgacctcagcttcggagccacctytggatgaactgcccccagcccccgccccattaaagacccggaagcctgactgtgtgctcggctcttgttcctccacctggcccggtgaagccgggagcgt

SEQ ID NO: 286595 - DNA, 201 bp, Homo sapiens; identical to SEQ ID NO: 58417

SEQ ID NO: 286596 - DNA, 201 bp, Homo sapiens; identical to SEQ ID NO: 58409

SEQ ID NO: 286597 - DNA, 201 bp, Homo sapiens
ctgggggtgagtgtcagaggggacctgaggctcagcaggttggagctgtccaggctgcgggggagggagcgctgggggaccaggagccgggctggggtcgytgctggcccctcaccgcccctcaaccccttgcaggcagccaaggcaaacttggagaaggcccaggcggagctggtggggacagctgacgaggccacgcgg

SEQ ID NO: 286598 - DNA, 201 bp, Homo sapiens; identical to SEQ ID NO: 58419

SEQ ID NO: 286599 - DNA, 201 bp, Homo sapiens
gacttggatgtttgtggagctcctggttcacagggggctctggacttgaccaggggagtccctgaggctgtgcagccctttggggtctcacgccttccccmcgccccattcccccagtgagcagcggttccatcgcagtgaacgccgactcttcggtgcagttgttggccgaagaggccgtgacgctggacatgttggacc

SEQ ID NO: 286600 - DNA, 201 bp, Homo sapiens
cagcggttccatcgcagtgaacgccgactcttcggtgcagttgttggccgaagaggccgtgacgctggacatgttggacctgggggtgagtgtcagagggsacctgaggctcagcaggttggagctgtccaggctgcgggggagggagcgctgggggaccaggagccgggctggggtcgctgctggcccctcaccgcccct

SEQ ID NO: 286601 - DNA, 201 bp, Homo sapiens
ctgtgcagccctttggggtctcacgccttccccccgccccattcccccagtgagcagcggttccatcgcagtgaacgccgactcttcggtgcagttgttgrccgaagaggccgtgacgctggacatgttggacctgggggtgagtgtcagaggggacctgaggctcagcaggttggagctgtccaggctgcgggggaggga

SEQ ID NO: 286602 - DNA, 201 bp, Homo sapiens
gggtggccaggaagatgtgggatctggggcccagggcaggtgttcctattagtgcatggaggacagggttctcaaagggtggccctgggcctgcagcagcygaacccgggagcttcctagaaatgcagatcccggccgggcgcggtggctcacacatgtaatcccagcactttgggaggccgaggcgggcggatcacgagg

SEQ ID NO: 286603 - DNA, 201 bp, Homo sapiens
cttcactgctggatgaggctctcgatgagcagagaggctggggaggggcgggctgttgaaggctcctgggctggcggtggggttttctgattcacgacgtrggtgtgttgttggggcacacgagtaagccccaggtagcttgaggcaggaaatggggttggggttgtctgggcccctccgggccgtgccttagagccgctc

SEQ ID NO: 286604 - DNA, 201 bp, Homo sapiens; identical to SEQ ID NO: 58424

SEQ ID NO: 286605 - DNA, 201 bp, Homo sapiens
agggtggtctcgatctcctgacatcgtgatctgcccaccttgacctcccaaagtgctgggattacaggtgcgagccaccgcgcccatcctgtattgttaayagagaccgggtttcaccatgttggccaggccggtttagaactgttgacttcaagtgatccacctgcctcagcctcccaaagtgctaggattacaggtgtg

SEQ ID NO: 286606 - DNA, 201 bp, Homo sapiens
gccccttgaccccatccaggcctcagtttccccgctcacacttcgcccccgcctcgtgggattctaaactgttgctccaaggtgggagttgaacggaaacyacaactcccgagaggctgtgcggccaaagacacacgagaactacggaggcgagagactcgctcagccaactgccgctctcgtaaggctcgggctgccctt

SEQ ID NO: 286607 - DNA, 201 bp, Homo sapiens
gcggcgggtgtaggggcccgaggtggggtcgagcacggcgtctcctcgtactctcgtcggagcagcagcgacgaagggccgggccgatacgggaggcccasaggtcgccggggataccaggcgctggacccgacctgagccggcagcggggaagggagggggtttcgagacgtctgggtgcggtgcttagggatgggtggg

SEQ ID NO: 286608 - DNA, 201 bp, Homo sapiens
cgccattctcctgcctcagcctcccgagtagctgggactgcgggcgtgggctaattttttgtatttttagtagagacgggatttcaccttgttagccaggrtggtctcgatctcctgacatcgtgatctgcccaccttgacctcccaaagtgctgggattacaggtgcgagccaccgcgcccatcctgtattgttaataga

SEQ ID NO: 286609 - DNA, 201 bp, Homo sapiens; identical to SEQ ID NO: 58436

SEQ ID NO: 286610 - DNA, 201 bp, Homo sapiens
ctggcaggtacatcacctaccggctggtgcagtagctaccgcctgacaggtgagacggccgagggacaggcactgaggtggggtcagaggcaggggtgtcrtcccctccgtcggtgtgcagggctgttcttgctttgtccggcagcaagaccctcctagcaccagcccagctgggccaccaggcgctcccaggacaccccc

SEQ ID NO: 286611 - DNA, 201 bp, Homo sapiens
acatggcccccaagtacatcctggagcagtttctgcagcaggagctgctcatcaacatcacggagcacgaggtgggcgcgcgccgcggaatcccgcctgcrtggggccggcagagatgcagcgtttgtgggtggccaggaagatgtgggatctggggcccagggcaggtgttcctattagtgcatggaggacagggttctc

SEQ ID NO: 286612 - DNA, 201 bp, Homo sapiens
gacgtgggtgtgttgttggggcacacgagtaagccccaggtagcttgaggcaggaaatggggttggggttgtctgggcccctccgggccgtgccttagagycgctctcttccagtccctggtcgacatggcccccaagtacatcctggagcagtttctgcagcaggagctgctcatcaacatcacggagcacgaggtgggc

SEQ ID NO: 286613 - DNA, 201 bp, Homo sapiens
actgttgctccaaggtgggagttgaacggaaactacaactcccgagaggctgtgcggccaaagacacacgagaactacggaggcgagagactcgctcagcyaactgccgctctcgtaaggctcgggctgcccttggcgctgccgatccgagacgttgctgcattcaggcattcgccgacgacagaccagcgcggggcgggg

SEQ ID NO: 286614 - DNA, 201 bp, Homo sapiens
cgacagaccagcgcggggcggggttaggcggagggggcctgattcggattcggcgcaggcgcagtccgcgcgggttctcgcgcggagaaggggtgcgagcrgcggcggcggcggaggctgccatggacgacgaggaggagacgtaccggctctggaaaatccgcaagaccatcatgcaggtgagccgcgcctggtgttggg

SEQ ID NO: 286615 - DNA, 201 bp, Homo sapiens
ggcgcgcgccgcggaatcccgcctgcgtggggccggcagagatgcagcgtttgtgggtggccaggaagatgtgggatctggggcccagggcaggtgttccyattagtgcatggaggacagggttctcaaagggtggccctgggcctgcagcagccgaacccgggagcttcctagaaatgcagatcccggccgggcgcggtg

SEQ ID NO: 286616 - DNA, 201 bp, Homo sapiens
gggttcacgccattctcctgcctcagcctcccgagtagctgggactgcgggcgtgggctaattttttgtatttttagtagagacgggatttcaccttgttrgccagggtggtctcgatctcctgacatcgtgatctgcccaccttgacctcccaaagtgctgggattacaggtgcgagccaccgcgcccatcctgtattgt

SEQ ID NO: 286617 - DNA, 201 bp, Homo sapiens
gccccaggtagcttgaggcaggaaatggggttggggttgtctgggcccctccgggccgtgccttagagccgctctcttccagtccctggtcgacatggccsccaagtacatcctggagcagtttctgcagcaggagctgctcatcaacatcacggagcacgaggtgggcgcgcgccgcggaatcccgcctgcgtggggccg

SEQ ID NO: 286618 - DNA, 201 bp, Homo sapiens; identical to SEQ ID NO: 58431

SEQ ID NO: 286619 - DNA, 201 bp, Homo sapiens
actgcaagctctgcctcccgggttcacgccattctcctgcctcagcctcccgagtagctgggactgcgggcgtgggctaattttttgtatttttagtagaracgggatttcaccttgttagccagggtggtctcgatctcctgacatcgtgatctgcccaccttgacctcccaaagtgctgggattacaggtgcgagccac

SEQ ID NO: 286620 - DNA, 201 bp, Homo sapiens
aggctgggtggacagacggtcttggtcaaggctggacatctctgggagcctctcaggatcatactggtcccatcctgtggtgtgaggctgtgggggccggrgtggctgtcatggagcacacagtgagtgttcatcccgtttgctgttcacctctgtcctctgcagcagccgcaggtctgacttccgggtcacgagctttgg

SEQ ID NO: 286621 - DNA, 201 bp, Homo sapiens
ttgcccaggctggagtgcagtggcgcaatctctgcccactgcaagctctgcctcccgggttcacgccattctcctgcctcagcctcccgagtagctgggastgcgggcgtgggctaattttttgtatttttagtagagacgggatttcaccttgttagccagggtggtctcgatctcctgacatcgtgatctgcccacctt

SEQ ID NO: 286622 - DNA, 201 bp, Homo sapiens
gtgaggctgggtggacagacggtcttggtcaaggctggacatctctgggagcctctcaggatcatactggtcccatcctgtggtgtgaggctgtgggggcyggggtggctgtcatggagcacacagtgagtgttcatcccgtttgctgttcacctctgtcctctgcagcagccgcaggtctgacttccgggtcacgagctt

SEQ ID NO: 286623 - DNA, 201 bp, Homo sapiens
tttgcccttgtcctcagcgaagccccccgcagcctgattcttctttctccgatcctcaaacattgtcagcctgaagtcacatctgtttcggtccctgtcatttttttttttaagagatagggtttcattctgtcgcccaggctgcagtgcagtggtgcaatcatagctcactgcatccttgaactggcctccagcaaccct

SEQ ID NO: 286624 - DNA, 201 bp, Homo sapiens
gctgggattacaggcgtgagccaccgcgcccagtctttttttttttttttttttttgagactgagtctccctctgtcacccaggctggagtgtgcagtggygcaatctcagctcactgcaacctccacctcccaggttcaaacaatccttccacctcagcctcccaaaaagctaggtttacaggcatacaccatctcacct

SEQ ID NO: 286625 - DNA, 201 bp, Homo sapiens
cacctaccggctggtgcagtagctaccgcctgacaggtgagacggccgagggacaggcactgaggtggggtcagaggcaggggtgtcgtcccctccgtcgrtgtgcagggctgttcttgctttgtccggcagcaagaccctcctagcaccagcccagctgggccaccaggcgctcccaggacacccccagacccccagacc

SEQ ID NO: 286626 - DNA, 201 bp, Homo sapiens
tagcacccacccccactcgcctggtgcccagcatttgtctctctgcccagtctgggaggaaaactcccctccccttccttgctgtgggtgatgccgttgayctctgacccctctcatgctcagcttctttctagtttccctctcagtccccttctctcttcctgccaacgaggagagtcacaagggcctccccactcaccc

SEQ ID NO: 286627 - DNA, 201 bp, Homo sapiens
gtttctgtgaggctgggtggacagacggtcttggtcaaggctggacatctctgggagcctctcaggatcatactggtcccatcctgtggtgtgaggctgtrggggccggggtggctgtcatggagcacacagtgagtgttcatcccgtttgctgttcacctctgtcctctgcagcagccgcaggtctgacttccgggtcac

SEQ ID NO: 286628 - DNA, 201 bp, Homo sapiens
agctgtgccacgaccgtggctatctggtgacccaggacgagcttgaccagaccctggaggagttcaaagcccaatttggggacaagccgagtgaggggcgkccgcggcgcacggacctcaccgtgctggtggcccacaacgatgaccccaccgaccagatgtttgtgttctttccaggtgagcagcgggtcccgggggagt

SEQ ID NO: 286629 - DNA, 201 bp, Homo sapiens
ccactctccccctttcctagcccctagaggcggacacacagcgacccccatccctgcaggacaaacgcccctgccctgccagaatccggcccccacagctstcacggctgctgctcctctggactccccaaggcaggtggcctccacccacgttctcccgtcctggggtgaggcttcctgtggcccagcccgccccattca

SEQ ID NO: 286630 - DNA, 201 bp, Homo sapiens
gaggcccagaggtcgccggggataccaggcgctggacccgacctgagccggcagcggggaagggagggggtttcgagacgtctgggtgcggtgcttagggrtgggtgggcggcttgggctggtgcggcgcgcgtggcggcgagaggaggaggaagccgcgaatggggacggggggcgcccccagactctgcccttctctgt

SEQ ID NO: 286631 - DNA, 201 bp, Homo sapiens
ggatacttggcctgttttattcaccatcactgtaggttgctgagtaaatgttgaattaacgaatgcatcactgaataagttactgatagcctgcacacagsaagtgttgggctggggttctccgtgaacctggggaagtgaggaggtttgcaaagacaggaagagtctggggtggggagatacccaggctaggctggggag

SEQ ID NO: 286632 - DNA, 201 bp, Homo sapiens
tgaggcgggaggatcatttgagcccaggaggccgaggctgcagtgagctacgattgtgctcctgtactccagcctgggccacagggtcacaccctgtctcaaaaaaaaaaaaaatgcagttccacaggcgcatgggccacgtttccagtgcttggtggccatgtggggctgacgtgcgaaaccttagagccgggggatacg

SEQ ID NO: 286633 - DNA, 201 bp, Homo sapiens
gcaggggacagcacagggcacagtcctgtgccgcaaggccctcgtgctcctggaagcctctgggaggaggcgcccgctggtgggacgtcgaagtccaggcrctctcggcagcgaccccaggacggcgcacctaagctatgccgtggtgcaggggacgtgctggagggacaggagcaggcaagagagaagccacctgtggtc

SEQ ID NO: 286634 - DNA, 201 bp, Homo sapiens
gcagcagcgacgaagggccgggccgatacgggaggcccagaggtcgccggggataccaggcgctggacccgacctgagccggcagcggggaagggaggggrtttcgagacgtctgggtgcggtgcttagggatgggtgggcggcttgggctggtgcggcgcgcgtggcggcgagaggaggaggaagccgcgaatggggacg

SEQ ID NO: 286635 - DNA, 201 bp, Homo sapiens
  misc_feature (1)...(201): n = A,T,C or G
ggtggggtcagaggcaggggtgtcgtcccctccgtcggtgtgcagggctgttcttgctttgtccggcagcaagaccctcctagcaccagcccagctgggcnaccaggcgctcccaggacacccccagacccccagaccccacccgaccgtaggctgcagctcttggggctgtgcgcctggacgggagagtcctggtacgcg

SEQ ID NO: 286636 - DNA, 201 bp, Homo sapiens
cgtgctcctggaagcctctgggaggaggcgcccgctggtgggacgtcgaagtccaggcgctctcggcagcgaccccaggacggcgcacctaagctatgccrtggtgcaggggacgtgctggagggacaggagcaggcaagagagaagccacctgtggtcccagccccaccccagctcacacgaattccggctgcctttccc

SEQ ID NO: 286637 - DNA, 201 bp, Homo sapiens
gccttagagccgctctcttccagtccctggtcgacatggcccccaagtacatcctggagcagtttctgcagcaggagctgctcatcaacatcacggagcaygaggtgggcgcgcgccgcggaatcccgcctgcgtggggccggcagagatgcagcgtttgtgggtggccaggaagatgtgggatctggggcccagggcagg

SEQ ID NO: 286638 - DNA, 201 bp, Homo sapiens
ttcaggcattcgccgacgacagaccagcgcggggcggggttaggcggagggggcctgattcggattcggcgcaggcgcagtccgcgcgggttctcgcgcgsagaaggggtgcgagcagcggcggcggcggaggctgccatggacgacgaggaggagacgtaccggctctggaaaatccgcaagaccatcatgcaggtgagc

SEQ ID NO: 286639 - DNA, 201 bp, Homo sapiens
ccaaaccccagctccgcccccatccacggctcccagaatggtttctggagtccctgcaacagacctgtgaggagagggcagggcagggcctgcctcctgcktccccgtgatgacctgggggatgcactgggcagggacagcttcctccatccacacagccctgtgggcaccaacaaggccactgtgacttcacacgacagc

SEQ ID NO: 286640 - DNA, 201 bp, Homo sapiens; identical to SEQ ID NO: 58441

SEQ ID NO: 286641 - DNA, 201 bp, Homo sapiens; identical to SEQ ID NO: 58430

SEQ ID NO: 286642 - DNA, 201 bp, Homo sapiens; identical to SEQ ID NO: 58432

SEQ ID NO: 286643 - DNA, 201 bp, Homo sapiens
gcattcaggcattcgccgacgacagaccagcgcggggcggggttaggcggagggggcctgattcggattcggcgcaggcgcagtccgcgcgggttctcgcrcggagaaggggtgcgagcagcggcggcggcggaggctgccatggacgacgaggaggagacgtaccggctctggaaaatccgcaagaccatcatgcaggtg

SEQ ID NO: 286644 - DNA, 201 bp, Homo sapiens
atccagcgtgcaccccgccggaggaaggtcccatggcctgctgggcttggctcggcgcccccacccctggctaccttgtgggaataaacagacaaattagmctgctggatctttctgcgtaggggcttggggggcccttttgccaggggcccctccatgtcagggccagttgccgtcagctgccaggctgggggtgccatg

SEQ ID NO: 286645 - DNA, 201 bp, Homo sapiens
tttggacaccgtctctccacagttcctcatcgacaagaacggctgcgtggtgaagcgctacggacccatggaggagcccctggtaggtcctctctagggascccgcttgaggctcgggggcttgggaggtagctgccctaacccagctttcctccccgacaggtgatagagaaggacctgccccactatttctagctccac

SEQ ID NO: 286646 - DNA, 201 bp, Homo sapiens
cccccagacccctggatgccacctccctgagcccctagaagcccccttcccccctgggggtcctagacccggccctcctccagaccactgagccccacgtyctccagcccccatctaccccctcccccaggctcttagatccggccctccctagacccctgcccctgccccgccccccaaccctgccttccctgcagtacc

SEQ ID NO: 286647 - DNA, 201 bp, Homo sapiens
taacccagctttcctccccgacaggtgatagagaaggacctgccccactatttctagctccacaagtgtgtggccccgcccgagcccctgcccacgccctyggagccttccaccggcactcatgacggcctgcctgcaaacctgctggtggggcagacccgaaaatccagcgtgcaccccgccggaggaaggtcccatggc

SEQ ID NO: 286648 - DNA, 201 bp, Homo sapiens
tggtccccggcccgccctcaccaggcgctgtggctgcagtgcgtcagcgacaaagcgtagccactctcccagggctccttggcctcctccgcggtgacctrgggacacagggccgcatgagcctgggcggggtcagggccggcaacccgagcgaaagctgcgcccggcggccgcctacccggtggaacttgcggcggaggc

SEQ ID NO: 286649 - DNA, 201 bp, Homo sapiens
ccctaaataggataaagggcaggaggttgccaggtctcctggaaacctggtgaggaaggtgtctaggggcagagggaagggagtggctatgtgatgccacmgccaagtcagcctgaggactgagcagggattcgcctagcagacattgcttgtgactcagggaagggggccagtgcctggcaggacggatttgagggagga

SEQ ID NO: 286650 - DNA, 201 bp, Homo sapiens
agtctggtggatcctcaaactgttacacaaagagtcaccatatgactcagcaattccactcctaggcatacacccaagagaaatgaaaacatacgcccacrcaaacacttgtacggctttacaaactcaaaaagagaaaacagcccatagccgggcatggtggcgcatgcctgtaatctcagctattcaggaggctgagaa

SEQ ID NO: 286651 - DNA, 201 bp, Homo sapiens
gttgcatgagatgagagacaggagcgcctctgggcctgggtgtggggcactcacccttctccacgtccaggcagccattccgggactcccggccaccaatrcccacagacagcaggccctgcttcatgtctgcggggagaggggcctcacatgctggtcttcccacccctgcccctccctcgaagcccctagctccttttc

SEQ ID NO: 286652 - DNA, 201 bp, Homo sapiens; identical to SEQ ID NO: 58486

SEQ ID NO: 286653 - DNA, 201 bp, Homo sapiens
gacctgcacgcccgatacgctgagtgtggtttgcggatcctggccttcccgtgtaaccagttcgggaagcaggtgggctgctgcgtccccggggcccgcaraggcgggtgggtgggggtcggggtgggctccagcctggagagggcctgggagtgtgcagggggcccggactgagggggtgccagcccccgactcactcac

SEQ ID NO: 286654 - DNA, 201 bp, Homo sapiens
tcccactccggcctcccattggctgacgtcggcgcgagcgctcaacaccgacgcgtctgaccaatgagcgctctggagggcgtggccgtgggaaaggaggygcggaaagccgacgcgcgtccattggtcggctggacgaggggaggagccgctggctcccagccccgccgcgatgagcctcggccgcctttgccgcctact

SEQ ID NO: 286655 - DNA, 201 bp, Homo sapiens
ccgcccagtctcacccagtaccctcgctcacccaggatgcatggcgcttccacgagccccttgcccacctaggccctcgccgtgctcacccacaatgcacrgtgttcccacgagccccgagcccacctgggatgcccggcgttcccacgagcccctcgcccacccgggatgcacggtgttcccacgagcccctcgcccacc

SEQ ID NO: 286656 - DNA, 201 bp, Homo sapiens
ctggctaccttgtgggaataaacagacaaattagcctgctggatctttctgcgtaggggcttggggggcccttttgccaggggcccctccatgtcagggcyagttgccgtcagctgccaggctgggggtgccatggaggtggcgtgttgttgccccctcttcctccaggctcggggggctgtgctggctgcagtgctgggg

SEQ ID NO: 286657 - DNA, 201 bp, Homo sapiens
cctgcccttccctccctgtcccacaggctgaggagcagactccgtgggaagtaggcaaaaggcacatatatttaaaaaagtcctttacatatgtacatcaraacttgctataaatacatagaaaccgcaggcgccaccctgccagctccgcggcctggggcctgggagaggtgagcgggcaataacttaggggtcagggaa

SEQ ID NO: 286658 - DNA, 201 bp, Homo sapiens
ggcacctgtgctcacccaggatgcccatgtcgtatttgccctcccgcttgtccatctcgatgaggtggtcgaaggtgtctgagaagtactggaacagggcrttctgcttgtgcacctccagccccaggatgcggttcaggaacttggtgatggaacagtctggtaggggagggagccaagcctcaggctgcgctgggaatc

SEQ ID NO: 286659 - DNA, 201 bp, Homo sapiens
acaggtgatagagaaggacctgccccactatttctagctccacaagtgtgtggccccgcccgagcccctgcccacgcccttggagccttccaccggcactyatgacggcctgcctgcaaacctgctggtggggcagacccgaaaatccagcgtgcaccccgccggaggaaggtcccatggcctgctgggcttggctcggcg

SEQ ID NO: 286660 - DNA, 201 bp, Homo sapiens
ggggcccggactgagggggtgccagcccccgactcactcacacaccttggccgccacaggagccagggagtaacgaagagatcaaagagttcgccgcgggytacaacgtcaaattcgatatgttcagcaagatctgcgtgaacggggacgacgcccacccgctgtggaagtggatgaagatccaacccaagggcaagggca

SEQ ID NO: 286661 - DNA, 201 bp, Homo sapiens
gtgccggcccggacgtcgtcgaggacatctcccatctgctggcggacgtggcccgcttcgctgagggccttgagaaacttaaggagtgtgtgttgcgtgayggtgagagccacggggacaccgaggcctgggtggaagacagagccagacccaagggaggatggagggagggacttggggaggctcagaagggagggaggc

SEQ ID NO: 286662 - DNA, 201 bp, Homo sapiens
acgagtcatccaaccagcgagctgaggtagtcgtccaggtgccgtacctggaggcgggcgaggcggtggtctacccgctgcaggaggcggcggcggacggktgcagaggtgagtgtgtggctgcccgaacggccccaagggaggctggcgtgtgccacccatgggcgcaggtgccatgacctagttgtacacacgtggcag

SEQ ID NO: 286663 - DNA, 201 bp, Homo sapiens; identical to SEQ ID NO: 58495

SEQ ID NO: 286664 - DNA, 201 bp, Homo sapiens
ggcagggagggctgtgtggaagaggccatgacagctaaggctctgagggatgtgtaggagtttggtgggggagtccctgagcgtacactggctcaagaggstgcccactttattttttttaaaggatctgatggcaattaggagggaaaggcagaggaaatgtcccatgcacaggctcagaaacacggaaacagagaatgc

SEQ ID NO: 286665 - DNA, 201 bp, Homo sapiens
caggcagtgtggcgccaggcacaggtggccccggcctcacggagctcgtggtgccgggtcccgacagcatggaggagtgtgaagcgctctgctcgcgcctrgccatcatggtgaatgggcggttccgctgcctgggcagcccgcaacatctcaagggcaggtgagccggcgcggcctccaggcaggtgtggggtgagggtg

SEQ ID NO: 286666 - DNA, 201 bp, Homo sapiens
gagggtgccggcccggacgtcgtcgaggacatctcccatctgctggcggacgtggcccgcttcgctgagggccttgagaaacttaaggagtgtgtgttgcrtgacggtgagagccacggggacaccgaggcctgggtggaagacagagccagacccaagggaggatggagggagggacttggggaggctcagaagggaggg

SEQ ID NO: 286667 - DNA, 201 bp, Homo sapiens; identical to SEQ ID NO: 58505

SEQ ID NO: 286668 - DNA, 201 bp, Homo sapiens
aacccgagctcggtggggtgtggccagtgctctgtgggggtggggctgaggctgggggcgtggcaggcacacgtgggggctgggccaggcccaccaacacytgctgacccttgactctgcgcagcttcccgagccgctcatctccttccgcctctaccacgagctcgtagggctggccaaggacagcctgaaggcagaggc

SEQ ID NO: 286669 - DNA, 201 bp, Homo sapiens; identical to SEQ ID NO: 58531

SEQ ID NO: 286670 - DNA, 201 bp, Homo sapiens
tggacacagtccatgggcctggccctgagctgccttggtgacaccggctgcctgtgctgcccgcagctgacctcaacggcatgacccccgagctgccggtrgccgtgcccagtggaccgttccgccacgaggggctgtccaaggcggcccgtactcaccggctccggaagctccgcacgcccgccaagtgccgcgagtgca

SEQ ID NO: 286671 - DNA, 201 bp, Homo sapiens
ggggccagttctgcgccgaggcacggacagggacaggaggggcggggtggggcttggtcagcacgtggcaggggtgtggccacggcagaggcacacctgaygctgtgcgggggcggggccggggccggggctcggtggggcgtggccagagcaagatgggcgtgttcagcgcttggcagggacccgtatgaggctaggggc

SEQ ID NO: 286672 - DNA, 201 bp, Homo sapiens
gggccagttctgcgccgaggcacggacagggacaggaggggcggggtggggcttggtcagcacgtggcaggggtgtggccacggcagaggcacacctgacsctgtgcgggggcggggccggggccggggctcggtggggcgtggccagagcaagatgggcgtgttcagcgcttggcagggacccgtatgaggctaggggcg

SEQ ID NO: 286673 - DNA, 201 bp, Homo sapiens
cggccccacgcaggcgggattccgcggcgcgcgcccacctcgtgctccgtgatgttgatgagcagctcctgctgcagaaactgctccaggatgtacttggsggccatgtcgaccagggactggaagagagcggctctaaggcacggcccggaggggcccagacaaccccaaccccatttcctgcctcaagctacctggggc

SEQ ID NO: 286674 - DNA, 201 bp, Homo sapiens
atgaagcccaaggaaccacagggagataatttggtttggacagggctgttcgggaggccactgtctttttgtgtcttttatgcaaaaaactcagcgaggtytgcattgaatctggcagaggtgcaaaggctctgcggccgcccctccactctcccttggggctggccttgggcctcacccttcacccccagcttccttccc

SEQ ID NO: 286675 - DNA, 201 bp, Homo sapiens
gataatttggtttggacagggctgttcgggaggccactgtctttttgtgtcttttatgcaaaaaactcagcgaggtctgcattgaatctggcagaggtgcraaggctctgcggccgcccctccactctcccttggggctggccttgggcctcacccttcacccccagcttccttccccgtttcccatcccggtgctgcctg

SEQ ID NO: 286676 - DNA, 201 bp, Homo sapiens
ctcccgcgtagctgggactacaggcgccggccaccacacccggctaatttttgtatttttaacagagatggggtttcactttgttggccaggctggtctcsaactgctgacctcaagtgatccgcaccccccttggcctcctgaagtgctgggattacaggtgtgagccactgcacgcggcgtctcgtattctttcaatcc

SEQ ID NO: 286677 - DNA, 201 bp, Homo sapiens; identical to SEQ ID NO: 58518

SEQ ID NO: 286678 - DNA, 201 bp, Homo sapiens
tctagttatgggacacctgtgttgtctgtcttcacactgctgataaataaatacctgaggctgggcacggtggctcacgcctgtaatcctcgcactttggraggacaaggcagatcacttgaggttaggagttcaagaccagcctgaccaacatggtgaaatcccatctctactaaaaatacaaaaattagacaggtgtgg

SEQ ID NO: 286679 - DNA, 201 bp, Homo sapiens; identical to SEQ ID NO: 58490

SEQ ID NO: 286680 - DNA, 201 bp, Homo sapiens
ccatgtcgtccacggaggagctggtggacccagacggtggagccggggcttcagcctttgagcagggtgagggtcccctgacggggctggagagagagggsggtttggacacagtccatgggcctggccctgagctgccttggtgacaccggctgcctgtgctgcccgcagctgacctcaacggcatgacccccgagctgc

SEQ ID NO: 286681 - DNA, 201 bp, Homo sapiens
tcggttgtaagcagctggtctccgggttgagggagactgatggtctctcaggactgggaaagcgccatgctcctgcatgtattctttttttttttttttttgatacggagtctcgctctgtcgcccaggctgcaggctggagtgccatggcaccatctaggctttcactgcaacctccatctccctggttcaaacaattct

SEQ ID NO: 286682 - DNA, 201 bp, Homo sapiens; identical to SEQ ID NO: 58492

SEQ ID NO: 286683 - DNA, 201 bp, Homo sapiens
ggaaaatccctttaacgagctcccctcggacctgcccaaggagctgcccaggaaggatggggctgacgcggtgttccccggaccaagcctggagccgcccrctgggtcctccggcgtcaaggccacagggaccctcaagcggcccaccagcctgagccgccacgccagcgcggctggcttccccctgtcgggtgctgcctc

SEQ ID NO: 286684 - DNA, 201 bp, Homo sapiens
gccaggcgctctgatctgctcccagcagccgcccattttacagatgacgaaactaagtctctagtgaggccctgacccctggctcacccagccagggcagrgcagagccaggactggacctcaagtggtggagtggcctctgcaccttcagggcactagttggggaaggcccggtccccactgggaggagtgggagccccc

SEQ ID NO: 286685 - DNA, 201 bp, Homo sapiens
ttccttggaggcctggcctgggcggggctcagctcccaggctcctgcaggaggtctgaactgggccagccagggtggggcactttttttttttttttttttgatacagggtcttgctctgttgcccaggctggagtccagtggtgtgattgaggctcactgttaccttgaactcctgggctcaagccatcctcctacctct

SEQ ID NO: 286686 - DNA, 201 bp, Homo sapiens
tgtgtggctgcccgaacggccccaagggaggctggcgtgtgccacccatgggcgcaggtgccatgacctagttgtacacacgtggcagggtccacggtgcwgcacattctgtggatttcgtctgccacggagaccacacctatgagctactcattcagtgtcctttaaccggctgcaaaaacaggcaaggcagtgcctttt

SEQ ID NO: 286687 - DNA, 201 bp, Homo sapiens
gccctgagacccctgtgttagccaccagtatggtcagggactagccagctctctgagcccccggcgcccccatccccagcgtggcccgggaacccagtgcygcgcacctcagcatgggatactgccctcaatccgatgccatctttgagctgctgacgggccgcgagcacctggagctgcttgcgcgcctgcgcggtgtcc

SEQ ID NO: 286688 - DNA, 201 bp, Homo sapiens; identical to SEQ ID NO: 58508

SEQ ID NO: 286689 - DNA, 201 bp, Homo sapiens
gctcgtagggctggccaaggacagcctgaaggcagaggccgaggccaaggcggcgtcccggggccggcaggacggctcggagagcgaggcagtggcggtgsccctggcaggtcggctgcgggagctcctgcgggacctgccgcctgagaaccgggcctcgctgcagtacctgctgcgtcacctacgcaggtgagtcccggc

SEQ ID NO: 286690 - DNA, 201 bp, Homo sapiens
ttttatcctcacctccatatagagaggctcacccgatatcagtcagcatgaagcagcctgaaccccttttttcggctgtgcagggctcagctgaggagatygagtaggttatttcatggacgtcttgggagtggctgagctgttgctgttacgaacaccattgctatgacaagcttgtgcccctgtctcaaggatgcctga

SEQ ID NO: 286691 - DNA, 201 bp, Homo sapiens
agaggaggccacagggcaggcgggatcacccctggggtggaagccacgagccactgtccagcttgtgtttgcagaagctgccgtgtgggggctgtgagcgscccggggaggtggggtggagccgctgggggctgcgctgagctgggcgccccggggctgggctcactcactctggccgcccccagtgctgcctggcctgcc

SEQ ID NO: 286692 - DNA, 201 bp, Homo sapiens
ttccagcacataccggcaaacacatatctgccctgttttgtacacacgaggacagctcacctcatgccctgttctgctcctgatttttatcctcacctccrtatagagaggctcacccgatatcagtcagcatgaagcagcctgaaccccttttttcggctgtgcagggctcagctgaggagattgagtaggttatttcat

SEQ ID NO: 286693 - DNA, 201 bp, Homo sapiens
ttggccaccggagacccccatcggtcagctgccaggccccacgcgctcgcggtctccgcgccccgacggctgcgccatgtgtatctgcgggacggcgcacycggtgctggacgagggccccgtgcgctgccgggcgggcccccgaggtgaggggacaggtgccgggcgctgggtcccgccgcgtccgggagcacgtggcgc

SEQ ID NO: 286694 - DNA, 201 bp, Homo sapiens; identical to SEQ ID NO: 58513

SEQ ID NO: 286695 - DNA, 201 bp, Homo sapiens; identical to SEQ ID NO: 58515

SEQ ID NO: 286696 - DNA, 201 bp, Homo sapiens
tgacttccgttctgcacttgcaggacgagtcatccaaccagcgagctgaggtagtcgtccaggtgccgtacctggaggcgggcgaggcggtggtctacccsctgcaggaggcggcggcggacgggtgcagaggtgagtgtgtggctgcccgaacggccccaagggaggctggcgtgtgccacccatgggcgcaggtgccat

SEQ ID NO: 286697 - DNA, 201 bp, Homo sapiens
cagctactccggagcctgagacaggagaattgcttgaacccaggaggtggaggttgcagtgggccaagatcgtgccattgcgccggggtgacacagcaagsctccgtctcaaaaaaaaaaaaaaaaaaaaaagaggctgggtgccgtggctcacgcctgtaatcccagcactttaggagttcaaggcaggcggatcacaag

SEQ ID NO: 286698 - DNA, 201 bp, Homo sapiens
ggggaggcctcacaatcatggcagaaagcaaagaggagcaagtcacatcttgcatggatggtggcaggcaaagggagagcttgtgtccggaaactccagtwtttagaccatcagatcttgtgaaacccacgtactatcatgagaacagcccaggaaagacgcacctccaggattcaaccatcctccaccagctccctccca

SEQ ID NO: 286699 - DNA, 201 bp, Homo sapiens
ttgctcaaaacatctttaccatttgaaaacacccaacctcctacaacaaccgagaactccagagctggcatctcgcaccctggtggcttgagcgcgtgcayggctgtgaatggagtaaagagccgaggccgggcgggggccgccacgcatcagggcccccgagggagggaagacgaggggtggaaggccgagggcccagga

SEQ ID NO: 286700 - DNA, 201 bp, Homo sapiens
aggcacggacagggacaggaggggcggggtggggcttggtcagcacgtggcaggggtgtggccacggcagaggcacacctgacgctgtgcgggggcggggscggggccggggctcggtggggcgtggccagagcaagatgggcgtgttcagcgcttggcagggacccgtatgaggctaggggcggggctgaggctagacaa

SEQ ID NO: 286701 - DNA, 201 bp, Homo sapiens
tggccgcggggcccagggagcaggaagggagggtgccgggttgggacgatgttgtgtttgggccgctgcaggttgggggcttaggcaatctgggggctctrggggccgttgagatgggagggctgtggcctggccattgggctgaaggttgaccgggcagcagatcctctaatgggatccaccaggttcagaggttgggga

SEQ ID NO: 286702 - DNA, 201 bp, Homo sapiens
aaaaaaaaaaagaaatcagagatgccggaaccagggcctggggcctcactgagcaccatctgtgggcatccctgtagtgttttgggctgctgggtgtgaayggagcagggaagacgtccacgtttcgcatggtgacgggggacacattggccagcaggggcgaggctgtgctggcaggccacaggtgaggggtgccaggta

SEQ ID NO: 286703 - DNA, 201 bp, Homo sapiens
cacagtctcggctcactgcaagctccgcctcccgggttcacgccattctcctgcctcagcctcccgagtagctgggactacaggcgcccgccaccacgccyggctaattttttgtatttttagtagagacggggtttcactgtgttagccaggatggtctcgatctcctgacctcgtgatccgtccacctcggcctcccaa

SEQ ID NO: 286704 - DNA, 201 bp, Homo sapiens
ttgggctgaaggttgaccgggcagcagatcctctaatgggatccaccaggttcagaggttggggagtgtccccaggcctggggtgtctacaaagctggggkgggggtctacagagcttgggggtccgggatgtctacaaggcctggggctgcccataggctctggggttccatggacctttaggggacagacagagtcaga

SEQ ID NO: 286705 - DNA, 201 bp, Homo sapiens
cagtggcacagtctcggctcactgcaagctccgcctcccgggttcacgccattctcctgcctcagcctcccgagtagctgggactacaggcgcccgccacyacgcctggctaattttttgtatttttagtagagacggggtttcactgtgttagccaggatggtctcgatctcctgacctcgtgatccgtccacctcggcc

SEQ ID NO: 286706 - DNA, 201 bp, Homo sapiens
tctcctgggctcaagcgattcttctgcctcagcctcccaagtagctgggattacaggcgccagccaacatgcctggctaatttttgtatttttagtagagrtggggtttcaccaccttggccaggctggtctcgaactcctgacctcaggtaatctgcccaccttgtccttccaaagtgctggaattataggcataagcca

SEQ ID NO: 286707 - DNA, 201 bp, Homo sapiens
aggaggggcagggctcacgctgggctgggaaaggggactgacgccgctctgggtggaacccgagctcggtggggtgtggccagtgctctgtgggggtgggrctgaggctgggggcgtggcaggcacacgtgggggctgggccaggcccaccaacacctgctgacccttgactctgcgcagcttcccgagccgctcatctcc

SEQ ID NO: 286708 - DNA, 201 bp, Homo sapiens
ttgcttgttttgagataaggtctcgctctgtcacccaggctggactgcagtgacgcaatcatacctcactgcagacttgccttcttgggctgcaatgatcstcccacctcagcctcctgagttcctgggtctacaggcaccagccatcacacccagttcatttttttgtattttttgtatactcactatgttgcccagttt

SEQ ID NO: 286709 - DNA, 201 bp, Homo sapiens
gatacggagtctcgctctgtcgcccaggctgcaggctggagtgccatggcaccatctaggctttcactgcaacctccatctccctggttcaaacaattctsctgtcgcagcgtcccgagtagctgggattacagaagcacgccaccacacctggctaatttttgtatttttagtagagacggggtttcaccatagtggtca

SEQ ID NO: 286710 - DNA, 201 bp, Homo sapiens
acccgaggtaggtgggaatggggtttgggaaaggaaagaggttggggttttgggattgggggtggggttctggaaggggacagcagggagacttggggagrggggagagagttcacactgcggggtgggggttgggggaaggtaggaggctgggatctgtatgcctgcagatgccccagctcttggccaatgccgcctcag

SEQ ID NO: 286711 - DNA, 201 bp, Homo sapiens
caccatggccccgccccatactcatgctgcctccacccacaccatggccccaccccatactcatgctgtctccacccacaccatggccctgccccatactsatgctggctctacccacaccatggccccgccgcatactcatgctggctccaccagtgtggccccgccccatactcatgctggctccacccacaccatggc

SEQ ID NO: 286712 - DNA, 201 bp, Homo sapiens
tttgagccccacgtctccgccaacgcctggtaccgccacccagctgccctgtccccggcgcacaaggccctgcctgggagccgggcttccctctgtcgggsgcatgaagatgaagctgtcttgccccccatcacctcccctccttttcccggtttcttccactaggtcccccgtcatgcgtgcccggaagagcagcttcaa

SEQ ID NO: 286713 - DNA, 201 bp, Homo sapiens
ccacccataccaaggccccaccccatactcatgctggctccacccacaccatggccccgccccatactcatgctggctccacccacaccatggccccgccscatactcatgctggctccacccacaccatggccccgccccatactcatgctgcctccacccacaccatggccccaccccatactcatgctgtctccaccc

SEQ ID NO: 286714 - DNA, 201 bp, Homo sapiens
tcatttttttgtattttttgtatactcactatgttgcccagtttttgtttgctttttagctgtgttaacacggtctgcagtgaaacgcaccctcctagctscttccagcacataccggcaaacacatatctgccctgttttgtacacacgaggacagctcacctcatgccctgttctgctcctgatttttatcctcacctc

SEQ ID NO: 286715 - DNA, 201 bp, Homo sapiens; identical to SEQ ID NO: 58503

SEQ ID NO: 286716 - DNA, 201 bp, Homo sapiens
cccgaggtaggtgggaatggggtttgggaaaggaaagaggttggggttttgggattgggggtggggttctggaaggggacagcagggagacttggggaggrgggagagagttcacactgcggggtgggggttgggggaaggtaggaggctgggatctgtatgcctgcagatgccccagctcttggccaatgccgcctcagg

SEQ ID NO: 286717 - DNA, 201 bp, Homo sapiens
gggctgcgagggctctctgcctagaagggcatcctggaggaggggatgtttgaagtgggttttgaaggatgcataggagtttgacaggcacaagctccctsctgttccccctgggttaagggctccggtcagttcttgcagggatggtcacctcccagagtgggcccacctccttgtccttatctctgcttcccagccttc

SEQ ID NO: 286718 - DNA, 201 bp, Homo sapiens
agggcacgcctcccagcctggaagactgtgacgccggtaagcccccacccagcggcaggcaggcatttgaggggtgggccattgcgggggtcgggccaggmtgagcaggcccccgttccctgcaggctgcctgcccgccgaggaggtggacgtgctgctacagcgctgtgaggggggcgtggatgccgcactgctgtatgc

SEQ ID NO: 286719 - DNA, 201 bp, Homo sapiens
gggcgtggatgccgcactgctgtatgccaagaacatggccaagtacatgaaggacctcatcagctacctggagaagcggacgacgctgggtgagagctggkgtcccagcagggtgggtctggagggagggggttctgggtgagctgggaaggccttgtcccagcacctcacacccctctccggcccgcagagatggagttt

SEQ ID NO: 286720 - DNA, 201 bp, Homo sapiens
ctacctggagaagcggacgacgctgggtgagagctggtgtcccagcagggtgggtctggagggagggggttctgggtgagctgggaaggccttgtcccagyacctcacacccctctccggcccgcagagatggagtttgccaagggcctgcagaagatcgctcacaactgcagacagagcgtcatgcaggaggtgggggcc

SEQ ID NO: 286721 - DNA, 201 bp, Homo sapiens
gcatctgccgtcttccacctctgcctcagtttccccatctgggaacaggagctctaaagagggaggaggtggacagactttccctgggactgggccctacsccactgctcactccgactctccccagcagacctccttgaggcccgccgcccgcgggcccacgagtgcctgggtgaggctctgcgtgtcatgcatcagatc

SEQ ID NO: 286722 - DNA, 201 bp, Homo sapiens
cgaggacagctcacctcatgccctgttctgctcctgatttttatcctcacctccatatagagaggctcacccgatatcagtcagcatgaagcagcctgaamcccttttttcggctgtgcagggctcagctgaggagattgagtaggttatttcatggacgtcttgggagtggctgagctgttgctgttacgaacaccattg

SEQ ID NO: 286723 - DNA, 201 bp, Homo sapiens
agatggggtttcaccaccttggccaggctggtctcgaactcctgacctcaggtaatctgcccaccttgtccttccaaagtgctggaattataggcataagmcaccgtgcttggctaatttttatatctttggtagagatggggtttcatcatgttggccaggctggtctcgagtagctaggaccacaggtgtgcgccacca

SEQ ID NO: 286724 - DNA, 201 bp, Homo sapiens
catttctccgagtgtcctgttacgggtgcctcctcccgttcttttttttttttttttttttgagctggaatctctgttgcccaggctggagtgcagtggtrcatgcaatcttggctcactgcaaccttcgcctcctgggttcaagctgttcgcgattctagtgcctcagcctcccgagtagctgggattacaagcgtgcac

SEQ ID NO: 286725 - DNA, 201 bp, Homo sapiens
aaggtgggcagatcacgatgtcaggagatcgagaccaccctggctaacaaggtgaaatcccgtctctactaaaaatacaaaaaattagcccacgcccgcastcccagctactcgggaggctgaggcaggagaatggcgtgaacccgggaggcagagcttgcagtgggcagagattgcgccactgcactccagcctgggcaa

SEQ ID NO: 286726 - DNA, 201 bp, Homo sapiens
aggtgagatggtgtatgcctgtaaacctagctttttgggaggctgaggtggaaggattgtttgaacctgggaggtggaggttgcagtgagctgagattgcrccactgcacactccagcctgggtgacagagggagactcagtctcaaaaaaaaaaaaaaaaaaaaagactgggcgcggtggctcacgcctgtaatcccagc

SEQ ID NO: 286727 - DNA, 201 bp, Homo sapiens
ctgtaatcccagctactcaggaggctgaagcaggagaatcacttgaaccggggaggcagaggttgcactgagccaagatcatggcactgcactccagcccrggcaagagagtgagactctgtctcaaaaagaaatacctgagactgggcaatttacaaaagaaagaggtttaatggagttacagttccatgtagctgggga

SEQ ID NO: 286728 - DNA, 201 bp, Homo sapiens
gccttgagaaacttaaggagtgtgtgttgcgtgacggtgagagccacggggacaccgaggcctgggtggaagacagagccagacccaagggaggatggagrgagggacttggggaggctcagaagggagggaggctcagatggcagggagggctgtgtggaagaggccatgacagctaaggctctgagggatgtgtaggag

SEQ ID NO: 286729 - DNA, 201 bp, Homo sapiens
accccactgctcactccgactctccccagcagacctccttgaggcccgccgcccgcgggcccacgagtgcctgggtgaggctctgcgtgtcatgcatcagrtcatctccaagtacccgctgctgaacaccgtggagacgctcaccgcagccggcaccctcattgccaaggtcaaaggtcagcctgctggaacagggctgcg

SEQ ID NO: 286730 - DNA, 201 bp, Homo sapiens; identical to SEQ ID NO: 58496

SEQ ID NO: 286731 - DNA, 201 bp, Homo sapiens; identical to SEQ ID NO: 58497

SEQ ID NO: 286732 - DNA, 201 bp, Homo sapiens
  misc_feature (1)...(201): n = A,T,C or G
cagggagggacagtgccctccccgcggtctcgaaatgagccccaggcatctgccgtcttccacctctgcctcagtttccccatctgggaacaggagctctnaagagggaggaggtggacagactttccctgggactgggccctaccccactgctcactccgactctccccagcagacctccttgaggcccgccgcccgcgg

SEQ ID NO: 286733 - DNA, 201 bp, Homo sapiens
ccagggccccgcatggggctggtctcacctgcgtctccgtcctacagtccatggaaagcctgtatggaccgggcagtgagggcacgcctcccagcctggawgactgtgacgccggtaagcccccacccagcggcaggcaggcatttgaggggtgggccattgcgggggtcgggccaggctgagcaggcccccgttccctgc

SEQ ID NO: 286734 - DNA, 201 bp, Homo sapiens
ggggatggtggaccgggcggcctcctcctgacccctccgctctccggtgccgcccgcaggccacgatctcctactaccagatgatgcatatgcagacggcrccgctgcccgtgcacttccagatgctgtgtgagagcagcaagctgtatgacccaggccagcagtacgcctcccacgtgcgccagctgcagcgggaccagg

SEQ ID NO: 286735 - DNA, 201 bp, Homo sapiens; identical to SEQ ID NO: 58502

SEQ ID NO: 286736 - DNA, 201 bp, Homo sapiens; identical to SEQ ID NO: 58504

SEQ ID NO: 286737 - DNA, 201 bp, Homo sapiens
cctgtccccggcgcacaaggccctgcctgggagccgggcttccctctgtcgggggcatgaagatgaagctgtcttgccccccatcacctcccctccttttyccggtttcttccactaggtcccccgtcatgcgtgcccggaagagcagcttcaacgtgagtgatgtggcgcggcccgaggctgccgggagccccccagaag

SEQ ID NO: 286738 - DNA, 201 bp, Homo sapiens
cctgccctgggccccagatcccacatcttcctggccacccacaaacgctgcatctctgccggccccacgcaggcgggattccgcggcgcgcgcccacctcrtgctccgtgatgttgatgagcagctcctgctgcagaaactgctccaggatgtacttgggggccatgtcgaccagggactggaagagagcggctctaaggc

SEQ ID NO: 286739 - DNA, 201 bp, Homo sapiens
cctggctcccacacccacagcaagaggcggagtccaacctgcgcaaggccaagcagggttacgtgcagcgctgcgaggaccacgacaaggctcgcttcctygtggccaaggcggaggaggagcaggctggcagcgcgccgggagcaggcagcacggccaccaagaccctggacaagcggcggcggctggaggaggaggcca

SEQ ID NO: 286740 - DNA, 201 bp, Homo sapiens
ccggtaacctggattgttctgacttcctggacgtctttgcccccagggtttcggttctgggcctcagtttccccacctgtcctcgacctgacccacttcayggggctgcagggcgggtgatgggggggaccctactctgcccggccctgctggggcccggccacaccctagggtctgcaggagaggcggtggagcgggctt

SEQ ID NO: 286741 - DNA, 201 bp, Homo sapiens
caagcagggttacgtgcagcgctgcgaggaccacgacaaggctcgcttcctcgtggccaaggcggaggaggagcaggctggcagcgcgccgggagcaggcrgcacggccaccaagaccctggacaagcggcggcggctggaggaggaggccaagaacaaggtgagggcgggtggaggcagggctggaggtccctggaggag

SEQ ID NO: 286742 - DNA, 201 bp, Homo sapiens
caccgagggtgccggcccggacgtcgtcgaggacatctcccatctgctggcggacgtggcccgcttcgctgagggccttgagaaacttaaggagtgtgtgytgcgtgacggtgagagccacggggacaccgaggcctgggtggaagacagagccagacccaagggaggatggagggagggacttggggaggctcagaaggg

SEQ ID NO: 286743 - DNA, 201 bp, Homo sapiens
cgcccgggcggggatggtggaccgggcggcctcctcctgacccctccgctctccggtgccgcccgcaggccacgatctcctactaccagatgatgcatatrcagacggcgccgctgcccgtgcacttccagatgctgtgtgagagcagcaagctgtatgacccaggccagcagtacgcctcccacgtgcgccagctgcagc

SEQ ID NO: 286744 - DNA, 201 bp, Homo sapiens
gccccccatcacctcccctccttttcccggtttcttccactaggtcccccgtcatgcgtgcccggaagagcagcttcaacgtgagtgatgtggcgcggccsgaggctgccgggagccccccagaagaaggcgggtgcactgagggcacacctgccaaggaccacaggggtgagtgtccggcggggcccaggggcggacgct

SEQ ID NO: 286745 - DNA, 201 bp, Homo sapiens
acacactgaccctgcgggtgcccgccgcaaggtcccagccggcagcggccttcgtggcggccgagttccctggggcggagctgcgcgaggcacatggaggycgcctgcgcttccagctgccgccgggagggcgctgcgccctggcgcgcgtctttggagagctggcggtgcacggcgcagagcacggcgtggaggactttt

SEQ ID NO: 286746 - DNA, 201 bp, Homo sapiens
agtgcaacagctacgtctacttccagggtgctgagtgtgaagaggtgagtgggacgccccgacggacagctgggagccttcgggagcctttggggtgcccrgcaccgccggcctgtgtgccctcaggaatgtccggcccagagcagggagcagtcggacgcctttggaaggaagcgaacggagggggtggggtgggctctt

SEQ ID NO: 286747 - DNA, 201 bp, Homo sapiens
gagaggaggccacagggcaggcgggatcacccctggggtggaagccacgagccactgtccagcttgtgtttgcagaagctgccgtgtgggggctgtgagcgccccggggaggtggggtggagccgctgggggctgcgctgagctgggcgccccggggctgggctcactcactctggccgcccccagtgctgcctggcctgc

SEQ ID NO: 286748 - DNA, 201 bp, Homo sapiens
tctccatgccaggagctcccgcctctaccatcgagatgaccacagatgtccccagacgtggcctggtgctccgtggaaaactgctgtccacaaaccatggygtccttcccctgacccccgccccttccctctctggcttggcccagcgggtgtctcagaacctgggtgcgtgcttctgccagccccccaaccacctggccc

SEQ ID NO: 286749 - DNA, 201 bp, Homo sapiens
ctgtgcctctcacctctgccggctgccgccccgggacatgagtcgggggttctgggtgctccacgtggagtctcacgctgggccacgcggggctccggggrtggcgtctgacccgagcccggcctccgcagagttctctgtggcccatgaccttcggcctggcctgctgcgccgtggagatgatgcacatggcagcacccc

SEQ ID NO: 286750 - DNA, 201 bp, Homo sapiens
ttagatcttcagtctaacgctctcccaactgagctatttcggctgggcggcagagtcgctctcgccgggactccgtcccgcgctgcgccttccctgcgcasgcgcagtcgtttcgcgtcagcaggccccacatcctttgtaaggtctcccagggcgccggagcgcagtgtcgtctctgtggcgcaatcggttagcgcgttc

SEQ ID NO: 286751 - DNA, 201 bp, Homo sapiens
ggagcgcagtgtcgtctctgtggcgcaatcggttagcgcgttcggctgttaaccgaaaggttggtggttcgagcccacccagggacgcgtggtgacttttkccctcctggaataacaagaaaatgagtgtcgcctctgtttttgtcggtccgccgcagacccgcggcccccacgtgcgcactccgatgacctttccgcctc

SEQ ID NO: 286752 - DNA, 201 bp, Homo sapiens
agcctcccaaagtgctgggagccacggcacccagcctacgctaagaattgaatgaagggctaattttccataagatgctggtgacaacaaagacatatatwtttttttattccaagcaaattcacagttctgaatcctcaccaggccccttgttaagaatgcctggcccacgcgcggtggctcacgcctgtaatcccagca

SEQ ID NO: 286753 - DNA, 201 bp, Homo sapiens; identical to SEQ ID NO: 58568

SEQ ID NO: 286754 - DNA, 201 bp, Homo sapiens
ctgcgccgtggagatgatgcacatggcagcaccccgctacgacatggaccgctttggcgtggtcttccgcgccagcccgcgccagtccgacgtcatgatcrtggccggcacactcaccaacaagatggccccagcgcttcgcaaggtaggcctcgtcccagccgcccagccgcccccagagtgagctgcgcacggaccccg

SEQ ID NO: 286755 - DNA, 201 bp, Homo sapiens; identical to SEQ ID NO: 58570

SEQ ID NO: 286756 - DNA, 201 bp, Homo sapiens
cccacctcggcctcccaaagtgctgggattacaggcgtgagccaccacgcccggctaatgcaggatagtttctaatggagggaacctgagacatggccagsggccgtcccaacacaggcttctggcgggcaggtggacctggccatttctgcccgggcagccctgcctcactctgtagcctgaccctgtcacccgccaaca

SEQ ID NO: 286757 - DNA, 201 bp, Homo sapiens
cccactttggggaccctctccacccagggctttcggggaaccctgactccaccccaccagccccttcatccgtcgaagtccaggcctcatcagggacgtgyattcattcagcaaacgtcccatcttcctgtgttcagcgccagatgccgccggtgctgggacctcgctctgcaggcccaccctgcatgcctgctgcacacc

SEQ ID NO: 286758 - DNA, 201 bp, Homo sapiens
gattggcgacttagtaatctaagtgcttcccttatgaacgcgatctagcggcaggtctaattgcgactgtgatttggaaggagtgaggagtggaaatgagrctttgatgatacggaaacgtctgcagcccctgcaccatagctaggaaacatctgtgattccgcttggtgaaaagttacaggtcctgctaatactgccgta

SEQ ID NO: 286759 - DNA, 201 bp, Homo sapiens
cctctcgagtagctgggattacaggtacctgctactacacccagctaatttttgtatttttagtagagacggggtttcaccatgttgcccaggctggtctsgaactcctgacctcaggtgatccacctgcctcggcctcctgaagtgctggaattacaggcatgagccaccacgcccaggcattaatgatccctttaaaga

SEQ ID NO: 286760 - DNA, 201 bp, Homo sapiens
cccaggcattaatgatccctttaaagaccccatctccaaaagcagtcacattctgaggtcctggggttagggcttcagatgcaggtcgggtggagggtcayagttcagccgtcaccagcaccaagcctgcctttctggattcttccttgtgagccaggattcctggcacctccaggtttcctcccgctgagtgccccgggc

SEQ ID NO: 286761 - DNA, 201 bp, Homo sapiens
gcccgagcagcagccagggcctggagcacccagcacacgcttgtcaggcacagctgaggccaggacgagcactgggtgcccagggaggccccagcattgcyggagtggcaggcaccccacaagcacgcatagatggagatagaaccgggtgccggcaaccggaggacctggggtcctggtgtaggcgggacgccccgggta

SEQ ID NO: 286762 - DNA, 201 bp, Homo sapiens
ggtcatgtgtggagggcctgctgccagtttccttctgtggatgatcctgggaccgtccttgcttggacactgttgacctgctgggtacgtcacaaaagaarttccattcaagtctgggccatcattgggggtcggggcgatggccgcatggctccagcggctctggccagtggcccaagtgttgacaggcagaggtgagaa

SEQ ID NO: 286763 - DNA, 201 bp, Homo sapiens
ggcgccggagcgcagtgtcgtctctgtggcgcaatcggttagcgcgttcggctgttaaccgaaaggttggtggttcgagcccacccagggacgcgtggtgrctttttccctcctggaataacaagaaaatgagtgtcgcctctgtttttgtcggtccgccgcagacccgcggcccccacgtgcgcactccgatgacctttc

SEQ ID NO: 286764 - DNA, 201 bp, Homo sapiens
ggggagaggcaggacaacagtgagtgcggctgggggagctggaggggcctgggacagccactgacccgcgttccatctcccggcagctccagcgtgggccyggctgtgcaggcacgaggtgtccatcagagcgtggccaccgatggcccaagcaggtgaagctggccttctgggggaggtcgtaccccctcgccccacccc

SEQ ID NO: 286765 - DNA, 201 bp, Homo sapiens; identical to SEQ ID NO: 58573

SEQ ID NO: 286766 - DNA, 201 bp, Homo sapiens
ggccggggtgggggctcagcctttggtcaccaggggcgtgatcatctgtgggaaggcgtagtagcggcagtcggccggtgggaccagcgccatcacctccrtacggatgttctccctccggaagccggcctccagcagcgcgggcacctgcgtctcctggtcggggatggcaccaggtcacctctgagggccatgggggtc

SEQ ID NO: 286767 - DNA, 201 bp, Homo sapiens
tctctctattttatgtatttgaatgtggctggtggggcgcgctttacaactcttggggcccggaggccacctgcaggagccgctgtgcctctcacctctgmcggctgccgccccgggacatgagtcgggggttctgggtgctccacgtggagtctcacgctgggccacgcggggctccgggggtggcgtctgacccgagcc

SEQ ID NO: 286768 - DNA, 201 bp, Homo sapiens
gtgctccctgtctggggactgcgctcctccctccttggggaccgtgctcctccctccctccctgcggaccgcgctcctccctccctggggaccgcgctcckccctccctgcggaccgcgctcggccctccctggggaccgcgcccctccctcccagcggaccgcgctcctccctccctggggacctcgctcctccctccct

SEQ ID NO: 286769 - DNA, 201 bp, Homo sapiens
tgtgctccctgtctggggactgcgctcctccctccttggggaccgtgctcctccctccctccctgcggaccgcgctcctccctccctggggaccgcgctcstccctccctgcggaccgcgctcggccctccctggggaccgcgcccctccctcccagcggaccgcgctcctccctccctggggacctcgctcctccctccc

SEQ ID NO: 286770 - DNA, 201 bp, Homo sapiens
ctggggactgcgctcctccctccttggggaccgtgctcctccctccctccctgcggaccgcgctcctccctccctggggaccgcgctcctccctccctgcrgaccgcgctcggccctccctggggaccgcgcccctccctcccagcggaccgcgctcctccctccctggggacctcgctcctccctccctccctgcggact

SEQ ID NO: 286771 - DNA, 201 bp, Homo sapiens
ggatggggcccgggagactggggcgggggtggggaagaggcacccagcccagccgggtcaagcagcctggaagcaggacatgctggggtggggacagggcrtcagccagcggaacagcagccctgggccagagtgcagagcacaggagccggccttctctcagggcaaggaggtcagtggagggggcgagcaggacggccc

SEQ ID NO: 286772 - DNA, 201 bp, Homo sapiens
ccccaggaagatgggcgggctgcacacatgtggatgcagggggcaaagtgggaggcatggggtgaccagctgggcacaagggcacagacaggcaggacccrggatgttcctggggctgggcaggtggggctgcccctgcaatgggcccagcaggggcgatgcctcctgagaggaaaccacatctggaaatgggaggcttgg

SEQ ID NO: 286773 - DNA, 201 bp, Homo sapiens
cccccttccctgaccccactgcaaagggtcaggtggctttcatctgaggaagggacatcgggcatcagctggagatgtctgctatgggcaagacagtgggrggggcggggcggatcctggggccgctcagaaacctggaggggagtcacccacttttcctgtgtccatgggatgggcgggaggtgagggagcagccgctgg

SEQ ID NO: 286774 - DNA, 201 bp, Homo sapiens
tggcgtggtcttccgcgccagcccgcgccagtccgacgtcatgatcgtggccggcacactcaccaacaagatggccccagcgcttcgcaaggtaggcctcktcccagccgcccagccgcccccagagtgagctgcgcacggaccccgcctctcttccaggtctacgaccagatgccggagccgcgctacgtggtctccatg

SEQ ID NO: 286775 - DNA, 201 bp, Homo sapiens; identical to SEQ ID NO: 58574

SEQ ID NO: 286776 - DNA, 201 bp, Homo sapiens; identical to SEQ ID NO: 58566

SEQ ID NO: 286777 - DNA, 201 bp, Homo sapiens
ggagccgcgctacgtggtctccatggggaggtgagtgcagggcggggggtctccagggacagacgtagcgtgagtgctggcctggccgtgccctgatggcrcttatcaaaagtgtcatctacattcagtgaaatcccacgtggtcccggcgctgcccttcagccgtctcggtgcctccaccctaggcagatgcgctggtgg

SEQ ID NO: 286778 - DNA, 201 bp, Homo sapiens
agtgaaatcccacgtggtcccggcgctgcccttcagccgtctcggtgcctccaccctaggcagatgcgctggtgggcctctccccagaacgattcctcccrtccacccccacgcagcagaccccacattccgcccagttctctgctttactcacacataagtgatgacaggtgctgtagatagttttataatctcagcctt

SEQ ID NO: 286779 - DNA, 201 bp, Homo sapiens
tacggccgaggccctgctctacggcatcctgcagctgcagaggaagatcaagcgggagcggaggctgcagatctggtaccgcaggtagcgccgccgccgcmgccgccggagcctgtcgccgtcctgtccccagcctgcttgtgtcccgtgaggttgtcaataaacctgccctcgggctgccgcctcccagtgtggtgtgtg

SEQ ID NO: 286780 - DNA, 201 bp, Homo sapiens
ctccctgcggactgtgctccctgtctggggactgcgctcctccctccttggggaccgtgctcctccctccctccctgcggaccgcgctcctccctccctgsggaccgcgctcctccctccctgcggaccgcgctcggccctccctggggaccgcgcccctccctcccagcggaccgcgctcctccctccctggggacctcg

SEQ ID NO: 286781 - DNA, 201 bp, Homo sapiens; identical to SEQ ID NO: 58572

SEQ ID NO: 286782 - DNA, 201 bp, Homo sapiens
ctccctcaggtgatccgcctgcctcggcctcccaaagtgctgggattataggcataagccaccacgcctggccttgccctcattttttagtcatttccccrtaacattgaaaggtatttagtctcttaacattttaaaatatttatttatttacttaaagatggagtctagctctgtcgcccaggctggagtgcagtggca

SEQ ID NO: 286783 - DNA, 201 bp, Homo sapiens
ctgctttactcacacataagtgatgacaggtgctgtagatagttttataatctcagccttctcacttgccattagttttttttctttttttttttttttttgagacagagtcttgctctgtcaacccaggctggagtgcggtggaaccatctcggctcactgcaacctccgcctcccaggttcaagcaattttcctgcctc

SEQ ID NO: 286784 - DNA, 201 bp, Homo sapiens
tctggggactgcgctcctccctccttggggaccgtgctcctccctccctccctgcggaccgcgctcctccctccctggggaccgcgctcctccctccctgsggaccgcgctcggccctccctggggaccgcgcccctccctcccagcggaccgcgctcctccctccctggggacctcgctcctccctccctccctgcggac

SEQ ID NO: 286785 - DNA, 201 bp, Homo sapiens
tctgctttactcacacataagtgatgacaggtgctgtagatagttttataatctcagccttctcacttgccattagttttttttctttttttttttttttttgagacagagtcttgctctgtcaacccaggctggagtgcggtggaaccatctcggctcactgcaacctccgcctcccaggttcaagcaattttcctgcct

SEQ ID NO: 286786 - DNA, 201 bp, Homo sapiens; identical to SEQ ID NO: 58583

SEQ ID NO: 286787 - DNA, 201 bp, Homo sapiens
cagaccaggtccactgggcatgtagaaagcatttcaggtgagtgtcccctgggtgctgggctgggaggcctgtaaagtgacacggagctctatcgaggacrgctcaacgcagccctaagagctggccgttgtgttgacacttgagtaactttagctgcctgccacccgaggccccctcccatagcagccggagctggcacc

SEQ ID NO: 286788 - DNA, 201 bp, Homo sapiens
agacacacctcagagccagacgctgctgggctccggctgagcctgcggggagggtgtcgcctcctgaggacgaggagccgagctggagctggggacccccrgccctttggatgctccagtcttcagagcagggcccacagacccagacaccaggcaggaaagattttccccagtgaaagctgagctccaaagtgttttctt

SEQ ID NO: 286789 - DNA, 201 bp, Homo sapiens
attggaagtgaaatggaccttgtaggatagtttccaccactctgctttactatcaggcagcacgtcagagccagggacaccctgtgccagctgtggtgacrgaggcccaggagggcttggtctctcaggaatttgataagcgggagctaaagcccaggcccctacactccctgcaccccgaggccccctgaggccttagcc

SEQ ID NO: 286790 - DNA, 201 bp, Homo sapiens
gcaagtgagacacacctcagagccagacgctgctgggctccggctgagcctgcggggagggtgtcgcctcctgaggacgaggagccgagctggagctgggracccccagccctttggatgctccagtcttcagagcagggcccacagacccagacaccaggcaggaaagattttccccagtgaaagctgagctccaaagtg

SEQ ID NO: 286791 - DNA, 201 bp, Homo sapiens
ctggggtgcaaggcttctaggcacccgccggctgctcctctccccatacccctggactggaagagtcctgggggccctgcatggcaggaatgtcctggctstgggtgcggaagaagaggagacagatctcaggagcccccctcaccgttgggatagaagcccttcagccatcctctaccccagggccattctaccacccct

SEQ ID NO: 286792 - DNA, 201 bp, Homo sapiens
acagtgccccgagtacgtagcgctgccagccctcctcacctgacacccggcgccctccatcaccggccacacggccacctcctcttccccttagcctccaygtgaataccatgtctgtgtcccagtgaagggacacgatcctccctaggaggagccggcgccagctctttgtcctcccttagcactctaggcggttatcac

SEQ ID NO: 286793 - DNA, 201 bp, Homo sapiens
gggcccacagacccagacaccaggcaggaaagattttccccagtgaaagctgagctccaaagtgttttcttccttaggctcagctcacctgaaaccctcgytacctgggcacgccctggctgttctcttcagccaggctttttcccagctcgattcagtcctggtcccaaccccctgcgcagtatctctggacggggctag

SEQ ID NO: 286794 - DNA, 201 bp, Homo sapiens
gtctcaaaaacgaaaagcaaaaaaaaaaaacaaaacaaaaccttcacagaggctaggacaaggagcactaaacagtcattagcaaaatgatgagtgagttmtctttttaggtctgttaggacagaaacaagtaggggtgccagaattcattgattcattcggcagacattgctgagcagctgctgtgagtcaggcactgtg

SEQ ID NO: 286795 - DNA, 201 bp, Homo sapiens
ctgaaactgtattcattaaacagtgactcctcctttcctcctcccccaggccctggcaactacctttctactttctctctgtatgaattaggctattttasgtacctcctatgaatgaaatcatatagtgtttgaccttttctgcctggcttattttactcagcatgatgtcttcaatgtcttacagcatgtcagaattcc

SEQ ID NO: 286796 - DNA, 201 bp, Homo sapiens
agtgaaaaaagtacatttaacacagtatctagactcttagttccctttcaatgagaaaaattttctgattaagtaatactgcaattcactgatgaccatcrttaatgatcacagctaagtcagggctgtttgcgttatgtggaaccagggctttttctagcagtagaacttcatagaccatgttattctgagacgtttctg

SEQ ID NO: 286797 - DNA, 201 bp, Homo sapiens
tggcctcccaaagtgctgggattacaggcgtgagccaccacacccagctgaaattggctttttgaagagggtagagcattactgtctggaccgcatgtggstgactctataatgccagcttggccaatgagaattccgttcttagtgacaagagtaactttgctgggtggctctacacaactgtatgcagaggggagcccc

SEQ ID NO: 286798 - DNA, 201 bp, Homo sapiens
aagattgaaactgtctagtgcttgggctgacagctcccactggctcacagctccccgctcccgcagggaacgtttgcttttccagagccctgtgcctgccygccggcgttgcccatgatggctgccttcgtgtccacgctgatgcttggcttgggattccgaagtctcaatcatggatgcagagcgcaggctcatgtgttg

SEQ ID NO: 286799 - DNA, 201 bp, Homo sapiens
atggttgttcaatttttgttaactactttatacttgtatttttccattcttgaccataaacacatgactctgggagtcaggaaagcaagttgctacctctscctccttcctttgcttttatcagggtgtcccgtgtccctgcctctgttttctgtgttgggccctaggcctctgggctccggtctgagtggctggggtggc

SEQ ID NO: 286800 - DNA, 201 bp, Homo sapiens
tgtgtggtcgacattattttatttcatcctcaccaaaggcctgggaagtctggtgattcccattgtcctgaggctggagaggtcggttagcttgtccaagrtcacacggggcccggattagatggttattagcgagccccaagtgtatccatagctcttcacaaagggacttctgtgggtaccctgtggaggctgggcagg

SEQ ID NO: 286801 - DNA, 201 bp, Homo sapiens
cagggcaggggtgcttcagatggaaagggagacctcagccctttggtctgaatgccatgaagaccttggacttggtgcaaatggccagagacaagagcttsatctgaaatgtatctcttccaagccacgtagacagtgcgagctgataccacagtcatggttgccggcgggggtctgtcagtgtttgagcatgtttatgga

SEQ ID NO: 286802 - DNA, 201 bp, Homo sapiens
ctggtgattcccattgtcctgaggctggagaggtcggttagcttgtccaaggtcacacggggcccggattagatggttattagcgagccccaagtgtatcmatagctcttcacaaagggacttctgtgggtaccctgtggaggctgggcaggggattccccatgggaacagcagacctcaggggaggtgagggctccctct

SEQ ID NO: 286803 - DNA, 201 bp, Homo sapiens
ggacttggtgcaaatggccagagacaagagcttgatctgaaatgtatctcttccaagccacgtagacagtgcgagctgataccacagtcatggttgccggsgggggtctgtcagtgtttgagcatgtttatggagcacttgctctgtgcagggtactgcgacaggctctgggaacacagagaccagtgagtcacagtctct

SEQ ID NO: 286804 - DNA, 201 bp, Homo sapiens
ggcaggagcattcactgctcttaaaggccaagagccggggatccttgacagggccggctgccttggtaggtggcctggcctcccagaccagagcctcaggsccttcattgtcacaggccacctgaaagcctgcacagatgactctggaaatacctggagtctggcggcagcccctatgggcatgggctctgagaaacagga

SEQ ID NO: 286805 - DNA, 201 bp, Homo sapiens
aaggctgggggtcaggaccagctgacatgtggccaccagtgaagtgacctggggcaagcttctgggcctctgtgcactccatttcctcagctctaagggcyttggctttgtgtgtggagcattcagatataaatccttagtggttttctgggggcaaagagaagctcccagatgccctccctccgatcctgccgtgtaacc

SEQ ID NO: 286806 - DNA, 201 bp, Homo sapiens
tcaacttgagcatgcaccgtggaatggccattcatggccagagggatgacctcttttgctctatagttgaaaactagctatcagaagggggttagcaaatyctagagctttttctatccagagatcaccgctgaccctaggcattttgctcgagtttgactttatgaagctgtgttggttgaagcttttcaccctcggaat

SEQ ID NO: 286807 - DNA, 201 bp, Homo sapiens
gctgctgggctccggctgagcctgcggggagggtgtcgcctcctgaggacgaggagccgagctggagctggggacccccagccctttggatgctccagtcytcagagcagggcccacagacccagacaccaggcaggaaagattttccccagtgaaagctgagctccaaagtgttttcttccttaggctcagctcacctga

SEQ ID NO: 286808 - DNA, 201 bp, Homo sapiens
tccggccaggagtggtagctcacgcctataatcccagcattttgggaggccgaggcaggtggatcacttgagatcaggagtttgagaccagcctggccaasacggtgaaacttcgtctctactaaaaatacaaaaattagctgggtgtggtggcgggtgcctataatcctagctactccggaggctgaggcaggagaatcg

SEQ ID NO: 286809 - DNA, 201 bp, Homo sapiens
cctggttcttctgccctgcacatgcaccgcacccacacctgtacccatgcgcacctgtgcacgcccatctcaaaagcctgtaccgacacggatggcagcaytgggttggagggtgtacccagctcctgggagtgttctagccatctctaatatacatggccccagatcaaccctgcccggctcagaagtcggttgctctca

SEQ ID NO: 286810 - DNA, 201 bp, Homo sapiens
gtttcgaagtcctgacctcaggtgatccacctgcctcgacctcccaaagtgttgggattacaggccatgagccaccatgcccagccaaaagaccttgtttytaagaaaaaaaaaaaaaaaaaatagctagatgtggtgatgtgtgcctgtagtcctagctactggggaggctgaggtgagaaaaatgcttgaacccaggag

SEQ ID NO: 286811 - DNA, 201 bp, Homo sapiens
gggtttagggaagcagacagtctcatacactgaggtgtgagtgtatactgactttgtacatgtgtagggtagtttagtcttgcttgttaaaactgtaaatrttcctattcttaattccagaagttgcttccttagcaacttattttttctttttaaatgcacttttctttttaaaaatgtatttatttgttttttaacaaa

SEQ ID NO: 286812 - DNA, 201 bp, Homo sapiens
ctaggtatgttaaaaatgttttctatctacccaaaaactcagcgaaaatagtaacaatcttgataaaccagatttttgcctctcctttagtggagaaaaayggccgagctgggttttagacaaacgccttggagtccgaatgttcagtccaactacctgcattcaacttgagcatgcaccgtggaatggccattcatggcc

SEQ ID NO: 286813 - DNA, 201 bp, Homo sapiens
cttgattttcagtttaggcccagctgggatggtctccagtatctgccaggcttcccccagctcccagcagctcttatcaaaccagaagtccagccagcagkggaggaaggaatgttggctggccactttaggtacaacatgcgggagtaagggtcagctcgaggcaatgttgtgaaatcccgaaatcattctttggaggtt

SEQ ID NO: 286814 - DNA, 201 bp, Homo sapiens
ccccaccaaaaaaaaaaaaagttactgatggtgaaggcagctccctcatcatctactcctaggaacctgacacctctagcccccaggggattgttcacctkcaaagctatttggtttaagtggagagtttggcctgggagccctaacctcttcagacactgcaccagctcgttgctctccacttgtgacaatggagaggca

SEQ ID NO: 286815 - DNA, 201 bp, Homo sapiens
accatgtgccaatttgggattctctcagtcccagggatgccagactcagtgggaagggccccctggagcacatggagggagcagaggggctgtcgggagamctggcttctccagtccagagcacccctagagtgcctttggcaggaaggaaggagggcactggtttggtggcattccagatgtgcccgagactgtgctggg

SEQ ID NO: 286816 - DNA, 201 bp, Homo sapiens
tcaggtagagaactacttttctacataaacaacagaggaactttagcttatattaaaatagtgatcaaagtgcttatgttttacgcaaaattaatgtaacsttaagttagatgttagtattatgcagtatccatccccagtcccgatggtagcagcagtggcctctcttctcaggagaagaaaattcagcttcatttgttg

SEQ ID NO: 286817 - DNA, 201 bp, Homo sapiens
cagcgtgtggcctgcaggggccagagcagcagtagccagtgggtcctgtcacagtgacaggaggagagcgggttacagactgtccatcacgggacactgcrtggcgggggaaccaaggatgccaggccctgtgtgtcaggagggatgaaggggaaaggcagctgcagaggagcagagggtctgaaatggatgtgaaatggg

SEQ ID NO: 286818 - DNA, 201 bp, Homo sapiens
ttcttccctgccagagggggaagccagccctggcctaagtggctgcccagtgaacggccacagcgggagccgggagggaaagcggcctcagcgtgtggccygcaggggccagagcagcagtagccagtgggtcctgtcacagtgacaggaggagagcgggttacagactgtccatcacgggacactgcatggcgggggaac

SEQ ID NO: 286819 - DNA, 201 bp, Homo sapiens
attgaagggtgcaaggaacaggacaatcacagcccgaggttacaggggaggcagggaagaggagcaaggctctggagcagaggagctggcccttgaagccrgtgtgctggcaggagcattcactgctcttaaaggccaagagccggggatccttgacagggccggctgccttggtaggtggcctggcctcccagaccagag

SEQ ID NO: 286820 - DNA, 201 bp, Homo sapiens
acttaaacccaggaggcagaggttgcagtgagctgagatcatgcctctgcactccagcctgagtgacagagtgagactccatctcaaaaaaaaaaaaaaaagaaaagaaagttgcatgcccagaagtggaattactggtaaaatggatatagacatattgaaagctgtttgtatatactactaacttgttttccaatgaag

SEQ ID NO: 286821 - DNA, 201 bp, Homo sapiens
ttagggaagcagacagtctcatacactgaggtgtgagtgtatactgactttgtacatgtgtagggtagtttagtcttgcttgttaaaactgtaaatgttcmtattcttaattccagaagttgcttccttagcaacttattttttctttttaaatgcacttttctttttaaaaatgtatttatttgttttttaacaaagttc

SEQ ID NO: 286822 - DNA, 201 bp, Homo sapiens
tctctctgccttcaccactccaggagcccggtgggcacctaccacatctctagtctagccagcacgcgagtcccgagggtgggcctgaattcctgagcttsctctcgcgtgcctttcaggcgatgagaatgatttatttgtttgtgatgcatgtttgctgaaagattaataaatcatttctgtgcctttagcaaacttcct

SEQ ID NO: 286823 - DNA, 201 bp, Homo sapiens
ccagagtgatctttttaaaagcaccctatcacagatcacctggggtcggaagttggagaccagcctgaccaacatggagaaaccccatctctactaaaaayagaaaaaattagctgggcattgtggcgcatgcctgcaatcccagctactcgggaggctgaggcaggagaatcgcttgaacccgggagacggaggttgcgg

SEQ ID NO: 286824 - DNA, 201 bp, Homo sapiens
gtcaagcagccgctcgtgagtgtggtggacacaatagccaaggtgagaaaagggactgctctggggaacagctgactggtgggtcaggcgggcaagagcckgggtagggcccccctgccaacagcctcagcctgtcctgactgggcctctgggtttctgaggtgtggcctccttccatgcactgggcaggtttggggtttc

SEQ ID NO: 286825 - DNA, 201 bp, Homo sapiens
tctatccagagatcaccgctgaccctaggcattttgctcgagtttgactttatgaagctgtgttggttgaagcttttcaccctcggaatgtactgtttctsgtcaggttccttctatccgtgtttgcatttggagcagtgaactgacacattttgtctatctgaaaaggtatggactaccagtgaacttccaggcagtgct

SEQ ID NO: 286826 - DNA, 201 bp, Homo sapiens
tgatattgtgagcaaagaggacttcgtgctggattctgaatatctcgtcacacttctggtcatcgtccccaagtgagtgctgggcgatcacgaaggaaacyggccctgcccagtggagaggaaggtggacccgttggtgacttgggcagtgtggacgaggatgctccctgcccagccccagttctcgggaagcagtcattc

SEQ ID NO: 286827 - DNA, 201 bp, Homo sapiens
ctctctgccttcaccactccaggagcccggtgggcacctaccacatctctagtctagccagcacgcgagtcccgagggtgggcctgaattcctgagcttgstctcgcgtgcctttcaggcgatgagaatgatttatttgtttgtgatgcatgtttgctgaaagattaataaatcatttctgtgcctttagcaaacttcctg

SEQ ID NO: 286828 - DNA, 201 bp, Homo sapiens
agaagtcatccaccaagcgtttaagagaggttctaaactctgtcttccgacatctggatgaagtagccgctacaagtatactggatgtaggtatccagaamcagcagtatttctacagtaagctcagcatcttactttcaaaaaactggtatctgcctgtaatcccaacactttgggaggtaggtggatcacttgaggtca

SEQ ID NO: 286829 - DNA, 201 bp, Homo sapiens; identical to SEQ ID NO: 58591

SEQ ID NO: 286830 - DNA, 201 bp, Homo sapiens; identical to SEQ ID NO: 58592

SEQ ID NO: 286831 - DNA, 201 bp, Homo sapiens
cacgagccttttctgcaaaaaatcacgtaacgattctatgttcttgcagaccaaactactcacaatggcaaaaaacctacgaatctctctcagacatggtrgtccctcgatcaaccaagtaagtgagaccccagcttggtcccagggcccctggggtacatgtgtgggtgcttcagggcacccaaccaccaaacatgcccc

SEQ ID NO: 286832 - DNA, 201 bp, Homo sapiens
acccatgaactagtgattgacaggatgaaccagaggcacacattgttgcattttaatcctatctcctccgggggcatttagggcaccactgcctgcagccrgtcagacctggtccaaaagtcacttctggagtttccttttctcaactgtagatggactgaatggcttcaaaggctcttggcttcgtcaggaccggttgtt

SEQ ID NO: 286833 - DNA, 201 bp, Homo sapiens
ggcgctctcgggctgcctccgtcctcagcctggaagccgcacccctcaaggcagtccagagagaaaaccaaaaccacaccaacaacaacaaagcttatttygccttttttttttttatttgagatggagtttcactcttgtcgcccaggctagagtgcaatggcatgttcctggctcactgaaacctccacctctcaggtt

SEQ ID NO: 286834 - DNA, 201 bp, Homo sapiens
tggattcttccatgtataaaaatgtgtatatttagactaaagctgttggcattctatggagcacccattttcttcatctgttgactcttgagattctcccrtcagcagccgtgtgctggcctgtagcatttgtggatggccgtggtgtaaatgctcctgccgtggctggttgtccaagctggtggggtgtcaccacgtggg

SEQ ID NO: 286835 - DNA, 201 bp, Homo sapiens
aaagctgttggcattctatggagcacccattttcttcatctgttgactcttgagattctcccatcagcagccgtgtgctggcctgtagcatttgtggatgrccgtggtgtaaatgctcctgccgtggctggttgtccaagctggtggggtgtcaccacgtggggctgcgaggagggaatgtgaaggagcctggcacagtcg

SEQ ID NO: 286836 - DNA, 201 bp, Homo sapiens
aggtgagggctccctctgaccccatccctgctcaccttcaggccttcaggaaaaggggtgtgcagcttcctaggcactcaggacacccacgagccttttckgcaaaaaatcacgtaacgattctatgttcttgcagaccaaactactcacaatggcaaaaaacctacgaatctctctcagacatggtggtccctcgatcaa

SEQ ID NO: 286837 - DNA, 201 bp, Homo sapiens
catctgttgactcttgagattctcccatcagcagccgtgtgctggcctgtagcatttgtggatggccgtggtgtaaatgctcctgccgtggctggttgtcmaagctggtggggtgtcaccacgtggggctgcgaggagggaatgtgaaggagcctggcacagtcggctctcagcactggcattatccccgctgtggaacaa

SEQ ID NO: 286838 - DNA, 201 bp, Homo sapiens
gctatcagaagggggttagcaaattctagagctttttctatccagagatcaccgctgaccctaggcattttgctcgagtttgactttatgaagctgtgttsgttgaagcttttcaccctcggaatgtactgtttctggtcaggttccttctatccgtgtttgcatttggagcagtgaactgacacattttgtctatctgaa

SEQ ID NO: 286839 - DNA, 201 bp, Homo sapiens
atatagggggtttttcaccctcctcctccgaaatagcacagggcgctcacacacgtgtgtgtgtgtgtgcgcgcgcacgtgcatgtatgagtgtgtgtgtggacctgtgtgtgcacagcaagtgagacacacctcagagccagacgctgctgggctccggctgagcctgcggggagggtgtcgcctcctgaggacgaggag

SEQ ID NO: 286840 - DNA, 201 bp, Homo sapiens
tatatagggggtttttcaccctcctcctccgaaatagcacagggcgctcacacacgtgtgtgtgtgtgtgcgcgcgcacgtgcatgtatgagtgtgtgtgtggacctgtgtgtgcacagcaagtgagacacacctcagagccagacgctgctgggctccggctgagcctgcggggagggtgtcgcctcctgaggacgagga

SEQ ID NO: 286841 - DNA, 201 bp, Homo sapiens
cacagctacgcagagcagaacgtacgctcagtgcctggcgagcttcctcaaaactaaaaggataagacaggaaactagtttatgcacttagagcattaccrtgtcttcttttgtaggcatctgtggagatcccgggactgcaactcaataaccaagactattttccttatgtctacttccatattgaccttagtcttcttg

SEQ ID NO: 286842 - DNA, 201 bp, Homo sapiens
ttatatagggggtttttcaccctcctcctccgaaatagcacagggcgctcacacacgtgtgtgtgtgtgtgcgcgcgcacgtgcatgtatgagtgtgtgtgtggacctgtgtgtgcacagcaagtgagacacacctcagagccagacgctgctgggctccggctgagcctgcggggagggtgtcgcctcctgaggacgagg

SEQ ID NO: 286843 - DNA, 201 bp, Homo sapiens
tggatgctccagtcttcagagcagggcccacagacccagacaccaggcaggaaagattttccccagtgaaagctgagctccaaagtgttttcttccttagrctcagctcacctgaaaccctcgctacctgggcacgccctggctgttctcttcagccaggctttttcccagctcgattcagtcctggtcccaaccccctgc

SEQ ID NO: 286844 - DNA, 201 bp, Homo sapiens
ggaaatctcagggagtgtccttggttccccagccctcagctgctgccatggaccccaggtgcaggccaccaggcccggggcctctgagccccactcccgcwcaaggcctagcagtgagtccagccaacagatgcttctctccaacagactcattactgaggacaaggaagggggccttttcactgtgactctgtttcgaaa

SEQ ID NO: 286845 - DNA, 201 bp, Homo sapiens
ggggccttttcactgtgactctgtttcgaaaagtgattgaagatttcaaaaccaaggccaaagaaaacaagtaagggtcctccgggtttggttcatctccygctgcggggggtctctgcccctctggaaagcttctgagtgaaaacccatgatttgcttgttttaaggttcactgttcgtgaattttactatgatgagaag

SEQ ID NO: 286846 - DNA, 201 bp, Homo sapiens
ggaggcaaggcctgtgtgttccaagcagcagagggcaagctgtggtgctgtgagtacagaaggccggaggggctgggcacggtggctcacgcctgtaatcycagcactttgggtgtctcagcctcattctgacaacaagaggtctcaatctgtcaactagagacatttagtcaaaggagactcctctattatctcacaata

SEQ ID NO: 286847 - DNA, 201 bp, Homo sapiens
gctcagctcacctgaaaccctcgctacctgggcacgccctggctgttctcttcagccaggctttttcccagctcgattcagtcctggtcccaaccccctgygcagtatctctggacggggctagaccgtggcagcctccacaccagggaggccctgctgggggacaggtggcgaagcagggcctttggcacccacctgggc

SEQ ID NO: 286848 - DNA, 201 bp, Homo sapiens
tgttttttttttttttgctttttgaaaaaaaatatataaatcttattttaaaaagcaagatctggctggtcacggtggctcatgcctgtaatccagcactytgggaggccgaggcgggcggatcacctgaggtcaggagttcgagaccagcctggccaacatggtgaaacctcgcctctaaaaatacaaaaaatggctggg

SEQ ID NO: 286849 - DNA, 201 bp, Homo sapiens
ggaaactagtttatgcacttagagcattaccatgtcttcttttgtaggcatctgtggagatcccgggactgcaactcaataaccaagactattttccttaygtctacttccatattgaccttagtcttcttgactagaaaggccagctggcacctctgtctcatgttcgtgcagattattacagacacctctttcctttag

SEQ ID NO: 286850 - DNA, 201 bp, Homo sapiens
ttctcccatcagcagccgtgtgctggcctgtagcatttgtggatggccgtggtgtaaatgctcctgccgtggctggttgtccaagctggtggggtgtcacsacgtggggctgcgaggagggaatgtgaaggagcctggcacagtcggctctcagcactggcattatccccgctgtggaacaaatggggaaacctgagccag

SEQ ID NO: 286851 - DNA, 201 bp, Homo sapiens
aactacctgcattcaacttgagcatgcaccgtggaatggccattcatggccagagggatgacctcttttgctctatagttgaaaactagctatcagaaggrggttagcaaattctagagctttttctatccagagatcaccgctgaccctaggcattttgctcgagtttgactttatgaagctgtgttggttgaagctttt

SEQ ID NO: 286852 - DNA, 201 bp, Homo sapiens
tttatatagggggtttttcaccctcctcctccgaaatagcacagggcgctcacacacgtgtgtgtgtgtgtgcgcgcgcacgtgcatgtatgagtgtgtgtgtggacctgtgtgtgcacagcaagtgagacacacctcagagccagacgctgctgggctccggctgagcctgcggggagggtgtcgcctcctgaggacgag

SEQ ID NO: 286853 - DNA, 201 bp, Homo sapiens
gaggaaacaacagctgataatatacaagtttatatagggggtttttcaccctcctcctccgaaatagcacagggcgctcacacacgtgtgtgtgtgtgtgygcgcgcacgtgcatgtatgagtgtgtgtgtggacctgtgtgtgcacagcaagtgagacacacctcagagccagacgctgctgggctccggctgagcctgc

SEQ ID NO: 286854 - DNA, 201 bp, Homo sapiens
ctgccaagtgtgtgctccgggctcctggggacctggcctgtctgtcagcgacctttttgcagggactggggatgagcagccaccccgtcacaagcgagcccagccacggagcccccgtagtggggttctcggagcccctctggtctggtctgtttccctttagggaggaaacaacagctgataatatacaagtttatatag

SEQ ID NO: 286855 - DNA, 201 bp, Homo sapiens
atcgtccccaagtgagtgctgggcgatcacgaaggaaaccggccctgcccagtggagaggaaggtggacccgttggtgacttgggcagtgtggacgaggakgctccctgcccagccccagttctcgggaagcagtcattccttcatggggccctgcctgcggctgtcagtagggacagtggttgggtgatggtggttgtgg

SEQ ID NO: 286856 - DNA, 201 bp, Homo sapiens
tcaaatctcagggcctgtcctgtaaaagttaatatccaagaaaaagtgacttgatccggaaatgttgactcccttcttaggcttctctgcaccacagggargtatgactggccttgtacaacttatggcctagctgagaagacacatattaataaaataatcacatcacataatcaaataatgctaaacctaagaaaggcc

SEQ ID NO: 286857 - DNA, 201 bp, Homo sapiens
tcaaagtgctaggatttcagacatgtgcctggcccattttattatatatttttttgagacagagtctcactctgtcacccaagctggagtacagtggtgtratctcagctcactgcaacttccacctcccgggttcaagcaattctcctgcctcagcctcctgagtagctgggattacaggcatccaccaccaagcccagc

SEQ ID NO: 286858 - DNA, 201 bp, Homo sapiens
tgggtggatcatgaggtcaggagttcgagaccagtctgtccaatatggtgaaaccctgtctctactaaaaaatacaaaaattagccaggcgtggtggcgcrcacctgtagtccttgctgctcgggaggttgaggcaggagaatcacttgaacccgggaggtggaggttgcagtgagccgagatcatgccactgctctccag

SEQ ID NO: 286859 - DNA, 201 bp, Homo sapiens
ggaaagagccagtcccctggcctcccctcgagggcccagcacccattcacttgctgctccacttcttttttcaaaagttactgatggtggccgggcacggyggcttacgcctgtaatcccagcactttgggaggccaaggtgggtggatcatgaggtcaggagttcgagaccagtctgtccaatatggtgaaaccctgtct

SEQ ID NO: 286860 - DNA, 201 bp, Homo sapiens
ccttccttcctccctccctccctccctcccttcctcccttttttgagacagagtctcactctgttgcccaggctggagtacaatggtctgatcgtggctcrttgcaacctccgcctcccaggttcaagtgattctcctgcctcagcatcctgagtagctgggactacagacaccctccaccatgcccagctaacttttgta

SEQ ID NO: 286861 - DNA, 201 bp, Homo sapiens
gataattttcttttcttttcttttcttttctttttttttgagatggagtctcgcttgtcacccaggatggaatgcagtggcgcaatctcggctcactgcargctccgccttctgggttcacgccattctccagcctcagcctcccaagtagctgggacaacaggcgcccgccaccacacctagctaattttgtgtgtgtgt

SEQ ID NO: 286862 - DNA, 201 bp, Homo sapiens
aacaaattaaaacatagcattacataaattcatggaaattgcaggtctccattcttgtatccatgaagataatagccagtgtcaacagtttggtttctttycttttaggattcttatttaggtatatactgacataattttttaagtggggttatatgctttacatgcctaaatgctttattttgaaccaatttcaaattt

SEQ ID NO: 286863 - DNA, 201 bp, Homo sapiens
ccctgtctctactaaaaatacaaaaacttagctgagcatggtggcagacacctgtaatcccagctaccagggaagctgaggcaggagaatcacttgaaccygggagatggaggttgcagtgagccgagatcacaccattgtattcccgcctggacaacaagagcaaaactccgtctcaaaaaaaaaaaaaaaaaaagaatg

SEQ ID NO: 286864 - DNA, 201 bp, Homo sapiens
gcgtggcagtgatgccccggctgggactgtcctgaggatgggcagggtctgggggagctatcggggcaccccagctcctgccttctctccatcctccaccygtctcctttctgagactgtggctgttggcaacacgctcaattccgagtcaagtacaccctcccctcagccctgtgtcccctgctgtctgctccctccgtt

SEQ ID NO: 286865 - DNA, 201 bp, Homo sapiens
gagggcggcgtacaaagagggatgaacgtttctaactccctcctctgcgctctcttttcttctttgtacacaaaccaagtatgcactgtgccctcaggccygatgctagaccctaaagatataaagcagaatacaatacaatttttgcacttgcagagctcacagttattcattcaacaaacgtgtggaaagttggcttcg

SEQ ID NO: 286866 - DNA, 201 bp, Homo sapiens
ggttgcagtgagccgagatcacaccattgtattcccgcctggacaacaagagcaaaactccgtctcaaaaaaaaaaaaaaaaaaagaatggagtcttcaaracacctaaaaaattatatatatcaacaaataaaattttttaaaagaggctgggtatggtggctcatgcctgtaatcttagcactttgggaagccgaggca

SEQ ID NO: 286867 - DNA, 201 bp, Homo sapiens
tcaaaaaaaaaaaaaaaaaaagaatggagtcttcaaaacacctaaaaaattatatatatcaacaaataaaattttttaaaagaggctgggtatggtggctsatgcctgtaatcttagcactttgggaagccgaggcaggaggatcacttgaggccaggagttcaagaccggtctgggcaacatagcaagaccctggcccta

SEQ ID NO: 286868 - DNA, 201 bp, Homo sapiens
ctggccctaccaaaaaaaagttttttttaaatgaacaagccagtaaaaagccggcaaaatatatgaacatgctatccacagaagaagaaaatagccttttwtagagtcaaacatgagaaaagatgtccagcctcactgatgatcaaagaaatgcaaatcaaagcaacaacgagatataatttttcagacatcagattggca

SEQ ID NO: 286869 - DNA, 201 bp, Homo sapiens
atgcctggctaattttttttttttcatttctcttttgtagagatgggggtctctttatgttgcccaggctggtctcaaactcctgggctcaaatgataccsctgaccatggcctcccaaagtactaggattataggcatgagccactgtgccaggccctcctggagaccttgacaaaatgcagattctgactcagtggatc

SEQ ID NO: 286870 - DNA, 201 bp, Homo sapiens
ctgccactgtgctttgaggatagctgctttgaatggtaatgaggtgatctgtttctagaaggttttaaatatgtcattatgacatgtttggacctggtacrtttttagtagttctttaataatattcacaaaatttttcagtactgttgctctgttagttttctctttggaggaggagtagattcgcaaattgcattttgc

SEQ ID NO: 286871 - DNA, 201 bp, Homo sapiens
tggactgctgtcacaaaataccactgactgggcagcttaaaccacagactaagatcagacaacctggtttctcctgagggctctctgcctggcttgtagayggccaccttcttgctgcatcgtcccatggcctttccttggtgcctgtatgaggacagggagagcacggatccaactctctgctgtcccttcttatatggc

SEQ ID NO: 286872 - DNA, 201 bp, Homo sapiens
cactgcaacctctgccccctgggttcaagcgattcttctgcctcagcctccccagtagctgggactacaggcgtgtgccaccatgcccagctaattcttayatttttagcagggacggggtttcaccatgttggccaggctggtctcaaactcctgacctcgtgatccacctgcttcagcctcccaaagtgctgggattac

SEQ ID NO: 286873 - DNA, 201 bp, Homo sapiens
ccaggctggagtgcagtggctcattcttggctcactgcaacctctgccccctgggttcaagcgattcttctgcctcagcctccccagtagctgggactacrggcgtgtgccaccatgcccagctaattcttacatttttagcagggacggggtttcaccatgttggccaggctggtctcaaactcctgacctcgtgatcca

SEQ ID NO: 286874 - DNA, 201 bp, Homo sapiens
cgttgcccaggctggagtgcagtggctcattcttggctcactgcaacctctgccccctgggttcaagcgattcttctgcctcagcctccccagtagctggractacaggcgtgtgccaccatgcccagctaattcttacatttttagcagggacggggtttcaccatgttggccaggctggtctcaaactcctgacctcgt

SEQ ID NO: 286875 - DNA, 201 bp, Homo sapiens
aatcccagctacttgggaggccaaggcaggggaattgcttgaaccctggaggccagaggttgcagtgagccaagatggtgccactgcactccagcctgggygacagaacgagatccatttcaaaaaaaaaaatagaaggccagaggggtggcagagggccgtcctcagacaacattctttccaaaggcagggtgcgtggac

SEQ ID NO: 286876 - DNA, 201 bp, Homo sapiens
ctactcagaaggctgaggtgggaggatcacttaaggccaggagtttgagaccagtctggaccacacagcaagacaccatctctttgaaacaaaaaaaaaaagcacactttctaccaaaataaaatgtcatattttctcagataataataaaaactgagatggcttcctgtcttctgtcataaattgtcatgtctctttagc

SEQ ID NO: 286877 - DNA, 201 bp, Homo sapiens
acggctccattgttccccaggtctcagcaaggcctttttcacttaacaccgtgttggtgctcatcgcagccccagtaaatggcagccatttggacgttccwtattttcacgagcttcaggggcaacctcccatggtcctttttggatgttctttttgcattagcttcatgtccaaagttggtatcattctcaacagcttcc

SEQ ID NO: 286878 - DNA, 201 bp, Homo sapiens
taccctgagcccgagtggttgaggctgcagtgagccgtgatcgagccattgcactccagccttggcaacagagtgagaccctgtttgaaaaaaagaaaaamatatatattttgacataaataaaatatcttgttaaagttaatttaacctgtttttacttttttaaatgtggtgactagaccttttttttgagatggagtc

SEQ ID NO: 286879 - DNA, 201 bp, Homo sapiens
taagtctgtaaaacaaattctcccaaggacttcttccgagtcccggtggcctagaaggtgtctgagtttggttgccgggcaggttccacctgcagcaaggytgtgtccacttagtgcatgtggcagggaggggagccgtggccctgcctgggccctgcagggcgttaggtgcttcacgccttatctcactttatcctggaa

SEQ ID NO: 286880 - DNA, 201 bp, Homo sapiens
gttccacctgcagcaaggctgtgtccacttagtgcatgtggcagggaggggagccgtggccctgcctgggccctgcagggcgttaggtgcttcacgccttrtctcactttatcctggaatttccacagcttgctctgtgccagcgtttcctcatctgtaagatggagatcatcatagggttttaatggggttgaagcataa

SEQ ID NO: 286881 - DNA, 201 bp, Homo sapiens
cagggccctggctggggtggtggttggcagctcagctctcctcccttggctgcccttgctgaacccacccctgacctttgtgggcagctgcagtgtcaggygggagctcggggctcttgctccaagactcttgagctcccaggaagacctgccacaccggcatcagtggctgctgctgtggccacgtgaggtggggctgtg

SEQ ID NO: 286882 - DNA, 201 bp, Homo sapiens
caccttcaggccttcaggaaaaggggtgtgcagcttcctaggcactcaggacacccacgagccttttctgcaaaaaatcacgtaacgattctatgttcttrcagaccaaactactcacaatggcaaaaaacctacgaatctctctcagacatggtggtccctcgatcaaccaagtaagtgagaccccagcttggtcccagg

SEQ ID NO: 286883 - DNA, 201 bp, Homo sapiens
aggtgggatagtgtaagggtaacgtgttcagtgctaggacagggaggctcatgcatgcggtgcccagggagaaggaacctaagggctttatccatggccaygcagctggtcagtgatgttcaggcaggggacagcaaagaagccacgcaggctccctgaggagggtgtttcccattgcctttaaagctttggccatggctc

SEQ ID NO: 286884 - DNA, 201 bp, Homo sapiens
  misc_feature (1)...(201): n = A,T,C or G
gggttgtggggagcaatcattgctgagaattgctgtgttctcctaggctccagcatccctggcacccacccttccttgagaactgcccccagtgcccgggngtgggtgtgtgtggggtcactgtgtccctttctgctcacatctttcacaccctttgttccacctgccttttagggggaacctcttcacccggacactgag

SEQ ID NO: 286885 - DNA, 201 bp, Homo sapiens
tcacttccctgcccctgccctgggaaggctgccctggccccacctggccgagcagcctctccacgccgttgcctctgctgcattctggctctgtgttctcrgctcagcgtcaattcttccctgccagagggggaagccagccctggcctaagtggctgcccagtgaacggccacagcgggagccgggagggaaagcggcct

SEQ ID NO: 286886 - DNA, 201 bp, Homo sapiens
cttcgctcaactggtgaggttcattcatccattgatcatcattgattcgcagtgactttaattgatttactaagtgcatataccaagtataggagggcggygtacaaagagggatgaacgtttctaactccctcctctgcgctctcttttcttctttgtacacaaaccaagtatgcactgtgccctcaggcccgatgctag

SEQ ID NO: 286887 - DNA, 201 bp, Homo sapiens
ggcgggggaaccaaggatgccaggccctgtgtgtcaggagggatgaaggggaaaggcagctgcagaggagcagagggtctgaaatggatgtgaaatgggcrtgactcgggcacacacaggtgcacaaggaattgtggggatgggtcacgggcaggaaggccacactcaggatggtagtggctcaggatggagtgagtggca

SEQ ID NO: 286888 - DNA, 201 bp, Homo sapiens
tacaggcgtgagccaccgcgcccggccagaggagactttatttggctgtttaaattgacatatggaaatgttcctaccccacctgtgatcttggctttgtrtgtctatatggcttaataactccaccttattatattgcaggcttgaaaggaaaaatgaaatgtttaaagagtaggttatgcattgtttgctgtgtctgtg

SEQ ID NO: 286889 - DNA, 201 bp, Homo sapiens
gtaggtgtgggcgtgggatgtcccgaccgttcaggatgggcttgaaatcaggaaaggttgggctcactgagtcatcctagaaaatccatcatggcttggcrcctgggtgccacacaggggctccctggaagggccaaatgctggtaaacagaagccatcccagcaaatgggcagggcagttatttttcttgaaagcaccat

SEQ ID NO: 286890 - DNA, 201 bp, Homo sapiens
acttgtgcaaacatctggtctagcctcttcgctcaactggtgaggttcattcatccattgatcatcattgattcgcagtgactttaattgatttactaagygcatataccaagtataggagggcggcgtacaaagagggatgaacgtttctaactccctcctctgcgctctcttttcttctttgtacacaaaccaagtatg

SEQ ID NO: 286891 - DNA, 201 bp, Homo sapiens
ggcatttgagagggccaggccatgtcgggtacccctggaagcaacgattgggggtcagcctgagctgccctccagcagagcctgagagggtaggtgtgggygtgggatgtcccgaccgttcaggatgggcttgaaatcaggaaaggttgggctcactgagtcatcctagaaaatccatcatggcttggcgcctgggtgcca

SEQ ID NO: 286892 - DNA, 201 bp, Homo sapiens
gccaggagacatgggcatttgagagggccaggccatgtcgggtacccctggaagcaacgattgggggtcagcctgagctgccctccagcagagcctgagarggtaggtgtgggcgtgggatgtcccgaccgttcaggatgggcttgaaatcaggaaaggttgggctcactgagtcatcctagaaaatccatcatggcttgg

SEQ ID NO: 286893 - DNA, 201 bp, Homo sapiens
tctgcttcttggggacctgtccacccacatgtcaaactcaagcttgtcccaggcagaacttgcctcctctcctccatccccatccctcccacctccatggstgcccggcttagagcacttccctccctccacccagccacccagcgagaaagctggcgtggccaggcctgcgtcattgccttgcaccctgtctagtcggtc

SEQ ID NO: 286894 - DNA, 201 bp, Homo sapiens
  misc_feature (1)...(201): n = A,T,C or G
tactgaggacaaggaagggggccttttcactgtgactctgtttcgaaaagtgattgaagatttcaaaaccaaggccaaagaaaacaagtaagggtcctccnggtttggttcatctcccgctgcggggggtctctgcccctctggaaagcttctgagtgaaaacccatgatttgcttgttttaaggttcactgttcgtgaat

SEQ ID NO: 286895 - DNA, 201 bp, Homo sapiens
ttaagatagcttcccagaagtggaattactggttcaaaggctattagcatttttttttttttttttgagacggggtcttacactgtcacccacgctggagwgcagtggtgcaatctcggctcactgcaacctccacctcccgggttcaagcgattctcctgcctcggcctcccaagtagctgggactacggcgcccaccac

SEQ ID NO: 286896 - DNA, 201 bp, Homo sapiens
aaggccaaagaaaacaagtaagggtcctccgggtttggttcatctcccgctgcggggggtctctgcccctctggaaagcttctgagtgaaaacccatgatwtgcttgttttaaggttcactgttcgtgaattttactatgatgagaaggaaattgaaagggaaagggaggagatggccagattgctgtctgataagaagca

SEQ ID NO: 286897 - DNA, 201 bp, Homo sapiens
tgtgtgtggggtcactgtgtccctttctgctcacatctttcacaccctttgttccacctgccttttagggggaacctcttcacccggacactgagtgataytgtgagcaaagaggacttcgtgctggattctgaatatctcgtcacacttctggtcatcgtccccaagtgagtgctgggcgatcacgaaggaaaccggccc

SEQ ID NO: 286898 - DNA, 201 bp, Homo sapiens
aaaacccaagtcctttcttggctctgtgtcaggcggggtgttcagcaggggtcacctggctcttctgtctttgcagggccccctgctgcgctggctcaagrtgaacttcagtgaagccttcattgcctggatccacatcaaggccctgagagtgtttgtggagtccgtgctcaggtgcgtggcagtgatgccccggctggg

SEQ ID NO: 286899 - DNA, 201 bp, Homo sapiens
gcatactaaggctgaacacgttaactcacggctctcaaacttgagtatgcatcagaatcatcctgaaggtttgttaaaaatacatcactggtctccacccygagaatctgtgattcaggaggtctgagttggggcctgagaacctgcatttctacgagttcccaggtgatactgatgctgcgggccctgccactgtgcttt

SEQ ID NO: 286900 - DNA, 201 bp, Homo sapiens
ctcccatcctgggctgccgcttggtgccttgagactggttcccagcttgtgggatggctctgggcccatggtgggaggtgagcttgcctgtgcctgtgcartggggtcctggaggtgagtttcactgtcgttcctgccacaggaggagtccccgccatcctcctggttaccctctgaccactccctgctcttacttccacc

SEQ ID NO: 286901 - DNA, 201 bp, Homo sapiens
ccaactccttcaatgctcagggtcacctggagcttttgctttcccaaaacagcaactggcgcagatcgagatggacctgaagtcccgaacggccgcctacracactctgaagacaaacctggagaacctggaaaagaaatccatgtgtgtatttgccagcctccacatctggcgggggcaggtcctggcgggggcttagcg

SEQ ID NO: 286902 - DNA, 201 bp, Homo sapiens
ctgaccaacatggagaaaccctgtctctactaaaaataaaaaattagccgtgcatgatggtgcatacctgtaatcccagctacctaggaaggctgaggcargagaatcacttgaatccaggaggcggaggttgaggtgagccgagatcgtgccatttcactccagcctgggcaacaagagcgaaactccatctcaaaaaca

SEQ ID NO: 286903 - DNA, 201 bp, Homo sapiens; identical to SEQ ID NO: 58586

SEQ ID NO: 286904 - DNA, 201 bp, Homo sapiens
cggtggctcatgcctgtaatccagcactctgggaggccgaggcgggcggatcacctgaggtcaggagttcgagaccagcctggccaacatggtgaaacctygcctctaaaaatacaaaaaatggctgggtgtgatggcgtgtgcctgtaatcccagctacttgggaggccaaggcaggggaattgcttgaaccctggaggc

SEQ ID NO: 286905 - DNA, 201 bp, Homo sapiens; identical to SEQ ID NO: 58589

SEQ ID NO: 286906 - DNA, 201 bp, Homo sapiens
ttttgtatttttggtagagatggggtttcactgtgttggccaggctggtctcgaactcctgacctcaggtgatccgcctgcctcagcctcccaaagtgctrggattacacgtgtgagccaccacacccagcttggtactcattttcctctgtacctttttgtatggccgagaaggtttgtaatttgaagaggttttagaat

SEQ ID NO: 286907 - DNA, 201 bp, Homo sapiens
ttgtgatattggaagtgaaatggaccttgtaggatagtttccaccactctgctttactatcaggcagcacgtcagagccagggacaccctgtgccagctgyggtgacggaggcccaggagggcttggtctctcaggaatttgataagcgggagctaaagcccaggcccctacactccctgcaccccgaggccccctgaggc

SEQ ID NO: 286908 - DNA, 201 bp, Homo sapiens
ttcttggggacctgtccacccacatgtcaaactcaagcttgtcccaggcagaacttgcctcctctcctccatccccatccctcccacctccatggctgccyggcttagagcacttccctccctccacccagccacccagcgagaaagctggcgtggccaggcctgcgtcattgccttgcaccctgtctagtcggtcctccc

SEQ ID NO: 286909 - DNA, 201 bp, Homo sapiens
cagagtgagaccccatctcaaacaaacaaacaaaaacccaaagtacaaaaaggatatatatagtgaaagtgaaggtttccggccaggagtggtagctcacscctataatcccagcattttgggaggccgaggcaggtggatcacttgagatcaggagtttgagaccagcctggccaacacggtgaaacttcgtctctacta

SEQ ID NO: 286910 - DNA, 201 bp, Homo sapiens
tgtcccaggcagaacttgcctcctctcctccatccccatccctcccacctccatggctgcccggcttagagcacttccctccctccacccagccacccagmgagaaagctggcgtggccaggcctgcgtcattgccttgcaccctgtctagtcggtcctcccctgtcctcctctcccctcccagggctcctcccactcctc

SEQ ID NO: 286911 - DNA, 201 bp, Homo sapiens
ccttggtgaccgatcctacccctttctgttcagcatccgtccacactccctcttccctgactcacagtgccccgagtacgtagcgctgccagccctcctcrcctgacacccggcgccctccatcaccggccacacggccacctcctcttccccttagcctccacgtgaataccatgtctgtgtcccagtgaagggacacga

SEQ ID NO: 286912 - DNA, 201 bp, Homo sapiens
cactgactgggcagcttaaaccacagactaagatcagacaacctggtttctcctgagggctctctgcctggcttgtagacggccaccttcttgctgcatcrtcccatggcctttccttggtgcctgtatgaggacagggagagcacggatccaactctctgctgtcccttcttatatggcctcgaatcctattggatcagg

SEQ ID NO: 286913 - DNA, 201 bp, Homo sapiens
aaactcctgacctcaagtgatctgcccaccttggcctcccaacatgctgggattacaggtgtgagccactgagcccagccttggctattgttaataatgcygctatgtttatttttattagttatttattatttattttgttatgatttactattttattttcagtttctcttatttccttttttttttcttcttcttttt

SEQ ID NO: 286914 - DNA, 201 bp, Homo sapiens
acaggttgctacctcaggaagccaaggagaaagtatcaaggcaaagcaggggctctgaggacaagctgaggtttgaggatggacggggaggtgatgggctrggtgggatatcatgccatagtcccaaataaattgtgatacctatgtagatgcagccacaggaaggaatgaacagggggacaaggttgtgggtagcagtgt

SEQ ID NO: 286915 - DNA, 201 bp, Homo sapiens
gcctgtaatcccagcactttgggtgtctcagcctcattctgacaacaagaggtctcaatctgtcaactagagacatttagtcaaaggagactcctctattrtctcacaatatcactttgctcagagaggtcaaggagcttatatcaggtcgcacagccagtagaagttggaactggcatttaaatgtgagccttactggtt

SEQ ID NO: 286916 - DNA, 201 bp, Homo sapiens
tatgattagatccctagcacctgtaacatggcggcccttggtgactgattgaatggatgaatagagggaagcatcctgggttataagagctgggcagcccrttagagatcttatctaacctgcaagagttccaaatgaggaaacaggcccagagagaagatcctagaaagacaaaggcagacaggggtggcagaggaggga

SEQ ID NO: 286917 - DNA, 201 bp, Homo sapiens
ttctaccacccctgaacgccttggggtccagggtttagaaatcagcagggctaagaggtgcccccgtagtgtttgtggaaaggaaggaaagggcacgttcrgtacagacctgccacaggcagatttgtgaagctcctgggcggccccttctcgcctgatcccccaccgcagcttgcccgtgtctggaggctgcctgcccag

SEQ ID NO: 286918 - DNA, 201 bp, Homo sapiens
accaggcccagctaatttttgtgtttttagtggagatgaggtttcaccatgttggccaggctggtcttgaactcctgacctcatgtgatctgcccaccccrtcggcctccccaagtgctgggattacaggtgtgaactgccacgcccagccttagacattttttaattacccacgtggcttgaattatatttctatgcaca

SEQ ID NO: 286919 - DNA, 201 bp, Homo sapiens
gattatactgggccagtgtggtggctcacgcctgtaatcccatcactttaggaggccgaggcaggcagatcacctgaggtcaggagttcaaaaccagcccrgccaacatggtgaaaccccatctctactaaaaatacagaaaaaattagctgggcgtagtggtgcacacctgtaatcccagctacttgggaggctggggga

SEQ ID NO: 286920 - DNA, 201 bp, Homo sapiens
ccccttccccgcctgcactgaggagctcctcatccctccctgccgtccccctggctgatgtcccctactttccctcgttttcctgcccatgttccctggtytccaggtcctgccatctgcctgccgtaggctttacctgggtatctgtctcatctcccctcccgcaccccttcctctgcttccctgtttctgccagtggcc

SEQ ID NO: 286921 - DNA, 201 bp, Homo sapiens
tcttttccccacctcttcccacaccctctaccatcacactcacagatttaccctctctaacacacccggtgctcccctctttcatggcacttgccacagtrgattttgacgtcttcttgtgggattatttggtcatatttttcttccctgtcttttgcttatgattagatccctagcacctgtaacatggcggcccttggt

SEQ ID NO: 286922 - DNA, 201 bp, Homo sapiens
gataaggtaggagcagaattttattttttgagcagaggaagcaggagcacttgccccaaatcacaaataaattccaaaattatcaaatatatatttagggkgaattttaaaaatcaccttttcttaggtattaccctatcttcaaaacaatagaaatataattggtttgtataaagcaacacatttgtagtctgtatttta

SEQ ID NO: 286923 - DNA, 201 bp, Homo sapiens
acctcaggaggacaagatgaagcattgctccaaaatacaggtgaggatgagatttgtgcaaaacaagacttttctaagtgtttaggaggtggttacttacrttgaattaggtctctggattctgaagatatctttctttggtctgaaggatttagtcttgtcatcagaatttgtgatccaaaagttaacaatcacctgttt

SEQ ID NO: 286924 - DNA, 201 bp, Homo sapiens
aatggaagagaaggaaagtgaagcaaaactgatccagcttctttctacagggcttttttgatatcccagtagacaatttgtatgcagagccggctgtcctraagtggataagggagaatatctctgagtggaggaactgcactattgtctcacctgatgctggtggagctaagaggtatggttgaaattagtattgttccc

SEQ ID NO: 286925 - DNA, 201 bp, Homo sapiens
ggcagtaggttttaggtggtatcgtagtgccttttgattaatttaagtatttaattttcatcttccttctttggatctatttggcctctcaaatgaactgrgattcctgttaaaaaagattgatgttattgtctcttgtagaggaaactaataaagtgtgtgtacctgtgtgatttggggtctgtatcatacataatctgt

SEQ ID NO: 286926 - DNA, 201 bp, Homo sapiens; identical to SEQ ID NO: 58595

SEQ ID NO: 286927 - DNA, 201 bp, Homo sapiens
gccccaaactcccctgctgccttcctgcagttggctctgtgggactgttccggatgggcctctgggtcactgcccccatcgccttgctgaagtcgctcatyagcgtcatccacctgatcacggccgcccgcaacatggctgccctggacgcagcagaccgcgccaagaagaagtgacgctggagccccgggtcctggctgc

SEQ ID NO: 286928 - DNA, 201 bp, Homo sapiens
tgatgtcactgactgtctacatgtatttatattcttgatattttctaccctcactagaatgtaaactccatgaaggcacagacttttcttgttctcttctstatccctagagtaagaccaacttgaacctggcatatagtagctgcttaataaatactcgtctgtcaatgagttggtttctcagagtgtggtccttagacc

SEQ ID NO: 286929 - DNA, 201 bp, Homo sapiens
gtccccaccgcccacttgtttgatgtcactgactgtctacatgtatttatattcttgatattttctaccctcactagaatgtaaactccatgaaggcacakacttttcttgttctcttctctatccctagagtaagaccaacttgaacctggcatatagtagctgcttaataaatactcgtctgtcaatgagttggtttct

SEQ ID NO: 286930 - DNA, 201 bp, Homo sapiens
tctgttcaccttgtgtgctgggaatgagctcttctactgcctcctctacctgttccatttctctgagggacctttaggtaggagatgaggggctgggcagraggatgggagggggatctggcctgcccagggagatggaggccccctccttcgggccccaaactcccctgctgccttcctgcagttggctctgtgggactg

SEQ ID NO: 286931 - DNA, 201 bp, Homo sapiens
ttagagacagagtcctactctgtcgtccaagctggagtgcagtggtgcaatcatagctcactgcagccccaaactcctgacctcaagtgatcctcccaccytagcctctcaaagtgctgggattacaggcatgagccacaaagcctggctggatatttctttaaaatgcaaattcaagccaggtgtggtggctcatgcctg

SEQ ID NO: 286932 - DNA, 201 bp, Homo sapiens
ttgagggcagtgaccccaagcgccagacgcttgagaagcttgggaggatgacgtagggtggagcctgcgacctaatcctcccatcacaaggggcacgcgaraagcaacccatctgcagggcgctctggagcctctctagccgcctagagcctgcgagagcaaaggcggctggagacttagggggcggggagtaaagtgagg

SEQ ID NO: 286933 - DNA, 201 bp, Homo sapiens
ttgatgtcactgactgtctacatgtatttatattcttgatattttctaccctcactagaatgtaaactccatgaaggcacagacttttcttgttctcttcyctatccctagagtaagaccaacttgaacctggcatatagtagctgcttaataaatactcgtctgtcaatgagttggtttctcagagtgtggtccttagac

SEQ ID NO: 286934 - DNA, 201 bp, Homo sapiens; identical to SEQ ID NO: 58606

SEQ ID NO: 286935 - DNA, 201 bp, Homo sapiens; identical to SEQ ID NO: 58607

SEQ ID NO: 286936 - DNA, 201 bp, Homo sapiens; identical to SEQ ID NO: 58608

SEQ ID NO: 286937 - DNA, 201 bp, Homo sapiens; identical to SEQ ID NO: 58609

SEQ ID NO: 286938 - DNA, 201 bp, Homo sapiens
caaatgtggtggcacatgcctgtggtcccagctactcaggaggctgaggtgggaggatggcttgagcctgggaggcaggagggagaggttgcagtgatccrtaatggtgccactccagcctgggaggcagagccaggcagtctcaaaaaaaaaaaaaagcaactttggcccgtcttggaggctcacgcctggcctgtaatc

SEQ ID NO: 286939 - DNA, 201 bp, Homo sapiens
agcctaggagaaggcgagggcgcagagcagggcctgcccagtcactccaggaggagggcccgtaagctgaggcgtggaggaggaggattggtggggaaggyctgtgtgaattactccagggaacaagtgggaatgaggcctgcaaagagaagggactgaaagcgggaagggagataagccagagaggtctgcagggctgga

SEQ ID NO: 286940 - DNA, 201 bp, Homo sapiens
ccctgcgtcagagtgataaaccaaatatgggcacctgtcctgcatccactgtgccataacagcccttgcccacctaatcttccaggaacccggtttggggycatgctggacatgctgacggaccgctgctccaccatgtgcctgttggtcaacctggccctgctgtaccctggagccacgctgttcttccaaatcagcatg

SEQ ID NO: 286941 - DNA, 201 bp, Homo sapiens
ttggatgtggccagtcactggctgcacctccacaggtctgctgcgattctgggggcctgggccacttggagacattacagtggggtgggctgagcctagayggaagggtgtctgggatggcactaggcatcctggaagggctcctttttagctctgctttgtagaaagaccccaggcaaacctgcctctctttaaagcttc

SEQ ID NO: 286942 - DNA, 201 bp, Homo sapiens
ggctgggtgcagtggctcatgcttgtaatcctagcactttgggaggcagaggggagtggatggcttgagcccagaagttggagaccagcctgggcaacatsgcgaaaccacatctcaacaaaaacacaaaaaaattagctgggtgtggtggtgcgtgcctgtagtcccagctacttgggaggctgaggtgggagaattgtt

SEQ ID NO: 286943 - DNA, 201 bp, Homo sapiens
aataaagaagaggggagcaggaaaagatttctaagatctctctaaatatggcatgacagtgtgggctgctttttgtatttcaggagaagaatcgaaccctrggagtttgacgtcttctatgaccccagagaacttcgtaaagaggcctgtctgctctacgaaatcaagtggggcatgagccggaagatctggcgaagctca

SEQ ID NO: 286944 - DNA, 201 bp, Homo sapiens
cacctgaagcaacaaagtccaggaacaatcagcacaacttatgactccagaggaggaagtccagagacagagcaccatgacttctgagaaaggtaaaatgkatccgggggcttggcaagtattcttgaacaatgcaagaatggtgtgtgtgtgtgtgtgtgtgtgtgtgtgtgtgtgtgtgtgtgtgtgtgtgtgtcctgc

SEQ ID NO: 286945 - DNA, 201 bp, Homo sapiens
gcctaccaaagtgctgggattaccagtgtgagccaccatacctggcccagagcgagtgatcgaagagagaccaaggtggaaatttccacgactttgatgayttcatcttggaatcacaccctatttcttttgcagtattctatttgttacacaggccagccatgattcagagtaagaggggactcatacacaaggatttga

SEQ ID NO: 286946 - DNA, 201 bp, Homo sapiens
gtggtgcgtgcctgtagtcccagctacttgggaggctgaggtgggagaattgtttgagcctaggaggttgaggctgcagtgagctgtgattgcaccactgygctccagcctgggtgaatgcagtgagtccagaaccagaccctgtctgggaaaaaaaaaaaagaagaaatagttaaatcgtcttccaactgacatttttaa

SEQ ID NO: 286947 - DNA, 201 bp, Homo sapiens
ggacagggaagtcatgttaaggaatatattatctcttgataggtggaaggattgatctatgtagtaaatgaatgtgatactttagggatgagtgggaactrttaggatgtaataagcttgtgacttaaccatattgcaaagaagagtctgcagttcaattctgagtttcccttgagttacagctttcagacatagagagtg

SEQ ID NO: 286948 - DNA, 201 bp, Homo sapiens
ttgcaggtcttgatcactccgacccagccaggctgacttgcttgctcttccttgaacaagtcaaggtccacacttcaggtcgtttgcacctggtgttcccygtgcttggaaagctctccccttccccgacgtccacatgtcttgctctctaaatttacattcaggtctcagctttaatgtccctctttatagatgtcttct

SEQ ID NO: 286949 - DNA, 201 bp, Homo sapiens
gagacttgtgtctggaatataatgaataaactggttaggctacaaaaaatttatgtaaacaatttgcagtaagaccagaaagcaaatttgaagtgttattrtactatagaggacttcgaatgccaggctcaaggaatgaaagtttttctttatggtagagggaatatctttggagaatttatgaatagcacagagatatga

SEQ ID NO: 286950 - DNA, 201 bp, Homo sapiens
aagtactgggattacaggtgtaagccaccatgccaggccagaagggcagactttggatcgacaaagaagaggagattccaggttgattgaatcctattgakaaacagaatttaaaagcttttatagagacttgtgtctggaatataatgaataaactggttaggctacaaaaaatttatgtaaacaatttgcagtaagacc

SEQ ID NO: 286951 - DNA, 201 bp, Homo sapiens
tggtcaacaggtccttcaaccggtgaccccactctgaggtaagaataacactatcacagtgcccatttaatttgatcaagaatcaatgggtatttaagagytgtgcatggtggcacatgcgcctataatcccagctactcaggaggctgaggcaggagtaggaggatcgcttgagcccaggaggtcaaggctgcagtgagc

SEQ ID NO: 286952 - DNA, 201 bp, Homo sapiens
agtactgggattacaggtgtaagccaccatgccaggccagaagggcagactttggatcgacaaagaagaggagattccaggttgattgaatcctattgagraacagaatttaaaagcttttatagagacttgtgtctggaatataatgaataaactggttaggctacaaaaaatttatgtaaacaatttgcagtaagacca

SEQ ID NO: 286953 - DNA, 201 bp, Homo sapiens
ctggagtacagtggtgtgatcactgctcactgctgtcttgacctcctgggctcaagagatcctcccgcctcaccttcctgggtagctgggacaacaggcaygggccaccagccctgctaatttttttgtagagatgaggtcttgctttattgctcaggctggtcttgaactcctgggctcaagtgatccactagcctcggc

SEQ ID NO: 286954 - DNA, 201 bp, Homo sapiens
tttttgagacagagtcttgctctgtcacccaagctggagggcagtggcatgatctctgctcactgcaacctctgcctcccgggttcaagcaattctcctgyctcagcctccagaatagcagggattacaggtgcctgccaccacacctggctaatttttgtatttttagtagagacggggtttcaccatgttgcccaggct

SEQ ID NO: 286955 - DNA, 201 bp, Homo sapiens
tttccttagagtattatcactgctggaggaattttgtcaactacccacctggggatgaagctcactggccacaatacccacctctgtggatgatgttgtaygcactggagctgcactgcataattctagtaagtcactttagggacacaaatgttgatgcaaaaagaagcatccttcttcaaagttctttcctgagaaaat

SEQ ID NO: 286956 - DNA, 201 bp, Homo sapiens
tgtccctctttatagatgtcttctctgactgccatctctgatatggtcgatatggtgcccccaccaccttttgtctccttccagtacttttcttcttcctytttttttgagatggagtctctctcgctctgtcgcccaggctagagtgcaatggtgtgatcttggcttactgtaacctccacctcccaggttcaagtgatt

SEQ ID NO: 286957 - DNA, 201 bp, Homo sapiens
gtagcctcgaactcctgggctcaagtgatcctcccacttcagccttctgagcagtggggactactggtgcacaccaccatgcccggctaatttaaaaaatttggttttgttttgttttgtttttagagacggggtcttgctgtgttgcttacggtagtctcaatttcctagcctcaagcaatcctcccgcctcagcctcct

SEQ ID NO: 286958 - DNA, 201 bp, Homo sapiens
tagcctcgaactcctgggctcaagtgatcctcccacttcagccttctgagcagtggggactactggtgcacaccaccatgcccggctaatttaaaaaatttggttttgttttgttttgtttttagagacggggtcttgctgtgttgcttacggtagtctcaatttcctagcctcaagcaatcctcccgcctcagcctcctg

SEQ ID NO: 286959 - DNA, 201 bp, Homo sapiens
cctcccgggttcacgccattctcctgctgcagcctcccgagtagctggaactataggtgcctgccaccacaccaggctaatttttttttttttttttttgkatttttagtacagacgggatttcaccatgttagccaggatggtctcgatctcctgaccttgtgatccacccgcctccgcctcccaaagtgctgggattag

SEQ ID NO: 286960 - DNA, 201 bp, Homo sapiens
ggctggtctcgaactcctgaccctcaggtgatccacccacctaggcctcccaaagtgctgggattacaggtgtgagccactgtccctggcccaaatacccyctctttctttctttctttcttctttctttctttctttctttctttctttctttctttctttccttccttccttccttccttccttccttccttccttcct

SEQ ID NO: 286961 - DNA, 201 bp, Homo sapiens
aaagtgctgggattacaggtgtgagccactgtccctggcccaaataccctctctttctttctttctttcttctttctttctttctttctttctttctttctttctttctttccttccttccttccttccttccttccttccttccttccttccttcccttccttccttccttccttcctttctttttttgagacagagtct

SEQ ID NO: 286962 - DNA, 201 bp, Homo sapiens
ttacaggtgtgagccactgtccctggcccaaataccctctctttctttctttctttcttctttctttctttctttctttctttctttctttctttctttcyttccttccttccttccttccttccttccttccttccttccttcccttccttccttccttccttcctttctttttttgagacagagtcttgctctgtcacc

SEQ ID NO: 286963 - DNA, 201 bp, Homo sapiens
ttttttaagactcgccctgttgcctaggctggagtacagtggtgtgatcactgctcactgctgtcttgacctcctgggctcaagagatcctcccgcctcascttcctgggtagctgggacaacaggcatgggccaccagccctgctaatttttttgtagagatgaggtcttgctttattgctcaggctggtcttgaactcc

SEQ ID NO: 286964 - DNA, 201 bp, Homo sapiens
aggtgtgagccactgtccctggcccaaataccctctctttctttctttctttcttctttctttctttctttctttctttctttctttctttctttccttcyttccttccttccttccttccttccttccttccttccttcccttccttccttccttccttcctttctttttttgagacagagtcttgctctgtcacccaag

SEQ ID NO: 286965 - DNA, 201 bp, Homo sapiens
gtgagccactgtccctggcccaaataccctctctttctttctttctttcttctttctttctttctttctttctttctttctttctttctttccttccttcyttccttccttccttccttccttccttccttccttcccttccttccttccttccttcctttctttttttgagacagagtcttgctctgtcacccaagctgg

SEQ ID NO: 286966 - DNA, 201 bp, Homo sapiens
tctttctttctttcttctttctttctttctttctttctttctttctttctttctttccttccttccttccttccttccttccttccttccttccttccttcccttccttccttccttccttcctttctttttttgagacagagtcttgctctgtcacccaagctggagggcagtggcatgatctctgctcactgcaacctc

SEQ ID NO: 286967 - DNA, 201 bp, Homo sapiens
tccttccttccttcctttctttttttgagacagagtcttgctctgtcacccaagctggagggcagtggcatgatctctgctcactgcaacctctgcctccygggttcaagcaattctcctgcctcagcctccagaatagcagggattacaggtgcctgccaccacacctggctaatttttgtatttttagtagagacgggg

SEQ ID NO: 286968 - DNA, 201 bp, Homo sapiens
cttgggaagttgaggcagaaaaatcgcttgaacctgggaggtggaggttgtggtgagctgagattgcaccactgcactccagtctgggcaacagtgtgagwctccatcttaaaaaaataaaataaaataaaataaaataaaataaagaagaggggagcaggaaaagatttctaagatctctctaaatatggcatgacagtg

SEQ ID NO: 286969 - DNA, 201 bp, Homo sapiens
ggaggtggaggttgtggtgagctgagattgcaccactgcactccagtctgggcaacagtgtgagactccatcttaaaaaaataaaataaaataaaataaawtaaaataaagaagaggggagcaggaaaagatttctaagatctctctaaatatggcatgacagtgtgggctgctttttgtatttcaggagaagaatcgaac

SEQ ID NO: 286970 - DNA, 201 bp, Homo sapiens; identical to SEQ ID NO: 58620

SEQ ID NO: 286971 - DNA, 201 bp, Homo sapiens
ctgcctgcctcagcctcccaaagtgctgggattacaggcatgagccaccgcgcccggcctataaatatatttttaaattttctttttttggtggaagtgcttttttttttttttcttttgacatggagttttgctctcgttgcccaggctggagtgcaacggcatgatctgggctcaccgcaacctctgcctcacagattc

SEQ ID NO: 286972 - DNA, 201 bp, Homo sapiens
tgcgctccagcctgggtgaatgcagtgagtccagaaccagaccctgtctgggaaaaaaaaaaaagaagaaatagttaaatcgtcttccaactgacattttwaaatgtttgtggtgataatattattaattaaaatattcatcctaaggattaaatataatccttttttattccagagtcttccaccctgtttaaagatttc

SEQ ID NO: 286973 - DNA, 201 bp, Homo sapiens
tgattccgtgtgtgtactgattcaagaacaagcaatgatgacccactaaagagtgaatgccatttagaatctagaaatgttcacaaggtaccccaaaactstgtagcttaaaccaacaataaatatgtattacctctggcagtttctgtgggtaaggaatttagaagcagcttatctgtgtgttcctgtctcaggtccccc

SEQ ID NO: 286974 - DNA, 201 bp, Homo sapiens
gcaacagtgtgagactccatcttaaaaaaataaaataaaataaaataaaataaaataaagaagaggggagcaggaaaagatttctaagatctctctaaatrtggcatgacagtgtgggctgctttttgtatttcaggagaagaatcgaaccctgggagtttgacgtcttctatgaccccagagaacttcgtaaagaggcct

SEQ ID NO: 286975 - DNA, 201 bp, Homo sapiens
tcgcccaggctggtctggaactcctgggctcaagcaattctccacccttggtctctcaaagtactaggaatacaggcatgagccaccatgcctaaccaaatttttttttttttttttttaagactcgccctgttgcctaggctggagtacagtggtgtgatcactgctcactgctgtcttgacctcctgggctcaagagat

SEQ ID NO: 286976 - DNA, 201 bp, Homo sapiens
tgtagcctcgaactcctgggctcaagtgatcctcccacttcagccttctgagcagtggggactactggtgcacaccaccatgcccggctaatttaaaaaakttggttttgttttgttttgtttttagagacggggtcttgctgtgttgcttacggtagtctcaatttcctagcctcaagcaatcctcccgcctcagcctcc

SEQ ID NO: 286977 - DNA, 201 bp, Homo sapiens
ccgagatagtgaacatagtacccaatgggaagtttttcagctctttcccctctccctccctcagtccttttggacttttccagtgtctattgttcccgtcttttttttttttttttttttgagacggagtctcgctctatcacccaggctggagtgcagtggcgcaaatttggctcactgcaagctccgcctcccgggttc

SEQ ID NO: 286978 - DNA, 201 bp, Homo sapiens
ttttgagacggagtctcgctctatcacccaggctggagtgcagtggcgcaaatttggctcactgcaagctccgcctcccgggttcacgccattctcctgcygcagcctcccgagtagctggaactataggtgcctgccaccacaccaggctaatttttttttttttttttttgtatttttagtacagacgggatttcacca

SEQ ID NO: 286979 - DNA, 201 bp, Homo sapiens
tgagctgtgattgcaccactgcgctccagcctgggtgaatgcagtgagtccagaaccagaccctgtctgggaaaaaaaaaaaagaagaaatagttaaatcrtcttccaactgacatttttaaatgtttgtggtgataatattattaattaaaatattcatcctaaggattaaatataatccttttttattccagagtcttc

SEQ ID NO: 286980 - DNA, 201 bp, Homo sapiens
tattaccaactttcagtaaaaagtcatatcaaacttaatgatagtaaaacttttatactttcatgcttgctttttttctttttttgatatggagtttcgckcttgttgtccaagctggagcgcaatggcacgatctcagctcaccacaacctcctcctcccaggttcaagcaattctcctgcctcagcctcccgagtagct

SEQ ID NO: 286981 - DNA, 201 bp, Homo sapiens
tccttcctctcgagttgtggtttaaaatatgtataattacaattataaagagatatctatctatctatctatctatctatcatctgtcatcaaagatatcstggcttctctccacactaccaaatactctttcttattttttaattataatttttatttcagattcatggggtacacgtgcagatttgttacaagggtata

SEQ ID NO: 286982 - DNA, 201 bp, Homo sapiens
cagtggggactactggtgcacaccaccatgcccggctaatttaaaaaatttggttttgttttgttttgtttttagagacggggtcttgctgtgttgcttayggtagtctcaatttcctagcctcaagcaatcctcccgcctcagcctcctgaagtgttgggattataggcatgagctatggcacccagccagggactcttt

SEQ ID NO: 286983 - DNA, 201 bp, Homo sapiens
cctgggctcaagtgattatcccacctcagctttcctagtagctgggactacaggcatgcaccactacagctggttaaacttctgtatctttttgtagagayggaaatttccccattttacccaggctggccttgatatcttaggcttaagcgaccatcttgccttggcctcccaaagtgctgggattacaggtgtgagtca

SEQ ID NO: 286984 - DNA, 201 bp, Homo sapiens
ggagtaggaggatcgcttgagcccaggaggtcaaggctgcagtgagctatgattgcaccactgcactgcagccggggtaacagactgagaccctgtctcaaaaaaaaaaaaaaaaaaggaactgtggatatagctttctttattgttccttttctcttttgccattttccattctttctttcatttttgccttttccagtt

SEQ ID NO: 286985 - DNA, 201 bp, Homo sapiens
tgaggcagaaaaatcgcttgaacctgggaggtggaggttgtggtgagctgagattgcaccactgcactccagtctgggcaacagtgtgagactccatcttaaaaaaataaaataaaataaaataaaataaaataaagaagaggggagcaggaaaagatttctaagatctctctaaatatggcatgacagtgtgggctgctt

SEQ ID NO: 286986 - DNA, 201 bp, Homo sapiens
gaggcagaaaaatcgcttgaacctgggaggtggaggttgtggtgagctgagattgcaccactgcactccagtctgggcaacagtgtgagactccatcttaaaaaaataaaataaaataaaataaaataaaataaagaagaggggagcaggaaaagatttctaagatctctctaaatatggcatgacagtgtgggctgcttt

SEQ ID NO: 286987 - DNA, 201 bp, Homo sapiens
aggcagaaaaatcgcttgaacctgggaggtggaggttgtggtgagctgagattgcaccactgcactccagtctgggcaacagtgtgagactccatcttaaaaaaataaaataaaataaaataaaataaaataaagaagaggggagcaggaaaagatttctaagatctctctaaatatggcatgacagtgtgggctgctttt

SEQ ID NO: 286988 - DNA, 201 bp, Homo sapiens
ggcagaaaaatcgcttgaacctgggaggtggaggttgtggtgagctgagattgcaccactgcactccagtctgggcaacagtgtgagactccatcttaaaaaaataaaataaaataaaataaaataaaataaagaagaggggagcaggaaaagatttctaagatctctctaaatatggcatgacagtgtgggctgcttttt

SEQ ID NO: 286989 - DNA, 201 bp, Homo sapiens
gaaaaatcgcttgaacctgggaggtggaggttgtggtgagctgagattgcaccactgcactccagtctgggcaacagtgtgagactccatcttaaaaaaataaaataaaataaaataaaataaaataaagaagaggggagcaggaaaagatttctaagatctctctaaatatggcatgacagtgtgggctgctttttgtat

SEQ ID NO: 286990 - DNA, 201 bp, Homo sapiens
ggaggttgtggtgagctgagattgcaccactgcactccagtctgggcaacagtgtgagactccatcttaaaaaaataaaataaaataaaataaaataaaataaagaagaggggagcaggaaaagatttctaagatctctctaaatatggcatgacagtgtgggctgctttttgtatttcaggagaagaatcgaaccctggg

SEQ ID NO: 286991 - DNA, 201 bp, Homo sapiens
aaaattagctggacatggtggcgggagcctgtaatcccagctacttgggaagttgaggcagaaaaatcgcttgaacctgggaggtggaggttgtggtgagmtgagattgcaccactgcactccagtctgggcaacagtgtgagactccatcttaaaaaaataaaataaaataaaataaaataaaataaagaagaggggagc

SEQ ID NO: 286992 - DNA, 201 bp, Homo sapiens
caggctggccttgatatcttaggcttaagcgaccatcttgccttggcctcccaaagtgctgggattacaggtgtgagtcactgcctacagcctggtttttkttttttaattttgttttgttgttattgattgtttttattttaaggaatttagtagctctagatgcaggcttatcttcagttttccacagcccttgctcac

SEQ ID NO: 286993 - DNA, 201 bp, Homo sapiens
tgtggatgatgttgtacgcactggagctgcactgcataattctagtaagtcactttagggacacaaatgttgatgcaaaaagaagcatccttcttcaaagktctttcctgagaaaatttgactcatatcttctttttgacatttatattgagatttagttatttaactagctagctcctcttaagaaaatctcagagccag

SEQ ID NO: 286994 - DNA, 201 bp, Homo sapiens; identical to SEQ ID NO: 58625

SEQ ID NO: 286995 - DNA, 201 bp, Homo sapiens
tcattcactgggtagattgagaagagagctgtagagagaatctgagtgtaatagtcagggcaggctaactgctgtaagaaacagtgcccccacatctcagyggtataactcaaaagaagttttttccttcttatgacagtcaattcctgacatctggagcatgacctttcacaacattattccgggacccagtctccttcc

SEQ ID NO: 286996 - DNA, 201 bp, Homo sapiens
  misc_feature (1)...(201): n = A,T,C or G
acccactgggctgcatctggtggccttttctgattgctatttggactcactgcagctgcagaatgacagaggccatgtccaaaatcccttagagacactgntgtcttagagttgttaaaataagagcccccatatcaggtttagaaaatactgtcaccgaacgaacgtcgctgtcctcagctccacctccctttcctttga

SEQ ID NO: 286997 - DNA, 201 bp, Homo sapiens
gccaggggggccggctggactgggcacgtggcaggcacgaggaagaccacgccaggcttccggctggtggagaagtatgggctcctggtgggcggggccgyctcgcaccgctacgacctgggagggctggtgatggtgaaggataaccatgtggtggccgccggtggcgtggagaaggtgctggtcctgcctgtccctggt

SEQ ID NO: 286998 - DNA, 201 bp, Homo sapiens
ggccggctggactgggcacgtggcaggcacgaggaagaccacgccaggcttccggctggtggagaagtatgggctcctggtgggcggggccgcctcgcacsgctacgacctgggagggctggtgatggtgaaggataaccatgtggtggccgccggtggcgtggagaaggtgctggtcctgcctgtccctggtccaacccc

SEQ ID NO: 286999 - DNA, 201 bp, Homo sapiens
ggaacccagatgagaactcacgaggcatgctgccagtggctgtgcttgtggccctgctggcggtcatagtcctcgtggctctgctcctgctgtggcgccgrcggcagaagcggcggactggggccctcgtgctgagcagaggcggcaagcgtaacggggtggtggacgcctgggctgggccagcccaggtccctgaggagg

SEQ ID NO: 287000 - DNA, 201 bp, Homo sapiens; identical to SEQ ID NO: 58629

SEQ ID NO: 287001 - DNA, 201 bp, Homo sapiens
ggaccagacctcagccctacctccctcaacttccatcaatgagggatcccctctttggacttccattggtgccagcactggttcccctttacctgagccarcaacctaccaggaagtttccatcaagatgtcatcagtgccccaggaaacccctcatgcaaccagtcatcctgctgttcccataacagcaaactctctagg

SEQ ID NO: 287002 - DNA, 201 bp, Homo sapiens
cacgcggtatttggttttctgttcctgcgtttgtttgctaaggataatggcctccagcgccatccatgtccctgcaaagaacgtaatctcattcttttttrtggctgcatagtattccacggtgtatgtgtaccacactttctttgtccagtctagcattgatgggcatttaggttgaatcatgtctttcctatggtgaat

SEQ ID NO: 287003 - DNA, 201 bp, Homo sapiens
gataaccatgtggtggccgccggtggcgtggagaaggtgctggtcctgcctgtccctggtccaaccccaccctcagcacacccctcccctcccctcccctytccagagcctccagccatgaccgggtgaacagccatggcctggagtcagcaacacaagactcttcccacctcagctcctccatctgagctgggctcagtt

SEQ ID NO: 287004 - DNA, 201 bp, Homo sapiens
tgcttgtggccctgctggcggtcatagtcctcgtggctctgctcctgctgtggcgccggcggcagaagcggcggactggggccctcgtgctgagcagaggyggcaagcgtaacggggtggtggacgcctgggctgggccagcccaggtccctgaggagggggccgtgacagtgaccgtgggagggtccgggggcgacaagg

SEQ ID NO: 287005 - DNA, 201 bp, Homo sapiens
atttatttatcttgagacagagtctcactctgtcacccaggctggagtgcagtggcatgatctcgactcactgcaacctccacctccggggttcaagtgartctcatgcctcagcctcctgagcagctgggattacaggcggccgccaccatgcccggctaatttttgtatttttagtagagatggggtttcgccatgttg

SEQ ID NO: 287006 - DNA, 201 bp, Homo sapiens
tgggaagagattgggagccattgggctgcacagggtcagggaaggccaggaggggctggtcactgctggaatctaagctgctgaggctggagggagcctcrggatggggctgatgggggagctgccagcatctgttcctctgtcatttctgataacagtaaaagccagcatggaaaaaaccgttaaaccgcaggttgggcc

SEQ ID NO: 287007 - DNA, 201 bp, Homo sapiens
ttgtgagaacacggttacgcatttttctgggaaggagatccataattttcatcagatccagattcttttttttttttttttttttttgagacagagtctcrccctgttgtccaggctggagtgcagtggcatgatcttggctcgctgcaacctctgcctcccgggttcaagcgattctcctgcctcagcctcacgagtagc

SEQ ID NO: 287008 - DNA, 201 bp, Homo sapiens
gccagagtgcagtagctccatcatagctcactgcagcctccaactcctggactcaagggatcctcccacttcagccttctgaatagctaggactacaggcrtgtgtcaccatgcccagctaatttttaaaattgtttttgtagagatgggttctcactatgctgcccaggctggtctcaaactcctggcctcaagcgatcc

SEQ ID NO: 287009 - DNA, 201 bp, Homo sapiens
ccgatggggaggggtctagccgtcggcccacgctcaccactttctttggcagacggaagtctcgccagggctccctggcgatggaggagctgaagtctggrtcaggccccagcctcaaaggggaggaggagccactggtggccagtgaggatggggctgtggacgccccagctcctgatgagcccgaagggggagacgggg

SEQ ID NO: 287010 - DNA, 201 bp, Homo sapiens
acctccaccaacgcaagcactgtgcccttccggaacccagatgagaactcacgaggcatgctgccagtggctgtgcttgtggccctgctggcggtcatagycctcgtggctctgctcctgctgtggcgccggcggcagaagcggcggactggggccctcgtgctgagcagaggcggcaagcgtaacggggtggtggacgcc

SEQ ID NO: 287011 - DNA, 201 bp, Homo sapiens; identical to SEQ ID NO: 58626

SEQ ID NO: 287012 - DNA, 201 bp, Homo sapiens
cagtggcacgggttcatgccattctcctgcctcagcctcctgagtagctggaaccacacgcgcccgccaccacaccaggctaatttttttgtatttttagkagagacagggtttcaccatgttagccaggatggtctcgatctcctgacctcgtgatccacctgcctcggcctcccaaagtgctgggattacaggcgtgag

SEQ ID NO: 287013 - DNA, 201 bp, Homo sapiens
aagtctccatttctgcagtacacatgcatgtgcgctctctctctctctctcacacacacacacacacacacacacacacacgcgcgcgcgcgcgcgcgcgstctcctgcgaacagaggcagggggagaggggtttgccctggtctcggggactggtctggctggcgcttccccactgcacgtttccaggtttagtttgtct

SEQ ID NO: 287014 - DNA, 201 bp, Homo sapiens
ctcttcagtcctcatcgcacctcaccgggatcctattgacacttcccctttgatttccttccgctctctgctagtgatggtcccagggacccttctaaaargtcactgtgggctgggcacagtggctcacgcctgtaatcccaacactttgagaggctgaggtgggccaatcatctgaggtcaggagttcgagaccagcct

SEQ ID NO: 287015 - DNA, 201 bp, Homo sapiens
tggggccaggagtttgaggctgcagtgagctttgattgggccactgcactccacttaagcctgagtgacagagcaaaaccctgtatccaaaaaaaaaaaaattaaccaggagaaaaatgacatttggagatcctgtctctaaagaaaaaaaaagctcactgcatagctcactgcagcctcagaaacaggcccaggactgaa

SEQ ID NO: 287016 - DNA, 201 bp, Homo sapiens
ttctaaggacattccatttctgaaaatgtacatttccacccgcttttcctctccttccttcctccctccctccctccctctctctctctctctctctctctttctttctttctgacaaggtcttcctctgtcgctgacgctggagtgcaatggtgcgatctcggcccattgcaacctccgcctcctgggctcaagtgatcc

SEQ ID NO: 287017 - DNA, 201 bp, Homo sapiens
gttctaaggacattccatttctgaaaatgtacatttccacccgcttttcctctccttccttcctccctccctccctccctctctctctctctctctctctctttctttctttctgacaaggtcttcctctgtcgctgacgctggagtgcaatggtgcgatctcggcccattgcaacctccgcctcctgggctcaagtgatc

SEQ ID NO: 287018 - DNA, 201 bp, Homo sapiens
tgctgggattacaagcatgagccactgtacccagccccatcatcctcattttatttattttttatttttattactatttttttaggtggagtcttgctctrtcacccaggctggagtgcagtggcgtgacctcggctcactgcaacctctgcttcccgggttcaagcaattctcttgcctcagcctcccgagtagctggga

SEQ ID NO: 287019 - DNA, 201 bp, Homo sapiens
gaaattgtgtgtctttgtgagaacacggttacgcatttttctgggaaggagatccataattttcatcagatccagattcttttttttttttttttttttttgagacagagtctcgccctgttgtccaggctggagtgcagtggcatgatcttggctcgctgcaacctctgcctcccgggttcaagcgattctcctgcctca

SEQ ID NO: 287020 - DNA, 201 bp, Homo sapiens
ttcctgttcttcccccatcatcacagtctacggctgtttcctctcgatgggcaaagactgtgtctggccattgagttttctgctatatccaagtgcttcgyatactgaaccatataaatgtgctgcttttattggtcaaaacggccaaatattggcaattttatattggttagcttcatagtatgtgagctaggatactta

SEQ ID NO: 287021 - DNA, 201 bp, Homo sapiens
agttagccaggcatggtggtgtgctcctgtaatcccagctacttaggaggctgaggccagagaattgcttgaaccctggagtcagaggttgcagtgagccrggatcatgccactgtactccaggctgggtgacaaagtgagactgtctcaaaaaataaaaataaataaaataaataaaagagaggcacaaacagtgttatg

SEQ ID NO: 287022 - DNA, 201 bp, Homo sapiens
ccctgaaataattggaaaatttttgtgagttaatgcggaattactaatgatttctttttaacacaagggaactgacataactgcaaaagagaattaacatrctttattaatattgctaatataatgatcattaaatattatcaacacaccagcagtgatatgtgtagtgatatgttacaaagagagccaatgagaaaaaat

SEQ ID NO: 287023 - DNA, 201 bp, Homo sapiens; identical to SEQ ID NO: 58636

SEQ ID NO: 287024 - DNA, 201 bp, Homo sapiens; identical to SEQ ID NO: 58637

SEQ ID NO: 287025 - DNA, 201 bp, Homo sapiens; identical to SEQ ID NO: 58639

SEQ ID NO: 287026 - DNA, 201 bp, Homo sapiens
caaaattgtaagtttctgaggctacagtattgtaaaagtgcttttcaaagtggaaatacccagaatacaaatatttcattagcattagtaatgtcaaaatyattgatcatattgagtctagaattcattaatctaaatagcccaccacactcttgggagaaaagatgatttctttgttttgtttagctacagattgaattt

SEQ ID NO: 287027 - DNA, 201 bp, Homo sapiens; identical to SEQ ID NO: 58643

SEQ ID NO: 287028 - DNA, 201 bp, Homo sapiens; identical to SEQ ID NO: 58644

SEQ ID NO: 287029 - DNA, 201 bp, Homo sapiens; identical to SEQ ID NO: 58635

SEQ ID NO: 287030 - DNA, 201 bp, Homo sapiens
taaatattatcaacacaccagcagtgatatgtgtagtgatatgttacaaagagagccaatgagaaaaaataaaggccttgctcaatttctgatttaaaagrctatagctattccctagtgcaggaatttttgtattatatttgtaaaagaaatctgttcttttctccaagtctgctaaagatgaaggaagccaagagaagg

SEQ ID NO: 287031 - DNA, 201 bp, Homo sapiens
tgaccacagtttctcaggcactctcacccagcgctcccttactgctctgctaccaggttcctaacaggccacagactgtatagtcggcggcccagcggagrggggggtgggggggtgggggctgctttaatcagtacatccatatacaaatgaaagtcttgaatttatattaaaaatctaggcaaaacattgtgcatgtat

SEQ ID NO: 287032 - DNA, 201 bp, Homo sapiens
ctcaggcactctcacccagcgctcccttactgctctgctaccaggttcctaacaggccacagactgtatagtcggcggcccagcggaggggggggtggggrggtgggggctgctttaatcagtacatccatatacaaatgaaagtcttgaatttatattaaaaatctaggcaaaacattgtgcatgtatatgttttaagtt

SEQ ID NO: 287033 - DNA, 201 bp, Homo sapiens; identical to SEQ ID NO: 58638

SEQ ID NO: 287034 - DNA, 201 bp, Homo sapiens
tttagctagggagaataagtttaagagagctattgtagagacactgaccttcagcgcctcggctccagcgccatggcgccctccaggaagttcttcgttgkggggaactggaagatgaacgggcgaaagcagagtctgcgggagctcgtccgcactctgaacgcggccaaggtgccggccgacaccgaggtggtttgtact

SEQ ID NO: 287035 - DNA, 201 bp, Homo sapiens; identical to SEQ ID NO: 58641

SEQ ID NO: 287036 - DNA, 201 bp, Homo sapiens; identical to SEQ ID NO: 58642

SEQ ID NO: 287037 - DNA, 201 bp, Homo sapiens; identical to SEQ ID NO: 58645

SEQ ID NO: 287038 - DNA, 201 bp, Homo sapiens; identical to SEQ ID NO: 58646

SEQ ID NO: 287039 - DNA, 201 bp, Homo sapiens
gaccacagtttctcaggcactctcacccagcgctcccttactgctctgctaccaggttcctaacaggccacagactgtatagtcggcggcccagcggaggkgggggtgggggggtgggggctgctttaatcagtacatccatatacaaatgaaagtcttgaatttatattaaaaatctaggcaaaacattgtgcatgtata

SEQ ID NO: 287040 - DNA, 201 bp, Homo sapiens; identical to SEQ ID NO: 58647

SEQ ID NO: 287041 - DNA, 201 bp, Homo sapiens; identical to SEQ ID NO: 58648

SEQ ID NO: 287042 - DNA, 201 bp, Homo sapiens; identical to SEQ ID NO: 58649

SEQ ID NO: 287043 - DNA, 201 bp, Homo sapiens; identical to SEQ ID NO: 58650

SEQ ID NO: 287044 - DNA, 201 bp, Homo sapiens; identical to SEQ ID NO: 58651

SEQ ID NO: 287045 - DNA, 201 bp, Homo sapiens; identical to SEQ ID NO: 58652

SEQ ID NO: 287046 - DNA, 201 bp, Homo sapiens; identical to SEQ ID NO: 58653

SEQ ID NO: 287047 - DNA, 201 bp, Homo sapiens; identical to SEQ ID NO: 58654

SEQ ID NO: 287048 - DNA, 201 bp, Homo sapiens; identical to SEQ ID NO: 58655

SEQ ID NO: 287049 - DNA, 201 bp, Homo sapiens; identical to SEQ ID NO: 58656

SEQ ID NO: 287050 - DNA, 201 bp, Homo sapiens; identical to SEQ ID NO: 58657

SEQ ID NO: 287051 - DNA, 201 bp, Homo sapiens; identical to SEQ ID NO: 58658

SEQ ID NO: 287052 - DNA, 201 bp, Homo sapiens; identical to SEQ ID NO: 58659

SEQ ID NO: 287053 - DNA, 201 bp, Homo sapiens; identical to SEQ ID NO: 58660

SEQ ID NO: 287054 - DNA, 201 bp, Homo sapiens; identical to SEQ ID NO: 58661

SEQ ID NO: 287055 - DNA, 201 bp, Homo sapiens; identical to SEQ ID NO: 58662

SEQ ID NO: 287056 - DNA, 201 bp, Homo sapiens; identical to SEQ ID NO: 58663

SEQ ID NO: 287057 - DNA, 201 bp, Homo sapiens
ctaaaggatttcacagatcaaacaatttatgaaaaaacactaggattgtctttatggggcttgagacaatatgacagatataccttgtccaaaactcccaytgtttaacttcactgaagaggctatttttgggttaaattaaatttaaccctaagtaactaaagggtctgtcaaacacatacatttatttaaattaccctg

SEQ ID NO: 287058 - DNA, 201 bp, Homo sapiens
agtgtttacaggagtgtagagaatatataactcttgggttatatttgtttttcaggttggattagcagcatgccaaattgctagagcttatggcttaaagrttttgggcactgctggtactgaggaaggacaaaagattgttttgcaaaatggagcccatgaagtgttcaatcacagagaagtgaattacattgataaaat

SEQ ID NO: 287059 - DNA, 201 bp, Homo sapiens
tttacaaaagtcaaactttgttccttggagacttgcgtggttttttaatatgtttttaaccaactactcctttaaagctgtttgcttccttttttcagtgygatgaatttttatgcgtgttttaaaactttatttaaaaaacagatgtctaagttttaaacttttactatcatttttgtattgtttatgtgtattaaatag

SEQ ID NO: 287060 - DNA, 201 bp, Homo sapiens
ccagggaataaagttcatttgttagctggatgctttggaggaataatcactactgcatccaaaatggtgaggtggcatttatttagttgctgcatttaacrgaattcaagcagattctgaagttcttcacttgtactatattagcaatttgctaaacacttattgctttgctaatcctcaaccacttcctcacgttaggga

SEQ ID NO: 287061 - DNA, 201 bp, Homo sapiens; identical to SEQ ID NO: 58671

SEQ ID NO: 287062 - DNA, 201 bp, Homo sapiens
caaactctaagcagatgccttagtcataaaatatgcgattctacctgcaggttagtttgatttcacattttctagctcaatctgtctcactatcactattrtaaagtttatttctacgaagtaaagggtcttatatgccagcatctcaaagggtgagatgaaaaggatggtaaagaaaaaaatcagctaacaccatttaat

SEQ ID NO: 287063 - DNA, 201 bp, Homo sapiens; identical to SEQ ID NO: 58673

SEQ ID NO: 287064 - DNA, 201 bp, Homo sapiens; identical to SEQ ID NO: 58675

SEQ ID NO: 287065 - DNA, 201 bp, Homo sapiens
ttacttctgcataaaataatagtttaaataacttctctacctgttctgaaaacagttaagtcaatggaggtggaagacttatgctttttagaagaaatccrgtattacaggattttaagtattatcctatttgccatcagtatgccacgttattttattctttgtgtaatctcctttgacaggcttcatcgttatgaagca

SEQ ID NO: 287066 - DNA, 201 bp, Homo sapiens; identical to SEQ ID NO: 58677

SEQ ID NO: 287067 - DNA, 201 bp, Homo sapiens
ggaatggggaaaatgtctccagggcatgtcagagacctttgcggcagtcgctctcatcacaggccagaggcctaggagttaaaaaatggtttcctgggccrggcccagggcctccatgccgtgtgcagcctagggacttggtgctctgcatcccagccatagcttaaaggtgccaacatacagatcaggccatttcttcag

SEQ ID NO: 287068 - DNA, 201 bp, Homo sapiens
attatgtatttttattactgcaccctccatggctcccaagtctaattttcttagcaagcctatgagagtctttacagtttggatataacctatctttacaratttatttctcatcacttcctctccatgtagagatacagtgctgtaacaacatcagcttttgtccaatttccttaagacttcctttcatttctctgtctt

SEQ ID NO: 287069 - DNA, 201 bp, Homo sapiens
ataatttttaatttctcttataaattttgcttcataatataaagagaaagttaattcttttgaaaaataagtaaaacatgaaaaaatgcaaggtcactatrcagttttggagccctgactcagtgaaaatgttatgctcaggatatatatatatacacacacacacatatatatatatatatgcccaaagacatattcata

SEQ ID NO: 287070 - DNA, 201 bp, Homo sapiens
ataaagagaaagttaattcttttgaaaaataagtaaaacatgaaaaaatgcaaggtcactatacagttttggagccctgactcagtgaaaatgttatgctyaggatatatatatatacacacacacacatatatatatatatatgcccaaagacatattcatagtaagctcatgtcctagcatctttcctcataattcctt

SEQ ID NO: 287071 - DNA, 201 bp, Homo sapiens
taatgtgcaaattacatactggcccaataatgcctggcctagggcattgtttcaccctgagtcctgcatctactttttaatagtgaggtccagcagacatytgttgaggctttactgtgtttctggtgccgtgacaagaagaaggctgtcctgggtcatcctgctgtcagggtcctagtatggttttctgcctttgggtgt

SEQ ID NO: 287072 - DNA, 201 bp, Homo sapiens
aaactttatttaaaaaacagatgtctaagttttaaacttttactatcatttttgtattgtttatgtgtattaaatagaatatagcttctctagaatcttakagctataaaaattgattttttaatgcaaataacattctaagtaaagctgcagctttgtatttgcagctgtgaggtattcttaatataatttctactgatg

SEQ ID NO: 287073 - DNA, 201 bp, Homo sapiens; identical to SEQ ID NO: 58674

SEQ ID NO: 287074 - DNA, 201 bp, Homo sapiens
ccatttagaacaaaaccaaatgcactaaaacaacaaaaatcatgcaaaaccgaacagctaatgatatcttcttttgctttttgtttattaataaaaatggkagccccctgggggtttggggcttttgatttattgtttctttatgaaagtttattttacagatagaaaattttcagctaagtattttatactcaagttgag

SEQ ID NO: 287075 - DNA, 201 bp, Homo sapiens
aagttttgccttctggtcctgggctcctagccctggtcctgcgtttaggctctgagtttaggctaccacaccatgaggtgtccgttggcactacccctgcycagcctccgccccccgcactccctgtcccccagccccacgctgcaccccccccccccgccagtcacccgcttgatttttccctgcagccagtgcctgggt

SEQ ID NO: 287076 - DNA, 201 bp, Homo sapiens
cttatatgccagcatctcaaagggtgagatgaaaaggatggtaaagaaaaaaatcagctaacaccatttaattacaggacttgggttctagctttgcttcygtgtgaccctgaccaagtctcttaacctcttgtgatgttttctcatccataaaatggatggcgattttatttttacttctgcataaaataatagtttaaa

SEQ ID NO: 287077 - DNA, 201 bp, Homo sapiens
tttttttttttttgagacagggtctcactctgtcacccaggctggagtggtgcagtggcaggatcatggctcactgcatcctgatctcctgggctcaagcratcctcccacctcagccttctgagtagctgggaccactggtgcttgccaccacacctagataatttttttttttttttttgtagagatggcatttcgcca

SEQ ID NO: 287078 - DNA, 201 bp, Homo sapiens; identical to SEQ ID NO: 58666

SEQ ID NO: 287079 - DNA, 201 bp, Homo sapiens; identical to SEQ ID NO: 58667

SEQ ID NO: 287080 - DNA, 201 bp, Homo sapiens; identical to SEQ ID NO: 58669

SEQ ID NO: 287081 - DNA, 201 bp, Homo sapiens
tagctggatgctttggaggaataatcactactgcatccaaaatggtgaggtggcatttatttagttgctgcatttaacagaattcaagcagattctgaagytcttcacttgtactatattagcaatttgctaaacacttattgctttgctaatcctcaaccacttcctcacgttagggagattagaatttcccaaatattg

SEQ ID NO: 287082 - DNA, 201 bp, Homo sapiens
ctttcaaatgtatttccttatctctattccactgaccaccataacttagtttaggcctcagtttctccagccttgactgttattcataactgagctaatayacccttttatctatgctgtcatctccctcttaaaaaagatctccagaaataaataaaatggaagctttatgaggagaggagttttgtctctctgttccct

SEQ ID NO: 287083 - DNA, 201 bp, Homo sapiens
aatatataactcttgggttatatttgtttttcaggttggattagcagcatgccaaattgctagagcttatggcttaaagattttgggcactgctggtactraggaaggacaaaagattgttttgcaaaatggagcccatgaagtgttcaatcacagagaagtgaattacattgataaaattaaggtaaaattttccactgt

SEQ ID NO: 287084 - DNA, 201 bp, Homo sapiens
tttcaaatgtatttccttatctctattccactgaccaccataacttagtttaggcctcagtttctccagccttgactgttattcataactgagctaatacmcccttttatctatgctgtcatctccctcttaaaaaagatctccagaaataaataaaatggaagctttatgaggagaggagttttgtctctctgttcccta

SEQ ID NO: 287085 - DNA, 201 bp, Homo sapiens
tttggatataacctatctttacaaatttatttctcatcacttcctctccatgtagagatacagtgctgtaacaacatcagcttttgtccaatttccttaakacttcctttcatttctctgtctttgcacatgctatttttttttacccaacctatcctttctctcattcctaaagaatttctacttatcttttaaacccta

SEQ ID NO: 287086 - DNA, 201 bp, Homo sapiens
tttgctgtttgtgtaagtgttagccagactaggggtagaaattccttaagatgatgaaaacacccgagattaattagcttcaaaaaataaggtgatgtaayttatgctttcctttgcagtgcctgtgtgaaagctggagagagtgttctggttcatggggcaagtggaggagtaagtattttttttaatgtattttgaaac

SEQ ID NO: 287087 - DNA, 201 bp, Homo sapiens
gagagagtgttctggttcatggggcaagtggaggagtaagtattttttttaatgtattttgaaacaagcttgggtttatgggtttcacattatagttcctytggtcatttttaaaagtcagatttataaatagagtcaaaggtgctttttttctttatgtagtaaaacttttgattttggtcttctgaaggtgatgttttg

SEQ ID NO: 287088 - DNA, 201 bp, Homo sapiens
gggctctgttctgagtagtcctgtgtggagttttgatacagtaaaagtctgaattctttcatatcaggtcctggtttctgcagctcttcttaatgtttaarcttcttgtggttgaggcagatgttttaggtgatggcagaatctaacactatttggttgatttcaagaaattataacccacagataaaattatggggatat

SEQ ID NO: 287089 - DNA, 201 bp, Homo sapiens
tgtctagcacatcgtaaacactctataaacattcaccatatggatgaattagttaatttgcccatatacctatctcttctacttaaatggtggaggccttacatttgttatttagaatttcatatgcacaaagaagtcagagagcatgttctgatcatctttaaaccctgcaaacatcttgatgcagtggttaaaaactca

SEQ ID NO: 287090 - DNA, 201 bp, Homo sapiens
acatctttacaggtacaaaaatttttctaagattatataactttctgtacaaatgttctttgcttttttctaggttatttgaactctgagttttcatttcmtttggtattaacagtgataggacagaaaggttagctgtgaccttgtaatttataaaagattgcatatggtgcactgtttttagttttttgatgtttttcc

SEQ ID NO: 287091 - DNA, 201 bp, Homo sapiens
ataacccacagataaaattatggggatatagtcaaaacctttcattacatctttacaggtacaaaaatttttctaagattatataactttctgtacaaatrttctttgcttttttctaggttatttgaactctgagttttcatttcctttggtattaacagtgataggacagaaaggttagctgtgaccttgtaatttata

SEQ ID NO: 287092 - DNA, 201 bp, Homo sapiens; identical to SEQ ID NO: 58679

SEQ ID NO: 287093 - DNA, 201 bp, Homo sapiens
cacagagaagtgaattacattgataaaattaaggtaaaattttccactgttttacaaaagtcaaactttgttccttggagacttgcgtggttttttaataygtttttaaccaactactcctttaaagctgtttgcttccttttttcagtgcgatgaatttttatgcgtgttttaaaactttatttaaaaaacagatgtcta

SEQ ID NO: 287094 - DNA, 201 bp, Homo sapiens
catggctcactgcatcctgatctcctgggctcaagcaatcctcccacctcagccttctgagtagctgggaccactggtgcttgccaccacacctagataatttttttttttttttttgtagagatggcatttcgccatgttgcccaggctggccttgatctcctaggctcaggcaatccttatgattcagaaattgaaaag

SEQ ID NO: 287095 - DNA, 201 bp, Homo sapiens
cacctcagccttctgagtagctgggaccactggtgcttgccaccacacctagataatttttttttttttttttgtagagatggcatttcgccatgttgccmaggctggccttgatctcctaggctcaggcaatccttatgattcagaaattgaaaagaagaatagaggggaaaacaataatgatgtctactatatacaaga

SEQ ID NO: 287096 - DNA, 201 bp, Homo sapiens
actgccttgcccaaggccatgtggctcccacatgatagagctgggactcacacctcgagctgcatattccaaaacctgctctttccgtaacgtcatgttgaaaaaaaaaaaaacaaaacaaaaacaacctctatgttcttatatccaccatggaaaattctcatctgggctacctttttcttttttattttcttgatactt

SEQ ID NO: 287097 - DNA, 201 bp, Homo sapiens
agctgttagagtttttgaatttggtgggccagaagtcctgaaattgcgatcagatattgcagtaccgattccaaaagaccatcaggtagaaataaaattaytttattgaggctataattatactgagtgtgagtctcttgcacattgtattaaaaagaagcagactcacaattatttttaaaaacattgaattaggatgca

SEQ ID NO: 287098 - DNA, 201 bp, Homo sapiens; identical to SEQ ID NO: 58670

SEQ ID NO: 287099 - DNA, 201 bp, Homo sapiens
tttacactttagcttcaatttcttttcattttatctcctgaaacagttacataccacacattagtctgcttactcattggtaataaatgctgctaatttcrtggcatttattcctgtccctatcgtttggccaactttgtttccttcacccgtaatgactcttccccattctagttttcaaaatcttgtcctgttcttcaa

SEQ ID NO: 287100 - DNA, 201 bp, Homo sapiens
acacttaatgcagtgcctggtatagcaagctcttcatggactgagccatcaacatcattatgatgccattcaaggaagtttatccttctttttcttatatkttttctgttttccttagattttcttcccattggttcccattaataaatatttttaaatgtgaagtattttaaaatgatttatggctgggcatggtggctc

SEQ ID NO: 287101 - DNA, 201 bp, Homo sapiens
gagaccgaaaggattccatgaccggcagaatctagaggtcatggtattccttaagcatccagtgaatgcatggactttgaagacagaacagcctgggtcartgtcttcacatagtactagttgtgtgaccttggttaagttacttaaacatctcaagggcagtttactgatttgagaaacatagataatgacagcacctac

SEQ ID NO: 287102 - DNA, 201 bp, Homo sapiens
cacctgaaaattccagacaaactttatttcactacagcaatgtatttagtacaaatttttatcagtttagatgttctggctggtaccttggaattacatcrtgattatataattagattatttaaaattttgcattattagtctcaaagatgtagcatttatatatcatttgaaacatatttctataatatcttgtacaga

SEQ ID NO: 287103 - DNA, 201 bp, Homo sapiens
tcatcatgtttgccttgctttttgtaattatttctatcctttgcttttctctcctccgagagtctaggatgcttgaggttagggacagtggtattgatgtscctcacataacttgaaataatgctttctatgtagtatattcgcagtaaatgtttgaattatattgaaatcaattcaacatgttttttagctgttaaaact

SEQ ID NO: 287104 - DNA, 201 bp, Homo sapiens
tctcatgagatctgttgggttttttttttttttttttttttttgagacagagtctcgctgtgttgcccaggctgcagtgcagtggctggagtgtagtggcrtctctcagctcactggaagctccacctgccgggttgacgccattctcctgcctcagcctcctgagtagctgggactacaggcgcctgccaccatgcccgg

SEQ ID NO: 287105 - DNA, 201 bp, Homo sapiens
agttttattgaccctgtgacgcccaccacctagaataatcttcaaaagaaaattacaaaacaccctgttaacacatcgttggatgtttatactgagtttcyagaggagactcagtgaccagggaaggtgtgtcaatgattaaacctaaaggctaaagtttggaatgcttgtccgtagctaatggaaattgttgtgcgagtc

SEQ ID NO: 287106 - DNA, 201 bp, Homo sapiens
aattgtacccagtctcaggtgtttcttcatagccatatgaaaatgaactaatacggtaaataggtaccattagagtggggtactgctgtaaagatacctgmaaatgtggaagcgactttgaaactgggtaacaattggaacagtttggagggctcagaagacaggaagatttgggaaagtttggaacttcctagagacttg

SEQ ID NO: 287107 - DNA, 201 bp, Homo sapiens
agcagagcataaaatttcagaaaatttgcagcctgaagatgcaatagaaaagaaaaacccattttctgaggagaaattcaagccagccgcagaaacttgcytaagtaaggaggagccaaatgttaatcatcaagataatggaatggggaaaatgtctccagggcatgtcagagacctttgcggcagtcgctctcatcacag

SEQ ID NO: 287108 - DNA, 201 bp, Homo sapiens
atgtgacaatacattaattttttttcttccttagtatctagatcaccatggcgactggacagaagttgatgagagctgttagagtttttgaatttggtggrccagaagtcctgaaattgcgatcagatattgcagtaccgattccaaaagaccatcaggtagaaataaaattactttattgaggctataattatactgagt

SEQ ID NO: 287109 - DNA, 201 bp, Homo sapiens
ataactactttttctatagttctggacaagttgacaaaagtcacacatttgtaagagactcttcatggtataacacttagattctgaagtgtttttaatgyttctgaaaattaaatcatacggttcactacaaaaagaaatttgtttttccttttcttaggaggaatttcagcaatatgcagcagcccttcaagctggaat

SEQ ID NO: 287110 - DNA, 201 bp, Homo sapiens
aaattcaagccagccgcagaaacttgcctaagtaaggaggagccaaatgttaatcatcaagataatggaatggggaaaatgtctccagggcatgtcagagrcctttgcggcagtcgctctcatcacaggccagaggcctaggagttaaaaaatggtttcctgggccgggcccagggcctccatgccgtgtgcagcctaggg

SEQ ID NO: 287111 - DNA, 201 bp, Homo sapiens
agagaaagttaattcttttgaaaaataagtaaaacatgaaaaaatgcaaggtcactatacagttttggagccctgactcagtgaaaatgttatgctcaggwtatatatatatacacacacacacatatatatatatatatgcccaaagacatattcatagtaagctcatgtcctagcatctttcctcataattccttgacc

SEQ ID NO: 287112 - DNA, 201 bp, Homo sapiens; identical to SEQ ID NO: 58678

SEQ ID NO: 287113 - DNA, 201 bp, Homo sapiens
aataagtaaaacatgaaaaaatgcaaggtcactatacagttttggagccctgactcagtgaaaatgttatgctcaggatatatatatatacacacacacayatatatatatatatatgcccaaagacatattcatagtaagctcatgtcctagcatctttcctcataattccttgacctgctcaactttggcagcacctta

SEQ ID NO: 287114 - DNA, 201 bp, Homo sapiens; identical to SEQ ID NO: 58680

SEQ ID NO: 287115 - DNA, 201 bp, Homo sapiens
ataagtaaaacatgaaaaaatgcaaggtcactatacagttttggagccctgactcagtgaaaatgttatgctcaggatatatatatatacacacacacacwtatatatatatatatgcccaaagacatattcatagtaagctcatgtcctagcatctttcctcataattccttgacctgctcaactttggcagcaccttac

SEQ ID NO: 287116 - DNA, 201 bp, Homo sapiens
aaatgaattgaaggctttgtttattctgtggagcttagggaatatttggggctgtatgtcaggttgcatttgctgtttgtgtaagtgttagccagactagrggtagaaattccttaagatgatgaaaacacccgagattaattagcttcaaaaaataaggtgatgtaacttatgctttcctttgcagtgcctgtgtgaaag

SEQ ID NO: 287117 - DNA, 201 bp, Homo sapiens; identical to SEQ ID NO: 58664

SEQ ID NO: 287118 - DNA, 201 bp, Homo sapiens
atctatttgatcttctatttgatctgatctatcatttatctctatataaattccttaagaatcagtcactctgtacacatacacacacacacacacacacrcgcacacagattgattgattttaaagagttgacccatgaaattgtggaggactggtgagtctaaaatctgttgcggtgggccagcagatgggagacacaa

SEQ ID NO: 287119 - DNA, 201 bp, Homo sapiens; identical to SEQ ID NO: 58665

SEQ ID NO: 287120 - DNA, 201 bp, Homo sapiens
agacttgcgtggttttttaatatgtttttaaccaactactcctttaaagctgtttgcttccttttttcagtgcgatgaatttttatgcgtgttttaaaacwttatttaaaaaacagatgtctaagttttaaacttttactatcatttttgtattgtttatgtgtattaaatagaatatagcttctctagaatcttatagct

SEQ ID NO: 287121 - DNA, 201 bp, Homo sapiens
aattatctacagagtaggcaggaaaaagccacaactcaatcactgcctctaacttgggacacaggaggtacactgcctggaaaaccaagtcccccgccgcmcacacacacacacacacacacacacactttttttttttttttaaccagaaatcatctgaactagctagaattgaggtctaggtccaccccacagtatcct

SEQ ID NO: 287122 - DNA, 201 bp, Homo sapiens
tggggcaagtggaggagtaagtattttttttaatgtattttgaaacaagcttgggtttatgggtttcacattatagttcctttggtcatttttaaaagtcrgatttataaatagagtcaaaggtgctttttttctttatgtagtaaaacttttgattttggtcttctgaaggtgatgttttgtcattagtttagcatttct

SEQ ID NO: 287123 - DNA, 201 bp, Homo sapiens
gggatttatggttaccctgtagataactactttttctatagttctggacaagttgacaaaagtcacacatttgtaagagactcttcatggtataacacttmgattctgaagtgtttttaatgcttctgaaaattaaatcatacggttcactacaaaaagaaatttgtttttccttttcttaggaggaatttcagcaatatg

SEQ ID NO: 287124 - DNA, 201 bp, Homo sapiens
taacagaattcaagcagattctgaagttcttcacttgtactatattagcaatttgctaaacacttattgctttgctaatcctcaaccacttcctcacgttrgggagattagaatttcccaaatattgagtactgtgtaaattagatcattacaaatgaaggaaaaaataagagtgagagtttattaccttttttgcaatca

SEQ ID NO: 287125 - DNA, 201 bp, Homo sapiens
tttgctagttcaaaattcctgttctactgcctttgaattctttgcccaaggtccctcagttggtataatatgcatatgtgtaatcatcaggtaaaaatacrtatgaatagaggacaaatgaataaaggaaaaaattcacacgaatactacatttattaatactacatttatcatgtagtattcatgtgaaaacaatcttca

SEQ ID NO: 287126 - DNA, 201 bp, Homo sapiens
attatttgcttcatgctacttttggatctcaagtgtgttttatttgactcttgagcctttagagaacaaaccttattattctttactatatcagatagccraactatttaaccaaactagaattgcttttagttgcattttccttggtgactgagagttccatatattttgtaagtgtttatacatagaaggaatgaatgt

SEQ ID NO: 287127 - DNA, 201 bp, Homo sapiens
ccggcctcagcctcctaagtagctgggattacaggcgcctgccactgcgcctgactcattttttattttttttagtagagacggggtttcaccatgttggycaggctgctcttgaactcctgacctcgtgattcacccgccttggcctcccaaagtgctgggattacaggtgtgagccacggcgcccggctcacagcctct

SEQ ID NO: 287128 - DNA, 201 bp, Homo sapiens
tttgggaggccgaggtgggccacttgaggtcaggagttcaagaccagcctggccaacatggtgaaaccctgtctctcctaaaaaaaaaaaaaattatccgrgtgtggtggtgtacacctataatcccagttacttgggtggctaaggcacgagaatcgcttgaacccaagtgatggaggttgcagtgagccgaggttgcag

SEQ ID NO: 287129 - DNA, 201 bp, Homo sapiens
ctcctgggttgaagtgatactcctgcttcagccttccaggtagctgggattacaggtgcgtgccaccatgctcagctaatttttgtatttttagtagagayggggtttcactagttggccaggctggtctcgaactcctgacctcggtgatccgcctgacttggcctcccaaagtgctgggattacaggcatgagccactg

SEQ ID NO: 287130 - DNA, 201 bp, Homo sapiens
agtaaagacggggtttcaccatgttggccagtctggtctcgaactcctgacctcaggtgatctgcctgccttggcctctcaaagtgctgggattacaggcrtgagccactacgcccagccccctgaggttctctcctgtatttctctcctgtatttttattccttcacctcttccagcatctagaaagtcttctgtggagt

SEQ ID NO: 287131 - DNA, 201 bp, Homo sapiens
aacctgtacctgtctgtggcctgggttggggacccctgctttaaaggaagggacttactcttagtaatcattttatccctcagaaatttgcacaatgtttygtattttatcttagtttcttatattagcttgttgagttgaaattatagaaatctgaaacctttagatacttttataatgcaatataaaagtctcatggca

SEQ ID NO: 287132 - DNA, 201 bp, Homo sapiens
tcagcctcctgagtagctgggattacaggtgcccaccaccatgcccagctaattttttatatttttagtagagacggggtttcaccgtgttgaccaggctsgtctcaaactcctgacctcaggtgatccacctgccttggcctcccaaagtgttgggattacaggcatgagccaccgtgcctggccaaaaaaattttttct

SEQ ID NO: 287133 - DNA, 201 bp, Homo sapiens
cctgggttcaagcgattctcctgcctcagcctcctgagtagctgggattacaggtgcccaccaccatgcccagctaattttttatatttttagtagagacrgggtttcaccgtgttgaccaggctggtctcaaactcctgacctcaggtgatccacctgccttggcctcccaaagtgttgggattacaggcatgagccacc

SEQ ID NO: 287134 - DNA, 201 bp, Homo sapiens
ttggcctttgcttcaggtttagcagccactgtaactattacccatcttttaaaagcaggagaccaaattatttgtatggatgatgtgtatggaggtaggtracccctctcatttatattctgtaaacttgtattttacagataataaagtgagccctgaattaatattaacaatgttgccagtatttttgattatttatta

SEQ ID NO: 287135 - DNA, 201 bp, Homo sapiens
tctgtaaacttgtattttacagataataaagtgagccctgaattaatattaacaatgttgccagtatttttgattatttattatagtttacaggtgtgacrggtacctctatgctctctcagacttgggaaaagaggagcataaacacttagggtccatgttctggaactgcttataagagagattatttatttatttatt

SEQ ID NO: 287136 - DNA, 201 bp, Homo sapiens
tattcagaaaaaggacttcttgaggagttgaagctatggcctatatgtttaataacatatttttcttgtgcactgttattatagcaccctccaagtggaaktcacagctagtattccagagctgctattagaagctgcttcctgtgaagatcaaatcttcctgagtaattaaatggaccaacaatgagcctttgcaaaatt

SEQ ID NO: 287137 - DNA, 201 bp, Homo sapiens
gcatatgtgatattctttcttgggaccttatttaaattctgtgtggataaaagaaggaccagtgtcttttataagtcagctgtttacaactttttgctaaygattaaaaggttagaattgtacccaagattatgttgcaatgaatgctaaaaaataaatatcttttcatgtacaaataattactttgcacattaacatggt

SEQ ID NO: 287138 - DNA, 201 bp, Homo sapiens
gtttcctgccacacttccaacatttcgccacgcaggcgatccatgtgggccaggatccagagcaatggacctccagggctgtagtgccccccatctcactrtccaccacgttcaagcaaggggcgcctggccagcactcggtgagctgggtctgtctggggctgtccacagttgggcggtaaaagagatacggcttatgaa

SEQ ID NO: 287139 - DNA, 201 bp, Homo sapiens
gcataaagaaagctgaagagggtagaaaagatgaggcaacatgaagctggagagataggggcccaagcaagtagtcagatgtgagcatggcataatcctcrtcttaggcttatttgcagttaagtagacagtgaaaaataccaccctccccccccaaaaattacatgtttaattctaaaataagacttatgataccttatg

SEQ ID NO: 287140 - DNA, 201 bp, Homo sapiens
actatatcagatagccaaactatttaaccaaactagaattgcttttagttgcattttccttggtgactgagagttccatatattttgtaagtgtttatacmtagaaggaatgaatgtttcttaatgcaatgttcttttcattttatctgattcccttctgtctcaggtacaaacaggtacttcaggcaagtggcatctgaa

SEQ ID NO: 287141 - DNA, 201 bp, Homo sapiens
gttattgagtacctactatatgccaaatacgtgctcgtatatatcatgtgtattacatgtattgtctcatctaatcctaacaacaaccctagtctgaaccraattctcattttttcccaataaagaagctgagatttagggagttaagtaactagccttagactagtaagtattggagatggaattcaaactttagaaact

SEQ ID NO: 287142 - DNA, 201 bp, Homo sapiens
cacttgggcctgaaaggtcgaagctgccgttagctgtgatcatgccactgcactctagcctgggcaacaaagtgagaccctgctgcttaaaaaaaaaaaaagaaagtaattcagtacaatggcatttcgttcaacaaatagaattcttttctttggtctttttgataactatcaagcatctaccatgtgtctgaattgtgg

SEQ ID NO: 287143 - DNA, 201 bp, Homo sapiens
ctcagcctcccgagtagctgggattataggaatgcaaatttttaaaaagtattgtgtggagctgttttgccaggaattgctccctatgctttgagccactyttgtagagccaagatgtgaatgaatgttgagcattggtaggatgtgatcataacttcctgttgtatgctaaatagaacttgaatcagcctgacagatggc

SEQ ID NO: 287144 - DNA, 201 bp, Homo sapiens
acaaattttattttatgccattggaaacatcaacaaaattaagatagactgtcatctccggggtgttatagcataatggtagtacatgatttctggagtaraattcaaattgtgattctgttatcttagttagtatattatcttgggcaaattatttaaccaaagtctcagtttcttcatttgcaaaatggagataattat

SEQ ID NO: 287145 - DNA, 201 bp, Homo sapiens
ggtttattctgttggctcatgcaagtcccttttcctaatgtttccagattaatgaaaaaaggtgagtctaacataataaacatactaataataaaaactgycatttatttagtgattagcatgtgccaggaaacatgtagtgaatttgtgcattatctcattttatcttcacaacaattttatgaaccagatatctgtatt

SEQ ID NO: 287146 - DNA, 201 bp, Homo sapiens
caaaaaacaaaaacggttatagcatagcaaggctttatgatatgatataagaaatgagtttttttattttcatgtccatcttaattataatcataatttgrtaaagccctagtgaatttttagtttcaagacttaatggtttttttttcttttttaaaattacatttgaaatgagggctttcatatactataccttttata

SEQ ID NO: 287147 - DNA, 201 bp, Homo sapiens
ctaagccagctttccgccacgtctcgggcgaacctccggcctgaggtcacagagacgcccgggtggctctcaggagccagcatggcagcctcctcaggacsggtactcaggaatttcgcccgcagggactaacaccacttggacccaggaactccagcttcactccgctttgtgcactgggtggggcggtcgcggtgacgt

SEQ ID NO: 287148 - DNA, 201 bp, Homo sapiens
aattttaaatagcacttacagtataaacttacatttttcaatagatgtctaaacaccatttcctatttacattgcttagtttatctccagtatagttaaakattaagccattgtaacttgacaggtaaaatataaacatgattaggaataaaaatgtcctccacaagggaaactgaaacttattgcttgataagtgtcctt

SEQ ID NO: 287149 - DNA, 201 bp, Homo sapiens
ctaatatcttccaaagactaaacagctctaatgagggtgaaataaaaacacacagttctatgtttaggaaaatgtaaagggaaagatgttgataatgtatktttttgtttgtttgtttgttttgaaatggagtcttgctctgtcgcccaggctggagtgcagtggcgcgatctcagctcactgcaaccaccgcctccccgg

SEQ ID NO: 287150 - DNA, 201 bp, Homo sapiens
aggagttatattgtggaattctgaatgcttactggttgctactagtgattcttggtcatctttctccgatgtgcctcagaaggtctagctctggattgatycagaggaaactaattatgacaggctcttggtccaagagacctcttataagtagcaatccagtaggttggtcatggagtacatgatttctggccaaacttc

SEQ ID NO: 287151 - DNA, 201 bp, Homo sapiens
gttcaagatatatagcgagaccctttctctgcaaaaaaaaaaaaataataataataattggccgagcatggtggcacatgcctgtagttccaactactggrgaggctgaggtaggaggatcacttgggcctgaaaggtcgaagctgccgttagctgtgatcatgccactgcactctagcctgggcaacaaagtgagaccct

SEQ ID NO: 287152 - DNA, 201 bp, Homo sapiens
ttggtccaagagacctcttataagtagcaatccagtaggttggtcatggagtacatgatttctggccaaacttcatttaggcaggtattaaaatatacacrttggggaggctatgccttaccctactgcatgggggtacttgacacacactttcagtatttggattgagcatatcttaccaatggtataaacaggataaaa

SEQ ID NO: 287153 - DNA, 201 bp, Homo sapiens
agctgggattacaggcatgtgccaccacgcctggctaactttgtgtttttagtagagccagggtttctccttgttggtcaggctggtctcaaactcccgaycttaggtgatccacctgcctcggcctcccaaagtgctaggattacagatgtgagtcactcgtgcccggcctcagggactggttttgtagaatacaatttt

SEQ ID NO: 287154 - DNA, 201 bp, Homo sapiens
tatgtataacttgggaagcatttagagatttttttatttaagtggtaaccacagagcaaagtctcaaatgcaataatttttttttttttttttttttttttaggcagagtttcactcttttgcccagactggagttcagtggcatgatctcggctcactgcaacctccacctcctgggttgaagtgatactcctgcttcag

SEQ ID NO: 287155 - DNA, 201 bp, Homo sapiens
ccatgttctggaactgcttataagagagattatttatttatttatttgtttatttttagataggatctcactctgtcacccgggttggagtggagtggtaygatctcagctcactgcagtctccgcctcctgggttcaaatggttctcatgccctagcctcctgaatagctgggaccccaggcgcatgccaccacacctga

SEQ ID NO: 287156 - DNA, 201 bp, Homo sapiens
tacctagggtcagtctacataccatcaaaagtctagtttctcattaatgacagaatattcttttgttgttgttgttgttattgagtatcaatatcaatttyttctttaagtttttatgtgtaaaaatcaaatctaggtgtatttataaaaaattattttaagtcaaatgatttaccttgtttcactgtaaaaatctggtag

SEQ ID NO: 287157 - DNA, 201 bp, Homo sapiens
ggagattggatgttttgaaaaacattatttgcttcatgctacttttggatctcaagtgtgttttatttgactcttgagcctttagagaacaaaccttattwttctttactatatcagatagccaaactatttaaccaaactagaattgcttttagttgcattttccttggtgactgagagttccatatattttgtaagtgt

SEQ ID NO: 287158 - DNA, 201 bp, Homo sapiens
cctccaggattcaagcgattctcctgcctcagcctcctgagtggctgggattgcaggtgtgcaccaccacaccctgctaatttttttttttttttttttttgagacagagtcttgctcttgtcgctcaggctggagtgcaatggcaggatctcggctcactgcaacctccgcctcctggattcaagcaattcttctccttc

SEQ ID NO: 287159 - DNA, 201 bp, Homo sapiens
gagatataaaggtcattgttactttttaagtaggcggtaaccacgttttctgttgtgggtgtcacttttcttctttagtctaaagcccatgctcttcaagwcttagatacttattctatagtttctagagtttctggcattaagttcatattaaatatatttttggcatcatagggataattctctttcattaaaattcta

SEQ ID NO: 287160 - DNA, 201 bp, Homo sapiens
taattaactttagtacttttctgtttacatgtacgttatctcacttgatctttacaaaaaattctgtaagataggtattaccaacccaattatacagatcrataggatacattacatacctacggcttcagaaatttgcaggtaaggctgggattcagatttgaacctcccaacatcatcatccatgtgtttccattatac

SEQ ID NO: 287161 - DNA, 201 bp, Homo sapiens
aatttatttctcacagttctgaaggctgggaagtcctcaatcaaagtgccagcagattcagtaccggtgagggcccactttctggtccatagatggagccktctcgctgtgtcctcacatggtagaagagacaaggcagttatctggggcctcttttatcagggcactgtattagtccattctcacactgctataaagaaa

SEQ ID NO: 287162 - DNA, 201 bp, Homo sapiens
taggaatcaagatcatgacaaaccccaaatgtaaataatcacagcatacgtcatgaggttttaatgattaaaaatctaagcagatgagtttatacttactstacataaaaattgctgaatgttcatttcaactattttatgtgtttaatgagtcataaaatactagagtctctactgtaggtaataaatttagagtcctgt

SEQ ID NO: 287163 - DNA, 201 bp, Homo sapiens
cagagacgcccgggtggctctcaggagccagcatggcagcctcctcaggacgggtactcaggaatttcgcccgcagggactaacaccacttggacccaggractccagcttcactccgctttgtgcactgggtggggcggtcgcggtgacgtttcaggcaacgcctctgctgtcagccaataaggagcgggagacgcgtcg

SEQ ID NO: 287164 - DNA, 201 bp, Homo sapiens
acactgtaattcttgcagcacagctttgtatcggatggtccagtgatcgtatttcttttgataagcaggactggaaggagccgtttgtccagcttgccatwtagatttggcctgaaattcaggtgattttgacaaatttgcaattaaaaatcgaaggtcataacttttttgagttacctttagcagcataaattttaaaga

SEQ ID NO: 287165 - DNA, 201 bp, Homo sapiens
aacagaaaatgtgtctctgatgaaactcctccatgcccttgattgttggagaacagccctactagatactgtcaaatcttttgttttctgttctctgtagrataaacctttaatgtcttcatgttgtgtacaagataaatccaaaccctaacttggtaccaggcccttcagtatctaacccaatcaattcatctagttttt

SEQ ID NO: 287166 - DNA, 201 bp, Homo sapiens
gtctgtaagtccaaagccttgattatgctttggaaaccacttcagtgtgttatataagttgaggaaaatccttacagacagtcccttgttttgtgagatasagttctaaggccatttctacaactggtttagaatactctttactgtattttagaatcaaaatatgtacacagcctctctttctttctttctttttttttt

SEQ ID NO: 287167 - DNA, 201 bp, Homo sapiens
ccagcatctgtactcatatactgaattatccatcttcctatccagagctgatctctttcatcctccttcacattctcagggaaatcactctcccaattctycccatctttcctagatcaccactctcctacccttttcgatggatcatttttgtcaggctcttacaaaatccttctcttgacatttttgccccaaccagct

SEQ ID NO: 287168 - DNA, 201 bp, Homo sapiens
gcatatcactgacatgtagttgagcattcccaaaatactcaccaaatggatgagtcagttaatttcagtaaactcttactttgctaataatggtaaaaatyacaatcatctttaaggaaataaaagaggatcacttaacttaaatattcacattgcaaaataaagaaaaaagaaggatttttctaactgtatggttatcac

SEQ ID NO: 287169 - DNA, 201 bp, Homo sapiens
tctggagctccaaagaaagatcatggagagagatcaatctgggtaccttaaggatttttgctttccccttaagaagcatatcactgacatgtagttgagcrttcccaaaatactcaccaaatggatgagtcagttaatttcagtaaactcttactttgctaataatggtaaaaatcacaatcatctttaaggaaataaaag

SEQ ID NO: 287170 - DNA, 201 bp, Homo sapiens
gaatgatggtataattcactgaactgaaaacatagaagtaagaggagctgggccaggcgcagtggctcacacctgtaatcccagcagtttgggaggccgargcgggtgcatcacccgaggttgggagttcaagaccagccttaccaacatggagaaacctcatctttactaaaaacacaaaattagctgggcatggtggtg

SEQ ID NO: 287171 - DNA, 201 bp, Homo sapiens
aaaaagtacctcaataataaatacagaacttctcctttcaacctcttccatcacatcaacacctatgaagacaatgggtttctgattgtggatctctgctrctggaaagggtaagaaaggacactggacaaatgggacacctcccattgttcctggaaattacggggtttttacagagctgctgcactcaatctgaatcac

SEQ ID NO: 287172 - DNA, 201 bp, Homo sapiens
cacatataggtatgtgaatatatgctttcttttatatctatttgctccctggttgcacaaaaggggttattaaaacagctacatggaatgtaaaactttgyaccaaaggcttagatatggtgtagtagaaaataaactcaatttagaaccaaacaccactgctcttaagcaagtttgtaagctctatgaagaatgagaaag

SEQ ID NO: 287173 - DNA, 201 bp, Homo sapiens
ctgaactgaaaacatagaagtaagaggagctgggccaggcgcagtggctcacacctgtaatcccagcagtttgggaggccgaggcgggtgcatcacccgargttgggagttcaagaccagccttaccaacatggagaaacctcatctttactaaaaacacaaaattagctgggcatggtggtgcatgcctgtaatcccagc

SEQ ID NO: 287174 - DNA, 201 bp, Homo sapiens
tttgtttgtttgtttgttttgttttttgagacagagtctcgctcagtcgcccaggctggagtgcagtgggatgatctcagctcactgcaagctccgcctcmtgggtttatgccattctcctgcctcagcctttccaagtagctgggactacaggcgcccgccatcacgcccggctaatttttcgtatttttagtagagacg

SEQ ID NO: 287175 - DNA, 201 bp, Homo sapiens
ttatttttgcagatttgagtttgtttataattacttatatttagccaatttacgtgagaactgggaagaggtgaaaaaaaatgccagaaaggctccccaamctgaagttaggagatatgtacttcctttgaatattgacaaggtaacctgcttctctgtagatttcagatttaaccagaatgtttcatctctctcaggaat

SEQ ID NO: 287176 - DNA, 201 bp, Homo sapiens
ggtgagatgatctagagaaaacttcacacgggagtgaacaaatgtttctttcaaagagattaagagttttcctaagcatgtgctctatttcgtagcatttsagtttcctcaaatcaattaccagaagtattgtgggaaaccttacacatatgcgtatggacttggcttgaatcactttgttccagatagggtaattaatcc

SEQ ID NO: 287177 - DNA, 201 bp, Homo sapiens
cacaggcaggatccccctctggctcaccggcagtctccttcgatgtgggccaggactctttgaagttggatctgagccattttaccacctgtttgatgggyaagccctcctgcacaagtttgactttaaagaaggacatgtcacataccacagaaggtaaagcagcactccatgccactcctcctcctcaaagtagggcct

SEQ ID NO: 287178 - DNA, 201 bp, Homo sapiens
atagcttttactccattatgttactgtgagatttaaaagagataataccatgcaaagttctttttatggtatgtaggacatagtaattgtttagtaaaagrtaattattataattgagtctggtcagagattccactctttgaagttacaacatgaaactgaacagaggatgtagaaagtaaacaaaaatatagaacctga

SEQ ID NO: 287179 - DNA, 201 bp, Homo sapiens
ttgacaaaatccctggggaaacttgagccccatcttctctgcgaagggagaaaaagacatgcgtttttcagactagccaaatcactaagaagacaacagcrcctaaggacacaaacagaatggtgacaggaagacagaacagaaagtatctcaaggctgctgttacttaaacaaatccattaagcaggttgctttattttc

SEQ ID NO: 287180 - DNA, 201 bp, Homo sapiens
aacaaaaatatagaacctgaatctcctggtctgactatgatgaaaaagtactgtaggtcttggggattggtagagaaatgagatgatggggaaaaaattayggtataatatgagtgaataatgaaagatgaggtacctgacccaaaaagctgtcatctctcaacccctaggaaggagataaatgggtctctccttgaggca

SEQ ID NO: 287181 - DNA, 201 bp, Homo sapiens
atgaaagcaattgttgtgtctgaatactcttcttactgcagttctgtatgttagttcgttaggaaaggagtaaggttgattattccgtaatactcaaaaaygatccttaatactataaatagagcagtactgaagaattaaaactatttgaaaagaattttcatcttttgatcaggtcttgttgattaccagtagaaaaaa

SEQ ID NO: 287182 - DNA, 201 bp, Homo sapiens
tatttgaacagtgctttgagtatatgctagtcaagtaaagcatattgactgattgcttgattgatttttctttctcacaaacagctctgtaagctgaatgkcaaaactaaagaaacttgggtttggcaagagcctgattcatacccatcagaacccatctttgtttctcacccagatgccttggaagaagatgatggtaat

SEQ ID NO: 287183 - DNA, 201 bp, Homo sapiens
tgctcctgtctatactcttccctatgtttcaatgtccttcaggttcatccgcactgatgcttacgtacgggcaatgactgagaaaaggatcgtcataacadaatttggcacctgtgctttcccagatccctgcaagaatatattttccaggttactgaacccaaactgaatgttactcaagacattttatattagcccttt

SEQ ID NO: 287184 - DNA, 201 bp, Homo sapiens
caaatcaattaccagaagtattgtgggaaaccttacacatatgcgtatggacttggcttgaatcactttgttccagatagggtaattaatccttcttactmatatttgaacagtgctttgagtatatgctagtcaagtaaagcatattgactgattgcttgattgatttttctttctcacaaacagctctgtaagctgaat

SEQ ID NO: 287185 - DNA, 201 bp, Homo sapiens
aacaaatttcaggaagtgaactgatggcagtaggattgattgatttgtcttccgaagtaaggaaaaactgcagaggacaggattaagttcactgtaaccaytgacattaaaagagaggtcatgtctcttgacatcagagcagtgatctgggacccccttccatacctgagtagtcttccccacccccagcctcacgtgctc

SEQ ID NO: 287186 - DNA, 201 bp, Homo sapiens
tcactgaactgaaaacatagaagtaagaggagctgggccaggcgcagtggctcacacctgtaatcccagcagtttgggaggccgaggcgggtgcatcaccygaggttgggagttcaagaccagccttaccaacatggagaaacctcatctttactaaaaacacaaaattagctgggcatggtggtgcatgcctgtaatccc

SEQ ID NO: 287187 - DNA, 201 bp, Homo sapiens
caaacaaaacagaacaagactccatctcaagaaacaaacaaacaaacaaacaaacaggaaatctaatttaacaatgaaaataagcaaaatagaacaaagtaaaaaaattcaacttgaaaccacataaataatatattaaacatagacatagacatttgtacttattgtatgcatgtacataaatatgcatacatgtgcaca

SEQ ID NO: 287188 - DNA, 201 bp, Homo sapiens
ggtatcaataaggttgctagagagggttagaggtgcacaatgtgcttccataacattttatacttctccaatcttagcactaatcaaacatggttgaatastttgtttactataactcttacagagttataagatctgtgaagacagggacagggacaatacccatctctgtctggttcataggtggtatgtaatagatat

SEQ ID NO: 287189 - DNA, 201 bp, Homo sapiens
tataatgtatcttccttctctcaactggaggacattcactttacttccgtaggttgatctttgcaactatgtctctgtcaatggggccactgctcaccccyacattgaaaatgatggaaccgtttacaatattggtaattgctttggaaaaaatttttcaattgcctacaacattgtaaagatcccaccactgcaagcagg

SEQ ID NO: 287190 - DNA, 201 bp, Homo sapiens
tgaaaaattcatttgtttctacaggtttttttcttactttcgaggagtagaggttactgacaatgcccttgttaatgtctacccagtgggggaagattackacgcttgcacagagaccaactttattacaaagattaatccagagaccttggagacaattaagcaggtgggacacagtgctaggtgatgttcaggaattta

SEQ ID NO: 287191 - DNA, 201 bp, Homo sapiens
aattaattaattaattaattaattaaaagtacaaaatcagattttaactggctctccatatcagaaatcctgggcaaagtatgctgtctactctaagatayggtttagcagacctgtctaggcaagagatggaattcaagaatacttaatttttaaaacaaaataaatgttaaaattgaagaaaaacataaaagtaacaga

SEQ ID NO: 287192 - DNA, 201 bp, Homo sapiens
gaagccgaatcaggaatagccatgcatgtcagcacaggagtagtactctcaggagggataaattgatttgttaatagctagtcagatgataatgtaggggmgattaatggaacatagttatttgcaatgggcagtaatatggcaggtggagatgggattgaggcagaacaactgaagacagaaagaacagtttgaggaaag

SEQ ID NO: 287193 - DNA, 201 bp, Homo sapiens
agtacaaaatcagattttaactggctctccatatcagaaatcctgggcaaagtatgctgtctactctaagatatggtttagcagacctgtctaggcaagasatggaattcaagaatacttaatttttaaaacaaaataaatgttaaaattgaagaaaaacataaaagtaacagagggagattgagaagaatataattcagc

SEQ ID NO: 287194 - DNA, 201 bp, Homo sapiens
gtgagctaataaaaccctttattcttcatgttgtgcatttatgattgtgacttgatgaggacacatagaatggccattctaagctccacatgggctgtacrgattgctcctgtctatactcttccctatgtttcaatgtccttcaggttcatccgcactgatgcttacgtacgggcaatgactgagaaaaggatcgtcata

SEQ ID NO: 287195 - DNA, 201 bp, Homo sapiens
tgtctaggcaagagatggaattcaagaatacttaatttttaaaacaaaataaatgttaaaattgaagaaaaacataaaagtaacagagggagattgagaakaatataattcagcacaccatgtccggaattttcccagtaagtttaggttgataggttataggtgatgggggtgggggtcctatgtgaacttcccccaggg

SEQ ID NO: 287196 - DNA, 201 bp, Homo sapiens
tttagagaaaggatatgctagatggagggggtaaagcgatcaaaagcatggaggtagaaggtgttcatgaaaactggagaataatctccttggactagacytgcagcatttctcagtggaggtattagtatgacattaggcagggggtgactcatcatcatggagacgtcccacacatgggagaggtttggcatccctggc

SEQ ID NO: 287197 - DNA, 201 bp, Homo sapiens
cctgagccctgatacagtgcctggcacatagtgaaagctcagagtatttgataaatgattgactgaataaatgaatatcttgcctattatttaaataaggktgctaaaatgtcctatgctttaaaaaaatctccctaattaattggaaataattttggttagataaatatatattccagtaattattcattcaataactct

SEQ ID NO: 287198 - DNA, 201 bp, Homo sapiens
gctaaagcctagggctttggggtccaacatgagtggctttaaaccctgtattcaacagacatgacttgcctaggagggtaaccttggcaagatgttgacckccaattcttggttttataattagtaaaatgggagaaataatagaatctaccttatatattcattacaagcattaaatgagagcgcagtgtctagcacaca

SEQ ID NO: 287199 - DNA, 201 bp, Homo sapiens
tttgtcattgcctgtgctcatgtttgactttttatttttgcagatttgagtttgtttataattacttatatttagccaatttacgtgagaactgggaagargtgaaaaaaaatgccagaaaggctccccaacctgaagttaggagatatgtacttcctttgaatattgacaaggtaacctgcttctctgtagatttcagat

SEQ ID NO: 287200 - DNA, 201 bp, Homo sapiens
gtttacaatattggtaattgctttggaaaaaatttttcaattgcctacaacattgtaaagatcccaccactgcaagcaggtgagtttaccaatctgtcctyttctgaaaataagtgtctatattgtgagaaagttactgtattgtgagaaagataagaatgtcagaatagcattttgtgcatagttaaattactctcagac

SEQ ID NO: 287201 - DNA, 201 bp, Homo sapiens
acttaagaactctgcatttctggctgtttgaattctttcctgctcactgaggtttctgttatcttctctcctaggctgacacaggcaagaatttagtcacrctccccaatacaactgccactgcaattctgtgcagtgacgagactatctggctggagcctgaagttctcttttcagggcctcgtcaaggtgagatgatct

SEQ ID NO: 287202 - DNA, 201 bp, Homo sapiens
caaaatcacaaccctagttaaattcagctctccaccccctccatgcttatacctctgaggctgaactaagtgcagacaacacacaatcatgttaattggtyccattttagatgcatgaccacaaatctttctgctacatttcccggcttcacttactctctcactttgctagttaaatattccacaccctcctctctttaa

SEQ ID NO: 287203 - DNA, 201 bp, Homo sapiens
aaatacaaatcttgagccttgtcctgggcagactgaatgagaaattttgggagtggagcctgcaatcagtattttaagaaactctttatgtgattctgatrcacactaaagtttgaggaccattcacttactagtgagtaaattttaatgtgcataagaattactgtacagggctattgacacaaacccatctaaactata

SEQ ID NO: 287204 - DNA, 201 bp, Homo sapiens
ccactgcaattctgtgcagtgacgagactatctggctggagcctgaagttctcttttcagggcctcgtcaaggtgagatgatctagagaaaacttcacacrggagtgaacaaatgtttctttcaaagagattaagagttttcctaagcatgtgctctatttcgtagcatttgagtttcctcaaatcaattaccagaagtat

SEQ ID NO: 287205 - DNA, 201 bp, Homo sapiens
ctagattttaaagagccaggattcctgttttttcatttaaatagtcttttttctatagacacatctttttaaaatacatttattctcactcttaatccatmcttctactcctcactccactaaaatatatcaagaaatttgaaaatcttcttaaaaatgagatggcaaaaggcaaatggattggtgtttggggaaatctat

SEQ ID NO: 287206 - DNA, 201 bp, Homo sapiens
tttttatggtatgtaggacatagtaattgtttagtaaaaggtaattattataattgagtctggtcagagattccactctttgaagttacaacatgaaactkaacagaggatgtagaaagtaaacaaaaatatagaacctgaatctcctggtctgactatgatgaaaaagtactgtaggtcttggggattggtagagaaatg

SEQ ID NO: 287207 - DNA, 201 bp, Homo sapiens
agcaccgtggtgaaagaaacacacaaatatccctgtcctcatgaagcttaccttctagtgggtgaagcaggtaataaacaatataagtaagtaaaaataartatgttagatactggttagtgttaagggaagaaaataaagtagggaagggggacatgaaatgttgggagaaggttgaaattttagataggatggccaggg

SEQ ID NO: 287208 - DNA, 201 bp, Homo sapiens
acaatcatctttaaggaaataaaagaggatcacttaacttaaatattcacattgcaaaataaagaaaaaagaaggatttttctaactgtatggttatcackgcctgaagaaatattacccaattatagaatagggaactgtaataatcataaaaaatgtctaacatcatcaaatccgtctcctctttcttctaatagttat

SEQ ID NO: 287209 - DNA, 201 bp, Homo sapiens
tttgctttccccttaagaagcatatcactgacatgtagttgagcattcccaaaatactcaccaaatggatgagtcagttaatttcagtaaactcttacttygctaataatggtaaaaatcacaatcatctttaaggaaataaaagaggatcacttaacttaaatattcacattgcaaaataaagaaaaaagaaggattttt

SEQ ID NO: 287210 - DNA, 201 bp, Homo sapiens
atgatggtataattcactgaactgaaaacatagaagtaagaggagctgggccaggcgcagtggctcacacctgtaatcccagcagtttgggaggccgaggygggtgcatcacccgaggttgggagttcaagaccagccttaccaacatggagaaacctcatctttactaaaaacacaaaattagctgggcatggtggtgca

SEQ ID NO: 287211 - DNA, 201 bp, Homo sapiens
aaaactatgattaatgattgaaaactaatcgggtccacgaaccccacctgaaaacaaaagattctgtgacctgagaggtgaacttaaagttgacaaaatcmctggggaaacttgagccccatcttctctgcgaagggagaaaaagacatgcgtttttcagactagccaaatcactaagaagacaacagcacctaaggacac

SEQ ID NO: 287212 - DNA, 201 bp, Homo sapiens
ttaaataagcatgtatgtgtgcataatagcatacatacatatatgagagtgtactaaatatgttgcgcttaattcccaaaactacaaacaaatctgttatytcatagaagtactatagaaaaagaactacagcaaaaagagtgtaccctagaattctccattcattcttcatttattgccaggttcattgttcaccacctt

SEQ ID NO: 287213 - DNA, 201 bp, Homo sapiens
gtcaagtaaagcatattgactgattgcttgattgatttttctttctcacaaacagctctgtaagctgaatgtcaaaactaaagaaacttgggtttggcaakagcctgattcatacccatcagaacccatctttgtttctcacccagatgccttggaagaagatgatggtaatgaaagcaattgttgtgtctgaatactctt

SEQ ID NO: 287214 - DNA, 201 bp, Homo sapiens
atagcacaagctgatctataattctcaacagactatttactatgtcttaacatacactccccatagctctttcttgtttatgttgtgtgtgtgtaaccatrtacaagtgtgtgtgtagctcctttagagaagaacaaaagctgagtttctaaatcattcatttgactttgatagggaatctgtattacaattacatgatat

SEQ ID NO: 287215 - DNA, 201 bp, Homo sapiens
tggacttggcttgaatcactttgttccagatagggtaattaatccttcttactaatatttgaacagtgctttgagtatatgctagtcaagtaaagcatatygactgattgcttgattgatttttctttctcacaaacagctctgtaagctgaatgtcaaaactaaagaaacttgggtttggcaagagcctgattcataccc

SEQ ID NO: 287216 - DNA, 201 bp, Homo sapiens
ctgtttgaattctttcctgctcactgaggtttctgttatcttctctcctaggctgacacaggcaagaatttagtcacgctccccaatacaactgccactgsaattctgtgcagtgacgagactatctggctggagcctgaagttctcttttcagggcctcgtcaaggtgagatgatctagagaaaacttcacacgggagtg

SEQ ID NO: 287217 - DNA, 201 bp, Homo sapiens
aaagagattaagagttttcctaagcatgtgctctatttcgtagcatttgagtttcctcaaatcaattaccagaagtattgtgggaaaccttacacatatgygtatggacttggcttgaatcactttgttccagatagggtaattaatccttcttactaatatttgaacagtgctttgagtatatgctagtcaagtaaagca

SEQ ID NO: 287218 - DNA, 201 bp, Homo sapiens
gccctcaccttcgcttctccccccacccccacccccacccagctgagactagaccggcaggagtgaacaggctttgagccagccctagagtgccttctctyctgcagctctgcctctatctctgcggactttgagcatcaacatgggcttcttccttattcttccaccatttcagggttgagcatcctgctggtggttaca

SEQ ID NO: 287219 - DNA, 201 bp, Homo sapiens
aattggaattccctaaggatcaggattacacctttgtcatcttcaaactgtcagtgcctagctcagtgcctggcacatagtaaatgtcctataaatgtctrttccattggtgtctgaataaatgaaggcccagtgacaagcacctgggagtattaaagggtggtgggtttcatgcccattttattagaggaatgttggttc

SEQ ID NO: 287220 - DNA, 201 bp, Homo sapiens
cccacattttgcagatgagaacactgaggtccagagatgacatgtgagctgatcctaaaccagaagtcatgtccctgacatccaaccctgtggactttctrctacagcagattgactttcatccaagcagtagctcacactcacagagggatatagctctagattttaaagagccaggattcctgttttttcatttaaata

SEQ ID NO: 287221 - DNA, 201 bp, Homo sapiens; identical to SEQ ID NO: 58740

SEQ ID NO: 287222 - DNA, 201 bp, Homo sapiens
agttatgtgagagtcaaaaatgtaattggaaaagcagtaggaagtttaggtaatctgaacatcaaaactatgattaatgattgaaaactaatcgggtccaygaaccccacctgaaaacaaaagattctgtgacctgagaggtgaacttaaagttgacaaaatccctggggaaacttgagccccatcttctctgcgaaggga

SEQ ID NO: 287223 - DNA, 201 bp, Homo sapiens
ccacattttgcagatgagaacactgaggtccagagatgacatgtgagctgatcctaaaccagaagtcatgtccctgacatccaaccctgtggactttctgmtacagcagattgactttcatccaagcagtagctcacactcacagagggatatagctctagattttaaagagccaggattcctgttttttcatttaaatag

SEQ ID NO: 287224 - DNA, 201 bp, Homo sapiens; identical to SEQ ID NO: 58723

SEQ ID NO: 287225 - DNA, 201 bp, Homo sapiens
tctctgtctggttcataggtggtatgtaatagatatttttaaaaataagtgagttaatgaatgagggtgagaatgaaggcacagaggtattagggggaggygggccccagagaatggtgccaaggtccagtggggtgactgggatcagctcaggcctgacgctggccactcccacctagctcctttctttctaatctgttc

SEQ ID NO: 287226 - DNA, 201 bp, Homo sapiens
taattctcaacagactatttactatgtcttaacatacactccccatagctctttcttgtttatgttgtgtgtgtgtaaccatatacaagtgtgtgtgtagytcctttagagaagaacaaaagctgagtttctaaatcattcatttgactttgatagggaatctgtattacaattacatgatattttaattagaaatataga

SEQ ID NO: 287227 - DNA, 201 bp, Homo sapiens
ccccctctggctcaccggcagtctccttcgatgtgggccaggactctttgaagttggatctgagccattttaccacctgtttgatgggcaagccctcctgyacaagtttgactttaaagaaggacatgtcacataccacagaaggtaaagcagcactccatgccactcctcctcctcaaagtagggcctagcttggctcct

SEQ ID NO: 287228 - DNA, 201 bp, Homo sapiens
taattgtatttaagcattgtgcaatcacttgggaaaaatattaaattattaacattgaggtattaatacattttaagccttttgtttttaaatttcttttsttccagagattgtttaaaaataaatattgacaaaaataatgttttatatcttaattctagtatctgttttatgcttgaaagcattacagatcatgatacc

SEQ ID NO: 287229 - DNA, 201 bp, Homo sapiens
tggagaaaatgaaaataacccctctaaaacaatcaaaatgtgtttctttgcctgtataagctgttctaaatgctttgtattaaaaaaaaaataagaggctsttccaaagccttttaaaaccactttatttcagacaaggaagatccaataagcaagtcagagatcgttgtacaattcccctgcagtgaccgattcaagcca

SEQ ID NO: 287230 - DNA, 201 bp, Homo sapiens
tctggggcatctccacatttcccaaggtgtgatctcctagtgaaggtgagtcaagtcagcagacattttctaagtgctgtccagcgcgagggctggaaatraaaatcactgccagctctatgaggaagaagctgcccaatcaggctgctgatatactctgccttaccaaggacaagcctagcccaaggcagggataagaag

SEQ ID NO: 287231 - DNA, 201 bp, Homo sapiens
gccagctctatgaggaagaagctgcccaatcaggctgctgatatactctgccttaccaaggacaagcctagcccaaggcagggataagaagcaatgttctrtctccccttcatcacaggcaggatccccctctggctcaccggcagtctccttcgatgtgggccaggactctttgaagttggatctgagccattttaccac

SEQ ID NO: 287232 - DNA, 201 bp, Homo sapiens
atgttactcaagacattttatattagccctttttctctcatggcttgaaaattactggactgaaaaattcatttgtttctacaggtttttttcttactttygaggagtagaggttactgacaatgcccttgttaatgtctacccagtgggggaagattactacgcttgcacagagaccaactttattacaaagattaatcc

SEQ ID NO: 287233 - DNA, 201 bp, Homo sapiens
agccctttttctctcatggcttgaaaattactggactgaaaaattcatttgtttctacaggtttttttcttactttcgaggagtagaggttactgacaatrcccttgttaatgtctacccagtgggggaagattactacgcttgcacagagaccaactttattacaaagattaatccagagaccttggagacaattaagca

SEQ ID NO: 287234 - DNA, 201 bp, Homo sapiens
agatatatttgtcaagtttgtgattctgaagaagatgtgtttaataatgtacacttttttcctttttaaatgcatcaaaatattttcctcatttttcaagktttggcttcatattgctgacaaaaaaaggaaaaagtacctcaataataaatacagaacttctcctttcaacctcttccatcacatcaacacctatgaaga

SEQ ID NO: 287235 - DNA, 201 bp, Homo sapiens
tgccattgcagtccagcctgaggaaaagaacaagaccccatctcaacaaacaaacaaacaaaacagaacaagactccatctcaagaaacaaacaaacaaamaaacaaacaggaaatctaatttaacaatgaaaataagcaaaatagaacaaagtaaaaaaattcaacttgaaaccacataaataatatattaaacatagac

SEQ ID NO: 287236 - DNA, 201 bp, Homo sapiens
tgagtatctggaaagcagttactgcgtgcacactcttaaaagtttggcaatgaagagaaaaatagaaagggcttaggtcccagttacttggaagactgagrcaggaggattgcttgagtccaggagttcaaagttacagtgagctacatgccattgcagtccagcctgaggaaaagaacaagaccccatctcaacaaacaa

SEQ ID NO: 287237 - DNA, 201 bp, Homo sapiens
ggagatgggattgaggcagaacaactgaagacagaaagaacagtttgaggaaagacagataggtggagagggagatacgcagagagaattggctattatamttggttgaaacataggcaaaagtagtaaagtaaatgggataaaaagttataaaagtacgttgtactcttagaaggctttaaggccaggctaagaaatttg

SEQ ID NO: 287238 - DNA, 201 bp, Homo sapiens
cagtaagtatctctgggagacttttttaaaacaccttcatggattcatgataaatgtgctatttcaagggctcctgaagagaaggcattgattaatgaccwgtttaggaaagacccttgaattttggtggggaaattttttcctgcttatgtattaaagcaactagctagaattcaggtccaaattatggggggtttgtgt

SEQ ID NO: 287239 - DNA, 201 bp, Homo sapiens
ggtgtttggggaaatctattaggtggagagtcccaatcctctcaagatgcttctccctcactccttccaaccctttatccacactctggggcatctccacrtttcccaaggtgtgatctcctagtgaaggtgagtcaagtcagcagacattttctaagtgctgtccagcgcgagggctggaaatgaaaatcactgccagct

SEQ ID NO: 287240 - DNA, 201 bp, Homo sapiens
taggtggagagggagatacgcagagagaattggctattataattggttgaaacataggcaaaagtagtaaagtaaatgggataaaaagttataaaagtacrttgtactcttagaaggctttaaggccaggctaagaaatttgcactttattgaactggtaatggaaagacagtgaaggtttttacacaaaagaaaagccca

SEQ ID NO: 287241 - DNA, 201 bp, Homo sapiens
tagttataggaaataatccatttgcttgaaaaacttcactggtaggaatcaaggaagcactgtcaatcactgcccttctcaaaggataaacctacctgggkttttttttgtttgtttttttgtttgtttgtttgttttgttttttgagacagagtctcgctcagtcgcccaggctggagtgcagtgggatgatctcagctc

SEQ ID NO: 287242 - DNA, 201 bp, Homo sapiens
aaaaaagaaggatttttctaactgtatggttatcacggcctgaagaaatattacccaattatagaatagggaactgtaataatcataaaaaatgtctaacrtcatcaaatccgtctcctctttcttctaatagttattgagtagccactaaaacaggcatcatactatttgttgcagtgggtacataaaatacacttctag

SEQ ID NO: 287243 - DNA, 201 bp, Homo sapiens
agaaagcggaaacgggcatctaaccctacccctaaacgtcatcaggaatgcgcccatgagagcgctattagattggctggagggagggcggtgtcggcctwcgcccccagagtcgtccggctgacgctggcggtggcgcggtttgtgtgggcttggtgagggcggggaggcctggctgtgtggatgtctgacaggtgaggc

SEQ ID NO: 287244 - DNA, 201 bp, Homo sapiens
acaattaggtaattatttgtgaataaaatttttctttgggaaattaccaggttctgaagtaattgttggagtaaataagtaccagttggaaaaagaagacrctgtagaagttctggcaattgataatacttcagtgcgaaacaggcagattgaaaaacttaagaaggtattaatagcttgcttttttttttttttttaagt

SEQ ID NO: 287245 - DNA, 201 bp, Homo sapiens
agcagaaaaggggaagaaatgaaatcagactaatacatcctctttcttttctgttcctttcttatgagtagctcctatttcccaccccctcttctaaatgwttttactctatgtttctttttctaggtcagttcttatttctattgggtgtttccatgctccaccatgttaagagctaagaatcagctttttttactttca

SEQ ID NO: 287246 - DNA, 201 bp, Homo sapiens; identical to SEQ ID NO: 58752

SEQ ID NO: 287247 - DNA, 201 bp, Homo sapiens
tgcagtggatgcatctcgggcaaggtgaagatatataagtttggaggtttccaaagactaaaagttgaccagtttagcttttcagagtatacttaaataamaggttgatcctgtaaaccatgtgagcccaaaagaaaataatggcatccatcgtaaatttaattcttatcattttaaaatttctgtatttaaaacattcat

SEQ ID NO: 287248 - DNA, 201 bp, Homo sapiens
gatctctgttttattctctcttcatgtaaattgtccctttccttgactttttccatagatcaaatccagcagggatcaagctttggctgaacgttgtcttsctgcactaaccgaatgtgctgctagcggagatggaaatatcctggctcttgcagtggatgcatctcgggcaaggtgaagatatataagtttggaggtttc

SEQ ID NO: 287249 - DNA, 201 bp, Homo sapiens
ctactgatatatttttaaatgtttttcagggttcataaattcatggaacgtgaaggtcgcagacctcgtcttcttgtagcaaaaatgggacaagatggccrtgacagaggagcaaaagttattgctacaggatttgctgatcttggttttgatgtggacataggccctcttttccaggtactaaaaactgttggggggaat

SEQ ID NO: 287250 - DNA, 201 bp, Homo sapiens
tatttgatagttcattgtgtctcgagttcattttctgtagacagtaaactttggttctcctgacagaatgagagaggggtggttgcagactctcaaattgkcttcttctttttagcttctcattttacacttacgtagaatccaatatagattcttctttcttgaattcatcagggaaaagcaggttgaccttgatccttt

SEQ ID NO: 287251 - DNA, 201 bp, Homo sapiens
cccagcagatccaatggtgcttgaggtgtcagtggcagatagcaatgatgtttggagcctttggcaggcccccataggtgagtcacagcagaggcctctargattttggaggaagggcctgccatcttctgcagataactactctccttttgagagacagctcttggcctgttactggactttggtggaaactgaatgttt

SEQ ID NO: 287252 - DNA, 201 bp, Homo sapiens
gacatgtatgagcataaaaatagttgttataaaagtgtactgttatgagatgaatcaacatttttagtagtgttaaaagtaaatcattttaccttgattcyagactcttgaatcttacattatttttctttatatatttagctggtcagcagggattatcagttgcctttgatctggcgacacatcgtggctatgattcag

SEQ ID NO: 287253 - DNA, 201 bp, Homo sapiens
caaagaatagctaatggatgctgggcttaatacctaggtgatggggtgatctatgcagctgtttaccatggcacgtgtttaactatgtaacaagcctgcayattaacccctgaatgtaaaataaaaattggaaaaaaaaaacaacccaaaatacaagtaaacaaattaggtgcttttaaataaacttgaaagatttgctgt

SEQ ID NO: 287254 - DNA, 201 bp, Homo sapiens
tcttctaagagcacactgtcagacatctggatggtcacttactgagcaggtatgtatataatttaaaatgtagaattttaataaagttatatatatatatwttttctgagcaatgtggcacaagcaggaaatagaattaagaagctatctgttaatatttgaaatgataaatattctgaagcataatgtatacttaggttt

SEQ ID NO: 287255 - DNA, 201 bp, Homo sapiens
cttcttctaagagcacactgtcagacatctggatggtcacttactgagcaggtatgtatataatttaaaatgtagaattttaataaagttatatatatatwttttttctgagcaatgtggcacaagcaggaaatagaattaagaagctatctgttaatatttgaaatgataaatattctgaagcataatgtatacttaggt

SEQ ID NO: 287256 - DNA, 201 bp, Homo sapiens
gaaggtttaaatgtttcctgatttcattaaagatgaggttacattgtttctctgcagctcaaatcaaaagtaaattgcattttaaaatatatttttcttayagactttatgtaattatgaaaactttatgtacctaaaaataaagattagagaattgatgttgctttaattttctcccaagacttaagaggttttgtgttt

SEQ ID NO: 287257 - DNA, 201 bp, Homo sapiens
taagaggctactgaggaaaaagactgaaactacaggactgatagtaattgtgaagaagaggggccaaagttataaaatatcaggtgcaggaagcagaaaasgggaagaaatgaaatcagactaatacatcctctttcttttctgttcctttcttatgagtagctcctatttcccaccccctcttctaaatgtttttactct

SEQ ID NO: 287258 - DNA, 201 bp, Homo sapiens
taaaaataaagattagagaattgatgttgctttaattttctcccaagacttaagaggttttgtgttttttggaatatacttgttagttgtcttttcaagtractataaacacacaaattctaattaatgactttgatgtttatttaattctgttcttatgaaacattaacatttagtttataattttattaatattagtaa

SEQ ID NO: 287259 - DNA, 201 bp, Homo sapiens
tgctgcccgaagacaagctagaatagattctggtaagatagtgagaaagttcatatatgaaatccagtagttaaaaagaaattcatttctgtttgaagatracatgtatagttaacaaaacaaaaataatgaaaaatggaacttgggtaaattttttctcatatacttgtatctatctatatatgtattttcacatacatg

SEQ ID NO: 287260 - DNA, 201 bp, Homo sapiens
acgaggtcaggagattgagaccatcctggctaacgtggtgaaaccctgtgtctactaaaaatacaaaaaattagccgggcatggtggcgggcgcctgtagycacagctacttggaaggctgaggcaggagaatggcgtgaacccgggaggcggagcttgcagtgagccgagatagcgccactgcactccagtctgggcaac

SEQ ID NO: 287261 - DNA, 201 bp, Homo sapiens; identical to SEQ ID NO: 58764

SEQ ID NO: 287262 - DNA, 201 bp, Homo sapiens
gtctatcactgatgggcatttaggttgattccatgtctttgctgtggtgaatagtgctacaatgaacatacatgtgaatgtgtatttttttttttttttttgaaacagagtctcgctctttcatccatgctggagtgcagtggtatgatcttggctcactacaacctccacctcctgggttcaagtgagtcttctgcctca

SEQ ID NO: 287263 - DNA, 201 bp, Homo sapiens
tccttttgagagacagctcttggcctgttactggactttggtggaaactgaatgtttgactatgggtcatcaagtcaccatgcgaccagaactgcctatcrtgaactgggtgctttctgacccatctaactataaagtgggtcttgcacagcagcattccatcatcaaatggaagtggtatatatgtggtccagcttgagc

SEQ ID NO: 287264 - DNA, 201 bp, Homo sapiens
tcttctgcagataactactctccttttgagagacagctcttggcctgttactggactttggtggaaactgaatgtttgactatgggtcatcaagtcaccaygcgaccagaactgcctatcatgaactgggtgctttctgacccatctaactataaagtgggtcttgcacagcagcattccatcatcaaatggaagtggtat

SEQ ID NO: 287265 - DNA, 201 bp, Homo sapiens
actactgatatatttttaaatgtttttcagggttcataaattcatggaacgtgaaggtcgcagacctcgtcttcttgtagcaaaaatgggacaagatggcmatgacagaggagcaaaagttattgctacaggatttgctgatcttggttttgatgtggacataggccctcttttccaggtactaaaaactgttggggggaa

SEQ ID NO: 287266 - DNA, 201 bp, Homo sapiens
ggaaaattagtatctaactactgatatatttttaaatgtttttcagggttcataaattcatggaacgtgaaggtcgcagacctcgtcttcttgtagcaaawatgggacaagatggccatgacagaggagcaaaagttattgctacaggatttgctgatcttggttttgatgtggacataggccctcttttccaggtactaa

SEQ ID NO: 287267 - DNA, 201 bp, Homo sapiens
agggactcagtctttgcacacaaattcttttgatgaagctttgggtttgccaactgtgaaaagtgctcgaattgccaggaacacacaaatcatcattcaakaagaatctgggattcccaaagtggctgatccttggggaggttcttacatgatggaatgtctcacaaatgatgtttatgatgctgctttaaaggtaagttt

SEQ ID NO: 287268 - DNA, 201 bp, Homo sapiens
acataaaactgcctatttaaaattaattatatatacatacatattttatgtgttaaagttatgtatttaagcaagcatgcaagcagactgtttaaagactrtttttacttgggtaatttaatttgttctcttaaaaattgtatagttatggccttgtttttatacatgttctctttacatatgaaattattttggtacatt

SEQ ID NO: 287269 - DNA, 201 bp, Homo sapiens
gtgcttgaggtgtcagtggcagatagcaatgatgtttggagcctttggcaggcccccataggtgagtcacagcagaggcctctaagattttggaggaaggscctgccatcttctgcagataactactctccttttgagagacagctcttggcctgttactggactttggtggaaactgaatgtttgactatgggtcatcaa

SEQ ID NO: 287270 - DNA, 201 bp, Homo sapiens
ttgagaccatcctggctaacgtggtgaaaccctgtgtctactaaaaatacaaaaaattagccgggcatggtggcgggcgcctgtagccacagctacttggraggctgaggcaggagaatggcgtgaacccgggaggcggagcttgcagtgagccgagatagcgccactgcactccagtctgggcaacagagcgagactcca

SEQ ID NO: 287271 - DNA, 201 bp, Homo sapiens; identical to SEQ ID NO: 58782

SEQ ID NO: 287272 - DNA, 201 bp, Homo sapiens
aattttggcttctaaactaatttgtctgaatttatttgctattctgaagcttaatatggaaattgacatagaaaatatgcagcagttgctgtttaatcatrttgctgtttatagttgcaatatctatcacctgtttctttgagtttttgttttttatcaaatattttaggatccctacaataatattgtccgtactgcaat

SEQ ID NO: 287273 - DNA, 201 bp, Homo sapiens
tctcttttagttttgttaatgtttttctttttagctcattaatgaaattgaagaaatgggtggaatggccaaagctgtagctgagggaatacctaaacttygaattgaagaatgtgctgcccgaagacaagctagaatagattctggtaagatagtgagaaagttcatatatgaaatccagtagttaaaaagaaattcatt

SEQ ID NO: 287274 - DNA, 201 bp, Homo sapiens
cattgtttctctgcagctcaaatcaaaagtaaattgcattttaaaatatatttttcttacagactttatgtaattatgaaaactttatgtacctaaaaatraagattagagaattgatgttgctttaattttctcccaagacttaagaggttttgtgttttttggaatatacttgttagttgtcttttcaagtaactataa

SEQ ID NO: 287275 - DNA, 201 bp, Homo sapiens
ctgtttaatcatgttgctgtttatagttgcaatatctatcacctgtttctttgagtttttgttttttatcaaatattttaggatccctacaataatattgwccgtactgcaatagaagcaatggcagcagtatttggagggactcagtctttgcacacaaattcttttgatgaagctttgggtttgccaactgtgaaaagt

SEQ ID NO: 287276 - DNA, 201 bp, Homo sapiens
cctcgtcttcttgtagcaaaaatgggacaagatggccatgacagaggagcaaaagttattgctacaggatttgctgatcttggttttgatgtggacatagrccctcttttccaggtactaaaaactgttggggggaatttcaaaagtatttactagtcacttacatttagaaaatgtagtaaaatgatgacagacattgag

SEQ ID NO: 287277 - DNA, 201 bp, Homo sapiens
gggcataagcaccctcgctgctggtcataaaaccctagttcctgaactcatcaaagaacttaactcccttggacggccagatattcttgtcatgtgtggasgggtgataccacctcaggtattttttatctctatttttctagtactgtgatgggaatcttgagtaatgatagcttatttgtggttctaaagataaacttg

SEQ ID NO: 287278 - DNA, 201 bp, Homo sapiens
gtcattatctagtaataaacaatgatttatctttactttctgactgtttagactcctcgtgaagtggcccagcaggctgtggatgcggatgtgcatgctgwgggcataagcaccctcgctgctggtcataaaaccctagttcctgaactcatcaaagaacttaactcccttggacggccagatattcttgtcatgtgtgga

SEQ ID NO: 287279 - DNA, 201 bp, Homo sapiens
tatctttactttctgactgtttagactcctcgtgaagtggcccagcaggctgtggatgcggatgtgcatgctgtgggcataagcaccctcgctgctggtcrtaaaaccctagttcctgaactcatcaaagaacttaactcccttggacggccagatattcttgtcatgtgtggaggggtgataccacctcaggtatttttt

SEQ ID NO: 287280 - DNA, 201 bp, Homo sapiens
tatctacctctgtgaaacttataagttgttattaaaaaccacactacaataataataccttccataatttatagattaaaaccaaggcttagatgattatrtaacttactaaaaattaaaaacagaataaagtttagagttattatttgaacccagggcttcttattgtaatttctttcaccagaatgatggcatctgata

SEQ ID NO: 287281 - DNA, 201 bp, Homo sapiens
tagactcctcgtgaagtggcccagcaggctgtggatgcggatgtgcatgctgtgggcataagcaccctcgctgctggtcataaaaccctagttcctgaackcatcaaagaacttaactcccttggacggccagatattcttgtcatgtgtggaggggtgataccacctcaggtattttttatctctatttttctagtactg

SEQ ID NO: 287282 - DNA, 201 bp, Homo sapiens
tgacgtaggagaatcacttgaacctgggaatcggaggttgcagtgagccaagatgacgccactgcactccagcctgggcaacaagagcacaactacgtctmaaaaaaaaaaaaaaaaaaaccaaagaaagaaagaaaacagaatttgatgatgagaaggaagcaaaagtcataagttagtactctcatataattgtaagag

SEQ ID NO: 287283 - DNA, 201 bp, Homo sapiens; identical to SEQ ID NO: 58746

SEQ ID NO: 287284 - DNA, 201 bp, Homo sapiens
attagttgggcgtggtggtgcatgcctataatcccagctacttgggaagctgacgtaggagaatcacttgaacctgggaatcggaggttgcagtgagccargatgacgccactgcactccagcctgggcaacaagagcacaactacgtctaaaaaaaaaaaaaaaaaaaaccaaagaaagaaagaaaacagaatttgatga

SEQ ID NO: 287285 - DNA, 201 bp, Homo sapiens
catgactatgaatggagcagttattccagttcttgcaaattttatagtaactggagaagaacaaggtgtacctaaagagaagcttactggtaccatccaawatgatatactaaaggaatttatggttcgaaatacatacatttttcctccagaaccatccatgaaaattattgctgacatatttgaatatacagcaaaggt

SEQ ID NO: 287286 - DNA, 201 bp, Homo sapiens; identical to SEQ ID NO: 58748

SEQ ID NO: 287287 - DNA, 201 bp, Homo sapiens
tttatatatttagctggtcagcagggattatcagttgcctttgatctggcgacacatcgtggctatgattcagacaaccctcgagttcgtggtgatgttgkaatggctggagttgctattgacactgtggaagataccaaaattctttttgatggaattcctttagaaaaaatgtcagtttccatgactatgaatggagca

SEQ ID NO: 287288 - DNA, 201 bp, Homo sapiens
atttttctttatatatttagctggtcagcagggattatcagttgcctttgatctggcgacacatcgtggctatgattcagacaaccctcgagttcgtggtratgttggaatggctggagttgctattgacactgtggaagataccaaaattctttttgatggaattcctttagaaaaaatgtcagtttccatgactatgaa

SEQ ID NO: 287289 - DNA, 201 bp, Homo sapiens
ggagaaagtaaagagataacatctgctatcaagaggtaatatgtaaggtttcttaggccagaatttcatcttttctgttagcacaatccccttgaatctastgggagcttaatttccttacatacaactgagaaaatttttgaattttataataataaatagtaaattaaatattaattatatagactatataacatataa

SEQ ID NO: 287290 - DNA, 201 bp, Homo sapiens
aagagagatactatggacttacctgaagaacttccaggagtgaagccattcacacgtggaccatatcctaccatgtatacctttaggccctggaccatccrccagtatgctggttttagtactgtggaagaaagcaataagttctataaggacaacattaagggtgagattttaatgtaagacataatatttatgataagt

SEQ ID NO: 287291 - DNA, 201 bp, Homo sapiens
cttgtattccaagagagatactatggacttacctgaagaacttccaggagtgaagccattcacacgtggaccatatcctaccatgtatacctttaggcccyggaccatccgccagtatgctggttttagtactgtggaagaaagcaataagttctataaggacaacattaagggtgagattttaatgtaagacataatatt

SEQ ID NO: 287292 - DNA, 201 bp, Homo sapiens
gtccaatgatatattcactatgccattttattgacttttccttgtaaagcaatgcacactaatttagtaagtatttggtttctgtgatgtgttcagttgcrtgctgggtgacatgtgaaataaactcatccttgaggaatttacagctcttgacagtatcttttgagtagactactttgggaggaagaatagcagccactt

SEQ ID NO: 287293 - DNA, 201 bp, Homo sapiens; identical to SEQ ID NO: 58755

SEQ ID NO: 287294 - DNA, 201 bp, Homo sapiens
ccacatgatacagagtctttgaaaaattccatgaggagtgtgacatagtcatatttacattgatgtcattgtatggaagggattcgtatagaatggagtasaaaaggagtaagactggtcagtaagaccagctaagaggctactgaggaaaaagactgaaactacaggactgatagtaattgtgaagaagaggggccaaag

SEQ ID NO: 287295 - DNA, 201 bp, Homo sapiens; identical to SEQ ID NO: 58757

SEQ ID NO: 287296 - DNA, 201 bp, Homo sapiens
aaaataatgaaaaatggaacttgggtaaattttttctcatatacttgtatctatctatatatgtattttcacatacatggatgcacacaggcaagcatatktacaaagtgtgtgtggatgtctaaccattgtatatatgtacatgtttgtgggtagatgtcattaacattttgaagatgacactgttgatgatcacagtgt

SEQ ID NO: 287297 - DNA, 201 bp, Homo sapiens; identical to SEQ ID NO: 58758

SEQ ID NO: 287298 - DNA, 201 bp, Homo sapiens; identical to SEQ ID NO: 58759

SEQ ID NO: 287299 - DNA, 201 bp, Homo sapiens
ctttttctaggtcagttcttatttctattgggtgtttccatgctccaccatgttaagagctaagaatcagctttttttactttcacctcattacctgaggyaggtaaaagaatcatcaggctccaggctcatacagcaacgacttctacaccagcaacagccccttcacccagaatgggctgccctggctaaaaagcagct

SEQ ID NO: 287300 - DNA, 201 bp, Homo sapiens
tgaatgaaaaaattaattaggaggctgtagtatatcttccacatgatacagagtctttgaaaaattccatgaggagtgtgacatagtcatatttacattgwtgtcattgtatggaagggattcgtatagaatggagtagaaaaggagtaagactggtcagtaagaccagctaagaggctactgaggaaaaagactgaaact

SEQ ID NO: 287301 - DNA, 201 bp, Homo sapiens
tatctagtaataaacaatgatttatctttactttctgactgtttagactcctcgtgaagtggcccagcaggctgtggatgcggatgtgcatgctgtgggcrtaagcaccctcgctgctggtcataaaaccctagttcctgaactcatcaaagaacttaactcccttggacggccagatattcttgtcatgtgtggaggggt

SEQ ID NO: 287302 - DNA, 201 bp, Homo sapiens
gccaatatttctaataaaaaatagaattaaatttggctgtacttctttgtaaatttgaggaatatcttgtctccagctatttagagaacacaattaagttscacattttaacaaattacattaaaatgtaaacataatgttgagacagttttttctaatttttccattttagaatacagaattcatctattattatttttt

SEQ ID NO: 287303 - DNA, 201 bp, Homo sapiens
ggctgtggatgcggatgtgcatgctgtgggcataagcaccctcgctgctggtcataaaaccctagttcctgaactcatcaaagaacttaactcccttggayggccagatattcttgtcatgtgtggaggggtgataccacctcaggtattttttatctctatttttctagtactgtgatgggaatcttgagtaatgatagc

SEQ ID NO: 287304 - DNA, 201 bp, Homo sapiens
tgaagcaaaatttcttccatatgcataaaactgtaattttatgttaggtttaaagttacataaatgtacgtgcactgatcttaattcaaattaagttcttygaaattaaaatatagaccttgattttctagtgtgtgatacaattagttttattttctgctctatattgttaactttaattaaattctggacctaacgtta

SEQ ID NO: 287305 - DNA, 201 bp, Homo sapiens
attgatgtcattgtatggaagggattcgtatagaatggagtagaaaaggagtaagactggtcagtaagaccagctaagaggctactgaggaaaaagactgraactacaggactgatagtaattgtgaagaagaggggccaaagttataaaatatcaggtgcaggaagcagaaaaggggaagaaatgaaatcagactaatac

SEQ ID NO: 287306 - DNA, 201 bp, Homo sapiens; identical to SEQ ID NO: 58765

SEQ ID NO: 287307 - DNA, 201 bp, Homo sapiens; identical to SEQ ID NO: 58768

SEQ ID NO: 287308 - DNA, 201 bp, Homo sapiens
atgtttttcagggttcataaattcatggaacgtgaaggtcgcagacctcgtcttcttgtagcaaaaatgggacaagatggccatgacagaggagcaaaagktattgctacaggatttgctgatcttggttttgatgtggacataggccctcttttccaggtactaaaaactgttggggggaatttcaaaagtatttactag

SEQ ID NO: 287309 - DNA, 201 bp, Homo sapiens; identical to SEQ ID NO: 58770

SEQ ID NO: 287310 - DNA, 201 bp, Homo sapiens
tatttttaaatgtttttcagggttcataaattcatggaacgtgaaggtcgcagacctcgtcttcttgtagcaaaaatgggacaagatggccatgacagagragcaaaagttattgctacaggatttgctgatcttggttttgatgtggacataggccctcttttccaggtactaaaaactgttggggggaatttcaaaagt

SEQ ID NO: 287311 - DNA, 201 bp, Homo sapiens
aaattttatagtaactggagaagaacaaggtgtacctaaagagaagcttactggtaccatccaaaatgatatactaaaggaatttatggttcgaaatacawacatttttcctccagaaccatccatgaaaattattgctgacatatttgaatatacagcaaaggtatactttgtggttattataggtttttctatagttcc

SEQ ID NO: 287312 - DNA, 201 bp, Homo sapiens
ccatgactatgaatggagcagttattccagttcttgcaaattttatagtaactggagaagaacaaggtgtacctaaagagaagcttactggtaccatccamaatgatatactaaaggaatttatggttcgaaatacatacatttttcctccagaaccatccatgaaaattattgctgacatatttgaatatacagcaaagg

SEQ ID NO: 287313 - DNA, 201 bp, Homo sapiens
ataaactgatatttaataaaagcactttgaatgaaaaaattaattaggaggctgtagtatatcttccacatgatacagagtctttgaaaaattccatgagkagtgtgacatagtcatatttacattgatgtcattgtatggaagggattcgtatagaatggagtagaaaaggagtaagactggtcagtaagaccagctaag

SEQ ID NO: 287314 - DNA, 201 bp, Homo sapiens
ctaactactgatatatttttaaatgtttttcagggttcataaattcatggaacgtgaaggtcgcagacctcgtcttcttgtagcaaaaatgggacaagatkgccatgacagaggagcaaaagttattgctacaggatttgctgatcttggttttgatgtggacataggccctcttttccaggtactaaaaactgttggggg

SEQ ID NO: 287315 - DNA, 201 bp, Homo sapiens
gttcttgcaaattttatagtaactggagaagaacaaggtgtacctaaagagaagcttactggtaccatccaaaatgatatactaaaggaatttatggttcraaatacatacatttttcctccagaaccatccatgaaaattattgctgacatatttgaatatacagcaaaggtatactttgtggttattataggtttttct

SEQ ID NO: 287316 - DNA, 201 bp, Homo sapiens
tctattacccaacataatgtcggtcataaactgatatttaataaaagcactttgaatgaaaaaattaattaggaggctgtagtatatcttccacatgatasagagtctttgaaaaattccatgaggagtgtgacatagtcatatttacattgatgtcattgtatggaagggattcgtatagaatggagtagaaaaggagta

SEQ ID NO: 287317 - DNA, 201 bp, Homo sapiens
aattagtatctaactactgatatatttttaaatgtttttcagggttcataaattcatggaacgtgaaggtcgcagacctcgtcttcttgtagcaaaaatgrgacaagatggccatgacagaggagcaaaagttattgctacaggatttgctgatcttggttttgatgtggacataggccctcttttccaggtactaaaaac

SEQ ID NO: 287318 - DNA, 201 bp, Homo sapiens; identical to SEQ ID NO: 58778

SEQ ID NO: 287319 - DNA, 201 bp, Homo sapiens; identical to SEQ ID NO: 58779

SEQ ID NO: 287320 - DNA, 201 bp, Homo sapiens
aatctcttgatctctgttttattctctcttcatgtaaattgtccctttccttgactttttccatagatcaaatccagcagggatcaagctttggctgaacrttgtcttgctgcactaaccgaatgtgctgctagcggagatggaaatatcctggctcttgcagtggatgcatctcgggcaaggtgaagatatataagtttg

SEQ ID NO: 287321 - DNA, 201 bp, Homo sapiens
taagagcacactgtcagacatctggatggtcacttactgagcaggtatgtatataatttaaaatgtagaattttaataaagttatatatatatattttttytgagcaatgtggcacaagcaggaaatagaattaagaagctatctgttaatatttgaaatgataaatattctgaagcataatgtatacttaggtttgtaat

SEQ ID NO: 287322 - DNA, 201 bp, Homo sapiens
tgcaatatctatcacctgtttctttgagtttttgttttttatcaaatattttaggatccctacaataatattgtccgtactgcaatagaagcaatggcagmagtatttggagggactcagtctttgcacacaaattcttttgatgaagctttgggtttgccaactgtgaaaagtgctcgaattgccaggaacacacaaatc

SEQ ID NO: 287323 - DNA, 201 bp, Homo sapiens
aagaaagcaataagttctataaggacaacattaagggtgagattttaatgtaagacataatatttatgataagtcatatgcctcctagttttttatttttkgggggttaatctctgtaaagatgatattcactctataattttgtagttaaagactatactctgaaaaaagtggatttttttaacttctgtggtcaaaaag

SEQ ID NO: 287324 - DNA, 201 bp, Homo sapiens
gatgctttcataatgcattaaaaaattcttattttacatttttacagtcatttacttatgtaataaaatgtttaattatattgaatattatggtaaacagrtatctttatcacaaaataatgaagttaatggaaccaccatttcatgtttcagatgtacagtgggagaaatcacagatgccctgaaaaaggtatttggtga

SEQ ID NO: 287325 - DNA, 201 bp, Homo sapiens
atatatataattattaggtcattcagtcatttcttggttgacaaatgttgaaaagagaattggatgcataaaggcatccagaataaatttttcttaagtawtttcagaagagatgctttcataatgcattaaaaaattcttattttacatttttacagtcatttacttatgtaataaaatgtttaattatattgaatatta

SEQ ID NO: 287326 - DNA, 201 bp, Homo sapiens
cgggttgaagtgattctcatgcctcagcctcctgagtacctgggattactggtgtgcgccaccatgcccagctaatttttgtatttttagtagagactggrtttcaccgtgttggccaggctggtcttgaacccctgacctcaggtgatccacctgcctcggcctcctgaagtgctgggattccaggcgtgaaccaccatg

SEQ ID NO: 287327 - DNA, 201 bp, Homo sapiens
accaattacaaagtgaataattcttacctgaagcaaaatttcttccatatgcataaaactgtaattttatgttaggtttaaagttacataaatgtacgtgyactgatcttaattcaaattaagttcttcgaaattaaaatatagaccttgattttctagtgtgtgatacaattagttttattttctgctctatattgttaa

SEQ ID NO: 287328 - DNA, 201 bp, Homo sapiens; identical to SEQ ID NO: 58788

SEQ ID NO: 287329 - DNA, 201 bp, Homo sapiens; identical to SEQ ID NO: 58790

SEQ ID NO: 287330 - DNA, 201 bp, Homo sapiens
aagatgaggttacattgtttctctgcagctcaaatcaaaagtaaattgcattttaaaatatatttttcttacagactttatgtaattatgaaaactttatrtacctaaaaataaagattagagaattgatgttgctttaattttctcccaagacttaagaggttttgtgttttttggaatatacttgttagttgtcttttc

SEQ ID NO: 287331 - DNA, 201 bp, Homo sapiens
tccgaagtagctgggattacaggcatgcgccaccatgcctggctaattttgtatttttagtagacacggggtttcaccatgttggccaggctattctcaawcttctgatctcaggtgatccacccgcctcagcctcccaaagtgctagaattataggcatgagccaccactcctggccttttttgttcgtttctttttttt

SEQ ID NO: 287332 - DNA, 201 bp, Homo sapiens
ccgaggcgggcggatcacgaggtcaggagatcgagaccatcctggctaacacagtgaaaccccgtctctgctaaaaatacaaaaaattagccgggcgtggmggcgggcacctgtagtcccagctactcgggaggctgaggcaggagaatggtgtgaacccgggaagcggagcttgcagtgagccgagattgtgccactgca

SEQ ID NO: 287333 - DNA, 201 bp, Homo sapiens
tgaccttgtgatccgcccatgtcagcctctcaaagtgctgggattacaggtgtgagccactgcacctggccccgagaggatatattttcttagttcagtarcacatggatagcaaatctactagaaaaatttggagctgttcaaaagaaactaccatcagagtaaacaggcaacctacagaacgggagaaaatttttacaa

SEQ ID NO: 287334 - DNA, 201 bp, Homo sapiens
acttaattctgttcaatccctcccccaggaggttccatgctcactggtcttattatatgtaagtctttgacaatgatctaagaaaagctgagttaaaaaawtttttttttctttgtctgggggtggtggcttatgcttgtaatcccagcactttggaaggctaaggtggacgcatcacttgaggtcaggagttcaaaacca

SEQ ID NO: 287335 - DNA, 201 bp, Homo sapiens
ttgaaggctgccgtactgaggtgatgggccaagctggagatatccccaaagcccatgttgacaccctgtcctgcaagcggatggactctgtgggctgcatycctaagaataaagcagagttcaggtgtgacctctggcagcaaagtgagaagggagtggccctgctctgttatcgtcttacccaatgagcgccacccgagg

SEQ ID NO: 287336 - DNA, 201 bp, Homo sapiens
gcttgaacccaggaggtggagcttgcaatgagccgagatcatgccactgcactccatccagcctgagcgacagagcgagactccgtctcaaaaaaaaaaaatcgaaaacatgcaaaaattatctgggtgcagtggttcatgcctgaagtcccagccctctgggaggttgaggcaggaggattgcaggagtttaaggccgca

SEQ ID NO: 287337 - DNA, 201 bp, Homo sapiens
ttagtagagacagggtttctccatgttggtcaggctggcgtaaaccttattatacataccatctgccagcatgatcatggctttttcttttctttttttttgagatggagtttcgctcttgtttcccaggctggagtgcaatagcacgatctcggcccaccgcagcctccacctcccaggttcaagcaattctcctgcctc

SEQ ID NO: 287338 - DNA, 201 bp, Homo sapiens
tttgtatttttagtagagacagggtttctccatgttggtcaggctggcgtaaaccttattatacataccatctgccagcatgatcatggctttttcttttctttttttttgagatggagtttcgctcttgtttcccaggctggagtgcaatagcacgatctcggcccaccgcagcctccacctcccaggttcaagcaattc

SEQ ID NO: 287339 - DNA, 201 bp, Homo sapiens
caggcatgcgccatcatgcccggctaatattctatttttagtatagatgggttttcaccatgttggtcaggctggtctcaaactcctgacttcaggtgatscgcccgcactttggctttttctataagaaggaagccactggaaggttttttgttttttggcgttttgttttgttttgttttgtttgagacagagtctcac

SEQ ID NO: 287340 - DNA, 201 bp, Homo sapiens
cagaatagaagttcattcagggaaatagtggatttaaaataatggttttcatttattacaaattgagcatctactgtgtgccatatgatgatacaggaatragcctgacatgttctttaggagatcatcaaaagtatggcatcattactgccacagcttgtgtggtaaccacatgcactatgcctcatgcacacaacagtt

SEQ ID NO: 287341 - DNA, 201 bp, Homo sapiens
ctgaatgcctcatgcatatgtaatgtgtcatatatatttcatgtgtgcctcgtatatttaatgcctcttgaatcttaggtctttctttgtcctcctgtctstctccatctgtttcagtacctgcaggctctactttatctgtagtaagttatttatccccagttttgggcacagtgtctaggctctattacatcaggtcaa

SEQ ID NO: 287342 - DNA, 201 bp, Homo sapiens
ctgaaaggggcattctatttgttcatcctttgctttctctaaaatctattgtttggttttacactgaacaactagtatgactctgcagggttttttgtttktttttttttgtttgttttttcgtgaaaacagatacctaggatgttttttttcacctttgaaatctctggaagaaaaacaaatatttacttaatagaaata

SEQ ID NO: 287343 - DNA, 201 bp, Homo sapiens
gagctgaaaggggcattctatttgttcatcctttgctttctctaaaatctattgtttggttttacactgaacaactagtatgactctgcagggttttttgkttgtttttttttgtttgttttttcgtgaaaacagatacctaggatgttttttttcacctttgaaatctctggaagaaaaacaaatatttacttaatagaa

SEQ ID NO: 287344 - DNA, 201 bp, Homo sapiens
tgaagggcagaggaaagattaaatccctaatccaataataaggttttcttccatctcctagcaagccagatatattttatgtccactccctcttgctactrtgggccctgatcttgcctaactatatgacctctggatacttccccatagtacctgaatccttacctaagtccttcccattgaaggctgccgtactgaggt

SEQ ID NO: 287345 - DNA, 201 bp, Homo sapiens; identical to SEQ ID NO: 58847

SEQ ID NO: 287346 - DNA, 201 bp, Homo sapiens
aatgcagagatataagtctctggtctttaatcactgtgggggccattttgtaaaacacacatactgtccagcagactcctttggtcatcccaaatacctcygaactccagggaagatgcattctaactccacgaacttacctattttgttaaccttgattagaccttctggagaagtaaccaatttgtccatcttaggagc

SEQ ID NO: 287347 - DNA, 201 bp, Homo sapiens
cttggcctcccaaagttctgggattacaggtgtgagacaccactgcgcctggcctggattctccttcaaagcggcccacttctctaggtttctcctgctayagagcagagagaggttggagccctatgccacctccctcttcttgctcccacaaagtatgttgacagaatagaccagtgccagccactaaatggatcgttc

SEQ ID NO: 287348 - DNA, 201 bp, Homo sapiens
atgagagtttttatttttttctgtaacgcccatcctgcctgcagtagaccctttgggcttaagaggtcctacagattctaatagtttcctctttgtagatrtgttaacatatttaaaatacttaggacatggcctggtacgtgacagatggtgtttaacatcattgtcatatgaagaacactctctgtgggccaatggagg

SEQ ID NO: 287349 - DNA, 201 bp, Homo sapiens
tttgtttgggctatggacaaggtactgtgctgggcaccatgaatgtgggaaattatctcaatgcaatggtagcctccgagtgtattaccaggcaagctatygcacaggtcacagaacagaaagactagcagcccaaattaagatgccaagtcacatggtttatttatttatttatttatttatttatttattattattttt

SEQ ID NO: 287350 - DNA, 201 bp, Homo sapiens
cagtctgagtaacaatgatgtgatcatagcccactgcagcctcaaactcctaggcttaaattatcctcttgcctcagtctcctgaatagctaggactacasgcatgtgccaccacactccctattcactatttttaagccctttttatacatagttattgcttagatgtgggccgtaacacctaaaagcctagcaagtact

SEQ ID NO: 287351 - DNA, 201 bp, Homo sapiens; identical to SEQ ID NO: 58843

SEQ ID NO: 287352 - DNA, 201 bp, Homo sapiens
ctgagtaacaatgatgtgatcatagcccactgcagcctcaaactcctaggcttaaattatcctcttgcctcagtctcctgaatagctaggactacaggcaygtgccaccacactccctattcactatttttaagccctttttatacatagttattgcttagatgtgggccgtaacacctaaaagcctagcaagtactcttc

SEQ ID NO: 287353 - DNA, 201 bp, Homo sapiens
gtgggccagccgcagtggctcacgcctgtaatcccagcactttgggaggccgaggcaggcagatcacgaggtcaggagttcaagaccagcttggccaacayggtgaaaccccatctctactaaaaataagaaaattagccgggtgtggtggtgggcgcctgtaatcccagctacttgggaggctgaggcaggataatcact

SEQ ID NO: 287354 - DNA, 201 bp, Homo sapiens
gtagatgtgttaacatatttaaaatacttaggacatggcctggtacgtgacagatggtgtttaacatcattgtcatatgaagaacactctctgtgggccartggaggtgtgccttaaaattcttcatcttgcctgattttgtttgcataacttctggagagtctgtgtcctcctcatctaggccacctttccattttttgt

SEQ ID NO: 287355 - DNA, 201 bp, Homo sapiens
tcttcaaaaacccacagtaaaactcccctccctccagttggccaccagtctgccaccaaacatgaacaaattctgctgctaatcggtttcccttgtgatcyggttcctgaggtcttcggatctgtgcaatgaattatttattgttttattaaaccgacagtggtgtcccagagaggaaccataaataaaatggaaatctgg

SEQ ID NO: 287356 - DNA, 201 bp, Homo sapiens
catccagaagacgtcgcctctttttaactcctccagtctttctctgtgtttcccccctgtatgcttccacagcatcctatgcatacttctatcactgtacrgagattgtcatttacggtcttccttacttgactatgaacttcctgaaagcggagactgttctcagtatctccagagcctgctacatagaaaggacaatta

SEQ ID NO: 287357 - DNA, 201 bp, Homo sapiens
tctactccagaattattagtatttgttgagcacctacaatgtactaaagatgttccatggattttacaaaagttctctcattttgaaagtctttattcaaycctgagcagttagtgatactatttacattttgaacccacatctatctactaagcttactcttaagccccatgctgaaattcgctcggcctttccctagga

SEQ ID NO: 287358 - DNA, 201 bp, Homo sapiens
aatggaagctctggaaaagtcccatgggaaactttttccagaactcaagagaagcttatcttgttgcagggacttattccaaagatcttggcatgcctccraggactaatgtgaagtgacagtgaacaaagcagctgtcattctgcatcagccaagtgtcatggacccattagatacctgcccttagccaagtgctgtggt

SEQ ID NO: 287359 - DNA, 201 bp, Homo sapiens
gctaaccaccacccaggcagctgtttcagtcagcctaacagcagcccacaaccctcaaaaggttattatttattatttctattgttttgcatttccgtgtrtacactcctccacataatctagaccaagcattatagttacaaagtagaaagggacagctgactggttactcctttttcctgactcaaaaccacctttctg

SEQ ID NO: 287360 - DNA, 201 bp, Homo sapiens; identical to SEQ ID NO: 58840

SEQ ID NO: 287361 - DNA, 201 bp, Homo sapiens
gttaatgaggccaaggaggctttctacctacctaccatattatctttctcctgatcctgcttcttcaggtaacttaatactgacattatgtctttctccaktttacattgctttttctttaagtcctcattactttttgccagtatccgtgaagtatcacgatacttaatcctagagagttctgtgacttccaacctggcc

SEQ ID NO: 287362 - DNA, 201 bp, Homo sapiens
aacccaagaggaaacagaactcggcttttggcatccaccctggctacgcttgggggcagctggcgagccgagaccttagtgggcttcagaaggctgacagsatactgcagcatggcaccagctgtgtcgatgaagtccgtgtggtcagcatcactccactgagcagcatcagccacaagacaaacaaggtgaaatgtgagt

SEQ ID NO: 287363 - DNA, 201 bp, Homo sapiens
ttcacctttgaaatctctggaagaaaaacaaatatttacttaatagaaatagaagctggagaagtttttcaaaaactacaatgatatattaatacaaaatwtgggtgacccctgaagaaactgcagtcacacagaggaaggaaagctgctgcctagaatgccattaattcactttctgagggaaaagagggacccagagtt

SEQ ID NO: 287364 - DNA, 201 bp, Homo sapiens
acatgattggtgagttcaccccaggtgtcagtccagagaggaaggtggatagggctgtggtggggaaggtcaaggagaaagagcacttgaggtgctttgtyggggtgattacccacctcttttctagtcactcgaacaaaagggtggaaatgacttagagtcttttggaggtgagagatgaccaaaacaactatatgaggt

SEQ ID NO: 287365 - DNA, 201 bp, Homo sapiens
ctcctgatcctgcttcttcaggtaacttaatactgacattatgtctttctccattttacattgctttttctttaagtcctcattactttttgccagtatcygtgaagtatcacgatacttaatcctagagagttctgtgacttccaacctggcctcccaaagggaggcattggccttggctctgtccaccacagattcatc

SEQ ID NO: 287366 - DNA, 201 bp, Homo sapiens; identical to SEQ ID NO: 58849

SEQ ID NO: 287367 - DNA, 201 bp, Homo sapiens
agtctctggtctttaatcactgtgggggccattttgtaaaacacacatactgtccagcagactcctttggtcatcccaaatacctccgaactccagggaakatgcattctaactccacgaacttacctattttgttaaccttgattagaccttctggagaagtaaccaatttgtccatcttaggagcaatttggaatgaga

SEQ ID NO: 287368 - DNA, 201 bp, Homo sapiens
ttcatttcatctcaaatcagacttctgggcaagatgttctttagagtaagcaaacctacaacctaaaaatctcttcaagaggcatctctggtcttgtgacragacctcttcaaaaacccacagtaaaactcccctccctccagttggccaccagtctgccaccaaacatgaacaaattctgctgctaatcggtttcccttg

SEQ ID NO: 287369 - DNA, 201 bp, Homo sapiens
  misc_feature (1)...(201): n = A,T,C or G
gaggcactggtagaatagagcctttttagtaagtctgtagcagccagaagagcagtgttgtgacgctgtctttctgtttcataacctgtgaggtggctcanggaacctgaagggcagaggaaagattaaatccctaatccaataataaggttttcttccatctcctagcaagccagatatattttatgtccactccctctt

SEQ ID NO: 287370 - DNA, 201 bp, Homo sapiens
gggggcagctggcgagccgagaccttagtgggcttcagaaggctgacagcatactgcagcatggcaccagctgtgtcgatgaagtccgtgtggtcagcatmactccactgagcagcatcagccacaagacaaacaaggtgaaatgtgagtagcagggaattaaaaattcaataaagaaaccttgtttgtaaccaaagctta

SEQ ID NO: 287371 - DNA, 201 bp, Homo sapiens
gtactcacaagtattctcatttttcaatgagagtcagtcagtgagtcattaaggaaggtacggtattctgagtgccaagccaatagttaggagacttgtgrttgaagctctgctctgttatactccatttcaaattaaaaagtttattttaaatgtggttgtagatccttcgtcaccatttctctagggaggacttaatcc

SEQ ID NO: 287372 - DNA, 201 bp, Homo sapiens
aattctcctgcctcagcctccccagtaacagactataggtgcgtgccaccatgccaggctaatttttgtatttttggtagagacagagtttcaccatgctrgccaggctggtcttgaactcctggcctcaggtgatccacccgccttggtctcccaaagtgttgagatttacaggcatgagccaccgcccccggctgtaaa

SEQ ID NO: 287373 - DNA, 201 bp, Homo sapiens
ggactttgattcttaatgaatgggcaagaaaagaccttctggtttgtgaagaaaaagaggcaacaatagcaacagctttcctccaagtgattattgtagcraagtcaagcctgaaacaatggagaatgaagttatgcctgactcattttgttattacacccaaatgagttcattgtacagaatgggcctttttgacacgtg

SEQ ID NO: 287374 - DNA, 201 bp, Homo sapiens
tcactgggcatggtggctcattcctgtagtctagctagtcaggaggctaaggcaagaggatcatttgagctcaggaggtgaaggttgcagtgagctgtgtytgcaccactgcacttgagcctaggtgataaagcaagacatcttctcatttaaaaaaaaaaaaaaaagggccgggtgtggtggctcacacctgtaatatca

SEQ ID NO: 287375 - DNA, 201 bp, Homo sapiens
caaagtcataaaagacattactgcttctgccctgctcttcttggattgactgctctggaggaagccagccactgggttataaagacattcaagcagccctrtggaggatctacacggggagctactgagacttcctgcccacagctggcatcaacttgccaaccattgagtgagccatcttggaggtgggtcttccaggcc

SEQ ID NO: 287376 - DNA, 201 bp, Homo sapiens
taaaaaagggatgagataataaatatttttattgcttaatacatgtatttatttacttaattaatttattttttgagacagggtcttgctctgtcacccakgctggagtgcagtggcatgattctagctcactgcagcttcgaactcctgggcttaagtgatccttctgcctcagcctcccaagtagctgggactgcaagt

SEQ ID NO: 287377 - DNA, 201 bp, Homo sapiens
agctagttggtctaacttgtgtgtctttgtcctataagcctctgcaggtgtgcgagcaggattgcttctgcaacaaaagcctccacccagccacatcttgkgaaaagaatggccacttcttggggcacagtctttttcatgctggtggtatcctgtgtttgcagcgctgtctcccacaggaaccagcagacttggtttgag

SEQ ID NO: 287378 - DNA, 201 bp, Homo sapiens
ctttatctgtagtaagttatttatccccagttttgggcacagtgtctaggctctattacatcaggtcaacacagaacaatcaactggtttatagacttttytggtggtggtagcatctttatccaacaaaaacttatgtagaatatcagtaatacagccgggcctgatggctcacgcctgtaatcctaacactttgggagg

SEQ ID NO: 287379 - DNA, 201 bp, Homo sapiens
cttgctactgtgggccctgatcttgcctaactatatgacctctggatacttccccatagtacctgaatccttacctaagtccttcccattgaaggctgccrtactgaggtgatgggccaagctggagatatccccaaagcccatgttgacaccctgtcctgcaagcggatggactctgtgggctgcatccctaagaataaa

SEQ ID NO: 287380 - DNA, 201 bp, Homo sapiens
atctctctagaaggcctgatgggccacaacctgggccagaagcattcagttcagatatgagaatggtgggtgtaggggcaatggccaatgggccatggccrgaaggaaattgttacagagtagtgggaagcctgcaaagactggcttctgtccgttttgccttggtttgcccatgtggatattctttgccaatattttctg

SEQ ID NO: 287381 - DNA, 201 bp, Homo sapiens
ccatcctgcctgcagtagaccctttgggcttaagaggtcctacagattctaatagtttcctctttgtagatgtgttaacatatttaaaatacttaggacayggcctggtacgtgacagatggtgtttaacatcattgtcatatgaagaacactctctgtgggccaatggaggtgtgccttaaaattcttcatcttgcctga

SEQ ID NO: 287382 - DNA, 201 bp, Homo sapiens
catggtgaaacctcatctctactaaaaatagaaaaattagctgggcatggtggcacgtgcctgtagtcccagctacttaggaggctgaggcaggagaatcrcttgaacccgggaggcggagattgcacagtgagccaagatcgcgccactgcgctccagcctggcaaggatccgtttcaaaaaaaaaaaaacaacaccttt

SEQ ID NO: 287383 - DNA, 201 bp, Homo sapiens
tgagaatatacaaccttattgtcacccatacacaaacacttaacagtaaacagtaccaagcagggattgataaaggagagatggtgtagaccaggggtgtycaatcttttggcttccttgggctacattggaagaagaagaattgtcttgggtcacacataaaatatactaacactaatgatggctgatgagcttaaaaaa

SEQ ID NO: 287384 - DNA, 201 bp, Homo sapiens
tcacaggccccacctgagacctactgattcagaaatactggcaatgaggcccagcagtctatgccctccaggtggttctgatgcgtgctaaagtttcagamccactagactagagcagagggttattgtatggaacaagtaggcaaaacactctaaaaaggtaggctgggaactcattgtgaatgacttagaatgtcagac

SEQ ID NO: 287385 - DNA, 201 bp, Homo sapiens
aattctaataattatggcttcctgatttacatcctacaacagatttaaaaagaaaattaggaggtaatggtggtttattgaaggagctgggcacatgacartactgatcagtgaaaatatatagcatgatgtcagaaaaaactagctcaaaaaggatagcaatctgggaccatttggtgacagaagggcaaacagtcctgt

SEQ ID NO: 287386 - DNA, 201 bp, Homo sapiens
aggctttctacctacctaccatattatctttctcctgatcctgcttcttcaggtaacttaatactgacattatgtctttctccattttacattgctttttmtttaagtcctcattactttttgccagtatccgtgaagtatcacgatacttaatcctagagagttctgtgacttccaacctggcctcccaaagggaggcat

SEQ ID NO: 287387 - DNA, 201 bp, Homo sapiens
tcctgatttacatcctacaacagatttaaaaagaaaattaggaggtaatggtggtttattgaaggagctgggcacatgacagtactgatcagtgaaaatakatagcatgatgtcagaaaaaactagctcaaaaaggatagcaatctgggaccatttggtgacagaagggcaaacagtcctgtagacctactgtagcccttg

SEQ ID NO: 287388 - DNA, 201 bp, Homo sapiens; identical to SEQ ID NO: 58845

SEQ ID NO: 287389 - DNA, 201 bp, Homo sapiens
aacctgggccagaagcattcagttcagatatgagaatggtgggtgtaggggcaatggccaatgggccatggccggaaggaaattgttacagagtagtgggragcctgcaaagactggcttctgtccgttttgccttggtttgcccatgtggatattctttgccaatattttctgcccaagagctgtgcttgctagagttgg

SEQ ID NO: 287390 - DNA, 201 bp, Homo sapiens
cttggacgctcttctaggttcttgggttacaccagtaaacaaaaagatttctgctcttgaggagcttatattctatcagaggaacacagacaataaatatmagtaagctttccagtatgttagaatgtgataagtggtgtggaaaaaagaaaagtggatcagagtaaggggagttgagaaagcaggtagaggtgggagcat

SEQ ID NO: 287391 - DNA, 201 bp, Homo sapiens
cttgaacccaggaggtggagcttgcaatgagccgagatcatgccactgcactccatccagcctgagcgacagagcgagactccgtctcaaaaaaaaaaaaycgaaaacatgcaaaaattatctgggtgcagtggttcatgcctgaagtcccagccctctgggaggttgaggcaggaggattgcaggagtttaaggccgcag

SEQ ID NO: 287392 - DNA, 201 bp, Homo sapiens
tcttcaaaatctcttgattagctgggcacagtggctcaaccctgttatcccagctattcaggaggctgaggctagaggattgcatgaggccaggagttcargaccagcctgggtaacatagtgagactccatctctacataaataaataaataagctcttgattttatgtaagaaggtcagactgctgtaagactttcaca

SEQ ID NO: 287393 - DNA, 201 bp, Homo sapiens
cttgccttggcctcccaaagtgctgggattacaggcatgagccactgcgcccagacacaccctgctaattttttaatattttgtagagatagcatttcacyatgttgcccaggctagtctcaaactcttggggtcaagcaatcctcccactttggcctcccaaagtgctaggattacaggcatgagtcatcatacctggcc

SEQ ID NO: 287394 - DNA, 201 bp, Homo sapiens; identical to SEQ ID NO: 58842

SEQ ID NO: 287395 - DNA, 201 bp, Homo sapiens
atttggtgacagaagggcaaacagtcctgtagacctactgtagcccttggaggcatctcaggtttacaggaaaatataactgataatcataatcatgactytgaactataaataaaagtggttttccctgtaggaaattatataattcacaatggaaacactttttattttttttttttgagatagagtttcgctcttgtt

SEQ ID NO: 287396 - DNA, 201 bp, Homo sapiens
ggtctcaaactcctgacctcatgatccgcccaccttggcctcccaaagtgctgggattacaggagtgagccaccgtgcccggcctacctttgttttttttkggggggtggggggcagagtcttactctgtcacccaggctggggtgcaatcctgtgatcttggctcactgcaacctctgcgtcctgagttcaagcaattct

SEQ ID NO: 287397 - DNA, 201 bp, Homo sapiens
agtcctgtagacctactgtagcccttggaggcatctcaggtttacaggaaaatataactgataatcataatcatgactttgaactataaataaaagtggtwttccctgtaggaaattatataattcacaatggaaacactttttattttttttttttgagatagagtttcgctcttgttgcccaggctggagtgcaatggc

SEQ ID NO: 287398 - DNA, 201 bp, Homo sapiens
caggtcctctgggattgtggtctctcaggcttccggggacatggaagaagggaagccagagtgtgacgttctgggaaagctgagtggggaggattcatgtstactccaggtataaagagacacaaaagaccatagaaggagatggagatagtgacaaacactggctggcaccagagtctcaacaaaaagaattggaaacag

SEQ ID NO: 287399 - DNA, 201 bp, Homo sapiens
gcagctggcgagccgagaccttagtgggcttcagaaggctgacagcatactgcagcatggcaccagctgtgtcgatgaagtccgtgtggtcagcatcactycactgagcagcatcagccacaagacaaacaaggtgaaatgtgagtagcagggaattaaaaattcaataaagaaaccttgtttgtaaccaaagcttaggct

SEQ ID NO: 287400 - DNA, 201 bp, Homo sapiens
tgtagtcccagctacttaggaggctgaggcaggagaatcgcttgaacccgggaggcggagattgcacagtgagccaagatcgcgccactgcgctccagccyggcaaggatccgtttcaaaaaaaaaaaaacaacacctttctgtatctccccctgcagcacatcatcagctgggtaaattgatactcacaaaggcagagtt

SEQ ID NO: 287401 - DNA, 201 bp, Homo sapiens
agagggacacaggaacaatgttacttttgaaggaggtagctttaggctagagaacttcaggaccagcatgaaattagtcaatcctgtattttacagttacytgggatttggattgaaagctgcaagactagcaaccctgggagccctggagacagaaggtttgtctgggtacctgtgctggggggggatggtgagggtgac

SEQ ID NO: 287402 - DNA, 201 bp, Homo sapiens
agaagaaaaagagaattttaatgtaaagtaagtttattaaattaaataagatcttgaaaatatgtatgatgggtcctgggcaggatgttctttttcatcarcgtaatctttctttaggagaggagtactcatttgcttgcaaaggccataatctgttcctggagaaaaaataaaagtgaatgaaactcttaacacagtaag

SEQ ID NO: 287403 - DNA, 201 bp, Homo sapiens
ggagacagaaggtttgtctgggtacctgtgctggggggggatggtgagggtgacacagatactccgcttgcttcttcccttccttgatagccattctatgraggaaaagattatgttgaattgggaggcaaatgttgtataatggacctaataatggcaaactccttttctagtttataagttcagaagttttgatgtata

SEQ ID NO: 287404 - DNA, 201 bp, Homo sapiens; identical to SEQ ID NO: 58844

SEQ ID NO: 287405 - DNA, 201 bp, Homo sapiens
tactatttacattttgaacccacatctatctactaagcttactcttaagccccatgctgaaattcgctcggcctttccctaggaatactttcaatgaatcrggcttgaaaggttcaggtagctgcaacctagcagaactgttcaaaataatccaagtgttacagcttcaaaaaaaggccaatgctaaccaccacccaggca

SEQ ID NO: 287406 - DNA, 201 bp, Homo sapiens
tactaaagatgttccatggattttacaaaagttctctcattttgaaagtctttattcaatcctgagcagttagtgatactatttacattttgaacccacayctatctactaagcttactcttaagccccatgctgaaattcgctcggcctttccctaggaatactttcaatgaatcaggcttgaaaggttcaggtagctgc

SEQ ID NO: 287407 - DNA, 201 bp, Homo sapiens
cccttaggtgtgaacttcaccacagcaggttcatgtcagctcatctaaggaatggagtgggaaggctcctcctagtttccagtgtatgtccaggtagagtytatcaggtttaaaaagttacaggatcctgatttgagctggcagggttaaatatatgcctttccataggtccagttcacctatacatttagatggtttggt

SEQ ID NO: 287408 - DNA, 201 bp, Homo sapiens
gcacctacaatgtactaaagatgttccatggattttacaaaagttctctcattttgaaagtctttattcaatcctgagcagttagtgatactatttacatkttgaacccacatctatctactaagcttactcttaagccccatgctgaaattcgctcggcctttccctaggaatactttcaatgaatcaggcttgaaaggt

SEQ ID NO: 287409 - DNA, 201 bp, Homo sapiens
aaaatcgaaaacatgcaaaaattatctgggtgcagtggttcatgcctgaagtcccagccctctgggaggttgaggcaggaggattgcaggagtttaaggcsgcagtgagctgtgattgctccactgcagcctgggtgacagagcaagaccttgtcaataaaattaaatttttttaaaaaccccaagtttttttggtattta

SEQ ID NO: 287410 - DNA, 201 bp, Homo sapiens
tgtgagatactgtattattttatccaagtcaatcaataatgatatttgcttagggagtcaacagaaagacataactaacaatcaatctcactatgggaaargaaaacaagtccactccttttgaaatctgattctctgcttccagagccattttccctcactctggctgtctttattctggtacacctctatattccagct

SEQ ID NO: 287411 - DNA, 201 bp, Homo sapiens
ccaaccccacaaagcctatctttgaaccctgagttaaggattcctgtcacaggatgttgtcatggaattaatttcataggattttaaggcccagcccccawggtgattcttttccacctcactggcttcttgcttgccttcctccctctctctcacttacttacctcttaccttgtgccctggattctttcagggactgat

SEQ ID NO: 287412 - DNA, 201 bp, Homo sapiens
ggtcaaacaattttgtctgttcctctcctaaccaatagctcttattcttaactacaggatagaagttcaaccttgaatagtgttctaacggatggttccarctctgctttggtagtacctaagaccaaatctagttattttaaatattttatttattgagacagggtctcactctgtacctaggctgaagtgcagtagtgc

SEQ ID NO: 287413 - DNA, 201 bp, Homo sapiens
cacccatcgtcctagctacttgggaggctgaggcaggagaatggtggcgtgaacctgcgggaggcggaggttgcagtgagccaagatcgtgccactgcacyccagcctgggcgacagagcgagactccgtctcaaaaaaaaaaaaagaaaaaagaaaaaataaataataaaaaataaaaggctatatcatttgacaagccg

SEQ ID NO: 287414 - DNA, 201 bp, Homo sapiens
tgctgggattacaggtgtgaggcactgctcctggcccctaaatgtaaacagtgctaagattaagaaaccctgaccttgaggaactccagttttcctttacrgatgagatcataggacacagtctgagctttgcaggaggccagatacaaatcaccaaaacaaaaagcacttaattgtttttgttggtttctcatttaatgt

SEQ ID NO: 287415 - DNA, 201 bp, Homo sapiens
gagttcaagaccagccagggcaatatggcagaaccccatctctaccaaaataaaaaaaatagccaggtatggaggcacacacgtgtaatcccaactactcrggaggctaaggaggaaggatcacttgagcccgggaggtgatgattgcagtgaaccgtgattgtgccactgcactccagccggggtgacagagtgagaccc

SEQ ID NO: 287416 - DNA, 201 bp, Homo sapiens
ctaccaaaataaaaaaaatagccaggtatggaggcacacacgtgtaatcccaactactcgggaggctaaggaggaaggatcacttgagcccgggaggtgaygattgcagtgaaccgtgattgtgccactgcactccagccggggtgacagagtgagaccctgtctcaaaaaaagatggggagtcagaaaagagggagggag

SEQ ID NO: 287417 - DNA, 201 bp, Homo sapiens
ccacccgcctcagcctcccaaagtgctagaattataggcatgagccaccactcctggccttttttgttcgtttctttttttttctttttttttttttttttgagacagggtcttgctctgtcacccatgctggagtgcagtggcatgatctcagttcactgcaacctctgcctcccgggttcaagtgaccctcccacctca

SEQ ID NO: 287418 - DNA, 201 bp, Homo sapiens
gagccaaggttgtgccactgcactccagcctgagcaacagagtgagactccacctcaaaaaaaaaaaaacaaagaggctttagggctttagggaaatggtraagaccttttttttccttctacatttcttgctttcttttttaaattgaaatagtgttatcagtgttaatgaaacactaagcatcaaaagacatggtaaat

SEQ ID NO: 287419 - DNA, 201 bp, Homo sapiens
ccacctcttttctagtcactcgaacaaaagggtggaaatgacttagagtcttttggaggtgagagatgaccaaaacaactatatgaggtctttttttttttaacatgtttattgaggtataattggcatacaataagtgcacatttaaagtatacaatttaagttttgtcatgtatacacccatgaatccatcagcacatt

SEQ ID NO: 287420 - DNA, 201 bp, Homo sapiens
caagcagtccttccacctcagccccctgagttgttgagactacaggcttgtgccaccatgcccagctcatttttaaatttttttatagagacctgctcagrctggcctcaaactcctaggctcaattgatcctcccacctcagcctcccaaagtactgggattataggtgtaagtcaccatgcttggccagaacacatggt

SEQ ID NO: 287421 - DNA, 201 bp, Homo sapiens
ctgacttcaggtgatccgcccgcactttggctttttctataagaaggaagccactggaaggttttttgttttttggcgttttgttttgttttgttttgttkgagacagagtctcactcttgttacccaggctagagtgcaatggcgcgatctcggctcactgcaacctccacctcctgggttcaagcgattctcctacctc

SEQ ID NO: 287422 - DNA, 201 bp, Homo sapiens
taaggaggcggtaacctcagagaggcagggttaaggggtgtttatcatgtaggatctcaaatgccagtgtaatcactttggctttttctttttcttttttytttttgagactgaattttgctcttgttgcccaggacggagtgcaatggcgctatctctgttcactgcaacctccacctcctgggttcaagtgattcttct

SEQ ID NO: 287423 - DNA, 201 bp, Homo sapiens
accaaacaccgcatgttctcactcataggtgggaattgaacaatgaggacacagggtggggaacatcacacaccggggcctgtcgtggggtggcgggagcrgggagggaaagcattaggagatatacctaatgtaaatgatgagttaatgggtgcagcccaccaacgtggcacatgtatgcatatgtaacaaacaaacctg

SEQ ID NO: 287424 - DNA, 201 bp, Homo sapiens
gtgtccaccagagaaatggtagcagaaatggaccctcagaggttgctctagtccttctttccagtactcctgcaagacattcctcacaactaggatcatttgggataacttcagggaagtcataggaaaacttacagagacagagcccagcatctgaagcagcctaacttttggtaaccagctctctcttctgttttgttc

SEQ ID NO: 287425 - DNA, 201 bp, Homo sapiens
taagcaaacctacaacctaaaaatctcttcaagaggcatctctggtcttgtgacgagacctcttcaaaaacccacagtaaaactcccctccctccagttgbccaccagtctgccaccaaacatgaacaaattctgctgctaatcggtttcccttgtgatctggttcctgaggtcttcggatctgtgcaatgaattatttat

SEQ ID NO: 287426 - DNA, 201 bp, Homo sapiens
aggctggagtgcagtggtgagatctcggctcactgcaacctctgccttccaggttcaagcgattctcctgcctcagcctcccgagtagctgggattacagyggtacaccaccacgccctgctaatttttgtatttttagtagagatggggtttcaccacgttggccaggctgatctcaaactcctgacctcaggtgatcca

SEQ ID NO: 287427 - DNA, 201 bp, Homo sapiens
ccctgctctgttatcgtcttacccaatgagcgccacccgaggcctgacgtactcagcagcatgtcccaacccaagaggaaacagaactcggcttttggcawccaccctggctacgcttgggggcagctggcgagccgagaccttagtgggcttcagaaggctgacagcatactgcagcatggcaccagctgtgtcgatgaa

SEQ ID NO: 287428 - DNA, 201 bp, Homo sapiens
ccaccagagaaatggtagcagaaatggaccctcagaggttgctctagtccttctttccagtactcctgcaagacattcctcacaactaggatcatttgggrtaacttcagggaagtcataggaaaacttacagagacagagcccagcatctgaagcagcctaacttttggtaaccagctctctcttctgttttgttccatg

SEQ ID NO: 287429 - DNA, 201 bp, Homo sapiens
aggctgaggcaggagaatcgcttgaacccgggaggcagaggttgcagtgagccgagattgtgccgttgcactccagcctgggtaacaagagcaaaattccrtcttaaaaaaaagaaaaagataatcaactaaaatgatcacaatataaaagaataatttggccaggcacggtggctcatgcttgtaatcccagcactttgg

SEQ ID NO: 287430 - DNA, 201 bp, Homo sapiens
  misc_feature (1)...(201): n = A,T,C or G
ttattgtattatatatattttttattgactaagtttgattttgtagataaagctgttgtgacatgaatatggctcagggaaatgccaagatttcatactcnggtagaggtggatatagagtctacattcttctgaatcccctcattttctaccaaagaactggatgttgttactgtcatctgctggtgagcaacaactgat

SEQ ID NO: 287431 - DNA, 201 bp, Homo sapiens
gctcagaaagatatatactgcatgttctcactcatatatgggagctaaaaaagttgatttcatggaagtagaatagaatgacagttaccagaggggctggraaggctagtggggtgtggagagattaggagaacttggttaatgggtacaaacttacaattaaatagaaggaataagttatagtgtttgatagttcagtag

SEQ ID NO: 287432 - DNA, 201 bp, Homo sapiens
gatgaagtttcctttgtttgggattgtaaaaggtcaaacaattttgtctgttcctctcctaaccaatagctcttattcttaactacaggatagaagttcarccttgaatagtgttctaacggatggttccagctctgctttggtagtacctaagaccaaatctagttattttaaatattttatttattgagacagggtctc

SEQ ID NO: 287433 - DNA, 201 bp, Homo sapiens
cacacgtgtaatcccaactactcgggaggctaaggaggaaggatcacttgagcccgggaggtgatgattgcagtgaaccgtgattgtgccactgcactcchgccggggtgacagagtgagaccctgtctcaaaaaaagatggggagtcagaaaagagggagggagaaacggatatttatgttctaaagggaaaatcatcaa

SEQ ID NO: 287434 - DNA, 201 bp, Homo sapiens
taaaaaagctagttggtctaacttgtgtgtctttgtcctataagcctctgcaggtgtgcgagcaggattgcttctgcaacaaaagcctccacccagccacwtcttgggaaaagaatggccacttcttggggcacagtctttttcatgctggtggtatcctgtgtttgcagcgctgtctcccacaggaaccagcagacttgg

SEQ ID NO: 287435 - DNA, 201 bp, Homo sapiens
attgacctctagtggatagaggctggggatactgctaaacatcctaccttacacaggacagcgcccacatcaagccctaattgttttttttttttttttttggttattgtttttttttttttaagacagattcttgctctgtcctccaggctggagcacagtggtgcgatcttgactcactgcagcctccgcctcccgggt

SEQ ID NO: 287436 - DNA, 201 bp, Homo sapiens
gaattcttttttctttcccttgataattatataaacataagacattaacacccatatcaatggtctgtattatggagaggcaagatgtttttgcaagatcktcattcccatctcctgaaacaggattccttaagtctagatctggagtctccccatgctctagagaccctagccatgtgccagaatctgacaggagctggt

SEQ ID NO: 287437 - DNA, 201 bp, Homo sapiens
cattctatttgttcatcctttgctttctctaaaatctattgtttggttttacactgaacaactagtatgactctgcagggttttttgtttgtttttttttktttgttttttcgtgaaaacagatacctaggatgttttttttcacctttgaaatctctggaagaaaaacaaatatttacttaatagaaatagaagctggag

SEQ ID NO: 287438 - DNA, 201 bp, Homo sapiens
acctgtagtcccagctactcaggaggctggagaatcacttgaacccaggaggcagaggttgcagtgagctgagagccgagattgcgccactgcactccagsctggatgatagagcaagactctgtctccaaaaaggccttccaaaaaaaaaaaaaacacctgccttgaaggcctctgctgcaacaagagtccttccgagtt

SEQ ID NO: 287439 - DNA, 201 bp, Homo sapiens
gcattctatttgttcatcctttgctttctctaaaatctattgtttggttttacactgaacaactagtatgactctgcagggttttttgtttgtttttttttgtttgttttttcgtgaaaacagatacctaggatgttttttttcacctttgaaatctctggaagaaaaacaaatatttacttaatagaaatagaagctgga

SEQ ID NO: 287440 - DNA, 201 bp, Homo sapiens
gccccattttcagccagcagctctaccacgcttaggcagagtcaagtcaattaataactaggtgaatgttcccttgccatctcactgttcagaatcccttygtttcctcaagcctagtgagattagccccttaatctgtcttcatctctgattttttgctgggagggacgggtggtggtgtgaacatcttcaggtaattac

SEQ ID NO: 287441 - DNA, 201 bp, Homo sapiens
tattattattattattattattatttgagatagagtctctctctatcactgaggctggagtgcagtggcacacttaacaggcgtgagccactgtgcccgaycagctgttacatttttattaaatgggtgagatctagtgcctgagttactgtattattgtttatccctttggagtattcattcaacatctactgtgtgctc

SEQ ID NO: 287442 - DNA, 201 bp, Homo sapiens
tatgattctcctaactttccaaagcattctcaaatctgttattgtatctgattagcaaaaacaaagtctgtgccaattccctaaggcctatcaactgaaasccggtccacttacaaagccggaggagcctaagaggcttctccattcttggcctcaaaagcattaatatatgacttaagagtcaaaagttttcggctgggt

SEQ ID NO: 287443 - DNA, 201 bp, Homo sapiens
atctcctagcaagccagatatattttatgtccactccctcttgctactgtgggccctgatcttgcctaactatatgacctctggatacttccccatagtayctgaatccttacctaagtccttcccattgaaggctgccgtactgaggtgatgggccaagctggagatatccccaaagcccatgttgacaccctgtcctgc

SEQ ID NO: 287444 - DNA, 201 bp, Homo sapiens
ccttcactgaagcttggaattgtgatttttttcaggggctgggtaattttttggaaagcagtcagctattattattattattattattattattattatttgagatagagtctctctctatcactgaggctggagtgcagtggcacacttaacaggcgtgagccactgtgcccgatcagctgttacatttttattaaatgg

SEQ ID NO: 287445 - DNA, 201 bp, Homo sapiens
accttcactgaagcttggaattgtgatttttttcaggggctgggtaattttttggaaagcagtcagctattattattattattattattattattattatttgagatagagtctctctctatcactgaggctggagtgcagtggcacacttaacaggcgtgagccactgtgcccgatcagctgttacatttttattaaatg

SEQ ID NO: 287446 - DNA, 201 bp, Homo sapiens
aaaccttcactgaagcttggaattgtgatttttttcaggggctgggtaattttttggaaagcagtcagctattattattattattattattattattattatttgagatagagtctctctctatcactgaggctggagtgcagtggcacacttaacaggcgtgagccactgtgcccgatcagctgttacatttttattaaa

SEQ ID NO: 287447 - DNA, 201 bp, Homo sapiens
ccctcctgagtagctgggattacaggcacgcgccactgcgcctggctaatttttgtatatttagtagagacggttttaccatgttggtcagtctggtctcraactcctgacctcatgatccgcccaccttggcctcccaaagtgctgggattacaggagtgagccaccgtgcccggcctacctttgttttttttggggggg

SEQ ID NO: 287448 - DNA, 201 bp, Homo sapiens
taaaatctcagattatgtttctttgaccacaatctttatcctctgcattaaatgctaaccctcttcttctatatcctctttcactagttttctactttttrtttctcaaattcatataaaaaattcttgaggacattggcttttaattattattatttgagacagggtctcactctgtcgcctaggctggagtacagtggt

SEQ ID NO: 287449 - DNA, 201 bp, Homo sapiens
gggagaaccatatttaatgtccctcatgctctctttttgaatccaagtgctcagagctcttgactgtgaattatttaccccaaattcattatcttgcactyttttttgagatggagtcttgctctgttgctcaggctagagtggagtggcgcaatctcagctcactgcaacctccgcccccaggttcaagcgattcttgtt

SEQ ID NO: 287450 - DNA, 201 bp, Homo sapiens
ttgcccacgctggagtgcaatggtgcaatctcagctcactgcacccttcacctcccgggttcaagtgattctcctgcctcaggctcccgagtagctgggaktacaggctatttaaaaaaaaatttttaaataaacataaaattaaaatacatagaatatattttatatgtaaatatacagagcaggaaaattagccagcag

SEQ ID NO: 287451 - DNA, 201 bp, Homo sapiens
tgatgtatattattagccatttttagaatgaggtctacttgttcaggggtaacagcctatgtctaggcagctgaagtgtctgcagaaatcccaggctttamgaatacattcagcaggagcttgctcaagccctgagctttacattggaggcacaggaagcagagtctgttctacatgcaggtggaacaacagagtaactcc

SEQ ID NO: 287452 - DNA, 201 bp, Homo sapiens
ggtgggtcacctgaggtcaggcgtttgagaccagcctggcaaacatggtgaaaccccgtctctactaaaatacaaaaattagctggatatgacagcgcacwcctgtaatcctagctattcaggaggctgaggcaggagaatcatttgaaccctggaggcggagattgcagtgagccgagatcacaccactgcacttcagcc

SEQ ID NO: 287453 - DNA, 201 bp, Homo sapiens
tggaggcacacacgtgtaatcccaactactcgggaggctaaggaggaaggatcacttgagcccgggaggtgatgattgcagtgaaccgtgattgtgccacygcactccagccggggtgacagagtgagaccctgtctcaaaaaaagatggggagtcagaaaagagggagggagaaacggatatttatgttctaaagggaaa

SEQ ID NO: 287454 - DNA, 201 bp, Homo sapiens
cctgtaatcctagctattcaggaggctgaggcaggagaatcatttgaaccctggaggcggagattgcagtgagccgagatcacaccactgcacttcagccrgagcgacagagcaagactcagtctcaaaaaaaaaaaaaaaaaaagaatcaaaagctttctgtagggagaggacacttcaagaaggctcaggcaaagctcc

SEQ ID NO: 287455 - DNA, 201 bp, Homo sapiens
tctacatgcaggtggaacaacagagtaactccattgatctcttcacaggtcaggcagaactgggttcagtcccagtgttgtgatatgaggcaagtaacctrtctgtgcccctttcctcacattaaatgagaatttgcatttaaggcactttgtacagtaatctgttattgggatgacatctattttgcatttcagagtata

SEQ ID NO: 287456 - DNA, 201 bp, Homo sapiens
aatgccactgcactccagcctgggcaacagggagaccctacctcttacaaattaattaagaagcatattctaagcctaggtctaatgcagcagtgtgaaascctgtttagttaatggttagctatttaaattatagtaaaacttaaaaccaagacaagaatgattcatcttcttataaaaggtatatacctgaatatcaag

SEQ ID NO: 287457 - DNA, 201 bp, Homo sapiens
ggtggtagcaatggaagtggtcagaaatggtcggattctggaaatgtattcaacagcaggaaattaagatcttcaaaatctcttgattagctgggcacagtggctcaaccctgttatcccagctattcaggaggctgaggctagaggattgcatgaggccaggagttcaagaccagcctgggtaacatagtgagactccat

SEQ ID NO: 287458 - DNA, 201 bp, Homo sapiens
ctgcctcatctttcttcttttgtgcttcagactgcacattcgctttttcctccacttagctctcatgatgcagaggtttccaagaaaatggcgctaaggcygagagaaaccctagcccatttctattgtcagtttttattgaattccaccttggacgctcttctaggttcttgggttacaccagtaaacaaaaagatttct

SEQ ID NO: 287459 - DNA, 201 bp, Homo sapiens
catctttatccaacaaaaacttatgtagaatatcagtaatacagccgggcctgatggctcacgcctgtaatcctaacactttgggaggctgaggcgggcgratcacctgaggtcaggagttcgagaccagcctagccaacatggtgaaaccccgtctctactaaaaatacaaaaattagccgggcgtggtggcaggtgcct

SEQ ID NO: 287460 - DNA, 201 bp, Homo sapiens
gagtgaagttgtatctcattgtagtagtggttgcatttccttaataactaatgatgctgagtatcttttcatgtccttactggccatttgtgtatccactwtggagaaatgtctgttcaaaatattttgcctgtttttaaattggattatttgtttttgagttataggagttctttatatattttaaatataaatttatca

SEQ ID NO: 287461 - DNA, 201 bp, Homo sapiens
cctcgggtggcgctcattgggtaagacgataacagagcagggccactcccttctcactttgctgccagaggtcacacctgaactctgctttattcttaggratgcagcccacagagtccatccgcttgcaggacagggtgtcaacatgggctttggggatatctccagcttggcccatcacctcagtacggcagccttcaa

SEQ ID NO: 287462 - DNA, 201 bp, Homo sapiens
tgtctttttgtttatagacattctagtgggtgtaagtaaagtgggatctccaggttttgacttgtatttccctaatgattaatgatgttgaatatcctttmatatgtttattggtcatttgtatatcttctttagagaaatgcctattcagaccctttgcccggtttttaattgagcagtttgtctcttgaatactgtggt

SEQ ID NO: 287463 - DNA, 201 bp, Homo sapiens
tttattcttagggatgcagcccacagagtccatccgcttgcaggacagggtgtcaacatgggctttggggatatctccagcttggcccatcacctcagtayggcagccttcaatgggaaggacttaggtaaggattcaggtactatggggaagtatccagaggtcatatagttaggcaagatcagggcccacagtagcaag

SEQ ID NO: 287464 - DNA, 201 bp, Homo sapiens
ctcggccttcttccgggcctcgcgcagcgtcatgcggaatggccgagggacagtaatggatgatgcccaggagctgacgcttctgtgctgggagggaggcygggagcctgagggtggctgggtctgaggcctgggaatgttggagggaaggttgttcagggagctgcagcgccttgtggagccacacctgggaaaaaagca

SEQ ID NO: 287465 - DNA, 201 bp, Homo sapiens
aaaggtgttgtttttttttttttgaaacggatccttgccaggctggagcgcagtggcgcgatcttggctcactgtgcaatctccgcctcccgggttcaagygattctcctgcctcagcctcctaagtagctgggactacaggcacgtgccaccatgcccagctaatttttctatttttagtagagatgaggtttcaccatg

SEQ ID NO: 287466 - DNA, 201 bp, Homo sapiens
ccttgtcttggaagaaactctccaggtcctcctcatcttcagagaggttttcatcactctctgggtcagactgaaagagagactccaacagacaccatctscctttctgcttcagttcctgtaagttctggtaaatgctcccagttgagtcagaagtagaatctatctcctcctctgggctgaggaactcgtcaagtttgc

SEQ ID NO: 287467 - DNA, 201 bp, Homo sapiens
  misc_feature (1)...(201): n = A,T,C or G
cagcaccttccagaccaaattgttggtagttgaagattcttattttgctaggggtcttgtatatctacatcttatcctagattctagggactctggttttngatttaagctatagtttaattttaggcaaaacttttggttatgaggaccagtacctattcaggccagctcaagtggagatggtctcatcgtaaatcctgt

SEQ ID NO: 287468 - DNA, 201 bp, Homo sapiens
attggcctattttctccgcgcattttatttccggttctgaggacgccgcggaagcgggacgggattggagtgctctgctccggacgcactacgtaggtggkcctgcgggagttctgagtgcgacggcgcaggtctgcaccatggcggcccggcttgtcagccgatgcggggctgtgcgtgcagctccccacagcggcccgc

SEQ ID NO: 287469 - DNA, 201 bp, Homo sapiens
ataagcaaccctgcctggccattattttgtttattctgtataagtcccttatctgataaatgacttgcaaatattttcttccattttgtagtcttttcacttttttttttccctgagatggagtttcgctcttgttgcccaggatggagtacaatggcacgatctcagctcactgcaacctctgggattacaggcttgtgc

SEQ ID NO: 287470 - DNA, 201 bp, Homo sapiens
acctcagtacggcagccttcaatgggaaggacttaggtaaggattcaggtactatggggaagtatccagaggtcatatagttaggcaagatcagggcccayagtagcaagagggagtggacataaaatatatctggcttgctaggagatggaagaaaaccttattattggattagggatttaatctttcctctgcccttca

SEQ ID NO: 287471 - DNA, 201 bp, Homo sapiens
actcctgatctcgtgatccacctgccccttcctcccaaagtgctgggattacaggcatgaatcaccatgcttggcccattatgagattttttttttgtgattttttttttttttttagctcatcagctatcattaatattagtgtttttttatatgtgacccaagacaattcttccactgtggcctggggaagccaaaaga

SEQ ID NO: 287472 - DNA, 201 bp, Homo sapiens
gggattacaggcatgaatcaccatgcttggcccattatgagattttttttttgtgattttttttttttttttagctcatcagctatcattaatattagtgtttttttatatgtgacccaagacaattcttccactgtggcctggggaagccaaaagattggacaccctgatctaagggcagctgttccaccctatgatcct

SEQ ID NO: 287473 - DNA, 201 bp, Homo sapiens
agcctaagctttggttacaaacaaggtttctttattgaatttttaattccctgctactcacatttcaccttgtttgtcttgtggctgatgctgctcagtgragtgatgctgaccacacggacttcatcgacacagctggtgccatgctgcagtatgctgtcagccttctgaagcccactaaggtctcggctcgccagctgc

SEQ ID NO: 287474 - DNA, 201 bp, Homo sapiens
cctccattggcccacagagagtgttcttcatatgacaatgatgttaaacaccatctgtcacgtaccaggccatgtcctaagtattttaaatatgttaacayatctacaaagaggaaactattagaatctgtaggacctcttaagcccaaagggtctactgcaggcaggatgggcgttacagaaaaaaataaaaactctcat

SEQ ID NO: 287475 - DNA, 201 bp, Homo sapiens
aaattgtgattttctgctctgtcacttgggaaagcaatattgtttctgattggagtgatgtttccctcttggttttaatgcagactttccttttgtgtttkcaggtgtgggacgcctgctcagaggccctgataatgtttgataaggataatttagatgacatgggctatatcgtggagaatgatgtcatcatgcatgctc

SEQ ID NO: 287476 - DNA, 201 bp, Homo sapiens
ctttacagagcatgctctacagagcatgtccctgtgccccatcctccacagcaaaagctgccaagatggaccgctcactgtctgtatggctggagctaactttttttttttttttttttttttgagacagagtctctgctctgtcacccaggctggagtgcagtggcaggatcccagctcactgcaacctctgcctcccag

SEQ ID NO: 287477 - DNA, 201 bp, Homo sapiens
agtacttgctaggcttttaggtgttacggcccacatctaagcaataactatgtataaaaagggcttaaaaatagtgaatagggagtgtggtggcacatgcstgtagtcctagctattcaggagactgaggcaagaggataatttaagcctaggagtttgaggctgcagtgggctatgatcacatcattgttactcagactg

SEQ ID NO: 287478 - DNA, 201 bp, Homo sapiens
tttacagagcatgctctacagagcatgtccctgtgccccatcctccacagcaaaagctgccaagatggaccgctcactgtctgtatggctggagctaactttttttttttttttttttttttgagacagagtctctgctctgtcacccaggctggagtgcagtggcaggatcccagctcactgcaacctctgcctcccagg

SEQ ID NO: 287479 - DNA, 201 bp, Homo sapiens
cttgagagtttccaagtgcagcagagtcttagccgttggtattggtgttcttttgacacagctctcagacaccttgagttccttggtttggtccacgtccmatgaacatgcagcagagctagttagcatggatgaggaaaaatttgtggatgccgttaactctgcctttgtgagtatcaatttacccagctgatgatgtgc

SEQ ID NO: 287480 - DNA, 201 bp, Homo sapiens
gggcaacataccaagaccttgtatcttgaaaaagaaaaaacaaatggtttcaagttactagaaatcctttgtaaaaataattttttaaaaattgtctttasgaggtttataacttcagcaggatgatgaagaaaaagaacaatatggatttggggccgggtgcggtggctcacgcctgtaatctcagcactttgggaggct

SEQ ID NO: 287481 - DNA, 201 bp, Homo sapiens
gagagtgaagttgtatctcattgtagtagtggttgcatttccttaataactaatgatgctgagtatcttttcatgtccttactggccatttgtgtatccastttggagaaatgtctgttcaaaatattttgcctgtttttaaattggattatttgtttttgagttataggagttctttatatattttaaatataaatttat

SEQ ID NO: 287482 - DNA, 201 bp, Homo sapiens
gaagagtacttgctaggcttttaggtgttacggcccacatctaagcaataactatgtataaaaagggcttaaaaatagtgaatagggagtgtggtggcacrtgcctgtagtcctagctattcaggagactgaggcaagaggataatttaagcctaggagtttgaggctgcagtgggctatgatcacatcattgttactcag

SEQ ID NO: 287483 - DNA, 201 bp, Homo sapiens
aactctgcctttgtgagtatcaatttacccagctgatgatgtgctgcagggggagatacagaaaggtgttgtttttttttttttgaaacggatccttgccrggctggagcgcagtggcgcgatcttggctcactgtgcaatctccgcctcccgggttcaagcgattctcctgcctcagcctcctaagtagctgggactaca

SEQ ID NO: 287484 - DNA, 201 bp, Homo sapiens
ggagaccatcctggctaacatggtgaaaccctgtctctactaaaaatacaaagaaacaattagccaggcatggtggcgggcgcctatagacccagctactygggaggctgaggcaggagaatggcgtgaacccaggaggtggagcttgcagtgagccgagatcacgccactgcactccagcctgggcgacagagcaagact

SEQ ID NO: 287485 - DNA, 201 bp, Homo sapiens
tgagagtgaagttgtatctcattgtagtagtggttgcatttccttaataactaatgatgctgagtatcttttcatgtccttactggccatttgtgtatccwctttggagaaatgtctgttcaaaatattttgcctgtttttaaattggattatttgtttttgagttataggagttctttatatattttaaatataaattta

SEQ ID NO: 287486 - DNA, 201 bp, Homo sapiens
agtgattatcctgcctcagcctcccaagtagctgggattacaggcgcccaccaccacacccggctaattttcttatttttagtagagatggggtttcaccrtgttggccaagctggtcttgaactcctgacctcgtgatctgcctgcctcggcctcccaaagtgctgggattacaggcgtgagccactgcggctggcccac

SEQ ID NO: 287487 - DNA, 201 bp, Homo sapiens
taattgtcctttctatgtagcaggctctggagatactgagaacagtctccgctttcaggaagttcatagtcaagtaaggaagaccgtaaatgacaatctcygtacagtgatagaagtatgcataggatgctgtggaagcatacaggggggaaacacagagaaagactggaggagttaaaaagaggcgacgtcttctggatg

SEQ ID NO: 287488 - DNA, 201 bp, Homo sapiens
accatgatgtagcttttaaagataatttgaatctaaaatttaataacttataaatttgttccataatatattgggtcatatgatcacacttgtgtgtgcaygtacatgcataggaaattgtctggaaagtcatacaccaaagctgtaattgcagttgtctctgagtagtttaagggtgatttttctccacttgaacctttc

SEQ ID NO: 287489 - DNA, 201 bp, Homo sapiens; identical to SEQ ID NO: 58881

SEQ ID NO: 287490 - DNA, 201 bp, Homo sapiens
tcctagggaaaggccgagcgaatttcagcatggggcttaagagtaagcttagtagatagatgtgggttcaaaatgtaaatagtatcactaactgctcaggrttgaataaagactttcaaaatgagagaacttttgtaaaatccatggaacatctttagtacattgtaggtgctcaacaaatactaataattctggagtaga

SEQ ID NO: 287491 - DNA, 201 bp, Homo sapiens
cagaaaggtggttttgagtcaggaaaaaggagtaaccagtcagctgtccctttctactttgtaactataatgcttggtctagattatgtggaggagtgtayacacggaaatgcaaaacaatagaaataataaataataaccttttgagggttgtgggctgctgttaggctgactgaaacagctgcctgggtggtggttagc

SEQ ID NO: 287492 - DNA, 201 bp, Homo sapiens
tgacctccccagaccgagtgacggttctctacaggagcaaagccattcgctatacctggccttgtccatttcctatggccgactccagcccttgggttcayattaccctaggtgatggcagcaccttccagaccaaattgttggtagttgaagattcttattttgctaggggtcttgtatatctacatcttatcctagatt

SEQ ID NO: 287493 - DNA, 201 bp, Homo sapiens
ttgagagtgaagttgtatctcattgtagtagtggttgcatttccttaataactaatgatgctgagtatcttttcatgtccttactggccatttgtgtatcsactttggagaaatgtctgttcaaaatattttgcctgtttttaaattggattatttgtttttgagttataggagttctttatatattttaaatataaattt

SEQ ID NO: 287494 - DNA, 201 bp, Homo sapiens
cagagcaagactccgtctcaaaaaaaaaaaaaaaattcctctgatgattatttcacggtgctggatacttagaagtggaattgctgggtcatataataatwctatgtttaatattttcagaagctgccaaacttttctgaagaggctatacaatttcactttcccaccagtctataagggttccagtttctccacatcctc

SEQ ID NO: 287495 - DNA, 201 bp, Homo sapiens
cttactgtgttaagagtttcattcacttttattttttctccaggaacagattatggcctttgcaagcaaatgagtactcctctcctaaagaaagattacgytgatgaaaaagaacatcctgcccaggacccatcatacatattttcaagatcttatttaatttaataaacttactttacattaaaattctctttttcttct

SEQ ID NO: 287496 - DNA, 201 bp, Homo sapiens
gcttgagagtttccaagtgcagcagagtcttagccgttggtattggtgttcttttgacacagctctcagacaccttgagttccttggtttggtccacgtcmcatgaacatgcagcagagctagttagcatggatgaggaaaaatttgtggatgccgttaactctgcctttgtgagtatcaatttacccagctgatgatgtg

SEQ ID NO: 287497 - DNA, 201 bp, Homo sapiens
actcacatttcaccttgtttgtcttgtggctgatgctgctcagtggagtgatgctgaccacacggacttcatcgacacagctggtgccatgctgcagtatsctgtcagccttctgaagcccactaaggtctcggctcgccagctgcccccaagcgtagccagggtggatgccaaaagccgagttctgtttcctcttgggtt

SEQ ID NO: 287498 - DNA, 201 bp, Homo sapiens
tgcctgggtggtggttagcattggcctttttttgaagctgtaacacttggattattttgaacagttctgctaggttgcagctacctgaacctttcaagccygattcattgaaagtattcctagggaaaggccgagcgaatttcagcatggggcttaagagtaagcttagtagatagatgtgggttcaaaatgtaaatagta

SEQ ID NO: 287499 - DNA, 201 bp, Homo sapiens
gcagctacctgaacctttcaagcctgattcattgaaagtattcctagggaaaggccgagcgaatttcagcatggggcttaagagtaagcttagtagatagrtgtgggttcaaaatgtaaatagtatcactaactgctcaggattgaataaagactttcaaaatgagagaacttttgtaaaatccatggaacatctttagta

SEQ ID NO: 287500 - DNA, 201 bp, Homo sapiens
acctttcaagcctgattcattgaaagtattcctagggaaaggccgagcgaatttcagcatggggcttaagagtaagcttagtagatagatgtgggttcaamatgtaaatagtatcactaactgctcaggattgaataaagactttcaaaatgagagaacttttgtaaaatccatggaacatctttagtacattgtaggtgc

SEQ ID NO: 287501 - DNA, 201 bp, Homo sapiens
gtatagtgtttatgttctctgtaagaaattcatattctaagggttaagtggttactctgttgtttctcttggtaatgggaaaggaaattcttgattttcckaagatgatataaattttctttttttaaggatatgatattcactttcatgacaagaaaatcctgttgctcgaagcaggtccaaagaaagtactggagaaat

SEQ ID NO: 287502 - DNA, 201 bp, Homo sapiens
taaagtccgagaggttcaggtctgtaagtcagagtccgcctcctggtccctaaacgctcattttaatcccacgcccctccgtgacacgcccctgctgtctstctccaaggcaacgcccaacagtttcctctccgggattcctttcccgggggcagtctcttttctctcctcacctgacggctcccctccgcgcctccgggg

SEQ ID NO: 287503 - DNA, 201 bp, Homo sapiens
tgtaagtcagagtccgcctcctggtccctaaacgctcattttaatcccacgcccctccgtgacacgcccctgctgtctgtctccaaggcaacgcccaacartttcctctccgggattcctttcccgggggcagtctcttttctctcctcacctgacggctcccctccgcgcctccgggggctccctcaggcctccccacgg

SEQ ID NO: 287504 - DNA, 201 bp, Homo sapiens
tcaattttgtcaagatgtcttggtctgtcttaagatatcggagtccactttctccaagtgttctgtgaatgtaggaggaatcagacaaggttcacattcastccgaggaagtggggagaagcattcccaggagaattttcttctcattttatattttcctaccagagaggctgacaaattgtgattttctgctctgtcact

SEQ ID NO: 287505 - DNA, 201 bp, Homo sapiens
cttactactacctggcattatattatgtgtttgttttttattgtccatctctccaattagaatgttaactgcagaaggccaaggactttgtccattggttycccactttactgtatttggcacatagtcggtgctcagtaaatatttcctcaatgaataaatctgttcagtgctatgaagagctaaaaaatagaacatagg

SEQ ID NO: 287506 - DNA, 201 bp, Homo sapiens
ctgtaagaaattcatattctaagggttaagtggttactctgttgtttctcttggtaatgggaaaggaaattcttgattttcctaagatgatataaattttytttttttaaggatatgatattcactttcatgacaagaaaatcctgttgctcgaagcaggtccaaagaaagtactggagaaattgtcagaaacttacagca

SEQ ID NO: 287507 - DNA, 201 bp, Homo sapiens
ttgcttcttggcacgtggcatgtagtggtctttggagaagtcttacagttgtgggcagggtggttctcatagctaaaatggtggtatatgttattgcttargactctgcatgggtatagtgtttatgttctctgtaagaaattcatattctaagggttaagtggttactctgttgtttctcttggtaatgggaaaggaaat

SEQ ID NO: 287508 - DNA, 201 bp, Homo sapiens
tgaattttgcttgtttattccactttttcttttgaacaggagttgtaatttttagtgacttaatactctggagattgaaaagaactggtgtttaaatactrtagtctaacttttttacttcatttttcctttctagggcattctgtttgctagttaggtgtttgccattatttgcttcttggcacgtggcatgtagtggtc

SEQ ID NO: 287509 - DNA, 201 bp, Homo sapiens
ctaatttttttgtatttttagtagagacgggtttcaccatgttggctaggctggtcttgaactcctgacctcaggtgatctgtccacctcggccttcaaaktgctgggattacaggtgtgagccaccgcaccggcctttataaactctaattctttattcttggtttaatcttgagactgcattgaattttgcttgtttat

SEQ ID NO: 287510 - DNA, 201 bp, Homo sapiens
ttgtagtttttgagacagggttttgctctgtcccccaggtaggagtgcagttgcacaaacatagctcaggtgtgccaccatgcctggctagttaaaaaaawtttttttttgtagagacagggtctcgccatgttgcccaggctggtcttgaattcctaggcttgagcaatcctcccacctcggcctcccaaaatgctgaga

SEQ ID NO: 287511 - DNA, 201 bp, Homo sapiens
cccactgtgcctgacctttctttcttttcttttcttttttgtagtttttgagacagggttttgctctgtcccccaggtaggagtgcagttgcacaaacatrgctcaggtgtgccaccatgcctggctagttaaaaaaaatttttttttgtagagacagggtctcgccatgttgcccaggctggtcttgaattcctaggctt

SEQ ID NO: 287512 - DNA, 201 bp, Homo sapiens; identical to SEQ ID NO: 58885

SEQ ID NO: 287513 - DNA, 201 bp, Homo sapiens
ttcatcgacacagctggtgccatgctgcagtatgctgtcagccttctgaagcccactaaggtctcggctcgccagctgcccccaagcgtagccagggtggwtgccaaaagccgagttctgtttcctcttgggttgggacatgctgctgagtacgtcaggcctcgggtggcgctcattgggtaagacgataacagagcaggg

SEQ ID NO: 287514 - DNA, 201 bp, Homo sapiens
ggttaagttccaaaactatactttttggctcacagggctctctgtgatgctctggtgccagctgtgtactcttgagtggttaggcagcagttcacattagrtgtgtaaaattaattaaacctaaatctctaggctcaagtccaggatgtccccagactagttcagaaactaagtgctctctcctccccttaaaaaggtgtt

SEQ ID NO: 287515 - DNA, 201 bp, Homo sapiens
taagagttatttttattttttgagacagggtcttccgctgtgcccaggctgcagtgcagtggcacgatcacggctcactgtagcctcaacctccctggctsaattgatcctcctgcctctgcctcccaaatagctgggactgcaggaatgcgccaccactcggctgatttttgtatttttttgtagagacgaggtctcact

SEQ ID NO: 287516 - DNA, 201 bp, Homo sapiens
ccagggcagcctccgatccatcccgcccgaggaggcaaggttcgttttccgattggcctattttctccgcgcattttatttccggttctgaggacgccgcsgaagcgggacgggattggagtgctctgctccggacgcactacgtaggtgggcctgcgggagttctgagtgcgacggcgcaggtctgcaccatggcggccc

SEQ ID NO: 287517 - DNA, 201 bp, Homo sapiens; identical to SEQ ID NO: 58890

SEQ ID NO: 287518 - DNA, 201 bp, Homo sapiens
gagaagtcttacagttgtgggcagggtggttctcatagctaaaatggtggtatatgttattgcttaggactctgcatgggtatagtgtttatgttctctgyaagaaattcatattctaagggttaagtggttactctgttgtttctcttggtaatgggaaaggaaattcttgattttcctaagatgatataaattttcttt

SEQ ID NO: 287519 - DNA, 201 bp, Homo sapiens
gtataaagtccgagaggttcaggtctgtaagtcagagtccgcctcctggtccctaaacgctcattttaatcccacgcccctccgtgacacgcccctgctgyctgtctccaaggcaacgcccaacagtttcctctccgggattcctttcccgggggcagtctcttttctctcctcacctgacggctcccctccgcgcctccg

SEQ ID NO: 287520 - DNA, 201 bp, Homo sapiens
tttcatgacaagaaaatcctgttgctcgaagcaggtccaaagaaagtactggagaaattgtcagaaacttacagcaacagggtcagctccatttcccctgrctctgcaacgcttctcagtagtgagtagaagatcctccttcaaagatccaatctcctttcccacttagctttctagtgtatcccatggggcagagtcatc

SEQ ID NO: 287521 - DNA, 201 bp, Homo sapiens
tccccacagcggcccgctggtgtcctggcgcaggtggtccggcgcctcaacagacaccgtgtatgacgtggtggtgtcgggtggaggcctggtgggcgctkccatggcctgtgccttgggtaagcccttctccaggctactagtggccggaaaccgggccgcggaggcacgatgagagccgtgagagccctagcacgactt

SEQ ID NO: 287522 - DNA, 201 bp, Homo sapiens
aagagggagtggacataaaatatatctggcttgctaggagatggaagaaaaccttattattggattagggatttaatctttcctctgcccttcaggttccrtgagccacctcacaggttatgaaacagaaagacagcgtcacaacactgctcttctggctgctacagacttactaaaaaggctctattctaccagtgcctc

SEQ ID NO: 287523 - DNA, 201 bp, Homo sapiens
taagctttggttacaaacaaggtttctttattgaatttttaattccctgctactcacatttcaccttgtttgtcttgtggctgatgctgctcagtggagtkatgctgaccacacggacttcatcgacacagctggtgccatgctgcagtatgctgtcagccttctgaagcccactaaggtctcggctcgccagctgccccc

SEQ ID NO: 287524 - DNA, 201 bp, Homo sapiens
ggttttgacttgtatttccctaatgattaatgatgttgaatatcctttcatatgtttattggtcatttgtatatcttctttagagaaatgcctattcagaycctttgcccggtttttaattgagcagtttgtctcttgaatactgtggtaagagttatttttattttttgagacagggtcttccgctgtgcccaggctgca

SEQ ID NO: 287525 - DNA, 201 bp, Homo sapiens
ggaaagtcatacaccaaagctgtaattgcagttgtctctgagtagtttaagggtgatttttctccacttgaacctttctttgttgtccagacttctacagygagcttattattattattattatttttttttttttggagatggagtctcgctctgtcgcccaggctggagtgcagtggcacagtctcggctcactgcaag

SEQ ID NO: 287526 - DNA, 201 bp, Homo sapiens
taattgcagttgtctctgagtagtttaagggtgatttttctccacttgaacctttctttgttgtccagacttctacagcgagcttattattattattattwtttttttttttttggagatggagtctcgctctgtcgcccaggctggagtgcagtggcacagtctcggctcactgcaagctcggcctcccaggttcacacc

SEQ ID NO: 287527 - DNA, 201 bp, Homo sapiens
gcaggacagggtgtcaacatgggctttggggatatctccagcttggcccatcacctcagtacggcagccttcaatgggaaggacttaggtaaggattcagrtactatggggaagtatccagaggtcatatagttaggcaagatcagggcccacagtagcaagagggagtggacataaaatatatctggcttgctaggagat

SEQ ID NO: 287528 - DNA, 201 bp, Homo sapiens
gttcctgtaagttctggtaaatgctcccagttgagtcagaagtagaatctatctcctcctctgggctgaggaactcgtcaagtttgctggccctgggcaawaccagcccatccccggacagctcctctcctgcctctgtgtctgcgaaggactcggggggaaatatctaaaatagaatagaaataggctgtgggtcaaaca

SEQ ID NO: 287529 - DNA, 201 bp, Homo sapiens
atggaaaccagcctggtctcgatctcttgacctcatgatccgctttccttggcctcccaaagtgctgggattacaggcgtgagccagcgcgcctggccaattttttttttttttttaaatttttagacggagtttcaccatgttggccaggctggtctcgaactcctgacctcaggtgatccacccgcctcggcctcccaa

SEQ ID NO: 287530 - DNA, 201 bp, Homo sapiens
ggaccatatctgcaacatgagatacagagcctttcggcgaatgcaggtgcccctttatcttttcaattttgtcaagatgtcttggtctgtcttaagatatyggagtccactttctccaagtgttctgtgaatgtaggaggaatcagacaaggttcacattcagtccgaggaagtggggagaagcattcccaggagaatttt

SEQ ID NO: 287531 - DNA, 201 bp, Homo sapiens
tcatttgtatatcttctttagagaaatgcctattcagaccctttgcccggtttttaattgagcagtttgtctcttgaatactgtggtaagagttatttttrttttttgagacagggtcttccgctgtgcccaggctgcagtgcagtggcacgatcacggctcactgtagcctcaacctccctggctgaattgatcctcctg

SEQ ID NO: 287532 - DNA, 201 bp, Homo sapiens
ctcacaagattatggaagctgagagttcccatgataggctgtctacaaactggagaaccagagaagctggtagcatggctcaatccaagctggaaggcccracaaccaaggaagccattggtatacttgtcagtcccaaggcctgagagcccaggaagccatgggtgcagtctcagagtacaaaggctgaagaacctggag

SEQ ID NO: 287533 - DNA, 201 bp, Homo sapiens
gctggagtgcaggggctcaatctcagctcattgcaacctccacctcctggattcaagagattctcatgcctcaacctcccgagtagctgggattaacaggygtgcaccaccacacccagctaatttttgtatttttagtagagatggggtttcaccatgttggccaggctggtctcaagctcctgacctcaggtgatccac

SEQ ID NO: 287534 - DNA, 201 bp, Homo sapiens
aacagtgtgctagtttttcaagtgataacttatccaggcatttgttgatgaaataaggtattttggaatcataatgtctgaaaggttacattacaaatatrtgtggcttttgtttctttagagtatgttattattggtccttaaaatttgcttttcttttttatgtgaaatgtactaacatatcagtgctgacatgtaaac

SEQ ID NO: 287535 - DNA, 201 bp, Homo sapiens
gacttgaggtgggaggatggcttgaagccatgagttcaagtccagcttgggcagcaacgcaagaccccaactctaaaaaatagaaaaatcttaagcaaccttttttttttttttttttgagatagagtcttgctctgtgcagtggcacaatctcggcttactgccacctctgcctcccgggttcaagtgattctcctgcct

SEQ ID NO: 287536 - DNA, 201 bp, Homo sapiens
gaggctgaggcaggagaatggcgtgaacccaggaggcagagcttgcagtcagcagagatcacaccactgcactccagactgggcaacagagcgagactccrtctttaaaataaataaataaataaacaaacattttgccccacttaatcttcaatgaacttgttcctattagttaaaaattctaactagatttagtctttc

SEQ ID NO: 287537 - DNA, 201 bp, Homo sapiens
gctagctctggaggaatatatcatgttgtttgttttatgtttttttcttgtctttatttaaaaacaagtgcagtattgagaagggaaaagagtagaacaargggtttggcctgtaactgactgaacaatcaggtgatataactcactacctttggaccagccttgtgttgttttcttttaatcgagccataggaggcttaa

SEQ ID NO: 287538 - DNA, 201 bp, Homo sapiens
ttgtaccgtagaagttataagctaaaccatatcacctaggtgtctagtaatctgtaccatgtaggtttgtgtaagtatactctgatgttcacacaatgatkaaatcacctaatgtcacatttctcagcatgtatcccagtagtcaagctgtacaaagcactcacaagagtgcttggcacatagtaacactaagggcttgat

SEQ ID NO: 287539 - DNA, 201 bp, Homo sapiens
tactgtactttttctatgtttagatacacaaatacttaccatcgtgttccagttgtctgcagcattcagtacagcaacatgccatataggtttgtaccgtrgaagttataagctaaaccatatcacctaggtgtctagtaatctgtaccatgtaggtttgtgtaagtatactctgatgttcacacaatgattaaatcacct

SEQ ID NO: 287540 - DNA, 201 bp, Homo sapiens
tttactgtactttttctatgtttagatacacaaatacttaccatcgtgttccagttgtctgcagcattcagtacagcaacatgccatataggtttgtaccstagaagttataagctaaaccatatcacctaggtgtctagtaatctgtaccatgtaggtttgtgtaagtatactctgatgttcacacaatgattaaatcac

SEQ ID NO: 287541 - DNA, 201 bp, Homo sapiens
gacagagactccatctcaaaaaaaaaaaaaattttttttatggtgtacaacatgatgttttgaaatgtttacaggccaggcgtggtggctcatgccagtamtcccagcactttgagaggctgcgggcagtacacgtgaggttgggagttcgagaccagcctgaccaacatggagaaaccacatctctactaaaaatacaaa

SEQ ID NO: 287542 - DNA, 201 bp, Homo sapiens
cctccacctcccgagttcaattgattctcctgcctcagcctcctgagtagctgggattacaggcacccgccatcatgcctggctaatttttgtatttttgyagagatggggtttcaccatgttggccaggctgttcttgaactcctgacctcaagtgatctgcccgcctcagcctcccaaagtgctaggattataggcctg

SEQ ID NO: 287543 - DNA, 201 bp, Homo sapiens
attacttttatattcatttaagtttctatttgcttcttaaaataaggaaggaaagtttagccgcgctccatcctgggtgacagagtaagaccttgtctctaaaaaaaaaaaagaaatacatactgagtcatttctatagttacagaagaattacaaaacaatatagatttacttgtgcctgtttttttttttttgacacgg

SEQ ID NO: 287544 - DNA, 201 bp, Homo sapiens
cactctgtcacccaggctggagtgatcttggctcactgcaacctctgcctcctgggttcaagtgatcttcccacctcagtctcccgagtagctgggattayaggtgtgcaccaccacgcccagctaattttttttatttttagtagagatggggttttgccatgttggccaggctgttctcaaactcctgacctcaagtga

SEQ ID NO: 287545 - DNA, 201 bp, Homo sapiens
agagtaagaccttgtctctaaaaaaaaaaaagaaatacatactgagtcatttctatagttacagaagaattacaaaacaatatagatttacttgtgcctgtttttttttttttgacacggagtctcgctctgtcatgcagtggcacaatctcggctcagtgcaacttccacctcccgggttcaagcgattcttctgcctca

SEQ ID NO: 287546 - DNA, 201 bp, Homo sapiens
gagtatagtgacgtgatctgggctcactgcaacctctgcctcccaggttcaagccattcttttgcctcagcctcctgagtagctgggtttataggcgctcrctaccatgcccggctaattttttgtatttgtatttgtatttttgtattttgtatttttagtggagacagggtttcaccatgttggccaggctggtctcga

SEQ ID NO: 287547 - DNA, 201 bp, Homo sapiens; identical to SEQ ID NO: 58898

SEQ ID NO: 287548 - DNA, 201 bp, Homo sapiens; identical to SEQ ID NO: 58899

SEQ ID NO: 287549 - DNA, 201 bp, Homo sapiens
caagtgttctgcccatccagcctcccaaagtgctgggattacagttgtgaaccagtgcacctggactggcctaggctattcttgaaacctgcaaatgatargcaaagttgtacctttgtgtgcttctgtactgttctttttctgttttagagtgtatagcttgtgatctgttactaattgaagagattaaacaatgggaaa

SEQ ID NO: 287550 - DNA, 201 bp, Homo sapiens
tttttttttttgagacggagtctcactttgtcacccaggctgtagtgcagtggcgcaatctcggctcactgcaacctccgcctcctaggttcaagcaattmttctgcttcagcctcccgagtagctgggattacaggcacatgccactcgctcagctaatttttgtatttttagtagagatggggtttcaccatgttggcc

SEQ ID NO: 287551 - DNA, 201 bp, Homo sapiens
tttttttttttttttgagacggagtctcactttgtcacccaggctgtagtgcagtggcgcaatctcggctcactgcaacctccgcctcctaggttcaagcrattattctgcttcagcctcccgagtagctgggattacaggcacatgccactcgctcagctaatttttgtatttttagtagagatggggtttcaccatgtt

SEQ ID NO: 287552 - DNA, 201 bp, Homo sapiens
tggcctaggctattctttttttttttttttttttttttttttgagacggagtctcactttgtcacccaggctgtagtgcagtggcgcaatctcggctcackgcaacctccgcctcctaggttcaagcaattattctgcttcagcctcccgagtagctgggattacaggcacatgccactcgctcagctaatttttgtattt

SEQ ID NO: 287553 - DNA, 201 bp, Homo sapiens
atgggaggccaaggtgggcagatcgtgaggtcaggaatttgagaccagcctggccagcatggtaaaaccccatctctactaaaaatattaaaaagtagccrggcatggtggtgcatgcctgtaatcccagctactcgggaggctgagtcaggagaatcacttgaacccaggaggcagaggttgcagtaagccgagatcgcg

SEQ ID NO: 287554 - DNA, 201 bp, Homo sapiens
ctttatgtcctcattcaatcctaaatgtctcctttaagtgcctatctccaaataaagtcacactggggcttagggctttactatataaatgttgtggggaygcaattcagtccataacacgttgtctctactttgttgtctcaaaacaggaattcctagtatttttaaagggtatatattttattttaggtagacccacaa

SEQ ID NO: 287555 - DNA, 201 bp, Homo sapiens
attattctctttctgtacctcttttttcttctcttttttctttttttttgagatggagtttcgctcttgtcgcccatgctggagtgcaatggcgtgatctyggctcactgcaacctccacctcccggtttaaagcgattccccagcctcagcctccagagtagctgggattacaggcgcccgccaccacgccgggctgatt

SEQ ID NO: 287556 - DNA, 201 bp, Homo sapiens
tgaggcaagagaattgtttgaacccgggaggcggagattgcagtaagccaagatcgcggcattgcactccagcctgtgtgacagagcaagactctgtctcaaaaaaaaaaaaaaaaaaaacaaaaaaacaaaaaaaagaagaagaagaaggttgaactaactctgactgcttaagctggagcatcattcttctcctgtcct

SEQ ID NO: 287557 - DNA, 201 bp, Homo sapiens
gaggcaagagaattgtttgaacccgggaggcggagattgcagtaagccaagatcgcggcattgcactccagcctgtgtgacagagcaagactctgtctcaaaaaaaaaaaaaaaaaaaacaaaaaaacaaaaaaaagaagaagaagaaggttgaactaactctgactgcttaagctggagcatcattcttctcctgtcctc

SEQ ID NO: 287558 - DNA, 201 bp, Homo sapiens
gacgagatttcaccgtgttagccaggatggtcttgatctcctgacctcgtgatctgcctgcctcggcctctcagagtgctgggattacaggcgtgagccaycgcgcccggcctggattcacatcattgaacaaagcagacgagtccttatcctcttagcgctgacgagctgggcagttagtttgaaattctgggctagaga

SEQ ID NO: 287559 - DNA, 201 bp, Homo sapiens
tactactgcgcccggataattttttgtatttttggtagagacgagatttcaccgtgttagccaggatggtcttgatctcctgacctcgtgatctgcctgcytcggcctctcagagtgctgggattacaggcgtgagccatcgcgcccggcctggattcacatcattgaacaaagcagacgagtccttatcctcttagcgct

SEQ ID NO: 287560 - DNA, 201 bp, Homo sapiens
gaagctgcttcgggccccagcggtgagggagaagactctcaaccagggtgacttctaggcgtcctcccggagctaccggggacactggcgttattgcccgsaacactgagatagggaatgctcgagaaacagaagcaggttttggggttttttttgaattactgggggaaagcaacctgaggttttgacgtaattgtgttt

SEQ ID NO: 287561 - DNA, 201 bp, Homo sapiens
acgcgcgagcggctcccgcgactgtggctcccgaagctgcttcgggccccagcggtgagggagaagactctcaaccagggtgacttctaggcgtcctccckgagctaccggggacactggcgttattgcccggaacactgagatagggaatgctcgagaaacagaagcaggttttggggttttttttgaattactggggga

SEQ ID NO: 287562 - DNA, 201 bp, Homo sapiens
ttcatatatttgctttaggaggcaaactctgacaggcgagtttatctttttggatcctaaatgtgatttttctccctcttcattgggaaacacaaatggayttcttttttatttttaaattgttgaatacttcaaatcttgtgatttaaaaatttttttatttataggagtattttatacagaaatcttgtgaaaccactg

SEQ ID NO: 287563 - DNA, 201 bp, Homo sapiens
cacgcgagatttcgttcacccgggctccacagggtcagtgacgcgcgagcggctcccgcgactgtggctcccgaagctgcttcgggccccagcggtgaggragaagactctcaaccagggtgacttctaggcgtcctcccggagctaccggggacactggcgttattgcccggaacactgagatagggaatgctcgagaaa

SEQ ID NO: 287564 - DNA, 201 bp, Homo sapiens
tagtgtaattaaggaatgttgtagagggaacagataatagtagtacatgtatgtgattcaggtgctttcaaatgttcagattacttcccagtagtaaatamagcttgaagatagtaaaacaggattgcaaattcagtaaataaagctttaagatagtaaaataagattgcaaattctttcagatccactttataagagagg

SEQ ID NO: 287565 - DNA, 201 bp, Homo sapiens
aagtaattcttttaaatttttagctttattcactagcatacatttcatgcatttaaatgtacaattcagtgaattttggaatactcacagagctttgcaaytgtcacctcagttttttaattttttatttaaaaacaaatttattgacaaataaaaattgttgccaggcatggtggctcacgcctgtaatcccagcacttt

SEQ ID NO: 287566 - DNA, 201 bp, Homo sapiens
tgcccaaccagagcaatgattgttcaaagagtggtattgaattctcgacctggtatgtatttgcgatgaatgaacaactctgatctttgataagtattaakgcaaatggaggaataaaaactaatgtgatgttcatgtggtaaattaaggtagtaagatattgacactagtaaagatattagaagaaactctttaaacgat

SEQ ID NO: 287567 - DNA, 201 bp, Homo sapiens
aggcagaggttgcagtaagccgagatcgcgccactgcattccagcctgggtgatagagcaagactctgtctcaaataataataataataatagtatatagmaaagtggctttttttaactttatatttttgcataatattttaggaaaaaatggtaatccagtggcagagaatttccgaatggaagaagtctatttaccag

SEQ ID NO: 287568 - DNA, 201 bp, Homo sapiens
ttttttttttcaagacagagtcttgctctgttgcccaggctggagcgcagtggcgcgatctcggctcacttcaacctctgccacctgggttcaagcgattytcctgcctcagccacctgggtagctgggattacaggcgtctaccaccatggctggctaatttttgtatttttagtagagatgggatttcagcatcttggc

SEQ ID NO: 287569 - DNA, 201 bp, Homo sapiens
agccctgcgtcgcgggcctggggaggccccgccagcacccttgacgtctgggtcccgagcagtgcggcagccacacgacactgaggcgagcgagtgggtgkgtgcgtggggggtcagccaaacttcctgtcccgcgctcgagctgcttccggcgggagccggaagacgctgtgtgtggacggaattcgggaccgactgacg

SEQ ID NO: 287570 - DNA, 201 bp, Homo sapiens
tttcacaggattcggttacagcatttttttttttttttttttttttttttttttttttgagacagagtcttgctctgtcacccaggctggagtatagtgaygtgatctgggctcactgcaacctctgcctcccaggttcaagccattcttttgcctcagcctcctgagtagctgggtttataggcgctcgctaccatgccc

SEQ ID NO: 287571 - DNA, 201 bp, Homo sapiens
tcaagacagagtcttgctctgttgcccaggctggagcgcagtggcgcgatctcggctcacttcaacctctgccacctgggttcaagcgattctcctgcctmagccacctgggtagctgggattacaggcgtctaccaccatggctggctaatttttgtatttttagtagagatgggatttcagcatcttggccagggtggt

SEQ ID NO: 287572 - DNA, 201 bp, Homo sapiens
caggcgtgagtcactgcacccagccatttttattaaacttgttgtagaaacaagagtcttaccatgttgcccaggctggtcttgaactcctggcctcaacsgatcctcccgcctcagccccacaaagtgctgggattacaggtgtgaaccactgtgcccagccttaatggtacattttaagcattagtaatgagaactgtt

SEQ ID NO: 287573 - DNA, 201 bp, Homo sapiens
tcctctacattttggatttcatgatagaggcaagagtgagccacagaggaagagagccttgactgctaccaagagaagttgttagccttcctcttgagatrgggtgcagtcccattgtgacattctgtctttgaggggtgaagagagcacttatctgaggttagggggcatgaaatagggagcgtacttggtctgaagttg

SEQ ID NO: 287574 - DNA, 201 bp, Homo sapiens
aaaggaactgttctgaatcctagagtgaccctttaaagaataataagtatatcccaccactatgggaggccaaggtgggcagatcgtgaggtcaggaattygagaccagcctggccagcatggtaaaaccccatctctactaaaaatattaaaaagtagccgggcatggtggtgcatgcctgtaatcccagctactcggga

SEQ ID NO: 287575 - DNA, 201 bp, Homo sapiens
tctggagaattctgatgaaaacaatatcctaatacactgatccatgaatgcatgatgtctttctacttatttgggtgttcattaatttctttctgtctttaaaaaaaaaagattttaggggaggaaaaatgatggaacaactaggattataatataaattgaattaatgatcttcacttcgaacactcccaacttcaaagc

SEQ ID NO: 287576 - DNA, 201 bp, Homo sapiens
tctgtttcgtcttttacccgttttacctgggtacaccgaaccacatgggaccccttaatcaggtgtccttccatgttttccatttcctggtccgtgctgtsgtcctctacattttggatttcatgatagaggcaagagtgagccacagaggaagagagccttgactgctaccaagagaagttgttagccttcctcttgaga

SEQ ID NO: 287577 - DNA, 201 bp, Homo sapiens
ttttagctagctgccaaaatgtggaaagcctttgttccttttccactgttagctgtgtagggaagtttaaattgtccttctgaaggtttgataattgagcstgctaaaataaactgacaataaacagattaacaggagaaaaaccattttaattcatgtatgtgcactggagcctcacagaagaataggagactcaaagga

SEQ ID NO: 287578 - DNA, 201 bp, Homo sapiens
ccgttcccagccagtgacaattttcaagtatacaatacattgttagccactgttcccagccagtggcaattttcaagtatataatacattgttattaactrtagtcactatgttgtttcaggtcttatgtttaagtcttgaatgtattttgagttgatttttatgtattgtgtgcaatatattactcattatatgctttta

SEQ ID NO: 287579 - DNA, 201 bp, Homo sapiens
cattttggatttcatgatagaggcaagagtgagccacagaggaagagagccttgactgctaccaagagaagttgttagccttcctcttgagatggggtgcrgtcccattgtgacattctgtctttgaggggtgaagagagcacttatctgaggttagggggcatgaaatagggagcgtacttggtctgaagttgggatgag

SEQ ID NO: 287580 - DNA, 201 bp, Homo sapiens
gagccctctgacattattaaagctgtcatgtaatatactcaaggttacctaccctgccttgcccgttctttcctgtggaaaccaaagatacttcttccttaaaaaaaaaaaagaagactctgggccatgctcttccttgctcctttgccctcttgaccaactcttgtgcttccccatgcgacccttcttggcatattgtgc

SEQ ID NO: 287581 - DNA, 201 bp, Homo sapiens
agtttgaaaccatcctgggcaacacagaaagatgccatcaataccaaaaaaaggaaattaggtgagtgttaaggtgcaccagccactctggaggctgaggygggaggatcacttgagcccgggaggtgggaggatcacttgagcccgggaagtgggaggatcacttgagcccaggaggtcgaagctgtagtgagctgtgat

SEQ ID NO: 287582 - DNA, 201 bp, Homo sapiens
gggcatggtggcacgcacctgtaatcccagctacttgggaggctgaggcaggagaatcgcttgaatctggaaggcagaggttgcagtgagctgagattgcrccactgcactccagcctgggcgacagagcaagactctgtttcaaaaaaaaaagaaagaaatttagtgtagtctaagtgcatagtgttaataaagtctaag

SEQ ID NO: 287583 - DNA, 201 bp, Homo sapiens
tggctcactgcaatctccacctccagggttcaagcgattctcctgcctcagcctcccaagtagctgggactacaggcatgggccacctgcccaccggctatttttttttgtatttttagtagagacaggatttcatcatgttagccaggctggtctcgaactcctgacctcaggtgatctgcccgccttggcctcccaaag

SEQ ID NO: 287584 - DNA, 201 bp, Homo sapiens
cggggtttcaccattttggccaggctggtcttgaactcctgaccacatgatccacccacctcagcctccttaagtactgggattacaggcgtgagccaccrcacccggccttaaagtttctttaatataaagagaagtaatattgttttttactctttacaaataaagtatagaattttagcaagactgatgaatggttta

SEQ ID NO: 287585 - DNA, 201 bp, Homo sapiens
aagtcggcctggcacagtggctcatgcctgcaatcccagtgctttgggaggccaacttggcaggattacttgaggaaaggagcacaagaccagcctgggcracatagtaagactcttcagtaaataaattagcccagcgtggtggcacgcctgttgtcctaactacttgagaggctgaggcaggaagagtacttcagccca

SEQ ID NO: 287586 - DNA, 201 bp, Homo sapiens
ttcggcctcccaaagttctgggattataggtgtgagctaccacgcccagccaaaattgaataaatttataatgactttcacacgtttcttgtagaaatggttttttttttttacctacttagactctcttactaacagtatgaaaaatgtagattttagtgtcttattctctgttaaccaaaaggagatatagtaaatgct

SEQ ID NO: 287587 - DNA, 201 bp, Homo sapiens
  misc_feature (1)...(201): n = A,T,C or G
ccagccttgtgttgttttcttttaatcgagccataggaggcttaatcatgatggtgtgcttgaagatgaatgagcttgaattatctgagaccaaaaacatnttgccccactagggccgggtgtggtggctcatgcctgtaatcccaacactgggaagctgaggcgggcagatcacgaggtcaggagattgagaccatcctg

SEQ ID NO: 287588 - DNA, 201 bp, Homo sapiens
tctgcttaatctttgtatgaatcatgtttttaatttagtgtattttaggatgttttgacatcttagggggcttgtgaatcctagagtaactgtccctggcrggatttgcttatttttagagataacaacttgcatttgagtcttgccattcatatacaaaccaaccaatccaaagcccatatccctaaactcctcctctat

SEQ ID NO: 287589 - DNA, 201 bp, Homo sapiens
ttttatcttttaatgctacctctctggcctccccttccctgcccttccctcccctcacctccctttttttttttttttttttttttttttttttttttttwaaagagatgatcttgctctgttgcccaggctggagtgcagtggcatgatcatagctaactgtaacttatgaacccatgggctcaagcaatcctctcacca

SEQ ID NO: 287590 - DNA, 201 bp, Homo sapiens
caccttgcttaaagtggtttaatggcttcccattagttttggaattgagaccaatcagccttgacatggtctaagaagctacataacctgggctaggcacrgtggctcacgcttgtaatcctagcactttgggaggccgaggtgggtggataacctgaggtcaggagtttgacaccagcctggccaacatagtgaaacccc

SEQ ID NO: 287591 - DNA, 201 bp, Homo sapiens
cttttaatgctacctctctggcctccccttccctgcccttccctcccctcacctcccttttttttttttttttttttttttttttttttttttttaaagaratgatcttgctctgttgcccaggctggagtgcagtggcatgatcatagctaactgtaacttatgaacccatgggctcaagcaatcctctcaccagagtag

SEQ ID NO: 287592 - DNA, 201 bp, Homo sapiens
tgtaaacaatgaacattgatgtgcataccagttagataccaattaaatctttccagtatgggcaaaacatttttttaagatgttaattgggttagtttgtrtgtaactttttacttgagatttcttttcatgaccattttcttctatgcttaatattcaaaatcattgaaaaagttatttaacataattttatatgttgta

SEQ ID NO: 287593 - DNA, 201 bp, Homo sapiens
ctctactaaaaatattaaaaagtagccgggcatggtggtgcatgcctgtaatcccagctactcgggaggctgagtcaggagaatcacttgaacccaggagkcagaggttgcagtaagccgagatcgcgccactgcattccagcctgggtgatagagcaagactctgtctcaaataataataataataatagtatatagcaa

SEQ ID NO: 287594 - DNA, 201 bp, Homo sapiens
accccgtctctactaagaatacaaaaattagccgggtgtggtggcaggcacctgtaatcccagctactcaggaagctgaggcaagagaattgtttgaaccygggaggcggagattgcagtaagccaagatcgcggcattgcactccagcctgtgtgacagagcaagactctgtctcaaaaaaaaaaaaaaaaaaaacaaaa

SEQ ID NO: 287595 - DNA, 201 bp, Homo sapiens
caaaatcattgaaaaagttatttaacataattttatatgttgtaccttttggaaacaagtatgatagtgacatttatcttttcagataacctactttctctttttccagctgcattccagtccatgatgacaggaggtaacattggaaagcagatagtttgcatttcagaagaaatctctttgtaattgctgtaaatgtca

SEQ ID NO: 287596 - DNA, 201 bp, Homo sapiens
ttgggaggctgaggcgggcagatcacctgaggtcagacgttcaggaccagcctggccaacgtggtgaaaccccgtctctactaagaatacaaaaattagcygggtgtggtggcaggcacctgtaatcccagctactcaggaagctgaggcaagagaattgtttgaacccgggaggcggagattgcagtaagccaagatcgc

SEQ ID NO: 287597 - DNA, 201 bp, Homo sapiens
aaaatcattgaaaaagttatttaacataattttatatgttgtaccttttggaaacaagtatgatagtgacatttatcttttcagataacctactttctctttttccagctgcattccagtccatgatgacaggaggtaacattggaaagcagatagtttgcatttcagaagaaatctctttgtaattgctgtaaatgtcat

SEQ ID NO: 287598 - DNA, 201 bp, Homo sapiens
cccacctcggcctccgaaagtgctgggattacaggcatgagctactatgcctgaacaattttttgtattttagtagagacagggtttcaccatgttggccmggatggtcttgatctcctaaccttgtgatcctcccgcctcagcctcccaaagtgctgggattacaggtgtgagccaccccacctggcctgtttttctttt

SEQ ID NO: 287599 - DNA, 201 bp, Homo sapiens
tctttttttttttttgagatggagtcttgctctgtcgccagtctggagtgcagtggcgctatcttggctcactgcaacctccacttcccgggttcaagtgrttcccctgcctcagcctcctgagtagctgggactacaggcacccaccaccacacctggctaatattttgtatttttagcagagacggggtttcaccatat

SEQ ID NO: 287600 - DNA, 201 bp, Homo sapiens
caagccaccacacctgacctaacttcactcttttgcaagtgaatatacagtcgtgtcagcactttttttttttttaagagagaccagaaatatttgaccaygaagggacatgaaccagcactgtttgttgaaaagataattctttcctcattggtttgtcttagtactcttgttgaaaaccaactgaccataaatatgagg

SEQ ID NO: 287601 - DNA, 201 bp, Homo sapiens
caagtaactgggacgataggtgcaagccaccacacctgacctaacttcactcttttgcaagtgaatatacagtcgtgtcagcactttttttttttttaagrgagaccagaaatatttgaccacgaagggacatgaaccagcactgtttgttgaaaagataattctttcctcattggtttgtcttagtactcttgttgaaaa

SEQ ID NO: 287602 - DNA, 201 bp, Homo sapiens
ggaagtgggaggatcacttgagcccaggaggtcgaagctgtagtgagctgtgatcatgccactgcactccagcctgggcaacagagtgagaccgtgcctcaaaaaaaaaaaaaaaagtttatgaaaacaaagttcgtatttatcactgtatctccagtgactagcataatgtttattaaatgttaattgcataaaggaagg

SEQ ID NO: 287603 - DNA, 201 bp, Homo sapiens
tgtgcttgaagatgaatgagcttgaattatctgagaccaaaaacattttgccccactagggccgggtgtggtggctcatgcctgtaatcccaacactgggaagctgaggcgggcagatcacgaggtcaggagattgagaccatcctggctaacacagtgaaaccccgtctctactaaaaatacaaaaaaattagctgggca

SEQ ID NO: 287604 - DNA, 201 bp, Homo sapiens
ataactttattttattatttttcatgttgtatctgaatcttattgtgcagtcccttatagattggtaaatatttgagcagttatatattgataccttttarttatagattgcctttgtttttattcactagtgtaattaaggaatgttgtagagggaacagataatagtagtacatgtatgtgattcaggtgctttcaaat

SEQ ID NO: 287605 - DNA, 201 bp, Homo sapiens
tttggtttatttttgtgaaaaattacagttgcattgttgaaatgctgaagcactgatccctaactcaccactgaccaactcacagccatggccccagaccttgcggatgggtttcataggctgcatgtatttatgcatatttactaacaatattataaaatatcaacatgaggtattaacactacatagtcctttgctgca

SEQ ID NO: 287606 - DNA, 201 bp, Homo sapiens
ttatttttgtgaaaaattacagttgcattgttgaaatgctgaagcactgatccctaactcaccactgaccaactcacagccatggccccagaccttgcggatgggtttcataggctgcatgtatttatgcatatttactaacaatattataaaatatcaacatgaggtattaacactacatagtcctttgctgcatctaaa

SEQ ID NO: 287607 - DNA, 201 bp, Homo sapiens
caagtgattctcctgcctcagccttctgaatagctgggattacagatgcctgccaccacgcccagctaatttttgtattttttagtagagatggggtttckccatgttggccaggctggtctcaaactcctgacctcaggtgatctgcccgccttggcctcccagagtgctgggattacagacatgagccaccacaccaga

SEQ ID NO: 287608 - DNA, 201 bp, Homo sapiens
ttttttgagatagagtcttgctctgtgcagtggcacaatctcggcttactgccacctctgcctcccgggttcaagtgattctcctgcctcagccttctgartagctgggattacagatgcctgccaccacgcccagctaatttttgtattttttagtagagatggggtttcgccatgttggccaggctggtctcaaactcc

SEQ ID NO: 287609 - DNA, 201 bp, Homo sapiens
caggctgttctcgaactcctggcctcaagagatccacctgcttcggcctcccaaagttctgggattataggtgtgagctaccacgcccagccaaaattgamtaaatttataatgactttcacacgtttcttgtagaaatggttttttttttttacctacttagactctcttactaacagtatgaaaaatgtagattttagt

SEQ ID NO: 287610 - DNA, 201 bp, Homo sapiens
gcctcccaaagtcctggggttacaggcatgagccaccacgcctggccccttgtgcctgttttaaaaggaactgttctgaatcctagagtgaccctttaaakaataataagtatatcccaccactatgggaggccaaggtgggcagatcgtgaggtcaggaatttgagaccagcctggccagcatggtaaaaccccatctct

SEQ ID NO: 287611 - DNA, 201 bp, Homo sapiens
tactgcggtcagagggccgaggcctgggggcgagctggggtcgtgcagtacagcctctttccggcaaatcacgcgagatttcgttcacccgggctccacasggtcagtgacgcgcgagcggctcccgcgactgtggctcccgaagctgcttcgggccccagcggtgagggagaagactctcaaccagggtgacttctaggc

SEQ ID NO: 287612 - DNA, 201 bp, Homo sapiens; identical to SEQ ID NO: 58905

SEQ ID NO: 287613 - DNA, 201 bp, Homo sapiens
ggaggtggaggttacagtgagccaagattgcaccactgcactccagcctgggtgacagagcgagactccatctcaaaaaagaaaaaaaagagaaagctacytggagaatgtaaaatcactgtctgtgtcctccatttatgaattctaagcttgttttccttctctttttcctcaacaggtgaaaggtcctagtattgcgct

SEQ ID NO: 287614 - DNA, 201 bp, Homo sapiens
gtggctcacgtctgtaatcccagtactttgggaggccaaggcggcagatcacctgaggtcaggagtttgagaccagcctggccaacatggtgaaaccccatctctactaaagatacaaaaattagctgggcatggtggtgcacacctgtaatcccagctactcgggaggctgaggcaggagaattgctcgaactcaggagg

SEQ ID NO: 287615 - DNA, 201 bp, Homo sapiens
tggctcacgtctgtaatcccagtactttgggaggccaaggcggcagatcacctgaggtcaggagtttgagaccagcctggccaacatggtgaaaccccatctctactaaagatacaaaaattagctgggcatggtggtgcacacctgtaatcccagctactcgggaggctgaggcaggagaattgctcgaactcaggaggc

SEQ ID NO: 287616 - DNA, 201 bp, Homo sapiens
aatttggcaatatctggagacatttgtggttgtcatatctgaagggagaggtgctattggcatctagcaggcagaggccagagatgctgctaaacattccmcaatgcacaggacaaccaccagaacaaagaattatcttgctgaaaatgtctgtactactgaggttgaggaaccctagtctaagtaaacacaggatgtttg

SEQ ID NO: 287617 - DNA, 201 bp, Homo sapiens
tagccgggcgtggtggtgggcacctgtaatcccagctactcgggaggctgaggcacgagaattgcttgaacccgggaggtggaggttacagtgagccaagwttgcaccactgcactccagcctgggtgacagagcgagactccatctcaaaaaagaaaaaaaagagaaagctacttggagaatgtaaaatcactgtctgtg

SEQ ID NO: 287618 - DNA, 201 bp, Homo sapiens
tttgggagcagcaggggcctttgtgaatacagggccagcctcctggccggacatggttttgctgtgcttgccctggcttatttcagatttgaagacctccycgaagatctgaatgatgtatatctggagtactttgaagaagccgtggactttatgctgcagcatccaaaggtgcgttctggtgatcacctgagtgcagaa

SEQ ID NO: 287619 - DNA, 201 bp, Homo sapiens
cgtggtggtgggcacctgtaatcccagctactcgggaggctgaggcacgagaattgcttgaacccgggaggtggaggttacagtgagccaagattgcaccrctgcactccagcctgggtgacagagcgagactccatctcaaaaaagaaaaaaaagagaaagctacttggagaatgtaaaatcactgtctgtgtcctccat

SEQ ID NO: 287620 - DNA, 201 bp, Homo sapiens
aaaaccctacctctactaattatataatacaaaaaaattagccaggcatagtggctcacacatgtagtcccagctactagggaggctgaggtgggagaatygcttgaacccgggaggctgaggttgcagtgagccaagattgcgccactacacttcagcctgggcgacagagcgagaccctgtctcaaaaaaaaaaaaaaa

SEQ ID NO: 287621 - DNA, 201 bp, Homo sapiens
tactaggaaatcagttgatttgcttattagaagacatatttgaactttgcagattgttggatacggaaggaaagcaaatgatagttaagaaagctactggyggggcacggtggctcatgcctataatcccagcactttgggaggccaaggcaggcggatcacttgaggtcagaagtttgagaccagctggccaacatggtg

SEQ ID NO: 287622 - DNA, 201 bp, Homo sapiens
caggagttcaagactagcctggccaacatggcaaaaccctacctctactaattatataatacaaaaaaattagccaggcatagtggctcacacatgtagtyccagctactagggaggctgaggtgggagaatcgcttgaacccgggaggctgaggttgcagtgagccaagattgcgccactacacttcagcctgggcgaca

SEQ ID NO: 287623 - DNA, 201 bp, Homo sapiens
gctactcgggaggctgaggcaggagaattgctcgaactcaggaggcagaggttgcagtgagtcgagattacaccattgcactctagactgggcaacaagartgaaaccccatctcaaaaaaaaacccaacaacaacaacgacaacaaattttggtataattaaaaatggaattatatatactctttgttatcatccaggtt

SEQ ID NO: 287624 - DNA, 201 bp, Homo sapiens
gcttatttcagatttgaagacctccccgaagatctgaatgatgtatatctggagtactttgaagaagccgtggactttatgctgcagcatccaaaggtgcrttctggtgatcacctgagtgcagaagagaggggatagagctgatgcagggctgaatccaaaagccctgccagaacactgagaactagaaacatgccagga

SEQ ID NO: 287625 - DNA, 201 bp, Homo sapiens
ggcttatttcagatttgaagacctccccgaagatctgaatgatgtatatctggagtactttgaagaagccgtggactttatgctgcagcatccaaaggtgygttctggtgatcacctgagtgcagaagagaggggatagagctgatgcagggctgaatccaaaagccctgccagaacactgagaactagaaacatgccagg

SEQ ID NO: 287626 - DNA, 201 bp, Homo sapiens
ggcggatcacttgaggtcagaagtttgagaccagctggccaacatggtgaaaccctgtctctactaaaaatacaaaaattagccgggcgtggtggtgggcrcctgtaatcccagctactcgggaggctgaggcacgagaattgcttgaacccgggaggtggaggttacagtgagccaagattgcaccactgcactccagcc

SEQ ID NO: 287627 - DNA, 201 bp, Homo sapiens
ctggccggacatggttttgctgtgcttgccctggcttatttcagatttgaagacctccccgaagatctgaatgatgtatatctggagtactttgaagaagycgtggactttatgctgcagcatccaaaggtgcgttctggtgatcacctgagtgcagaagagaggggatagagctgatgcagggctgaatccaaaagccct

SEQ ID NO: 287628 - DNA, 201 bp, Homo sapiens
ttgtgaatacagggccagcctcctggccggacatggttttgctgtgcttgccctggcttatttcagatttgaagacctccccgaagatctgaatgatgtayatctggagtactttgaagaagccgtggactttatgctgcagcatccaaaggtgcgttctggtgatcacctgagtgcagaagagaggggatagagctgatg

SEQ ID NO: 287629 - DNA, 201 bp, Homo sapiens
acatatttgaactttgcagattgttggatacggaaggaaagcaaatgatagttaagaaagctactggcggggcacggtggctcatgcctataatcccagcrctttgggaggccaaggcaggcggatcacttgaggtcagaagtttgagaccagctggccaacatggtgaaaccctgtctctactaaaaatacaaaaattag

SEQ ID NO: 287630 - DNA, 201 bp, Homo sapiens; identical to SEQ ID NO: 58902

SEQ ID NO: 287631 - DNA, 201 bp, Homo sapiens
gaagtaagaaaaacaaagtcagctcctgaaagtacaagaggaattagtagaattgggagttttaagataaagttgtggaatagcaaagagtgaaaataaayaataagtgtttattatttatagaaatggagtctcgttatgttccccaagctggtcttgaactgggctcaagagatcctcctgcctcagcttcccgagtag

SEQ ID NO: 287632 - DNA, 201 bp, Homo sapiens
atcaacttgttttctttccttttggtgcaagggaaagggaaaagcaaagcaattagctaatacaaagtttcatgtttttgtttgtttgtttgtttgtttgtttttttcagccaactgtaaagctcttcattggtgggaaattcgttgaatccaaaagtgacaaatggatcgatatccacaacccagtaagcgaagctgctt

SEQ ID NO: 287633 - DNA, 201 bp, Homo sapiens
acagaaccatacagaaaaatccgtttatcagcaacaaacattaattgcatggtgaaggatgttttgagtgtctgcgacctgatatcaaaatataaacatayagacatatttgggaggcaaaggagtgaataagaatggattatttatgttacagaaaacagcatggggtttctgtaaagagaaaaattatcctggtatatt

SEQ ID NO: 287634 - DNA, 201 bp, Homo sapiens
atacagaaaaatccgtttatcagcaacaaacattaattgcatggtgaaggatgttttgagtgtctgcgacctgatatcaaaatataaacatacagacatakttgggaggcaaaggagtgaataagaatggattatttatgttacagaaaacagcatggggtttctgtaaagagaaaaattatcctggtatatttactatag

SEQ ID NO: 287635 - DNA, 201 bp, Homo sapiens
tagaccgctttaaaaatttagtgtcccagcactttgggaggctgaggcaggtggatcacgaggtcaagagatcgagaccatcctggccaacatggggaaaycacatctctactaaaaatacaaaacttagctgggcatggtggcacgcacctgtagtcccagctactctgcgggctgaggcaggagaatcgcttgaattcg

SEQ ID NO: 287636 - DNA, 201 bp, Homo sapiens
cctaagccctggagattgaggctacagtgagctgtggttgtgccactgcactctagcctgggtgacagagtgagactctgtctcaaaaaaaaaaaaaaaaagaaagagtttaacattagaggctgagagatgtgttaggaagctattatggaaggtcaagtgagagacaatgatggtatagactgggataatggcaggaca

SEQ ID NO: 287637 - DNA, 201 bp, Homo sapiens
agtagtcaaacttaacctaaaacctctctctgctccttgtgatattatcactcccatgcagagataaaggaatgttcgagacagggtctcgctctgtcacscaggctggagtgcagtggtgcaatcacaactcacagcagcctcgacctcccacgctgaagtgattcttccatctcagccctccgagtagctgcaacaaca

SEQ ID NO: 287638 - DNA, 201 bp, Homo sapiens; identical to SEQ ID NO: 58916

SEQ ID NO: 287639 - DNA, 201 bp, Homo sapiens; identical to SEQ ID NO: 58917

SEQ ID NO: 287640 - DNA, 201 bp, Homo sapiens
tacccaagctggagtgcagtggcaccatcctagctcatggcagcctcaaactgttgggctcaagtgatcctcctgcctcagcctcctgagcagcttggacyacaggtgcgggccaccacctggctaatttttttattttttgtaaatatgaagtctcactttgttgcccaggctggtctggaactcctgggctcaagcagt

SEQ ID NO: 287641 - DNA, 201 bp, Homo sapiens
atgactctctcccttgtactgcatctcctccagtcttattcttcctttgctacctcagaatttaaaagaggaacattcttgcattaatttctatttgtgtrtcttctctctagaaagaaattgccaagttaatcacattggaacaagggaagaccctagctgatgctgaaggagatgtatttcgaggccttcgtaagctgg

SEQ ID NO: 287642 - DNA, 201 bp, Homo sapiens; identical to SEQ ID NO: 58906

SEQ ID NO: 287643 - DNA, 201 bp, Homo sapiens
cggcgctattggcggcggcggcagtgcgagcccggatcctgcaggcgagtgagggtggtgccaaggcaccatgaagctaggaattggatcctttccgtcckctccctgagccatcctcgggcgggaccaccttcttggcccaacccctttttggccagacctcctacccgacctgtgcggccctgtcccatgcccagccct

SEQ ID NO: 287644 - DNA, 201 bp, Homo sapiens; identical to SEQ ID NO: 58912

SEQ ID NO: 287645 - DNA, 201 bp, Homo sapiens
tgcagagacgttgatcatgactctctcccttgtactgcatctcctccagtcttattcttcctttgctacctcagaatttaaaagaggaacattcttgcatyaatttctatttgtgtgtcttctctctagaaagaaattgccaagttaatcacattggaacaagggaagaccctagctgatgctgaaggagatgtatttcga

SEQ ID NO: 287646 - DNA, 201 bp, Homo sapiens
ggctggtctggaactcctgggctcaagcagtcctcctgccttggcctcctaaagctttgggattacaggcatgagccctggcagcagtcataatttatgtyaatgaggaccttaaattcttctgtgttgttttacaggagatcagcctggagctgatcttggccctctgatcactccccaggccaaagagcgagtctgtaa

SEQ ID NO: 287647 - DNA, 201 bp, Homo sapiens
gtatgcagtttgatgagttttaacatttgtatacacctgtgaaaatagcatcacaatcaacataatgaacatatgtccatcaccccaaaaagtttccctcktcatccctaggtaaccactgttctgctttctgatattacagatttgtttgcattctctagtgttacataagtagaatcatacagtatgtacttttattat

SEQ ID NO: 287648 - DNA, 201 bp, Homo sapiens
catgagaacacaatagtgtctgagtgtcccagtacatagtcaccattgaggaaatattgttattcttttttttgagatggagtctccctctgtcgcccagrctggagagcagtggtgcgatctcggctcactctacccgctgcctcccaggttcaagcaattttcctgcctctgcctcttaaatagctgggattacaggca

SEQ ID NO: 287649 - DNA, 201 bp, Homo sapiens
ttttttaaagcacaggctgtctgttacccaagctggagtgcagtggcaccatcctagctcatggcagcctcaaactgttgggctcaagtgatcctcctgcstcagcctcctgagcagcttggaccacaggtgcgggccaccacctggctaatttttttattttttgtaaatatgaagtctcactttgttgcccaggctggt

SEQ ID NO: 287650 - DNA, 201 bp, Homo sapiens
  misc_feature (1)...(201): n = A,T,C or G
tatcaacttgttttctttccttttggtgcaagggaaagggaaaagcaaagcaattagctaatacaaagtttcatgtttttgtttgtttgtttgtttgtttntttttttcagccaactgtaaagctcttcattggtgggaaattcgttgaatccaaaagtgacaaatggatcgatatccacaacccagtaagcgaagctgct

SEQ ID NO: 287651 - DNA, 201 bp, Homo sapiens
tagagaggcaggcaggggttgagtcatgtagggctctttaagccatttaaagaagccctcatcagactgtagttgttatctacttatctgcagtacctggmacagagcaggctgcccaaacatttgttgaacaaataggctaggggaagttctttctagtcataggactagagccattttgaaaccttcattaataaatta

SEQ ID NO: 287652 - DNA, 201 bp, Homo sapiens
aaaagaaaaacacaggaaaacttcaaatccatagcagtggggaaaggggaaatttgccatgttgagaatccatttgctcctttgtgagtgatcatttattytcttcttaaagctgtaaattttatttgcgatcatccggacatcaaagcaatcagctttgtgggatccaacaaggcaggagagtatatcttcgagagagga

SEQ ID NO: 287653 - DNA, 201 bp, Homo sapiens
gtgcaggcattgctccattcaattttcctgccatgatccccctttggatgtttcccatggccatggtgtgtggaaataccttcctaatgaaaccatctgarcgagtccctggagcaactatgcttcttgctaagttgctccaggattctggtgcccctgatggaacattaaacatcatccatggacagcatgaaggtaact

SEQ ID NO: 287654 - DNA, 201 bp, Homo sapiens; identical to SEQ ID NO: 58909

SEQ ID NO: 287655 - DNA, 201 bp, Homo sapiens; identical to SEQ ID NO: 58910

SEQ ID NO: 287656 - DNA, 201 bp, Homo sapiens
cataggactagagccattttgaaaccttcattaataaattacatgttttgttatacaagtctccccttttataggttgattttttttttctgtgccagctrtgtgctgccacagggcgagggatgtggggcttttttattttatttatgtttgggttattaaaaaattaacaatgggattgcatagcattatgacagtgtg

SEQ ID NO: 287657 - DNA, 201 bp, Homo sapiens
  misc_feature (1)...(201): n = A,T,C or G
cctggagcaactatgcttcttgctaagttgctccaggattctggtgcccctgatggaacattaaacatcatccatggacagcatgaaggtaactgcccttntgcatatggctacttaatctggctaccaaaaaatcaaggtgttgagtgatggttggatgttttaggataaggaacctacttgtaaggaggaaaggattta

SEQ ID NO: 287658 - DNA, 201 bp, Homo sapiens
ctccttactgtgtcagactcctgaggttcttttggaatagtgggtagcaccacttcaccagaagagtctgatattgcaatttgctgggtgatgaagatttyatcttgaagcttactttcatccctgcaataatgacaaaataacagaaccgtcaacaactctacacacatgaaacctggtttagaataacagacttgtcat

SEQ ID NO: 287659 - DNA, 201 bp, Homo sapiens
cattctcggctcacttgcaacctccacctcccaggttcaagcaattctgcctcaggctccaccacgcccagcttttttttttttttttttttttttttttycccagtagagacgaggtttcgccatgttgggccaggctggtcttgagctcatggcctcaagtgatccgcctacctcagcctcccaaagtgctgatattac

SEQ ID NO: 287660 - DNA, 201 bp, Homo sapiens
gcattctcggctcacttgcaacctccacctcccaggttcaagcaattctgcctcaggctccaccacgcccagctttttttttttttttttttttttttttttcccagtagagacgaggtttcgccatgttgggccaggctggtcttgagctcatggcctcaagtgatccgcctacctcagcctcccaaagtgctgatatta

SEQ ID NO: 287661 - DNA, 201 bp, Homo sapiens; identical to SEQ ID NO: 58913

SEQ ID NO: 287662 - DNA, 201 bp, Homo sapiens
gttctttctagtcataggactagagccattttgaaaccttcattaataaattacatgttttgttatacaagtctccccttttataggttgattttttttttctgtgccagctatgtgctgccacagggcgagggatgtggggcttttttattttatttatgtttgggttattaaaaaattaacaatgggattgcatagcat

SEQ ID NO: 287663 - DNA, 201 bp, Homo sapiens
tttaggataaggaacctacttgtaaggaggaaaggatttactcattttaacctccatgtttgttgatgattttgccatctttgtgcgccaaggtaactgaytggggaatagcagtgcttgttgccctacagtatatattgggacactagaaatatggattagggctagacacagataagattaaaaagaaacttttttctt

SEQ ID NO: 287664 - DNA, 201 bp, Homo sapiens
acataattgtcatcagagtgtatgtgaaactttctagttttttcctccttttggattatttccctcctgaaatggattaccatgtcaaaagatacaaacaktttcatggcttctagaggttctgctgaccctgccagatagttgtcttcttcttaatgacctttagagtggtttttacagatcatctgtctgtcaaccact

SEQ ID NO: 287665 - DNA, 201 bp, Homo sapiens
ccacctgtgatggaaagctaagagtcacaaggtcactatgtttactcttacgtaaaagatagtacacattttggctaggctgtttacttcaaaaggcaacstataggtttctacacaaaaagaggcacacatttgcatttgcattagtataatatgcatttgtacggatattgctttaaaaatttatgtaatctactaatg

SEQ ID NO: 287666 - DNA, 201 bp, Homo sapiens
ggattacaggcgtaagccttaccatatcctcctgaatgtcttctctttaatcatgaaccttttgaggagtttcattctaagtcacgttaatcactttttttctttttttttgagacagagtcttactctgtcacccaggctagagtgcagtggtgccatctcagctcactgcaacctccacctcccaggttctaacaattc

SEQ ID NO: 287667 - DNA, 201 bp, Homo sapiens
acctttagagtggtttttacagatcatctgtctgtcaaccacttccagcatctaaaatctaataaataaggactattgctcaaattctttctacacagaartatgcacacactgtaccacagtaggtcaccattttttggttcatagaccgctttaaaaatttagtgtcccagcactttgggaggctgaggcaggtggatc

SEQ ID NO: 287668 - DNA, 201 bp, Homo sapiens
gcgcccggctaatttttctattttttttcagtagagacagggtttcaccatgttggccaggatggtttcgatctcctgacctcatgatctgcccgcctcgrcctcccaaagtgctgggattacaggcgtaagccttaccatatcctcctgaatgtcttctctttaatcatgaaccttttgaggagtttcattctaagtcac

SEQ ID NO: 287669 - DNA, 201 bp, Homo sapiens
aaaataaaagggaaaggagaagagcccaagaaagaaatgtatgttcgaggggcagagacagagtggatgttcccagtagagcaaagaaggaggctgcaggmaaagatctctaagccggctcttaccgtctgtgggagacgccatcttccaacccatgtcacgtgacgtggccaaccgtcggcgggaaaacgaggttccata

SEQ ID NO: 287670 - DNA, 201 bp, Homo sapiens
gctgggtgcagtggcacatacctgtgatcccagcactttgggaggtgaaggcaggcggatcacttgagcccaggagttcgagaccagcctgggccatgtggcgaaacccccgtctctacaaaaaaaatacaaaaattagccaggaatggtggcatgtgcaggtagtcccatgaggtgggaagacagcttgagcctggcaaa

SEQ ID NO: 287671 - DNA, 201 bp, Homo sapiens
caacttgttttctttccttttggtgcaagggaaagggaaaagcaaagcaattagctaatacaaagtttcatgtttttgtttgtttgtttgtttgtttgtttttttcagccaactgtaaagctcttcattggtgggaaattcgttgaatccaaaagtgacaaatggatcgatatccacaacccagtaagcgaagctgctttg

SEQ ID NO: 287672 - DNA, 201 bp, Homo sapiens
gaatcatgaaaccccagaaatatatgctaactttttttctgttttccttagggcatccaattctacactcagttaaagaccattacttctcagtggaaagragaagatgctactctttcctcacctgctgttgtcatgcctaccatgggccgttagaaacaagtttgtttaagactgactccatcctgagtaatctccctt

SEQ ID NO: 287673 - DNA, 201 bp, Homo sapiens
caattagctaatacaaagtttcatgtttttgtttgtttgtttgtttgtttgtttttttcagccaactgtaaagctcttcattggtgggaaattcgttgaayccaaaagtgacaaatggatcgatatccacaacccagtaagcgaagctgctttgggacttcaacttatgagcctagaattctagggacatgatgggcaaga

SEQ ID NO: 287674 - DNA, 201 bp, Homo sapiens
tcaacttgttttctttccttttggtgcaagggaaagggaaaagcaaagcaattagctaatacaaagtttcatgtttttgtttgtttgtttgtttgtttgtttttttcagccaactgtaaagctcttcattggtgggaaattcgttgaatccaaaagtgacaaatggatcgatatccacaacccagtaagcgaagctgcttt

SEQ ID NO: 287675 - DNA, 201 bp, Homo sapiens
atctccactaaaaatacaaaaaattaggccaggcgcagtggctcacgcctgtaatcccagcactttgggaggctgaggcgggcggatcatgaggtcaggasatcgagaccatcctggctaacatggtgaaaccccatctctactaaaaatacaaaaaactagccaggcatggtggcgggcgcctgtagtcccagttactca

SEQ ID NO: 287676 - DNA, 201 bp, Homo sapiens
cgtcttctctacctccgcctacgtcattggctgaggtggcagagggcgagagcattttcgctcctaaccaatcacttatccccaggacgggggtgtgaggrgaggaatcaggtgttcggaccagtgattggctggagaaaatagtcctccccaccaatgaggaagcctggcaggatggagggcgaggcctggcagctgtag

SEQ ID NO: 287677 - DNA, 201 bp, Homo sapiens
ctgttacaaagaggagatttttggtccagttcttgtggttctggagacagaaacattggatgaagccatccagattgtaaataacaacccatatggaaatrgaactgccatcttcaccaccaatggagccactgctcggaaatatgcccacttggtggatgttggacaggttcgtgaacagaatttttaagagattcttat

SEQ ID NO: 287678 - DNA, 201 bp, Homo sapiens
tgataaacaataggagtatctgggatactgtggggacctagggaaagagccaagtattgcaggactagcaggccatgaaccaggagaggaaggagttcctkataaaggatatagcaagtaggaagtaaacatctagagagcagcagtttggggtgactggccacaggatagtttcttcagcaacaatgctaatgggtgttt

SEQ ID NO: 287679 - DNA, 201 bp, Homo sapiens
ggatcctttccgtccgctccctgagccatcctcgggcgggaccaccttcttggcccaacccctttttggccagacctcctacccgacctgtgcggccctgwcccatgcccagccctcacttcataacctccctggtcccggatccaaccctgggctgttacccttggccctctacccttttactcctaagcctcctctttt

SEQ ID NO: 287680 - DNA, 201 bp, Homo sapiens
ttgcattaatttctatttgtgtgtcttctctctagaaagaaattgccaagttaatcacattggaacaagggaagaccctagctgatgctgaaggagatgtrtttcgaggccttcgtaagctgggagccccttatgggacttttgggaaggaccaaaggaagatgggaggcaaagatcgcagaatgggaggttgcttcttcc

SEQ ID NO: 287681 - DNA, 201 bp, Homo sapiens
agaaatcaccgtgccgttatttacaatgacataacaataagatttaatgagtaccagctttgtgctaactacttttctataactggacagtcctgatcagstttaatctttaactctgaagtaggtgaacaagacagatgcagtgtcaaccctcctgaaactgacagtctttatgggtaacagataagtacccaggtgctg

SEQ ID NO: 287682 - DNA, 201 bp, Homo sapiens
cctgggcaacagagtgagaccatgtctcaaaaaaataaaaaataaaaaataagggccaggtgcagaggctcacgcctgtaatcctagcactttgggaggcsgaggtgggtggatcacctgaggtcaggagttcgagatcagtctggccgacatggtgaaaccccatctctactcaaaatacaaaaattagttgggtgttgt

SEQ ID NO: 287683 - DNA, 201 bp, Homo sapiens; identical to SEQ ID NO: 58915

SEQ ID NO: 287684 - DNA, 201 bp, Homo sapiens
agggcctcttaacctagtttggggtaggaagcagacaggaatgggcttctattttattcagcagatatttactgaacacctactacctaccgagtactatrttggtattgggaacatagctataaataagacatgatgggctccaggagagtgtcagtggtttgaaatggctttggtagggaatagaagagcaaacagatg

SEQ ID NO: 287685 - DNA, 201 bp, Homo sapiens
  misc_feature (1)...(201): n = A,T,C or G
gttctcattcaccggctctcgatcctccttcaggggagacaccaatttctatggcaaacaggtaacttttgagttaaattttttgtcttttcctttaaganattttcttaaagatattcaggagcaaggattctgcaaggaagggactgccagcagcatctgtgaggtcataatcagtgcttctcagaaggttccctaaaa

SEQ ID NO: 287686 - DNA, 201 bp, Homo sapiens
ttttttaatacttgtgaaaaatggcagtattcagtatccctaagactgatttactttactctttactcaaatgatcttccagtgggtatatacatatcgcygtatttttcccattcagagaatctcattttgcacaaacccttaacttggaagggcaagtcagtgtaccctgcaccccttcattggcctgaaccacttcct

SEQ ID NO: 287687 - DNA, 201 bp, Homo sapiens
catggggtagaggatagggtagaaggtgggtatttaaaactggtctctgatgcctttgtgtttctaaatggagagttcctttgtccttaggatatgacacrgatttgttctgttttaggtgggagtgaatgtccccattccagtgcctttgccaatgttctcattcaccggctctcgatcctccttcaggggagacaccaa

SEQ ID NO: 287688 - DNA, 201 bp, Homo sapiens
ctgatcctttcaatgggtaccccaaggagaaaactacagtaagccacgtcctccagaaacatctcctcctcgaccctcagcctcgcccaaatagagataargaaggcacagggcgacccccctgtccttttacccagaatgagtccctccctagtgccctcctccacacgcctggtacagagcggggaaactgggcacctc

SEQ ID NO: 287689 - DNA, 201 bp, Homo sapiens
atcttccagtgggtatatacatatcgctgtatttttcccattcagagaatctcattttgcacaaacccttaacttggaagggcaagtcagtgtaccctgcrccccttcattggcctgaaccacttcctgtcctcagggctgaagagaacaggacaaagctaactagtacacagtgtggagagctgatggcctgacttctgt

SEQ ID NO: 287690 - DNA, 201 bp, Homo sapiens
tcttttttttttgagaggagtctctctctgtcacccaggctggagtacagtggcatgatctcggctcactgcaacctccgcctcccgggttcaagtgattytcctgcctcagcctcccgagtagctgggattacaaatgtgtgccaccatgcctggctaatttttgtatttttagtagagatggggtttcaccatgttggc

SEQ ID NO: 287691 - DNA, 201 bp, Homo sapiens
caatagtagcaggcagaaatttttgtcagagacatctttgataatccttacgtactatatcagaagatctcctaatgctcttagtagataactttttttttgtaaggatggagaataatagaataacacagaaaaaatttcccaaggccatctaattaactgaattttctctgagagttgaaaccccaaaacagcccccaa

SEQ ID NO: 287692 - DNA, 201 bp, Homo sapiens
ttttcttttctttctcttttttttttgagaggagtctctctctgtcacccaggctggagtacagtggcatgatctcggctcactgcaacctccgcctcccrggttcaagtgattctcctgcctcagcctcccgagtagctgggattacaaatgtgtgccaccatgcctggctaatttttgtatttttagtagagatggggt

SEQ ID NO: 287693 - DNA, 201 bp, Homo sapiens
ttcttttcttttcttttctttctcttttttttttgagaggagtctctctctgtcacccaggctggagtacagtggcatgatctcggctcactgcaacctcygcctcccgggttcaagtgattctcctgcctcagcctcccgagtagctgggattacaaatgtgtgccaccatgcctggctaatttttgtatttttagtaga

SEQ ID NO: 287694 - DNA, 201 bp, Homo sapiens
ccagcctagaattaatttcttttcttttcttttctttctcttttttttttgagaggagtctctctctgtcacccaggctggagtacagtggcatgatctcrgctcactgcaacctccgcctcccgggttcaagtgattctcctgcctcagcctcccgagtagctgggattacaaatgtgtgccaccatgcctggctaattt

SEQ ID NO: 287695 - DNA, 201 bp, Homo sapiens
acccagcctagaattaatttcttttcttttcttttctttctcttttttttttgagaggagtctctctctgtcacccaggctggagtacagtggcatgatcwcggctcactgcaacctccgcctcccgggttcaagtgattctcctgcctcagcctcccgagtagctgggattacaaatgtgtgccaccatgcctggctaat

SEQ ID NO: 287696 - DNA, 201 bp, Homo sapiens
gtacgtgtgtgccactgtacccagcctagaattaatttcttttcttttcttttctttctcttttttttttgagaggagtctctctctgtcacccaggctgragtacagtggcatgatctcggctcactgcaacctccgcctcccgggttcaagtgattctcctgcctcagcctcccgagtagctgggattacaaatgtgtg

SEQ ID NO: 287697 - DNA, 201 bp, Homo sapiens
aagtgctgggactgtacgtgtgtgccactgtacccagcctagaattaatttcttttcttttcttttctttctcttttttttttgagaggagtctctctctstcacccaggctggagtacagtggcatgatctcggctcactgcaacctccgcctcccgggttcaagtgattctcctgcctcagcctcccgagtagctggga

SEQ ID NO: 287698 - DNA, 201 bp, Homo sapiens
gatggtcttgatctcctgggctcaagtcatcctcctgcctcagcttcccaaagtgctgggactgtacgtgtgtgccactgtacccagcctagaattaatttcttttcttttcttttctttctcttttttttttgagaggagtctctctctgtcacccaggctggagtacagtggcatgatctcggctcactgcaacctccg

SEQ ID NO: 287699 - DNA, 201 bp, Homo sapiens
tttggtacccttattgctgttacttattttaaagataccatgtgcatgggactataaaacccaatccatatctgttttgcctggatgataaaagattttaraacattttgaagaaatgagaatttagtaagatttgagaaccctagaactggcagtgtaacttttcctgttaaagtagtagcctaagaaactctcaataat

SEQ ID NO: 287700 - DNA, 201 bp, Homo sapiens
atattagccctcaattttcttttaagtgatttttctagttaatcaagatctgcagttctttgttcttttttgacagggtcttgctctgtcacccaggctgragtgcagtggcacaatcatggctcactacagcctcaacctcctgggctcaagggatcctcttgcctcagcttcccgtatatgtgcaccaccatacctggc

SEQ ID NO: 287701 - DNA, 201 bp, Homo sapiens
cctacaatcatattagccctcaattttcttttaagtgatttttctagttaatcaagatctgcagttctttgttcttttttgacagggtcttgctctgtcayccaggctggagtgcagtggcacaatcatggctcactacagcctcaacctcctgggctcaagggatcctcttgcctcagcttcccgtatatgtgcaccacc

SEQ ID NO: 287702 - DNA, 201 bp, Homo sapiens
agagcgagtcttgctctgtcgcccaggctggagtgcaatgttgcaatcttggctcactgcagcctctgcctccaggttcaagcgatcctcgcgcttcaacsccccagcagctgggactagaggtgtgcgccaccacacttggcttttttttttttttttttttgtatttttagtagagacaggggtctcaccatgttgtcc

SEQ ID NO: 287703 - DNA, 201 bp, Homo sapiens
tttttttttgtttttggagagcgagtcttgctctgtcgcccaggctggagtgcaatgttgcaatcttggctcactgcagcctctgcctccaggttcaagcratcctcgcgcttcaaccccccagcagctgggactagaggtgtgcgccaccacacttggcttttttttttttttttttttgtatttttagtagagacaggg

SEQ ID NO: 287704 - DNA, 201 bp, Homo sapiens
tttctggaatagaatattttaatagccaaaaggcaaaggatattgacaagaataaggctacaggtcacaaacagttcaagatgattttgtaggttcagggyctagttgacttagcatgcaatataatttgtgttaaagttctgaataccttgtccttgttctgcaagatcatggagatgtcagctaaaggaatcaaacctg

SEQ ID NO: 287705 - DNA, 201 bp, Homo sapiens
acctacaatcatattagccctcaattttcttttaagtgatttttctagttaatcaagatctgcagttctttgttcttttttgacagggtcttgctctgtcrcccaggctggagtgcagtggcacaatcatggctcactacagcctcaacctcctgggctcaagggatcctcttgcctcagcttcccgtatatgtgcaccac

SEQ ID NO: 287706 - DNA, 201 bp, Homo sapiens
agattacttattaagcaaatctccagggttgagagggaaggtatcactaagtttattatcctggagtataagcacatgtttcaggaacaggaagtaaagargtttacatttctaaatttctccagatttgtttatctttagggagatactgtctctgcctttcaaggcctttgctattcaatcaactcgtcagtgtccttt

SEQ ID NO: 287707 - DNA, 201 bp, Homo sapiens
ttacaggcacatgacaccacgcctggctattttttgtatttttagtagagacagagtttccccatgttggccaggctcgtctcgaactcctgaccttaggygatccgcctgccttggccttccaaagtgctgggattacaggcatgagccactgcatccggcctagtttttttgttttcaaagcaccggtcaccacggtga

SEQ ID NO: 287708 - DNA, 201 bp, Homo sapiens
ctcctgaatagctgggattacaggcacatgacaccacgcctggctattttttgtatttttagtagagacagagtttccccatgttggccaggctcgtctcraactcctgaccttaggtgatccgcctgccttggccttccaaagtgctgggattacaggcatgagccactgcatccggcctagtttttttgttttcaaagc

SEQ ID NO: 287709 - DNA, 201 bp, Homo sapiens
ttgtgctacttataagttctcttcctttctggacaagaattttaaggtaggagttagcacttaggagtttgacttcatttacgaagcagaagataaactcytttcttcatttgggtcttaagagaaatgataagcaaggctttgataagcttcttatcaaagaggagctttggctgattgacataaaatagttttcttaca

SEQ ID NO: 287710 - DNA, 201 bp, Homo sapiens
cactagtttctgtttattattattttttttttgtgatggagtctcactctgtcacccaggctggagtgcaatggcacaatcttggctcactgcaacctccdcctcctgggttcaagcgattctcctgcctcagactcctgaatagctgggattacaggcacatgacaccacgcctggctattttttgtatttttagtagag

SEQ ID NO: 287711 - DNA, 201 bp, Homo sapiens
ataccttagcactagtttctgtttattattattttttttttgtgatggagtctcactctgtcacccaggctggagtgcaatggcacaatcttggctcactrcaacctccgcctcctgggttcaagcgattctcctgcctcagactcctgaatagctgggattacaggcacatgacaccacgcctggctattttttgtattt

SEQ ID NO: 287712 - DNA, 201 bp, Homo sapiens
gcctcagcctcccgagtagctgggattacaaatgtgtgccaccatgcctggctaatttttgtatttttagtagagatggggtttcaccatgttggccaggstggtctcaaactgctgacctccagtgatccgcccacctcggcttcccaaagtgctgggattacaggtgtgagccactgcaccccgccaggctagcatttc

SEQ ID NO: 287713 - DNA, 201 bp, Homo sapiens; identical to SEQ ID NO: 58952

SEQ ID NO: 287714 - DNA, 201 bp, Homo sapiens
agcagccatagcaataccttagcactagtttctgtttattattattttttttttgtgatggagtctcactctgtcacccaggctggagtgcaatggcacartcttggctcactgcaacctccgcctcctgggttcaagcgattctcctgcctcagactcctgaatagctgggattacaggcacatgacaccacgcctggct

SEQ ID NO: 287715 - DNA, 201 bp, Homo sapiens
tgagagggaaggtatcactaagtttattatcctggagtataagcacatgtttcaggaacaggaagtaaagaggtttacatttctaaatttctccagatttstttatctttagggagatactgtctctgcctttcaaggcctttgctattcaatcaactcgtcagtgtcctttgcttggaaagccctgaccatgcagaaata

SEQ ID NO: 287716 - DNA, 201 bp, Homo sapiens
tatctaatagaggctcagtaaattcttagagaattgttaaatcaagttagatgaacatgtgtttgaaggataggcagggttctctatgtggagagaatacrtggaagccagtggaagactgcctggaacaaatagaagaatggagacagggtgagcctggtgtattgggagaagtggggaggctgcgttgactggagtaca

SEQ ID NO: 287717 - DNA, 201 bp, Homo sapiens; identical to SEQ ID NO: 58954

SEQ ID NO: 287718 - DNA, 201 bp, Homo sapiens
aaatgcagcagccatagcaataccttagcactagtttctgtttattattattttttttttgtgatggagtctcactctgtcacccaggctggagtgcaatrgcacaatcttggctcactgcaacctccgcctcctgggttcaagcgattctcctgcctcagactcctgaatagctgggattacaggcacatgacaccacgc

SEQ ID NO: 287719 - DNA, 201 bp, Homo sapiens
cagcaaaatgcagcagccatagcaataccttagcactagtttctgtttattattattttttttttgtgatggagtctcactctgtcacccaggctggagtrcaatggcacaatcttggctcactgcaacctccgcctcctgggttcaagcgattctcctgcctcagactcctgaatagctgggattacaggcacatgacac

SEQ ID NO: 287720 - DNA, 201 bp, Homo sapiens
tcccaagtagctgggactacaggcgcccgccactacgcccggctaattttttgtatttttagtagagacggggtttcaccgtttttagccgggatggtctygatctcctgacctcgtgatccgcccgcctcggcctcccaaagtgctgggattatacatatatatattctagcaagagacatgaggctttttggatcacag

SEQ ID NO: 287721 - DNA, 201 bp, Homo sapiens
acctttttctacacctaggttttagaggaattaccagtattgtctctttttttaaaaaaaaaaaagtctcgctctctcatgcaggctggagtgcagtgacrcagtcagggttcactgtgtgtatccttgacctcttaggctcaagtgaccctcccaccttagcctcccaagtagctgggactacaggtgcgtgtcaccaca

SEQ ID NO: 287722 - DNA, 201 bp, Homo sapiens
tcttcagttttctggaatagaatattttaatagccaaaaggcaaaggatattgacaagaataaggctacaggtcacaaacagttcaagatgattttgtagsttcagggcctagttgacttagcatgcaatataatttgtgttaaagttctgaataccttgtccttgttctgcaagatcatggagatgtcagctaaaggaat

SEQ ID NO: 287723 - DNA, 201 bp, Homo sapiens
gtgccttcttgaacatacggagtatagctatcataacttaatgttcttgtctactagttctgttgtgttatttctgaatgtgtttttattggttagtttcrcttcctggttaaatgttacggttttctactttttgcatgcctggtagtttttgatcactagacatatgatctctagtgaatcactagggcacattatatt

SEQ ID NO: 287724 - DNA, 201 bp, Homo sapiens
caagttcatcggtcttctatagtgttttatctgctgttaatctcatctagtgtattttcatctctagattaatttgggtcttttatatatgtgttctgtgrctctccttaacatgcttatgtttttctgtgccttcttgaacatacggagtatagctatcataacttaatgttcttgtctactagttctgttgtgttattt

SEQ ID NO: 287725 - DNA, 201 bp, Homo sapiens
ttttaatatttttctccttatcactggttttaagcaatttgattatgatgtcttttggtgcagttttcttcatatgtatttttcctgaggtttattgatcytcttggatctgtaaatttgtttcatttggaaaaaaaatttggccatgatttctttagtttttttttttgccccctcttccatcacttctccttcagggcc

SEQ ID NO: 287726 - DNA, 201 bp, Homo sapiens
aatatttcacatttgtccacatatttaccatttctggtgctcataagtcatttgtgtagacccagatatctgtctgctgtcattttctcttctgctagaasgaatttcttcagcatttcttttctgttttgttttgttttttgagacaaggtctcgctctgtctccccagctgaagcacagtagtggaatcatagctcact

SEQ ID NO: 287727 - DNA, 201 bp, Homo sapiens
tttttttgagacggagtctcgctctgtcgcccaggctggagtgcagtggcgggatctcggctcactgcaagctccgcctcccgggttcacaccattctccygcctcagcctcccaagtagctgggactacaggcgcccgccactacgcccggctaattttttgtatttttagtagagacggggtttcaccgtttttagccg

SEQ ID NO: 287728 - DNA, 201 bp, Homo sapiens
tatgtaaattttttttttttttttttttttttgagacggagtctcgctctgtcgcccaggctggagtgcagtggcgggatctcggctcactgcaagctccrcctcccgggttcacaccattctcccgcctcagcctcccaagtagctgggactacaggcgcccgccactacgcccggctaattttttgtatttttagtaga

SEQ ID NO: 287729 - DNA, 201 bp, Homo sapiens
cctggtgtgccgtttgctaagactgttggaaaagcgcagtattagggtgggagtgtcccgatttcccaggtaccatctgtcacggcttcccttggctaggraagggaattccctgaccccttgtgcttcccaggtgaaccagtcctaatgagatgaacccagtacctctgttggaaatgcagaaatcaccgtcttctgcat

SEQ ID NO: 287730 - DNA, 201 bp, Homo sapiens
ctcctttggcaggttttcatgtttgtaaagctttgttttgaattataatgcactctttatagctcatcgtcctttttttatttttattttttttttttttkgagacggaatcttgctctgtcgcccaggctggagtgcagtggagtgatctcggctcactgcaaccttcgcctcccgggctcaagcaattctcctgcctca

SEQ ID NO: 287731 - DNA, 201 bp, Homo sapiens
agccagctgcaggatataatctcctggtgtgccgtttgctaagactgttggaaaagcgcagtattagggtgggagtgtcccgatttcccaggtaccatctrtcacggcttcccttggctaggaaagggaattccctgaccccttgtgcttcccaggtgaaccagtcctaatgagatgaacccagtacctctgttggaaatg

SEQ ID NO: 287732 - DNA, 201 bp, Homo sapiens
tttgtcccagaagggcacccacctgtatgaggtgtcagtcggcctcgactgggaggtgtctcccagttaggctacttgggggtcagggacccacttgaggwggcagtctgtccattctcagatctcaaactccatgctggaagaaccactactcttttcaaagctgtcagacagggacgtttaagtctgcagaagtttccg

SEQ ID NO: 287733 - DNA, 201 bp, Homo sapiens
caaaaaaacaaaacaaaaaaacctgctagtatagagatggtcactaaatcaaaccatacataaaaacaagaagttacggtagcccacgcctgtaattccgrcacttcgggaggctgaggcgggtgggtcacaaggtcaggagatcaagaccatcctggtcaacatggtgaaacccggtctctactaaaaaatacaaaaaat

SEQ ID NO: 287734 - DNA, 201 bp, Homo sapiens
tttgtggttttatctacctttggtttttgatgatgctgacctacatatggggttttggtgtggatgtcctttttgttgatgttgatgctattcctttctgytagttttccttctaatagtcaggaccctcagctgcaggtctgttggagtttgctggaggtccactccagaccctgtttgcctgggtatcaccagcggagg

SEQ ID NO: 287735 - DNA, 201 bp, Homo sapiens
agcttttctgttctggtttctccccatctttgtggttttatctacctttggtttttgatgatgctgacctacatatggggttttggtgtggatgtcctttytgttgatgttgatgctattcctttctgttagttttccttctaatagtcaggaccctcagctgcaggtctgttggagtttgctggaggtccactccagacc

SEQ ID NO: 287736 - DNA, 201 bp, Homo sapiens
tttgccagtattttattgaggatttttgcatcgatgttcatcagggatattggtctaaaattctctttttttgttatgtcttggtatcaggctgatgctgrcctcataaaatgagttagggaggttccctctttttctaatgattggaatagtttcagaaggaatagtaccagctcatctttgtatctctggtagaattca

SEQ ID NO: 287737 - DNA, 201 bp, Homo sapiens
aagccaacttgatcatggtggataagctttttgatgtgctactggattctgtttgccagtattttattgaggatttttgcatcgatgttcatcagggataytggtctaaaattctctttttttgttatgtcttggtatcaggctgatgctggcctcataaaatgagttagggaggttccctctttttctaatgattggaat

SEQ ID NO: 287738 - DNA, 201 bp, Homo sapiens
tatcaattttttttctttaattgtgtctagattttgggtaatagaaaacctttttctacacctaggttttagaggaattaccagtattgtctctttttttwaaaaaaaaaaagtctcgctctctcatgcaggctggagtgcagtgacgcagtcagggttcactgtgtgtatccttgacctcttaggctcaagtgaccctcc

SEQ ID NO: 287739 - DNA, 201 bp, Homo sapiens
cctggtgtattgggagaagtggggaggctgcgttgactggagtacaagtcagactggtacagatgttggtgaaatcttggggagcacagacctgcatcctsctttactcctgttttccccataggtgaacacatccagctcccaggtggatcgtttggttataccagaagagaaccacttggggtatgtgtgggaatagga

SEQ ID NO: 287740 - DNA, 201 bp, Homo sapiens
tcactactgcgatagaggaaatctatctccctatcttgggtccttgaactacagcctgctgtcttacaccagtggagctaccctttaaatgtacaaattayttgtatgctaatgtaatatggtgaaattaaaataaatcacactgttaattgttttcctatcgtgttttgaaactaaacgtatcttgaggttatgggagga

SEQ ID NO: 287741 - DNA, 201 bp, Homo sapiens
atggtgaaacccggtctctactaaaaaatacaaaaaattagctgggcgtagtggcgtgcactggtagtcccagctactcaggaggctgaggcaggggaatygcttgaactcaggaggcagaggttgcagtgagccgagatcgcgccactgcactccagcctgggtgacagagcaagactccatctcaagaaaaaaaaaaaa

SEQ ID NO: 287742 - DNA, 201 bp, Homo sapiens
cttatagtgcaggtctgttggtactctttcagattctgtatgtctaaaaaagtctttcttttgcattaatttttgaatgaattgtaggtaaatagttttttctttcagtactttaaagatgttgctccactgtcttctgatttgtattgtttcagaagagaaatttactgtcatttttatttttgtatctttgtatgtaat

SEQ ID NO: 287743 - DNA, 201 bp, Homo sapiens
atattgtgatgatttttttgtgtgtatggtaaagcctaatgtaaaatttaccaatttaaccgtgtgtgtgtgtgtgtgtgtgtgtgtgtgtgtgtgtgtgkgtttgtattttttttattttttatttttttattttttggagacaggatcttactctgttgctcaggctggagtacagtgacatcatcccagctcactgca

SEQ ID NO: 287744 - DNA, 201 bp, Homo sapiens
attgacaactggatgacctgagggagaggccagtgaaggaccctggatcacacagtatgggttcccaaggacttcttcctttaggagacctggaggtggcrgaaggggatccagttgcttttcttttcctcctctggttgtctggggaaggaaatgtggaaaaggagggggctttagtggcacccaagtttggctttaagc

SEQ ID NO: 287745 - DNA, 201 bp, Homo sapiens
ctgatccagaccccaagagagggttcttggatcttgtgcaagaaagaattcaggacaagtccataaagtgaaagtaagtttattaagaaagtaaaggaatraagaatggctactccataggcagagcagcctatactaatttatattctcaccagcggtataccaagatttccttttctccgcatcctcaccaacacttgt

SEQ ID NO: 287746 - DNA, 201 bp, Homo sapiens
cctcctgagtagctgggattacaggcatgtgccaccacgcctgactaattttgtatttttagtagagacggggtttctccatgttggccaggctggtctcraactcctgacctcaggtgatctgcccacctcggcctcccaaagtgctgggattgcaggcatgagccgctgttccctgccaatttttaattttttaaagag

SEQ ID NO: 287747 - DNA, 201 bp, Homo sapiens
ttcaagtgattttcctgccttagcctcctgagtagctgggattacaggcatgtgccaccacgcctgactaattttgtatttttagtagagacggggtttcwccatgttggccaggctggtctcgaactcctgacctcaggtgatctgcccacctcggcctcccaaagtgctgggattgcaggcatgagccgctgttccctg

SEQ ID NO: 287748 - DNA, 201 bp, Homo sapiens
ggagtgcaatggcacgatctcagctcactgcaacttccgcctcctgggttcaagtgattttcctgccttagcctcctgagtagctgggattacaggcatgygccaccacgcctgactaattttgtatttttagtagagacggggtttctccatgttggccaggctggtctcgaactcctgacctcaggtgatctgcccacc

SEQ ID NO: 287749 - DNA, 201 bp, Homo sapiens
aactataacgtcagcccagtggagttgccctttggtggatataagaagtcaggtgaggagctgggaggtgtgaatgcaaactaggtctctagagctaggtygtaattcagaccttataaaccagtattcctaaacctgtctgcatatctgaattacctggggaaatacaggttcctggtccttccccagatccactgtagc

SEQ ID NO: 287750 - DNA, 201 bp, Homo sapiens; identical to SEQ ID NO: 58948

SEQ ID NO: 287751 - DNA, 201 bp, Homo sapiens
gtgtataggaatgcttgtgatttttgcacattgattttgtatcttgagactttgctgaagtagcttatcaccttaaggagattttgggctgagacaatggrgttttctaaatatacaatcatgtcatctgcaaacagggacaatttgacttcctcctaattgaatacactttatttttttctcctgcctgattgccttggc

SEQ ID NO: 287752 - DNA, 201 bp, Homo sapiens
attggtgtataggaatgcttgtgatttttgcacattgattttgtatcttgagactttgctgaagtagcttatcaccttaaggagattttgggctgagacartggggttttctaaatatacaatcatgtcatctgcaaacagggacaatttgacttcctcctaattgaatacactttatttttttctcctgcctgattgcct

SEQ ID NO: 287753 - DNA, 201 bp, Homo sapiens
atgatttggctctgtgtttgtctgttattggtgtataggaatgcttgtgatttttgcacattgattttgtatcttgagactttgctgaagtagcttatcascttaaggagattttgggctgagacaatggggttttctaaatatacaatcatgtcatctgcaaacagggacaatttgacttcctcctaattgaatacactt

SEQ ID NO: 287754 - DNA, 201 bp, Homo sapiens
gaagcaattgtgaatgggagttcactcatgatttggctctgtgtttgtctgttattggtgtataggaatgcttgtgatttttgcacattgattttgtatcwtgagactttgctgaagtagcttatcaccttaaggagattttgggctgagacaatggggttttctaaatatacaatcatgtcatctgcaaacagggacaat

SEQ ID NO: 287755 - DNA, 201 bp, Homo sapiens
tatccatgagcatggaatgttctttcatttgtttgtgtcctcttttatttcattgagcagtggtttgtagttctccttgaagaggtccttcacatcccttstaagttggattcctgggtattttattctctttgaagcaattgtgaatgggagttcactcatgatttggctctgtgtttgtctgttattggtgtataggaa

SEQ ID NO: 287756 - DNA, 201 bp, Homo sapiens
tggtaccagtaccatgctgttttggttactgtagccttgtagtatagtttgaagtcaggtagcatgatgcctccagctgtgttcttttggcttaggattgwcttggcaatgcgggctcttttttggttccatatgaactttaaagtagttttttccaattctgtgaagaaagtcattggtagcttgatggggatggcatta

SEQ ID NO: 287757 - DNA, 201 bp, Homo sapiens
ctcatttcttgtttttgtcaggtttgtcaaagatcagatggttgtagatgtgtggtattatttctgagggctccgttctgttccattgttctatatctctrttttggtaccagtaccatgctgttttggttactgtagccttgtagtatagtttgaagtcaggtagcatgatgcctccagctgtgttcttttggcttagga

SEQ ID NO: 287758 - DNA, 201 bp, Homo sapiens
ttctacatatggctagccagttttcccagcaccatttattaaatagggaatcctttcctcatttcttgtttttgtcaggtttgtcaaagatcagatggttktagatgtgtggtattatttctgagggctccgttctgttccattgttctatatctctgttttggtaccagtaccatgctgttttggttactgtagccttgt

SEQ ID NO: 287759 - DNA, 201 bp, Homo sapiens
gtgtaaggaagggatccagtttcagctttctacatatggctagccagttttcccagcaccatttattaaatagggaatcctttcctcatttcttgtttttstcaggtttgtcaaagatcagatggttgtagatgtgtggtattatttctgagggctccgttctgttccattgttctatatctctgttttggtaccagtacc

SEQ ID NO: 287760 - DNA, 201 bp, Homo sapiens
tgtttgttttttcttgtaaatttgtttaagttcattgtagattctggatattaaccctctgtcagatgggtagattacaaaaattttctcccattctgtargttgcctgttcactctgatggtagtttcttttgctgtgcagaagctctttagtttacttagatcccatttgtctattttggcttttgttgccattgcttt

SEQ ID NO: 287761 - DNA, 201 bp, Homo sapiens
ggctggagtgcagtggagtgatctcggctcactgcaaccttcgcctcccgggctcaagcaattctcctgcctcagcttcccaagtagctgggactacaggygtgtgccaccatgcctggctaatttttgtatttttcgtagagatggatttcaccatgttggccaggctggtcttgaactcctgacctcaagtgatccacc

SEQ ID NO: 287762 - DNA, 201 bp, Homo sapiens
ggaattgctgaatcataggatggttctatttttaattttttttttttttttttttgattcggagtctcacttagttgcccaggctggagtgcaatggcacmatctcagctcactgcaacttccgcctcctgggttcaagtgattttcctgccttagcctcctgagtagctgggattacaggcatgtgccaccacgcctgac

SEQ ID NO: 287763 - DNA, 201 bp, Homo sapiens
gaggaattgctgaatcataggatggttctatttttaattttttttttttttttttttgattcggagtctcacttagttgcccaggctggagtgcaatggcrcgatctcagctcactgcaacttccgcctcctgggttcaagtgattttcctgccttagcctcctgagtagctgggattacaggcatgtgccaccacgcctg

SEQ ID NO: 287764 - DNA, 201 bp, Homo sapiens
tcctgcctcaccctcccaagtagctgggactagaggcatgcgctaccacacccggttaatttttttgtatttttagtagagacagggtttcaccatgttgyccaggctggtcttgaactcctgagctcaggcgatccacccgcctcagccttccaaagtgtgggattataggcgtgagccaccacgcctggcatgagccac

SEQ ID NO: 287765 - DNA, 201 bp, Homo sapiens
tggagctcaagcgattctcctgcctcaccctcccaagtagctgggactagaggcatgcgctaccacacccggttaatttttttgtatttttagtagagacrgggtttcaccatgttggccaggctggtcttgaactcctgagctcaggcgatccacccgcctcagccttccaaagtgtgggattataggcgtgagccacca

SEQ ID NO: 287766 - DNA, 201 bp, Homo sapiens
acgatcttggttcactgcaaccttcgcccctggagctcaagcgattctcctgcctcaccctcccaagtagctgggactagaggcatgcgctaccacacccrgttaatttttttgtatttttagtagagacagggtttcaccatgttggccaggctggtcttgaactcctgagctcaggcgatccacccgcctcagccttcc

SEQ ID NO: 287767 - DNA, 201 bp, Homo sapiens
cttttgggcattcctttttgaatagtacccgttcgcttgatgtctacagtattgcctttcttatagatttgcatgcacgtggcccaaggaacaactccatkttttctaaaaggcctagagaacatatattgggtaattcttctctttccctgtgtttgtcgttttggtgaattactggaagacggcagtaccaaccaaaag

SEQ ID NO: 287768 - DNA, 201 bp, Homo sapiens
caaatagctgggactacaggtgtgtgccaccacggctggctaattttttttttttttttttttttgagacagagtcttgctctgtcgcccaggctggagtrcagtggtgcgatctcggctcactgcaagctctgtctcctgggttcatgccattcttctgcctcagcctcccaagtagctgagactacaggcacccgccac

SEQ ID NO: 287769 - DNA, 201 bp, Homo sapiens
gattctcctgtttcagcctcccaaatagctgggactacaggtgtgtgccaccacggctggctaattttttttttttttttttttttgagacagagtcttgytctgtcgcccaggctggagtacagtggtgcgatctcggctcactgcaagctctgtctcctgggttcatgccattcttctgcctcagcctcccaagtagct

SEQ ID NO: 287770 - DNA, 201 bp, Homo sapiens
ggttcaagtgattctcctgtttcagcctcccaaatagctgggactacaggtgtgtgccaccacggctggctaattttttttttttttttttttttgagacrgagtcttgctctgtcgcccaggctggagtacagtggtgcgatctcggctcactgcaagctctgtctcctgggttcatgccattcttctgcctcagcctcc

SEQ ID NO: 287771 - DNA, 201 bp, Homo sapiens
cacacactttaaatcggaaggggcctgctctgggatattcaaagcctcagaggacatggctcgttcctgccctgtcttgcccctcaaggagcttatagttwaggttgtacacaatcatgtctagatattctcaggttttatttatttaattttgtatatgaaaagaaatttaattttttcttattaaattgaattagattt

SEQ ID NO: 287772 - DNA, 201 bp, Homo sapiens
actagtttacagtcccaccaacagtgtaaaagtgttcctatttctccacatcatctccagcacctgttgtttcctgactttttaatgattgccattctaastggtgtgagatggtatctcattgtgggtttgatttgcatttctctgatggccagtgatgatgagcattttttcatgtgtcttttggctgcataaatgtct

SEQ ID NO: 287773 - DNA, 201 bp, Homo sapiens
agttctagatatttgaggaatcgccacactgtcttccacaatggttgaactagtttacagtcccaccaacagtgtaaaagtgttcctatttctccacatcmtctccagcacctgttgtttcctgactttttaatgattgccattctaagtggtgtgagatggtatctcattgtgggtttgatttgcatttctctgatggcc

SEQ ID NO: 287774 - DNA, 201 bp, Homo sapiens
ggtatatatgtgccacattttcttaatccagtctatcattgatgggcatttgggttggttccaagtctttgctcttgtgaatagtgctgcaataaacataygtgtgcatgtgtctttatagtagcatgatttataatcctttgagtatatacccagtaatgggatggctgggtcaaatggtatttctagttctagatattt

SEQ ID NO: 287775 - DNA, 201 bp, Homo sapiens
caactcaccatttacattaggtatttctcctaatgctatccctcccccagccccccaccccctacggccccggtgtgtgatgttccccaccctgtgtccargtgatctcattgttcaattcccacctatgaatgagaacatgcagtgtttggttttctgtccttgtgatagtttgctcagaatgatggtttccagcttcat

SEQ ID NO: 287776 - DNA, 201 bp, Homo sapiens
tttttttttatacttaagttctagggtacatgtacacaatgtgcaggtttgatacataggtatacaagtgccatgttggtttgctgcacccatcaactcaycatttacattaggtatttctcctaatgctatccctcccccagccccccaccccctacggccccggtgtgtgatgttccccaccctgtgtccaagtgatct

SEQ ID NO: 287777 - DNA, 201 bp, Homo sapiens
aaccgttcatgagggatttgccccgtgacccaaacacctcccactaggctctacctccaacaatggggatcatacttcaacatgagatttggaggagaaargcatccagaccatatcagtcatcaatataataaaaccagtatgtcagataatatactaatctttttagaaattacataatttaataatttttagcacctc

SEQ ID NO: 287778 - DNA, 201 bp, Homo sapiens
aatttttatttgtcaactaaaaaaaattgtaaaaacaagtatttaatactcatcgcaaaacataaaaagcctgcaatgcaaagggtttctgtggtgtagtrgttaccacgctggcctaacacacggaaggtcctctgtttgaaacttgacggaaacaaaaggtttcttttgtttcccagaatctgaccaggctgcctcttc

SEQ ID NO: 287779 - DNA, 201 bp, Homo sapiens
tgaaagagagagcaagagaggcaccaggctcttttaaacagccagctctgtgtgaactcacagagtgagaatgcactcattaccatggggaggacatcaarccgttcatgagggatttgccccgtgacccaaacacctcccactaggctctacctccaacaatggggatcatacttcaacatgagatttggaggagaaagg

SEQ ID NO: 287780 - DNA, 201 bp, Homo sapiens
tagctgggactacaggtgtgtgccaccatgcctggctaatttttgtatttttcgtagagatggatttcaccatgttggccaggctggtcttgaactcctgrcctcaagtgatccacccacatcggcctcacaaaatgctgggattacaggcgtgagccactgtgcccagcctttctttctttttaaaccatgtggtttact

SEQ ID NO: 287781 - DNA, 201 bp, Homo sapiens
catcatctcctcctgttgaggcctcaggaagatttcagtcatggtggaaggtgaaaggggagcagacgagtcacatggtgaaagagagagcaagagaggcrccaggctcttttaaacagccagctctgtgtgaactcacagagtgagaatgcactcattaccatggggaggacatcaaaccgttcatgagggatttgcccc

SEQ ID NO: 287782 - DNA, 201 bp, Homo sapiens
ggagtgcagtggagtgatctcggctcactgcaaccttcgcctcccgggctcaagcaattctcctgcctcagcttcccaagtagctgggactacaggtgtgmgccaccatgcctggctaatttttgtatttttcgtagagatggatttcaccatgttggccaggctggtcttgaactcctgacctcaagtgatccacccaca

SEQ ID NO: 287783 - DNA, 201 bp, Homo sapiens
gcccaggctggagtgcagtggagtgatctcggctcactgcaaccttcgcctcccgggctcaagcaattctcctgcctcagcttcccaagtagctgggactrcaggtgtgtgccaccatgcctggctaatttttgtatttttcgtagagatggatttcaccatgttggccaggctggtcttgaactcctgacctcaagtgat

SEQ ID NO: 287784 - DNA, 201 bp, Homo sapiens
ctctttatagctcatcgtcctttttttatttttatttttttttttttttgagacggaatcttgctctgtcgcccaggctggagtgcagtggagtgatctcrgctcactgcaaccttcgcctcccgggctcaagcaattctcctgcctcagcttcccaagtagctgggactacaggtgtgtgccaccatgcctggctaattt

SEQ ID NO: 287785 - DNA, 201 bp, Homo sapiens
cacccaggctggagtgcagtggcacgatctcagctcactgcaacctccaccacctgggttcgggttcaagtgattctcctgtttcagcctcccaaatagcrgggactacaggtgtgtgccaccacggctggctaattttttttttttttttttttttgagacagagtcttgctctgtcgcccaggctggagtacagtggtg

SEQ ID NO: 287786 - DNA, 201 bp, Homo sapiens
tgctgggattacaagtgtgagccactgtacccggcctttattttatttttttattgagacggagtctcactctgtcacccaggctggagtgcagtggcacratctcagctcactgcaacctccaccacctgggttcgggttcaagtgattctcctgtttcagcctcccaaatagctgggactacaggtgtgtgccaccacg

SEQ ID NO: 287787 - DNA, 201 bp, Homo sapiens
gtgctgggattacaagtgtgagccactgtacccggcctttattttatttttttattgagacggagtctcactctgtcacccaggctggagtgcagtggcaygatctcagctcactgcaacctccaccacctgggttcgggttcaagtgattctcctgtttcagcctcccaaatagctgggactacaggtgtgtgccaccac

SEQ ID NO: 287788 - DNA, 201 bp, Homo sapiens
tgcagggaggggctgccacaggccagtttctgtgtcagcatcccgatgtggccaaagtctccttcactggaagtgtgcccactggcatgaaggtgaggacraaaccagtattggtcaacacacatggcatttggatgtggcaaatccggtcctacccagagtatattttggaggcttctcttttgattttacctagcctga

SEQ ID NO: 287789 - DNA, 201 bp, Homo sapiens
aagtgctgggattacaagtgtgagccactgtacccggcctttattttatttttttattgagacggagtctcactctgtcacccaggctggagtgcagtggmacgatctcagctcactgcaacctccaccacctgggttcgggttcaagtgattctcctgtttcagcctcccaaatagctgggactacaggtgtgtgccacc

SEQ ID NO: 287790 - DNA, 201 bp, Homo sapiens
aaagtgctgggattacaagtgtgagccactgtacccggcctttattttatttttttattgagacggagtctcactctgtcacccaggctggagtgcagtgrcacgatctcagctcactgcaacctccaccacctgggttcgggttcaagtgattctcctgtttcagcctcccaaatagctgggactacaggtgtgtgccac

SEQ ID NO: 287791 - DNA, 201 bp, Homo sapiens
tcccaaagtgctgggattacaagtgtgagccactgtacccggcctttattttatttttttattgagacggagtctcactctgtcacccaggctggagtgcrgtggcacgatctcagctcactgcaacctccaccacctgggttcgggttcaagtgattctcctgtttcagcctcccaaatagctgggactacaggtgtgtg

SEQ ID NO: 287792 - DNA, 201 bp, Homo sapiens
ccgccaccatgcccagctaatttttgtatttttagtagagacagagtttcactgtgttggccaggctggtctcaaactcctgacttcacaatccacccacrttggcctcccaaagtgctgggattacaagtgtgagccactgtacccggcctttattttatttttttattgagacggagtctcactctgtcacccaggctg

SEQ ID NO: 287793 - DNA, 201 bp, Homo sapiens
tcctctgcctcccaggtttaagcgattcccccgcctcagcctcctgagtagctgggattacaggtgcccgccaccatgcccagctaatttttgtatttttygtagagacagagtttcactgtgttggccaggctggtctcaaactcctgacttcacaatccacccacgttggcctcccaaagtgctgggattacaagtgtg

SEQ ID NO: 287794 - DNA, 201 bp, Homo sapiens
acgatctcggctcactgcatcctctgcctcccaggtttaagcgattcccccgcctcagcctcctgagtagctgggattacaggtgcccgccaccatgcccmgctaatttttgtatttttagtagagacagagtttcactgtgttggccaggctggtctcaaactcctgacttcacaatccacccacgttggcctcccaaag

SEQ ID NO: 287795 - DNA, 201 bp, Homo sapiens
gtggcacgatctcggctcactgcatcctctgcctcccaggtttaagcgattcccccgcctcagcctcctgagtagctgggattacaggtgcccgccaccaygcccagctaatttttgtatttttagtagagacagagtttcactgtgttggccaggctggtctcaaactcctgacttcacaatccacccacgttggcctcc

SEQ ID NO: 287796 - DNA, 201 bp, Homo sapiens
gattctcatttaattgatctgggcatctggatttttttttttgagatggagtttctctcttttccctcttgttgcccaggctggagtgcaatggcacattsgcggctcactgcaacctccgcctcctggattcaagcgattttcctgtctcagcctcccgagtagctgggattacaggcatgcgcccccacacccagctaa

SEQ ID NO: 287797 - DNA, 201 bp, Homo sapiens
gaactcctgggctcaagtgatccaaatgcctcggcctcccaaagtgctgggattgcaggcatgtgccaccgtgcccggcctgttttttattttttgtaaayttttttttatgatttagaaggactatcttcaaaccagtacaagtatttcataaataatatctgattgttttctaaccagttgagtaatttgttgcacgat

SEQ ID NO: 287798 - DNA, 201 bp, Homo sapiens
tagagacggggtttcactgtgttggccaggctggtcttgaactcctgggctcaagtgatccaaatgcctcggcctcccaaagtgctgggattgcaggcatrtgccaccgtgcccggcctgttttttattttttgtaaatttttttttatgatttagaaggactatcttcaaaccagtacaagtatttcataaataatatct

SEQ ID NO: 287799 - DNA, 201 bp, Homo sapiens
cttaacatggccctcaggccctgtttctccagcctcgtcttttctcttcacacaccataagacccagctctcctgcactactggtccttcctcgtttaccrtgtgtatactgtcacacctcatgcttttacaatgccatgacgctgagtttggtgctattcttttgtttttcttgcctcttgtgcttacatgtttagcatt

SEQ ID NO: 287800 - DNA, 201 bp, Homo sapiens
ttcctaccttcttgggttaaggattaaatgagatagtgcatgtaaagcacctagcatgatacctgagctttagaccaaattgctgaaaaaccagttttcayaagaatcggtttgtcatatttaccagttttatctatttagcaaacttttttttgacagtgtataaagttttcaacaattgatattggaaggttggtaggg

SEQ ID NO: 287801 - DNA, 201 bp, Homo sapiens
ggcgggtgggtcacaaggtcaggagatcaagaccatcctggtcaacatggtgaaacccggtctctactaaaaaatacaaaaaattagctgggcgtagtggygtgcactggtagtcccagctactcaggaggctgaggcaggggaatcgcttgaactcaggaggcagaggttgcagtgagccgagatcgcgccactgcactc

SEQ ID NO: 287802 - DNA, 201 bp, Homo sapiens
aatctagtcttctgctttacccaaaggaacgggaggatgaaattgctactatggagtgcatcaacaatggcaagtccatctttgaggcccgcttggacatygacatttcctggcagtgcctggagtattatgcgggcttggctgcatccatggctggtaagtcctcacctggtgtctgtgaccagctgataatgaggcaga

SEQ ID NO: 287803 - DNA, 201 bp, Homo sapiens
ccgtcttaaaaaacaaaaaaacaaaacaaaaaaacctgctagtatagagatggtcactaaatcaaaccatacataaaaacaagaagttacggtagcccackcctgtaattccggcacttcgggaggctgaggcgggtgggtcacaaggtcaggagatcaagaccatcctggtcaacatggtgaaacccggtctctactaaa

SEQ ID NO: 287804 - DNA, 201 bp, Homo sapiens; identical to SEQ ID NO: 58951

SEQ ID NO: 287805 - DNA, 201 bp, Homo sapiens
caggaggcagaggttgcagtgagccgagatcgcgccactgcactccagcctgggtgacagagcaagactccatctcaagaaaaaaaaaaaaaaaaaaaaaagactactactaagagaatattgatagataatattttatttaaatatgtggcaacaatttgagttaaaactgatgtttccgctctttataggccgagtgat

SEQ ID NO: 287806 - DNA, 201 bp, Homo sapiens
tggggtgcaatgggacgatctcggctcactgcaacctccatctcccacgttgaactagttctcccaccttagcctcctatagctgggactataggtgtgcrccaccacacccagccaattttttgtatttttagtagagatgacgtcttgccatgttggccaggttggttttgaactactgacctctagtgatccacctgc

SEQ ID NO: 287807 - DNA, 201 bp, Homo sapiens
tcaggaggcagaggttgcagtgagccgagatcgcgccactgcactccagcctgggtgacagagcaagactccatctcaagaaaaaaaaaaaaaaaaaaaaaagactactactaagagaatattgatagataatattttatttaaatatgtggcaacaatttgagttaaaactgatgtttccgctctttataggccgagtga

SEQ ID NO: 287808 - DNA, 201 bp, Homo sapiens
ctcaggaggcagaggttgcagtgagccgagatcgcgccactgcactccagcctgggtgacagagcaagactccatctcaagaaaaaaaaaaaaaaaaaaaaaagactactactaagagaatattgatagataatattttatttaaatatgtggcaacaatttgagttaaaactgatgtttccgctctttataggccgagtg

SEQ ID NO: 287809 - DNA, 201 bp, Homo sapiens
agtgcagtggcacgatctcggctcactgcatcctctgcctcccaggtttaagcgattcccccgcctcagcctcctgagtagctgggattacaggtgcccgycaccatgcccagctaatttttgtatttttagtagagacagagtttcactgtgttggccaggctggtctcaaactcctgacttcacaatccacccacgttg

SEQ ID NO: 287810 - DNA, 201 bp, Homo sapiens
actggtagtcccagctactcaggaggctgaggcaggggaatcgcttgaactcaggaggcagaggttgcagtgagccgagatcgcgccactgcactccagcytgggtgacagagcaagactccatctcaagaaaaaaaaaaaaaaaaaaaaaagactactactaagagaatattgatagataatattttatttaaatatgtg

SEQ ID NO: 287811 - DNA, 201 bp, Homo sapiens
gaccagcctggccaacatgatgaaatcccgtctctactaaaaatacaaaaattagctgtgtgtggtggcaggcgcctgtaatcccagctactcgggaggckgaggcaggagaattgctggaacccaggaggcaaaagttgcagtgagtcaagatcgtgccattgcactccagcctgggtaacaagagcgagactccgtctt

SEQ ID NO: 287812 - DNA, 201 bp, Homo sapiens
tagtgcagtggcacgatctcggctcactgcatcctctgcctcccaggtttaagcgattcccccgcctcagcctcctgagtagctgggattacaggtgcccvccaccatgcccagctaatttttgtatttttagtagagacagagtttcactgtgttggccaggctggtctcaaactcctgacttcacaatccacccacgtt

SEQ ID NO: 287813 - DNA, 201 bp, Homo sapiens
aatgtaagaccagcctggccaacatgatgaaatcccgtctctactaaaaatacaaaaattagctgtgtgtggtggcaggcgcctgtaatcccagctactcrggaggctgaggcaggagaattgctggaacccaggaggcaaaagttgcagtgagtcaagatcgtgccattgcactccagcctgggtaacaagagcgagact

SEQ ID NO: 287814 - DNA, 201 bp, Homo sapiens
gtagtgcagtggcacgatctcggctcactgcatcctctgcctcccaggtttaagcgattcccccgcctcagcctcctgagtagctgggattacaggtgccygccaccatgcccagctaatttttgtatttttagtagagacagagtttcactgtgttggccaggctggtctcaaactcctgacttcacaatccacccacgt

SEQ ID NO: 287815 - DNA, 201 bp, Homo sapiens
tgaggtcaggaatgtaagaccagcctggccaacatgatgaaatcccgtctctactaaaaatacaaaaattagctgtgtgtggtggcaggcgcctgtaatcycagctactcgggaggctgaggcaggagaattgctggaacccaggaggcaaaagttgcagtgagtcaagatcgtgccattgcactccagcctgggtaacaa

SEQ ID NO: 287816 - DNA, 201 bp, Homo sapiens
tcccccagacggtagtgcagtggcacgatctcggctcactgcatcctctgcctcccaggtttaagcgattcccccgcctcagcctcctgagtagctgggamtacaggtgcccgccaccatgcccagctaatttttgtatttttagtagagacagagtttcactgtgttggccaggctggtctcaaactcctgacttcacaa

SEQ ID NO: 287817 - DNA, 201 bp, Homo sapiens
gggaggcagaggtgggtgaatcacttgaggtcaggaatgtaagaccagcctggccaacatgatgaaatcccgtctctactaaaaatacaaaaattagctgrgtgtggtggcaggcgcctgtaatcccagctactcgggaggctgaggcaggagaattgctggaacccaggaggcaaaagttgcagtgagtcaagatcgtgc

SEQ ID NO: 287818 - DNA, 201 bp, Homo sapiens
gtctaggatccagtcaaggatgatgcattgcctttagttgtcttgtctttaatctcctttagctgagaacagttcttcagttattcttgtctttcaggacrttgacattttgggagaacaggccattcattttgtagaatgttccttagtttgggtctgtctgatgttttctgttagattcatattatgaatttttggcaa

SEQ ID NO: 287819 - DNA, 201 bp, Homo sapiens
ttgtatcacccagaattcccatgtgttgtgggagggacccagggggaggtaattgaatcatgggggctggtctttctcatgctattctcctgatagtgaayaagtctcatgagatctgatgggtttatcaggggtttccgcttttgctgctgcttcatttttctcctgccgccaatgtaagaagtgactttcacctcccgc

SEQ ID NO: 287820 - DNA, 201 bp, Homo sapiens
ctttggctgattgacataaaatagttttcttacagtatttaaagagaagaatctttgaggaaagaagactaattttatcttagaaaaaattgtaatgttaraaagcattactgttaggacattatattgaaatgcagcttttgtcctgttgccattgcatgttcttgttttagcctatttctctttgagatacagctgtga

SEQ ID NO: 287821 - DNA, 201 bp, Homo sapiens
cagagcctcagagggcatgggttcattcctgcccggtcttgccccttcttttactaactgatcttgaaataaagtagcggtcttaaatctttgtcgattawcgagggaagaacagggctgctgttcagctataagcctttatctctcttctaaatgtaacactgccatttcttttcatttaaagtgaaagctatttctagt

SEQ ID NO: 287822 - DNA, 201 bp, Homo sapiens; identical to SEQ ID NO: 58950

SEQ ID NO: 287823 - DNA, 201 bp, Homo sapiens
ggcaaatatataaactctgatgaacactgatgagatggtgggtgttaatttgacagtcttatttgtcccggtggggtactcagaggagtcgtacacacagrcacaagtgcaggtgggaaccaaggtgccatcttattaacatgtaacatataacattacatgttaagtttctgatagtccctcagtgcagggaattatttg

SEQ ID NO: 287824 - DNA, 201 bp, Homo sapiens
ttttttttttgtttgttagttaagcaattattttattgctcaagtacatagacaaatttatgcaaccagggcagaggctgtatatgattcatatttccagytgggagagaggactcacttggtcttataatatcgagccaaacagtgaatccggctctctatcagaatcagacagaatttagcatcctcatcctttctctt

SEQ ID NO: 287825 - DNA, 201 bp, Homo sapiens
aagtccataaagtgaaagtaagtttattaagaaagtaaaggaataaagaatggctactccataggcagagcagcctatactaatttatattctcaccagcrgtataccaagatttccttttctccgcatcctcaccaacacttgttatcttttatctttttgataataaccatgctaacagatatgaagtgatacctcatt

SEQ ID NO: 287826 - DNA, 201 bp, Homo sapiens
gacctgtatcttgtgctgatctcctatcttatcctgtgacttagaatgtctaacttcttgggaatgcagtccagtacgtctcagccttattttacccagcmcctacttaagatgaagttgctctagttcaaacacctgtgacatttcccctctcccttttataaaagaacccttaatcctaagggttgcagagggacaaag

SEQ ID NO: 287827 - DNA, 201 bp, Homo sapiens
tttatcagcaaggtctttatgacctgtatcttgtgctgatctcctatcttatcctgtgacttagaatgtctaacttcttgggaatgcagtccagtacgtcycagccttattttacccagcacctacttaagatgaagttgctctagttcaaacacctgtgacatttcccctctcccttttataaaagaacccttaatccta

SEQ ID NO: 287828 - DNA, 201 bp, Homo sapiens
gttccctgccaatttttaattttttaaagagcccctatcctgttttccttcatggctatactaacttagattctttttttttttttttttttttttttagkgaaaggaagtttattaagaaagtaaaggaataaagaatggctactccgtaggcagagctgccccaggggctgctggttgcccctttttgtggttatttct

SEQ ID NO: 287829 - DNA, 201 bp, Homo sapiens
gagcgagactccgtcttaaaaaacaaaaaaacaaaacaaaaaaacctgctagtatagagatggtcactaaatcaaaccatacataaaaacaagaagttacrgtagcccacgcctgtaattccggcacttcgggaggctgaggcgggtgggtcacaaggtcaggagatcaagaccatcctggtcaacatggtgaaacccggt

SEQ ID NO: 287830 - DNA, 201 bp, Homo sapiens
ctaggtgcagtggaacacccccagcactttgggaggctgaggcaggaggatcgctggagcccaggtgtttgagaccagactgggcaacatagtgagacccratcttcaaaaaattagctgggggtggtggtgcacactgtggtcccagctgctcaggaggttttattttaatgtttgcagctaattgcagagacgacatga

SEQ ID NO: 287831 - DNA, 201 bp, Homo sapiens
ttatactactcctaaatcacatgctttgtgcccttttcatgttaatattcgtatgactattattcattggactattagcatccctggctgtgttctgcttkgtacctgcactgggaagactatgtgtttgttcgggatacaattaacatttcaggaatgcattttggggttatatttttaatacaacatatcttttttcct

SEQ ID NO: 287832 - DNA, 201 bp, Homo sapiens
tgtcagctaaaggaatcaaacctgttaccttggaacttggaggcaaatctccactcatcatcttctcagactgtgatatgaacaatgctgtaaagggggcrctgatggccaacttcctcacacaaggccaggtatgtacctgtccctggaagaggtgtaaaaggaatctctaccccctcatccaacagtgtgttttaaagc

SEQ ID NO: 287833 - DNA, 201 bp, Homo sapiens
ctttttatgtttgtgtcttgggtttatgcaggtaatgccatggtctttaaaccttctccctttacacctgtttctgcattgctactggctgaaatctacastgaggctggtgtacctcctgggctcttcaatgtggtgcagggaggggctgccacaggccagtttctgtgtcagcatcccgatgtggccaaagtctccttc

SEQ ID NO: 287834 - DNA, 201 bp, Homo sapiens
ggaacttacatgcttcccctgctgttgagtgttcctctcatttccattttgtttcatctaagctatctaatagaggctcagtaaattcttagagaattgtwaaatcaagttagatgaacatgtgtttgaaggataggcagggttctctatgtggagagaatacgtggaagccagtggaagactgcctggaacaaatagaag

SEQ ID NO: 287835 - DNA, 201 bp, Homo sapiens
tgcaaggaacttacatgcttcccctgctgttgagtgttcctctcatttccattttgtttcatctaagctatctaatagaggctcagtaaattcttagagarttgttaaatcaagttagatgaacatgtgtttgaaggataggcagggttctctatgtggagagaatacgtggaagccagtggaagactgcctggaacaaat

SEQ ID NO: 287836 - DNA, 201 bp, Homo sapiens
ccccagcactttgggaggctgaggcaggaggatcgctggagcccaggtgtttgagaccagactgggcaacatagtgagacccgatcttcaaaaaattagcygggggtggtggtgcacactgtggtcccagctgctcaggaggttttattttaatgtttgcagctaattgcagagacgacatgacctgtgtgaaggaagaga

SEQ ID NO: 287837 - DNA, 201 bp, Homo sapiens
gagtgcaatggcatagtctcggctcactgcaacccgtctcccgggttcaagcgattttcccacctcagcctcccaagtagctgggattacaggcgcccgcsaccacacccagctaatttttgtatttttagtagagacggggttttaccattttggtcaggctggtctcgaactcctgacctcaggtgatctgcccgcctt

SEQ ID NO: 287838 - DNA, 201 bp, Homo sapiens
ctggagtgcaatggcatagtctcggctcactgcaacccgtctcccgggttcaagcgattttcccacctcagcctcccaagtagctgggattacaggcgccygccaccacacccagctaatttttgtatttttagtagagacggggttttaccattttggtcaggctggtctcgaactcctgacctcaggtgatctgcccgc

SEQ ID NO: 287839 - DNA, 201 bp, Homo sapiens
gaatgggcctgccctgtgactttcagagcctcagagggcatgggttcattcctgcccggtcttgccccttcttttactaactgatcttgaaataaagtagyggtcttaaatctttgtcgattaacgagggaagaacagggctgctgttcagctataagcctttatctctcttctaaatgtaacactgccatttcttttcat

SEQ ID NO: 287840 - DNA, 201 bp, Homo sapiens
cacccagactggagtgcaatggcatagtctcggctcactgcaacccgtctcccgggttcaagcgattttcccacctcagcctcccaagtagctgggattayaggcgcccgccaccacacccagctaatttttgtatttttagtagagacggggttttaccattttggtcaggctggtctcgaactcctgacctcaggtgat

SEQ ID NO: 287841 - DNA, 201 bp, Homo sapiens
attctctacccctcacctcttcaataaatatacacttcaaatcagaatgggcctgccctgtgactttcagagcctcagagggcatgggttcattcctgccyggtcttgccccttcttttactaactgatcttgaaataaagtagcggtcttaaatctttgtcgattaacgagggaagaacagggctgctgttcagctataa

SEQ ID NO: 287842 - DNA, 201 bp, Homo sapiens
tatctgttttgcctggatgataaaagattttaaaacattttgaagaaatgagaatttagtaagatttgagaaccctagaactggcagtgtaacttttcctsttaaagtagtagcctaagaaactctcaataatgcacacattttttttttcttcatagggacatccaacgggctcatagagtggtagctgagcttcaggct

SEQ ID NO: 287843 - DNA, 201 bp, Homo sapiens
ttttcttcatatgtatttttcctgaggtttattgatcttcttggatctgtaaatttgtttcatttggaaaaaaaatttggccatgatttctttagtttttwtttttgccccctcttccatcacttctccttcagggcctccaattacacatatattgggctgcctgaagctatcccacgtcactgatgctcagttcatttt

SEQ ID NO: 287844 - DNA, 201 bp, Homo sapiens
tctcctgcctcagcctcccgagtagctgggattacaaatgtgtgccaccatgcctggctaatttttgtatttttagtagagatggggtttcaccatgttgrccaggctggtctcaaactgctgacctccagtgatccgcccacctcggcttcccaaagtgctgggattacaggtgtgagccactgcaccccgccaggctag

SEQ ID NO: 287845 - DNA, 201 bp, Homo sapiens
ttctcctgcctcagcctcccgagtagctgggattacaaatgtgtgccaccatgcctggctaatttttgtatttttagtagagatggggtttcaccatgttrgccaggctggtctcaaactgctgacctccagtgatccgcccacctcggcttcccaaagtgctgggattacaggtgtgagccactgcaccccgccaggcta

SEQ ID NO: 287846 - DNA, 201 bp, Homo sapiens
gattctcctgcctcagcctcccgagtagctgggattacaaatgtgtgccaccatgcctggctaatttttgtatttttagtagagatggggtttcaccatgytggccaggctggtctcaaactgctgacctccagtgatccgcccacctcggcttcccaaagtgctgggattacaggtgtgagccactgcaccccgccaggc

SEQ ID NO: 287847 - DNA, 201 bp, Homo sapiens
agtgattctcctgcctcagcctcccgagtagctgggattacaaatgtgtgccaccatgcctggctaatttttgtatttttagtagagatggggtttcaccrtgttggccaggctggtctcaaactgctgacctccagtgatccgcccacctcggcttcccaaagtgctgggattacaggtgtgagccactgcaccccgcca

SEQ ID NO: 287848 - DNA, 201 bp, Homo sapiens
ggagtacagtggcatgatctcggctcactgcaacctccgcctcccgggttcaagtgattctcctgcctcagcctcccgagtagctgggattacaaatgtgygccaccatgcctggctaatttttgtatttttagtagagatggggtttcaccatgttggccaggctggtctcaaactgctgacctccagtgatccgcccac

SEQ ID NO: 287849 - DNA, 201 bp, Homo sapiens
tttttttttgagaggagtctctctctgtcacccaggctggagtacagtggcatgatctcggctcactgcaacctccgcctcccgggttcaagtgattctcytgcctcagcctcccgagtagctgggattacaaatgtgtgccaccatgcctggctaatttttgtatttttagtagagatggggtttcaccatgttggccag

SEQ ID NO: 287850 - DNA, 201 bp, Homo sapiens
gattttacctagcctgaattgggaatgggaaggagattttattaggcagaggtgtgaaatttcctgtaaaagtatgaagggggaaagggagtacacatggkgtgatttgtgttaggccaggtaggggtggaaattaacagccccagcctaaggagaggatgtgtcttagtggacaggggcctgggctgccacttgtattgt

SEQ ID NO: 287851 - DNA, 201 bp, Homo sapiens
agcctatttctctttgagatacagctgtgaaagaggaaaaatagtcactagctttaatagtcaccagaattaagtcactagctttggggactctcatcaartgaaccattctggtcttcaatgtcaacttttataaaatggagctaatgatacctacttcatactgctgttgaaagtgttaaatgagataatatatgtgaa

SEQ ID NO: 287852 - DNA, 201 bp, Homo sapiens
ttctctatctgtgcagctcttttcccttccacactcagtcttgaagaactgtagccactcaaagttccctaaactcccaccctatcttctcaactcatgtrtctgctgggcgccacctagcttcctcctccctgctctgtggcctgaaaactttctctaggcagtagactccagcaattgtagggctcacctcattggttc

SEQ ID NO: 287853 - DNA, 201 bp, Homo sapiens
ttcatatgtatttttcctgaggtttattgatcttcttggatctgtaaatttgtttcatttggaaaaaaaatttggccatgatttctttagtttttttttttgccccctcttccatcacttctccttcagggcctccaattacacatatattgggctgcctgaagctatcccacgtcactgatgctcagttcattttccagt

SEQ ID NO: 287854 - DNA, 201 bp, Homo sapiens
ggttcaagcgattctcctgcctcagactcctgaatagctgggattacaggcacatgacaccacgcctggctattttttgtatttttagtagagacagagtytccccatgttggccaggctcgtctcgaactcctgaccttaggtgatccgcctgccttggccttccaaagtgctgggattacaggcatgagccactgcatc

SEQ ID NO: 287855 - DNA, 201 bp, Homo sapiens
cttcccaggtgaaccagtcctaatgagatgaacccagtacctctgttggaaatgcagaaatcaccgtcttctgcattgatcacgctgggagatgcagatcrgagctgctcctattcggccatcttgattctggactctgatagttaaactttttatagtcttaaagatcagaagtaccagatgttcattatagaaagaaaa

SEQ ID NO: 287856 - DNA, 201 bp, Homo sapiens
gagctgtggtgggctccactcggttcgagcttcctggctgctttgtttacctagtcaagcctcaggaatggcagacgcccctcccccagcttcactgccamcttcgcagttccatcttggactgctgttatagcagtgagcaaagctccatgggtgggggacccgccgagccagctgcaggatataatctcctggtgtgcc

SEQ ID NO: 287857 - DNA, 201 bp, Homo sapiens
acattgaaaactgtgtaccccattaaataataactctgtttctctctcccctcagcctctggtaaccactagtctaattcccgtctctatgaatttgactrttctacgtaccttttataaatgcaatcatacaatatttattattttatgtctggctcgtttcacttagtataatatcttcaggttcatccatgttgtagc

SEQ ID NO: 287858 - DNA, 201 bp, Homo sapiens
ttgtgtcttgggtttatgcaggtaatgccatggtctttaaaccttctccctttacacctgtttctgcattgctactggctgaaatctacagtgaggctggkgtacctcctgggctcttcaatgtggtgcagggaggggctgccacaggccagtttctgtgtcagcatcccgatgtggccaaagtctccttcactggaagtg

SEQ ID NO: 287859 - DNA, 201 bp, Homo sapiens
attaacgagggaagaacagggctgctgttcagctataagcctttatctctcttctaaatgtaacactgccatttcttttcatttaaagtgaaagctatttytagttttaaaaattgagcagtgtgttctatttaagcattaattacatcaagacatattggaatatgtcttaaatctagtcttctgctttacccaaaggaa

SEQ ID NO: 287860 - DNA, 201 bp, Homo sapiens
gtgaggggatgggatgagaaccaggtgagatccctgtgcatgcaggaagttgcaccaaaggagaagaaccctaaacttctgagattcatttaaatagaaaytactggcacatctgcccatcctcttctctggggagagagtgagagagattgagattacttattaagcaaatctccagggttgagagggaaggtatcacta

SEQ ID NO: 287861 - DNA, 201 bp, Homo sapiens
ccaggagcctgcccacagctgtggctaacatcaggtgtgaatccattgctgatccctccacctcctcttccaggtctaagcccagacagtgggtgctcccmcagcacttggttcatctctccactgtggcatttaatatactgtatcacaaatatgtaagtctgtttttctctggactgagaacttgttgaagcaaggatc

SEQ ID NO: 287862 - DNA, 201 bp, Homo sapiens
tggatgtggtggctcacacctgtaatcccagcactttgggaggccgaagcaggtggatcgcttgaggccaggagtttgagaccagccttgccgacatggtraaacccatctctactaaaattacaaaaattagccgggcgtgatgacacacgcctgtaatcccagctactccagagacaaaggcacgagaatctcttgaac

SEQ ID NO: 287863 - DNA, 201 bp, Homo sapiens
gtttgatattttctaagtgttttgcattttctctttgataggtattatatgctttacctgtctgccaggacatggactgtttctgagtgctgagtccttarcacagggctggcaggcatcagtaaaagtttgataagggaacgaggaagtgcctgagtggatgaatctccattgtgctttttttcctagaatgttcccaca

SEQ ID NO: 287864 - DNA, 201 bp, Homo sapiens
ggatgtccccttccagttcctctgaggtgcttacctccccatcccacactgacctccatgtctctgccattgtaggccttcccttcttcttggtggtgttmttgagtaagataatctggactggcccccgtctttgcttccctgcctgctgctgccccatttgatcaagagaccatggaagtgtcagagattcagaatcca

SEQ ID NO: 287865 - DNA, 201 bp, Homo sapiens
gtctacctctccatggccccttcttctgccattgcctcttccatgttccagtcacatcaggctactagctcttctctaaatctgccatgcatgtccctgcygcttgctctttcctgcccctgagcctttgctcacacagtttcctctagccggaatgctcttctttccttccctcctgatggaatcccattcatccttcta

SEQ ID NO: 287866 - DNA, 201 bp, Homo sapiens
gactacagaagagatgatgcttcagtttagtacaagaaagaatataacttgtcaggtggctaaaactgggcagggcattccaggcagagggaacagcctaygcaaagtcacaaaggcaggaaacagcaggaagtgtagaggaagctgcaaataattcaatatgactgaagcaggaagatatgaaaagcaaatggtgagaag

SEQ ID NO: 287867 - DNA, 201 bp, Homo sapiens
gctggattagctgaggcagaagtcgggctccagtcagccgcctgaaatagcctgtctacctctgtccgtccgctcactgctcttgagacctgattcctccrtgcattgctctgtctggttgccgtttggattgttcccgtgttaatttacgttgttagtctgtgtgactgcgtgtctggacgtctggctggccgattggtg

SEQ ID NO: 287868 - DNA, 201 bp, Homo sapiens
ctagcccagcttgcaaatggtagtcacatccagctttcaggtttacatgttacaaatttagcctcaaagagagcatctatcccacctccagattcccagaraaggaactctagttggcccagagtgagttaggcatccttccctagatcaatcaactatgaccaggagggtggtatcatgttgtacatacagactgccaag

SEQ ID NO: 287869 - DNA, 201 bp, Homo sapiens
gaaattgggagtttataataaagggagtgtttcatggaactaaaggaagaaatagaactaggaactagaaccatagagaaccaaggcagttctttatctcygtttctctagtgctcgctacacatctgtgttgtgttctctctctgttctctagcccagcttgcaaatggtagtcacatccagctttcaggtttacatgtt

SEQ ID NO: 287870 - DNA, 201 bp, Homo sapiens
tgtggtctggtactgtctgactagcgtgcaggagctagagaagggggaatgagctccagtttgttaggctgtcttcattgccccaggaaaagggaagagaaccacctaagttagcctgtctggccaacactgaggtttggcctctgatgatcctgttgcctacttgataaaattctactcctcagcattgcgttcaaggtc

SEQ ID NO: 287871 - DNA, 201 bp, Homo sapiens
cttatattaatggtagttcttttccaaaaagggacccttgattcctcactgggtcagtgttttccctttctcccatgtactctttctctttactaactggygaggagagcttgatctttttggcactcctcaatattgcctttaaaactcagggattctatttaaggcactgcaaatatggccttggtcaaattgttttat

SEQ ID NO: 287872 - DNA, 201 bp, Homo sapiens
ggtgtgcgcctgtagtcccaggtacttggtaggctgaggtaggaggatcccttgagcccaggaggtcaattcaaggctgcagtgagccatgttcataccaytgcactccagcctgggcgacagagcaagaccttgtctaaagggaaaaaaaaaaagcttgcttagaaccttccttggggaaggcaaaatggaatgagcaag

SEQ ID NO: 287873 - DNA, 201 bp, Homo sapiens
tggcaggttttaggccgaattacgtttttacctatgttttgattcatctgcatggtgttgtataactgtgaaatggcacaaaaaaatcctagtttttttttctctttaaaaaatggaaagtggaagtatgctgggcctgcatttctcacagtggcagtgacagtgacaattggttggaatcaaggaactggtccctttgga

SEQ ID NO: 287874 - DNA, 201 bp, Homo sapiens
ggcggtggcaaattcaagtcctgttaaccccgtggtgttctttgatgtcagtattggcggtcaggtgagatccaggaggctgcccacacctgcgccgaagrgaaactgctcggggctaggcaggcagaactcacccagagagagcggactcgggaagccagccagaaagtgaaattgcacccgaacctaccgacctgccgg

SEQ ID NO: 287875 - DNA, 201 bp, Homo sapiens
ttcaggcttgagaacaatagccaggtttgatgtgggtgttggagagaatggtgatggggaagttcttgaaagtggctgggtacgactgactgtagataacmgactttagcactttgattgaggcattaaattccatggtccaaatctcagcctttttgagccagaaattggactttttaagaatacctatagatgatctat

SEQ ID NO: 287876 - DNA, 201 bp, Homo sapiens
taggtgcagcttccaagatgaccaacaagagtaagagtagactttaaagatgtcatgctttaggtgcgacagtgttcttcctccggtttccagggacccarcactccaagtcactaatacttcccttctctctgctcagggagatggtactggagtcgccagtatttaccgggggccatttgcagatgaaaattttaaact

SEQ ID NO: 287877 - DNA, 201 bp, Homo sapiens
tgcaattgctgtttttactacagagacccagtcttcaggcttgagaacaatagccaggtttgatgtgggtgttggagagaatggtgatggggaagttcttraaagtggctgggtacgactgactgtagataaccgactttagcactttgattgaggcattaaattccatggtccaaatctcagcctttttgagccagaaat

SEQ ID NO: 287878 - DNA, 201 bp, Homo sapiens
atgtctgtcaaccatctttaggagagtccttttggctccagtgcatggtaaactggaaaggccttgtgctacctgctgtcactccaagtctctttcttttyggttataggaaagatggggttccaataggatacaaaggaagcaccttccacaggtaaggctcttggcaagccatcctggagtctttcagaaatatttcct

SEQ ID NO: 287879 - DNA, 201 bp, Homo sapiens
agtccagctcatgctcttcctacaggaaaaatcatcgatggacttctagtgatgagaaagattgaggtaagtactgctttgatttttctgtttctctgccrttgtggtctggtactgtctgactagcgtgcaggagctagagaagggggaatgagctccagtttgttaggctgtcttcattgccccaggaaaagggaagag

SEQ ID NO: 287880 - DNA, 201 bp, Homo sapiens
tctgtgtgactgcgtgtctggacgtctggctggccgattggtggacttgctggctccagtgtttattctttcccgtatttagaggcgctcacgactgtgayatcatagtgattgaatcattcattttttgtccctttcaggcagttctgcaccggagaattcaggtcagtttcagatgtgtttgacttctttgcctgctcc

SEQ ID NO: 287881 - DNA, 201 bp, Homo sapiens
agctgaggcagaagtcgggctccagtcagccgcctgaaatagcctgtctacctctgtccgtccgctcactgctcttgagacctgattcctccatgcattgytctgtctggttgccgtttggattgttcccgtgttaatttacgttgttagtctgtgtgactgcgtgtctggacgtctggctggccgattggtggacttgct

SEQ ID NO: 287882 - DNA, 201 bp, Homo sapiens
gtttcagatgtgtttgacttctttgcctgctccagaggggtgttctggggctgcagtgagggtatcggtgaaccacctgctggccttgaatgattgctggygacagtgatagaaggtaatgccccaagggtctgtccctagtttatttgccttctttatgtctgtcaaccatctttaggagagtccttttggctccagtgc

SEQ ID NO: 287883 - DNA, 201 bp, Homo sapiens
catgaagatcgagctctttgcagacgttgtgcctaagacggccgagaactttaggtaaggacgtgctccagctccgctggattagctgaggcagaagtcgrgctccagtcagccgcctgaaatagcctgtctacctctgtccgtccgctcactgctcttgagacctgattcctccatgcattgctctgtctggttgccgtt

SEQ ID NO: 287884 - DNA, 201 bp, Homo sapiens
aggaactgggcggttagactagggaggcggaggtgggagataccgagcggcagggtggtgggtcagcccatcatgccccctgctccgtgaagccctcatgrtcttggactgggccttctgacactctcccgctgattgcaggaagttggccgcatgaagatcgagctctttgcagacgttgtgcctaagacggccgagaac

SEQ ID NO: 287885 - DNA, 201 bp, Homo sapiens
accatagaggaatcagtgttacaagctcttttggaaatcttgcccttcagctaacatggccggggaaacttactgcaggtatatttggtttccatcaggcraacagtggtccaagtacaaatggctgtcagttctttatcacctgctctaagtgcgattggctggatgggaagcatgtggtgtttggtaagtcctactcct

SEQ ID NO: 287886 - DNA, 201 bp, Homo sapiens
gagggcttggctgcaagagccgataaggaggaccctggcgactgcctagtccaaaagtcctagctagagcaagatcaacttgtactgcccttagtacagcyacgtgagtggggtgaccattgaccttaaccaaaaagatgtcaaggctttcctcctcctcactcccgcgtccccagtgccaggcagagtctctcagctaga

SEQ ID NO: 287887 - DNA, 201 bp, Homo sapiens
ctcttttttccttgtcctgttagtttttacggtcttgtcctagaagggagcctggctgttgagagggtttctgtgggctctactcctcattccctttagattttttttttttttttttgagactgagttttgctcttattgcccaggctggagtgcaatgccgtgatctcagctcactgcaacctccgcctcccaggttca

SEQ ID NO: 287888 - DNA, 201 bp, Homo sapiens
ggtttctgtgggctctactcctcattccctttagattttttttttttttttttgagactgagttttgctcttattgcccaggctggagtgcaatgccgtgwtctcagctcactgcaacctccgcctcccaggttcaagcgattctcctgcctcagcctcccaagtagctgggattacaggcatgcgccaccacgcctggct

SEQ ID NO: 287889 - DNA, 201 bp, Homo sapiens
tcattccctttagattttttttttttttttttgagactgagttttgctcttattgcccaggctggagtgcaatgccgtgatctcagctcactgcaacctcygcctcccaggttcaagcgattctcctgcctcagcctcccaagtagctgggattacaggcatgcgccaccacgcctggctaattctgtatttttttttagt

SEQ ID NO: 287890 - DNA, 201 bp, Homo sapiens
tttagattttttttttttttttttgagactgagttttgctcttattgcccaggctggagtgcaatgccgtgatctcagctcactgcaacctccgcctcccrggttcaagcgattctcctgcctcagcctcccaagtagctgggattacaggcatgcgccaccacgcctggctaattctgtatttttttttagtagagacag

SEQ ID NO: 287891 - DNA, 201 bp, Homo sapiens
aatccatcgcctccgccatgtctgacgccgagcactactagaagagctaccccctcgcgagcgcctggcacacagagctcaactgactgagctgtcaccgmagacgcctctgccgcgaagcgcagcactgggcctgcgcagcagcagccgcggcgcatcgagagtgcccgccccctctcccccggaagaggtggggcttcg

SEQ ID NO: 287892 - DNA, 201 bp, Homo sapiens
gttaaccactcccaaatccctggagtatgtaggttaacatagataagtcaggattagccaccctttaactggctgtcttatattctcattagcgttccccrtttgaaccacagaacacaggtaattgagtgttttatcattgctaggaagatggtacatagtaccattccagaggcatacgagagggcttaatccccgtgg

SEQ ID NO: 287893 - DNA, 201 bp, Homo sapiens
agcgaaacttcctgcttagcttcatcctcctttctgagaaatgcattcttttgttgagccactcagtaaacgtggaagttggagaaatgttaaataccctrgcttttcagaaagaccttcaaaattttctgggcctcactaaggtcattctgaacgttatgtattaaaagggatcagttctaaaactgtcatgcatctacc

SEQ ID NO: 287894 - DNA, 201 bp, Homo sapiens
atgtgctccctgcccaagtgaaatagcctcctcaaatttatttgaacacggtaaagaaggtgatctctgtaattctgttgccttccagtgttgataatgtrtaaacataacgcagtctaaggaccttcctgaaattctcctttccccttgttcctagagttccaaacaagtcttctctttgacacgtatttttgtgtggct

SEQ ID NO: 287895 - DNA, 201 bp, Homo sapiens
agagttaagagactgtggaggaggaactaggacgagaactaagagttatcagaaaagaaaagcgaaacttcctgcttagcttcatcctcctttctgagaartgcattcttttgttgagccactcagtaaacgtggaagttggagaaatgttaaataccctagcttttcagaaagaccttcaaaattttctgggcctcacta

SEQ ID NO: 287896 - DNA, 201 bp, Homo sapiens; identical to SEQ ID NO: 58977

SEQ ID NO: 287897 - DNA, 201 bp, Homo sapiens
taccccgggcacgccggctccccgttcccagctggcaccggcgggatgctccctatcatactcctagagttaagagactgtggaggaggaactaggacgasaactaagagttatcagaaaagaaaagcgaaacttcctgcttagcttcatcctcctttctgagaaatgcattcttttgttgagccactcagtaaacgtgga

SEQ ID NO: 287898 - DNA, 201 bp, Homo sapiens
ctcgtgggtacgcacatgctgagacgtggtggctgcgccctgcagaccacgtaccccgggataccccgggcacgccggctccccgttcccagctggcaccrgcgggatgctccctatcatactcctagagttaagagactgtggaggaggaactaggacgagaactaagagttatcagaaaagaaaagcgaaacttcctgc

SEQ ID NO: 287899 - DNA, 201 bp, Homo sapiens
agataaagccataggcttgctggaggagtcacatttcaagatggtgacttcatctggtattgagtctgtcgtacataagaggaacttcattattaatctcygtatggaaagcgtgacgcttgccttgaaaatacacttgccaagcaagaacattattttcttagattgtacatgtattaaggtggcttagggctgggaggt

SEQ ID NO: 287900 - DNA, 201 bp, Homo sapiens
tgccagggcactttggttctcctccacgtggtcactccacatacgatcttatcctccagggcctcttcatgtggcctgtctggcagcacagcctgggcttsccttcagcatggtggttgggctctaaggggaagcttccaaaagaacagacctcattgtgcaaacacgtatcaagcctctggtgataacccattggccaaa

SEQ ID NO: 287901 - DNA, 201 bp, Homo sapiens
aaagccataggcttgctggaggagtcacatttcaagatggtgacttcatctggtattgagtctgtcgtacataagaggaacttcattattaatctccgtayggaaagcgtgacgcttgccttgaaaatacacttgccaagcaagaacattattttcttagattgtacatgtattaaggtggcttagggctgggaggtaggt

SEQ ID NO: 287902 - DNA, 201 bp, Homo sapiens
atccggtttcacgcctctctaagacgcagccagggctgcgggacttgaagcgcgggaatctcggccctggcaccgactccccggaaaaactacagggcccsgcatgcactgcgcgcctctgggagcgggagccgaaaggaaccggcgctttgtgacgtcacgtccgccttaccggcggattaagctcgctttcttctaggc

SEQ ID NO: 287903 - DNA, 201 bp, Homo sapiens
gagcattgtagggcagagaccaaaggggttgtctttcccatgtatacaggcactccttacctactttggttcccctaaaacttttaagataaagtcttacrtggattagatctgatttaagtctttcacagaagaaagagcctaatctgtctgtggaagttggaaataagcatcttcaggcctggcgcgggcctcacacct

SEQ ID NO: 287904 - DNA, 201 bp, Homo sapiens
gctgagaagaggataatgtggccacctggtcacctgtaaagtaatgactactctcaagttatatgacagtaaagtaaaggatagtccttttttaatagtgkcccctgaatctgacgtccttcttgggctcacattaactaggtattaacagttgagtgagggttccagaggagaccagtggtcagtgttcatttgaattgt

SEQ ID NO: 287905 - DNA, 201 bp, Homo sapiens
gcggtttgaaagaatgatccataaattgtctttgaatagtaaagatatccctccctacaccaatctgtttagtttctggtttcagatagcaaattcagacyataagagacatgaacatatcatacagaacagctcagagttgtccgcattactttggtttttcaggttcaagtgataagtatcaagagtttggataccaag

SEQ ID NO: 287906 - DNA, 201 bp, Homo sapiens
tgactgacatcaccttaaaggtggcaggtaggaactctccctggcaaatcactgaactcccacagcaggtaggcctgcggcttcagtagcacaagggaagrtctgggttggtcttgttctcaagtagcctgtgtctgaagctactttactaaggacagtgccattatatctatacagaaagaagcagagcagccctgagac

SEQ ID NO: 287907 - DNA, 201 bp, Homo sapiens
ttttttttgagactgagttttgctcttattgcccaggctggagtgcaatgccgtgatctcagctcactgcaacctccgcctcccaggttcaagcgattctsctgcctcagcctcccaagtagctgggattacaggcatgcgccaccacgcctggctaattctgtatttttttttagtagagacagggtttctccatgttgg

SEQ ID NO: 287908 - DNA, 201 bp, Homo sapiens
ttgcccaggctggagtgcaatgccgtgatctcagctcactgcaacctccgcctcccaggttcaagcgattctcctgcctcagcctcccaagtagctgggaktacaggcatgcgccaccacgcctggctaattctgtatttttttttagtagagacagggtttctccatgttggtcaggctggtcttgaactcccagcctta

SEQ ID NO: 287909 - DNA, 201 bp, Homo sapiens
aatggaaggatggaggcagaatccagctgtctggtcttaaggaggctagggatagaaaggaactgaggcagcagtagacaacttgtatgtgagggttggcrggaaaaatgaccgagtgtgaaagctagaagggacagaagggtcataaagtccccatttctcttcaaacagttgcaggctcacaatttgctaactgctttg

SEQ ID NO: 287910 - DNA, 201 bp, Homo sapiens
tgcccaggctggagtgcaatgccgtgatctcagctcactgcaacctccgcctcccaggttcaagcgattctcctgcctcagcctcccaagtagctgggatyacaggcatgcgccaccacgcctggctaattctgtatttttttttagtagagacagggtttctccatgttggtcaggctggtcttgaactcccagccttac

SEQ ID NO: 287911 - DNA, 201 bp, Homo sapiens
gagtgcaatgccgtgatctcagctcactgcaacctccgcctcccaggttcaagcgattctcctgcctcagcctcccaagtagctgggattacaggcatgcrccaccacgcctggctaattctgtatttttttttagtagagacagggtttctccatgttggtcaggctggtcttgaactcccagccttacgtgatctgcct

SEQ ID NO: 287912 - DNA, 201 bp, Homo sapiens
gtctttaactggtttgaatggacattgttggtttgagggaaaagatggggattaaacctcaagctaaaatcagattgtactgctttgcattgtgccctgaccaaaaaaaaaaaaaaaatgcaggccgggtgtgggggctcacacctgtaatcccagcactttgggaggctgaggtgggtggatcacttcagcccaggagtt

SEQ ID NO: 287913 - DNA, 201 bp, Homo sapiens
ctttaactggtttgaatggacattgttggtttgagggaaaagatggggattaaacctcaagctaaaatcagattgtactgctttgcattgtgccctgaccaaaaaaaaaaaaaaaatgcaggccgggtgtgggggctcacacctgtaatcccagcactttgggaggctgaggtgggtggatcacttcagcccaggagttca

SEQ ID NO: 287914 - DNA, 201 bp, Homo sapiens
agagtcacttgaacctgggaggcggaggttgcattgagctgagatcgtgccactgcactccagcctgggcaacagagcaagactctgtcccaaaaaaaacaaaaaaaaaaatgcagagggagtttttttttgacactgataccataaaatgacttctggttctgtcagtcagtatttttgctcttctttttctaggtagga

SEQ ID NO: 287915 - DNA, 201 bp, Homo sapiens
tcactaccttcagaccagcctaaatttttaataaatactgggaattgggccgggcgcagtggctcacacctgtaatcccagcactttgggaggccgaggtragcagatcacaaggtcaggagatcgagaccatcctggctaacacagtgaaaccctgtctctactaaaaacacaaaaaattagccaggcgtggtggcaggc

SEQ ID NO: 287916 - DNA, 201 bp, Homo sapiens
tatctcccacaggaagtacttctgtttcctgccatgaaacccgaagacaagaaggagaatgtagcaaccactgatacactggaaagcacaacagttggcasttctgtctagaaaataataattgcaagttgtataactcaggcgtctttgcatttctgcgaaagatcaaggtctgcaagggaattcttgtgtgctgctttc

SEQ ID NO: 287917 - DNA, 201 bp, Homo sapiens
ctaaatttttaataaatactgggaattgggccgggcgcagtggctcacacctgtaatcccagcactttgggaggccgaggtgagcagatcacaaggtcagsagatcgagaccatcctggctaacacagtgaaaccctgtctctactaaaaacacaaaaaattagccaggcgtggtggcaggcacctgtagtcccagctact

SEQ ID NO: 287918 - DNA, 201 bp, Homo sapiens; identical to SEQ ID NO: 58976

SEQ ID NO: 287919 - DNA, 201 bp, Homo sapiens
gaggtgagcagatcacaaggtcaggagatcgagaccatcctggctaacacagtgaaaccctgtctctactaaaaacacaaaaaattagccaggcgtggtgrcaggcacctgtagtcccagctactttggagtctgagtcaggagaatggtgtgaacccaggaggcggagcttgccatgagccgagatcgcgctgctgcact

SEQ ID NO: 287920 - DNA, 201 bp, Homo sapiens
acatatcatacagaacagctcagagttgtccgcattactttggtttttcaggttcaagtgataagtatcaagagtttggataccaagtgatttaaccagaratgtatttaaatctatatgaggcacagagagtaaagggttaagatactaaaagatacctagaaagctcacatttggttagctgaatgccagggtcagggt

SEQ ID NO: 287921 - DNA, 201 bp, Homo sapiens
gattcatgtttttgataagttgctaggggcagaacatagaggactcttcaggcagctaacacattgaacgctttcatctttccaacagtgagctgaagagrcgcctgaaagctgagaagaaagtagcagagaaggaggccaaacagaaagagctcagtgagaaacagctaagccaagccactgctgctgccaccaaccaca

SEQ ID NO: 287922 - DNA, 201 bp, Homo sapiens
acgtagaaggacatggagctgccgtcgtccctcacgaacagagtcgaggaatgggtgggcccgttggggtctttgcccaaatccatcgcctccgccatgtytgacgccgagcactactagaagagctaccccctcgcgagcgcctggcacacagagctcaactgactgagctgtcaccgcagacgcctctgccgcgaagcg

SEQ ID NO: 287923 - DNA, 201 bp, Homo sapiens
agccgcggcgcatcgagagtgcccgccccctctcccccggaagaggtggggcttcgcaccttgacctggaaattaacgtactatcctccttacttttgggycgggccctccgggaagatggcggccgtgcaggcggccgaggtgaaagtggatggcagcgagccgaaactgagcaagaagtgagtgtcgctgcgagtcttt

SEQ ID NO: 287924 - DNA, 201 bp, Homo sapiens
cacccttttcccttaaagaagcagaaagctggaataccactggctagatgggtatagtcagaaataagaggaacagagagagtaaagcagccaagaaagtrttctgatgggtcaggtgtgtggatgtgagtaacacttccagaatttctctacaagattaatagagcattgtagggcagagaccaaaggggttgtctttcc

SEQ ID NO: 287925 - DNA, 201 bp, Homo sapiens
atacaaaaaaattagccaggcgtggtggcacatgcctgtaatcccagctactagggaggctggggcaggagaattgcttgaacctaggaggcggaggttgyggtgagctgagatcttgccattgcactccagcctaggcaacaagagcaaaactccatctcaaaaaaaaaaagattagctgtcatgaccgtggccatgtgt

SEQ ID NO: 287926 - DNA, 201 bp, Homo sapiens
ctcgcgagcgcctggcacacagagctcaactgactgagctgtcaccgcagacgcctctgccgcgaagcgcagcactgggcctgcgcagcagcagccgcggmgcatcgagagtgcccgccccctctcccccggaagaggtggggcttcgcaccttgacctggaaattaacgtactatcctccttacttttgggtcgggccct

SEQ ID NO: 287927 - DNA, 201 bp, Homo sapiens
aaagagtttagtgacaagctacttgagctgagctgtgggtgtggaattgaggggtatagaactgagcaagagcgtttctcctgggcgattcatgtttttgrtaagttgctaggggcagaacatagaggactcttcaggcagctaacacattgaacgctttcatctttccaacagtgagctgaagagacgcctgaaagctga

SEQ ID NO: 287928 - DNA, 201 bp, Homo sapiens
cgtcgtccctcacgaacagagtcgaggaatgggtgggcccgttggggtctttgcccaaatccatcgcctccgccatgtctgacgccgagcactactagaakagctaccccctcgcgagcgcctggcacacagagctcaactgactgagctgtcaccgcagacgcctctgccgcgaagcgcagcactgggcctgcgcagcag

SEQ ID NO: 287929 - DNA, 201 bp, Homo sapiens; identical to SEQ ID NO: 58973

SEQ ID NO: 287930 - DNA, 201 bp, Homo sapiens
accgcagacgcctctgccgcgaagcgcagcactgggcctgcgcagcagcagccgcggcgcatcgagagtgcccgccccctctcccccggaagaggtggggyttcgcaccttgacctggaaattaacgtactatcctccttacttttgggtcgggccctccgggaagatggcggccgtgcaggcggccgaggtgaaagtgga

SEQ ID NO: 287931 - DNA, 201 bp, Homo sapiens
tctcactccatattcaatcctgtaatgcagaggtcttggttaaagaaaacaatgtattggggtcactcgggggcagaatactgccctctgctaggtgggcsccactggtctgaccaggttcaacttctgaagggcttttttttttttttttttaacagcaatactacaaaatccgcagtcaagcaattcatcagctgaagg

SEQ ID NO: 287932 - DNA, 201 bp, Homo sapiens
tggcacatgcctgtaatcccagctactagggaggctggggcaggagaattgcttgaacctaggaggcggaggttgcggtgagctgagatcttgccattgcrctccagcctaggcaacaagagcaaaactccatctcaaaaaaaaaaagattagctgtcatgaccgtggccatgtgttgttgttagatgcttgtggttggtg

SEQ ID NO: 287933 - DNA, 201 bp, Homo sapiens
actcccacagcaggtaggcctgcggcttcagtagcacaagggaaggtctgggttggtcttgttctcaagtagcctgtgtctgaagctactttactaaggayagtgccattatatctatacagaaagaagcagagcagccctgagacatggaatcatattccagatgaggtagtgctacaaagagaggggctttctctataa

SEQ ID NO: 287934 - DNA, 201 bp, Homo sapiens
atttcattcccgctaaataacaggtttctctcccagggatggtgaagcatattacaggcagttacaaggtcacctaccacccagatggcccagagggccargcctacgatgttgacttcaccccacccttccggcgaatcaacatggtagaagagcttgagaaagccctggggatgaagctgccagaaacgaacctctttg

SEQ ID NO: 287935 - DNA, 201 bp, Homo sapiens
ggcagatcacctgaggtcgggagttcgagaccagcctgaccaatacagagaaaccctgtctctactaaaaatacaaaaaaattagccaggcgtggtggcasatgcctgtaatcccagctactagggaggctggggcaggagaattgcttgaacctaggaggcggaggttgcggtgagctgagatcttgccattgcactcca

SEQ ID NO: 287936 - DNA, 201 bp, Homo sapiens
tgaaaccaacctggccaacatggtgaaacccagtgtctacaaaaatacaaaaattagctgggcgtggtggcatgtgcctgtaatcccagctacttgggagkctgaggcaggaggattgcttgaacccgggaggcggaggttgcagtgagccgagatcctgcaactgcactccagcctgggtgacagaatgagacttcgtct

SEQ ID NO: 287937 - DNA, 201 bp, Homo sapiens
gcctgaccaatacagagaaaccctgtctctactaaaaatacaaaaaaattagccaggcgtggtggcacatgcctgtaatcccagctactagggaggctggrgcaggagaattgcttgaacctaggaggcggaggttgcggtgagctgagatcttgccattgcactccagcctaggcaacaagagcaaaactccatctcaaa

SEQ ID NO: 287938 - DNA, 201 bp, Homo sapiens
gaaaccaacctggccaacatggtgaaacccagtgtctacaaaaatacaaaaattagctgggcgtggtggcatgtgcctgtaatcccagctacttgggagaytgaggcaggaggattgcttgaacccgggaggcggaggttgcagtgagccgagatcctgcaactgcactccagcctgggtgacagaatgagacttcgtctc

SEQ ID NO: 287939 - DNA, 201 bp, Homo sapiens
tcccagcactttgggaggcggaggcaggcagatcacctgaggtcgggagttcgagaccagcctgaccaatacagagaaaccctgtctctactaaaaatacraaaaaattagccaggcgtggtggcacatgcctgtaatcccagctactagggaggctggggcaggagaattgcttgaacctaggaggcggaggttgcggtg

SEQ ID NO: 287940 - DNA, 201 bp, Homo sapiens
ggaggcggaggcaggcagatcacctgaggtcgggagttcgagaccagcctgaccaatacagagaaaccctgtctctactaaaaatacaaaaaaattagccrggcgtggtggcacatgcctgtaatcccagctactagggaggctggggcaggagaattgcttgaacctaggaggcggaggttgcggtgagctgagatcttg

SEQ ID NO: 287941 - DNA, 201 bp, Homo sapiens
taatgctgtacggtaagaactggctgccttcagcctgttcagttattacaagctacgtaacctttcggccttccaaaaggtttgtgactattccttataaytttccccaatatttccctttaatatttctgccaccatcctgagtgaatcccaacatagaggaagctcacagtccccaggaggatcagagaatcaggcttg

SEQ ID NO: 287942 - DNA, 201 bp, Homo sapiens
gggcacctgtaatccccgctattcaggaggctgaggcacgagaatcactggaaccaggatgcggaggttgcagcaagccgagatcatgccactgcactccrgcctgggcgacagagcgagactccatctcaataataataataataataataataaataaataaaaagctataggataaacccatctggatgggagctgag

SEQ ID NO: 287943 - DNA, 201 bp, Homo sapiens
gaacagagtcgaggaatgggtgggcccgttggggtctttgcccaaatccatcgcctccgccatgtctgacgccgagcactactagaagagctaccccctcscgagcgcctggcacacagagctcaactgactgagctgtcaccgcagacgcctctgccgcgaagcgcagcactgggcctgcgcagcagcagccgcggcgca

SEQ ID NO: 287944 - DNA, 201 bp, Homo sapiens
ggccgaggtgaaagtggatggcagcgagccgaaactgagcaagaagtgagtgtcgctgcgagtctttaaagcctttgcggtaggagagtctgggctgggargcgccgcgaggttcccaccaaggctgctgtgccggggccttcttgccggctctcgtgggtacgcacatgctgagacgtggtggctgcgccctgcagacca

SEQ ID NO: 287945 - DNA, 201 bp, Homo sapiens
ctggtgggggttgtctattattattttcgtttcacaggtgagaagttaattcactcgtccaagtcacataattgacaagtgtgttggaatttagtcccagrcagcctgactacaaagatggtatattaccccctgtactatactgctttgcacaccgttctattttgttgtctaagtcaggctccagtgggcaaagtgaga

SEQ ID NO: 287946 - DNA, 201 bp, Homo sapiens
tggtgggggttgtctattattattttcgtttcacaggtgagaagttaattcactcgtccaagtcacataattgacaagtgtgttggaatttagtcccaggsagcctgactacaaagatggtatattaccccctgtactatactgctttgcacaccgttctattttgttgtctaagtcaggctccagtgggcaaagtgagac

SEQ ID NO: 287947 - DNA, 201 bp, Homo sapiens
agccaaacccactctccatgcccccactttatccttccctccctggttttttgtttttgtttttgtttttttgaggcaaagtctcattctgtcacccaggytggagtgcagtggtgtgatctcactgcaacctccgcctccccggttcaagtgattctccttcctcagcctcccaagtaactggtattagaggcgcacacc

SEQ ID NO: 287948 - DNA, 201 bp, Homo sapiens
gcttgaccttgaggccccagggaaagtgtctctctaaagattgcctgaggtttactttagaccaggggctggccaactacagtccaccagccaaacccactctccatgcccccactttatccttccctccctggttttttgtttttgtttttgtttttttgaggcaaagtctcattctgtcacccaggctggagtgcagtg

SEQ ID NO: 287949 - DNA, 201 bp, Homo sapiens
tcagcctcccaagtaactggtattagaggcgcacaccactacaccctgttaatgttggccaggctggtcttgaactcctggcctcaagtgatccacccgcstcgggctcccagagtactaggattacaggcatgagccaccacaccttgcccctccttggttttactagtaaaattgtattggaacacagctgtgctcatt

SEQ ID NO: 287950 - DNA, 201 bp, Homo sapiens
ataagacattatatgtagaaaaagctgtcaactttgaaaccattcagaatctgtttttcttttttacaagatgaaagattcggccaggcgtggtggctcaygcctgtaatcccagcactttgggaggccaagacaggcagatcacgaggtcaggagatcaagaccatcctggctaacacggtgaaaccccatcttcactaa

SEQ ID NO: 287951 - DNA, 201 bp, Homo sapiens
tatgtagaaaaagctgtcaactttgaaaccattcagaatctgtttttcttttttacaagatgaaagattcggccaggcgtggtggctcacgcctgtaatcscagcactttgggaggccaagacaggcagatcacgaggtcaggagatcaagaccatcctggctaacacggtgaaaccccatcttcactaaaaataccaaaa

SEQ ID NO: 287952 - DNA, 201 bp, Homo sapiens
tcaggtgactcctgctctctctcatactcatcgggtggttggtatgctgctttcagaggagggctgcctggatttcattcccgctaaataacaggtttctytcccagggatggtgaagcatattacaggcagttacaaggtcacctaccacccagatggcccagagggccaagcctacgatgttgacttcaccccaccctt

SEQ ID NO: 287953 - DNA, 201 bp, Homo sapiens
cagaatctgtttttcttttttacaagatgaaagattcggccaggcgtggtggctcacgcctgtaatcccagcactttgggaggccaagacaggcagatcaygaggtcaggagatcaagaccatcctggctaacacggtgaaaccccatcttcactaaaaataccaaaaaaattagccgggcatggtggcgggcacctgtag

SEQ ID NO: 287954 - DNA, 201 bp, Homo sapiens
ggcagatcacgaggtcaggagatcaagaccatcctggctaacacggtgaaaccccatcttcactaaaaataccaaaaaaattagccgggcatggtggcggrcacctgtagtcccagctactccggaggctgaggcaggaaaatggtgtgaacccgggaggcagagcttacagtgatctgagatcgcaccactgcactccag

SEQ ID NO: 287955 - DNA, 201 bp, Homo sapiens
ctccggaggctgaggcaggaaaatggtgtgaacccgggaggcagagcttacagtgatctgagatcgcaccactgcactccagcctgggcaacacagcgagmctctgtctcaaaaaaaaaaaaaaaaggtgaaagattcaaaacctcaattcattttttaaagttattctaaattcatatcgaaaatgaaggatgtgtcctg

SEQ ID NO: 287956 - DNA, 201 bp, Homo sapiens
ctggaatatactaatctctggattttggtggtaacaacagaggcaagaggaatgggtagatagctgtgaaaaaatgttgagagtgcttctcagcttcaagrtacattcttatctcccacaggaagtacttctgtttcctgccatgaaacccgaagacaagaaggagaatgtagcaaccactgatacactggaaagcacaac

SEQ ID NO: 287957 - DNA, 201 bp, Homo sapiens
gcgggcggatcacttgaggtcaggagttcgagaccagcctggtaacatggcgaaaccccgtctctactaaaaataacaaaaatgagccgggtgtgatggcrggcgcctgtaatcccagctacttgggaggctgaggcaggagaatcgcttgaagccaggagacggaggttgcagtgcgccgaaattgcgccgcttccagcc

SEQ ID NO: 287958 - DNA, 201 bp, Homo sapiens
atgccctccacctcggaccacagccaggctccttgacaaggtgagaaggccctgccttcttgtacatgtcctcatctggtgctgaatggttccctcttccytgggaaaatgaaccccactggggagagttcatttctgcagcttcacaggaaaaccctagagagagaacaagagaattaacagacttttaactgtcatact

SEQ ID NO: 287959 - DNA, 201 bp, Homo sapiens; identical to SEQ ID NO: 58979

SEQ ID NO: 287960 - DNA, 201 bp, Homo sapiens
tatatttgggggtccttggcaacgtcttcccacagcattttgttgtaaattttgtccatggatttttcgcttcgcctctctagctgtgctttctatttttrtgtgaggattcagggaaatccaaaaactatgctgctaccagcaccaccatcttctaggcatccagtgacttaatcttgaaagctagatcctgaaagcatg

SEQ ID NO: 287961 - DNA, 201 bp, Homo sapiens
gagctcaactgactgagctgtcaccgcagacgcctctgccgcgaagcgcagcactgggcctgcgcagcagcagccgcggcgcatcgagagtgcccgccccytctcccccggaagaggtggggcttcgcaccttgacctggaaattaacgtactatcctccttacttttgggtcgggccctccgggaagatggcggccgtgc

SEQ ID NO: 287962 - DNA, 201 bp, Homo sapiens
tcttagttgcagacaacagaaactgttataactagtttaagcaaaataaaaatttattcagctctataggtgaggtattgctcctcacaagagggcattakctgcgggggtctgcctgcagaccctgacctaaacgatggatgaataaaacgtacactgaaacacagatactctgttttgccagtcctgctgagtgtccga

SEQ ID NO: 287963 - DNA, 201 bp, Homo sapiens
gttataactagtttaagcaaaataaaaatttattcagctctataggtgaggtattgctcctcacaagagggcattagctgcgggggtctgcctgcagaccstgacctaaacgatggatgaataaaacgtacactgaaacacagatactctgttttgccagtcctgctgagtgtccgatcacctgcacaccaagagaggtgt

SEQ ID NO: 287964 - DNA, 201 bp, Homo sapiens
tataactagtttaagcaaaataaaaatttattcagctctataggtgaggtattgctcctcacaagagggcattagctgcgggggtctgcctgcagaccctracctaaacgatggatgaataaaacgtacactgaaacacagatactctgttttgccagtcctgctgagtgtccgatcacctgcacaccaagagaggtgtat

SEQ ID NO: 287965 - DNA, 201 bp, Homo sapiens
gcggaggcaggcagatcacctgaggtcgggagttcgagaccagcctgaccaatacagagaaaccctgtctctactaaaaatacaaaaaaattagccaggcvtggtggcacatgcctgtaatcccagctactagggaggctggggcaggagaattgcttgaacctaggaggcggaggttgcggtgagctgagatcttgccat

SEQ ID NO: 287966 - DNA, 201 bp, Homo sapiens
tcattgcggccgaccctgagcagctctcactccaggcatttatttagtatagaattaacaacagaagctttgagtaaacacacttgtggataattaacatsgtaagagaggagttctaggaattattaaagtccaggtaccatggtctaaagtaaataccattagggagcagtatctttggtcaacctccccccaagaggg

SEQ ID NO: 287967 - DNA, 201 bp, Homo sapiens
gcaaaagctgttgaatgccctccacctcggaccacagccaggctccttgacaaggtgagaaggccctgccttcttgtacatgtcctcatctggtgctgaayggttccctcttccctgggaaaatgaaccccactggggagagttcatttctgcagcttcacaggaaaaccctagagagagaacaagagaattaacagactt

SEQ ID NO: 287968 - DNA, 201 bp, Homo sapiens
ctcacaaggacaagtcattttctgatcaaagaaggttggtgcccattaccttctttattgctctggaagcaaaaattatttccttacttggttcattttcygttaagcctctggctaagtctttggacttgttgctaaggaaacaaggagccctaataccaaaaccaatagtcctttctcattttctctttaataaattca

SEQ ID NO: 287969 - DNA, 201 bp, Homo sapiens
atagtctcactctgtctcccaggctggaatgcagtggtgccatctcagcttactgcaacctctgccccccaggttcaagcaattctcttgcctcagcctcscgagtacctgggattacaggcacctgccaccacgcccggctaagttttgtatttttagtagagatggggcttcgccatattgaccaggctggtctcgaac

SEQ ID NO: 287970 - DNA, 201 bp, Homo sapiens
ctgccaccacgcccggctaagttttgtatttttagtagagatggggcttcgccatattgaccaggctggtctcgaactcctgacctcaggtgatccacctscctcggcttcccaaagtgctgggattacaggcgtgagccgccacaccctgccactaaaatatttattgatgttagttattctagttcagtattctcagat

SEQ ID NO: 287971 - DNA, 201 bp, Homo sapiens
tttttttttatttttttatttttatttttttgaggcgaagtcttgctcttgtcccccaggctgtagtgcaatggcgcaatctcggctcactgcaacctccrccttccgggttcaagcgattctcctgcctcagcctccccagtagctgggattacaggcgcctgccaccacgcccagctaatttttgtatctttagtagag

SEQ ID NO: 287972 - DNA, 201 bp, Homo sapiens
ccccaggctgtagtgcaatggcgcaatctcggctcactgcaacctccgccttccgggttcaagcgattctcctgcctcagcctccccagtagctgggattrcaggcgcctgccaccacgcccagctaatttttgtatctttagtagagacggagtttcaccatgttggccaggctggtcttgaactcctgacctcaggtga

SEQ ID NO: 287973 - DNA, 201 bp, Homo sapiens
tccacatgctaatgatgtcacattcaatatgtattcacgtcattttgcttttttgtagcattaagaaatattttttgattatatgagaaaggcaaacacaygtaccataaaacaaattcaaacaataaattaaatagaagcaaaactgaaagtgctctttcactccttctgactaacttccctacccaaacttgagtttga

SEQ ID NO: 287974 - DNA, 201 bp, Homo sapiens
gtgagctccctcttgtttttgtggcatgttcagaaatactgcagcttgttttttgagatttcctggttctcttcttcttcctcactttttttgggtcttctttttttttttttttttggtctcttttttccttgtcctgttagtttttacggtcttgtcctagaagggagcctggctgttgagagggtttctgtgggctct

SEQ ID NO: 287975 - DNA, 201 bp, Homo sapiens
taatatatgggcagcataatatgttctgaaaagtaaatgagttaacagatcagccaagatttatagtctccaataccaccctatttcaaatacaagcaatyctacaaaacaagtagaattcagttaattagcttggcttggtttgtaccaccaggctggcaattcaggacacaagcaaaggcacagatattaataaataat

SEQ ID NO: 287976 - DNA, 201 bp, Homo sapiens
ccagccgaggccaaccagtttggcacttaaaattaacccctgaagcagacatattgttattctcttattctctgggtcaaggtctctcaaaattcgggggstatttgcatcagaaatcctcaaggaggcttgtttaaaattcagatcctaggctgggcatggtggctcatgcctgtaatcccagcagtttgggaggccaag

SEQ ID NO: 287977 - DNA, 201 bp, Homo sapiens
ccctagccagctggtttctgttgggttcaacccacaggaaactacaaggcaggaggaaagacaaattgggatatttcttcccctgcttcctcgctgtttargactgtgtttctgacagtagctgcatcccccatatgacctcagttcctgttgggtagccctagtggtgggctggagctgattcatagtgacttgcaaaag

SEQ ID NO: 287978 - DNA, 201 bp, Homo sapiens
tagccagctggtttctgttgggttcaacccacaggaaactacaaggcaggaggaaagacaaattgggatatttcttcccctgcttcctcgctgtttaggamtgtgtttctgacagtagctgcatcccccatatgacctcagttcctgttgggtagccctagtggtgggctggagctgattcatagtgacttgcaaaagctg

SEQ ID NO: 287979 - DNA, 201 bp, Homo sapiens
aagacaaattgggatatttcttcccctgcttcctcgctgtttaggactgtgtttctgacagtagctgcatcccccatatgacctcagttcctgttgggtarccctagtggtgggctggagctgattcatagtgacttgcaaaagctgatatgcacgcttctgtccaactgtgtatttgttgatgtcatactggtagctaga

SEQ ID NO: 287980 - DNA, 201 bp, Homo sapiens
gttatcataccactacggcactacaaataaagcaaatagttctagtagtcaattatactttcatagtcatggaaaaggccagtaatgataaataatttacmaatttcacagtaagtggcagaaccagaatttgaacccatatctgtctgactccaaaggttgtgccctttctactcaccaagcaatgaaaatattagcaat

SEQ ID NO: 287981 - DNA, 201 bp, Homo sapiens
ataagattgttttgttaaccatagtcactccacaaccttagaaagtaatgctggtttttgtgaatttttttctgaccagattccttgggtcttcctaaaargtaccagactggaaatgcagtgaatctttgagcaatgaaagcaatttgtggagtagctcttgacatgaaagaaagcctttctcttcatgcaaccatgggc

SEQ ID NO: 287982 - DNA, 201 bp, Homo sapiens
agcatctcagaagaaagtagactttgtgagtgtaagtcagtcccatccacacccttcctactgctctcctctcttctgtggtgagtgagccaaccatttgyagcctgaatgccaagcagaagcagccctatcaggaggcagcagagacaaaaccacctgcgtatgctttgggggctggcggagggatgtcttacttacaga

SEQ ID NO: 287983 - DNA, 201 bp, Homo sapiens
attcagctcctccctttccccttcagtgggacaaggcccttgcacagggcacagcttgcacaaccaacctggggaccctgacttcacctcattcctgagtytcatgtggattcaagtaatatgggtatagtaattatgtatatgaagttaactaaatgagggattataagaaaagtccatgggcagatttggataatttaa

SEQ ID NO: 287984 - DNA, 201 bp, Homo sapiens
gccctttgaatccattgacgaaggccatgtcactcacaactgggatgaagttgatcctgatcctaaccaggtaacctggtcctgtgaattgaagcttatcrtatacccaaagccttgactagaaatacctaaatagaataccatggtcattggaaaaaataaatagttttttaaagtattattttaataaatgctaaagtg

SEQ ID NO: 287985 - DNA, 201 bp, Homo sapiens
gggtaaccatccccatgattcaattacctcccaccatgaatgtccctcccacaaacgtgaggattatgggaactataattcaagatgagatttgggtgagrcacagacaaatgatatgaggtgggaattttggaaatgatggattgattatgtatatacatattgttaaaagaaaaacctttgacaaatctaatttaacag

SEQ ID NO: 287986 - DNA, 201 bp, Homo sapiens
aggggccttgggatgaggcaacgcttgggtgggaggggtccacagtagacccctgacatttacagatctaacatttccaatgtcaccgttggaagccctaratatagtcatttgtcctttggtgagggagtaaataacacaactagtagggaagcaaagccagatactcaacattcccctgtgaacatagcttcattctct

SEQ ID NO: 287987 - DNA, 201 bp, Homo sapiens
ggtgtgcaccacaatggccagctaattttttgtatttttggtagagaaagggttttaccatattgctcaggctggtctcgaactcctgggctcaagcaatstgcctgcctgagcctcccaaagtgctggaattacaggcatgcaccactgcacccagcttagctttgtctgattgtatgagtaaaatatacttataaaaac

SEQ ID NO: 287988 - DNA, 201 bp, Homo sapiens
atgtcaattctcacagcaataagggttgggtttatttttatttgaatttacacagatgcgatcttctctgtattgctgcaatagttatttttccaaaattyagttctgatcatgccaccactgtcttcattagaaagcctttgcaggcttcccatggcttaggattaagtctgcactctgaagcatggtgtttgatgctct

SEQ ID NO: 287989 - DNA, 201 bp, Homo sapiens
ctcaggctggtctcgaactcctgggctcaagcaatctgcctgcctgagcctcccaaagtgctggaattacaggcatgcaccactgcacccagcttagcttkgtctgattgtatgagtaaaatatacttataaaaacccaaaagtattgtagaaattaataaaatattactggacgtctcccatcattaagtgagagtcaag

SEQ ID NO: 287990 - DNA, 201 bp, Homo sapiens
ttcccatggcttaggattaagtctgcactctgaagcatggtgtttgatgctcttcaccatctgtccctggactcattttccagtatcacctcttgcccctytcccttctgtcaatgcactggggttttagccttctctcctcttaacaaaatctctgtgcactttgatgtgttttcagtgattaaaatgtcatttcccttc

SEQ ID NO: 287991 - DNA, 201 bp, Homo sapiens
gctgtatcagggtgggcatggtggctcatgcctgtaatcccagcactttgggaggccaaggcaggcagatgacctgagactgggagtttgagaccagcctwacctgaggtcaggagatcgagaacagcttgaccaacatggagaaacaccatctctactaaaaatacaaaattagccaggtgtggtggtgcatgcctgaat

SEQ ID NO: 287992 - DNA, 201 bp, Homo sapiens
gattaagtctgcactctgaagcatggtgtttgatgctcttcaccatctgtccctggactcattttccagtatcacctcttgcccctctcccttctgtcaawgcactggggttttagccttctctcctcttaacaaaatctctgtgcactttgatgtgttttcagtgattaaaatgtcatttcccttccttcccacttcctt

SEQ ID NO: 287993 - DNA, 201 bp, Homo sapiens
aagtctgcactctgaagcatggtgtttgatgctcttcaccatctgtccctggactcattttccagtatcacctcttgcccctctcccttctgtcaatgcaytggggttttagccttctctcctcttaacaaaatctctgtgcactttgatgtgttttcagtgattaaaatgtcatttcccttccttcccacttccttagtc

SEQ ID NO: 287994 - DNA, 201 bp, Homo sapiens
ttcaccatctgtccctggactcattttccagtatcacctcttgcccctctcccttctgtcaatgcactggggttttagccttctctcctcttaacaaaatytctgtgcactttgatgtgttttcagtgattaaaatgtcatttcccttccttcccacttccttagtcctccctccctccctccctccctttttcccccatc

SEQ ID NO: 287995 - DNA, 201 bp, Homo sapiens
caccatctgtccctggactcattttccagtatcacctcttgcccctctcccttctgtcaatgcactggggttttagccttctctcctcttaacaaaatctytgtgcactttgatgtgttttcagtgattaaaatgtcatttcccttccttcccacttccttagtcctccctccctccctccctccctttttcccccatccc

SEQ ID NO: 287996 - DNA, 201 bp, Homo sapiens
aaatcctgctaatggtggcatttgtgtctttgtcacctacagtacatttctggatttgggaatgagtgttcttcagaggatcctcgctgcccaggttcccygccagaaggacaggtatgagcaaataaagtgcttagaagagctctgaatcctattcctggatgactagctttcaggccaaagtgcctccacccaccgtgg

SEQ ID NO: 287997 - DNA, 201 bp, Homo sapiens
gtaatattgtttattgcatcctttgtttcagaataatcctcaggtctgcccctacaatctctatgctgagcagctctcaggatcggctttcacttgtccayggagcaccaataagagaaggtacaaggattagatgaattctgacctgcagactgtgggtactatgacagggactttgtgctgcctccttcccctgggcca

SEQ ID NO: 287998 - DNA, 201 bp, Homo sapiens
tgacttgagtgtcttcctgatggtactgcctgagccattctgtgtatcactcagaacattactctaaggcttgtatatcttgtatgtttttccctctagckggctgtataggattctaccttcagtttctcacaagccctttgaatccattgacgaaggccatgtcactcacaactgggatgaagttgatcctgatcctaa

SEQ ID NO: 287999 - DNA, 201 bp, Homo sapiens
gtgctaagcattttagctatgaattaactcataatcctcaaaataaatctggggtatagagagaggttcttgtttcaattagaaaagtaatgcttggagaractatgatttgcccaaggtcactgccaatagatgacttgattagaagcagggtatgtttgaatgcgaagtccaggctcaaaaaggggccttagtggctcc

SEQ ID NO: 288000 - DNA, 201 bp, Homo sapiens
agtgtcttcctgatggtactgcctgagccattctgtgtatcactcagaacattactctaaggcttgtatatcttgtatgtttttccctctagctggctgtrtaggattctaccttcagtttctcacaagccctttgaatccattgacgaaggccatgtcactcacaactgggatgaagttgatcctgatcctaaccaggta

SEQ ID NO: 288001 - DNA, 201 bp, Homo sapiens
aagcaaatgcagccttaagcctttcctgttcatgaaatggttatcacaccaaaagaattgctcaccactgccctgtctttttttgtcagttccgcagaaarggaaccttctcatttacaccgagtttggcaagatgcttgtacagcccaatgagatctgcgtcattcaggttggtgatgtgtccccttctcttccctgcct

SEQ ID NO: 288002 - DNA, 201 bp, Homo sapiens
ctcaccactgccctgtctttttttgtcagttccgcagaaagggaaccttctcatttacaccgagtttggcaagatgcttgtacagcccaatgagatctgcktcattcaggttggtgatgtgtccccttctcttccctgcctctcactaatttgggagcagtcagatgtttcagctgctgctatttccaactctaaaatttc

SEQ ID NO: 288003 - DNA, 201 bp, Homo sapiens
gggatgggctatggctctgggcagcttctttataactacagctgtgatttcagagggcacaccagtgtctgctttccattccagagaggaatgcggttcakcatagatgtctttgaggagaccaggggctacatcttggaggtctatggtgtccactttgagttacctgaccttggaccaattggtaaatcttcattacaa

SEQ ID NO: 288004 - DNA, 201 bp, Homo sapiens
cagagaggaatgcggttcagcatagatgtctttgaggagaccaggggctacatcttggaggtctatggtgtccactttgagttacctgaccttggaccaaytggtaaatcttcattacaagcctctaagcctcgcttgagatgtaggactcagataattgcatgaaagttaaacatccttctcccttcgctgtctcactca

SEQ ID NO: 288005 - DNA, 201 bp, Homo sapiens
aggatgtctccccgttcaatgttgtggcctggcacgggaattatacaccctacaagtacaacctgaagaatttcatggttatcaactcagtggcctttgamcatgcagtaagtctgaaccctgtaggggccttgggatgaggcaacgcttgggtgggaggggtccacagtagacccctgacatttacagatctaacatttc

SEQ ID NO: 288006 - DNA, 201 bp, Homo sapiens
ttatttctatttctactttgctctgagcatcccttctgctgcacatctcagctctagtcaacttgatctgaggttgagaagcaggcaccgttggttctcakacccacggggtaataagttgcatgtaatgtgggctcagcagggtgaaaaagcagttcagaatccttttagctggtgttaattcattttgcctcaagcaca

SEQ ID NO: 288007 - DNA, 201 bp, Homo sapiens
ttacctcccaccgggtccttctcacaacatgtggggattatggaagctacaattcaggatgagatttgggtggggacacaaccaaaccatatcagatcccwaccccaaacctcagtatcacacaatatacccatgtaacaaaactgcatatgtatccctctatctaaattaaaagttgaataaaaataaataaaaaaatta

SEQ ID NO: 288008 - DNA, 201 bp, Homo sapiens
ccgggtccttctcacaacatgtggggattatggaagctacaattcaggatgagatttgggtggggacacaaccaaaccatatcagatccctaccccaaacytcagtatcacacaatatacccatgtaacaaaactgcatatgtatccctctatctaaattaaaagttgaataaaaataaataaaaaaattagaatgtcact

SEQ ID NO: 288009 - DNA, 201 bp, Homo sapiens
gagccaagattgcaccattggactacagcctgggcaacaagagcaaaactccatctcaaaataataatgacaataataataatagctgcattggaagtttytgcttgttttctagcagaccctcagcccatatttgttccccttctccccgcttcccatgtctcccattctaacctatggttagaatggctttgcttttgt

SEQ ID NO: 288010 - DNA, 201 bp, Homo sapiens
gatgagatttgggtggggacacaaccaaaccatatcagatccctaccccaaacctcagtatcacacaatatacccatgtaacaaaactgcatatgtatccytctatctaaattaaaagttgaataaaaataaataaaaaaattagaatgtcacttgcaaacaccttcatgtatgcatgaaatgtgtgtcattgtccagtca

SEQ ID NO: 288011 - DNA, 201 bp, Homo sapiens
gcaccattggactacagcctgggcaacaagagcaaaactccatctcaaaataataatgacaataataataatagctgcattggaagtttctgcttgttttytagcagaccctcagcccatatttgttccccttctccccgcttcccatgtctcccattctaacctatggttagaatggctttgcttttgtccttgaacttg

SEQ ID NO: 288012 - DNA, 201 bp, Homo sapiens
gctggcatctgtttctaatgaagcctcaggaaatacaatcatggtggcaggcaagagggaagctggcatatcacatgatgagagcaagcaagagaaaggargaagtcccagcttcttttgaacagccaaaccccatgtgaactcatagagtgagaactcactcataaccgtcatgatggcaccaagccatttatgagggat

SEQ ID NO: 288013 - DNA, 201 bp, Homo sapiens
aaagagtttctgcagaacatttgttgcctagtacaagacctaacaaatctactatttttattttattaatattattattcttagcacctaataattattgkccaatttctatggctctgttacaagttttttaaaaaactaactcatgaagtgtttataatacttgtaagagacaggtagtattattgtcccccccgcttt

SEQ ID NO: 288014 - DNA, 201 bp, Homo sapiens
atggacgtaggccactccatggtcaaatgccagcatcccccttttcagatggcaccatcatggtagagaaaagaaaacaatcagttaccatggcaaagacrgcagctattttgtgaatagcatcataagtcgtttctaaaaactgtgaagcctactaaagactctaacttttctcctcctggaagttagtgacctagagga

SEQ ID NO: 288015 - DNA, 201 bp, Homo sapiens
aactgtgaagcctactaaagactctaacttttctcctcctggaagttagtgacctagaggacctgttgtcaaggagagaaaattgccctggcttatagtcygtacttcgcatgttactccttaataattcaccatttcactcttgttcttgtattgaggttactctgtgtgcctgtagtggttcttacattttaccatgtg

SEQ ID NO: 288016 - DNA, 201 bp, Homo sapiens
tgccttgacttcccaaagtgctgggattacaggcatgagccaccatggctggccagaatctacatttttcactggcaagtcaggggattctgatgaaggargtttacagactgcttgttgagaaatactggcctagggtgtgtccccatccctaggtggaggaataatagagtcatctgatttagacaagtttgctactgt

SEQ ID NO: 288017 - DNA, 201 bp, Homo sapiens
gatgtctccccgttcaatgttgtggcctggcacgggaattatacaccctacaagtacaacctgaagaatttcatggttatcaactcagtggcctttgaccrtgcagtaagtctgaaccctgtaggggccttgggatgaggcaacgcttgggtgggaggggtccacagtagacccctgacatttacagatctaacatttcca

SEQ ID NO: 288018 - DNA, 201 bp, Homo sapiens
ttcatgtatgcatgaaatgtgtgtcattgtccagtcacttcccttgcatcatgcgttcagtctctccttgtgtgttcacaggacccatccattttcacagkattgactgctaagtctgtccgccctggagtggccattgctgattttgtcatcttcccacctcgatggggggttgctgataagaccttcaggcctccttat

SEQ ID NO: 288019 - DNA, 201 bp, Homo sapiens
ttttcacagtattgactgctaagtctgtccgccctggagtggccattgctgattttgtcatcttcccacctcgatggggggttgctgataagaccttcagkcctccttattaccatagtaagtctctcttttaccaagccacatttgcaagccaaagagacaacaaagcagtgagcgctacacattgggaataatgcctgg

SEQ ID NO: 288020 - DNA, 201 bp, Homo sapiens
taaaaataatactgcttcaaccttcccagggaactgcatgagtgagttcatgggactcatccgaggtcactatgaggcaaagcaaggtgggttcctgccasggggagggagtctacacagcacaatgaccccccatggacctgatgctgactgctttgagaaggccagcaaggtcaagctggcacctgagaggattgccga

SEQ ID NO: 288021 - DNA, 201 bp, Homo sapiens
ttcaggctctgggccccaccaccaaatccttgattcactggctctgggtctgtatgtaacaagcttctggagtgattctaatgattagccagagacaggayctactattctacgtaactgatttcctcttgctgctgtaaaaaattaccacaaatttattggcttaaaacaacacaaatgtattatcttgaagttgtggag

SEQ ID NO: 288022 - DNA, 201 bp, Homo sapiens
cctcagcccatatttgttccccttctccccgcttcccatgtctcccattctaacctatggttagaatggctttgcttttgtccttgaacttgttgcctttyttctgttttgaattccctgaacactttctatatggtagccaccaaatgaatttcttctccaatatcttccctgctcctttgagaccttgtcttcacacac

SEQ ID NO: 288023 - DNA, 201 bp, Homo sapiens
ctctctctctcctccctctctccccaccccgccactttccacaacccaaggaaatctcctgcttcccctttgtttaccatgacattttgtctatacctgcmaatctccctcccctaagtgcttagactttttataagacaaaagtcaaaataatttatagacacctttggtttcctgcccagttctctctcttgtcttaat

SEQ ID NO: 288024 - DNA, 201 bp, Homo sapiens
tacatttttcactggcaagtcaggggattctgatgaaggaggtttacagactgcttgttgagaaatactggcctagggtgtgtccccatccctaggtggargaataatagagtcatctgatttagacaagtttgctactgtgctatagggtctcaacccattccttaatttttatttgtagttcagacttgctgacacaaa

SEQ ID NO: 288025 - DNA, 201 bp, Homo sapiens
ttatttaaaacttacattaaagtgtcaatgcccagtaattccactaacacagagttaacaacttctaatgttttgggttctttccagtcctttctttttgwacatatatgtaaataaataattcctagggtcccatgtagccagtaaccaagagtaatttaaaataatatctggccaggcacagtggctcatgcctgtaat

SEQ ID NO: 288026 - DNA, 201 bp, Homo sapiens
ccctaggtggaggaataatagagtcatctgatttagacaagtttgctactgtgctatagggtctcaacccattccttaatttttatttgtagttcagactygctgacacaaataatcttgagagatgcctcctatagttttttaatgactctcaaagtaaatttggccccagggtagatcttataaaggtatgggtaccct

SEQ ID NO: 288027 - DNA, 201 bp, Homo sapiens
gaaaaagacagatgaatgaatgggtaagtagatgtgtggtttgagatgcaaaggcacttaaatttgcccaggtgttatatttctttaattcctgctctatkgtattgctactctaataaagagctttatttcaatagaagcataagattggaagagtggaagcatggtgatttttgttaaattttgtgtgactctagaaag

SEQ ID NO: 288028 - DNA, 201 bp, Homo sapiens
aactttgatacagggctcgtaagcttagatgatagagtacattcgctctctattatgactagcattttaattattattatcttctctgggccctgattttytttagatctagcctgattcctgtcagagagtggaactcgagacctctgataatccacatggccatggagtagagctgtgcctgccaagaatgccaatatg

SEQ ID NO: 288029 - DNA, 201 bp, Homo sapiens
tacagggctcgtaagcttagatgatagagtacattcgctctctattatgactagcattttaattattattatcttctctgggccctgattttctttagatytagcctgattcctgtcagagagtggaactcgagacctctgataatccacatggccatggagtagagctgtgcctgccaagaatgccaatatgaatgtttt

SEQ ID NO: 288030 - DNA, 201 bp, Homo sapiens
caaggtcaagctggcacctgagaggattgccgatggcaccatggtaagtatgttaactgccacattccagcggcctctgaactccccacccttactgagargggtggccgtttttcatttctccaaagtcacagaggaagagtcaaaagagggagagttaatgactgcataagtatgtttacatgtatatatactcacatc

SEQ ID NO: 288031 - DNA, 201 bp, Homo sapiens
tcaagctggcacctgagaggattgccgatggcaccatggtaagtatgttaactgccacattccagcggcctctgaactccccacccttactgagaggggtkgccgtttttcatttctccaaagtcacagaggaagagtcaaaagagggagagttaatgactgcataagtatgtttacatgtatatatactcacatccttgt

SEQ ID NO: 288032 - DNA, 201 bp, Homo sapiens
tggtaagtatgttaactgccacattccagcggcctctgaactccccacccttactgagaggggtggccgtttttcatttctccaaagtcacagaggaagartcaaaagagggagagttaatgactgcataagtatgtttacatgtatatatactcacatccttgtgtatatactagacttctgttgtggtggtgtagaaag

SEQ ID NO: 288033 - DNA, 201 bp, Homo sapiens
tgttaactgccacattccagcggcctctgaactccccacccttactgagaggggtggccgtttttcatttctccaaagtcacagaggaagagtcaaaagarggagagttaatgactgcataagtatgtttacatgtatatatactcacatccttgtgtatatactagacttctgttgtggtggtgtagaaagatcgttgga

SEQ ID NO: 288034 - DNA, 201 bp, Homo sapiens
aactgccacattccagcggcctctgaactccccacccttactgagaggggtggccgtttttcatttctccaaagtcacagaggaagagtcaaaagagggaragttaatgactgcataagtatgtttacatgtatatatactcacatccttgtgtatatactagacttctgttgtggtggtgtagaaagatcgttggacttg

SEQ ID NO: 288035 - DNA, 201 bp, Homo sapiens
aagtataaatcctggctccttttccagctgtgtggccttgggtaaatcatctgccctcttggatcctctagttcttcattcgtaaaacaaagataattatrgtacctatttcatagctgtggtgaggattaaaagaaaggatgtgtgtaaagcacattagcttagcttagcacattggcacaggcacatggttagtgctca

SEQ ID NO: 288036 - DNA, 201 bp, Homo sapiens
tttcttcttacctagactatgttaatgaccttctacctgattcctatgtcttcccctccctatcccacaccgtgctgccagaatcagcgtgctaaattatyatctcaaaaatctttaaatctaaccatcacccgccccctccactgcccagccaatccagtgcaggcttccagataagagatcaagagctctgattcacta

SEQ ID NO: 288037 - DNA, 201 bp, Homo sapiens
aggattttcctagctcactacactgaatcaggtgccaagtccatagaatggtgatgcctgagtatacataagagttaccaggggacttgttgaaaatgtarattcctcagtcttgctccccagagatcccagttcagtaggtctgaggtggtactcaggagtctccccagatgactcccatgcaggttggtgctggactgc

SEQ ID NO: 288038 - DNA, 201 bp, Homo sapiens
ctgaatcaggtgccaagtccatagaatggtgatgcctgagtatacataagagttaccaggggacttgttgaaaatgtagattcctcagtcttgctccccaragatcccagttcagtaggtctgaggtggtactcaggagtctccccagatgactcccatgcaggttggtgctggactgcactttatgaaattctgctgtag

SEQ ID NO: 288039 - DNA, 201 bp, Homo sapiens
caggaggtgattggatcttggggacagtttctcatgaatggtttagcaccatccctgttggtactgtcctcatgatagtgagtgagttctcatgagatctrgtcattgaaaagtgtgtggcacctcccacctctctctctctctttctttctctctctctttctctctctctctctctcactcctgttcctgcaatgtaag

SEQ ID NO: 288040 - DNA, 201 bp, Homo sapiens
gagatcccagttcagtaggtctgaggtggtactcaggagtctccccagatgactcccatgcaggttggtgctggactgcactttatgaaattctgctgtaragtgtgctttcaggatctctctggttccttttttccttttcctacctccacctggttcagacctcatttcttcttacctagactatgttaatgaccttct

SEQ ID NO: 288041 - DNA, 201 bp, Homo sapiens
cctaaccaggtaacctggtcctgtgaattgaagcttatcatatacccaaagccttgactagaaatacctaaatagaataccatggtcattggaaaaaataratagttttttaaagtattattttaataaatgctaaagtgtgtctgttttctgctcaaacttgggtggtgtattagtccattctcatgctgctatgaaaaa

SEQ ID NO: 288042 - DNA, 201 bp, Homo sapiens
tgataggtatgtcttcacctgtcatagaccaaatccaatacttcatcagcttcaccaactatccacattagtcatctctgggaatttgaagacctgaggaytgcctgatgattcctccagtgtaacatttagtcccaaaggcagcatcttgcaatatgtgatcatcactgtcatccttgataccctctcaggaagactggg

SEQ ID NO: 288043 - DNA, 201 bp, Homo sapiens
aacatatcataaaatgccttctgtctctagtacatgcaaattataaaaaaaagtttcaaaacaatatacccttacagggtatttgctgtctaatttgtcaractttccaggttttgccatcctgaaatccccttccctccacaaatgtcttggatttttctgcctctcttgcccaagtctgtcctagtcacagccagactc

SEQ ID NO: 288044 - DNA, 201 bp, Homo sapiens
aaacaatatacccttacagggtatttgctgtctaatttgtcaaactttccaggttttgccatcctgaaatccccttccctccacaaatgtcttggattttyctgcctctcttgcccaagtctgtcctagtcacagccagactccttgagaaataatctaaacccactttatcaccctcattcactctttaaccctatgcaa

SEQ ID NO: 288045 - DNA, 201 bp, Homo sapiens
ctaacaatgggcttgctatccacattttcctctgcaatacctccatggagaacaggtaagtggctcagttctagggaaggacatgcccatcttctaagggmttttggccagaagtcaaactccaggtttcactcttgtgaagtcacatatgcacatacatagttgtttttgttattggttttctcctcaaggcaatattca

SEQ ID NO: 288046 - DNA, 201 bp, Homo sapiens
tgtactgaatatatattagaataaaataatcatataataagaagaacccaaagatctcttctgtttagcattatttgtttgcttcattttgtctatttgamttattccttatattttccaaggtatgttattcttcttaggcagcatctagagataatgccaaccagccgaggccaaccagtttggcacttaaaattaacc

SEQ ID NO: 288047 - DNA, 201 bp, Homo sapiens
agtattcttcaaggtcctgaactagaatcttgatatagtttgactgtgtccccacccaaatctcatcttgaattcccacgtgttacgggagggacctggtrggaggtagtctatctgcacaagctctttctttgcctgctgccacccaaatgagatgtgactttctcctccttgccttctgctatcattgtgaggctttcc

SEQ ID NO: 288048 - DNA, 201 bp, Homo sapiens
aagcattcaacatgtgaccaggctgcttctaaccgcctatgcccacatgcatgagcaaataaatgacctgaagttggaacttaaatttaaaaataagtttrgatttaaacctatatttaaattttaacttgtatttaaagggaagtagagtgtaaaagttaggaaattttgcagcctggccatgtggtagaaaagaaaagc

SEQ ID NO: 288049 - DNA, 201 bp, Homo sapiens
acttgtatttaaagggaagtagagtgtaaaagttaggaaattttgcagcctggccatgtggtagaaaagaaaagcccattttcaggagaagaattcaaacwggctgcagaaatttgcataaataaaaaggagccaaatgctgatagccaagacaatgtgggaaaggcctcaaaggcatttcacagacctttggggcagttc

SEQ ID NO: 288050 - DNA, 201 bp, Homo sapiens
catgccaggaaagggacctgattataaatagcatgaaaagcagcatcagtcaaaactcactgatgtgcctgggcaaaatgttaaaagaaacaaatagcttytaaaaatggaagcaatggttttatttttataatctaaagtgctaaggaacaaaagcagtttatattcacatagttttaaacacacaaacatgtgtgtgca

SEQ ID NO: 288051 - DNA, 201 bp, Homo sapiens
ttaggagttcaacatatgaatttggaggaggaacacaatctagcccataattctctccttctgcttctttttccctctaaatatctactaaggattcccamtcttttggattctctttgccttagagatgaagggatagttgttgataagaaataatcaagtgggacaaactaacaggaggaactccttgagcaatagagg

SEQ ID NO: 288052 - DNA, 201 bp, Homo sapiens
ttccctgctgtgtttcagacatgcatggggcctatagaccctttgttctggccaatttctcccttttgaaatggaagtatttacctaatgtctataccccyattgtatcttggaagtaactaacttattttatattttacaggctcataggtggaagggacttaacttgtctcagatgagactttggacatttgagttaat

SEQ ID NO: 288053 - DNA, 201 bp, Homo sapiens
ggaaagggacctgattataaatagcatgaaaagcagcatcagtcaaaactcactgatgtgcctgggcaaaatgttaaaagaaacaaatagcttctaaaaawggaagcaatggttttatttttataatctaaagtgctaaggaacaaaagcagtttatattcacatagttttaaacacacaaacatgtgtgtgcacgtgcac

SEQ ID NO: 288054 - DNA, 201 bp, Homo sapiens
aaattctgctgtagagtgtgctttcaggatctctctggttccttttttccttttcctacctccacctggttcagacctcatttcttcttacctagactatkttaatgaccttctacctgattcctatgtcttcccctccctatcccacaccgtgctgccagaatcagcgtgctaaattatcatctcaaaaatctttaaatc

SEQ ID NO: 288055 - DNA, 201 bp, Homo sapiens
gaaaagcagcatcagtcaaaactcactgatgtgcctgggcaaaatgttaaaagaaacaaatagcttctaaaaatggaagcaatggttttatttttataatytaaagtgctaaggaacaaaagcagtttatattcacatagttttaaacacacaaacatgtgtgtgcacgtgcacaaataacacacactaacagagtccctt

SEQ ID NO: 288056 - DNA, 201 bp, Homo sapiens
gttaatgaccttctacctgattcctatgtcttcccctccctatcccacaccgtgctgccagaatcagcgtgctaaattatcatctcaaaaatctttaaatytaaccatcacccgccccctccactgcccagccaatccagtgcaggcttccagataagagatcaagagctctgattcactatcacagcctttcagactctc

SEQ ID NO: 288057 - DNA, 201 bp, Homo sapiens
tttgtattcttcctgtgtcaggctgtaaacattgaggctgaacacaattgcagctggctgcggtgcttgattttattttatttttgcattcttcgaggtaragtttatggtccacagggagtaattttatgctaaatcacatgcaaatttgctttacttttgaaaataaatgccttcaatgctacctggtttaaaatctat

SEQ ID NO: 288058 - DNA, 201 bp, Homo sapiens
tatggtccacagggagtaattttatgctaaatcacatgcaaatttgctttacttttgaaaataaatgccttcaatgctacctggtttaaaatctatagcaragacctgcctgcttcatgcttgcaaactacctaaacagtgagcattatctgtccgtctgtccactgcagtttgctttcagtcccaaccctggagccagag

SEQ ID NO: 288059 - DNA, 201 bp, Homo sapiens
tggtccacagggagtaattttatgctaaatcacatgcaaatttgctttacttttgaaaataaatgccttcaatgctacctggtttaaaatctatagcagaracctgcctgcttcatgcttgcaaactacctaaacagtgagcattatctgtccgtctgtccactgcagtttgctttcagtcccaaccctggagccagagtt

SEQ ID NO: 288060 - DNA, 201 bp, Homo sapiens
agactttgtgagtgtaagtcagtcccatccacacccttcctactgctctcctctcttctgtggtgagtgagccaaccatttgcagcctgaatgccaagcaraagcagccctatcaggaggcagcagagacaaaaccacctgcgtatgctttgggggctggcggagggatgtcttacttacagaaaccatatggcccctgac

SEQ ID NO: 288061 - DNA, 201 bp, Homo sapiens
agagttggtggagctcctttgcaaaaggagggtgttcagagtcccatttgcttgctttggctctatttcccctttcaagggcctctatggagtttctgtaraacccctacatctcaaagagatgcagtctggcagtctcagttaagctattacctctgaagtctcctggaggtgcagtcctggaggctattctagagttgc

SEQ ID NO: 288062 - DNA, 201 bp, Homo sapiens
atttgcttgctttggctctatttcccctttcaagggcctctatggagtttctgtagaacccctacatctcaaagagatgcagtctggcagtctcagttaarctattacctctgaagtctcctggaggtgcagtcctggaggctattctagagttgccactcaataacctttggtcccccaatttggctttgggtagtcaat

SEQ ID NO: 288063 - DNA, 201 bp, Homo sapiens
atattctttctgttgtggacaaaaacctcctgacagtgcaacatccaccattcagacacttctgagatatgacttttaaaagtgctacagccattcctgcmatttccttcacctccctctcctccccactccctttttcccttttcccagcccatctcttggtcagagtcctgaaaagacaggctcaaatcccagttctgc

SEQ ID NO: 288064 - DNA, 201 bp, Homo sapiens
tctcaccagcttacaaatggtaggaccagagccacaactcagggcttgagcctgctctcctcaccactctagcacacaaatctttgatttgttattggaaratttcacctacccataccttctgttgacatctaatcaaatgtgtttattatctatctcacctcttttttctcatccccatcgtcacttcctccaggcatt

SEQ ID NO: 288065 - DNA, 201 bp, Homo sapiens
aagagaactgggcatgatatgtggcaagtgctatgttacaatgtcagtatcaacagtacttttctctcaatagatatatgcgtgggaagaggaagagatakagaaagatttctatacatgtcaaaaatcaggggataattccttcactatttaatcatctctctctctctctctgtaagcccaaatagggtaagataagca

SEQ ID NO: 288066 - DNA, 201 bp, Homo sapiens
tctggaaagactctaagaggcattccacctggaacattctagaaaacaaattcctttctttagtaaactccagggccttctgtttataataggtccctctytatatataccagttcccaggtgtcagggctcaacagaacacaacagtgcactgaatggccaatttagctattttatagcatcaggaatgaaggcccttag

SEQ ID NO: 288067 - DNA, 201 bp, Homo sapiens
actccatctcaaaataataatgacaataataataatagctgcattggaagtttctgcttgttttctagcagaccctcagcccatatttgttccccttctcyccgcttcccatgtctcccattctaacctatggttagaatggctttgcttttgtccttgaacttgttgcctttcttctgttttgaattccctgaacacttt

SEQ ID NO: 288068 - DNA, 201 bp, Homo sapiens
catccacacccttcctactgctctcctctcttctgtggtgagtgagccaaccatttgcagcctgaatgccaagcagaagcagccctatcaggaggcagcasagacaaaaccacctgcgtatgctttgggggctggcggagggatgtcttacttacagaaaccatatggcccctgacaccagagggtattcatgaactattt

SEQ ID NO: 288069 - DNA, 201 bp, Homo sapiens
tccacacccttcctactgctctcctctcttctgtggtgagtgagccaaccatttgcagcctgaatgccaagcagaagcagccctatcaggaggcagcagasacaaaaccacctgcgtatgctttgggggctggcggagggatgtcttacttacagaaaccatatggcccctgacaccagagggtattcatgaactatttat

SEQ ID NO: 288070 - DNA, 201 bp, Homo sapiens
gttgtgtggacaacagtggagccatacttcttttacatagttttattcggggtgggaggttaggttttaaacctaacctttaaagaaaatatgtgatgtgrctctactttgagtgtgatgtgtaatatgctcagtaatatacctttattatatattattatttccttgactatcattgctacattttatttaacatgaata

SEQ ID NO: 288071 - DNA, 201 bp, Homo sapiens
gtgcctttcagttgggaagaacaaaatgccctttctcttcagagctgaggagctcagtctctcatttatgcacaaaaatgacagtcacacgaatgcgcagscaagccaactgagctaaatttggggagaaaaaacaatggagtagaccatttagaatacacctccaaactggaaaccaaacagggtacccaaaagggagtc

SEQ ID NO: 288072 - DNA, 201 bp, Homo sapiens
tttggaaatgatggattgattatgtatatacatattgttaaaagaaaaacctttgacaaatctaatttaacagagtttaattgggcaaaggacaattcacmaattattctacctgtagccaggataggttctgagagattccagtgcagacactagtagaagacgatttatggacagaaaaaggaaagtgatgtacagaaa

SEQ ID NO: 288073 - DNA, 201 bp, Homo sapiens
taaaatgggatgataacatttgcctcacagtgctattgtgaagattatgagagaataggtgtgaacctgcttcatacaatgcctggcatgtgataggcaaraaccatgattctgatacagctatttatatttacctgaatttacattattcaggtaactttatttcttcattttatattattttttactctgaaggcttct

SEQ ID NO: 288074 - DNA, 201 bp, Homo sapiens
cttgctgttccttctgcctggaacattctttcctttctccaaaccctcacctagataacaccttcagatatcaggtcaaatgtgtcccttctttgaagaascctttgctgattcttcaaactaaccaagtcgctattctttcattccctcaaacttgattttcacagggtcattacagtctgcaaagatattgttctgtaa

SEQ ID NO: 288075 - DNA, 201 bp, Homo sapiens
caagttcataaatctccctgaagtagatgcttgggctagaatggcgtcaattcaacatggcaactctagttagtacaatgctgattggaagctctgtttgrtagttataggtcccaggagtactggaataactgcacagagcaaggagtatctgggggagaggagaaaggagctctaaggaagtggggctcaaagagacca

SEQ ID NO: 288076 - DNA, 201 bp, Homo sapiens
ctttttgaccatgtcacaaaattgtgcatatacaagttccttgcctggtgaccaaaaaagcagagtcattgttttattcacattcttctagataggaaaayagctaatctaagttgtcagaatttatctttttccccaagagactcaataaagctctttgcatttggaatggaaaagcaaatgcagccttaagcctttcct

SEQ ID NO: 288077 - DNA, 201 bp, Homo sapiens
tgccgagccataggataaattgttggaaacatcttgaagttctcatctttattaagtgctccaaactctttgtagactcacttaaatataccctaaacttrcaaattgagttaaaatacaaaatgatatccccatctcctttcttgtgtgaattgtagatatctggaggcgcagagctctctccttttggctctccatctg

SEQ ID NO: 288078 - DNA, 201 bp, Homo sapiens
aagacaacggaggccgggcacagtggatcacgcctgtaatcccagtactttgagaggccgaggtgggcggatcacgaggtcaggagctcgagaccagcctrgccaacatagtgaaaccccatctctactaaaaaatacaaaaaattagccgggcgtggtggtgggcgcctgtaatcccagctactcaggaggctgaaaaag

SEQ ID NO: 288079 - DNA, 201 bp, Homo sapiens
gcatcaaattgataaaataccaagtaatgaactgatactctgtaagttcttctgatatagccactaagacaacccagatttaggccatggctggagactarggtaaaccacaaactaccaaacatgagtcagtaaattcaggctccttagaggctgcctggattccaaacgtcccaccggtcccaaagggaagaccctagt

SEQ ID NO: 288080 - DNA, 201 bp, Homo sapiens
tatatattgcctttaagcacattgcaaaatgcagcccctattctaacccccaaccccttagactcagtcccccacacaaagggacacagacgaggcattcmgctcctccctttccccttcagtgggacaaggcccttgcacagggcacagcttgcacaaccaacctggggaccctgacttcacctcattcctgagtctcat

SEQ ID NO: 288081 - DNA, 201 bp, Homo sapiens
ccagctactcaggaggctgaaaaaggagaattgcttgaacccgggaggcggaggttgcagtgaaccgagatcatgccattgcactccagcccggacaaccrtgtgagactccatctcaaaaaaaaaaaaaaaaaaagaaaaagaagaaaaagacaatggagaaatcctttagaatggacctgtgaactagaattaggaacc

SEQ ID NO: 288082 - DNA, 201 bp, Homo sapiens
caaacatgagtcagtaaattcaggctccttagaggctgcctggattccaaacgtcccaccggtcccaaagggaagaccctagtagaaatgtgcctcatgamcctcagggaccagtggaagggctgcctcttgggcaccgttcacattaacctttccctcttctgtgggtctctcccagggcctgcataccttgtgtggagc

SEQ ID NO: 288083 - DNA, 201 bp, Homo sapiens
gctacccgactttggcttcagctaacagctctgtgtaagcttaaaattcttaagtagaggagcttatatactggctttgcaaaacaaagtatgcaaatggmattcctgccttattatacactacctctggaactggaccatttgtgtccaaagcccaactctacatttcctggctgagcgaccttgtgagccatgaatcag

SEQ ID NO: 288084 - DNA, 201 bp, Homo sapiens
gctaaattatcatctcaaaaatctttaaatctaaccatcacccgccccctccactgcccagccaatccagtgcaggcttccagataagagatcaagagctytgattcactatcacagcctttcagactctccactcacttccatgtcccctacctatcagtcacactagaaccatcgtcattttatctacctgggatttcc

SEQ ID NO: 288085 - DNA, 201 bp, Homo sapiens
gtgaaccaaggtctccacagcccccattcttctggcaagctggaggaagtgaaaatgttaggaggggttgttctcaaactgtctcttggattgaaagaaawggctgggaaaattggcccttggtttactctttggtcacatctcccaattcttcccttccttgtcaacagctttttagagcaaacagggacaggccagtgt

SEQ ID NO: 288086 - DNA, 201 bp, Homo sapiens
tcagtaaattcaggctccttagaggctgcctggattccaaacgtcccaccggtcccaaagggaagaccctagtagaaatgtgcctcatgaccctcagggamcagtggaagggctgcctcttgggcaccgttcacattaacctttccctcttctgtgggtctctcccagggcctgcataccttgtgtggagctggagacata

SEQ ID NO: 288087 - DNA, 201 bp, Homo sapiens
tgtcccctacctatcagtcacactagaaccatcgtcattttatctacctgggatttcctgttcttccatcacaaatactcacccatctaaatctcactcaygatttatgattcattttaaataatactttcttcattatgccctttcaatatttctcagagtatttaaggttctatgtctctatcatcttcatctgatctg

SEQ ID NO: 288088 - DNA, 201 bp, Homo sapiens
tggctgcttagtcaattataaaagcatttggcacttggttatacttcacatgtaagcaagaagggcaggcatgtatcatgtccagtgtttgattttgtaasggttgccactgccacatctctctattctgtccttggtttgccctctcagtactctcacaggacagactatgagtagctttaaaggctatgttgttgttgt

SEQ ID NO: 288089 - DNA, 201 bp, Homo sapiens
tcaggctccttagaggctgcctggattccaaacgtcccaccggtcccaaagggaagaccctagtagaaatgtgcctcatgaccctcagggaccagtggaarggctgcctcttgggcaccgttcacattaacctttccctcttctgtgggtctctcccagggcctgcataccttgtgtggagctggagacataaagtctaac

SEQ ID NO: 288090 - DNA, 201 bp, Homo sapiens
atcgtcattttatctacctgggatttcctgttcttccatcacaaatactcacccatctaaatctcactcatgatttatgattcattttaaataatactttyttcattatgccctttcaatatttctcagagtatttaaggttctatgtctctatcatcttcatctgatctgcagtatccagtacatgccttcttccaaata

SEQ ID NO: 288091 - DNA, 201 bp, Homo sapiens
ttccattcacatccaggcagagcccgggaggtaatcagtcaggaaagatatagaaatttcttctacattgagtagaagtaaggataccttccaatttcaasatttaggactctatgaatagggtatcaatggaactagaaaaaataaaaacaaatccaaaagacattctgaagaacagaaaaacaagaggataacagattc

SEQ ID NO: 288092 - DNA, 201 bp, Homo sapiens
ataccttgtgtggagctggagacataaagtctaacaatgggcttgctatccacattttcctctgcaatacctccatggagaacaggtaagtggctcagttytagggaaggacatgcccatcttctaagggcttttggccagaagtcaaactccaggtttcactcttgtgaagtcacatatgcacatacatagttgtttttg

SEQ ID NO: 288093 - DNA, 201 bp, Homo sapiens
tgaacagcccacttctaaagttactcataactttcagtgcttgagtttaaaccaaagaaattctagagcatgaacttggtcatatttttcactcagttcgsaggccacaaatggtctctggtctacagtgcaggctcccaagaccctacattcttaataaagtggtggttctgagaccccggggggaagttcattttgcag

SEQ ID NO: 288094 - DNA, 201 bp, Homo sapiens
tggtgggaaggtgggatgcttttcggatgggagtaatattgtttattgcatcctttgtttcagaataatcctcaggtctgcccctacaatctctatgctgmgcagctctcaggatcggctttcacttgtccacggagcaccaataagagaaggtacaaggattagatgaattctgacctgcagactgtgggtactatgaca

SEQ ID NO: 288095 - DNA, 201 bp, Homo sapiens
ccctcttctaaggccaccagttacaaagaatggggaaggttaatgagtaactccaccagtgcctgccagaaagctcagctgtactccagccttccttcctytcttgcagagagaaacaatgcggcagttgaacaaagcgaaggcactgtaatgcccagtggcttcagtcacaggctggtctaaaattccatttcacagaat

SEQ ID NO: 288096 - DNA, 201 bp, Homo sapiens
ctcttctaaggccaccagttacaaagaatggggaaggttaatgagtaactccaccagtgcctgccagaaagctcagctgtactccagccttccttcctctyttgcagagagaaacaatgcggcagttgaacaaagcgaaggcactgtaatgcccagtggcttcagtcacaggctggtctaaaattccatttcacagaattg

SEQ ID NO: 288097 - DNA, 201 bp, Homo sapiens
aatccaatacttcatcagcttcaccaactatccacattagtcatctctgggaatttgaagacctgaggattgcctgatgattcctccagtgtaacatttartcccaaaggcagcatcttgcaatatgtgatcatcactgtcatccttgataccctctcaggaagactgggggctgctccccctaaagccttcattttcttt

SEQ ID NO: 288098 - DNA, 201 bp, Homo sapiens
ttgagtgtatttaaattcagcctgaggacataaattcaattaattaatacctcacataagaagtatacctaattttatgtgtctgcctctaatttctgaartctcagaatttaatgaactaatctacatccaatttaaccatgattttacagatttcagctagaattcctgaattagcacttctctttaagagtcctttaa

SEQ ID NO: 288099 - DNA, 201 bp, Homo sapiens
aattcaattaattaatacctcacataagaagtatacctaattttatgtgtctgcctctaatttctgaagtctcagaatttaatgaactaatctacatccartttaaccatgattttacagatttcagctagaattcctgaattagcacttctctttaagagtcctttaaaatttatttttcttattatttcattctaacct

SEQ ID NO: 288100 - DNA, 201 bp, Homo sapiens
gatttgcccaaggtcactgccaatagatgacttgattagaagcagggtatgtttgaatgcgaagtccaggctcaaaaaggggccttagtggctcctactaractggtatcttaaggcaaggaaaacagaatatgtccctaatatctaaaaccatgcctagtgcccaggccaggcttgaatcaatgctcaacgcatgcatgt

SEQ ID NO: 288101 - DNA, 201 bp, Homo sapiens
ctccagagatctagcacctctgagaggcctcaaaatgccaagtgatcagctcttatatgtatttccgggacaaaactatttttgggggggttccctgtagsgccactgcacatcacaggggatgaatccctcagacactgcaactcagcccctagtcacccagggtgcctttcagttgggaagaacaaaatgccctttctc

SEQ ID NO: 288102 - DNA, 201 bp, Homo sapiens
tgcctttcagttgggaagaacaaaatgccctttctcttcagagctgaggagctcagtctctcatttatgcacaaaaatgacagtcacacgaatgcgcaggmaagccaactgagctaaatttggggagaaaaaacaatggagtagaccatttagaatacacctccaaactggaaaccaaacagggtacccaaaagggagtca

SEQ ID NO: 288103 - DNA, 201 bp, Homo sapiens
ccctttctcttcagagctgaggagctcagtctctcatttatgcacaaaaatgacagtcacacgaatgcgcaggcaagccaactgagctaaatttggggagraaaaacaatggagtagaccatttagaatacacctccaaactggaaaccaaacagggtacccaaaagggagtcattcttgttgtctttagaaaaagacaac

SEQ ID NO: 288104 - DNA, 201 bp, Homo sapiens
aacaagagcttcctaggagggaaaaatcaagaactgtcaaccaaacagggctcaggaggacttaacagttccatcagaggagaagcccaaagttgaaggcrctttcaataggtccctgctgataccttagctctgagttcaggcaactccttcagggttctgagtcttctctgaggcccaatgtgtccaggtgccaaatta

SEQ ID NO: 288105 - DNA, 201 bp, Homo sapiens
gacacttgtgattacatttaggatacacccaaataattaggatatctccccatcccaagatccttaattatatatgcaaaagtctgtttggctagaaaagrtaatactcacaggtttcaggggttaagccatacatatctttcagagtgagccattagccattattcagcctactgcgataatgtgcaagttccctttaca

SEQ ID NO: 288106 - DNA, 201 bp, Homo sapiens
tgcctttgaatatccttaatttctaaggttccccagggctgttcttgagtcccaggtcacagtgtgtgagtttccattaggaccacccattagtagcaggytacccgactttggcttcagctaacagctctgtgtaagcttaaaattcttaagtagaggagcttatatactggctttgcaaaacaaagtatgcaaatggca

SEQ ID NO: 288107 - DNA, 201 bp, Homo sapiens
tagaaaattggatgcagtggagaatcagaatgttggatggtctctgccatttccccaaagatatcatcctaactgcatgctgctgcttttaacaaatcagkatacaacttagtattttttgtgttgacaaattttcaaatatacaaaatattgagtctgaaggcaaaaagaataatttttcacttccattgcttcctaggt

SEQ ID NO: 288108 - DNA, 201 bp, Homo sapiens
gcctttgaatatccttaatttctaaggttccccagggctgttcttgagtcccaggtcacagtgtgtgagtttccattaggaccacccattagtagcaggcwacccgactttggcttcagctaacagctctgtgtaagcttaaaattcttaagtagaggagcttatatactggctttgcaaaacaaagtatgcaaatggcat

SEQ ID NO: 288109 - DNA, 201 bp, Homo sapiens
acagtgcacattcccctgctcagcccttttggacagcttgctagctctttttacatttcatctccatcaacttacatttcacttcttgcaaagatattggmgctgtctgcaaaccagatgatttcattgcttatatctcttattttccatatataagaatgttaaataggccctgtgccaggacttattcctgagagaaca

SEQ ID NO: 288110 - DNA, 201 bp, Homo sapiens
atttctcttccaaagttatttgcactgatccacttccttgtttttctatcatgaggttttcacatttccaggatcttctgtaatggattacctgagggaaragacaatgtcatgttcacctccagcatctagcataaaatctggcacacagagaggttcaataaatactgtttgaaataattaatataaggggattagaca

SEQ ID NO: 288111 - DNA, 201 bp, Homo sapiens
aatgacaacacaaagattaaaattggattggtggcacagcagccaatccaaactagtgaaattaactgtagggtttccagtaggatccccaaaaatccagrgttaaagagaatccctcatattccccttgaacaccatggatgtgagcattatgataaaataacaaggtgctttcacatgtatgcacaaagatgttcatac

SEQ ID NO: 288112 - DNA, 201 bp, Homo sapiens
ttctcttccaaagttatttgcactgatccacttccttgtttttctatcatgaggttttcacatttccaggatcttctgtaatggattacctgagggaagaracaatgtcatgttcacctccagcatctagcataaaatctggcacacagagaggttcaataaatactgtttgaaataattaatataaggggattagacaag

SEQ ID NO: 288113 - DNA, 201 bp, Homo sapiens
ctggatagagctaaaagattacgcaggcaaccattgatctgatacttaaatcccttctactgggaaatccagaaagatgactctttctggattttctttcygaaactaagattctaggtagtattgtcttcctaacaatcttcctgggtataaatactctgctctgttactatagaaggaagcagcaggtaatgtttagtg

SEQ ID NO: 288114 - DNA, 201 bp, Homo sapiens
tgctataaagataacctgaaaatgtggaagtgactttggaactggataactggcagaggttggaagagtgtggagggctcagaagacaggaagatgagggwtagtttcaaacttcctagagacttgttaaattgttgtgacaaaaatgccaatagtgacatgaacaataaagtccaggctgaggagatctcaaatgaaaat

SEQ ID NO: 288115 - DNA, 201 bp, Homo sapiens
aggttaatgagtaactccaccagtgcctgccagaaagctcagctgtactccagccttccttcctctcttgcagagagaaacaatgcggcagttgaacaaascgaaggcactgtaatgcccagtggcttcagtcacaggctggtctaaaattccatttcacagaattgaagataatttggggttattaccaattctcagcag

SEQ ID NO: 288116 - DNA, 201 bp, Homo sapiens
ggttaatgagtaactccaccagtgcctgccagaaagctcagctgtactccagccttccttcctctcttgcagagagaaacaatgcggcagttgaacaaagsgaaggcactgtaatgcccagtggcttcagtcacaggctggtctaaaattccatttcacagaattgaagataatttggggttattaccaattctcagcagc

SEQ ID NO: 288117 - DNA, 201 bp, Homo sapiens
caaatttgagttgatggagggacagccaaactgagatacccaggcggtggttggatttatggatctggatttcaggggagtgggcagggctaggggaataraactgagggtcatgatgtcagtggtaggagttgaagtcttggaagaaagagtagatagaaactttgttttctgatgaacattctatgaggaagttcagca

SEQ ID NO: 288118 - DNA, 201 bp, Homo sapiens
gaactaataaatgtccatgaaatcttcacaatccacgaacttctgccatggcttcagctgatccctccgtttggagtcccagacttcccgcaacaactgaraactctggagggcctacccttcacccacttccacccttcttatatctcttaaggagctgtgttcagatggttacatttcgcttgctgagcaagactgcat

SEQ ID NO: 288119 - DNA, 201 bp, Homo sapiens
ttaaagtattattttaataaatgctaaagtgtgtctgttttctgctcaaacttgggtggtgtattagtccattctcatgctgctatgaaaaaataaccaaractgggtaatttataaaggacatatttttaattgactcacagttctgcatggctgaggaggcctcaagaaacttacaatcatggcggaaagggaagcaaa

SEQ ID NO: 288120 - DNA, 201 bp, Homo sapiens
gttcagatggttacatttcgcttgctgagcaagactgcattttcattatcctgggctaaaatcaattggtatttaagttagagcaaaaagggttctaaccytatttacagcagcacacatacacttacattagaattggctttaagggaaaaattcaatcaatcgacaaatttccactgattaccttctatgagccaagac

SEQ ID NO: 288121 - DNA, 201 bp, Homo sapiens
aattaggttatggttcactatgtatggagaaacctttaggcagaacttaaaatatgtaaggaggcaactttaggacaaacttgattaacagtctgcgtgtktgtgtgtgtgtgtgtgtgtgtgtgtgtgtgtgtgtgtgcacatgcgcacataagcttgtatttttctagcctaatggcatatagatggacacaggagtag

SEQ ID NO: 288122 - DNA, 201 bp, Homo sapiens
aagggttctaaccctatttacagcagcacacatacacttacattagaattggctttaagggaaaaattcaatcaatcgacaaatttccactgattaccttytatgagccaagactgccatagtctcagccttcatgcagcttataggctagcaaaaaagccagacagtgcacaagaactcacaagtgtgttgagtgttgca

SEQ ID NO: 288123 - DNA, 201 bp, Homo sapiens
agccttacctgaggtcaggagatcgagaacagcttgaccaacatggagaaacaccatctctactaaaaatacaaaattagccaggtgtggtggtgcatgcytgaattcccaactactcgggaggctgaggcaggaaaattgcttgaacccaggaggcggaggttgtggtgagccaagattgcaccattggactacagcctg

SEQ ID NO: 288124 - DNA, 201 bp, Homo sapiens
gctgaggcaggaaaattgcttgaacccaggaggcggaggttgtggtgagccaagattgcaccattggactacagcctgggcaacaagagcaaaactccatytcaaaataataatgacaataataataatagctgcattggaagtttctgcttgttttctagcagaccctcagcccatatttgttccccttctccccgcttc

SEQ ID NO: 288125 - DNA, 201 bp, Homo sapiens
ctaggggaatagaactgagggtcatgatgtcagtggtaggagttgaagtcttggaagaaagagtagatagaaactttgttttctgatgaacattctatgargaagttcagcagaggttggaaacatctttaccatttataaataaattttatgtaaaatcctatcctgctgtcatgtttaagcaacttattatgcacagca

SEQ ID NO: 288126 - DNA, 201 bp, Homo sapiens
aggtgggaagactgctcgagcctgggaggtcagggctgtggtgagccctgttcatgccactgcactccagcctgggcaacagtgtgaaaccctatctcagaaaaaaaaaaaaaaaaaaaggaagaaaaaagaaagaaggaaagaaagaaagaaaagaaagagaaaagaaaagttaatctttacttgtttttcctgaagaca

SEQ ID NO: 288127 - DNA, 201 bp, Homo sapiens
ctgagggtcatgatgtcagtggtaggagttgaagtcttggaagaaagagtagatagaaactttgttttctgatgaacattctatgaggaagttcagcagargttggaaacatctttaccatttataaataaattttatgtaaaatcctatcctgctgtcatgtttaagcaacttattatgcacagcaccaggacatcaatg

SEQ ID NO: 288128 - DNA, 201 bp, Homo sapiens
ggtgggaagactgctcgagcctgggaggtcagggctgtggtgagccctgttcatgccactgcactccagcctgggcaacagtgtgaaaccctatctcagaaaaaaaaaaaaaaaaaaaggaagaaaaaagaaagaaggaaagaaagaaagaaaagaaagagaaaagaaaagttaatctttacttgtttttcctgaagacat

SEQ ID NO: 288129 - DNA, 201 bp, Homo sapiens
tatgaggaagttcagcagaggttggaaacatctttaccatttataaataaattttatgtaaaatcctatcctgctgtcatgtttaagcaacttattatgcmcagcaccaggacatcaatgtaaattgcatgccagtctttgctctcagtttcaaaggcattcttccctgcctgctgtctaatctttacaaagaaaggttaa

SEQ ID NO: 288130 - DNA, 201 bp, Homo sapiens
catgcccggctaatttttgtatttttagtagagacatggtttcaccatgttggccaggctggtctcgaactcctcatctcaggtgatctggccgcctcggsctcccaaagtgctgggattacaggcgtgaaccacctcgcttggcctgaaagacttttagaaatctaaattacagtgacttggatcctcattatctatatt

SEQ ID NO: 288131 - DNA, 201 bp, Homo sapiens
gaccagatctcatgagaactcactgtcatgagaacagcaccaagagggtaatgctaagccattcgtgagaaatccacccccattatgcaaccacccccccyctcttgctcctgctcccatcatatgagatgctcccatcatatctttgccttctgccatgattgaaaactttctgagcctctccagaagcagaagctgcta

SEQ ID NO: 288132 - DNA, 201 bp, Homo sapiens
agtcccaggtcacagtgtgtgagtttccattaggaccacccattagtagcaggctacccgactttggcttcagctaacagctctgtgtaagcttaaaattyttaagtagaggagcttatatactggctttgcaaaacaaagtatgcaaatggcattcctgccttattatacactacctctggaactggaccatttgtgtcc

SEQ ID NO: 288133 - DNA, 201 bp, Homo sapiens
agcttatatactggctttgcaaaacaaagtatgcaaatggcattcctgccttattatacactacctctggaactggaccatttgtgtccaaagcccaactytacatttcctggctgagcgaccttgtgagccatgaatcagggacaagatcacagccctatgacaaggctctggaggcctctctttgggtcaaatctcata

SEQ ID NO: 288134 - DNA, 201 bp, Homo sapiens
ccgcgtgccctccttctaagcacttgcacttgctgttccttctgcctggaacattctttcctttctccaaaccctcacctagataacaccttcagatatcmggtcaaatgtgtcccttctttgaagaagcctttgctgattcttcaaactaaccaagtcgctattctttcattccctcaaacttgattttcacagggtcat

SEQ ID NO: 288135 - DNA, 201 bp, Homo sapiens
ttcaccaattattctacctgtagccaggataggttctgagagattccagtgcagacactagtagaagacgatttatggacagaaaaaggaaagtgatgtasagaaaacagaaatgaggtacagaaatagccagattggttgcagctcggcatatgacttacttgaacacagttttaatagtgtgtcaccatgattggcaca

SEQ ID NO: 288136 - DNA, 201 bp, Homo sapiens
agataatgggtgatatcatatagtttatacattttctacaataaatatatattacttttataatcggggggcaagtcacatcaaaagttgttacaagaaasatatcgggttgcagatggtcatgtgcagtcgcccagagcatccccatccccctactgagttggttggtgggaaggtgggatgcttttcggatgggagtaa

SEQ ID NO: 288137 - DNA, 201 bp, Homo sapiens
cattaaccctgaaggacctaagcagggttagtgtcccaggaatcagactggccagggtgattcagcactggaggaacagtaaacaaaggtcaatttggaaraccaggtacaagaccattaaaaggagggaaagcttgggtttaggagccaaggagatcaggaataatttgggaaacaggtcaagacaggctaagatcaaag

SEQ ID NO: 288138 - DNA, 201 bp, Homo sapiens
cagggacaggaagggagggaggcatttagggtggaaaaatgtgaattggtatttaaaatactatctacctcatagccactttgaaactaagatattttgtytaaataattgacccttaaactcgtatgaagtttaatgcataaagcagacatcctccctggtccccagctggcctatatattgcctttaagcacattgcaa

SEQ ID NO: 288139 - DNA, 201 bp, Homo sapiens
cccagggaactgcatgagtgagttcatgggactcatccgaggtcactatgaggcaaagcaaggtgggttcctgccagggggagggagtctacacagcacartgaccccccatggacctgatgctgactgctttgagaaggccagcaaggtcaagctggcacctgagaggattgccgatggcaccatggtaagtatgttaac

SEQ ID NO: 288140 - DNA, 201 bp, Homo sapiens
ctgaaggacctaagcagggttagtgtcccaggaatcagactggccagggtgattcagcactggaggaacagtaaacaaaggtcaatttggaagaccaggtwcaagaccattaaaaggagggaaagcttgggtttaggagccaaggagatcaggaataatttgggaaacaggtcaagacaggctaagatcaaagggctcagg

SEQ ID NO: 288141 - DNA, 201 bp, Homo sapiens
catttagggtggaaaaatgtgaattggtatttaaaatactatctacctcatagccactttgaaactaagatattttgtctaaataattgacccttaaactygtatgaagtttaatgcataaagcagacatcctccctggtccccagctggcctatatattgcctttaagcacattgcaaaatgcagcccctattctaaccc

SEQ ID NO: 288142 - DNA, 201 bp, Homo sapiens
tgctgttccttctgcctggaacattctttcctttctccaaaccctcacctagataacaccttcagatatcaggtcaaatgtgtcccttctttgaagaagcytttgctgattcttcaaactaaccaagtcgctattctttcattccctcaaacttgattttcacagggtcattacagtctgcaaagatattgttctgtaatt

SEQ ID NO: 288143 - DNA, 201 bp, Homo sapiens
cttgggtttaggagccaaggagatcaggaataatttgggaaacaggtcaagacaggctaagatcaaagggctcagggtgtaggttagtaagagggtctgaraaagtgttggcatcagttcttagtagagaaaatttaactgttctaaaccatcagttttttcacttctaaaatagagatgataataataatcatagggagc

SEQ ID NO: 288144 - DNA, 201 bp, Homo sapiens
atacccagctctgagcttgctacataggcactaaacaatgatttgtgttatgacgtaatttgtctagacaatgttaaaactgaaaatcacaagaattactstatatgtttcagatgcttttacaattcagatggggacttcttgattggtgagttctgaagacttcagaccccctcactgttaattgacccctaaccgcaa

SEQ ID NO: 288145 - DNA, 201 bp, Homo sapiens
catctcttagttcctacaggatcttgaacaactcacttagcttctctgtgcttcattttccccatctataaaatgggtatagtatccaacccagcagatgrctatgagttaacctaacagactgtccaacactattcaaatgtaagggaacattattaatactatgtgaagcctcttcctgtatccttatgcagccctggg

SEQ ID NO: 288146 - DNA, 201 bp, Homo sapiens
taaactcgtatgaagtttaatgcataaagcagacatcctccctggtccccagctggcctatatattgcctttaagcacattgcaaaatgcagcccctattytaacccccaaccccttagactcagtcccccacacaaagggacacagacgaggcattcagctcctccctttccccttcagtgggacaaggcccttgcacag

SEQ ID NO: 288147 - DNA, 201 bp, Homo sapiens
aaagagggagagttaatgactgcataagtatgtttacatgtatatatactcacatccttgtgtatatactagacttctgttgtggtggtgtagaaagatcrttggacttggagtcagacctgggttctgagtttaagtcccatctcttagttcctacaggatcttgaacaactcacttagcttctctgtgcttcattttcc

SEQ ID NO: 288148 - DNA, 201 bp, Homo sapiens
aaagaaaggatgtgtgtaaagcacattagcttagcttagcacattggcacaggcacatggttagtgctcagttaatgctagttattgtcatgataactatyattaagtattgccatcatagcagagtttctgcctcatttccagggtatctctaggaggctgtcaagagaactgggcatgatatgtggcaagtgctatgtt

SEQ ID NO: 288149 - DNA, 201 bp, Homo sapiens
tatagatgtgttccatagatgaggcagatagcagaggcttctgcctacagcaaggctagtttggagagggttttgctgtcagggttggacccacacacctyttcatagatgctttttcttttttttcccagagtttgaaagggaaatggagtctcaagttcagggaggttacagtgtagacccacaaatcagctaagtaca

SEQ ID NO: 288150 - DNA, 201 bp, Homo sapiens
tccaggctgaggagatctcaaatgaaaatgaggaacttactgggaactagatcaaaggtcaaacttgttatgccttagcaaagaacttgactgcattgtgytcctgccctagggatctgtggaactctgaacttgagaatgatgatttaaggtgtctggtacaagaaatttctaagcagcaaagcattcaacatgtgacca

SEQ ID NO: 288151 - DNA, 201 bp, Homo sapiens
aaaatgaggaacttactgggaactagatcaaaggtcaaacttgttatgccttagcaaagaacttgactgcattgtgctcctgccctagggatctgtggaaytctgaacttgagaatgatgatttaaggtgtctggtacaagaaatttctaagcagcaaagcattcaacatgtgaccaggctgcttctaaccgcctatgccc

SEQ ID NO: 288152 - DNA, 201 bp, Homo sapiens
cgtcattcaggttggtgatgtgtccccttctcttccctgcctctcactaatttgggagcagtcagatgtttcagctgctgctatttccaactctaaaattyctctgtcatgtctgggcaacgaggagggaatctgagttatgcagaaggttccatgtgctgaagagtaagcaagcttgggtgcctgctttcttttaatata

SEQ ID NO: 288153 - DNA, 201 bp, Homo sapiens
gccttagcaaagaacttgactgcattgtgctcctgccctagggatctgtggaactctgaacttgagaatgatgatttaaggtgtctggtacaagaaatttytaagcagcaaagcattcaacatgtgaccaggctgcttctaaccgcctatgcccacatgcatgagcaaataaatgacctgaagttggaacttaaatttaaa

SEQ ID NO: 288154 - DNA, 201 bp, Homo sapiens
ctgaggaatccaaatatgcagaggaaggtgggaggcagcaagaggcagctggagccgtggtgggccgtctgtcatcctgttcacctcccactcttcccacyctgctctggcttcctgctgctctatagtcagcatagcctccaggttccgtggaacatgtaccctctggaaaatatctataatttgctaaccagccgggga

SEQ ID NO: 288155 - DNA, 201 bp, Homo sapiens
tgtggaactctgaacttgagaatgatgatttaaggtgtctggtacaagaaatttctaagcagcaaagcattcaacatgtgaccaggctgcttctaaccgcytatgcccacatgcatgagcaaataaatgacctgaagttggaacttaaatttaaaaataagtttagatttaaacctatatttaaattttaacttgtattta

SEQ ID NO: 288156 - DNA, 201 bp, Homo sapiens
tgtagacccacaaatcagctaagtacagctaagggtggagaagtctatgcaatatccagcactcttctgattaattagaagtctttaaaattcacagaaascatattgtcttccctaaatgattcatatgtcaagacacagtaaagatattatatgtggaacatcatacacaaacataggtccatatagaaattcttacct

SEQ ID NO: 288157 - DNA, 201 bp, Homo sapiens
gagaagaattcaaacaggctgcagaaatttgcataaataaaaaggagccaaatgctgatagccaagacaatgtgggaaaggcctcaaaggcatttcacagrcctttggggcagttcatcccatcacaggcccagaggcctaggagggaagaatgattttgtgggccaggcccagggccttgctaccctgcacagcctcagg

SEQ ID NO: 288158 - DNA, 201 bp, Homo sapiens
ttggaaacatctttaccatttataaataaattttatgtaaaatcctatcctgctgtcatgtttaagcaacttattatgcacagcaccaggacatcaatgtwaattgcatgccagtctttgctctcagtttcaaaggcattcttccctgcctgctgtctaatctttacaaagaaaggttaactccagaggtcaggaatctga

SEQ ID NO: 288159 - DNA, 201 bp, Homo sapiens
catcacaggcccagaggcctaggagggaagaatgattttgtgggccaggcccagggccttgctaccctgcacagcctcaggacactgttttctgcatcccwgctgctccagctcctcctgtggctcaaagggatccaagcaccgcttcaaagggtgcaagccataagccttggtagcttccatgtggtgttaagactgcag

SEQ ID NO: 288160 - DNA, 201 bp, Homo sapiens
gctctgggccccaccaccaaatccttgattcactggctctgggtctgtatgtaacaagcttctggagtgattctaatgattagccagagacaggacctacyattctacgtaactgatttcctcttgctgctgtaaaaaattaccacaaatttattggcttaaaacaacacaaatgtattatcttgaagttgtggaggtcag

SEQ ID NO: 288161 - DNA, 201 bp, Homo sapiens
cctccttcttttcttcctgaatccccttttttccctgggttccatgacattgcatgattcccaaacctgcaaaataagtattcttcaaggtcctgaactaraatcttgatatagtttgactgtgtccccacccaaatctcatcttgaattcccacgtgttacgggagggacctggtgggaggtagtctatctgcacaagct

SEQ ID NO: 288162 - DNA, 201 bp, Homo sapiens
acagagaacctctactagggcagtatggaggggaaatgtggggttggagctcccacacagagtccccgctggggcattgcctagtggagctatgagaagarggctaccattctctagactccagaaaggtagatccatccacagattgcaccgtgcacctgaaaaagccacaggcactcaatggcagcccatgagagcagc

SEQ ID NO: 288163 - DNA, 201 bp, Homo sapiens
cctctactagggcagtatggaggggaaatgtggggttggagctcccacacagagtccccgctggggcattgcctagtggagctatgagaagagggctaccrttctctagactccagaaaggtagatccatccacagattgcaccgtgcacctgaaaaagccacaggcactcaatggcagcccatgagagcagccgcaggtg

SEQ ID NO: 288164 - DNA, 201 bp, Homo sapiens
ccctcacaccagtgtaccctggatgtgggacattaggtcaaaggagatttttttggagctttaaaatttaatgacttccctgctgtgtttcagacatgcayggggcctatagaccctttgttctggccaatttctcccttttgaaatggaagtatttacctaatgtctatacccccattgtatcttggaagtaactaactt

SEQ ID NO: 288165 - DNA, 201 bp, Homo sapiens
gccaagggcagaataatatggtttggatctgtgtccctacccaaatttcatatcaaattataatccctaatgttggaggtggggcctggcaggaggtgatwggatcttggggacagtttctcatgaatggtttagcaccatccctgttggtactgtcctcatgatagtgagtgagttctcatgagatctggtcattgaaaa

SEQ ID NO: 288166 - DNA, 201 bp, Homo sapiens
tgaaaatcacaagaattactctatatgtttcagatgcttttacaattcagatggggacttcttgattggtgagttctgaagacttcagaccccctcactgwtaattgacccctaaccgcaagctgctttctaattttatacacattattttccttcattctccaatctgtcttatttcatttagtgcaatccagagactga

SEQ ID NO: 288167 - DNA, 201 bp, Homo sapiens
ttgattggtgagttctgaagacttcagaccccctcactgttaattgacccctaaccgcaagctgctttctaattttatacacattattttccttcattctycaatctgtcttatttcatttagtgcaatccagagactgaggtctagaggccacaggtggtctggaaaagatttctagtgtacctcaaagcccctactcta

SEQ ID NO: 288168 - DNA, 201 bp, Homo sapiens
aaaagcagagtcattgttttattcacattcttctagataggaaaatagctaatctaagttgtcagaatttatctttttccccaagagactcaataaagctytttgcatttggaatggaaaagcaaatgcagccttaagcctttcctgttcatgaaatggttatcacaccaaaagaattgctcaccactgccctgtcttttt

SEQ ID NO: 288169 - DNA, 201 bp, Homo sapiens
ggaataatttgggaaacaggtcaagacaggctaagatcaaagggctcagggtgtaggttagtaagagggtctgagaaagtgttggcatcagttcttagtaragaaaatttaactgttctaaaccatcagttttttcacttctaaaatagagatgataataataatcatagggagcctcagagagttgttgtgagaattaaa

SEQ ID NO: 288170 - DNA, 201 bp, Homo sapiens
aataatttgggaaacaggtcaagacaggctaagatcaaagggctcagggtgtaggttagtaagagggtctgagaaagtgttggcatcagttcttagtagaraaaatttaactgttctaaaccatcagttttttcacttctaaaatagagatgataataataatcatagggagcctcagagagttgttgtgagaattaaatg

SEQ ID NO: 288171 - DNA, 201 bp, Homo sapiens
agggaaccttctcatttacaccgagtttggcaagatgcttgtacagcccaatgagatctgcgtcattcaggttggtgatgtgtccccttctcttccctgcytctcactaatttgggagcagtcagatgtttcagctgctgctatttccaactctaaaatttctctgtcatgtctgggcaacgaggagggaatctgagttat

SEQ ID NO: 288172 - DNA, 201 bp, Homo sapiens
gggtggaatgaaaaagtgagaagaggccagggctgtgggcagcagatggccatgaaaagtgatgctgtatcattgcttcactgcttcacacattagagccyacaggtcgttgttgacttgagtgtcttcctgatggtactgcctgagccattctgtgtatcactcagaacattactctaaggcttgtatatcttgtatgtt

SEQ ID NO: 288173 - DNA, 201 bp, Homo sapiens
atgagaacagcaccaagagggtaatgctaagccattcgtgagaaatccacccccattatgcaaccaccccccccctcttgctcctgctcccatcatatgaratgctcccatcatatctttgccttctgccatgattgaaaactttctgagcctctccagaagcagaagctgctatgtttcctgtgcagcctgcagaactgt

SEQ ID NO: 288174 - DNA, 201 bp, Homo sapiens
cacatgcccaggaatagcagtgtcttcccgctattgctaggctcagatacctcaacatttctagtcattccagttaaccctaaccacgcctctatgagtarcgccttcattaaaatctttagcactttcggacccatagatacagaagggaccaccttcctatagcaggacactgatcctcttctaccccaggacaggacc

SEQ ID NO: 288175 - DNA, 201 bp, Homo sapiens
ccctaaccacgcctctatgagtagcgccttcattaaaatctttagcactttcggacccatagatacagaagggaccaccttcctatagcaggacactgatyctcttctaccccaggacaggaccaggaagtattatgttaggattgctctgaaatctcaagtccttggagttggaacttttagaggccttctcccctctcc

SEQ ID NO: 288176 - DNA, 201 bp, Homo sapiens
tctaaggcttgtatatcttgtatgtttttccctctagctggctgtataggattctaccttcagtttctcacaagccctttgaatccattgacgaaggccawgtcactcacaactgggatgaagttgatcctgatcctaaccaggtaacctggtcctgtgaattgaagcttatcatatacccaaagccttgactagaaatac

SEQ ID NO: 288177 - DNA, 201 bp, Homo sapiens
tacagaagggaccaccttcctatagcaggacactgatcctcttctaccccaggacaggaccaggaagtattatgttaggattgctctgaaatctcaagtcyttggagttggaacttttagaggccttctcccctctcctggactcaccaacccaggcactgtgtctattgcaagctcctctaggctgaaattacctggaga

SEQ ID NO: 288178 - DNA, 201 bp, Homo sapiens
cagaagggaccaccttcctatagcaggacactgatcctcttctaccccaggacaggaccaggaagtattatgttaggattgctctgaaatctcaagtcctkggagttggaacttttagaggccttctcccctctcctggactcaccaacccaggcactgtgtctattgcaagctcctctaggctgaaattacctggagaag

SEQ ID NO: 288179 - DNA, 201 bp, Homo sapiens
acactgatcctcttctaccccaggacaggaccaggaagtattatgttaggattgctctgaaatctcaagtccttggagttggaacttttagaggccttctyccctctcctggactcaccaacccaggcactgtgtctattgcaagctcctctaggctgaaattacctggagaagcatcacagcaggtactctctgttccag

SEQ ID NO: 288180 - DNA, 201 bp, Homo sapiens
aatggaaaagcaaatgcagccttaagcctttcctgttcatgaaatggttatcacaccaaaagaattgctcaccactgccctgtctttttttgtcagttcckcagaaagggaaccttctcatttacaccgagtttggcaagatgcttgtacagcccaatgagatctgcgtcattcaggttggtgatgtgtccccttctcttc

SEQ ID NO: 288181 - DNA, 201 bp, Homo sapiens
tttctctgtcatgtctgggcaacgaggagggaatctgagttatgcagaaggttccatgtgctgaagagtaagcaagcttgggtgcctgctttcttttaatrtagcacataattctaaaggaaagaccacttgtcattgcactttcctaaatatttacatatactctggataaggccctgttcccactaatggcagtagagg

SEQ ID NO: 288182 - DNA, 201 bp, Homo sapiens
gtgtctattgcaagctcctctaggctgaaattacctggagaagcatcacagcaggtactctctgttccaggaaacagaaggtagcccagattgtttgagamctgctgacatccacagatcctcacagttaggttaaaaattgttgaaaaggcactacttggagaatgtgctgtgtttctgctgcatgtgtgatcagaaggc

SEQ ID NO: 288183 - DNA, 201 bp, Homo sapiens
cctgttccttcctagcctgagtcaggactgagcagagaatcctccaccacacacagcaggcactatctgccacagttcctttccccgatagcttcaaattytctgccttttgaaataagcctacttttaactggaataaataattggtcaatctctacctcaggtgaagaggaaccaagcctctggaaacacttaggaaca

SEQ ID NO: 288184 - DNA, 201 bp, Homo sapiens
aaccccagtgtattgcctttgtccctgagtttaggtacatgttgctgataataggtatgtagggcaggaagaaaaacagacctgggtttgcatccctgccsatctacttactagctgtgtcttaagctatgatgtttcaattgtaaaatgggatgataacatttgcctcacagtgctattgtgaagattatgagagaatag

SEQ ID NO: 288185 - DNA, 201 bp, Homo sapiens
gttacctcccaccgggtccttctcacaacatgtggggattatggaagctacaattcaggatgagatttgggtggggacacaaccaaaccatatcagatccytaccccaaacctcagtatcacacaatatacccatgtaacaaaactgcatatgtatccctctatctaaattaaaagttgaataaaaataaataaaaaaatt

SEQ ID NO: 288186 - DNA, 201 bp, Homo sapiens
atttacattattcaggtaactttatttcttcattttatattattttttactctgaaggcttcttctgccctctttccctccctcctactctctctctcctycctctctccccaccccgccactttccacaacccaaggaaatctcctgcttcccctttgtttaccatgacattttgtctatacctgccaatctccctcccc

SEQ ID NO: 288187 - DNA, 201 bp, Homo sapiens
aatacctgaggctacttaatttataatgaaaagaggttcatttggctcgtggttatgcaggctgtacaagcagcatggtgctggcatctgtttctaatgargcctcaggaaatacaatcatggtggcaggcaagagggaagctggcatatcacatgatgagagcaagcaagagaaaggaggaagtcccagcttcttttgaa

SEQ ID NO: 288188 - DNA, 201 bp, Homo sapiens
ctctcttcccctcctcttccttactgtctttcttatcctcctcttttcttctccttctcttcaccccaaccttccccttcccctctgtattgttctgctaragctatcataacaaaaagatactgggtggcttaagcaaaagagatttactttctaacagttctggattccaagattgaggtatcggcagggttgctttct

SEQ ID NO: 288189 - DNA, 201 bp, Homo sapiens
atctcagctcactgcaacctccaccccccaggctcaagtgatcctccccgctcagtctcctgagtagcttggaccacaggtgtgcaccaccacacctggctttttttttttttttttgtattgttagtacagacggggtcttgccatgttgcccaggctggtcttgaactcctaaactcaagcaatccacctgccttgact

SEQ ID NO: 288190 - DNA, 201 bp, Homo sapiens
ccttactgtctttcttatcctcctcttttcttctccttctcttcaccccaaccttccccttcccctctgtattgttctgctagagctatcataacaaaaaratactgggtggcttaagcaaaagagatttactttctaacagttctggattccaagattgaggtatcggcagggttgctttcttctgaggcctctctcatt

SEQ ID NO: 288191 - DNA, 201 bp, Homo sapiens
atcaaaaccacacaccctcaatctaagccttctagattgggaattagaaatatgctgttgctgtgtcctacagtggagctacttgggaaagggttatgatytgggagataagataactttgatacagggctcgtaagcttagatgatagagtacattcgctctctattatgactagcattttaattattattatcttctct

SEQ ID NO: 288192 - DNA, 201 bp, Homo sapiens
tcttttcttctccttctcttcaccccaaccttccccttcccctctgtattgttctgctagagctatcataacaaaaagatactgggtggcttaagcaaaaragatttactttctaacagttctggattccaagattgaggtatcggcagggttgctttcttctgaggcctctctcattgacttgtatcttctccttggctc

SEQ ID NO: 288193 - DNA, 201 bp, Homo sapiens
atgctgttgctgtgtcctacagtggagctacttgggaaagggttatgatctgggagataagataactttgatacagggctcgtaagcttagatgatagagwacattcgctctctattatgactagcattttaattattattatcttctctgggccctgattttctttagatctagcctgattcctgtcagagagtggaact

SEQ ID NO: 288194 - DNA, 201 bp, Homo sapiens
ggagataagataactttgatacagggctcgtaagcttagatgatagagtacattcgctctctattatgactagcattttaattattattatcttctctggsccctgattttctttagatctagcctgattcctgtcagagagtggaactcgagacctctgataatccacatggccatggagtagagctgtgcctgccaaga

SEQ ID NO: 288195 - DNA, 201 bp, Homo sapiens
tatatatataaagctcttaagtttaattagatccatttgtcaatttttcttttgttgccaattgcttttgatgtttttgtcatgaaatctttgcccatgcygatgtcctgaatggtattgcctaggtcatcttccagagtttttatagttttgggcttaacatttaagtccttaatccatcatgagttggtttttctatat

SEQ ID NO: 288196 - DNA, 201 bp, Homo sapiens
gtcattcaggttggtgatgtgtccccttctcttccctgcctctcactaatttgggagcagtcagatgtttcagctgctgctatttccaactctaaaatttstctgtcatgtctgggcaacgaggagggaatctgagttatgcagaaggttccatgtgctgaagagtaagcaagcttgggtgcctgctttcttttaatatag

SEQ ID NO: 288197 - DNA, 201 bp, Homo sapiens
ctgataagaccttcaggcctccttattaccatagtaagtctctcttttaccaagccacatttgcaagccaaagagacaacaaagcagtgagcgctacacaktgggaataatgcctgggttatttctggacacccaccatggcatgaattcaggatcctgctgcacaaggcctagtgctgatccccaagctttaatctcttt

SEQ ID NO: 288198 - DNA, 201 bp, Homo sapiens
gatgtgtccccttctcttccctgcctctcactaatttgggagcagtcagatgtttcagctgctgctatttccaactctaaaatttctctgtcatgtctggrcaacgaggagggaatctgagttatgcagaaggttccatgtgctgaagagtaagcaagcttgggtgcctgctttcttttaatatagcacataattctaaag

SEQ ID NO: 288199 - DNA, 201 bp, Homo sapiens
cccccattatgcaaccaccccccccctcttgctcctgctcccatcatatgagatgctcccatcatatctttgccttctgccatgattgaaaactttctgarcctctccagaagcagaagctgctatgtttcctgtgcagcctgcagaactgtgagccaatcaaacctcttttctttataaattactcaatcttaggtcttt

SEQ ID NO: 288200 - DNA, 201 bp, Homo sapiens
gcagaataatatggtttggatctgtgtccctacccaaatttcatatcaaattataatccctaatgttggaggtggggcctggcaggaggtgattggatctkggggacagtttctcatgaatggtttagcaccatccctgttggtactgtcctcatgatagtgagtgagttctcatgagatctggtcattgaaaagtgtgtg

SEQ ID NO: 288201 - DNA, 201 bp, Homo sapiens
cctaatgttggaggtggggcctggcaggaggtgattggatcttggggacagtttctcatgaatggtttagcaccatccctgttggtactgtcctcatgatrgtgagtgagttctcatgagatctggtcattgaaaagtgtgtggcacctcccacctctctctctctctttctttctctctctctttctctctctctctctc

SEQ ID NO: 288202 - DNA, 201 bp, Homo sapiens
agagtaagcaagcttgggtgcctgctttcttttaatatagcacataattctaaaggaaagaccacttgtcattgcactttcctaaatatttacatatactytggataaggccctgttcccactaatggcagtagaggcagtgaaggtggactttttttttttttagtgtggctaaatcaggcttaccattatctctggacc

SEQ ID NO: 288203 - DNA, 201 bp, Homo sapiens
ttctgtcatgattgtacatttcttgacgcctcctcagaaactgagcagatgccagcatcatgcttcctgtacagtctgaagaactgtgagccagttaaacytcttttctttataaattacccagtatcaggtaattctttatagcaatgtgagaacagactaatatgtacactatgatgactatttcaccgagaaattact

SEQ ID NO: 288204 - DNA, 201 bp, Homo sapiens
tctgaggaatccaaatatgcagaggaaggtgggaggcagcaagaggcagctggagccgtggtgggccgtctgtcatcctgttcacctcccactcttcccaytctgctctggcttcctgctgctctatagtcagcatagcctccaggttccgtggaacatgtaccctctggaaaatatctataatttgctaaccagccgggg

SEQ ID NO: 288205 - DNA, 201 bp, Homo sapiens
tcaggtaattctttatagcaatgtgagaacagactaatatgtacactatgatgactatttcaccgagaaattacttcaaaattcttggataggtggtactsacttctaatgatatgtctgtctatcctcagccagtgttgttgagagtactcaagtcatccaatctagttgagtccatgggaaatttggagggaatctcag

SEQ ID NO: 288206 - DNA, 201 bp, Homo sapiens
ttctgcatggctgaggaggcctcaagaaacttacaatcatggcggaaagggaagcaaacacatccttcttcatatggcggcaggagagagaagtgttaagygaaagggggaaaatccccttataaaactatcatatcttgtgagaactcactatcatgagggtaaccatccccatgattcaattacctcccaccatgaatg

SEQ ID NO: 288207 - DNA, 201 bp, Homo sapiens
atagccagattggttgcagctcggcatatgacttacttgaacacagttttaatagtgtgtcaccatgattggcacaagagtaggttacacatccaattagsttatggttcactatgtatggagaaacctttaggcagaacttaaaatatgtaaggaggcaactttaggacaaacttgattaacagtctgcgtgtgtgtgtg

SEQ ID NO: 288208 - DNA, 201 bp, Homo sapiens
gatgaggcagatagcagaggcttctgcctacagcaaggctagtttggagagggttttgctgtcagggttggacccacacacctcttcatagatgctttttyttttttttcccagagtttgaaagggaaatggagtctcaagttcagggaggttacagtgtagacccacaaatcagctaagtacagctaagggtggagaagt

SEQ ID NO: 288209 - DNA, 201 bp, Homo sapiens
aggctagtttggagagggttttgctgtcagggttggacccacacacctcttcatagatgctttttcttttttttcccagagtttgaaagggaaatggagtytcaagttcagggaggttacagtgtagacccacaaatcagctaagtacagctaagggtggagaagtctatgcaatatccagcactcttctgattaattaga

SEQ ID NO: 288210 - DNA, 201 bp, Homo sapiens
tctggatttgggaatgagtgttcttcagaggatcctcgctgcccaggttccctgccagaaggacaggtatgagcaaataaagtgcttagaagagctctgawtcctattcctggatgactagctttcaggccaaagtgcctccacccaccgtggctcttccaatctagcctgtgaactgtctagaggtttcccaagtcatag

SEQ ID NO: 288211 - DNA, 201 bp, Homo sapiens
ttttcttctccttctcttcaccccaaccttccccttcccctctgtattgttctgctagagctatcataacaaaaagatactgggtggcttaagcaaaagaratttactttctaacagttctggattccaagattgaggtatcggcagggttgctttcttctgaggcctctctcattgacttgtatcttctccttggctcct

SEQ ID NO: 288212 - DNA, 201 bp, Homo sapiens
aagcagtttatattcacatagttttaaacacacaaacatgtgtgtgcacgtgcacaaataacacacactaacagagtccctttaaggaaatgatggataaycattttaatataacaaaatcacaagtagagcctcacagagggggtagctgtcctttcttttctatgtaattgatgctatttatttagaaggtctatggtt

SEQ ID NO: 288213 - DNA, 201 bp, Homo sapiens
ccccttcccctctgtattgttctgctagagctatcataacaaaaagatactgggtggcttaagcaaaagagatttactttctaacagttctggattccaarattgaggtatcggcagggttgctttcttctgaggcctctctcattgacttgtatcttctccttggctcctcacatcatcttccctctgtgtctatagcca

SEQ ID NO: 288214 - DNA, 201 bp, Homo sapiens
aggccagcaaggtcaagctggcacctgagaggattgccgatggcaccatggtaagtatgttaactgccacattccagcggcctctgaactccccacccttrctgagaggggtggccgtttttcatttctccaaagtcacagaggaagagtcaaaagagggagagttaatgactgcataagtatgtttacatgtatatatac

SEQ ID NO: 288215 - DNA, 201 bp, Homo sapiens
ctccaaatatagtcacattctgaaatacagggggttaggagttcaacatatgaatttggaggaggaacacaatctagcccataattctctccttctgcttstttttccctctaaatatctactaaggattcccaatcttttggattctctttgccttagagatgaagggatagttgttgataagaaataatcaagtgggac

SEQ ID NO: 288216 - DNA, 201 bp, Homo sapiens
catctaatcaaatgtgtttattatctatctcacctcttttttctcatccccatcgtcacttcctccaggcatttatgtttgaatcatctttaagtctggcrgtcacaaagtggggactcaaggcctccaggtgtttggatgagaactaccacaagtgctgggagccactcaagagccacttcactcccaactccaggaacc

SEQ ID NO: 288217 - DNA, 201 bp, Homo sapiens; identical to SEQ ID NO: 59025

SEQ ID NO: 288218 - DNA, 201 bp, Homo sapiens
atagaactcatagaatacagttgtaaaatatgtgaagcaataatacaactaaaaggataaatagacaaatccacaattttagttggagacttcaacacccytctctcaacagttgatagaacaactgaacagaaagtcagaaaagatacagaagtgatctacagaaggagcaggattggaaaaaaagttttttaaaaaaga

SEQ ID NO: 288219 - DNA, 201 bp, Homo sapiens
actatagtcaagccattgcattgggcattacaattgattttattatttttgaaatgtttaataagtaaattctatagagaagaagctatttaacaatagcrtatagtataaataaaataaactatttttaaaagttgtaggactatattagtctgatcaagctgccataacaaaataccacagactgggtagtttaaacaa

SEQ ID NO: 288220 - DNA, 201 bp, Homo sapiens
aaaactgagagtccaagtccgaggtgttagcagggttgatgtcttgtgaggctcctctttggtttaaagacagtccttcttactgtatcctcacatagccyatcctctgagtgcaagcagagagagagatctcttcttcttataaggccatcaatcctatcagattagggccccacatttatgatctcttttaactttaaa

SEQ ID NO: 288221 - DNA, 201 bp, Homo sapiens
aaactgagagtccaagtccgaggtgttagcagggttgatgtcttgtgaggctcctctttggtttaaagacagtccttcttactgtatcctcacatagcctrtcctctgagtgcaagcagagagagagatctcttcttcttataaggccatcaatcctatcagattagggccccacatttatgatctcttttaactttaaaa

SEQ ID NO: 288222 - DNA, 201 bp, Homo sapiens
aaagattgttgtgatttaaactgaactgtcaggcagcctagggacaaacgtggggtttggtgaagcagctgaacctggtactgcatttaccaaatcagatytcagctgggtgctctttctttctcttaaaaaaacaatttagaactctaagggcttgaagtagaagtagaaccttcccctgcagtgtcaggagcccacaca

SEQ ID NO: 288223 - DNA, 201 bp, Homo sapiens
tacatcaacagtgatgcattgattctgagcctagttcccagtttctctgtccctgtaagaggcagaaaggctggtaaagtttagaagccttgttagaaagkcttctaaacaagtttcctcacattttagatgtttccttttggggaatactggggaggttgttagttagtctgttgttttgggaaagttcatcacctaagt

SEQ ID NO: 288224 - DNA, 201 bp, Homo sapiens
gctcctactagactggtatcttaaggcaaggaaaacagaatatgtccctaatatctaaaaccatgcctagtgcccaggccaggcttgaatcaatgctcaaygcatgcatgtgtaactgaacagaactgcccagaaccttggctcaggccaagtaggccagaccaccccacaacagacatcttccctgaatgcagggtttga

SEQ ID NO: 288225 - DNA, 201 bp, Homo sapiens
aacgtggggtttggtgaagcagctgaacctggtactgcatttaccaaatcagatctcagctgggtgctctttctttctcttaaaaaaacaatttagaactytaagggcttgaagtagaagtagaaccttcccctgcagtgtcaggagcccacacagggaggctggcatgccaggaaagggacctgattataaatagcatga

SEQ ID NO: 288226 - DNA, 201 bp, Homo sapiens
tgcatgagtgagttcatgggactcatccgaggtcactatgaggcaaagcaaggtgggttcctgccagggggagggagtctacacagcacaatgaccccccrtggacctgatgctgactgctttgagaaggccagcaaggtcaagctggcacctgagaggattgccgatggcaccatggtaagtatgttaactgccacattc

SEQ ID NO: 288227 - DNA, 201 bp, Homo sapiens
gccagaaggacaggtatgagcaaataaagtgcttagaagagctctgaatcctattcctggatgactagctttcaggccaaagtgcctccacccaccgtggytcttccaatctagcctgtgaactgtctagaggtttcccaagtcataggggcaatgaagatacagagcaatgacaacacaaagattaaaattggattggtg

SEQ ID NO: 288228 - DNA, 201 bp, Homo sapiens
tctagaggtttcccaagtcataggggcaatgaagatacagagcaatgacaacacaaagattaaaattggattggtggcacagcagccaatccaaactagtraaattaactgtagggtttccagtaggatccccaaaaatccagagttaaagagaatccctcatattccccttgaacaccatggatgtgagcattatgataa

SEQ ID NO: 288229 - DNA, 201 bp, Homo sapiens
aaaaaaaaaggaaaaaatgcctgattattacagggttacaggtatgatagggtcacaattttggaggataagaatgcaaggaaaaataccaacatgtgaaygcttggttatttctggttgtgagataatgggtgatatcatatagtttatacattttctacaataaatatatattacttttataatcggggggcaagtcac

SEQ ID NO: 288230 - DNA, 201 bp, Homo sapiens
gggttttgctgtcagggttggacccacacacctcttcatagatgctttttcttttttttcccagagtttgaaagggaaatggagtctcaagttcagggagrttacagtgtagacccacaaatcagctaagtacagctaagggtggagaagtctatgcaatatccagcactcttctgattaattagaagtctttaaaattca

SEQ ID NO: 288231 - DNA, 201 bp, Homo sapiens
gcttttcggatgggagtaatattgtttattgcatcctttgtttcagaataatcctcaggtctgcccctacaatctctatgctgagcagctctcaggatcgkctttcacttgtccacggagcaccaataagagaaggtacaaggattagatgaattctgacctgcagactgtgggtactatgacagggactttgtgctgcct

SEQ ID NO: 288232 - DNA, 201 bp, Homo sapiens
tgctgtatcattgcttcactgcttcacacattagagcctacaggtcgttgttgacttgagtgtcttcctgatggtactgcctgagccattctgtgtatcaytcagaacattactctaaggcttgtatatcttgtatgtttttccctctagctggctgtataggattctaccttcagtttctcacaagccctttgaatccat

SEQ ID NO: 288233 - DNA, 201 bp, Homo sapiens
ttttttttcccagagtttgaaagggaaatggagtctcaagttcagggaggttacagtgtagacccacaaatcagctaagtacagctaagggtggagaagtytatgcaatatccagcactcttctgattaattagaagtctttaaaattcacagaaaccatattgtcttccctaaatgattcatatgtcaagacacagtaaa

SEQ ID NO: 288234 - DNA, 201 bp, Homo sapiens
gaacataaggttcaggaagtctagtaactctcccaggatcacacaggtggttccaagacatacacacatgctctgaacttcatatactgggagctggagargcttagtaagaccaaggtctgaggtcacgtcatcaagagatggagaaatcaaatggaaactaaacagatctagccctttttcccccagatggctcaatgt

SEQ ID NO: 288235 - DNA, 201 bp, Homo sapiens
tatgtttttccctctagctggctgtataggattctaccttcagtttctcacaagccctttgaatccattgacgaaggccatgtcactcacaactgggatgmagttgatcctgatcctaaccaggtaacctggtcctgtgaattgaagcttatcatatacccaaagccttgactagaaatacctaaatagaataccatggtc

SEQ ID NO: 288236 - DNA, 201 bp, Homo sapiens
gtaactctcccaggatcacacaggtggttccaagacatacacacatgctctgaacttcatatactgggagctggagaggcttagtaagaccaaggtctgargtcacgtcatcaagagatggagaaatcaaatggaaactaaacagatctagccctttttcccccagatggctcaatgttgggccaggccaactcaactcac

SEQ ID NO: 288237 - DNA, 201 bp, Homo sapiens
cacacaggtggttccaagacatacacacatgctctgaacttcatatactgggagctggagaggcttagtaagaccaaggtctgaggtcacgtcatcaagaratggagaaatcaaatggaaactaaacagatctagccctttttcccccagatggctcaatgttgggccaggccaactcaactcactgaggtagactgtcct

SEQ ID NO: 288238 - DNA, 201 bp, Homo sapiens
tctccttgtgtgttcacaggacccatccattttcacagtattgactgctaagtctgtccgccctggagtggccattgctgattttgtcatcttcccacctygatggggggttgctgataagaccttcaggcctccttattaccatagtaagtctctcttttaccaagccacatttgcaagccaaagagacaacaaagcagt

SEQ ID NO: 288239 - DNA, 201 bp, Homo sapiens
ccgaactgtagaaaacatacaaacacacttgcttaatgttagctttttaatcttatttttgtacacagtatacttttacataggcactgaaccagctggaratgaatgcttggattttcgcagctgataaaagcagagttcagattctgtccttgagctcaatgtctggagaaagcagctgtgaatactgcttccttaatt

SEQ ID NO: 288240 - DNA, 201 bp, Homo sapiens
caaaatctctgctttctcttgtgagtactgagtttatcagaaccaccttggggattttcttatccttcatgatacaggcccagtatgatctgaatatagaytctgtataatcttctgccatcagggccaacagataaatgactcctctccctatactatctctgtcatttggtggggatcattttttgcattagagaaggt

SEQ ID NO: 288241 - DNA, 201 bp, Homo sapiens
caaacacacttgcttaatgttagctttttaatcttatttttgtacacagtatacttttacataggcactgaaccagctggaaatgaatgcttggattttcrcagctgataaaagcagagttcagattctgtccttgagctcaatgtctggagaaagcagctgtgaatactgcttccttaattcagatgcctttggccgtga

SEQ ID NO: 288242 - DNA, 201 bp, Homo sapiens
cttaataaagtggtggttctgagaccccggggggaagttcattttgcagctcacttcataagagatgaacctaacccacaagctggaaggataattagagsagaagtcagagactcagaggcaaaaggattattgtgagccagttcagtttatctctggggggacaaacctacctctccaaacagcagcaactcttaataa

SEQ ID NO: 288243 - DNA, 201 bp, Homo sapiens
ggaccagtggaagggctgcctcttgggcaccgttcacattaacctttccctcttctgtgggtctctcccagggcctgcataccttgtgtggagctggagayataaagtctaacaatgggcttgctatccacattttcctctgcaatacctccatggagaacaggtaagtggctcagttctagggaaggacatgcccatctt

SEQ ID NO: 288244 - DNA, 201 bp, Homo sapiens
aagatttcacctacccataccttctgttgacatctaatcaaatgtgtttattatctatctcacctcttttttctcatccccatcgtcacttcctccaggcmtttatgtttgaatcatctttaagtctggcggtcacaaagtggggactcaaggcctccaggtgtttggatgagaactaccacaagtgctgggagccactca

SEQ ID NO: 288245 - DNA, 201 bp, Homo sapiens
ggccaacagataaatgactcctctccctatactatctctgtcatttggtggggatcattttttgcattagagaaggttcgtcaaggtcgttgcttcttccrgattgtgggccctattgaaggtatgttctcttcactatgaaatgtagttgcattttcttccaccacctcaggctctctgttctcatgacttgagggctaa

SEQ ID NO: 288246 - DNA, 201 bp, Homo sapiens
tgtattttttttccagcttagatggaaaccatttgagattccaaaagcatctcagaagaaagtagactttgtgagtgtaagtcagtcccatccacaccctycctactgctctcctctcttctgtggtgagtgagccaaccatttgcagcctgaatgccaagcagaagcagccctatcaggaggcagcagagacaaaaccac

SEQ ID NO: 288247 - DNA, 201 bp, Homo sapiens
tctgaccagattccttgggtcttcctaaaaggtaccagactggaaatgcagtgaatctttgagcaatgaaagcaatttgtggagtagctcttgacatgaargaaagcctttctcttcatgcaaccatgggcatctttcctatgttttggaagtttctaaaagacttttgggttactgttttctaggggccaatggcttggc

SEQ ID NO: 288248 - DNA, 201 bp, Homo sapiens
gtggtagaatgaggagaaaggaactttatgaatttggagaagtccctgaccccacaactctcaagagcctcctctatgatctctgacttctcaccccagtrccttcattcctggctgtatttggcagtgacagagtgaacagcccacttctaaagttactcataactttcagtgcttgagtttaaaccaaagaaattctag

SEQ ID NO: 288249 - DNA, 201 bp, Homo sapiens
actttggcttcagctaacagctctgtgtaagcttaaaattcttaagtagaggagcttatatactggctttgcaaaacaaagtatgcaaatggcattcctgccttattatacactacctctggaactggaccatttgtgtccaaagcccaactctacatttcctggctgagcgaccttgtgagccatgaatcagggacaaga

SEQ ID NO: 288250 - DNA, 201 bp, Homo sapiens
tgggtttatttttatttgaatttacacagatgcgatcttctctgtattgctgcaatagttatttttccaaaattcagttctgatcatgccaccactgtctycattagaaagcctttgcaggcttcccatggcttaggattaagtctgcactctgaagcatggtgtttgatgctcttcaccatctgtccctggactcatttt

SEQ ID NO: 288251 - DNA, 201 bp, Homo sapiens
ccttgtgtgttcacaggacccatccattttcacagtattgactgctaagtctgtccgccctggagtggccattgctgattttgtcatcttcccacctcgayggggggttgctgataagaccttcaggcctccttattaccatagtaagtctctcttttaccaagccacatttgcaagccaaagagacaacaaagcagtgag

SEQ ID NO: 288252 - DNA, 201 bp, Homo sapiens
gtctgaaccctgtaggggccttgggatgaggcaacgcttgggtgggaggggtccacagtagacccctgacatttacagatctaacatttccaatgtcaccrttggaagccctagatatagtcatttgtcctttggtgagggagtaaataacacaactagtagggaagcaaagccagatactcaacattcccctgtgaacat

SEQ ID NO: 288253 - DNA, 201 bp, Homo sapiens
  misc_feature (1)...(201): n = A,T,C or G
tggcctggcacgggaattatacaccctacaagtacaacctgaagaatttcatggttatcaactcagtggcctttgaccatgcagtaagtctgaaccctgtnggggccttgggatgaggcaacgcttgggtgggaggggtccacagtagacccctgacatttacagatctaacatttccaatgtcaccgttggaagccctag

SEQ ID NO: 288254 - DNA, 201 bp, Homo sapiens
agaccagatctcatgagaactcactgtcatgagaacagcaccaagagggtaatgctaagccattcgtgagaaatccacccccattatgcaaccaccccccmcctcttgctcctgctcccatcatatgagatgctcccatcatatctttgccttctgccatgattgaaaactttctgagcctctccagaagcagaagctgct

SEQ ID NO: 288255 - DNA, 201 bp, Homo sapiens
gtcacaggctggtctaaaattccatttcacagaattgaagataatttggggttattaccaattctcagcagctcaaattcaatcccgttgatggtgagcakggggttcattttgagagtagaaaattggatgcagtggagaatcagaatgttggatggtctctgccatttccccaaagatatcatcctaactgcatgctgc

SEQ ID NO: 288256 - DNA, 201 bp, Homo sapiens
cattcccctgctcagcccttttggacagcttgctagctctttttacatttcatctccatcaacttacatttcacttcttgcaaagatattggagctgtctrcaaaccagatgatttcattgcttatatctcttattttccatatataagaatgttaaataggccctgtgccaggacttattcctgagagaacatttctatt

SEQ ID NO: 288257 - DNA, 201 bp, Homo sapiens
ccagaagaagcacctcctctaggaaatcattccttctttttagtaatacgcaattgaaaagtatgtgtgggttatgtgctgttaggtgctaagcattttarctatgaattaactcataatcctcaaaataaatctggggtatagagagaggttcttgtttcaattagaaaagtaatgcttggagagactatgatttgccca

SEQ ID NO: 288258 - DNA, 201 bp, Homo sapiens
gttacaggtatgatagggtcacaattttggaggataagaatgcaaggaaaaataccaacatgtgaacgcttggttatttctggttgtgagataatgggtgwtatcatatagtttatacattttctacaataaatatatattacttttataatcggggggcaagtcacatcaaaagttgttacaagaaacatatcgggttgc

SEQ ID NO: 288259 - DNA, 201 bp, Homo sapiens
gcttgcagagtatataagataaaatgagacagaaccagtactatagcaatgagatagacccagtgctataaacgactgagctctttttttaaccttctgaraaccccagtgtattgcctttgtccctgagtttaggtacatgttgctgataataggtatgtagggcaggaagaaaaacagacctgggtttgcatccctgcc

SEQ ID NO: 288260 - DNA, 201 bp, Homo sapiens
cagaaccagtactatagcaatgagatagacccagtgctataaacgactgagctctttttttaaccttctgagaaccccagtgtattgcctttgtccctgartttaggtacatgttgctgataataggtatgtagggcaggaagaaaaacagacctgggtttgcatccctgcccatctacttactagctgtgtcttaagcta

SEQ ID NO: 288261 - DNA, 201 bp, Homo sapiens
ccagtactatagcaatgagatagacccagtgctataaacgactgagctctttttttaaccttctgagaaccccagtgtattgcctttgtccctgagtttargtacatgttgctgataataggtatgtagggcaggaagaaaaacagacctgggtttgcatccctgcccatctacttactagctgtgtcttaagctatgatg

SEQ ID NO: 288262 - DNA, 201 bp, Homo sapiens
tagtgcatatcaaggactaaatcagtcagcaagcatcctttacttctttcagagtttctcctctggagagaattatggaattatagttctcaccagcaccygttgttatatgtaagaaaaaaacaaaatttgggagagaaaatggctttcctgaagatcacagagtaaacgggaacagagacagtagcaaaaaccaagtct

SEQ ID NO: 288263 - DNA, 201 bp, Homo sapiens
ggactttattaccactcacagcaaggtttttgtttgtttgtttgttttgttgttgttgtttttgttgttttttgttttttagacagagtctcactctgtcrcccaagctggagtgcaatggtgaggtcttggctcactgcaacctccacctcccaggttcagaagattcttctgcctcagcttcctgagtagctgggacta

SEQ ID NO: 288264 - DNA, 201 bp, Homo sapiens
agtgcatatcaaggactaaatcagtcagcaagcatcctttacttctttcagagtttctcctctggagagaattatggaattatagttctcaccagcacccrttgttatatgtaagaaaaaaacaaaatttgggagagaaaatggctttcctgaagatcacagagtaaacgggaacagagacagtagcaaaaaccaagtctt

SEQ ID NO: 288265 - DNA, 201 bp, Homo sapiens
gagagaattatggaattatagttctcaccagcacccgttgttatatgtaagaaaaaaacaaaatttgggagagaaaatggctttcctgaagatcacagagwaaacgggaacagagacagtagcaaaaaccaagtcttcagtgcactctccttttggtctggccttggctcagagagttactgctccacagcatacaataaa

SEQ ID NO: 288266 - DNA, 201 bp, Homo sapiens
tgttatatgtaagaaaaaaacaaaatttgggagagaaaatggctttcctgaagatcacagagtaaacgggaacagagacagtagcaaaaaccaagtcttcrgtgcactctccttttggtctggccttggctcagagagttactgctccacagcatacaataaagctgcagctggctttagtagatgtttgtaccatgcact

SEQ ID NO: 288267 - DNA, 201 bp, Homo sapiens
aatcttcattacaagcctctaagcctcgcttgagatgtaggactcagataattgcatgaaagttaaacatccttctcccttcgctgtctcactcaaacttycacttttctctctagacaaattcttctctagaccaagtgtcttcccagaaaatatatgcaaaacagaaagcaacccaaaccaatccattataaatctctc

SEQ ID NO: 288268 - DNA, 201 bp, Homo sapiens
agccctagtggtgggctggagctgattcatagtgacttgcaaaagctgatatgcacgcttctgtccaactgtgtatttgttgatgtcatactggtagctaraaaatcatcatggtgagactgtatacaccttagaaatcagtaaacactatatgtcaatgctttatgtatttttttcagagtgctagttgtgaaatattta

SEQ ID NO: 288269 - DNA, 201 bp, Homo sapiens
tctttataattctagctcttgctaaagtcctataacaatatttccctcctcattccacatgcccaggaatagcagtgtcttcccgctattgctaggctcaratacctcaacatttctagtcattccagttaaccctaaccacgcctctatgagtagcgccttcattaaaatctttagcactttcggacccatagatacaga

SEQ ID NO: 288270 - DNA, 201 bp, Homo sapiens
aagttctaggctttggagtcagaacccaaagcactactcattggctaactctgttaccttgggcaacttcaactcctctgaattatagtttcctggtttcrtatataaatgatgtgcattatgaggttaaataagacagtctgtgtaacattcgcagcacataatatatgcccagtaaactggtaattaacaggtgtgctt

SEQ ID NO: 288271 - DNA, 201 bp, Homo sapiens
acaccctaacaacacagaagcagacgcagcccgtgttgggaatctgctgtcagagtgacagcaaacatttgctgtacattgaatgaatgaacataaacttyattaaactgtgagctcttagaaagtacagattctacaatcagttgttcaacaagcgagtgttaactacgagccaggcattatgttatgtgcagagaatac

SEQ ID NO: 288272 - DNA, 201 bp, Homo sapiens
gtgtggatttgggcccctcatcttcatttattatattatcaaaactgagagggtaagtattcagaccagatgtttagtatttgagtgataggttcactttmtagggaccagctgcagctccttctcttgaagattgccaccagtgcccctcccaccttggggctgtcctctgccttcccttcctctcttcttttatcttta

SEQ ID NO: 288273 - DNA, 201 bp, Homo sapiens
gcctcgttcgtaaggcgtgttcagaaaatgtttctatatatatgcatatatatattatattatatatatattctatatatatgcatatatattatattctmtatatatgcatatatattttatatatatgcatatatattatattctatatatatgcatatatattttatatatatatataattttaaagagctggtgttt

SEQ ID NO: 288274 - DNA, 201 bp, Homo sapiens
ttattcctttccagcaggagttaaaacagaaagttttcagtcacctttgtctatttttgttagttcatttgttttttaaaaagatgatgtttattgggttwagtattagcagaatacataaatcatttagtacgtttcctgtttgcgtgaattctatttatgttggtcacattttgcaaattaatgttaaaacctattaat

SEQ ID NO: 288275 - DNA, 201 bp, Homo sapiens
acactgactagtgtgctgtgtgcttcacgcggtgggtgcttaataaatattttaaaacagtattaaaatgttgaataaatttgacagcagtgctgcttctyatcatttcaaatgccaacactttctaggtcccttttctagcaaccatttcccaacatacctacgcgcccccagacgtttcagccaagctggggctctctt

SEQ ID NO: 288276 - DNA, 201 bp, Homo sapiens
tcccattagagttcgtgtattttgattatctggtgaatgatctacttaacagaaaggtagtccacattttcccagaaagtgtttgcattttgctttcaatrtatggttttatgggataatatatttctaatgactaaaatgtgagtaagatgtttttgaataggagcattttcttactgtgtctttagttcctcggattac

SEQ ID NO: 288277 - DNA, 201 bp, Homo sapiens
agaattgactatgggggaaaggacaggatcagggagactaggaggcttttgtagtaatccaatctctgttgattaccagggtggtggcagaaggcggtgakaaatggtagattccaggtgtattttaaaagtagagccaaccaggtttgctgatagactagatgtggtgtatgaaagaggagtcaaggatgactccaaggt

SEQ ID NO: 288278 - DNA, 201 bp, Homo sapiens
attaaaatcatttaacatgttagtggtaagtgatgagaaaaaaaataaagcaggggagatttggagtgtgtgtaagtagtaggggaggtaagcagctacartcttaggcccagggaagccctctgtttgaaggtgacatctgaataaagatctgaaagaagtggggtgagggacctagctctctaggaaggcagcctactc

SEQ ID NO: 288279 - DNA, 201 bp, Homo sapiens
atttattaatcaatacatgtaaattctcttgcctaatttttttttttttttcccttgagacaggatcttactctgtcacccaggctggagtgcagtggtaygatctcggctcactgcaacctctgcctcccgggctcaagctgtcctcccacctccgccttccaagtagctgggaccacagatgtgcgctaccatgtccgg

SEQ ID NO: 288280 - DNA, 201 bp, Homo sapiens
tgtcaatagtttctagaacagcagaagatattttgggactttgtatctagtagtgagtgcttacaccgttgaggaatttcagtctgattaaaaggaacggragcatttccatcataaggtttttttttttgtttttttttttttttaaacttctgagctgcagctgattatctcagggtaaattgttgtaatttagtttga

SEQ ID NO: 288281 - DNA, 201 bp, Homo sapiens
tttacaggataggaaagaaaaacttatccaggaaggaaaattggatcgaacatttcacctctcatattaagtctggcaatgatgactatatgtattcctgyctaaataaatcatctattaatcattaagtagtagtttctctttcttagtattaccttgattcaatgttaaaaactattaacaccctaacaacacagaagc

SEQ ID NO: 288282 - DNA, 201 bp, Homo sapiens
  misc_feature (1)...(201): n = A,T,C or G
ctttagttcctcggattactgtttcttcgcacactccctgggctttagacagtgggattgcaattaggtttggagtgtttcattctgtttgtcagttgtanggtgggttgtgccaaaatgcagtttttcttaccttttttatttatttatttttatctaatatagccaactggcagaatatattgtctttaatgtactttt

SEQ ID NO: 288283 - DNA, 201 bp, Homo sapiens
aacaggctcccacctgggaccttctgagaagccctgtggaatgtagaatttttcaaccagatgtgggaaaagcaaatgtttgtcttgtctccattggtcawgggttatcccatgcaattctcgtgtacatcagggtatggacatactctggaaaggctgacgatgtttttacaggcattacacatgcgggagaaaggaagc

SEQ ID NO: 288284 - DNA, 201 bp, Homo sapiens
aggtaaaattttgggaatcatcagcctttagatagattatttaaagttatctgaccagatgacatcatcaagggagtaaatgtagataggaaagaccagcraggtccaatattaagagattggggagatgaggaggaaaagagcaaagaaatgaagagagaatggccatagagttagcaggaaatccaagcaggtgtgggc

SEQ ID NO: 288285 - DNA, 201 bp, Homo sapiens
gtatctaggtgcccactcccggaccccacggtttgcgggcccgttttcctggggtggggcattcagtcttcgacggagtagggggtgcggcctggggggtkgggtggtcaggcttgatcaaccctgcagagggcagtgacccgggaggaagtcaccaggtgcagaggaccgtgccctgtggggacctgcctgcaggctgct

SEQ ID NO: 288286 - DNA, 201 bp, Homo sapiens
cccacggtttgcgggcccgttttcctggggtggggcattcagtcttcgacggagtagggggtgcggcctggggggtggggtggtcaggcttgatcaacccygcagagggcagtgacccgggaggaagtcaccaggtgcagaggaccgtgccctgtggggacctgcctgcaggctgctgacagtgggtaccaggtcggcctt

SEQ ID NO: 288287 - DNA, 201 bp, Homo sapiens
ttccctgagggctacctcagtgaccttctccttccactggagtatctgagctatttgttcccaagtcaatatctcagaggtcttgccatatacttagtggrggggtctacatcaggggtttccatgtaggttatttcatgagtctcttcacatgagtggttttcttccagggtacctcactgaggtaattgtgtttctacg

SEQ ID NO: 288288 - DNA, 201 bp, Homo sapiens
ctcttcacatgagtggttttcttccagggtacctcactgaggtaattgtgtttctacgatctcctaaaggggctatctccagcctccagcctctcttctcygggggttatctcaggcatctctgtacatcagaaggcatctttcctatgttatggaccttgaagttcttcccacactaaggaggctgtctcaggagtttct

SEQ ID NO: 288289 - DNA, 201 bp, Homo sapiens
aaatataggaaggatgcatcagagatccctgttggcagcaaggtctgcgagaaaggctctccaactctctttgcaagttgggtgctggctctgggatcccygtgcgtcatgtagtctacctggaggtctgcctcaagggtttcttcacaccagggcagggctctccatgatcaatagtcctgcaatggcagtcctttcttt

SEQ ID NO: 288290 - DNA, 201 bp, Homo sapiens
cagcctcttaagtagctgagaccatgggcatgcaccaccatgcctggctaatttttaaatttttttgtagagatgggagtctcactgtgttgcctgggctwgtcttgaactcctggcctcaagcaatcctcccacctcggcctcccaaagtgctggtattacaggcatgagccaccacgcccagccaaaaaaggaattata

SEQ ID NO: 288291 - DNA, 201 bp, Homo sapiens
tatggtccccattgcaactcttcaactctgctgcatgggagcagccataatgatatgcaaatacatgaatgtggctttgtaccaataaaactttatttacmaaaataaatgtggccagccgggtgcagtggctcacgcctgtaatcctagcactttgggaggctgaggcgggaggatcacttgagttcaggagtttgagac

SEQ ID NO: 288292 - DNA, 201 bp, Homo sapiens
gaggtagcagtgtgtgtgttatgtgccactgaccctgaaaaatgtgccatagcccaagccaattgaaattgatcagggggccaggcatggtggctcatgcytgtaatcccagcaccttgggaagctgaggtgggaggattgcttgaaaccaggagttcaagaccagcctgtgcaacatagcaaaaccccatctctacaaag

SEQ ID NO: 288293 - DNA, 201 bp, Homo sapiens
ctactgccatttctgcattggtgggaatgagaatagtgatgaagtagaaatgtctgccacagttccaggagagggaggtagcagtgtgtgtgttatgtgcyactgaccctgaaaaatgtgccatagcccaagccaattgaaattgatcagggggccaggcatggtggctcatgcctgtaatcccagcaccttgggaagctg

SEQ ID NO: 288294 - DNA, 201 bp, Homo sapiens
ctgtatagtgatttctactgccatttctgcattggtgggaatgagaatagtgatgaagtagaaatgtctgccacagttccaggagagggaggtagcagtgygtgtgttatgtgccactgaccctgaaaaatgtgccatagcccaagccaattgaaattgatcagggggccaggcatggtggctcatgcctgtaatcccagc

SEQ ID NO: 288295 - DNA, 201 bp, Homo sapiens
ctcccaaatagctggaactacaggcctgcaccactacacctggctcattttttaaaaatcttactctcatctttatggtttttgttgcccccctgcctgcytgcaggcttgcagggtggcccccgctccgacttcgacatggcctatgagcgtggccggatctccgtgtccctgcaggaagaggcctccggggggtccctg

SEQ ID NO: 288296 - DNA, 201 bp, Homo sapiens
acagcttccggctcctgtttgacgtggtggtcatcctcacctgctccctgtccttcctcctctgcgcccgctcactccttcgaggcttcctgctgcagaaygtgaggcttctgcgtcatgtgtgctggtgtcctccccgcctggccctggggcgataaaagccagggctttgagggtcctgtgcctggtcaggccctcacc

SEQ ID NO: 288297 - DNA, 201 bp, Homo sapiens
ccagtcaccagggcgaggccactgagggtccacggtctcctgtgtctcaggacgggaaggagtgtgtggtgaaggaagtggttcctggggacagcgtcaayagccttctcagcatcctggatgtcatcaccgtgagtgaccagtttctgaggcaggggggctggggtgcaaggtcccacccaagggactaggttgaaggaa

SEQ ID NO: 288298 - DNA, 201 bp, Homo sapiens
  misc_feature (1)...(201): n = A,T,C or G
cgctgcgtctccatgccaggggacatctcaggtttggagcactgggtctgcggggagggccatggagcttccaggtttgaatccaggtccaccgcctgccngtcttgattgttttaatctgcgaaatgggaacactgccagtacttccccaggcactgttttgtagatattcattgagatagtgcttctcccacctgttaa

SEQ ID NO: 288299 - DNA, 201 bp, Homo sapiens
cgctccgacttcgacatggcctatgagcgtggccggatctccgtgtccctgcaggaagaggcctccggggggtccctggcagcccccgctcgggtaaggcytgggaccctgcccggtggtggagcccgcaggggaaggtggctgggagggagcatcaggaggtcacaagcctgccccactcagacccccactcaggagcct

SEQ ID NO: 288300 - DNA, 201 bp, Homo sapiens
gcggcccctgggtgagtctgggtttccgttagcctcgcaggggtgtcccttcgagggtcgttagcgagcctccgctttcccacgatctgtcctccgattcytgttaactctagactttctgatgttcccataccccccacgtctcggcaggtgtttccacaccggtagccagctgtgccctgaggtggaagaggaccggcc

SEQ ID NO: 288301 - DNA, 201 bp, Homo sapiens
caccagggcagggctctccatgatcaatagtcctgcaatggcagtcctttcttttttgtttgtttgtttgtttgtttttgagatggagtcttgctctgtcrctaggctagagtgcactggcacgatctcggctcactgcaacctccacctcctcggttcaaaagattctcctgcctcagcctcccgagtagctgggactac

SEQ ID NO: 288302 - DNA, 201 bp, Homo sapiens
accaccatgcctggctaatttttaaatttttttgtagagatgggagtctcactgtgttgcctgggctagtcttgaactcctggcctcaagcaatcctcccrcctcggcctcccaaagtgctggtattacaggcatgagccaccacgcccagccaaaaaaggaattatatctgaatttcttgatttcactgagtttaactca

SEQ ID NO: 288303 - DNA, 201 bp, Homo sapiens
ggaggggccatctcagagaactttaggtctggggtcatagggtttttccataaagggccagatagtaaatgtttcaggctttgctggccacatatggtccycattgcaactcttcaactctgctgcatgggagcagccataatgatatgcaaatacatgaatgtggctttgtaccaataaaactttatttaccaaaataaa

SEQ ID NO: 288304 - DNA, 201 bp, Homo sapiens
gtgctagaagctgacctgaccgagggcgacctggctaactcccatctgccctctgaagtgctttatatgctcaagaacgtccggtcagtgttggggtgcargtgggggtggagggctgcagacgtggggccgccctgacctccagcctctgtcgcccaccgcctgtccaacagggtgctgggccacttcgagaagccactc

SEQ ID NO: 288305 - DNA, 201 bp, Homo sapiens
tttttcagttctgcatagagtcaacctgaccttgtccagccccacagggactccatagcggggtacccaggtctgactcctatctggtaccgaggaagctstggcctcgtccccaagggcccattggaattgctttaactagttaatcagtcgccagcatctccttatctcccaacctgctaatcctcctagtggctctga

SEQ ID NO: 288306 - DNA, 201 bp, Homo sapiens
ccaacctgctaatcctcctagtggctctgaggggcaggagcctgaacatgtgtctcccccaggggaccctgtgaagcccacatccctggaaaccccctcgscccctctgctgagccgctgcgtctccatgccaggggacatctcaggtttggagcactgggtctgcggggagggccatggagcttccaggtttgaatccag

SEQ ID NO: 288307 - DNA, 201 bp, Homo sapiens
cttgcaagcccacgccaccccaagcatcccaggactcttctgaaacgtgggtatcagacgccttccgcggatgccccggcagtactcccgtgcctcccagstcctgggtcttccccggggcaggcttgcgtcgggagccgagtatctaggtgcccactcccggaccccacggtttgcgggcccgttttcctggggtggggc

SEQ ID NO: 288308 - DNA, 201 bp, Homo sapiens
gatccagcgaggcagtggcaagaaggagctggtgggcgagtacggccgcggcgacctcatcggcgtggtgagcgcgacccccacccactgacctctggccytttccaggccagtccctcgacaactcacacacatcatcccgggtaatccagggagtggtgaatgcagctcccgacctctgaggtcacccagtccactccc

SEQ ID NO: 288309 - DNA, 201 bp, Homo sapiens
ctgatccctgccctttgactgtaagaccagcaccttctcccatagaagcagacctctctcatcctatcatttccaacctctaacccttgggtcctgtgacmcccaccccctaaccccaccctatgtcctctggacctgtcaacccttcacctgtgacccctgaaccttttgccctaggactccaactcctagatctctcct

SEQ ID NO: 288310 - DNA, 201 bp, Homo sapiens
atttaatcccagcattttgggaggccgaggtgggcagatcacttgaagtcaggagttcaagaccagcctggtcaacatggtgaaacctcatctctactaartatacaaaaattagctgggtgtggtggcacatgcctatagtcccagctacttgagaggctgcagcaggagaaatcgcttgaacctaggaggcagtggttg

SEQ ID NO: 288311 - DNA, 201 bp, Homo sapiens
taatgacttgacgttgaacagctttttatgtgcctattggccatttgtatatcttctttggagaagtttttattcagatcttttgcccattttactcttaytttttttagagacgggggtctcactatgttgcccaggctggtctccaactcctgggctgaaactatcaagcgatccttctgccttggcctcccaaaatgc

SEQ ID NO: 288312 - DNA, 201 bp, Homo sapiens
gagctggtgggcgagtacggccgcggcgacctcatcggcgtggtgagcgcgacccccacccactgacctctggccttttccaggccagtccctcgacaackcacacacatcatcccgggtaatccagggagtggtgaatgcagctcccgacctctgaggtcacccagtccactccccgcccagacctcatttcgttggaaa

SEQ ID NO: 288313 - DNA, 201 bp, Homo sapiens
cgtcactgcactccagcctgggtgacagagcaaaactctgtctctaagaaaaagaaagggccaggcatggtggctcatgcatttaatcccagcattttgggaggccgaggtgggcagatcacttgaagtcaggagttcaagaccagcctggtcaacatggtgaaacctcatctctactaagtatacaaaaattagctgggt

SEQ ID NO: 288314 - DNA, 201 bp, Homo sapiens
gagcatgctgggagggaagccttctttcctgagggatgctgggaaatggagttccgcgaagaaatcgtgcccctgagggtttcaaaccctaagtaggaccsaggtgcagagcattctggggaatggagttcgtgttcctgagcatgctgggaaacgaagtcctcgacccctggcgtgctagttaatgggctcgaaagtaaa

SEQ ID NO: 288315 - DNA, 201 bp, Homo sapiens
atggagttccgcgaagaaatcgtgcccctgagggtttcaaaccctaagtaggacccaggtgcagagcattctggggaatggagttcgtgttcctgagcatrctgggaaacgaagtcctcgacccctggcgtgctagttaatgggctcgaaagtaaatcagtggtgccggggagggagtcttaggcggtggacttggcgtag

SEQ ID NO: 288316 - DNA, 201 bp, Homo sapiens
cattctggggaatggagttcgtgttcctgagcatgctgggaaacgaagtcctcgacccctggcgtgctagttaatgggctcgaaagtaaatcagtggtgcyggggagggagtcttaggcggtggacttggcgtagtctgcccgggagtcagggcttgctggggaagtccacggcctggacgttgagagaaagggagtccta

SEQ ID NO: 288317 - DNA, 201 bp, Homo sapiens
tctcagccactcaggaggctgaggcgggaggattgattgcttgagcccggaggtcgaggctgcagtgagccgtgatcgtgccactgtactccagccgggaygacagagctagaacctgtttcagaaaaaataaaacagcaaacaaacaaaactccccataccatgatggaaaatagtctgtggattgttgtttaggactct

SEQ ID NO: 288318 - DNA, 201 bp, Homo sapiens
tactccagccgggatgacagagctagaacctgtttcagaaaaaataaaacagcaaacaaacaaaactccccataccatgatggaaaatagtctgtggattkttgtttaggactctgggcacctcgccttctgaagttacagcttgctgggagatgtagccccctgtttcagcctgtggcttcagtgagctagaacagaatg

SEQ ID NO: 288319 - DNA, 201 bp, Homo sapiens
aaaaaagaaagaaaaaaaaaagaaaagaaaaggaaagaaattacagatagagaatacaatatctagaagacaaaagagggtcatcttgccgtgtggctgamagagggagggaggaagggagggagaaagaggcttttctaaggacagtgagctgagacttgacaactaagatggggccagacatgaaagagaaaccagggg

SEQ ID NO: 288320 - DNA, 201 bp, Homo sapiens
gggcagcccaccgtattctgagagacatgactcaaaggattacacaaattcttgtaaaatcataagtgcttagtgtcacaaaggaaatgatcttggcactrcaaagtctggcttagacagggtggcacctctaagggcatgacctaagaaggaaggagggggaggaacaaactgggtgcaggtgggaggaaaggtcattct

SEQ ID NO: 288321 - DNA, 201 bp, Homo sapiens
aactaagatggggccagacatgaaagagaaaccaggggtgctgcacaggaggctggtggttttgaagcactgaggaggaaagcgatcaaggggagaggtgrtgggggttggggggtaagtcacataggggctaggggctgtggacaggcacttgagcttatttagattgttattgttagattggggaggaaggattccacc

SEQ ID NO: 288322 - DNA, 201 bp, Homo sapiens
aacaaactgggtgcaggtgggaggaaaggtcattctaggcagaaggaagagcttgtgcaaatgttgtgtggtgggaagaaataggttgatctctaagaaayaaaaaaggaagtcagtgggcctcaagtgaaacaatattttttgggggggtgtaatggttttattgagctataattcatgtactatacaatttacccattt

SEQ ID NO: 288323 - DNA, 201 bp, Homo sapiens
agattgttattgttagattggggaggaaggattccaccagtaaggaggcaacaagaggtctaggcaagatatgggagttgacagctggtctaggctgttastggagaaactgggaagcaacagctgggtcaaaagtagcttttcttttcttgtctttgtcttttcttttattttctttttaagacagggtctcgctctgta

SEQ ID NO: 288324 - DNA, 201 bp, Homo sapiens
taacccttgggtcctgtgacccccaccccctaaccccaccctatgtcctctggacctgtcaacccttcacctgtgacccctgaaccttttgccctaggacyccaactcctagatctctcctgcctgccctggctcttcctgtaattctgttttctgaacttctgatcctgcagtattcactaacatgtctgcttctcatgc

SEQ ID NO: 288325 - DNA, 201 bp, Homo sapiens
ggataggggctcaataaatggctacaaatcgccatctggcctcggaaggccatgaaccagccctgggtcggggtttcagggccttgtggcggcacccaggwtgtgtaggaaaatgtatcctaccattctgtccactgtccatatggggaaactgaggcccatcaagggttagtgacccgactaccagctgaaagtcaggaa

SEQ ID NO: 288326 - DNA, 201 bp, Homo sapiens
acgggcacctactcatggatggcggctacatcaacaatctgccaggcaagtggccgcccgcaccacccgcacacgcaagcacctcccgcaccacacacacrcacacgcgtgggcacacacagacaggctcgatgacgggacacatgcccaagctgcccatgcaggggtgcagacacacatgcgcacacatacgatcacttg

SEQ ID NO: 288327 - DNA, 201 bp, Homo sapiens
cctctgcctcccggattcaagtgattctcccacctcagcctccctcgaagctgggactacagtcacgtgccaccacgcctggctaatttttgtagttgcastagagatggggtttcaccatgtcggccaggctggtctcaaactcctggcctcaagtgatccactcgcctcagcctcccaaagtgctgggattacaggcgt

SEQ ID NO: 288328 - DNA, 201 bp, Homo sapiens
ggtcgtgacccgccttatccacctactgagccagaaaattctagggaatttgcagcagctgcaaggacccttcccaggtgagagccggccggcccagagcrtgctgggagatgtagtccggcgtccagagcatgctgggagggaagccttctttcctgagggatgctgggaaatggagttccgcgaagaaatcgtgcccct

SEQ ID NO: 288329 - DNA, 201 bp, Homo sapiens
  misc_feature (1)...(201): n = A,T,C or G
gcctcctactgcccctacctgcccccactgtgcgaccccaaggacgggcacctgctggtggacgggtgctacgttaacaacgtcccaggtcagcgagcccntcgggccggctgggcctccggcgtgtctgagcgtgtctgtgcgtgtttgtgtctgtgtgtcccaccgcgcaggctccctgtggcggtacgtgcgcgccag

SEQ ID NO: 288330 - DNA, 201 bp, Homo sapiens
gacgctactccttaacagtgacatcatccgggcacgcctgggggcctccgcactggataggtgtgtgttgcagaagggagtggggagggtggtgggtgggsctggagcctcaaattctttcagacctgagttcaagttctcggcttccaaccacggagcctgcgtcttacccataggtcaatggggagattcgcagtggtg

SEQ ID NO: 288331 - DNA, 201 bp, Homo sapiens
ggggcctccgcactggataggtgtgtgttgcagaagggagtggggagggtggtgggtggggctggagcctcaaattctttcagacctgagttcaagttctyggcttccaaccacggagcctgcgtcttacccataggtcaatggggagattcgcagtggtgtgaatctgcccaccggagcacggacttccatggtggggct

SEQ ID NO: 288332 - DNA, 201 bp, Homo sapiens
tgtggggccccagccaccagctcctagccatttgcatgggaccccagcctgaccccagcccccggttcctggccatgccttggctccctctgaccccgccrcccctctggcagttccgctcactctccatggtgtctgagtgcctgttctcgctcatcaatggggacgacatgtttgtgacgttcgccgccatgcaggcgc

SEQ ID NO: 288333 - DNA, 201 bp, Homo sapiens
ggagtttgtggggttcatgtggcggcagcggggacgggtcatcagcctgtgggagcggctggaatttgtcaatggctggtacatcctgctcgtcaccagckatgtgctcaccatctcgggcaccatcatgaagatcggcatcgaggccaaggtgcgtcctgccaacaccctgggccccaggtcccatccctgctgtcagtg

SEQ ID NO: 288334 - DNA, 201 bp, Homo sapiens
ccaggtctgactcctatctggtaccgaggaagctgtggcctcgtccccaagggcccattggaattgctttaactagttaatcagtcgccagcatctccttwtctcccaacctgctaatcctcctagtggctctgaggggcaggagcctgaacatgtgtctcccccaggggaccctgtgaagcccacatccctggaaacccc

SEQ ID NO: 288335 - DNA, 201 bp, Homo sapiens
tgaagtgctttatatgctcaagaacgtccggtcagtgttggggtgcaggtgggggtggagggctgcagacgtggggccgccctgacctccagcctctgtcrcccaccgcctgtccaacagggtgctgggccacttcgagaagccactcttcctggagctctgccgccacatggtcttccagcggctgggccagggtgacta

SEQ ID NO: 288336 - DNA, 201 bp, Homo sapiens
gcgcaagccccagcactgcctccgagatggtgagagtgggtggcccagggtcccctcacatcccccagagggtcatgagtacagtgtcaggcaggggagcsgggggcgtatttgagatcctgtgtgtgctgggtgctggctgacatgtgacgcatcagtgtcccgtgctgggtgacgtgtgtgtgaccttccctcgcagga

SEQ ID NO: 288337 - DNA, 201 bp, Homo sapiens
atgccagtctgtcccgtttgtcctgcacgttccctcaaacacgcagggatgtgcacacacgtagataggatgcggcacctctgaccgagttaagtcatgcytaccacctttatgggtgcaggtgagaagcgggcaggtacacaacttaaaatctcacaccccagaagtgtgcatatatgaacagacatgtacgccaactgc

SEQ ID NO: 288338 - DNA, 201 bp, Homo sapiens
acacacgtgtacacacaggcacatgtgcacagatgaacacgtgtgtcagtgaaatagggcatttgccaacgcatgccagtctgtcccgtttgtcctgcacrttccctcaaacacgcagggatgtgcacacacgtagataggatgcggcacctctgaccgagttaagtcatgcctaccacctttatgggtgcaggtgagaag

SEQ ID NO: 288339 - DNA, 201 bp, Homo sapiens
tggctggagatggcaggccagccccaatcccctcacctgtgccctgctccccgattccaggagaggagtcagattgtctgacagagtatgaggaggacgcyggacccgactgctcgagggatgaaggggggtcccccgagggcgcaagccccagcactgcctccgagatggtgagagtgggtggcccagggtcccctcaca

SEQ ID NO: 288340 - DNA, 201 bp, Homo sapiens
atgaggcaggggcactggccaattgatctcccaagcacagtgaatctgaatggttgtagagttgtgtaatggatcccactgaggtgatcagggcccaaagyggagggtagatggccaggttttaacaaaagagggaatagtagttgaggctgagggtccaggaccagagccatggctttctgtatggtagagtcaagactt

SEQ ID NO: 288341 - DNA, 201 bp, Homo sapiens
gtagttgaggctgagggtccaggaccagagccatggctttctgtatggtagagtcaagactttgggcaactgggggctgcagtctgggagcacaggagcargaatttcagataaggaggaagaggaagaagaggaggaggagggttcatctctctggacacaggttcgcaccacaaatctcatccattgggttcttagcag

SEQ ID NO: 288342 - DNA, 201 bp, Homo sapiens
  misc_feature (1)...(201): n = A,T,C or G
ggcacgcctgggggcctccgcactggataggtgtgtgttgcagaagggagtggggagggtggtgggtggggctggagcctcaaattctttcagacctgagntcaagttctcggcttccaaccacggagcctgcgtcttacccataggtcaatggggagattcgcagtggtgtgaatctgcccaccggagcacggacttcca

SEQ ID NO: 288343 - DNA, 201 bp, Homo sapiens
  misc_feature (1)...(201): n = A,T,C or G
ttcaagttctcggcttccaaccacggagcctgcgtcttacccataggtcaatggggagattcgcagtggtgtgaatctgcccaccggagcacggacttccntggtggggctttgggtgtctaagttcctcccagcaacggagctatgtggtctcggggagcacactgaccccaggccaaccccaggatgacgctgccccct

SEQ ID NO: 288344 - DNA, 201 bp, Homo sapiens
tgcccccttcccaccctagcatccaagagttccggctgtcagggtggctggcccagcaggaggatgcacaccgtatcgtactctaccagacggacgcctcrctgacgccctggaccgtgcgctgcctgcgacaggccgactgcatcctcattgtgggcctgggggaccaggagcctaccctcggccaggtcggaagcccgt

SEQ ID NO: 288345 - DNA, 201 bp, Homo sapiens
gggttggaggcctgctgaaatgagggcctgagtttctacattgtggtggccagattctgggccagcccagcaacctagataccccttttccctccaggggytctacccaattggccctgagccctagatcccccaaggcgggggcagggcggtagtggcagaaaagacatcattaagaaattacagaggcctggggcggtg

SEQ ID NO: 288346 - DNA, 201 bp, Homo sapiens
ggctgccttacttcaacgtgaccacagatatcaccgcctcagccatgcgagtccacaaagatggtgggtgtccccgcccagcctgcagcaaccgctgacgycacgtggggttggggggatgcttccgggagggccgctgagcttctgggacgttgttaacacgagtgaccgtccaccctggcccgatcaccgaccactaac

SEQ ID NO: 288347 - DNA, 201 bp, Homo sapiens
tcctactgcccctacctgcccccactgtgcgaccccaaggacgggcacctgctggtggacgggtgctacgttaacaacgtcccaggtcagcgagcccgtcrggccggctgggcctccggcgtgtctgagcgtgtctgtgcgtgtttgtgtctgtgtgtcccaccgcgcaggctccctgtggcggtacgtgcgcgccagcat

SEQ ID NO: 288348 - DNA, 201 bp, Homo sapiens
ccgccctgaccacacagaggccgcgccccttccctatttacacttcttagtgtccgccaccgctccttccttgatggagaccccctggatccgtctgcctyttctccaaggtctgaattagcaattcacccatctccgccttcattctcccaggtgtcacaatccacctcctccctcgtggatacctctgtctccgccacc

SEQ ID NO: 288349 - DNA, 201 bp, Homo sapiens
ccctccccgcaggagacaacagcttccggctcctgtttgacgtggtggtcatcctcacctgctccctgtccttcctcctctgcgcccgctcactccttcgmggcttcctgctgcagaacgtgaggcttctgcgtcatgtgtgctggtgtcctccccgcctggccctggggcgataaaagccagggctttgagggtcctgtg

SEQ ID NO: 288350 - DNA, 201 bp, Homo sapiens
caccatgcctggctaattgttgtgtatttttagtagagcagtgtttctccatgttggctaggctaaaaatagctttatttctgcctcgttttatgttcagktcccccattagacagaggaaccaaggccagaatgaggcaggggcactggccaattgatctcccaagcacagtgaatctgaatggttgtagagttgtgtaa

SEQ ID NO: 288351 - DNA, 201 bp, Homo sapiens
ctgaccccagcccccggttcctggccatgccttggctccctctgaccccgccgcccctctggcagttccgctcactctccatggtgtctgagtgcctgttstcgctcatcaatggggacgacatgtttgtgacgttcgccgccatgcaggcgcagcagggccgcagcagcctggtgtggctcttctcccagctctaccttt

SEQ ID NO: 288352 - DNA, 201 bp, Homo sapiens
tcggcttccaaccacggagcctgcgtcttacccataggtcaatggggagattcgcagtggtgtgaatctgcccaccggagcacggacttccatggtggggstttgggtgtctaagttcctcccagcaacggagctatgtggtctcggggagcacactgaccccaggccaaccccaggatgacgctgcccccttcccaccct

SEQ ID NO: 288353 - DNA, 201 bp, Homo sapiens
ctgcgacaggccgactgcatcctcattgtgggcctgggggaccaggagcctaccctcggccaggtcggaagcccgtgccccctgatctcacccacctcggvccccgtcctttgccctcccgtgcctgcaccaggccacgtgcaccctcgccataggggtaggcgatcagggacccaggtgtggccaggtggtggtggggcg

SEQ ID NO: 288354 - DNA, 201 bp, Homo sapiens
  misc_feature (1)...(201): n = A,T,C or G
tgcgacaggccgactgcatcctcattgtgggcctgggggaccaggagcctaccctcggccaggtcggaagcccgtgccccctgatctcacccacctcggcncccgtcctttgccctcccgtgcctgcaccaggccacgtgcaccctcgccataggggtaggcgatcagggacccaggtgtggccaggtggtggtggggcgg

SEQ ID NO: 288355 - DNA, 201 bp, Homo sapiens
agtgccaagtgagcacccgaggggcccctcttgggaggctgtatggtggggggcccaaatgcccgggtcccgaggcggcagagatggggatttgctggcgyctgttcgcggtaccccagctctggcagggtggagtctgcacagagctcggagtgcccctgtccccacctatccccagaaaccccagccccggatggcccc

SEQ ID NO: 288356 - DNA, 201 bp, Homo sapiens
cgcccggggaaggctcggcgggacggatttgcggtgcgcagccagtgccgttcgtccctcaggtgcttggcgtgatgatcggggccggagtggcggtggtrgtcacggccgtgctcatcctcctggtggtgcggaggctgcgagtgccaagtgagcacccgaggggcccctcttgggaggctgtatggtggggggcccaaa

SEQ ID NO: 288357 - DNA, 201 bp, Homo sapiens
cctcggccaggtcggaagcccgtgccccctgatctcacccacctcggcccccgtcctttgccctcccgtgcctgcaccaggccacgtgcaccctcgccatrggggtaggcgatcagggacccaggtgtggccaggtggtggtggggcggctggtgacctcagccgtccgtattccgcagctggagcagatgctggagaaca

SEQ ID NO: 288358 - DNA, 201 bp, Homo sapiens
ccctcccgtgcctgcaccaggccacgtgcaccctcgccataggggtaggcgatcagggacccaggtgtggccaggtggtggtggggcggctggtgacctcmgccgtccgtattccgcagctggagcagatgctggagaacacggctgtgcgcgcccttaagcagctagtcctgctccaccgagaggagggcgcgggcccca

SEQ ID NO: 288359 - DNA, 201 bp, Homo sapiens
tctagccatctttgtgggtgtgaagtgtagtatctcattgtggttttgctttgcatttctctaatgacttgacgttgaacagctttttatgtgcctattgrccatttgtatatcttctttggagaagtttttattcagatcttttgcccattttactcttattttttttagagacgggggtctcactatgttgcccaggct

SEQ ID NO: 288360 - DNA, 201 bp, Homo sapiens
ctgggtaaccactttgggacctcctgtctactgaccctaacccataacccccaacgagagcacccagggcccttggtgaccaccttgtggatggccttggrtgaccacatcatccctaagtgttccttttttttttttttttttttttttttgagactgagtcttgctctgtcacccaggctggagtgcagtggcacaatc

SEQ ID NO: 288361 - DNA, 201 bp, Homo sapiens
atgctttctctcaggggcaggtagggcttacacacacgtgtacacacaggcacatgtgcacagatgaacacgtgtgtcagtgaaatagggcatttgccaaygcatgccagtctgtcccgtttgtcctgcacgttccctcaaacacgcagggatgtgcacacacgtagataggatgcggcacctctgaccgagttaagtcat

SEQ ID NO: 288362 - DNA, 201 bp, Homo sapiens
tgggagatgtagtccggcgtccagagcatgctgggagggaagccttctttcctgagggatgctgggaaatggagttccgcgaagaaatcgtgcccctgagrgtttcaaaccctaagtaggacccaggtgcagagcattctggggaatggagttcgtgttcctgagcatgctgggaaacgaagtcctcgacccctggcgtgc

SEQ ID NO: 288363 - DNA, 201 bp, Homo sapiens
ctgcgcccgcccatcgactgcttcaagaccatggactttgggaagttcgaccagatctatgtgagtgggcaggagtggcatggtgcctgcataggtggtcyggctaagctttgctacttaaagcccagagtggtatgagggggaggaatccaggaggaatccaggaatcccatctggaatctctggaaaacagatcagtga

SEQ ID NO: 288364 - DNA, 201 bp, Homo sapiens
taagaactttctccttataggccagctgcacccctggaagcactgtatagtgatttctactgccatttctgcattggtgggaatgagaatagtgatgaagyagaaatgtctgccacagttccaggagagggaggtagcagtgtgtgtgttatgtgccactgaccctgaaaaatgtgccatagcccaagccaattgaaattg

SEQ ID NO: 288365 - DNA, 201 bp, Homo sapiens
caagtggatgtacgtacaagagggacaggtgcacacgtccacacacacatcaggggacatgcaggtggaatgcaacactcgtgtgcacaccagctatataygcacatgctttctctcaggggcaggtagggcttacacacacgtgtacacacaggcacatgtgcacagatgaacacgtgtgtcagtgaaatagggcatttg

SEQ ID NO: 288366 - DNA, 201 bp, Homo sapiens
tggatgtacgtacaagagggacaggtgcacacgtccacacacacatcaggggacatgcaggtggaatgcaacactcgtgtgcacaccagctatatatgcamatgctttctctcaggggcaggtagggcttacacacacgtgtacacacaggcacatgtgcacagatgaacacgtgtgtcagtgaaatagggcatttgccaa

SEQ ID NO: 288367 - DNA, 201 bp, Homo sapiens
ctctgctgacttcagagagttcccaccctaggatctcctctgagcccccaatgcaccactgggccccccaggggccccaagactctgtgggccccccctargagcctcaccagtgtcaccccacaggtgcttgccttcccaagctctggcttcactgacttggcagagattgtgtcccggattgagccccccacgagctat

SEQ ID NO: 288368 - DNA, 201 bp, Homo sapiens
gtcagtgaaatagggcatttgccaacgcatgccagtctgtcccgtttgtcctgcacgttccctcaaacacgcagggatgtgcacacacgtagataggatgyggcacctctgaccgagttaagtcatgcctaccacctttatgggtgcaggtgagaagcgggcaggtacacaacttaaaatctcacaccccagaagtgtgca

SEQ ID NO: 288369 - DNA, 201 bp, Homo sapiens
gctatgtctctgatggctgtgctgacggtgaggggcccaggggacccccaagagggaggggagtggctggagatggcaggccagccccaatcccctcaccygtgccctgctccccgattccaggagaggagtcagattgtctgacagagtatgaggaggacgccggacccgactgctcgagggatgaaggggggtcccccg

SEQ ID NO: 288370 - DNA, 201 bp, Homo sapiens
agtcatgcctaccacctttatgggtgcaggtgagaagcgggcaggtacacaacttaaaatctcacaccccagaagtgtgcatatatgaacagacatgtacrccaactgcacacatgctcacaatcttgtaggccaggggtgggcaaactatggcccacaggctgagtcctgccctctgtttgattgtataaataaagcttt

SEQ ID NO: 288371 - DNA, 201 bp, Homo sapiens
agtttgagacccgcctggccaacatggtgaaaccccgtctctactaaaaatacaaaaaattaaccaggctggtggggtgtgcctgtaatcccagctactcrggaggctgaggcagataaatcacttgaacctgggagttggaggttgcagtgagctgagatcatgctactgcactccagcctgggcgacagagcaagactc

SEQ ID NO: 288372 - DNA, 201 bp, Homo sapiens
agaccttaatgagagccgccgtgcagacgtaagcctgtgatgcccccagggccactctgactccactgattacagaacccaagcccccttaaagtctcccygaaacctcagatgaccccacatgtccctgggttttgctgagctctcagacctctgctgacttcagagagttcccaccctaggatctcctctgagccccca

SEQ ID NO: 288373 - DNA, 201 bp, Homo sapiens
gaattcgaggccagcctggccaacatggtgaaacccggtttctactaaaaatacaaaaattagctgggcgtggtggtgtatgcctctaatcccagctactygagaggctgaggcaagagagttgcttgaacccgggaggtggaggttgcatcgagcccagatcgtgccattgcactccagcctgggcgacagagtgagact

SEQ ID NO: 288374 - DNA, 201 bp, Homo sapiens
aggtcaggagtttgagacccgcctggccaacatggtgaaaccccgtctctactaaaaatacaaaaaattaaccaggctggtggggtgtgcctgtaatcccmgctactcaggaggctgaggcagataaatcacttgaacctgggagttggaggttgcagtgagctgagatcatgctactgcactccagcctgggcgacagag

SEQ ID NO: 288375 - DNA, 201 bp, Homo sapiens
tgggcgtggtggtgtatgcctctaatcccagctacttgagaggctgaggcaagagagttgcttgaacccgggaggtggaggttgcatcgagcccagatcgygccattgcactccagcctgggcgacagagtgagactctgtctcagaaaataaaacaaaacctcccaacacctgacccccctcctcaacttcagttgcatc

SEQ ID NO: 288376 - DNA, 201 bp, Homo sapiens
tggtgaccaccttgtggatggccttgggtgaccacatcatccctaagtgttccttttttttttttttttttttttttttgagactgagtcttgctctgtcrcccaggctggagtgcagtggcacaatctcggctcactgcaacctccacctcccaggttcaagtgatttatccgcctcagcctcatgagtagctgggatta

SEQ ID NO: 288377 - DNA, 201 bp, Homo sapiens
ctccagcctgggcgacagagtgagactctgtctcagaaaataaaacaaaacctcccaacacctgacccccctcctcaacttcagttgcatcatttgcacgyctgtgcatgacagcatggtgtttgcatgtgtgggtattctctcttttttttttgcgtgatcatttgcatgatggcatctgtgggactgggttgaacatct

SEQ ID NO: 288378 - DNA, 201 bp, Homo sapiens
ctacccaattggccctgagccctagatcccccaaggcgggggcagggcggtagtggcagaaaagacatcattaagaaattacagaggcctggggcggtggstcacgcctgtaatctcagcactttgtgaggctgaggcaggtgaatcacttgaggtcaggggttcgagaccagcctggccaacgtggtgaaactcatctct

SEQ ID NO: 288379 - DNA, 201 bp, Homo sapiens
ccccacagggactccatagcggggtacccaggtctgactcctatctggtaccgaggaagctgtggcctcgtccccaagggcccattggaattgctttaackagttaatcagtcgccagcatctccttatctcccaacctgctaatcctcctagtggctctgaggggcaggagcctgaacatgtgtctcccccaggggaccc

SEQ ID NO: 288380 - DNA, 201 bp, Homo sapiens
gggagactggggcggggcctgggagggctgaggacaggctcgaaggtcagggtacccctgggggatccgccggaccccgccctcatgctcctgggtcgcgrctatctcccccatcccagcatgagctctacgagaaggttttctccaggcgcgcggaccggcacagcgacttctcccgcttggcgagggtgctcacgggga

SEQ ID NO: 288381 - DNA, 201 bp, Homo sapiens
ccgcctcatctcctggccagggccgagaggtcggtttgctccatcccttagtcccgcagcgcccctctagcctcgcccctggcagctggagacgcttcccscgccaccccagagggcagggcttgagctgggggcagggcttgaggcaggggagaggtgggcccagattgacgacttgcacgggttccttcgactccttga

SEQ ID NO: 288382 - DNA, 201 bp, Homo sapiens
gaggctccgctgcaaactggaatggtaaggggtggggcggagaccgggtaggtgccggcgtggggcgccaagaggactacaactcccggcgtgctcagcgsgcattacgtggtctggcgataacgcgctgcgtccgctcgggcggaactacgtttcccggcatgcactgcgggccgccgggcctcagggaagagtcgcgcc

SEQ ID NO: 288383 - DNA, 201 bp, Homo sapiens
gaaacctcagatgaccccacatgtccctgggttttgctgagctctcagacctctgctgacttcagagagttcccaccctaggatctcctctgagcccccartgcaccactgggccccccaggggccccaagactctgtgggccccccctaagagcctcaccagtgtcaccccacaggtgcttgccttcccaagctctggct

SEQ ID NO: 288384 - DNA, 201 bp, Homo sapiens
  misc_feature (1)...(201): n = A,T,C or G
tggtgtttgcatgtgtgggtattctctcttttttttttgcgtgatcatttgcatgatggcatctgtgggactgggttgaacatctctgccccgggcccccnaggggagcagcccgctgacccccctggccccacagcggacatcgcccgcagcatgggtgccaaaacggtcatcgccattgacgtggggagccaggatgag

SEQ ID NO: 288385 - DNA, 201 bp, Homo sapiens
  misc_feature (1)...(201): n = A,T,C or G
tgcgcccgcccatcgactgcttcaagaccatggactttgggaagttcgaccagatctatgtgagtgggcaggagtggcatggtgcctgcataggtggtccngctaagctttgctacttaaagcccagagtggtatgagggggaggaatccaggaggaatccaggaatcccatctggaatctctggaaaacagatcagtgat

SEQ ID NO: 288386 - DNA, 201 bp, Homo sapiens
gcagtgagccaagattgtgccactgcactccagcctgggtgacagagtgagactctgtctcaaaaaataatattaattttaaaaattaaagataaaaatawtaaaaatttttttaaaaagaaagaaattgatcagtagctgcagcccagaagccctgagtctgagaagagatgtgtgatgtcccttgtgggctcactggga

SEQ ID NO: 288387 - DNA, 201 bp, Homo sapiens
  misc_feature (1)...(201): n = A,T,C or G
atcaccaccttgtgttatttgctacccagcaccctgcatggggctgtgtgggaaagaacatggagagattgattggtaatgtctgtcaagggcaggacagnggatgtgtaggcgagtgtgctatgtgcagctgactctgaaataggtttagtctcaaatgcaactcccccagagaatcaggcttttgaggggccagagaat

SEQ ID NO: 288388 - DNA, 201 bp, Homo sapiens
  misc_feature (1)...(201): n = A,T,C or G
gagctatgtctctgatggctgtgctgacggtgaggggcccaggggacccccaagagggaggggagtggctggagatggcaggccagccccaatcccctcanctgtgccctgctccccgattccaggagaggagtcagattgtctgacagagtatgaggaggacgccggacccgactgctcgagggatgaaggggggtcccc

SEQ ID NO: 288389 - DNA, 201 bp, Homo sapiens; identical to SEQ ID NO: 59087

SEQ ID NO: 288390 - DNA, 201 bp, Homo sapiens
attgctgcaccccaggagtgccataaaacccgtggttccaacctaacctgatcccatgggggagcctccggggtcagggtgacccttcctgattaaatctrtgatccccagctgtccggacttttatagataagcttctaggactctgggtaaccactttgggacctcctgtctactgaccctaacccataacccccaacg

SEQ ID NO: 288391 - DNA, 201 bp, Homo sapiens
tggccaggctggtgccgaactcctggcctcaagtgatcccccctgcctggcctcccaaagcgctgggattacagccgtgagccaccgcgccctgcgccttyatatttttcttaacccttcctttcttctttaattttttcctgtgggggcatgttgacctgagctggggtccacgctgtccgggttctgtgttcatcacat

SEQ ID NO: 288392 - DNA, 201 bp, Homo sapiens
cctgacctcttgatccgcctgcctcagcctcccaaagttctgggattacaggcgtgagccaccgtgcctggccttcttcttcttcttcttttttttttttttaagacagtgtctcactctgtcgcccaggctggagtgcaatggcatgatctcagctcactgcaacctcagccttccaggttcaggcaattctcttgcctc

SEQ ID NO: 288393 - DNA, 201 bp, Homo sapiens
atggtctcgatctcctgacctcttgatccgcctgcctcagcctcccaaagttctgggattacaggcgtgagccaccgtgcctggccttcttcttcttcttcttttttttttttttaagacagtgtctcactctgtcgcccaggctggagtgcaatggcatgatctcagctcactgcaacctcagccttccaggttcaggca

SEQ ID NO: 288394 - DNA, 201 bp, Homo sapiens
caccacacccggctaattttttgtattttcagtagagacggggtttcaccgtattagccaggatggtctcgatctcctgacctcttgatccgcctgcctcrgcctcccaaagttctgggattacaggcgtgagccaccgtgcctggccttcttcttcttcttcttttttttttttttaagacagtgtctcactctgtcgcc

SEQ ID NO: 288395 - DNA, 201 bp, Homo sapiens
ctgacctcttgatccgcctgcctcagcctcccaaagttctgggattacaggcgtgagccaccgtgcctggccttcttcttcttcttctttttttttttttwaagacagtgtctcactctgtcgcccaggctggagtgcaatggcatgatctcagctcactgcaacctcagccttccaggttcaggcaattctcttgcctca

SEQ ID NO: 288396 - DNA, 201 bp, Homo sapiens
atttttatatttatttatatttatatatagatggtgcttatatccaaagtctttattctctccttcatgtttctttcttttctttttttttttctgagacrgagtctcgctctgtcgcccacgctggagtgcagtggcgcgatctcggctcattgcaagctccgcctcccgggttcacgccattctcctgcctcagcctcc

SEQ ID NO: 288397 - DNA, 201 bp, Homo sapiens
aaaaaaaatttttatatttatttatatttatatatagatggtgcttatatccaaagtctttattctctccttcatgtttctttcttttctttttttttttytgagacagagtctcgctctgtcgcccacgctggagtgcagtggcgcgatctcggctcattgcaagctccgcctcccgggttcacgccattctcctgcctc

SEQ ID NO: 288398 - DNA, 201 bp, Homo sapiens
gaacccaggagacaggttgcagtgagctgagatcgcacccctgcactccagcctgtgcaacagagtgagaccctgtctcaaaaaaaaaaaaaaaaaaaaaagtgggcagggaaaacccttagtggtccctgcccttgggcagcccaccgtattctgagagacatgactcaaaggattacacaaattcttgtaaaatcataa

SEQ ID NO: 288399 - DNA, 201 bp, Homo sapiens
agccatcgcgcccggctaaaaaaaatttttatatttatttatatttatatatagatggtgcttatatccaaagtctttattctctccttcatgtttctttyttttctttttttttttctgagacagagtctcgctctgtcgcccacgctggagtgcagtggcgcgatctcggctcattgcaagctccgcctcccgggttca

SEQ ID NO: 288400 - DNA, 201 bp, Homo sapiens
agccaggatggtctcgatctcctgacctcgtgatccgcctgcctcaggcctcccaaagtgttgggattacaggcatgagccatcgcgcccggctaaaaaawatttttatatttatttatatttatatatagatggtgcttatatccaaagtctttattctctccttcatgtttctttcttttctttttttttttctgagac

SEQ ID NO: 288401 - DNA, 201 bp, Homo sapiens
cgcgatctcggctcactgcaagctcctcctcccgggttcacgccattttcctgcctcagactcccaagtagctgggactacaggcgcccggcaccacgccyggctaattttttgtacttttagtagagacgtggtttcaccgtgttagccaggatggtctcgatctcctgacctcgtgatccgcctgcctcaggcctccca

SEQ ID NO: 288402 - DNA, 201 bp, Homo sapiens
agtgcagtggcgcgatctcggctcactgcaagctcctcctcccgggttcacgccattttcctgcctcagactcccaagtagctgggactacaggcgcccgscaccacgcccggctaattttttgtacttttagtagagacgtggtttcaccgtgttagccaggatggtctcgatctcctgacctcgtgatccgcctgcctc

SEQ ID NO: 288403 - DNA, 201 bp, Homo sapiens
tttttttttttgagacggagtctcgctcagtcgcccaggctggagtgcagtggcgcgatctcggctcactgcaagctcctcctcccgggttcacgccattytcctgcctcagactcccaagtagctgggactacaggcgcccggcaccacgcccggctaattttttgtacttttagtagagacgtggtttcaccgtgttag

SEQ ID NO: 288404 - DNA, 201 bp, Homo sapiens
ttttacatttccactgacagtgtatgtgaattccagtctctctacattctctctaaccctttgtaattctagccatctttgtgggtgtgaagtgtagtatstcattgtggttttgctttgcatttctctaatgacttgacgttgaacagctttttatgtgcctattggccatttgtatatcttctttggagaagtttttat

SEQ ID NO: 288405 - DNA, 201 bp, Homo sapiens
tttttcctgaatattttagatccaaggttggttgaatcctgggtatatggaacatatatatatatatacacacacatatatatacacacatatatatatakagagagagatgctgctcatctatatataatctatgtaaaaaaatttttctttttttttttttttttttgagacggagtctcgctcagtcgcccaggctgg

SEQ ID NO: 288406 - DNA, 201 bp, Homo sapiens
ttgagaggccaaggcggttggatcactgaggtcaggagttcaagaccagcctggccaacatggtgaaaccccgtctctactaaaaatacaaaaattagccrggcgtgtggcaggcacctttaatctcagctacttgggaggccgaggcaggagaatcacttgaactctggaggcagaggttgcagtgagccgagtttgtat

SEQ ID NO: 288407 - DNA, 201 bp, Homo sapiens
tttgtatttttagtagaaacacggtttcaccatattggtcaggctggtcttgaactcctgacctcaagtgatccatccgcctcagcttcccaaagtgctgsgattacagatgtgagccaccatggccagcctctatttttaatttttttaagcactgtgtgtttgtttgtttctttgctagactgttttccaaagcagcgg

SEQ ID NO: 288408 - DNA, 201 bp, Homo sapiens
acgctgccacgcccagctaatttttgtatttttagtagaaacacggtttcaccatattggtcaggctggtcttgaactcctgacctcaagtgatccatccrcctcagcttcccaaagtgctgggattacagatgtgagccaccatggccagcctctatttttaatttttttaagcactgtgtgtttgtttgtttctttgct

SEQ ID NO: 288409 - DNA, 201 bp, Homo sapiens
agtcccagctactcgggagcctgaggcaggagaatcacttgaacccaggagacaggttgcagtgagctgagatcgcacccctgcactccagcctgtgcaasagagtgagaccctgtctcaaaaaaaaaaaaaaaaaaaaaagtgggcagggaaaacccttagtggtccctgcccttgggcagcccaccgtattctgagaga

SEQ ID NO: 288410 - DNA, 201 bp, Homo sapiens
caggagttcgagaccatcctggccaacatggtgaaaccccatttctactaaaaattcaaaaattagtcaggcacgatggcgggcgcctgtagtcccagctmctcgggagcctgaggcaggagaatcacttgaacccaggagacaggttgcagtgagctgagatcgcacccctgcactccagcctgtgcaacagagtgagac

SEQ ID NO: 288411 - DNA, 201 bp, Homo sapiens
atcacttgaggtcaggagttcgagaccatcctggccaacatggtgaaaccccatttctactaaaaattcaaaaattagtcaggcacgatggcgggcgcctstagtcccagctactcgggagcctgaggcaggagaatcacttgaacccaggagacaggttgcagtgagctgagatcgcacccctgcactccagcctgtgca

SEQ ID NO: 288412 - DNA, 201 bp, Homo sapiens
tggagtgcagtggcacaatctcagctcactgcaacctccgcctcctgggttcaagcaattctcctgcctcagcctcccgagtagctgggattacagggttstgccaccacgcctggctactttttatatttttagtagagatggggttttgccatgttggccagccttgtctcaaactcctgacctcaggtgatccgcctg

SEQ ID NO: 288413 - DNA, 201 bp, Homo sapiens
ggcggcctcagtcggccttccaagcatggcgcggggaggaggggtgggagggtcgggagggactgcggtgcgactaggagtgaataatttaaaggggccgygcctgcggagccgggcggaacgctagcggtgttggcgcggagtggaccccggctgcggcccctgggtgagtctgggtttccgttagcctcgcaggggtgt

SEQ ID NO: 288414 - DNA, 201 bp, Homo sapiens
agccagggtggtctcgatctcctgacctcgtgatccgcccgcctaggccttccaaagtgctgggattacaggcgtgagccactgcgcccggcctttttttktttgttttgagacagagtcttgctgttgtcacccaggctggagtgcagtggcacaatctcagctcactgcaacctccgcctcctgggttcaagcaattct

SEQ ID NO: 288415 - DNA, 201 bp, Homo sapiens
accccatctctactaaaaatgcaaaattagctgggcgtggtggcacatgcctgtaatcccagctactagggaggctgaggcaggagaatcgcttgaacccwggaggtggaggttgcagtgagccgagatcgcaccattgcactccagcctgggaaacaagagcaaaacttcgtctcaaaaaaaaaaaaaaaaaaaaaaagg

SEQ ID NO: 288416 - DNA, 201 bp, Homo sapiens
gcaatggcgccaccatcggtcccggagtcccagtgatgctctgtgccatagagcccccataacttcactactacgtgatagtaaatccccggcaaaaaccmgcagcgccttgcaagcccacgccaccccaagcatcccaggactcttctgaaacgtgggtatcagacgccttccgcggatgccccggcagtactcccgtgc

SEQ ID NO: 288417 - DNA, 201 bp, Homo sapiens
gagccgagtatctaggtgcccactcccggaccccacggtttgcgggcccgttttcctggggtggggcattcagtcttcgacggagtagggggtgcggcctkgggggtggggtggtcaggcttgatcaaccctgcagagggcagtgacccgggaggaagtcaccaggtgcagaggaccgtgccctgtggggacctgcctgca

SEQ ID NO: 288418 - DNA, 201 bp, Homo sapiens
cgacgtggatgacataatttctattcaaaatgattataaaatacagaatatagtgcttgagagagacacgttagccatctaaggaaaagaaaatcaatatyggtaacacttcaattacaaagttggataaatggagcattattacattttttttctattgagacatatctttatggttggtctccaattaatggtggcttt

SEQ ID NO: 288419 - DNA, 201 bp, Homo sapiens
ttacaggagtacatctaatggtcccttactaggttgtgtagtatgctttttctggagtaacttaataacgtaatattcattcatagtccattcagaagtcktcattcttcctatggtggcagtgagatatacttaattctttgaggtggacaatgaacgttttcaggcaaaattaaaaaaaaaaatgtttaaaaatcagaa

SEQ ID NO: 288420 - DNA, 201 bp, Homo sapiens
tatatatgtgataacccagtgatttgaatctagttcttctaactccagcctagtagcagtctctcctactaactccatgcacttgtgtttgactggtatawactgttactccattctctattacatatctgattaaatgtttctgccctgtcttcgtgatctgtgcatataaatccatgtcagtgtctttattaagaatat

SEQ ID NO: 288421 - DNA, 201 bp, Homo sapiens
gtctttatatcctaatgtttggatgtgtctttgctaaagtctcacaaaaattagtggtaagaaatttttattattcatgatataaataatatacttagtcrtcaaacacaaagctggaaattatttcataaaatgtataggttttcttttgtagtgtaaaatcataataattagctatttgtgctccaagcaaaactgtga

SEQ ID NO: 288422 - DNA, 201 bp, Homo sapiens
atttttagccagtttaaaacgtgtgtgaatatcaaactggaatcagacatctgtggcactgtattatgtctctgtcaccctcaggttctatgaaaccttgraaagcacaactcaggtttgtatactcctgtaggccatacactacatcacactgttctttaggcctcttgcacaaaatagatggtcagaaaatgtctacat

SEQ ID NO: 288423 - DNA, 201 bp, Homo sapiens
tagtgatatataaatataccgaagtacaccaaaacaaaaccccccaaaaccctgcagtgaatcttttgataattcaaataatctcaccgtatttgttagakttggatatttaaaaaaatctgtatctattctgtgcatggattacaggagtacatctaatggtcccttactaggttgtgtagtatgctttttctggagtaa

SEQ ID NO: 288424 - DNA, 201 bp, Homo sapiens
cgtaacgagtaattggcctggtttacacctgtgatggagactggtaaactgaggaagtcaaattcaatttttatttaaaacactatgtggatgacaaaaamaaaaaaaaaaagccacacacacaatgtggtacttttcaagtaagcttttaacataaatgatagagattttcccctcatgggtgagaattccctctccaag

SEQ ID NO: 288425 - DNA, 201 bp, Homo sapiens
aaaattaagtccattaaaaacacagtatgaggccaggagttcaagaccagcctgggtaacttagcaagaccttgcctctacaaaaattctgtaaaactttwgccaggcatggtggcatgcacctgtagtcccagctactcaggaggctgaggcaggagggtcaactgaacccaggagttcaaggctgcaatgagccattat

SEQ ID NO: 288426 - DNA, 201 bp, Homo sapiens
tgggttctgttactttctagtttctgtattttagtcgtcttttttacctctgagcctcagtgtctataactgtgaaataacctgcattttccagaggactwcagtgaggtccaaatttgaaatgtattaaagtgctttaaaatgtagtatttttggtgaagaattttaggttaaggtttgatatttgggggagaaacagaa

SEQ ID NO: 288427 - DNA, 201 bp, Homo sapiens
gtttcataaaagttggctcttaggaggccactgtcataaattcaagcttttttgcaaaagaagaacatttctgaagaaacagttgtcctgttaccacaacstaagtccaccatactggctaactgactcacactttctgctcatagtgttaagaataataataataaggatatcaatagtcaacaactaacagtcattcaa

SEQ ID NO: 288428 - DNA, 201 bp, Homo sapiens
caatcctataaaatagatattattagtattatgctttataaataagtcttagggtgattaagtaatttgtccaaggacacatgagaagtgctggagctagraattaaacagactgattccagactgtatgtaatcactaagctatatatctagtaaaaatagtaagtgatacaaaactaaacatagttttgtggtaaacat

SEQ ID NO: 288429 - DNA, 201 bp, Homo sapiens
agcacagtgctttacatcaaacagatgcttataattttgcatcaaacagatgcaattatttagaaaacaaacatttgtttgttttctaaattattggctgyaggaatgaaataacacaatgtgatgtcaagagatgatgtttttcaacccttattcagttttagctgttcttgggttaaatacctagcaattgtttggcct

SEQ ID NO: 288430 - DNA, 201 bp, Homo sapiens
ggctcttccaccacagacctgctgggtctgtgttcccacagataaaatagaaaataatgcctgccaaaacaacttgacaaggatgcagtgaggaccaaatratatatatgcagataaatgtaaaagattgcgatgtgcctaacaaattaaaaatatcactcaacacattaaaaatattactgttatcagacaacatcctga

SEQ ID NO: 288431 - DNA, 201 bp, Homo sapiens
aattctaacactatatccttatgaaagttatcttccttttcctaagtcaaatcaaccactctgaattcccatgataatgacaataactaacttttactggrtttttactgtgtatcagggatgattttaagtcacttttattctttcattgactcctctcaacaaccttatgaataaggtactattagtatcatcatttta

SEQ ID NO: 288432 - DNA, 201 bp, Homo sapiens
caggctggtctcgaactcctgacctcaagtgatccgcctgcctcggcctcccaaagtgctggtatttacaggagtgagccactgcaccaggcttattatayatttcttaatagacattcccattgtcatttgccattgctattcatttacatattacatatgaaaaagtaagctgctttagtttttggctgttttgctgcc

SEQ ID NO: 288433 - DNA, 201 bp, Homo sapiens
tttcaccatattggccaggctggtctcgaactcctgacctcaagtgatccgcctgcctcggcctcccaaagtgctggtatttacaggagtgagccactgcrccaggcttattatatatttcttaatagacattcccattgtcatttgccattgctattcatttacatattacatatgaaaaagtaagctgctttagttttt

SEQ ID NO: 288434 - DNA, 201 bp, Homo sapiens
aatggattggtatgcttattatgtatttcttttctttttttttttttttgagacagagtctcgctctgtcacccaggctggagggcaatgtggtgatctcrgctcactgcaacctctgcctcctgggttcaagcgattcccttgcctcagcctcctgaatagctgggactacacgtgcctgccaccacgcccggctaattt

SEQ ID NO: 288435 - DNA, 201 bp, Homo sapiens
ctgtgaaataacctgcattttccagaggactacagtgaggtccaaatttgaaatgtattaaagtgctttaaaatgtagtatttttggtgaagaattttagrttaaggtttgatatttgggggagaaacagaatagtgctacttgagaaaagatagatcataatcgattttatattttcttttttgcttctaaaggtgattt

SEQ ID NO: 288436 - DNA, 201 bp, Homo sapiens
atgtctatggaaactaaaaaaactacagtgactattagtacctcaataaagaagactattggaattttccctgctttttaagtgaaattgacctgggagtrtttaaatttgccttaaatcatatggttgtttttattataatttttccttatgtacacaagtagtgggtaattattgtgaaaaaacttcagactttacagg

SEQ ID NO: 288437 - DNA, 201 bp, Homo sapiens
ttaattcttaatgattcttaaactttgtttctttcagtatttatggcagtgggagcttcaattgccgctcgcttaggaacttatcctgactggtttttttyctgctcttttattgggatgtttgtgttttattgcgctcattggcagacttatgtttcaggcatgttgagatttggaaagtaagtatgctttttaagttgt

SEQ ID NO: 288438 - DNA, 201 bp, Homo sapiens
attctctgctccaaatagtgaagtccctttataatcatttgagtgtaggccttgtggaggactcatggaggttgaggttggattaacagaaatacagtggwaatatttcatgccctccatgcatgcatccattttgttgttgtttttgagacaggggtttactctgtcacccaggctggagtgccgtgccgtggctcgatc

SEQ ID NO: 288439 - DNA, 201 bp, Homo sapiens
ccttcctcttcctttcttctgtaccagttatccaactatgtacccatctttcaatacccaattctaacactatatccttatgaaagttatcttccttttcmtaagtcaaatcaaccactctgaattcccatgataatgacaataactaacttttactggatttttactgtgtatcagggatgattttaagtcacttttatt

SEQ ID NO: 288440 - DNA, 201 bp, Homo sapiens
agctaaaatttcccaaatatgtattttatacagctctttttcagtgtataattgaaaaacaatttaaattttaatcagtgggtttttttttaatgacaagsggttatgattgatttttagtagttattttgttttctagaataaatttatatgaaatttaatatatcaagtaaaattcattgttagggaagctattactta

SEQ ID NO: 288441 - DNA, 201 bp, Homo sapiens
aagtcttttaggtactctgcatgttataaatagttacattatttgataataattttatttttcttctcctcttctccaacttaatcattagcccaagtttmcaatagagaggattaaaagaaaattaagggacctgaataatatagaaaagggatatgcagtacttaaataagcatttgattcatataataaaataatgca

SEQ ID NO: 288442 - DNA, 201 bp, Homo sapiens
ctaatttctagaacatgactggggataaagggaaactaatagaaaaaagttgtgatttatatttagcttctgcaaactgcttttcaagccatcatttccawtaaggaactttgtactccagccaaattgaacttcttactataacaaggatttctctccttcttatccctctcttttccccttcctcttcctttcttctgt

SEQ ID NO: 288443 - DNA, 201 bp, Homo sapiens
ataacatcagtgataactattagcaatttgatatatggtatatatttttttccctctgcatataccgttacctatgtgtgagcacatgttgttctgtaacytttttaacttaacagtgtagtcaactgataattcaataatggaagtaaaggtaaaaataaactaagcctacagagatttttacatctttgctatttaata

SEQ ID NO: 288444 - DNA, 201 bp, Homo sapiens
tttttttataggtagctcacatgaccaaaagtgaactatatcttcaagacactgtctttttggggccaggtcttttgtttttagaccagtactttaataaytttatagacgaatatgttgttctatggatggcaatggtaagtatttttctccattttatttattttttaacaatgcttaagagctatttcagtgagctat

SEQ ID NO: 288445 - DNA, 201 bp, Homo sapiens
atcccagcactttgagaagctgaggctgggaggatcgcttgagcccgggagtttgagactggcctgggcaacatggggaaaccctgtctctactaaaaacmcaaaaaattaaaaaaaaaaaaaaaaaaagaaaataggaaaaaagaaggaaacctgaatagaactaaactattcttactcttcttcatcagtgatattttg

SEQ ID NO: 288446 - DNA, 201 bp, Homo sapiens
ttcttcatcagtgatattttgtagaattggcagaataagctctatttcagtatctccacaaaattatgttaatttggcaatccacatgtggactgccttcratgtagtaaaagttgatatagaataaactgcattaatttttagccagtttaaaacgtgtgtgaatatcaaactggaatcagacatctgtggcactgtatt

SEQ ID NO: 288447 - DNA, 201 bp, Homo sapiens
attttacataaaagaacatttgcagtctgaatgcaaaaagaaaggaggtggggatgttggtgtagaaagaaactaggataagctgggtgtggtggctctckcctgtaatcccagcactttgagaagctgaggctgggaggatcgcttgagcccgggagtttgagactggcctgggcaacatggggaaaccctgtctctact

SEQ ID NO: 288448 - DNA, 201 bp, Homo sapiens
tgaggcaggcaaatcacttgaacctgggaggcagaggttgcggtgagccgagatcatgccactgcactccagcctgggtgacacagcgagactgtgtctcaaaaaaaaaaaaaaaagatctagtctatacaatatatacaataaatgtttctgagtatttaaaattacttcttctaagctgtgaataatattatattgtgt

SEQ ID NO: 288449 - DNA, 201 bp, Homo sapiens
cctgtgcaggaggctagtataccatcaataaggttatatttgaatataaaacataaaccctgtagatttcattgtgtcttatttcagttatgaagcccccrttgtatcatcattttttatcacagatgttctcagaattgtctacatattaattagaaacaagactaaagaaatgtcaatcctgaggacaacagtgaaccc

SEQ ID NO: 288450 - DNA, 201 bp, Homo sapiens
cttgaggatagtgtataatttgtattaatgatgactcagtcatcaattaaattaaattcgctttgattatatcctgcttaaggaaacgacgtggatgacataatttctattcaaaatgattataaaatacagaatatagtgcttgagagagacacgttagccatctaaggaaaagaaaatcaatattggtaacacttcaat

SEQ ID NO: 288451 - DNA, 201 bp, Homo sapiens
gtaactgaaattcagatagctttagtgattgtctttgtgttgtctgcatttggaggagcaacaatgtgggactatacggtaaatctgaatatttaaatttrtatttaagtacttttcaaatatttaggaaaaagtattgcattgttaattttcttcaaaaatccttggcattgtatttaattttttttttttaattggtgt

SEQ ID NO: 288452 - DNA, 201 bp, Homo sapiens
tttactctgtcacccaggctggagtgccgtgccgtggctcgatctcggctcactgcaacctccgccttcagggttcaagcgattcttctgcctcagccttmcaagtagctgggattacaggcgcgtgccaccacggccgactcacttttgtgtttttagtagatacagggtttcaccatgttggccaggctcatgcatcct

SEQ ID NO: 288453 - DNA, 201 bp, Homo sapiens
ctgtatttctaaacagcatagggcaattatttcataaattatttttaattcttaatgattcttaaactttgtttctttcagtatttatggcagtgggagcrtcaattgccgctcgcttaggaacttatcctgactggttttttttctgctcttttattgggatgtttgtgttttattgcgctcattggcagacttatgttt

SEQ ID NO: 288454 - DNA, 201 bp, Homo sapiens
tcagggttcaagcgattcttctgcctcagccttacaagtagctgggattacaggcgcgtgccaccacggccgactcacttttgtgtttttagtagatacarggtttcaccatgttggccaggctcatgcatcctttaaaaacaaaaatttgatcgagcctacattttaaaatatcttgtcaatggattggtatgcttatta

SEQ ID NO: 288455 - DNA, 201 bp, Homo sapiens
agtagaataatggggccaaaagccagactagagtgtgttaagcaacaaacgtgaagagaggagaaaattacaaatgttgactaattttcagtgagcctatycgtggagcataggagagagagtgacagcttcaggggaatgcagactagagggactgatgctgattggttagtggttttttgagaaatttaagcatattta

SEQ ID NO: 288456 - DNA, 201 bp, Homo sapiens
ggagtcatggccagccatttttgatcacaaggacaagggcaacatctgaaaggcggcagactaataaaatggaagaagtctgtgtctctgacaccatcgarctgccatgtagccctaccatgcctacccagacatcaatgtgggaaaaataaacctctattccatttaggttgctgtagtttgcccagctgtagtctaaaa

SEQ ID NO: 288457 - DNA, 201 bp, Homo sapiens
taaacaaataaaagaaattttagctgggcaggtggctgtctggctaaagattgcatttgcaggctcttttacagttaggcatagcagccatgtggccaggytctggccaatgggatgagagcagaagtgatgtgtgcaacctttgatcatggccttcagaagaaaggagcatagcagccccttctctttttccccttccta

SEQ ID NO: 288458 - DNA, 201 bp, Homo sapiens
atcatttggggtcaggcatttgagaccagcctggccaacatggcgaaaccccatctctactaaaaatacaaaaattagctgggtgtggtggcacatgcctrtagtctcagctactcaggatgctgaggcaggtgaatcacttgaacctgggaagaggttgcagtgagttcagattgcgccactgcactccagcctgggtga

SEQ ID NO: 288459 - DNA, 201 bp, Homo sapiens
gtaattcatgatctcaccactgcactccagcctgggtgacagagtgagaccctatctcaaaaaaataaataaataagtaaataaaagtataatgctttggyatgctgaatactttgaattaaagaagactggaaggcctcagaagcaaagtttctctccgacctttttctgttttcctgtctcctgcccctgtttctcccc

SEQ ID NO: 288460 - DNA, 201 bp, Homo sapiens
aatgtcagtaagtactttagggggactgtgagggagacaaactgtatttagtcagctctaagatcaactgacaaggagggaataattaaataaataaccaattaaattacaacagaatcctaaaatttttatttaacgcttattgaaagagctcttttaagcccagatttttatgataaaagaactcttaagcttatttag

SEQ ID NO: 288461 - DNA, 201 bp, Homo sapiens
ctttgagttttgtctgtcctttgtccacaaggaatttccttgtgggaaaattatgagggaggtatgtagctttttttatatttgtagctatcttatgtggraataaaatgggaggcagatttgcctgacacagttcccagcttgactttccctttggcttagtgatttgagggccccaagatttattttcctttcatacct

SEQ ID NO: 288462 - DNA, 201 bp, Homo sapiens
atgcccatgacacagcctcaggaggtcctgacatgtgcccatggtggtcggggcacagcttggttgtgtacattttagggagacatgagacatcctacacratatgtttaagatgtacattggttcactcaggtcatagggagataagagataaaagattgcattcctttgagtctctgattagcttttcactgaatacaa

SEQ ID NO: 288463 - DNA, 201 bp, Homo sapiens
agatggttaggcattctaagtcacaggatgaaataggaggtcagcacaaaatacaggtcataaagaccttgctgataaaataatttgcagtaaaggagccrgccaaaacccaccaaaaccaaaatggcgacgagagtgacctctggtcatcctcactgctacactctcaccagcttcatgacagtttacaaatgccatggc

SEQ ID NO: 288464 - DNA, 201 bp, Homo sapiens
atacagttagccataaactgataaactaagaaattattctctgtctaggtgccatccttggtaggaagctttattagaagccaaaataaagaagactatgmtggcctaaaagaagaatttcgtaaagaatttaccaagctagaggaggtaattatttctcctagctatcatcagagtaaacgataactatatctaccctcc

SEQ ID NO: 288465 - DNA, 201 bp, Homo sapiens
gtcatcctagttgacctagctcacacctttcattttttcctcttcccacaggtgtgtagaccacactccaaaactgaaactgtggatggcagccatgaagraagatcccacagtctcagccctgcttactagtgagaaagactggcaaggtttcctagagctctacttacagaacagccctgaggcctgtgactatgggct

SEQ ID NO: 288466 - DNA, 201 bp, Homo sapiens
agctaattctcagaaggaaggctataaatttcccttaaattgttaattagcatttataacacacatttgtgctctagagcagttctgagttggaacgtatyagtggttggtaagatctgcttactaagttgtaaccaacatgtctttaaaatgaacggaacaaaaaaacttcacagtgcatcccaatggtaagtgtaaatt

SEQ ID NO: 288467 - DNA, 201 bp, Homo sapiens
aaaatttaaaagtcaaatacaaattataagattgaaaattaaaaattcaaatcaaaaatttttaaagcaaatatttttaatttaaatgaaatttattacayatttttatataaatttgcaattctaatgtttattatttatctagttgtcaaataattggtatcaagcttcatacatgttatatctagacctacataccta

SEQ ID NO: 288468 - DNA, 201 bp, Homo sapiens
atttaacatattctatgccaagcactgctctgagtgctttctgtatagtaactaatttaatcctgccacagactctatgtcagagacgtttgaaccagagsgactccatcttgagtgagggctaggaagatgcggctgggacttgctgggccgcattcccagaaagttaggtattcctagcctctagatgtttatggttaa

SEQ ID NO: 288469 - DNA, 201 bp, Homo sapiens
atcttggtgttatggtttagatggaaagggaggtctctggctgagtttctggggataccagaatgttctgatatgcaagagattacctgacccctacaccrtgccagattacagaaggatgagtggtctttctttcttattctggaaggggaaatgcagatcatcccagagaatggactgggaaggataagttaggaaaat

SEQ ID NO: 288470 - DNA, 201 bp, Homo sapiens
ctgactgcatcttgcttctagcctcacaggctgcctgtcctcgctcattcctgggtgtaggctcagctaaccccgggaggaatttagtttatggtttaackttgaagcaaggatggtaatagtctgtccctaaaactgatcccctcattatctggggactgaaaccacctttgtaagactaatgaaaaagacacaagatta

SEQ ID NO: 288471 - DNA, 201 bp, Homo sapiens
agctagagacctcccttaattttaaagccaaccctagagcagaatgtgaggaggccagtcttgccctgctcccaaagtaagtgactggcagaggatgaaargtaggcaggaaatatagacttcgggaaagagatgctggcctggaatcagcagtgaccctgggaagctgaacttaccctgtgttacagcaaaagaggaact

SEQ ID NO: 288472 - DNA, 201 bp, Homo sapiens
gtggggccagataagggaataaaagcaggctgcctgagctagcagtggcaacttgctcaggtccgtttctgtggcgtggaagccttgtcttttcgctcctygcagtaaatcttgctgctccttgcagtaaatcttgctgctgctcgccatttgggtccacactgcgtttatgagctgtaacactcactgcaaaggtctgca

SEQ ID NO: 288473 - DNA, 201 bp, Homo sapiens
ctatcggtattctgggctagatttggcgattgttggtagagtcctgtgcattgcagggtgtttagcaatgtagcacctctgcagttttgacaaccaaaaaygtctatgcacattgtcaaatgtcccctggatagcacaatcactccccagttgaaaaccactggtaagtcagtgtattaaaaagttattttaaaaggtaaa

SEQ ID NO: 288474 - DNA, 201 bp, Homo sapiens
cctttggcttagtgatttgagggccccaagatttattttcctttcatacctgtcttcagcaagaagcccattaggtcaatttagccagaatcctccatcakccctgatggtttcttatagtaattttccatccactgacccccaccctgctccttggctataaattcccacttgcccatgctatatttagagttgagctct

SEQ ID NO: 288475 - DNA, 201 bp, Homo sapiens
ttttattcctttactttcttaataaacttgctttcactttgcactgcggagtcaccctgaattcgttcttgcgtgagatccaagaaccctctcttggggtstggatcaggacccctttcctataacaacatcattatgcaaatagaattatagattgaaataagaagaaaagaaacatgatagtatgaatgcttatgttag

SEQ ID NO: 288476 - DNA, 201 bp, Homo sapiens
gactgaactcctctctaccctgaatgcaagagaccctcatagttaggcaggaatatcatcgcccctattcagcctgaaaaagttacaaaagatggatcttygtccctctgcaacccttaggattaagggttctcttataaaagacaagggggaaatgtcagaggcatgtgaacaagagcaactccatcttaaataggagct

SEQ ID NO: 288477 - DNA, 201 bp, Homo sapiens
tgtcaaaactcaacagttatgaatggaccttaccatactgatgttctctgactgaactcctctctaccctgaatgcaagagaccctcatagttaggcaggwatatcatcgcccctattcagcctgaaaaagttacaaaagatggatcttcgtccctctgcaacccttaggattaagggttctcttataaaagacaaggggg

SEQ ID NO: 288478 - DNA, 201 bp, Homo sapiens
gagggaggctgagggaaggcactgggggcagaggggaagaggtcgaagctgcggggaaagccgccctaaggaaccggagggagaggagggaggaggggacktggggcaggaggttccgcgagacccagatcggtcgcggggccgtgaacaccgcacctcacggacaaggacgcgccgccggcggagtgggggccttcgtcg

SEQ ID NO: 288479 - DNA, 201 bp, Homo sapiens; identical to SEQ ID NO: 191830

SEQ ID NO: 288480 - DNA, 201 bp, Homo sapiens
ctgaataaatagcaatcctgtagaagaactgtttgtaccttacttagcatcaacactgtggattagttcaaacaattagtattaacaaagaaatgactaamagatgtgtgtttagacaccaagaatagcatgtctggttatatgcctataacattgtcaccttggtagtacggtcagtatataaaggattatctttagaga

SEQ ID NO: 288481 - DNA, 201 bp, Homo sapiens
gaccatgaacccagcgggaggaacaaacgactccagatgtgcggccttaagagctgtaacactcatcgtgaaggtccgcagcttcactcttgaagccagcragacaacgaacccaccagaaagaactctgaacacatcggaacatcagaaggaacaacttccagacacgccgcctttaagaactgtaacactcaccgcaag

SEQ ID NO: 288482 - DNA, 201 bp, Homo sapiens
atgtgggtggggccagataagggaataaaagcaggctgcctgagctagcagtggcaacttgctcaggtccgtttctgtggcgtggaagccttgtcttttckctccttgcagtaaatcttgctgctccttgcagtaaatcttgctgctgctcgccatttgggtccacactgcgtttatgagctgtaacactcactgcaaagg

SEQ ID NO: 288483 - DNA, 201 bp, Homo sapiens; identical to SEQ ID NO: 191831

SEQ ID NO: 288484 - DNA, 201 bp, Homo sapiens
atgggtattagaaacaaaatctaagacacacaagtttttctctaatcagtgacccagtgagcagtcctgggcttcctaaagtaataaccagtgtgttccaycatttttaggaagggctcaactcccctaaactggccttgcccctcccaatcttctcttccctggcaaatctccaccttgccaccaacagcctagtccttg

SEQ ID NO: 288485 - DNA, 201 bp, Homo sapiens
atatattatagaaccccctccctcaaagcaaggcataaaaacctggaaatattactctaaccttcccctgcctttatttgtaggaactggccataaagaaattctctagcctacctgtctaatgtagatcataagcatcttattccagaggggtcctgctctgtacccagcaggaaggaatcctactcggagaggccacaa

SEQ ID NO: 288486 - DNA, 201 bp, Homo sapiens
ggatgaagcatacccagggaagaagctgttgccggatgacccctatgagaaagcttgccagaagatgatcttagagttgttttctaaggtttgtgcataakaaatttcagctcctatttgaaaaacctgttttttaaagcgaaatcagtgctgccatttatggttcagtgatttgggagagaaaaacaaaacaggaatatg

SEQ ID NO: 288487 - DNA, 201 bp, Homo sapiens
tatatattatagaaccccctccctcaaagcaaggcataaaaacctggaaatattactctaaccttcccctgcctttatttgtaggaactggccataaagaaattctctagcctacctgtctaatgtagatcataagcatcttattccagaggggtcctgctctgtacccagcaggaaggaatcctactcggagaggccaca

SEQ ID NO: 288488 - DNA, 201 bp, Homo sapiens
tcctgaccaagccagcattttaggccacaaaactgttcctaagaccagtccattacctctgtgagcgcaggaacttgatgcacccttggtgtttctagaayaccttgacaccaggactgtaagggttctaccatatttttatgtgagggggccgatacagttagccataaactgataaactaagaaattattctctgtcta

SEQ ID NO: 288489 - DNA, 201 bp, Homo sapiens
gtatatattatagaaccccctccctcaaagcaaggcataaaaacctggaaatattactctaaccttcccctgcctttatttgtaggaactggccataaagaaattctctagcctacctgtctaatgtagatcataagcatcttattccagaggggtcctgctctgtacccagcaggaaggaatcctactcggagaggccac

SEQ ID NO: 288490 - DNA, 201 bp, Homo sapiens
tgtatatattatagaaccccctccctcaaagcaaggcataaaaacctggaaatattactctaaccttcccctgcctttatttgtaggaactggccataaagaaattctctagcctacctgtctaatgtagatcataagcatcttattccagaggggtcctgctctgtacccagcaggaaggaatcctactcggagaggcca

SEQ ID NO: 288491 - DNA, 201 bp, Homo sapiens
ccaaaataaagaagactatgctggcctaaaagaagaatttcgtaaagaatttaccaagctagaggaggtaattatttctcctagctatcatcagagtaaaygataactatatctaccctccttttcctcctattcttttctttatattcccactttccaagtcactttaaggtaattaggaaaattcccctaaacattttt

SEQ ID NO: 288492 - DNA, 201 bp, Homo sapiens
atatcagcttagttccaacagctgcccagttcatgaaaagccttctaatttagcttacttggaacaactttacttattttgctctacccttgtggaatatrttgctgttatactctttgtgtaggaatacaggacaagcttactaaatgttttcttaaacacgtattaatcttccagatatcaccttttgtcaaaactcaa

SEQ ID NO: 288493 - DNA, 201 bp, Homo sapiens
acatgcaataaggatctgttttcttttgtagcagaacacaattggataaattggttatttcaccacggctttaactggaatggtgtgctttcctttaaggratcaaacttgacttgtaaagccaataaaagccacttggagaattggcctcagatcttgtctgcaactgtccctgtaaaggtaagtaaagaatgacctgtg

SEQ ID NO: 288494 - DNA, 201 bp, Homo sapiens
aggactttcatagaaaatgtacgatacagttatgtggtcttgttacatagttgcaagtcatttccccttagctgttgagtctgggaagaaaagtggtttayaggcacactgaaacaatatgccctgtctaggcaggatacatggtaacaagactatgttagttttttaaattttttttctgagttcatagaatactattgt

SEQ ID NO: 288495 - DNA, 201 bp, Homo sapiens
tagaagccaaaataaagaagactatgctggcctaaaagaagaatttcgtaaagaatttaccaagctagaggaggtaattatttctcctagctatcatcagrgtaaacgataactatatctaccctccttttcctcctattcttttctttatattcccactttccaagtcactttaaggtaattaggaaaattcccctaaac

SEQ ID NO: 288496 - DNA, 201 bp, Homo sapiens
aagatcccacagtctcagccctgcttactagtgagaaagactggcaaggtttcctagagctctacttacagaacagccctgaggcctgtgactatgggctytgaagggggcaggagtcagcaataaagctatgtctgatattttccttcactaatatgaataatagcatgcttttattttaccaaggttcaggttgcatgg

SEQ ID NO: 288497 - DNA, 201 bp, Homo sapiens
ttctactcttgatagtaaacgttttcacatttgggctattacaaatagtgctgcagtgaacattcacataacatatcttttggtgaacatgtgttacattkccaagtacaattgctgggtgatgagtatgcatactcttaaaacatggttgtaccaatttacacctctacgacagtggttccatacccttgccaacttcat

SEQ ID NO: 288498 - DNA, 201 bp, Homo sapiens
acacgttttcacaaagcgaacacagccatggaaccagcacccatatcaactaacaaaatactagtttgggcttttttgtactttatacaaatggactcatwtaatgttcatcttttgggtctgcctgctttcattcaatattaggtttgtgggttcatctctgctgtgtgtagttctttcctgttctttatacagtgttcc

SEQ ID NO: 288499 - DNA, 201 bp, Homo sapiens
caaatcaaaatcacataataacctcacacttgtcaagatgactataatgaaaaaagacaagtgttagcaaggatgtgtagaaatcagaacctttgcacacygttggcgggaatgtaaaatggtacagctgctatggaaaacagtatagatgttcttcaaaaaattaaaactagaactaccatgtgattcagcaatctcact

SEQ ID NO: 288500 - DNA, 201 bp, Homo sapiens
agaaattagctgggtgtgatggtgcacgcctgtggtcccaactactcgggaggtaggaggatcgctttagcccaggaggtcgaggctgcagtgagctgcgrtcaagccactgtactccagtctgggagacagagtgtcaaaaaaaattaaaaattaaaaaaatagacatttcttcaaagaggatataaaaatgggcaacac

SEQ ID NO: 288501 - DNA, 201 bp, Homo sapiens
ggcttttactgggaaagtactagattttaaccacatgatatgacttaacaaagcatggttttctctaaaagatgcatcttccaacttgctgtggcaggtgygtagacttgttggctcacaatgccagcttaccaaaattcatgtgtgttctgacatacttttttttttttaaataacaaaagcccaggatctttttgtttt

SEQ ID NO: 288502 - DNA, 201 bp, Homo sapiens
agagttttgaaagcagcaccattattctgaggttgataatatccaggtttgtgctgtctcctatgggttaaaatgaaaaggatgtatcctacaggtgacgrtagggacagaggccctcccagtagtcacgttaagctagtactgacagaaaaaggaaaagcctgtccaggtggctgggcaaccctgcagcgaggcatagat

SEQ ID NO: 288503 - DNA, 201 bp, Homo sapiens; identical to SEQ ID NO: 59132

SEQ ID NO: 288504 - DNA, 201 bp, Homo sapiens
gcatgactcactttggtgctttatctgctgggttgtgccatcatgggcagaagtcatttgtaaagtggccttgtctcaggcatacttttggatgtaaatgractgttatctctggaggcagtctcctggggggtgagagtcctgctctggagcttttaagtaaacacccagttagataagcttgccctgtagggagtgtca

SEQ ID NO: 288505 - DNA, 201 bp, Homo sapiens
ataaatcttactgctgctcactctttgggtctgcactaggtttatgagctgtaacactcactgtgagggtctgcagcttcattcctgaagtcagtgagacsgtaaacccccgggaggaacaaacaactctggacgcagcacctttaagagctataagactcactgcaaaggtctgcagcttcactcctgaagtcagcgaga

SEQ ID NO: 288506 - DNA, 201 bp, Homo sapiens
ggtctgcagcttcattcctgaagtcagtgagaccgtaaacccccgggaggaacaaacaactctggacgcagcacctttaagagctataagactcactgcaraggtctgcagcttcactcctgaagtcagcgagaccatgaacccaccagaaggaagaaactccggacacatctgaacatctgaaggaacaaactctggaca

SEQ ID NO: 288507 - DNA, 201 bp, Homo sapiens
tgaagttaaatgagtaagatatttgaatattttgtgcataatttaggatgacaggtggaatagtatatattgacctttctttataacagaagttgaaatayttaatacaactggtctgaatgagaacaagcagacaggggaatcttggactatcccaggcatgtcatatacctacactaactactctccatcactgcaatg

SEQ ID NO: 288508 - DNA, 201 bp, Homo sapiens
taataaattgtcagtttctctctttgggcaagttctcacattaactgaacaaattgcttcactctagtctcattccttttgtgtaaaaaagggacctctayagtgtctttcaaattgaatattctattacaggcatttttaaatatttttaatgaaatatttaagggaaaaaagtgaaactgtagagtaataattacatat

SEQ ID NO: 288509 - DNA, 201 bp, Homo sapiens; identical to SEQ ID NO: 59137

SEQ ID NO: 288510 - DNA, 201 bp, Homo sapiens; identical to SEQ ID NO: 191864

SEQ ID NO: 288511 - DNA, 201 bp, Homo sapiens
tctcattccttttgtgtaaaaaagggacctctatagtgtctttcaaattgaatattctattacaggcatttttaaatatttttaatgaaatatttaagggraaaaagtgaaactgtagagtaataattacatatgggagactctgtgatgtcatcctagttgacctagctcacacctttcattttttcctcttcccacagg

SEQ ID NO: 288512 - DNA, 201 bp, Homo sapiens
accttttaaattacatgcacacctgtgctcatgttcaaattggatgttcctttgtttacatgggggattatgtatttaaatcctcaaatgaaatgctgttytagctacagctgtggatgggaaaatagaaaacaaaaggtattggtgtctattttttttttagtaatctgttctattgaacatttattcagccttgacaat

SEQ ID NO: 288513 - DNA, 201 bp, Homo sapiens
gagtataggttcaagttgctctgaatagatactctcattagcagcagttacaagtggatttctaaaggcaaaaaggggcttcaggaagtgggctgacataragttgtctgtcaggaattctcattggtttacagaaataacattgattagtagctggctacacattgttaagctatagactgtgggttatatttgctgtag

SEQ ID NO: 288514 - DNA, 201 bp, Homo sapiens
acgccttcgtcctcttactttcgggaacaccctactctgtctatggagtagctgttttttcaccactttactttcttaataaacttgcttttgttttgcayggtggactcgctctgaattctttcttatgcgagatccaagaaccctctcttgggtctggatcaggacccctttcccgtaacatctatgcaggaggaataa

SEQ ID NO: 288515 - DNA, 201 bp, Homo sapiens
cagcttcattcttgaagtcagcgagaccaagaacccaccggaaggaataaattccagacacaagaccagagttgacaacccatctccaccataaaaaatayattgattttgagaaaatcacttaacctgtgccccccagtttccctatccctgagatggtaatattaacagtatttaaatcttaggattgttgtgaggatt

SEQ ID NO: 288516 - DNA, 201 bp, Homo sapiens
cctagctcacacctttcattttttcctcttcccacaggtgtgtagaccacactccaaaactgaaactgtggatggcagccatgaaggaagatcccacagtytcagccctgcttactagtgagaaagactggcaaggtttcctagagctctacttacagaacagccctgaggcctgtgactatgggctctgaagggggcagg

SEQ ID NO: 288517 - DNA, 201 bp, Homo sapiens
tgcaagtccaagcaagagcaataacatcagtgtcaaaactgctacacagcctgctgtaattttagatacacttccatttttagaggtatttaaacatgaaraaatgtgaatcttagaatccatgagatatggtagcagtcttaactgctacctgatctctcgatcagacttaggtgtcagactgatgggtgaagccagctg

SEQ ID NO: 288518 - DNA, 201 bp, Homo sapiens
gcgggctccctcagcttgcggggaggtgtggagggagaggcgtgggcgggaaccggggctgcccacggtgcttgcgggccagcgcgagttctgggtgggcrtgggctcggcggccctgcactcggagcggccggctggccccaccaccccgggcagtaaggggcttagcacccaggtcagcagctgtggaggacgcacagg

SEQ ID NO: 288519 - DNA, 201 bp, Homo sapiens
taaactgataaactaagaaattattctctgtctaggtgccatccttggtaggaagctttattagaagccaaaataaagaagactatgctggcctaaaagargaatttcgtaaagaatttaccaagctagaggaggtaattatttctcctagctatcatcagagtaaacgataactatatctaccctccttttcctcctatt

SEQ ID NO: 288520 - DNA, 201 bp, Homo sapiens
caagtagctgggattacaggcatgtgccaccacacccagctaattttgtatttttagtagagatggggtttctccatgttggtcaggctggtctcaaactygcgacctcaggtgatctgcctgcctcggcctcccaaagtgctgggattacagacgtgaaccacttcacccggcccattttgtctgttaatgcatatgccc

SEQ ID NO: 288521 - DNA, 201 bp, Homo sapiens
agattgaaaattaaaaattcaaatcaaaaatttttaaagcaaatatttttaatttaaatgaaatttattacacatttttatataaatttgcaattctaatrtttattatttatctagttgtcaaataattggtatcaagcttcatacatgttatatctagacctacatacctacagaaatgtaggactaatacattttttt

SEQ ID NO: 288522 - DNA, 201 bp, Homo sapiens
ttcattttttcctcttcccacaggtgtgtagaccacactccaaaactgaaactgtggatggcagccatgaaggaagatcccacagtctcagccctgcttamtagtgagaaagactggcaaggtttcctagagctctacttacagaacagccctgaggcctgtgactatgggctctgaagggggcaggagtcagcaataaag

SEQ ID NO: 288523 - DNA, 201 bp, Homo sapiens
cagctaattatttgctttttgtgaaatgcaccttgtttatgcaaaaagtcaaaaaaataagttggcattgtttctctgtgtaaaaagaaatgtaaataatkaatgtttttaaaataaaggaataatctgctgtgatagagagtatctagttattctatggcaattgaccccttttatagcagcgatgaccacaatttacta

SEQ ID NO: 288524 - DNA, 201 bp, Homo sapiens
cccacagtctcagccctgcttactagtgagaaagactggcaaggtttcctagagctctacttacagaacagccctgaggcctgtgactatgggctctgaarggggcaggagtcagcaataaagctatgtctgatattttccttcactaatatgaataatagcatgcttttattttaccaaggttcaggttgcatgggatca

SEQ ID NO: 288525 - DNA, 201 bp, Homo sapiens
gtcagtgagaccaagaatccaccaattctgtacacaattggacttccctttaatttttttggcttttagggtttttcatattgcttgtgttcccttagacrggagacaaacaatactttccagaaaaatacatgttttggggcctttttcactagtaaaaacctggcataacaataaaactaactttgcaaatattatgac

SEQ ID NO: 288526 - DNA, 201 bp, Homo sapiens
tttatgagctgtaacactcactgtgagggtctgcagcttcattcctgaagtcagtgagaccgtaaacccccgggaggaacaaacaactctggacgcagcamctttaagagctataagactcactgcaaaggtctgcagcttcactcctgaagtcagcgagaccatgaacccaccagaaggaagaaactccggacacatctg

SEQ ID NO: 288527 - DNA, 201 bp, Homo sapiens
ccaagggaatcaggtgggcacccaggcgggggacgctccccgagccgtccgggagcctgctgcaggcggcggggtggggtggggtctcagcccccttctamccccctcccaccagcgtcctttactgcacattaaactattctcggccctttggaaaatagcaagttataggccattcccctaggaaaaataggccacaga

SEQ ID NO: 288528 - DNA, 201 bp, Homo sapiens; identical to SEQ ID NO: 191875

SEQ ID NO: 288529 - DNA, 201 bp, Homo sapiens; identical to SEQ ID NO: 59128

SEQ ID NO: 288530 - DNA, 201 bp, Homo sapiens
gaactcttttattgtactaagagaaatctaatgtaaccaaaattgaaaaaagacattttttggtactcatttatttgaaaagtccaggagcatgacacagstggattcagaggcacaaagtcctgggttatgtgcttcaccctggacctttagtttgaaaacaaccctaccttatttactggggcagttttccaaaggaac

SEQ ID NO: 288531 - DNA, 201 bp, Homo sapiens
gcgccacctacttcctgaatcccctgcaaaccccagaggagctcggcctgcgctgcgccacgatgtccggggagtcagccaggagcttggggaagggtgargcctgcccgccgcgaagagggggtgatctcggcgacccccggcggcatgttcgaggctgctccgggagcccagccgcccgggagcgccccaccggcgggg

SEQ ID NO: 288532 - DNA, 201 bp, Homo sapiens; identical to SEQ ID NO: 59131

SEQ ID NO: 288533 - DNA, 201 bp, Homo sapiens
caggttcagttgcttcccgctttcagagtccaattattaataagaagagcaaagtctggtataaagaaagtgattttttattccaaagctagcttaggggragcaaaacaggcttcctgccttaagggtaccactttgcttctggggcagaaagcaggggcttttaaagggggcagttggtatgaactgcatgctggggag

SEQ ID NO: 288534 - DNA, 201 bp, Homo sapiens
agaatcacttgaacccgggaggcagttgcagtgagctgagatcatgtcactgaactccagcctgggcaagagcaagacacttcatcaaaaaaaaaaaaaaattccataaggttgtaaatttttgtaaggatgttgttgcgggattgtacgaccagtgttacctcccatttaccgtaagatttccacattattttccaaatt

SEQ ID NO: 288535 - DNA, 201 bp, Homo sapiens
ggtgccatccttggtaggaagctttattagaagccaaaataaagaagactatgctggcctaaaagaagaatttcgtaaagaatttaccaagctagaggaggtaattatttctcctagctatcatcagagtaaacgataactatatctaccctccttttcctcctattcttttctttatattcccactttccaagtcacttt

SEQ ID NO: 288536 - DNA, 201 bp, Homo sapiens
atgctgaatactttgaattaaagaagactggaaggcctcagaagcaaagtttctctccgacctttttctgttttcctgtctcctgcccctgtttctccccmaaagcaagtcatagacaccagaattcctcttccccaaggtgggtcatagaaactattaatatatatattgtatatattatagaaccccctccctcaaagc

SEQ ID NO: 288537 - DNA, 201 bp, Homo sapiens
aggtgccatccttggtaggaagctttattagaagccaaaataaagaagactatgctggcctaaaagaagaatttcgtaaagaatttaccaagctagaggaggtaattatttctcctagctatcatcagagtaaacgataactatatctaccctccttttcctcctattcttttctttatattcccactttccaagtcactt

SEQ ID NO: 288538 - DNA, 201 bp, Homo sapiens
catcagttccatccagagacgtattaaggtatccaaatgggatttgggagaaaacttgggaaataagtttaaatgcttttttcacatttctgatttattakagagactagcattcaactactgctcaataaatatttgttgaatgagccaagaatcaatcttgttctttgttttagaaagtaactcatgacatggacatgt

SEQ ID NO: 288539 - DNA, 201 bp, Homo sapiens
gagacctgcctggccaacatggtgagaccccatctctactaaaaatacaaaattagctgggtgcagtggtgcatgcctgtaatcccagctacttgggaggyaggagaataacttgaacccgggaggtggagattgcggtgagctgacatcgtgccactgcactccggcctgggcaaaaagagcaaaactccatttcaaaaa

SEQ ID NO: 288540 - DNA, 201 bp, Homo sapiens
cccacaccaggaaagccggcagtaagtacaggtgctggtatattggcagtgctaaaaagttgcatgggaactacaggaagtctaaaatgactcttaatcayttagctgtttctgggctacaggaaaaaggaaatgaatattactttgaaatcttactggaaaagtggctaaactggtttatgtaggtaagtttttgtaagc

SEQ ID NO: 288541 - DNA, 201 bp, Homo sapiens; identical to SEQ ID NO: 59150

SEQ ID NO: 288542 - DNA, 201 bp, Homo sapiens
aatgaggaagagggtaactgaagcaaaaatatatatgtggactgtaggaatgttaagctgaatatataataattctaaacttgtaaacttctaatttttcttttttttttttttaatttttattttttttttaaatttatttttttattgataattcttgggtgtttctcacagagggggatttggcagggtcatgggaca

SEQ ID NO: 288543 - DNA, 201 bp, Homo sapiens
ctactgcactagatcatctcaaaaatgtgcatatatgttactgttatttaaaatgcatttaacctgtcaacagagagtaatgaggaaagctttaaagtacyttaaaaggcattagtggcaaacctgataaaattttttaaaaaatctgtggttaatagtattgtaccaatgttaatttcatacttttcataattatactgt

SEQ ID NO: 288544 - DNA, 201 bp, Homo sapiens
cagtgcccttgttgctacaggcaccttgctcctgcatttcctctggctgagaggcagaagaactgcccccgtcctccttccaatttttgtggaagagcagsctgctgaatttgaaagacttcttgagagagaacttattaggggagactgcccccttggcctcagcaccctggataggggatgctggctcaatggcatcgc

SEQ ID NO: 288545 - DNA, 201 bp, Homo sapiens
atataccctctgacttttttttggagacaaaattttgctcttgttgcccaggctggagtacaatggcgcgatctcagctcaccgcaacctctgcctcctgrattcaaatgattctcctgcctcagcctcctgagtagctgggatttcaggcatgtgccaccatgcctggctaattttgtatttttagtagagatggggttt

SEQ ID NO: 288546 - DNA, 201 bp, Homo sapiens
ccatcacgcccagcctggtagtgattgttttgaatgggtgaaggctcatttcgatgtgtaagttctattatgtttgtttttaacagatattattactcatrtctcataatacagtttgattattttcatttcagaattccatttttgtttctgttattttgagataattgtcttttagagagagacagcttattttggagc

SEQ ID NO: 288547 - DNA, 201 bp, Homo sapiens; identical to SEQ ID NO: 59148

SEQ ID NO: 288548 - DNA, 201 bp, Homo sapiens
ttaaatagaataattcagttgaagtgatactggcacacattaagttctctataaatgttagttttttttgctcagagtgaaggaatattaatgtagcttgrtgggatcaggaaaaacagtaacacttcagagtagggagaagatgctgaagtggatgtattgagggtatgattaatagattgttctcactaaaagggtttg

SEQ ID NO: 288549 - DNA, 201 bp, Homo sapiens
taatttttgtatttttagtagagatggggtttcaccatgttggccaggatggtctcaatctctttacctcatgatccgtccgccttggcctcccaaagtgytgcgattacaggcgtgagctaccacgcccggcccttaattttaattgttaaaatttgataaagaaggtgggtagtagacatatcaaatgatcattatatt

SEQ ID NO: 288550 - DNA, 201 bp, Homo sapiens
tgtaggtaagtttttgtaagcagacaaaaaatttctaagtgcagtcttctctgtataggaaagctaagtcagaattaggtaatattttgttgtttcaataratactaatattttgaaaaatatagttacttgttattgagtatatcagaagttaattattatatcaatagttggttttttaagtaggctggtgatatttgc

SEQ ID NO: 288551 - DNA, 201 bp, Homo sapiens
acatggtgaaaccccatctctaccaaaaaatacaaaaattagttgggtgtggtggtacgtgcctgtagtctcagctggtcaggaggctgaggtgggagaaycgcttgaactggggaggcagaggttgcagtgagctgagatggtgccaatgcactccagcctgggcaacagagtgagaccgtgtctcaaaaaaaaaaaaaa

SEQ ID NO: 288552 - DNA, 201 bp, Homo sapiens
accctgaaattttgctgtgttttatgaatgatcctctatacactggtctttcaaaaattgtagagaaaaagtgaaaaacaatttagaggaaaataggaaamaagggattggaaaagcctatgcttaattagactgaggttttagaatagtaaatatattcttagaagtactggtattgtcctggtttctcccgtaacttgt

SEQ ID NO: 288553 - DNA, 201 bp, Homo sapiens
tatgtaacctgcacattctgcatatgtatcccagaacttaacaaaaaacaaacaaaccccaaaaaactcagagatgtactggggtttcttttctgtacctrgggtatatgcaggaatttagccagtcttcccaatggtcagctgcagttagatggaggactgggcaagaagtcattgaaactccatgacaaatatggaaaa

SEQ ID NO: 288554 - DNA, 201 bp, Homo sapiens
ttaggaaatttaaaagattgcttaataaaacccatttcatctccattacatggtaagtgatagaaagaatcaattactagtgtttatgatctttacttttkattgccaattataaaagcattcaaatgtaggccagattttttgtgtgaataaatgtcatgtaataatattagtggcatcagtgaagttattaagatgaat

SEQ ID NO: 288555 - DNA, 201 bp, Homo sapiens
  misc_feature (1)...(201): n = A,T,C or G
tgagcgtccagacatcagttccatccagagacgtattaaggtatccaaatgggatttgggagaaaacttgggaaataagtttaaatgcttttttcacattnctgatttattatagagactagcattcaactactgctcaataaatatttgttgaatgagccaagaatcaatcttgttctttgttttagaaagtaactcatg

SEQ ID NO: 288556 - DNA, 201 bp, Homo sapiens
atatgaaattatttttccaactttagattattgagaagtgtcagtataattttcagcatatttactgtattcagtgtgttttaataggtaattatattagrcagtttgcaagctggagtttttctgatttttaaaaaaatcagatgtcagtatacagatgccaatattaagttactaaattaatgattttcttttctagaa

SEQ ID NO: 288557 - DNA, 201 bp, Homo sapiens
tttttttctttttgaaacagggtcttactctgtcacccatgctggaatgcagtggtacaatcttggctcattgcaacttctgcctctcaggctcaggagawcccacttcagcctcccgagtaactgggactacaggcatgtgccaccacacccagcttttttttgtattttttgtggagacggggttttgccatgttgcct

SEQ ID NO: 288558 - DNA, 201 bp, Homo sapiens; identical to SEQ ID NO: 59149

SEQ ID NO: 288559 - DNA, 201 bp, Homo sapiens; identical to SEQ ID NO: 59151

SEQ ID NO: 288560 - DNA, 201 bp, Homo sapiens; identical to SEQ ID NO: 59153

SEQ ID NO: 288561 - DNA, 201 bp, Homo sapiens
gcctttgacaggaatgtgtagtgcagtttgggacaagtgacataaagaactctgaatgaaaataatgaaatgaaaaataaacaaaaaaacttgtttatagrctgggcacggtggctcattcctgtaattccagcactttgggaggcaggtggatcacttgaggtcaggaattcgagaccagcctaaccaacacggtgaaac

SEQ ID NO: 288562 - DNA, 201 bp, Homo sapiens
ttctctttccaagcacaagcaggctctttcatcccacactctttttttttttccgagacggagtctcactttgttgcccaggctggctcgatctcagctcrctgcaacctctacctcctgggttcaagcaattctcctgcctctgcctcccgagtactacaggcatgctgagaatacaggcatgtgacactgtgcccggct

SEQ ID NO: 288563 - DNA, 201 bp, Homo sapiens
tacatgtatttgactatccttgaaaaatattttgcacactttttatagcagtcatattagaatctagttaggcatttgtgtatctctatctagtttgtttsagagctgctaagtaaaccagctagaataatagtgtgtagattgaaatagctcaaacattctgtatcaaaattataagaattttaagttattttaataagc

SEQ ID NO: 288564 - DNA, 201 bp, Homo sapiens
ccgattttatctttttaaattattttgtaacaggaaaaataagagctaaaccaaagttgaatggtgagcaggagttcattggtaagagaatgagttctttyctgaaataaagcagttttttacctgcttttttttttttttccttttttttttttttggagacagggtctttgtctgttgtccaggctggagtgtgcagtg

SEQ ID NO: 288565 - DNA, 201 bp, Homo sapiens
cctacctcagcctcccgagtagctgggtctacaggcacccgtcaccatgcctgtctaatttttgcatgtttttatagagatgggggttttgccatgttgcytaggctggtctcgaactcctaggctcaagggatccgcctggcttggcctcccagagtggtgggattataggtgtgagccactgcaccttgccctatgtat

SEQ ID NO: 288566 - DNA, 201 bp, Homo sapiens
acctctgtagaggtttgccctttatttttctaaatctataaattactacatagtgtgtcttggtggcaatggtaaaaagtgcatgagaattccaaacttcyctgcagaaagttttctgctcattccaaagggactttgtcctttaatatgtattctatcttgtatgaacagcatctactcaaaacagagcccacaactttc

SEQ ID NO: 288567 - DNA, 201 bp, Homo sapiens
caacacccaagcttaagttttgatggcttatgtaatctagaaattcactttttgcagtggtagtatatataccctatcacaaagagcttttgtttgtttgytttttgagatgaagtctcactctgttgcccagactggagtgcagtggtgcagtcttggatcactgcaacctccgcctcctgggttcaagcatttctcctg

SEQ ID NO: 288568 - DNA, 201 bp, Homo sapiens
atagtttagtcacctcttaatgcaataggagtctgggtttgagcagttgttagtatatcctaatgaatctgattttcactaaaatgatcagtttttttttwaaatcctattggaggctttttctcagtgcttcgaatcacttgggggtacttctcaatatgttctcaagggtttctcaaggagttccatgggtataggtac

SEQ ID NO: 288569 - DNA, 201 bp, Homo sapiens
aatatgataatttcatgctagattcattgaattgtatcaatgttctgattagactaaactgaacttgacaaggcctatggtgaatagatttacatagctgktaggttcattatttatagttttaactatgaagcaataaatgatgaatagactataaagactactgttatataggatttatactttactttttttccaaaa

SEQ ID NO: 288570 - DNA, 201 bp, Homo sapiens
ttttatttatttacttatttttttttttttagtagtgacagggtttcaccatcttggccaggctggttttgaactccagacctcgtgatccacctgcctcrgcctcccaaagtgctgagattacaggtgtgagccactgcgcccggccaagaatgaaattcttttttttttttttttttttgagacggcgtctcgctccct

SEQ ID NO: 288571 - DNA, 201 bp, Homo sapiens
tagagtgctaggattacaggcgtgagccaccgcacccagcccaggaatgaaattcttgtattttttatttatttacttatttttttttttttagtagtgamagggtttcaccatcttggccaggctggttttgaactccagacctcgtgatccacctgcctcggcctcccaaagtgctgagattacaggtgtgagccactg

SEQ ID NO: 288572 - DNA, 201 bp, Homo sapiens
ggctattttcttttttttttattctggagacggagtcttgctctgtcacccaggcaagaatgcattggcacaatctcgactcactgcaacctccgcctccygggttcaagcaattctcctgcctcagcctcctgagtagctgggactacagatgcacactgccatgcccggctaatttttttgtattttagtagagacggg

SEQ ID NO: 288573 - DNA, 201 bp, Homo sapiens
cccacgtcacgctcgcgccattgtttcccagccgccggctcgctgggaccccgcctcagcctcccagcgcggccgttcgccgcgttccgccctcttccccmctttcctcacgctggtggtagccctttcctcagtcctgctgacgtcctccagctgattccaggctgttcccggccacccctgaggccgtcttttcgcttc

SEQ ID NO: 288574 - DNA, 201 bp, Homo sapiens
ggaggctgaggcaggagaatcgcttgaacccaggaggcggaggttgcagtgagctgagattgcgccacgcactccagcctgggtgacaagagtgaaactcygtctcaaaaaaaaaaaaaaaaagaaagaaagccacaaaattaatgcggcaaaccggccaggtgcggtggcttacgcctgtaatcccagcactttgggagg

SEQ ID NO: 288575 - DNA, 201 bp, Homo sapiens
tcatgccactgcactccctcctgggtgatacatcaagaccttgtctccaaaaaaataaaaataaaaaatccgcatataagtggacctgtgcagttcaaacmcgcattattcaagtcagctgtagtttgtctgtcgagtacagatgagtttatatatgaaagtcatgtttagaatctagatagtactgaatcatatgtgtta

SEQ ID NO: 288576 - DNA, 201 bp, Homo sapiens
caggaatgtgtagtgcagtttgggacaagtgacataaagaactctgaatgaaaataatgaaatgaaaaataaacaaaaaaacttgtttatagactgggcayggtggctcattcctgtaattccagcactttgggaggcaggtggatcacttgaggtcaggaattcgagaccagcctaaccaacacggtgaaaccccgtctg

SEQ ID NO: 288577 - DNA, 201 bp, Homo sapiens
cagagaaaaatgtgcgttatcaccttttctagttagaggcttagagaaccaacatcatgtagcctacagctaaatagatgagcatgttgatgttgatcatwcttataacataaaagcaaatgactattcttgggtggttgggttgcatttttggttttcattgtgactgttggtagtgttgtaatgcttttaggactttta

SEQ ID NO: 288578 - DNA, 201 bp, Homo sapiens
gtgatatggcaggatagtagcaatagaatgttgatgagaacatagcaaaattagtcttttttgtatattttcaaaagtttaggaacagatgaaataaattygtagtttctagttacaatttcagactacagataggagcatgtagctgcttgaagaagaaaaacaaattgtcaaggcaacaggtactgcatttctcactcg

SEQ ID NO: 288579 - DNA, 201 bp, Homo sapiens
aatttttgtggaagagcaggctgctgaatttgaaagacttcttgagagagaacttattaggggagactgcccccttggcctcagcaccctggataggggaygctggctcaatggcatcgccagtggccccggctgcctcatgtgttctgttcacagaggcaacactccttcacccttgggagataagtcttcattgctttt

SEQ ID NO: 288580 - DNA, 201 bp, Homo sapiens
atgagaattccaaacttctctgcagaaagttttctgctcattccaaagggactttgtcctttaatatgtattctatcttgtatgaacagcatctactcaamacagagcccacaactttcatcctgaaaacatagttattttttgaagaactgttttttccttgcagattatggagtaaagaatatctttaaatgctctcag

SEQ ID NO: 288581 - DNA, 201 bp, Homo sapiens
tcttgtatgaacagcatctactcaaaacagagcccacaactttcatcctgaaaacatagttattttttgaagaactgttttttccttgcagattatggagyaaagaatatctttaaatgctctcagtaacttcaactttcaaagcgttggttgttttctttatagtctaattatgtaacctgagaacactgtgtgctgtcc

SEQ ID NO: 288582 - DNA, 201 bp, Homo sapiens
caaattgtctcatagacataggttttactcgatagtcactccattgctctatagttacctaatttctctagctggagaaattgctgatttaggggtgagtrtgggtgggagtaattaaggtttgttttttgtctcccactcttaaggcatatccagcaaattgtccttctgaaaaaattaacaattgaaaacattttatat

SEQ ID NO: 288583 - DNA, 201 bp, Homo sapiens
aaacttgggaaataagtttaaatgcttttttcacatttctgatttattatagagactagcattcaactactgctcaataaatatttgttgaatgagccaaraatcaatcttgttctttgttttagaaagtaactcatgacatggacatgtgctatgggatgatgggaagcctgtttcgcagtggctcccggcagacccttt

SEQ ID NO: 288584 - DNA, 201 bp, Homo sapiens
gctagtaacctctaatttattttgtctctatgaatttgtctgttataggtatttcataaaagtgaaattatacaatacttgttttgtgtctggcttatttyttttagcatattttttaaatttgtccatgttatagcatatattactttttgagactgaataatattctactgtaggtatatacatttgtttatctgttca

SEQ ID NO: 288585 - DNA, 201 bp, Homo sapiens
ataggctgggcatggtggttcacgcctgtagtccacacactttgggaggccgagccaggcggagtccttgagctcaggagtttgagaccagcctgggcaaratggcgaaaccctgtctctacaaaaaaaaaacataaaaattagccaggtgtggtggcttacgcctgtggactcagctacctgggaggctgaggtgggagg

SEQ ID NO: 288586 - DNA, 201 bp, Homo sapiens
agatgaaatgatttaatgtatagaatgtgttattacagttatttattatttatatcttgtctgcttcccaaaggatatggcttataatacatagacacaatttttttttttttttttgagatggagtcttgctctgttgccaagctggagtgcagtggcacgatctcggctcactgcaacctccccctcctaggttcaagc

SEQ ID NO: 288587 - DNA, 201 bp, Homo sapiens
tactctgtggtctatcttgaataatctctatgcttttgacaagaatgtgtattctgctgatgttgagtggcatattctaaagatgtctttaccttaatttktgtagcatttttcactgggtatgcatttttatatgtattgtagaaatcatgagttcacaccattacatctaatgctagtccatcctaggaaagttccttc

SEQ ID NO: 288588 - DNA, 201 bp, Homo sapiens
  misc_feature (1)...(201): n = A,T,C or G
aaagctttggtaatctctcagcaaagtgccacatatactgtttagtagtctaagatgtcatctactgaaggtaaatagtttagtcacctcttaatgcaatnggagtctgggtttgagcagttgttagtatatcctaatgaatctgattttcactaaaatgatcagttttttttttaaatcctattggaggctttttctcag

SEQ ID NO: 288589 - DNA, 201 bp, Homo sapiens
tacttagggacagtgtcaggaaagtcagggtggaaagaacctaaatgaccaattttaagttttaaatgtttcttcaacctgtttctaaaaagtgataaatwaaaaaacctgacatttttggaactttggccttttagcttccattcaatatattcttctatcactttgtatttgttcacaattactgtattccattgaaca

SEQ ID NO: 288590 - DNA, 201 bp, Homo sapiens
atacttccttcccatagaatattcagatatttcacagaactccagaatttgaataaatatgagaggttatcttgtttaaccttcttgaatctcttcgaggdtaagtttagaatgttggcgtcttgagttgtgttacagtaacactaagttgtgaactggagctcaacttttcctctgtggtcccatatttccccaaccatg

SEQ ID NO: 288591 - DNA, 201 bp, Homo sapiens
atattcagatatttcacagaactccagaatttgaataaatatgagaggttatcttgtttaaccttcttgaatctcttcgaggttaagtttagaatgttggygtcttgagttgtgttacagtaacactaagttgtgaactggagctcaacttttcctctgtggtcccatatttccccaaccatgcctagcagtcccagtctc

SEQ ID NO: 288592 - DNA, 201 bp, Homo sapiens
tattcttgtagttatggaatttgctttgaggatagtcaatggaaatccttcatatttgtgtaaaacttgagatttagattttttaaaaaagtatttcccawgagatatattaatgaggcaatgcctgataatccagttgcttttcctgttcccctaccctcagtaatagttcttggagcgcttacatgtgacagacaacat

SEQ ID NO: 288593 - DNA, 201 bp, Homo sapiens
aatgctcaccactatccatttccagaactttttcatcatcccaaacagaaactccatacccattaagcaataactccccattccctccacccctcagttgstagtaacctctaatttattttgtctctatgaatttgtctgttataggtatttcataaaagtgaaattatacaatacttgttttgtgtctggcttatttct

SEQ ID NO: 288594 - DNA, 201 bp, Homo sapiens
ttgtatttaaatttttgttttttattttttgagacagagtctttgctcttgtctctcagtacagtggcgcggtctcagctcactgcaacctctgcctcccrggttcaagcgattctcctgcctcaccgtcccgagtagctgggattacaggcacacaccaccacacctggctaattttttaatttttagtagagacagggt

SEQ ID NO: 288595 - DNA, 201 bp, Homo sapiens
aaaatacaattttgatggcatacattgttagagctgataagaaaacagttaatctaacaagtggaacaaatatgttgattggagaaggcatataaagcaaytacccaagccaaacaggaattccaaaaataaattattttaaaagttcattttgaaggatttctgcaacaattatgcacaacaccgaagccttcagcatac

SEQ ID NO: 288596 - DNA, 201 bp, Homo sapiens
tcatgcctgtaatcccagcactttgggagactgaggcgggtggattacttgacaggagttcgagaccagcctgcccaacatggtgaaaccccatctctacyaaaaaatacaaaaattagttgggtgtggtggtacgtgcctgtagtctcagctggtcaggaggctgaggtgggagaatcgcttgaactggggaggcagagg

SEQ ID NO: 288597 - DNA, 201 bp, Homo sapiens
agcaattacccaagccaaacaggaattccaaaaataaattattttaaaagttcattttgaaggatttctgcaacaattatgcacaacaccgaagccttcarcatacatagacctcccttacctagttttctgtgtacttttattctcacgattaatatcacagctatgcatattcatttttttaaactgtgggaatgaaag

SEQ ID NO: 288598 - DNA, 201 bp, Homo sapiens
catccaagtcatctcttgaatgctttgctgcttagaaatttcttccatcagataccctaaatcatctctctcaagttcaaagttccacaaatctctagggyaggggcaaaatgccaccagtctctttgctaaaatatataaagactcagctttgctccagctcccaataagttcctcatttccatctgagaccacctcagc

SEQ ID NO: 288599 - DNA, 201 bp, Homo sapiens
atttaaagcaagaaatattatgcagtattggtgtattgtcactacaggcatctcaagtccagcattaaaaaaatttatggtaaaatatatagaatataatrttaccattttaaaccattttcaagtatacaattcaatggcattaagcacattcacaaagttgcacaatgctcaccactatccatttccagaactttttca

SEQ ID NO: 288600 - DNA, 201 bp, Homo sapiens
acacagttagtaagtagtaaagctaagtcacacccaaatcataactactgcactagatcatctcaaaaatgtgcatatatgttactgttatttaaaatgcmtttaacctgtcaacagagagtaatgaggaaagctttaaagtaccttaaaaggcattagtggcaaacctgataaaattttttaaaaaatctgtggttaata

SEQ ID NO: 288601 - DNA, 201 bp, Homo sapiens
gctgctaataaagacatacctgagactgggcagtttacaaaagaaagaggtttaggccaggtgtggtggctcacacctgtaatcccagcactttgagaggytgaagtgggcagatcacctgaggtcaggagttcgagacctgcctggccaacatggtgagaccccatctctactaaaaatacaaaattagctgggtgcagt

SEQ ID NO: 288602 - DNA, 201 bp, Homo sapiens
gctacttgggaggcaggagaataacttgaacccgggaggtggagattgcggtgagctgacatcgtgccactgcactccggcctgggcaaaaagagcaaaaytccatttcaaaaaaaaaaagtttaatggacttacagttccatgtggctggagtggctccacaatcatggtggaaggtgaaaggcaaaaggcatgtctcat

SEQ ID NO: 288603 - DNA, 201 bp, Homo sapiens
tatctccttagtctcttctaatctgtgattgttcctaagtcttctctttcattgctatgacacttttttttttttttcgagatgaagttttgctcttgttrcccaggctggagtgcaatagtgcagtcttggctcactgcaacctccgcctcccaggttcaagcaattcttgtgcctcggcctcccaagtagctggggtta

SEQ ID NO: 288604 - DNA, 201 bp, Homo sapiens
gttcacagaggcaacactccttcacccttgggagataagtcttcattgcttttcacgtggccatcgtcttgtccgttggcctttgcaggggaagcacctgmcgcaaccttggtggtcacgtcttccgaggagccttggagctctggctgcctatgatgggggtctgctggggggtagccagtatccaacccagactcacac

SEQ ID NO: 288605 - DNA, 201 bp, Homo sapiens
aacttgggaaataagtttaaatgcttttttcacatttctgatttattatagagactagcattcaactactgctcaataaatatttgttgaatgagccaagmatcaatcttgttctttgttttagaaagtaactcatgacatggacatgtgctatgggatgatgggaagcctgtttcgcagtggctcccggcagaccctttt

SEQ ID NO: 288606 - DNA, 201 bp, Homo sapiens
ttctgcctcagcctcctgagtagctgggactacaggcatgcaccaccgcgccctgttaatttttgtattttttgtagagatagggtttcaccatattgacsaggctggtctcgaactcctgaccttgtgatctgcccaccttggcctcccaaagtgctgggattacagatgtgagccactgcatccggccaactatgtttt

SEQ ID NO: 288607 - DNA, 201 bp, Homo sapiens
tgccatgttttcttctaagagttttatagttttaactcctacatttaggtctttgatccattttgagtttacttcttttcttttcttcctttttttttttygaaacaggttctcacactgtcatccaggctggagtgcagtggtgtgatctcagctcactgcaacctctgcctcccaggctcaagtgattctcccatttca

SEQ ID NO: 288608 - DNA, 201 bp, Homo sapiens
aatgagataccctgtgccttagtttcctcaaatgtaaaaatggggataatacctacctcctaaagctgatgaaaaacggaggtaatatgtgtataaagatvgacatgacagcctttctcaaccaaggctccatatccgaaacacagaaaattattactattattttacctttccaatggagctgaatacagaaaattattt

SEQ ID NO: 288609 - DNA, 201 bp, Homo sapiens
gcagtggtgtgatcatggctcactgcagccttgacctcccgggctcatagctttgtttttattcacacatcatgatgtttatgtcattttgctttttgttyatggttcctcttctgttggagacctcttcttttcctcttagcctgctgctaatacttttagcctggtgattaagagcttggggctagggttggcattttg

SEQ ID NO: 288610 - DNA, 201 bp, Homo sapiens
cgggcgcgagcagaggggcggcgcggggcggtgccgggcggcgggggcggggagggcgcgcgttgaggcggctgcggcagttgcgcgctgggattgttgcsgtgcgctggagccggtgagtgcggcgggccccgtgggcgggcggggaaggagcgggcgaacggggagctaggtggggaggtgcgcggccgaacacgcgac

SEQ ID NO: 288611 - DNA, 201 bp, Homo sapiens
gaatcaccgtgaggaggatttgccatctcaatgttcttagactttagcagacttatttatttcttcccctgttgcataatccctatgcattatattggtcrggaggcaggaatgttacagattcttttttttcaaagctcagtttgctctgagatttggaattaacctttagaatgttctggatttatcccccatatgcca

SEQ ID NO: 288612 - DNA, 201 bp, Homo sapiens
cccattggatagttctcttcagggtgaatctgcagccaaatctggcccccaaagaactgcatcctaaaagtgaatccatgtggatcagatgccggaaggcrtccttccaagcgaggcaagacaatgctcccattcttctcatttgttcacggtcccaatgggcattaaaacctgaaaaccttgtgtactcaagtctttctt

SEQ ID NO: 288613 - DNA, 201 bp, Homo sapiens
atatttccctaatagtaataggaaaagattaatagagttaaatcacccaaagttatacttgagctttatgtaagtctatggtaattaagacagtgtgataytagtgttaagataggcatatagattatggaaccaaatggggagttcatagacccacatatatataatcaattgattttcagcaatgaagttaagctaatt

SEQ ID NO: 288614 - DNA, 201 bp, Homo sapiens
cggagctgggggacggaacagcgcgccggtccctggccgggcgcgagcagaggggcggcgcggggcggtgccgggcggcgggggcggggagggcgcgcgtygaggcggctgcggcagttgcgcgctgggattgttgcggtgcgctggagccggtgagtgcggcgggccccgtgggcgggcggggaaggagcgggcgaacgg

SEQ ID NO: 288615 - DNA, 201 bp, Homo sapiens
aagggctggggagggtattgcaaaagaacatgaaggaattttttggattgaagaaaatattctacatcttgattgtagtagttgttgcatgagtgtatacygttatcagactcaccaaaattttcatttaaggggggtgaatgttattttaagtaaatgataccttagtaaagttggtggaggaatgagacttgagaagct

SEQ ID NO: 288616 - DNA, 201 bp, Homo sapiens
tttcttttctgtacctagggtatatgcaggaatttagccagtcttcccaatggtcagctgcagttagatggaggactgggcaagaagtcattgaaactccrtgacaaatatggaaaagatgaacttcttttttaacttgtagaatccttagtctgtgtagatgttttcatcagcatgttttgtccttatgaggatgtgggg

SEQ ID NO: 288617 - DNA, 201 bp, Homo sapiens
acatacactgtgtatactacatatgttaatactttattcatttatagtgataatgtgggcttttaagtgcaaaattctgaaatcagctaacccttaaaagkttcccccattcctgtggtggacagaaaccagtatttgacaactccaaagtgtaaagataaaaatgttttcgtgtttcactcattatccaattacatttca

SEQ ID NO: 288618 - DNA, 201 bp, Homo sapiens
ctacatatgttaatactttattcatttatagtgataatgtgggcttttaagtgcaaaattctgaaatcagctaacccttaaaagtttcccccattcctgtkgtggacagaaaccagtatttgacaactccaaagtgtaaagataaaaatgttttcgtgtttcactcattatccaattacatttcagggaaaactgcctttg

SEQ ID NO: 288619 - DNA, 201 bp, Homo sapiens
tgatctaactccttaacttcatcttacttttgctgagacacttaaaaatttatagtactggcaagaagttccacttcccccaattcgctgtacatgtaaayttgatttagacacctggtgatttgtagtaaacagtcttacataaaccgttggtttgttgacttagttggtctagggatggcagtagcgaagccaaggtga

SEQ ID NO: 288620 - DNA, 201 bp, Homo sapiens
caaaataaaaatatttccactattgtcactaatttgaactttttaccctagtaaacagcagatgaaatttagtatctactatttttttgtgaaatgtcccratattttcaaatcataatgccacaatttgacaacttctgtagctatagctttactgttatacattttctctactgttatgccaccttatttactattgac

SEQ ID NO: 288621 - DNA, 201 bp, Homo sapiens; identical to SEQ ID NO: 59156

SEQ ID NO: 288622 - DNA, 201 bp, Homo sapiens
gagccctggctccataacttgaaatctgcatgccgttaggcaagttaatgagataccctgtgccttagtttcctcaaatgtaaaaatggggataatacctmcctcctaaagctgatgaaaaacggaggtaatatgtgtataaagatagacatgacagcctttctcaaccaaggctccatatccgaaacacagaaaattatt

SEQ ID NO: 288623 - DNA, 201 bp, Homo sapiens
tatgaagtgggacttcattttacagatgatgaaattaatgtacagagaggttaagtaaataacccagatcgtatgtctagtacatggtacaaatctagttytaagtcgagacttttaactactagtacaccatactgctttgtgtatctactagtaaaagtatttaagagaaaaatgtctggttgctagaaaattgcacct

SEQ ID NO: 288624 - DNA, 201 bp, Homo sapiens
tttaaaaaaatcagatgtcagtatacagatgccaatattaagttactaaattaatgattttcttttctagaatacaaaatacagttaaaataaaatgtcarcctcctggagtgatcggttacagaatgcagcagatatgcctgctaacatggataagcatgccctgaaaaagtatcgtcgagaagcctatcatcggtaagt

SEQ ID NO: 288625 - DNA, 201 bp, Homo sapiens
actgatgaagtctgaataaagttgtgaattgtgtcaatgtcaatttctttgttgtgatatttttctatatggcacaagatttccccattgggggacactgkgtgaagggttcatgaaatctctgtatcatttcttactcaactgcgtgtgaatctacaattactccaaattaaaaagtttaacttaaaaaattctcttggg

SEQ ID NO: 288626 - DNA, 201 bp, Homo sapiens
ttatctgtccaagcagaattacactaaaaccccccaactcatttcacagcagctacccaggagccattcagggatggtaatttaatttcattcccaggccmggcaagatttgattaaggaataaatactgtgtatcttatcagaagtaaaattttgcgtaagtcttaaacaagttatcctctccctttagggagaattata

SEQ ID NO: 288627 - DNA, 201 bp, Homo sapiens
ggggcagtgatggctctgaatgttaatcacctctggtattttttatttactcttctgagatctagagaatgaggccatattgtattcttgaactaagctaygctgtgtatatgcagtatacacactgtgctgaactgagttacggatatagttctgtaaaagtgcttgatatacaagttctccagccagccttgatgcgca

SEQ ID NO: 288628 - DNA, 201 bp, Homo sapiens
tagctcactgcagccttgacctcctcctgggctctagtgatcctcccaactcagccttccaagcagctagaaatacaggagcacaccaccacacctagctwtttttttattttttatttttcgtagagatagggtctcactttgatgtccaggctggtctcaaaccccgggcttcaaacagttctcctgccttggactccc

SEQ ID NO: 288629 - DNA, 201 bp, Homo sapiens
tgaatgacagggtattttggcaacagagcatgtttccatgagcatgtttaccagtgtgctgaaggaaatagattttggacaacaggtccttctttaaattaaaaaaaaaaaattctttatgacagaggtgtcattatgcttctaatagatgcaaggagagttacttgcctttttgaaacaataagaaaggaagaaatagtt

SEQ ID NO: 288630 - DNA, 201 bp, Homo sapiens
tattaatataacagtattaatttgtccatctcaaattagacaaatcacagtttgatgttcgatttaggctacaaatgtgaatgaataatacgtgttcaaamacgaaattacgggagtacttgctacatagatacggtcatgatttttttaccaaacaagtaatacattaaaaatatacacagttcctgatttgaatttttc

SEQ ID NO: 288631 - DNA, 201 bp, Homo sapiens
tatttacttggatggagtttattcaagtttaatgtcttaactgctgtgggatatgataataaaagctgttacatttgtctttatattgaagtctgtgcttygttttagagtgttcctgtcacctagagattgtttttcatgttaatgctcaaatctgcaacttacaaagacttagtatgttggaattgctggctaattgtg

SEQ ID NO: 288632 - DNA, 201 bp, Homo sapiens
gaaggtgatatgtttgggggctggaggttggagggtgttttttgtttctttgtttgagacagggtcttgctctgttgcccaggctagaatgcagtggcacratctcagttcgctgcagccttgacctcttgggctcaagtgatcttcctgcctcagcctcttgagtagctgagactataggcatgtgccactacacgtggc

SEQ ID NO: 288633 - DNA, 201 bp, Homo sapiens
tggagggtgttttttgtttctttgtttgagacagggtcttgctctgttgcccaggctagaatgcagtggcacgatctcagttcgctgcagccttgacctcytgggctcaagtgatcttcctgcctcagcctcttgagtagctgagactataggcatgtgccactacacgtggctaattttttattttttgttgagataggg

SEQ ID NO: 288634 - DNA, 201 bp, Homo sapiens
aaactgctgtgctgtggttttagtgccttttctagaatctaggattagagtaattactggcagccatgcttaattatttggaagtatatgttatctttccrgattgaaattaccatatgaaattatttttccaactttagattattgagaagtgtcagtataattttcagcatatttactgtattcagtgtgttttaatag

SEQ ID NO: 288635 - DNA, 201 bp, Homo sapiens
tatatggaccttatgttaaatttttttttccagaaaattatgacttacctgtttgacttcccacatggccccaaggtaccgtatgtgactcaatagaccaytgctttaataacagtgaatgcatttaatcattctggaatattaagggggaaagaattggtcagaacccacccagaaaagtcctactttttaagcctattg

SEQ ID NO: 288636 - DNA, 201 bp, Homo sapiens
gttaaatttttttttccagaaaattatgacttacctgtttgacttcccacatggccccaaggtaccgtatgtgactcaatagaccactgctttaataacartgaatgcatttaatcattctggaatattaagggggaaagaattggtcagaacccacccagaaaagtcctactttttaagcctattgtctaatcttcatta

SEQ ID NO: 288637 - DNA, 201 bp, Homo sapiens
tcttaggttagagataggatttttgcctgtgtctatttaatgtgttaggaggattttcatatagttttggaaaatggaaaaaagtccttgggcatttgttyatatgataattggaaagatctcacttaaaattttctcagagaaaaatgtgcgttatcaccttttctagttagaggcttagagaaccaacatcatgtagcc

SEQ ID NO: 288638 - DNA, 201 bp, Homo sapiens
tgaaggcagcccaaatgttcttcagcaggtacatacataaacagtatgtggtatatttatagaatagattataactcaggtaaaataatgaactagtgatrcatagagcaactgatcactctcaaaggcataatgctgagtcaaataagacagtcttaaatgacatctggcatgattttatttatatgatagtctcaaaga

SEQ ID NO: 288639 - DNA, 201 bp, Homo sapiens
tgaaaggaattttcaggttgtggatgatatttgattaacagaaacagaaaatgtatgtgtattcttgacaacttctagattttgtattagttgttgctaartttttgccaagagagcactcagccttgatatttagcagagaagtcttcatttctgcagtacggctgcacttaggtttaaggaatactccttgcaacttag

SEQ ID NO: 288640 - DNA, 201 bp, Homo sapiens
ctaggctggtctcgaactcctaggctcaagggatccgcctggcttggcctcccagagtggtgggattataggtgtgagccactgcaccttgccctatgtatttttttttttttaaaggagtattcaggagtcattactaaaggtgcaaagtattatatatcgtctgaatgtaaaaattgtacagcttgtttatacctttat

SEQ ID NO: 288641 - DNA, 201 bp, Homo sapiens
ccttgccctatgtatttttttttttttaaaggagtattcaggagtcattactaaaggtgcaaagtattatatatcgtctgaatgtaaaaattgtacagctkgtttatacctttatgcttttgaagacctcagttaattatggcaacgttttgaagaaatagctcagtcttttaaaatgttttccttacatgctctcttgtt

SEQ ID NO: 288642 - DNA, 201 bp, Homo sapiens
agaagcagccttaatgtgttgatgtagaacaaatatatagcattctatgtgatatggcaggatagtagcaatagaatgttgatgagaacatagcaaaattmgtcttttttgtatattttcaaaagtttaggaacagatgaaataaatttgtagtttctagttacaatttcagactacagataggagcatgtagctgcttga

SEQ ID NO: 288643 - DNA, 201 bp, Homo sapiens
tagaacaaatatatagcattctatgtgatatggcaggatagtagcaatagaatgttgatgagaacatagcaaaattagtcttttttgtatattttcaaaastttaggaacagatgaaataaatttgtagtttctagttacaatttcagactacagataggagcatgtagctgcttgaagaagaaaaacaaattgtcaaggc

SEQ ID NO: 288644 - DNA, 201 bp, Homo sapiens
aggctgctgaatttgaaagacttcttgagagagaacttattaggggagactgcccccttggcctcagcaccctggataggggatgctggctcaatggcatygccagtggccccggctgcctcatgtgttctgttcacagaggcaacactccttcacccttgggagataagtcttcattgcttttcacgtggccatcgtctt

SEQ ID NO: 288645 - DNA, 201 bp, Homo sapiens
gaatcgcttgaatctgggaggcggaggttgcattgagccgagatcgcgtcattgcactccagcctgggcaacaagagtgaaactctgtctcaaaaaaactaaaaaaaaaaaaaaccaaaaacttatcatgaactatttaaaagatgagaggtaatgaaacatttaagataatttaaatgcaacagtttcaaggagccttct

SEQ ID NO: 288646 - DNA, 201 bp, Homo sapiens
atcttggtgttcctgaattaagctcagtttattgcaactgaggaagacccacttacaggtaaaaaaggagattactaaaactgatgggcagtaatcacagrtggtgctatttggggctgttggcaaataggtacgtgtttctctaatacacttaacatgatagaagcttggcagtttccatttctggatttgatagggaat

SEQ ID NO: 288647 - DNA, 201 bp, Homo sapiens
ttttcagcagttgcctagagctgttggagcagctgttttcctttctttgggggagggtgatggtagtggtgaaggggactgtgcatgttttgcctgtgaawtattattttttttttttttgagacagagtttcgctctgctgcccaggctggagtacagtgatgtgatctcctgacgtcaagtgatccattcgcctcggcc

SEQ ID NO: 288648 - DNA, 201 bp, Homo sapiens
atttggggagtagctactttgctctgcctgctttctgagcctctagcttttttctgtctagatgcctcatgaatcaacggtggagcacacacacgtagatwtcaatgagatggagtctcctcttgccacccggaaccgcacatcagtggatttcaaagacactgactacaagcggcaccagctgacacggtcaattagtga

SEQ ID NO: 288649 - DNA, 201 bp, Homo sapiens
tcagcagttgcctagagctgttggagcagctgttttcctttctttgggggagggtgatggtagtggtgaaggggactgtgcatgttttgcctgtgaattattattttttttttttttgagacagagtttcgctctgctgcccaggctggagtacagtgatgtgatctcctgacgtcaagtgatccattcgcctcggcctcc

SEQ ID NO: 288650 - DNA, 201 bp, Homo sapiens
agcagttgcctagagctgttggagcagctgttttcctttctttgggggagggtgatggtagtggtgaaggggactgtgcatgttttgcctgtgaattattwttttttttttttttgagacagagtttcgctctgctgcccaggctggagtacagtgatgtgatctcctgacgtcaagtgatccattcgcctcggcctccca

SEQ ID NO: 288651 - DNA, 201 bp, Homo sapiens
atcgccagtggccccggctgcctcatgtgttctgttcacagaggcaacactccttcacccttgggagataagtcttcattgcttttcacgtggccatcgtsttgtccgttggcctttgcaggggaagcacctgccgcaaccttggtggtcacgtcttccgaggagccttggagctctggctgcctatgatgggggtctgct

SEQ ID NO: 288652 - DNA, 201 bp, Homo sapiens
gtgcacctgtaatcccagctacttgggtgcagttgttgtttgtgtatatgcagttgctgtttgttttattttgtatatcactcctttactttactcaggtytctgaacaaatattacctcctcaaagaggccttccatggttttcctacctacagtattgttactggaaaggggtcctgatccagaccccaagagagggtt

SEQ ID NO: 288653 - DNA, 201 bp, Homo sapiens
ccatggctagtgtccactccttcgcatttctctgagaaattttcaggaagatagaaatgaacatttattaaacgtactagaaaatgtactttatgtacaaygtaccttttaatccttaccacagcctgctgaggtagggattactagcaacattgtacaaaaataaggccaggcatgattgctcacaggggtaatcccagt

SEQ ID NO: 288654 - DNA, 201 bp, Homo sapiens
taatgagaccctgtctgtacacaaattaaaaaaaataataattagctgggttttgtagtgagtacctgtatttctagctgttctggagcctgaggtggaaggatcacttgagtccaggagttcagggttacagtgagctatgatcatgtcactgcactccagcctgggcaacagtgagaccctgtctcagaagaagggaga

SEQ ID NO: 288655 - DNA, 201 bp, Homo sapiens
ccagcagtgtagtagaattcaggttgctctacattctcaacaacatttgatactgtctttttaattttaaatattcaaataggcatattttggtatcttaytgtgtttttaatttgtatttccctagtgacaaatgatgttaaacatcacttcatatgcttatttgccatttgtatatattctttgatgaaatgtctatgc

SEQ ID NO: 288656 - DNA, 201 bp, Homo sapiens
gttgtcttttttttccatattgatttatggaaggtgtgtgtgtgtattctcttaaaaaatagcagcttcagtggggcgtggtggctcatgcctataatccyaggactttgggaggccgaggtgggtggatcatgaggtcaagagatcgagaccatcctggccaacatggtgaaaccccgtctctactaaaaatacaaaaat

SEQ ID NO: 288657 - DNA, 201 bp, Homo sapiens
gcgcggtggatcatgcctgtaatcccaggactttgagaggccgagataggagggttgcttgagcccaggagttcaagatgagccagagcaacataggtgarcctctgtctctacaaaaaataaaaaattatccgggcttgctgacgtgtgcctgtagttcctgctactcaggaggctgaggtaaggaggatctcctgagcc

SEQ ID NO: 288658 - DNA, 201 bp, Homo sapiens
aaaatatataaagactcagctttgctccagctcccaataagttcctcatttccatctgagaccacctcagcctagaatttgttgcccatgtcactatcaayatttttgtcaaagccattcaacaagtctctaggaagttctaaactttcccacatttttctctcttcttctgagccctccaaattgttctaacatttgtct

SEQ ID NO: 288659 - DNA, 201 bp, Homo sapiens
ttacttagttttataatactaaatccagaaatctagttctgaggcttcaaatgagaaattcttttccgagtaaatgagtgacataaagtccttaacattayctcctcgtggttacagatcagcatctgacagactgctaatctgcaaaatgtggtttcttcaagaagcagaatgctagccagcagctgttaagtgagagta

SEQ ID NO: 288660 - DNA, 201 bp, Homo sapiens
caaataatgctatttttataaaatattaatctactacttaactctaagaggatatttttcatccttatttgaaactacttactgatgaaaacttcaaaaasagaagtgaaacctaagaatagcctaatgtaaaagtagttaaaaacacttaagctgcccacctcattttagatgcttatcctaattagatggaatgtttta

SEQ ID NO: 288661 - DNA, 201 bp, Homo sapiens
gggctcaaagcgatcctcctgtctcagcctcccaagtagctgggagtatagttgcaaaccactgtgttactaaatacaaaaaattagccgggcatggtggygtgcacctgtaatcccagctacttgggtgcagttgttgtttgtgtatatgcagttgctgtttgttttattttgtatatcactcctttactttactcaggt

SEQ ID NO: 288662 - DNA, 201 bp, Homo sapiens
gtacatggtacaaatctagttctaagtcgagacttttaactactagtacaccatactgctttgtgtatctactagtaaaagtatttaagagaaaaatgtcyggttgctagaaaattgcacctaagttaataaaaatttttttttctttctttttttgagggagtgctggatggacagagtcttgctctgttgcccaggctg

SEQ ID NO: 288663 - DNA, 201 bp, Homo sapiens
gctggttttgaactccagacctcgtgatccacctgcctcggcctcccaaagtgctgagattacaggtgtgagccactgcgcccggccaagaatgaaattcttttttttttttttttttttgagacggcgtctcgctccctggcccaggctggagtgcagtagcacgatctcactgcaggctccgtctcccgggtccacgcc

SEQ ID NO: 288664 - DNA, 201 bp, Homo sapiens
agaaatactttgtcaacaactttaaagcccagcaatttttccaaggctgcctggtcattttaaaataaatactctgcttattcaccacgaatagcctgagmcaactacatatttaagtctgtattagggtaggaaccttacccacattccatgttatggaaactatttaatctgtctttgatggtgggaaaaatggtaact

SEQ ID NO: 288665 - DNA, 201 bp, Homo sapiens
ttctggattgttcattgctagtttatggaaacacaactggttttttgtatattaatcttgtatcctgccactttgctgaacttgtttattagctctaattgtgtgtgtgtgtgtgtgtgtgtgtgtgtgtgtgtgtgtgtgcatgttttggagatgaggtctcactctgttacctaggctggatgcagtggctattcacgg

SEQ ID NO: 288666 - DNA, 201 bp, Homo sapiens
tttcgttaaattgtaagcgttttctagctttctttgtgatttctattatttaggagtgtgttgtttaatttctacatatttgtgaatgtcccaaattttcttttttttttttctttttgagatggagtctcgctctgttgtcatgctggagtgcagtggcacgatcctggctcactgcatcctccacctcccgggttcaag

SEQ ID NO: 288667 - DNA, 201 bp, Homo sapiens
gccaggatggtctccatctcctgacctcgtgatctgcctgcctcggcctcccaaagtgctgggattacaggcgtgagccactgtacctggcccttgaaagttttttttttttgagatagagtttcgctcttgttgcccaggctggagtgcaatggcgtgatctcagctcaccacaacctccgcctcctgggttcaagtgat

SEQ ID NO: 288668 - DNA, 201 bp, Homo sapiens
gtggaggagctggaatttaagccttagttcttctagtgcccattctctttccattacaccatactgcttttctaaataaactgaaaataattttcttttgktttttcttttttattttttctaccttaaagtcttttatcccttaattttattttgaatttatagtatttagtagtgcttttaattacttagtaactattt

SEQ ID NO: 288669 - DNA, 201 bp, Homo sapiens
caccttggcctcccaaagtgctgggattataggtgtgaggcaccacttctggtctcaaactcctttttaaaaaaagtctccaaggccatctctacaaaaamaaaaaaaaaaaaaaaaaaaaaatagctggacatggtggtgcgtacctgtggtcccagctacttgggaggctgaggctgaggtaggaggataacatgagcc

SEQ ID NO: 288670 - DNA, 201 bp, Homo sapiens
gctgaaagagattatctaaagcagaaatagaagttaatggtgtcaaaaagtgacaaatatttttcccttggttattaagacaatctctttacattgaaatrgttcaatttagtaagtatttattgagaatctataatgtgcctggcacattttgttactgaaaactgaggtgattatatattcccacagaataatgaaaaa

SEQ ID NO: 288671 - DNA, 201 bp, Homo sapiens
ttctcagtggttacactgttttattttctttggcccaatatattacctatctcttgctctgattttccaagaatattaatacctaataataataccagtactatcttaccaaaagaacaatgctgttggtagaacaggttttctcattaaggctataatattgacaacatagtatagttacaatatttctgggctgggcat

SEQ ID NO: 288672 - DNA, 201 bp, Homo sapiens
cacttagcactgtgcagtctttagagttaaacagaaaagctggccaggcacagtggcttacgcctataatctcagcactttgggaggacaaggcaagaagmcttcttgagcctaggagaccagcctggacaataaagtgaaaccctatctctacaaatatcaaaaattagctgggcatggtggtacatgcctttggtccca

SEQ ID NO: 288673 - DNA, 201 bp, Homo sapiens
ggaggccgaggtgggtggctcgcctgaggtcaggagtttgagactagcctggccaacatggtgaaaccccatctctacttaaagaatacaaaaattagccrggtgtggtggcgggtgcctgtaatcccagctactcgggaggctgaggcaggagaatcgcttgaatacaggaggcagaggatgcagtgagctgagatttta

SEQ ID NO: 288674 - DNA, 201 bp, Homo sapiens
tttgtattgtttttgtagagacaaagtcttgctatgttacccaggttgatcttgaactcttgttctcaagtgatcctcctgccttgtccttccaaagtgcygggattacaagtgtgagccaccatgccccgtgtttaaaataaagtatatgtgtgcttttagaacaataaaaacattatatatatatgtgtgtgtgtatat

SEQ ID NO: 288675 - DNA, 201 bp, Homo sapiens
gccaccatgcctagccatgcttggtaatttaaaaaatttttttctagagatgtggtctcactatgttgtccaagctggttttgatcttctggctgcaagcagtcctcctgcctcggcctccaaaagtgctggaattacagatgtgagccatcactcccagcctgaaaaaaaaattaaatgtagaaaatttgggttcttggt

SEQ ID NO: 288676 - DNA, 201 bp, Homo sapiens
aaagtggggggatgagttgttaatatttatttaagcccttcacaaatatagagtgactcttggtttaggattatgaaactatagtatttctaacttggctyactggctcatttgggaaatcataatgactttttttttccccccccaatttcgaaggcttgagttttttggctctcttgtgactcctggtgcttggaaatc

SEQ ID NO: 288677 - DNA, 201 bp, Homo sapiens
ctttttgaaacaataagaaaggaagaaatagttaatgtttgcagttgcacgaaagagtaaatgtggtaaatttcatgaagttaacacaaaaattatacatrtagaattattaaatttccagaagtcttaaccccaaggaagactagagcaacataatggtagaaagtggggggatgagttgttaatatttatttaagccct

SEQ ID NO: 288678 - DNA, 201 bp, Homo sapiens
gatgaaactctttgatgaattaagatggaagattagctgagctgaacttactattgatagcgtgtaaactggttgcatctatttggagttcttactgtgasgagaggtctctgaaaggaatgtatttgttgaaaagtctttggtacaaaacaagaaaggtaacctttatcaaaaagaccaaagaaattctcattgtcctag

SEQ ID NO: 288679 - DNA, 201 bp, Homo sapiens
tgagttaatttttgaataatgctatttcccaattattataatgttattttaaaaatcagttaatttttaaatttttctttcagaccagaaactagagaacrgtatccaaataaatttatccagcgagatgatactgaaagattttacattctgaacacactattcaacctaccaggtagattcattctatgcttatttata

SEQ ID NO: 288680 - DNA, 201 bp, Homo sapiens
gattcaaaggagatgacatgatctgtgaaggaaattgcactgggcaggtgtcagctcaggctgctgtccacatgatgcctgggacatgtctgagggactakcctgctgcaagttaacagcacataattctggaagggcggtgggaaaccctgagccagaagtggttcttattttcgctcatgtgtgtgcagtgagtattta

SEQ ID NO: 288681 - DNA, 201 bp, Homo sapiens
ctgttccaaattacattcccactagcaatgtacaagggttcccttttctctgcatcatcaccaacacttgttatcttttgactttttgataatagccattytaacagatgtgaagtgatatcctattgtggtttggatttgaatatccctgattattagtgatgtttagtatcttttcatatacctcttggccatttgtgt

SEQ ID NO: 288682 - DNA, 201 bp, Homo sapiens
gagggcattatgctaagtgaaataagccagatacagaaaaacaaatacatacaattttacttatatttgtaatctaagaaagtcaaactcatagaagcagrgagtaggtggaatggtggttgctagggtgaggggatggggaaaatggggagatgttagtcaaacagtataaactttcagttatcagatgagcaaattctg

SEQ ID NO: 288683 - DNA, 201 bp, Homo sapiens
tctcgaagtcatgacttatgaggggagtaatgttcaggtggagatagatagctgtttgtttaaaaagtagatcttagtcacattttatatttagacaagastgttcaaaagcaaatgttgccatttttcattaaggaggtgaaatgcagagaaaaaagaacccctataaactcttgggtgggagggaaattaatagaactt

SEQ ID NO: 288684 - DNA, 201 bp, Homo sapiens
cataacactaatgggcattaagtttgggtctaaacaggcaggcttaagattttttaaatttacaaaatatatttagctaaaagcaatttcatcacccaaaytgcaagcccctctgaggtagttctgcatagcccttcagttacgaagctgagaggtgaggatgtcctacttagtagagacttttcatgggaaggtgcctct

SEQ ID NO: 288685 - DNA, 201 bp, Homo sapiens
taagtggataggttttaaaacagctgttaaaacagctccaaagaaatgcacatcctgactgcctaatcagacctatacagagaaacaaagcatttggaccrcatgaatggatccattatcacatgtttatccattcagtgttaaaattttttaaaatcgatgttataaaataccattcaaacgaatgtagcattggcatgg

SEQ ID NO: 288686 - DNA, 201 bp, Homo sapiens
attaggtcaaatatcaacctttccatgtgcagatcccatcaaagtagaaggtctatttttaaatatgtgtaggaacagttatgcagagcttagatcaatawggttacggcattttatgatcttgagacagactcagaattacattttatgaaacatgcaacttaggccaggcatgatggctcatgcctataatcccagtac

SEQ ID NO: 288687 - DNA, 201 bp, Homo sapiens
ggtcagggagaagatctataacattctgctaggtggatgagagattcaaaggagatgacatgatctgtgaaggaaattgcactgggcaggtgtcagctcakgctgctgtccacatgatgcctgggacatgtctgagggactagcctgctgcaagttaacagcacataattctggaagggcggtgggaaaccctgagccaga

SEQ ID NO: 288688 - DNA, 201 bp, Homo sapiens
cttagtagctgagactacaggtgcatgccaccacgcccagctaatttgtgtgtgtgtgtgtgtgtgtgtgtgtgtgtgtgtgtgtgtgtttgttgttgttgagacagggtcccactctgttgcccaggctggtctcgaaactcctgagctcaggtgatccacctgccttggcctcccaaagtactgggattacaggcatga

SEQ ID NO: 288689 - DNA, 201 bp, Homo sapiens
gttgcagtgagctacgattgcgccactgcactccagcctgggcgacaggaccgaaactctatctcaaaaaaaaaaaaaaaaaagagagagagagagagagaactttcactgtcaaaacttcaaaaccttattgaactgtcaagccacacttttattttctcttgcagtaacttacagtggacaaaaccaaataaattagca

SEQ ID NO: 288690 - DNA, 201 bp, Homo sapiens
ggttgcagtgagctacgattgcgccactgcactccagcctgggcgacaggaccgaaactctatctcaaaaaaaaaaaaaaaaaagagagagagagagagagaactttcactgtcaaaacttcaaaaccttattgaactgtcaagccacacttttattttctcttgcagtaacttacagtggacaaaaccaaataaattagc

SEQ ID NO: 288691 - DNA, 201 bp, Homo sapiens
aggttgcagtgagctacgattgcgccactgcactccagcctgggcgacaggaccgaaactctatctcaaaaaaaaaaaaaaaaaagagagagagagagagagaactttcactgtcaaaacttcaaaaccttattgaactgtcaagccacacttttattttctcttgcagtaacttacagtggacaaaaccaaataaattag

SEQ ID NO: 288692 - DNA, 201 bp, Homo sapiens
cagcccattaactatccatgggtatgaaaactagataaccaaatccaaaaggatggcatgtataaggtttctgggcaagggtttgtccttaacaaaaggcrtgaacctcatgactttctgactttggccaggggctatttcccagttcttgctgtccagtctactccctgcccccttttacatactttaaagttttttttt

SEQ ID NO: 288693 - DNA, 201 bp, Homo sapiens
agtggcacacattacttaaaccaacatcccattggtcagaacttgatcatatagagctgcacgggagttggtaaaatagtctttgtggttggctatgtacmagctaaaattccaaagttcttttctaagggaagacagaatgactagatattggagaacaatcagcagtctcttccacactatgccatcttcccccaggag

SEQ ID NO: 288694 - DNA, 201 bp, Homo sapiens
gaggttgcagtgagctacgattgcgccactgcactccagcctgggcgacaggaccgaaactctatctcaaaaaaaaaaaaaaaaaagagagagagagagagagaactttcactgtcaaaacttcaaaaccttattgaactgtcaagccacacttttattttctcttgcagtaacttacagtggacaaaaccaaataaatta

SEQ ID NO: 288695 - DNA, 201 bp, Homo sapiens
tggacctggaaggcagaggttgcagtgagctacgattgcgccactgcactccagcctgggcgacaggaccgaaactctatctcaaaaaaaaaaaaaaaaaagagagagagagagagagaactttcactgtcaaaacttcaaaaccttattgaactgtcaagccacacttttattttctcttgcagtaacttacagtggaca

SEQ ID NO: 288696 - DNA, 201 bp, Homo sapiens
tttctgtatttttagtacagatggggtttcaccatgttggccaggctggtctcaaactcctgaccttaggtgatccacccatttcggcctcccaaagtgcyaggattacggcataagccaccatgcccggccgcaaatgtgcattttatagacccagtgagcaccatagcgaggagagggtgctacatacagcaccaggtt

SEQ ID NO: 288697 - DNA, 201 bp, Homo sapiens
ctttgttcgattttatctccctctacttatccaccaacacgagaaagtcatctatttggacgatgatgtaattgtacaaggtactctcgctaactgccaaraacacttggaaaagaagcagctgataagtagaataactgtctctcttcatttttcaaataactaattgtgcagcaagttttgactgcttatttaagttgt

SEQ ID NO: 288698 - DNA, 201 bp, Homo sapiens
ttgcctgccctgcagtggctcccagctccacctctctgtctgtcctgaagacaggcctgcaggcaatttcttgttaaaggcttggctatttattaccacasagaaaccacacacacggaagtcactagggctaggaaagctcacagaggtgtaaggggcacagttctggggctctttgttgtgacagtagcaggaaggctg

SEQ ID NO: 288699 - DNA, 201 bp, Homo sapiens
gatgtgaagtgatatcctattgtggtttggatttgaatatccctgattattagtgatgtttagtatcttttcatatacctcttggccatttgtgtgctttytttagagaaatgtctattctggtcctttgcctatttttttttttttttttttttttttgctattgcacatcactcctttattatactgatatggaaaaag

SEQ ID NO: 288700 - DNA, 201 bp, Homo sapiens
catgcaaggtcttcaggggcttatttttaaacttacaggcctcttctcatgcccagaacaactctctgtactctccttttcttcctactcacaggccctakaacctcaaccttcttttctcccctctttgaagatgctactgcccagtgccttgcctgccctgcagtggctcccagctccacctctctgtctgtcctgaag

SEQ ID NO: 288701 - DNA, 201 bp, Homo sapiens
gcagggagggtgctcctggggacagtatcttccccgccggccttcacttcttggccttgccctgggcagccacagcttccatggctttgcgcaccgtctcytcatcccccagaaactgcatgggcttgataggcttcaagttcttgtccaattcatagacaatgggaataccagtcggcaggttcagctccatgatagcct

SEQ ID NO: 288702 - DNA, 201 bp, Homo sapiens
aaaatgagtgtaacctccacctcaaaaaccttatgggccagtctggactgcagggaggtggaacagtacaggggtctgggactttggttcatatcttagcwccatgccttaccaactctggggcaactttctttagccctgcaaggtcccaccttccttacctgaaacatgggaacaatcatgtctactttgttgtgtctt

SEQ ID NO: 288703 - DNA, 201 bp, Homo sapiens
gtgatatccaagaactgtatgacaccaccttggccctgggccacgcggcggctttctcagatgactgcgatttgccctctgctcaggacataaacagactygtgggacttcaggtgggcatatgctgtctcagaaatcctcccttcactctacaactctggccccttctcccccctctgcaagtcaaaatgagtgtaacct

SEQ ID NO: 288704 - DNA, 201 bp, Homo sapiens
  misc_feature (1)...(201): n = A,T,C or G
tgtgcagcaagttttgactgcttatttaagttgtgagtacagtattgttgtaaatgtggaagtattttggaaacgggttgatacttactgagacaatccanttgacactctgattgtcaaaaccagcaataaatagcttggtagcctttcctttccctgtatgcctataatgtacggaaataaagtgtcacggatgacatt

SEQ ID NO: 288705 - DNA, 201 bp, Homo sapiens
ggagaaagaagctggaatcagacagtgggggtcagggagaagatctataacattctgctaggtggatgagagattcaaaggagatgacatgatctgtgaargaaattgcactgggcaggtgtcagctcaggctgctgtccacatgatgcctgggacatgtctgagggactagcctgctgcaagttaacagcacataattct

SEQ ID NO: 288706 - DNA, 201 bp, Homo sapiens
ccttagtagctgagactacaggtgcatgccaccacgcccagctaatttgtgtgtgtgtgtgtgtgtgtgtgtgtgtgtgtgtgtgtgtgtttgttgttgttgagacagggtcccactctgttgcccaggctggtctcgaaactcctgagctcaggtgatccacctgccttggcctcccaaagtactgggattacaggcatg

SEQ ID NO: 288707 - DNA, 201 bp, Homo sapiens
acacgtgccatgttggtgtgctgtacacattaactcgtcatttacatcaggtatatctcctaatgctatcccttccccctccccccaccccacacctggtrtgtgatgttccccttcctgtgtccaagtgttctcattgttcaattcccacctatgaatgagaacatgcagtgtttggttttttatccctgcgatagtttg

SEQ ID NO: 288708 - DNA, 201 bp, Homo sapiens
tccttagtagctgagactacaggtgcatgccaccacgcccagctaatttgtgtgtgtgtgtgtgtgtgtgtgtgtgtgtgtgtgtgtgtgtttgttgttgttgagacagggtcccactctgttgcccaggctggtctcgaaactcctgagctcaggtgatccacctgccttggcctcccaaagtactgggattacaggcat

SEQ ID NO: 288709 - DNA, 201 bp, Homo sapiens
tctcagcctccttagtagctgagactacaggtgcatgccaccacgcccagctaatttgtgtgtgtgtgtgtgtgtgtgtgtgtgtgtgtgtgtgtgtgtttgttgttgttgagacagggtcccactctgttgcccaggctggtctcgaaactcctgagctcaggtgatccacctgccttggcctcccaaagtactgggatt

SEQ ID NO: 288710 - DNA, 201 bp, Homo sapiens
ttagtcaatttggaaagtataagaaatacaaataaaatcaaaatcactcctaattccataaatagacataggtccatttgcaaatatgtatgtatcaaatwgtgatcaaatactagagagaattttgtattcttttcctccttaacagtgttttatgagcattctctcatgtcagtaaatatattgtgaaaacaaaattat

SEQ ID NO: 288711 - DNA, 201 bp, Homo sapiens
ctatctcagcctccttagtagctgagactacaggtgcatgccaccacgcccagctaatttgtgtgtgtgtgtgtgtgtgtgtgtgtgtgtgtgtgtgtgtgtttgttgttgttgagacagggtcccactctgttgcccaggctggtctcgaaactcctgagctcaggtgatccacctgccttggcctcccaaagtactggg

SEQ ID NO: 288712 - DNA, 201 bp, Homo sapiens
tcctatctcagcctccttagtagctgagactacaggtgcatgccaccacgcccagctaatttgtgtgtgtgtgtgtgtgtgtgtgtgtgtgtgtgtgtgtgtgtttgttgttgttgagacagggtcccactctgttgcccaggctggtctcgaaactcctgagctcaggtgatccacctgccttggcctcccaaagtactg

SEQ ID NO: 288713 - DNA, 201 bp, Homo sapiens
gtgatccacctgccttggcctcccaaagtgctgggattacaggtgtgagccaccacacccggcctgcacatcatccttgaccaagggttgaattaactgaraagcagctgtgtcataatggctaagaacatgtatttataattactactggctcataagaagaatcacataaattcaacaaaataaaagccacatacggca

SEQ ID NO: 288714 - DNA, 201 bp, Homo sapiens
agggggatcacttgagcctgggaggcagaggctgcagtgagctgagattgcaccactgcatgccagcctgggagacagagtgagaccctgtctcaaacacmcaaaaaaaaaaaaaaaaaagaagaagaagtggaagtgaacttacagcagggatcatatatttctataaaacttgcaaaaataatgcattttctcgttcgg

SEQ ID NO: 288715 - DNA, 201 bp, Homo sapiens
gcagggggatcacttgagcctgggaggcagaggctgcagtgagctgagattgcaccactgcatgccagcctgggagacagagtgagaccctgtctcaaacmcacaaaaaaaaaaaaaaaaaagaagaagaagtggaagtgaacttacagcagggatcatatatttctataaaacttgcaaaaataatgcattttctcgttc

SEQ ID NO: 288716 - DNA, 201 bp, Homo sapiens
agtctgggagttcgaggctgtagtgagctgtgatcatgccactgcactccagcctgggcaacagagagagaccctgtctcaaaaaagaaaaaaaaaaaaaagagtggtgtttttgatagcagttctacagaaactgcagccaccttctacatatgattgttacttaaattcatccctgaaaatttacttaattctgagccc

SEQ ID NO: 288717 - DNA, 201 bp, Homo sapiens
caacatggcaaaaccccatctctactaaaaacaaaaaaaatttagctgggtgtggtggtgcatgcctgtaggtccagctacttgggaggctgaggaaggargatcgcttgaacctgggagggggagattgcagtgagccaagatcgcaccactgcattccagcctgggtgatggagcgagactctatcaccaaaaaagaaa

SEQ ID NO: 288718 - DNA, 201 bp, Homo sapiens
tttgagtctgggagttcgaggctgtagtgagctgtgatcatgccactgcactccagcctgggcaacagagagagaccctgtctcaaaaaagaaaaaaaaaraaaagagtggtgtttttgatagcagttctacagaaactgcagccaccttctacatatgattgttacttaaattcatccctgaaaatttacttaattctga

SEQ ID NO: 288719 - DNA, 201 bp, Homo sapiens
taatcgcttgaacccgggaggtggaggttgcagtgagccaagattgcactattgcactccagcctaggcaacagagtgagactccgtctcaaaaaaaaaawtttttttttaattagctaggcatggtggcatacccctgtagtcctagctacctactcaggaggctgaggtgggaggattgtttgagtctgggagttcgag

SEQ ID NO: 288720 - DNA, 201 bp, Homo sapiens
tgcccaggcttgtctccaactcctgggctcaagcatctgcccacctcggcctccaaaagtgagccaccacgcccagtaaaacacttaaaatgtcactttargtcctgtgggaagagcagcgtggaggtgggctgaggttagaaggtgcagagcgtggaagaagattgtgagctgagtattggacatctgttcttgaatagt

SEQ ID NO: 288721 - DNA, 201 bp, Homo sapiens
aaagatcagatggttgtagatgtgtggtgttatttctggggcctctgttctgttccattggtctatatctctgttttggtaccagtaccatgctattttgrttactgtagccttgtagtatagtttgaagtcaggtagcgtgatgcctccagctttgttcttttggcttaggattgacttggcgatgcgggctcttttttg

SEQ ID NO: 288722 - DNA, 201 bp, Homo sapiens
ggacaaatgaggcttttcagttctttgtatgttttttaagtgtgtgtgtgttttaggctagccaactggctcctgtaagatagctccaaaataatagattktgtgttatgatcaaaagggctcacagccttatgtgctagaatccaacactatgaccccagattttgagaaaagcaaagctttttcttgtaaatcgtctaa

SEQ ID NO: 288723 - DNA, 201 bp, Homo sapiens
ctgctgataaagacatacctgagactgggaagaaaaagagttttaatcggacttacagttccacatggctggagaagcctcagaatcatggcaggaggcgraaggcacttcttacatggcagcagcaagagaaagtgagagatgcaaaagcagaaacccctgataaaactaccagatctcatgagacttattcactaccat

SEQ ID NO: 288724 - DNA, 201 bp, Homo sapiens
aatgaggcttttcagttctttgtatgttttttaagtgtgtgtgtgttttaggctagccaactggctcctgtaagatagctccaaaataatagattttgtgwtatgatcaaaagggctcacagccttatgtgctagaatccaacactatgaccccagattttgagaaaagcaaagctttttcttgtaaatcgtctaacaagg

SEQ ID NO: 288725 - DNA, 201 bp, Homo sapiens
ccaacaagttcctcatctacatctgaggccacctcaccctgaaccttattgtccatgtctctaactggcttttggtcaaagccattcaacaagtctctagraagttccaacctttcctacattttcctgtcttcttctgacccctccaaactcttccaacctctgtttgtcacccagttccaaagttgcttccatatttgt

SEQ ID NO: 288726 - DNA, 201 bp, Homo sapiens
gttcccaacaagttcctcatctacatctgaggccacctcaccctgaaccttattgtccatgtctctaactggcttttggtcaaagccattcaacaagtctmtaggaagttccaacctttcctacattttcctgtcttcttctgacccctccaaactcttccaacctctgtttgtcacccagttccaaagttgcttccatat

SEQ ID NO: 288727 - DNA, 201 bp, Homo sapiens
cctaaattatctctctcaagttcaaagttccacaaatccctagggcagggcaaaatgcccctggtctttttgctaaaacataacaaaagtcacctttgttmcagttcccaacaagttcctcatctacatctgaggccacctcaccctgaaccttattgtccatgtctctaactggcttttggtcaaagccattcaacaagt

SEQ ID NO: 288728 - DNA, 201 bp, Homo sapiens
agtattttggaaacgggttgatacttactgagacaatccagttgacactctgattgtcaaaaccagcaataaatagcttggtagcctttcctttccctgtrtgcctataatgtacggaaataaagtgtcacggatgacattcttaggagtgagctaagttttggtgtttaaatgttgtgttctatctcttccactacaaac

SEQ ID NO: 288729 - DNA, 201 bp, Homo sapiens
taacagcacccaagccacctcttgaatgctttgctgcttagaaatttcttctgccagatatcctaaattatctctctcaagttcaaagttccacaaatccmtagggcagggcaaaatgcccctggtctttttgctaaaacataacaaaagtcacctttgttccagttcccaacaagttcctcatctacatctgaggccacc

SEQ ID NO: 288730 - DNA, 201 bp, Homo sapiens
tctcttgcctattttgctgttagtctatctttttttaattgatatgaccaattattttttcagattttgcagatctaaattttgttcacatttaattcttktgttgatttttagtcaacaacaaatactaccctaggtggctttagtcattcgacattttattttgagattatttctaccaagaacctcattatgaattgg

SEQ ID NO: 288731 - DNA, 201 bp, Homo sapiens
cctgcctcagcctcccgagtggctgggattacaggcatgcgccaccatgcctggctaattttgtatttttaggagagatggggtttctccatgttggtcargctggtctcaaacgcctgacctcagatgatctgcccaccttagtgtcccaaagtgctgggattacagatgtgagccactgcgcccggcccaggtatatat

SEQ ID NO: 288732 - DNA, 201 bp, Homo sapiens
taaaaataagtctaatacaagcactattatcccatcattgtattgcctagcagtcttgtgtatctggatattttaataccatcataaccttgaatttgcargtaaagttattctaaataatgtaggattcgaatttgatctcctgtgtctactatttaaaaccctgggagttaaaatggcaaaatattaacactgttactc

SEQ ID NO: 288733 - DNA, 201 bp, Homo sapiens
ggcaggaacatattgatatttgtcacacctcaaggcacaggatttcaatttgtttcattttgttgatcttaagtgtgattactttgagaatgtgaattttstgtaccccaacaacattttaccccctatcactttagcattcattgaggttttttgcctgaattacttattaacatgttgattgtaaaatggtattacaga

SEQ ID NO: 288734 - DNA, 201 bp, Homo sapiens
acaagtgtttacagaagtattattcataatcacaaaacaatggaaacaacccaaatgtccttcagtgggtgaatggataaactgtggtatatccattcaayggaataccattcagcaataaaaaggtacaaactattggtaaaggcaatagctagtatgaatctcaaaaacattatgctaattgaaagaagaaagtctcgc

SEQ ID NO: 288735 - DNA, 201 bp, Homo sapiens
ccatggctggagtggctgggacacagggcaccacgtccctaggctgcatgcagcacaggaccctgggcccagaccacaaaaccattttctcctaggcctcygggcctgtgatggcaggggcagctgtgaagccctctgatatgccctggagacattttccccattgtcttggggattaatgtttggctccttgttacttat

SEQ ID NO: 288736 - DNA, 201 bp, Homo sapiens
gagttattgctagagaaaggcactagtgctgcactcagacttagggcattcagcatttagaggttggagaaatgagggaaaccagcaaaacaaaacaaaawcaacaaactacccagtggccagtgacacaggaggaaacccaaagatactgcacaagggtttcaagaaaatgatcattttccagaaacaaaagattcgctg

SEQ ID NO: 288737 - DNA, 201 bp, Homo sapiens
tcaatggactttcagctgtttaaagaatatatatatcaaattccttttcatggaaagaaagtcgaacactatagagatttttaaaaaattgtacattcacrccaccttaatgtagttctagaataggtattctaaagagtattctaagcaatggcactgttagggtaaatgcatagtctctcgaagtcatgacttatgagg

SEQ ID NO: 288738 - DNA, 201 bp, Homo sapiens
gaaagttagatgcatacatatcacctaaaatcctaaatggataaaaggtacctgaaaccctatctcagaaaaatcctaagtagtgtgctgttttgacccawttcttttccaggtgcaaaaggggaagaggagaagggtcattgccatgcactcaaagctcttgggtgttcagtctatagcccgggaaaataaaaggaacat

SEQ ID NO: 288739 - DNA, 201 bp, Homo sapiens
agaataacataaccctagcaaatcaaccctctcgtaattcaatggactttcagctgtttaaagaatatatatatcaaattccttttcatggaaagaaagtygaacactatagagatttttaaaaaattgtacattcacgccaccttaatgtagttctagaataggtattctaaagagtattctaagcaatggcactgttag

SEQ ID NO: 288740 - DNA, 201 bp, Homo sapiens
aatggtattacagacattttataagtgaggaatcttaagtttccaagggaaggggttcttatatggttcttatacattgtgcagctaggatttgaacccargtggtctgactccaaggcccacagtttaatacactaattgtactggaaaaggatttccacatgattttccacttgactttagtgccctcagtcagaaact

SEQ ID NO: 288741 - DNA, 201 bp, Homo sapiens
ttgctgtagaaaggatggtcgggctccatcggaggtggtgggacatcataggagcgcctccagatcttcacctgggcctcaccatgctttgcagcagtttstgctttattgagaccggttagacccccatagtgccgctcattgaggcgccaagtcctcaccactggcagccacatctgatcaatggcatctagcactgtc

SEQ ID NO: 288742 - DNA, 201 bp, Homo sapiens
gatctggggaactatttcttcattccagaagggcagagctctggcaatagtatccttcagactctcacaggagggtagctgatcttctgtgaggtctgcayacctgcgatccttactgatgttgctgtagaaaggatggtcgggctccatcggaggtggtgggacatcataggagcgcctccagatcttcacctgggcctc

SEQ ID NO: 288743 - DNA, 201 bp, Homo sapiens
tcttcagagagaccctccagatgcttgacaatgccccggaggctgttgccatgggctgcaatcagtacacgtttcccctccttgatctggggaactatttyttcattccagaagggcagagctctggcaatagtatccttcagactctcacaggagggtagctgatcttctgtgaggtctgcatacctgcgatccttactg

SEQ ID NO: 288744 - DNA, 201 bp, Homo sapiens
atgaaagtggcaacagcctcggcactagggggtttgtatctaggagaacggccgatccgtcagcgctggcttcagccccaggcctcagataagttgggcamtgggaagctcagatgagacatcttgctagctcctgttttattccgctccaaacctggagctgagctgaggccatggtcaaagccgactctccagtacccc

SEQ ID NO: 288745 - DNA, 201 bp, Homo sapiens
ccacagcttccatggctttgcgcaccgtctcctcatcccccagaaactgcatgggcttgataggcttcaagttcttgtccaattcatagacaatgggaatmccagtcggcaggttcagctccatgatagcctcttcagagagaccctccagatgcttgacaatgccccggaggctgttgccatgggctgcaatcagtacac

SEQ ID NO: 288746 - DNA, 201 bp, Homo sapiens
actggaatgactagagcccccaggcagtaggcagtgacctgactgcagaagagcagaggacagactccgctcatggggacagacaggctctgttgcttctyctcactggtcatggcttagcatggttcctccccaaagtccttagtaaacaaagcactcgcaaaaacccaagtcactacttttaaactctgttggataagg

SEQ ID NO: 288747 - DNA, 201 bp, Homo sapiens
gcctctgggttcaagtgattctcctgcctcagcctcccgagtggctgggattacaggcatgcgccaccatgcctggctaattttgtatttttaggagagayggggtttctccatgttggtcaggctggtctcaaacgcctgacctcagatgatctgcccaccttagtgtcccaaagtgctgggattacagatgtgagccac

SEQ ID NO: 288748 - DNA, 201 bp, Homo sapiens
gtcctttgcctatttttttttttttttttttttttttgctattgcacatcactcctttattatactgatatggaaaaaggatttagtacagttatgctcaratgaacactggacccatgtggcagggtcaagcaactagaacatgattcagaaatcagtgaaagatacacttggacaggaccaagaggcatttcactgcca

SEQ ID NO: 288749 - DNA, 201 bp, Homo sapiens
atatatattttttttttttttttttttgagacagagtttcgctcttgttgcccaggctggagtgcaatggtgccatctcggctcaccactacctctgcctstgggttcaagtgattctcctgcctcagcctcccgagtggctgggattacaggcatgcgccaccatgcctggctaattttgtatttttaggagagatgggg

SEQ ID NO: 288750 - DNA, 201 bp, Homo sapiens
tagctctattttgaattttttgagagacctccatattgttttccataatggctgttccaaattacattcccactagcaatgtacaagggttcccttttctytgcatcatcaccaacacttgttatcttttgactttttgataatagccattctaacagatgtgaagtgatatcctattgtggtttggatttgaatatccct

SEQ ID NO: 288751 - DNA, 201 bp, Homo sapiens
ggtagctctattttgaattttttgagagacctccatattgttttccataatggctgttccaaattacattcccactagcaatgtacaagggttcccttttytctgcatcatcaccaacacttgttatcttttgactttttgataatagccattctaacagatgtgaagtgatatcctattgtggtttggatttgaatatcc

SEQ ID NO: 288752 - DNA, 201 bp, Homo sapiens
tcatgtactactacagaagacttattcctttcctcccaggcaaacttatcagctttaatagattttatctaggaccttatctaaaagttatatactcagtmaaggcagacccagttagcaagaagaaatgatgaacatctgaccttcaactagtaagaaataaacatggaataatagagactaagatacatgttttgttga

SEQ ID NO: 288753 - DNA, 201 bp, Homo sapiens
tgcaggcgacaaaatggctaaaatgaaaatgggagccactggtccccatctgcagctacaactcaagatgtctacagatgtggtcagtgtgacatgtgcasgtgggaggggcagagggacaagatgggcagggagggtgctcctggggacagtatcttccccgccggccttcacttcttggccttgccctgggcagccaca

SEQ ID NO: 288754 - DNA, 201 bp, Homo sapiens
caagtataagtctgatgtatcagttccacaattatccagatcaagattccttctatattatggttttggtgacctcaacaagtagcttccatcttgtggtmtaagctggcaactctaactcccaccatcatatcaacagtccagctaatgggaaaggggaaaggcaagggggtgagtgagcattcctttgaagggtagacc

SEQ ID NO: 288755 - DNA, 201 bp, Homo sapiens
taatgcacttggaagtagactgtgcaatgcagtggtaagaacataggctctggggtcaggcttacaggactgaatctacatgctgccacttacacaccttytaagctcgactccgggtgaattgtttaactgcatgcaccctagttcctcatctgtaaaatggaaattacatgacctaatgtctatagaggacataataca

SEQ ID NO: 288756 - DNA, 201 bp, Homo sapiens
tgctttttaaacattaaaaaagatcttatgtttactttataagcaagtgtcacacattggacaagcctggtatataatttatgaaataagaaggatagttmacatgagagtaaaaaaaaaaaaacctgagagagagtgagagaaagaaaacatgatgatatctgaatgtctggatgtgctttgaaaaaaaaaatcagtcct

SEQ ID NO: 288757 - DNA, 201 bp, Homo sapiens
gatccttatatccttataggaaataggaagaggagccattgcagaaataaattctgtgatcccagacaaagtgctggcaccatctcccgggtttgagaacmcaccgcagagatacagaacagcgcagattgctgttgaggtcagctcccagctccctgcctcattcctctctgattcctcttttgttcaggcacaaaaaca

SEQ ID NO: 288758 - DNA, 201 bp, Homo sapiens
gggcagtcaataattctacacaggcagcaaatttgatgctgaaggatgaccaatgtggatgccatgccacttaacgctactgttgcagccgcagatcctaktatttgaaatatgcctcaagaaggaaacacttaagaagtgctgaataagaattccaatcctggcttcatcgctaacttgctttgggaacttgggctttaa

SEQ ID NO: 288759 - DNA, 201 bp, Homo sapiens
ttcaatataagtcctgtaagactatcaactgaaaaaaatctccctttttctaccagctgacctctatattttctgtaatcttcaacacagagacaaaaagsccttttaatattgggttacttgaagttgggtagaggtgtgtattttaattactttaatcgtgtataacaatgtgaaacaggcatatctcatcgcaaatct

SEQ ID NO: 288760 - DNA, 201 bp, Homo sapiens
ctccccgccgcccgcccaaggaagcagtgaccgggcggtgacagctgtcagggccgcggccgccgcctcgcctcccctccccctccgcagctccagcaggsggggccgacgagccgccgccgcgcctacccgtgttgtagacgtgcagctcatccgcgatgccctcatttccccctccaaagatgatcatcagctcccgga

SEQ ID NO: 288761 - DNA, 201 bp, Homo sapiens
tatctgcatcctaaagcttcttgtttcatcttaaagagatttcagagttggcaacacactggacggggaaagatgaaccccctgttcagatgaatcagcayttactattcctctgcctctggagtggtctcatagttacagtaaccgagcactcaggaaagagctgaccagcattgcctgtgagctgtaaagcttcatcaa

SEQ ID NO: 288762 - DNA, 201 bp, Homo sapiens
tggaaagggagggagaaataagatgtctgcgaacagaaaagaggttatgaatatttatctattaatatttttctatgtcacatacataacataggaggctyttaaatgttgccataataaagtttttatggatttgaaataaaactggaagagttggaataaagcagtgagtttttcataaaacccaaagtgtttaattta

SEQ ID NO: 288763 - DNA, 201 bp, Homo sapiens
tcagtttgccagtatttttttgaggatttttgcatcagtgttcatcagggatataatctcagaagcagaaagagtttcatcatttcagcattttattcttmtaatctatcatcctgcaaactcgagaatttctattagtcattggtttctttaactctttgggggtatggtttcaatagcgacataaacaaaatagaagtt

SEQ ID NO: 288764 - DNA, 201 bp, Homo sapiens
atgattgcactactacactccagcctgggtgacaatcctgtctctgaaaaaaaatatatacatatatatatatatatatacacacacacacacatatatayacacacacacacatatatatatattttcaaggagtacaatgttttaatatacacattgtgaaatgattaccacaatcaagctaattaacaaatccatcac

SEQ ID NO: 288765 - DNA, 201 bp, Homo sapiens
tgacttggggctacaaaaagacacacgacaaatatggcagctcttctgaaaggagcagtttttctttttttcttttcttttcttctttctttctttctttytttttctttctttctttctttcccttcttcttcttcttcttcttcttcttcttctttttcttcttcttcttcttcttcttcttcttcttcttcttcctct

SEQ ID NO: 288766 - DNA, 201 bp, Homo sapiens
acatattgagaccctgtttatacttaaaaaagttttatttagtggccaagcgtggttgctcatgcctgtaatcccaacactttgggaggccgaggcaggcrgatcgtgaggtcaggagttcgagaccagcctggccaacatagtgaaaccccatctctactaaaaatacaaaaattagctgggcatggtggcaggcacctg

SEQ ID NO: 288767 - DNA, 201 bp, Homo sapiens
agctcaaggttacaatgagctatgattgcactactacactccagcctgggtgacaatcctgtctctgaaaaaaaatatatacatatatatatatatatatacacacacacacacatatatacacacacacacacatatatatatattttcaaggagtacaatgttttaatatacacattgtgaaatgattaccacaatcaa

SEQ ID NO: 288768 - DNA, 201 bp, Homo sapiens
catttgaaccggggaggcggaggttgcagtgagccgagatctcatcactgcactctagcctgggagacagagggagactccgtctcaaaaaaaaaaaaaaagtaaaattacagggtggcttgcattttatttctgttggagagcaccactttagaaagagacagtgagcagggagatccttatatccttataggaaatagg

SEQ ID NO: 288769 - DNA, 201 bp, Homo sapiens
atcccagcactttgggaggctgagcggggaggattgcttgagctcagaagtttgagaccagcttgggcaacatattgagaccctgtttatacttaaaaaarttttatttagtggccaagcgtggttgctcatgcctgtaatcccaacactttgggaggccgaggcaggcggatcgtgaggtcaggagttcgagaccagcct

SEQ ID NO: 288770 - DNA, 201 bp, Homo sapiens
gagctcaaggttacaatgagctatgattgcactactacactccagcctgggtgacaatcctgtctctgaaaaaaaatatatacatatatatatatatatatacacacacacacacatatatacacacacacacacatatatatatattttcaaggagtacaatgttttaatatacacattgtgaaatgattaccacaatca

SEQ ID NO: 288771 - DNA, 201 bp, Homo sapiens
aaacaccatgctgggagaaccactgctctcttcagagctgtcagacagggatgtttaagtctgcagaagtttctgctgccttttgttcagctatgccctgmccccagaagtggagtctacagaggcagctggctttgcggagctgtggtgggctctgcccagttcaagcttccccacccactttgtttacccactcaaacc

SEQ ID NO: 288772 - DNA, 201 bp, Homo sapiens
ggtatcttttcaacaacgtcccactctactggtaccaatttactgtattagtccgttttcatgctgctgataaagacatacctgagactgggaagaaaaakagttttaatcggacttacagttccacatggctggagaagcctcagaatcatggcaggaggcgaaaggcacttcttacatggcagcagcaagagaaagtga

SEQ ID NO: 288773 - DNA, 201 bp, Homo sapiens
gaaattcttggttgaaaattcttttctttaagaatgttgaatattgccccccactctcttctagcttgtagagtttctgctgagagatctgctgttagtcygatgggcttccctttgtgggtaacctgacctttctttgtggctgcccttaacattttttccttcatttcaaccttggtgaatctgacaattatatatctt

SEQ ID NO: 288774 - DNA, 201 bp, Homo sapiens
cactccagccagggcaactgaggtgagaccctgtctcaaaaaagaaaaaaaaagataaaataataataacaatgatgcataaccatttgtaaagtctttaytgggcctgcattgccttggttaactctcaaaacagtagtgcgaggtaatgcttattattacaatcttcattcagcagataagcacaccaagctcagagag

SEQ ID NO: 288775 - DNA, 201 bp, Homo sapiens
aaaggattttatttctccttcacttagtttggctggatatgaaattcttggttgaaaattcttttctttaagaatgttgaatattgccccccactctcttmtagcttgtagagtttctgctgagagatctgctgttagtctgatgggcttccctttgtgggtaacctgacctttctttgtggctgcccttaacattttttc

SEQ ID NO: 288776 - DNA, 201 bp, Homo sapiens
gtggctcatgcctgtattcccagcactttgggaggccgaggcaggtggattgcttgagtccaggagttcgagaccagccttagcaacatggtgaaaccccrtttctactaaaaaatacaaaaaattagccaggtgtggtgatatgtgtctatagtcccagctacttcggaggctgaggtaggagaatcacctgagcctgca

SEQ ID NO: 288777 - DNA, 201 bp, Homo sapiens
catccaggaatttatccatttcttctatattttctagtttatttgcatagaggtgttcatagtattctctgatggtactatcggtggtgatatctcctttrtcattttttattgcgtctgtttgattcttctcccttttcttctttattattcttgctagcagtctattttgttgaccttttcaaaaaaccagctcctgga

SEQ ID NO: 288778 - DNA, 201 bp, Homo sapiens
gggaggcagaggctgcagtgagctgagattgcaccactgcatgccagcctgggagacagagtgagaccctgtctcaaacacacaaaaaaaaaaaaaaaaaagaagaagaagtggaagtgaacttacagcagggatcatatatttctataaaacttgcaaaaataatgcattttctcgttcggaataaatattcatgttcat

SEQ ID NO: 288779 - DNA, 201 bp, Homo sapiens
atgctggcctcataaaatgagttagggaggattccctcttcctctattgattggaatagtttcagaaggaatggtaccagctcctttttgtacttctggtrgaatttggctgtgaatccatctggtcctggacattttttggttggtagactattaattattgcctcaatttcagagcctgttattggtctattcagagat

SEQ ID NO: 288780 - DNA, 201 bp, Homo sapiens
aaacatacgtgtgcatgtgtctttaaagcagcatgatttataatcctttgggtatatacccagtaataggatggctgggtcaaatggtatttctagttctrgatccttgaggcatcaccacactgtcttccacaatggttgaaccagtttacactcccaccaacagtgttaaagcattcctatttctccacatcctctcca

SEQ ID NO: 288781 - DNA, 201 bp, Homo sapiens
tttgtggagcaatttaaaaaacggagtcacagccgggcacagtggctcacacctgtaatcccagcactttgggagaccaaggtgagtggatcacctgaggycaggagttcaagaacagcctggccagcatggcgaaactgcctctctactaaaaatacaaaaactagctgggcgtggtggtgcacacatgtaatcccagct

SEQ ID NO: 288782 - DNA, 201 bp, Homo sapiens
tgaagacaggcctgcaggcaatttcttgttaaaggcttggctatttattaccacagagaaaccacacacacggaagtcactagggctaggaaagctcacasaggtgtaaggggcacagttctggggctctttgttgtgacagtagcaggaaggctgatgagatgaccagagccctctgcttttattcctggagtgggatca

SEQ ID NO: 288783 - DNA, 201 bp, Homo sapiens
cgtgaaggaagaaactcgcctccagttgaggaggctgggagccgccatcttcccaacccccgcccctctgcccacaatgcaccgctcccgcctcaaccggstgctccctggggagggcggggacccgcctccagctgtgctggggtcacgtggccgcgggcgccggcggccaggctggaggcccgcgggcagtggagagac

SEQ ID NO: 288784 - DNA, 201 bp, Homo sapiens
taggtagttaccctctattcacacaaaaacctgtaaacaagtgtttacagaagtattattcataatcacaaaacaatggaaacaacccaaatgtccttcaktgggtgaatggataaactgtggtatatccattcaacggaataccattcagcaataaaaaggtacaaactattggtaaaggcaatagctagtatgaatctc

SEQ ID NO: 288785 - DNA, 201 bp, Homo sapiens
aagagttgaggactgttggacaaatgaggcttttcagttctttgtatgttttttaagtgtgtgtgtgttttaggctagccaactggctcctgtaagatagytccaaaataatagattttgtgttatgatcaaaagggctcacagccttatgtgctagaatccaacactatgaccccagattttgagaaaagcaaagctttt

SEQ ID NO: 288786 - DNA, 201 bp, Homo sapiens
tacaattcaagatgagatttgggtggggacacagagccaaaccatatcattctgcccctggtccctccaaatctcatgtcctcacatttcaaaaccaatcmtgccttctcaacagtcccccaaagtcttgactcatttcagcattaactcaaaactccacaatccaaagtcccatctgaaacaaggcaagttccttctgcc

SEQ ID NO: 288787 - DNA, 201 bp, Homo sapiens
catagtagccccaaactggaaacaattcacatgtacatcaactcgtgagggatacaaaaaatgtaatttatctcacacaatgaaatacttttcgacagtaraaaggaacaaatgactgatacaagctgcaatatggatgaacctgaaaaaaaactatgctaaataaaagaagtcagacctgaaagaccatatattgtatga

SEQ ID NO: 288788 - DNA, 201 bp, Homo sapiens
attttgtaatttaaaaattcatttaaaaataattaaaaacatgtataatctgatctaaatgaacatggaatctgcaaagagaatgattttcatacaaagayatatatacaaatgttcttagggtataattcatagtagccccaaactggaaacaattcacatgtacatcaactcgtgagggatacaaaaaatgtaatttat

SEQ ID NO: 288789 - DNA, 201 bp, Homo sapiens
cgaaactcctgagctcaggtgatccacctgccttggcctcccaaagtactgggattacaggcatgagctaccacacctggccaggttaattctttattctrtatgctgtctgcttatagaaaggtctcagataccactcctctgtgtcatggaaggcacctactcgcactaccattctaaactttgtcacgtgatttcagg

SEQ ID NO: 288790 - DNA, 201 bp, Homo sapiens
ggtgggcgggtcagttgagctcgggagttcgagaccagcctgggtaacatggagagaccccatctctacaaaaaatacaaaaattagccaggcatggtggyggacacctgtagtctcagctactcgggaggctgaggcagggggatcacttgagcctgggaggcagaggctgcagtgagctgagattgcaccactgcatgc

SEQ ID NO: 288791 - DNA, 201 bp, Homo sapiens; identical to SEQ ID NO: 59179

SEQ ID NO: 288792 - DNA, 201 bp, Homo sapiens
aactaattgtgcagcaagttttgactgcttatttaagttgtgagtacagtattgttgtaaatgtggaagtattttggaaacgggttgatacttactgagayaatccagttgacactctgattgtcaaaaccagcaataaatagcttggtagcctttcctttccctgtatgcctataatgtacggaaataaagtgtcacgga

SEQ ID NO: 288793 - DNA, 201 bp, Homo sapiens
ctatggagacacagagcagatcagtggttgcctagagctgggagtgggaatggactgactgcagaccaggcagctcaatggaactttctaaaattggatcktggtgatggttgtgcaattctataaatttactaaacatcattgtactgtacgcttacaatgggtaaatttttaaaaatctgtattcgtttgcttgggctg

SEQ ID NO: 288794 - DNA, 201 bp, Homo sapiens
gtgtgctgttttgacccatttcttttccaggtgcaaaaggggaagaggagaagggtcattgccatgcactcaaagctcttgggtgttcagtctatagcccrggaaaataaaaggaacattgtagctggttgtttacagtgaattaaagagttgaatcaaatctctgttgaagagttttcctagatgactgccagcaaattc

SEQ ID NO: 288795 - DNA, 201 bp, Homo sapiens
gttgattctttcaacccccatcacttttttgagggcataactatataaagttctagaatgttagatctaatagaattgtctgcttcagtcataataatgargaaactgagacggagagagatggagttatttccctagaatcacacgatcataatggcttgtataagtggggttccaactgtttgccaagtactgttgtaa

SEQ ID NO: 288796 - DNA, 201 bp, Homo sapiens
accacatttctttatccactcatccatttatggacacaggttaattccatatcttggctattctgaatagtgctgcgggctgggtgcggtggctcacacckgtaatcccagcactttgggaggctgaggtgggcagatcacctgaggtcaggagttggagaccagcctggccaacatggtgaaaccctgtctctactaaaa

SEQ ID NO: 288797 - DNA, 201 bp, Homo sapiens
agctaattaacaaatccatcaccctcacgtagttgccttttgcgtatgtgcagtgagaactcttaagatctaccctcttagtagatttcaagtatacaatrcattattagtaataacagtcaccatgctgtgcattaggtctccagaacttgctcatcttataacggcaagcttgtaccctttgaccgacatttccccatt

SEQ ID NO: 288798 - DNA, 201 bp, Homo sapiens
aactggggacttatctttgaatctctagtgcctgggtgcctggtatattcgtagaggttgagtaaatgtttgttgaatgaatcaaagaaatgtcaagggarccccctaattaccttcttgtcctgggttgggcccttatcccatcttagctttgttgttgttgctgttgttgttgagaaagagccttgctttgtcacccag

SEQ ID NO: 288799 - DNA, 201 bp, Homo sapiens
ctgcctctctactaaaaatacaaaaactagctgggcgtggtggtgcacacatgtaatcccagctactagggaggctgaggcaggagaattgctctaacccrggaggcggaggttgcagtgagccaagattgtgccactgcattccagcttgagagacagaacaaaactccatctcaaaaataaaaataaaaactaaatgga

SEQ ID NO: 288800 - DNA, 201 bp, Homo sapiens
attaatcaatcactttctttctttctttctttcttattttctttctttctttctttttctttctttctttctttctttctttctttctttctttctttctyatctttcttttcttttcttttttaactgaatctagtgatggcttcagatttcttctcaatctagcaatcccaacagcccataccatagccaatcagagct

SEQ ID NO: 288801 - DNA, 201 bp, Homo sapiens
ttactccctaccatactataaccatggcagacatgattaatcaatcactttctttctttctttctttcttattttctttctttctttctttttctttctttctttctttctttctttctttctttctttctttcttatctttcttttcttttcttttttaactgaatctagtgatggcttcagatttcttctcaatctagc

SEQ ID NO: 288802 - DNA, 201 bp, Homo sapiens
tttgctctgtctcccagctggagtgcagcagccatggctcactgcagcctcaacctcctgggctcaagtgatcctccttcctcaacctcccgagtagctgrgactacaggcatgcaccatgatgcctgctaatttttgtatttttttgtagagattgttgcagggggggtcttataatgttgcccaggcttgtctccaact

SEQ ID NO: 288803 - DNA, 201 bp, Homo sapiens
ctattactccctaccatactataaccatggcagacatgattaatcaatcactttctttctttctttctttcttattttctttctttctttctttttctttctttctttctttctttctttctttctttctttctttcttatctttcttttcttttcttttttaactgaatctagtgatggcttcagatttcttctcaatct

SEQ ID NO: 288804 - DNA, 201 bp, Homo sapiens
gaatatccctgattattagtgatgtttagtatcttttcatatacctcttggccatttgtgtgctttctttagagaaatgtctattctggtcctttgcctawttttttttttttttttttttttttgctattgcacatcactcctttattatactgatatggaaaaaggatttagtacagttatgctcagatgaacactgga

SEQ ID NO: 288805 - DNA, 201 bp, Homo sapiens
atttcctattactccctaccatactataaccatggcagacatgattaatcaatcactttctttctttctttctttcttattttctttctttctttctttttctttctttctttctttctttctttctttctttctttctttcttatctttcttttcttttcttttttaactgaatctagtgatggcttcagatttcttctc

SEQ ID NO: 288806 - DNA, 201 bp, Homo sapiens
catttcctattactccctaccatactataaccatggcagacatgattaatcaatcactttctttctttctttctttcttattttctttctttctttctttttctttctttctttctttctttctttctttctttctttctttcttatctttcttttcttttcttttttaactgaatctagtgatggcttcagatttcttct

SEQ ID NO: 288807 - DNA, 201 bp, Homo sapiens
tttgattcccagtcatttcctattactccctaccatactataaccatggcagacatgattaatcaatcactttctttctttctttctttcttattttctttctttctttctttttctttctttctttctttctttctttctttctttctttctttcttatctttcttttcttttcttttttaactgaatctagtgatggct

SEQ ID NO: 288808 - DNA, 201 bp, Homo sapiens
ctttttgattcccagtcatttcctattactccctaccatactataaccatggcagacatgattaatcaatcactttctttctttctttctttcttattttmtttctttctttctttttctttctttctttctttctttctttctttctttctttctttcttatctttcttttcttttcttttttaactgaatctagtgatg

SEQ ID NO: 288809 - DNA, 201 bp, Homo sapiens
ttgctttttgattcccagtcatttcctattactccctaccatactataaccatggcagacatgattaatcaatcactttctttctttctttctttcttatyttctttctttctttctttttctttctttctttctttctttctttctttctttctttctttcttatctttcttttcttttcttttttaactgaatctagtg

SEQ ID NO: 288810 - DNA, 201 bp, Homo sapiens
ggatctccatccccccagaaagaactggccgttgtggaaacccaagtgaggcttattgtaaatacagtagtcgtggtgtttgggttgaaaatgctttttamacattaaaaaagatcttatgtttactttataagcaagtgtcacacattggacaagcctggtatataatttatgaaataagaaggatagttaacatgagag

SEQ ID NO: 288811 - DNA, 201 bp, Homo sapiens
gaacccctataaactcttgggtgggagggaaattaatagaacttcttgggggacaatgcggcaatctctatcaaaattgaaaaggcacacaaccttcaatmtagcaattccacccacaatattttatcctacatatatatatatatatatatatatatatatatatatatatatatatatatatatatttgtacacataca

SEQ ID NO: 288812 - DNA, 201 bp, Homo sapiens
ttaattgaaaaactgatactctattcaattactggaaaacttttaagtacatttggaccaacctggactcgtgaatttacttttgttcccagtgtttttttctatttttttattgataacataatagatatacatattttgagtgtgtattcaaacatttaatattaatacattcatataatttgtaaagatcaaatcagt

SEQ ID NO: 288813 - DNA, 201 bp, Homo sapiens
cggctgcagtgagctgtgatcacgccactgcactccagcctgagtaacagagcaagaccctgtctctttaaaaaaaaaaaaaagtaaaattggccggatgmggtggctcacgcctgtaatcccagcactttgggaggctgaggcggcggatcacctgaggtcaggtgtttgagaccagcctggccaacatggcgaaacccc

SEQ ID NO: 288814 - DNA, 201 bp, Homo sapiens
tacatttggaccaacctggactcgtgaatttacttttgttcccagtgtttttttctatttttttattgataacataatagatatacatattttgagtgtgyattcaaacatttaatattaatacattcatataatttgtaaagatcaaatcagtgtaactgggatatccattaccttaaatgaatctactttttaaatggt

SEQ ID NO: 288815 - DNA, 201 bp, Homo sapiens
tacaactcaagatgtctacagatgtggtcagtgtgacatgtgcaggtgggaggggcagagggacaagatgggcagggagggtgctcctggggacagtatcytccccgccggccttcacttcttggccttgccctgggcagccacagcttccatggctttgcgcaccgtctcctcatcccccagaaactgcatgggcttgat

SEQ ID NO: 288816 - DNA, 201 bp, Homo sapiens
ctctcttctgcactgaggtgaagcagatgtcaaactcatagccagcatctcgtagcgcctgcccgccgcgcttcgcctcctcgtggcccgccgggctcagrtcggcgtcgtaccagccgctgaagcggttctccaggttccatgcgctctcgccgtgccggatcagcaccagtttgtaggcggccatggcggcgggctggg

SEQ ID NO: 288817 - DNA, 201 bp, Homo sapiens
acccaactcccttaaacctcagcatgcttctccaccttctcatctatctaagctttttttgagagataactctctatgttttaaaaaggaattctcaggaygggtgcggtggctcacacctgtaatcccagcactttgagaggccgaggagggcagattacctgaggtcaggagttcgagaccagcctggccaacatggtg

SEQ ID NO: 288818 - DNA, 201 bp, Homo sapiens
ttcacagttctgaaggatatataagtctgaaatcaaagtgtcagtagggctgtgatccctgcaaaacctgtaggaaagaatgcttccatgcctctttctakcttctggtggcagctgtcaatccatggcagcccttgacttgtcaatgaatcactccagtctctgactccatcacatcatcacgtggtgttctccctgtgt

SEQ ID NO: 288819 - DNA, 201 bp, Homo sapiens
gtgaagcagatgtcaaactcatagccagcatctcgtagcgcctgcccgccgcgcttcgcctcctcgtggcccgccgggctcaggtcggcgtcgtaccagcmgctgaagcggttctccaggttccatgcgctctcgccgtgccggatcagcaccagtttgtaggcggccatggcggcgggctggggatgcggcaccgactgg

SEQ ID NO: 288820 - DNA, 201 bp, Homo sapiens
tctgtaccccaacaacattttaccccctatcactttagcattcattgaggttttttgcctgaattacttattaacatgttgattgtaaaatggtattacasacattttataagtgaggaatcttaagtttccaagggaaggggttcttatatggttcttatacattgtgcagctaggatttgaacccaggtggtctgactc

SEQ ID NO: 288821 - DNA, 201 bp, Homo sapiens
tccagaactataagaaataaagttttgttgtttagaagccacccagttcaggctggcatggtggctcatgcctgtaatcacagcactttgggagggtaagrtgggaggatctcttgaggcccagagttctaaaccagactaggcaacatagcaagactctgtctctacaaaaaaaatttttaattagctggatgtggtggt

SEQ ID NO: 288822 - DNA, 201 bp, Homo sapiens
gctactcaagctgcatttgtgtttcaaatgaacttgatatgattatcgaacaacaaaaaagttactatggccgttaggccagtgatggattgaggaagggsagtgtacagaaattctaaaggcaggaaggccaggtgggaggttattgcagaggtgtaattagtaggactcggtgattgaaggaggaattaggagggagaa

SEQ ID NO: 288823 - DNA, 201 bp, Homo sapiens
ttctcagcttccagaactataagaaataaagttttgttgtttagaagccacccagttcaggctggcatggtggctcatgcctgtaatcacagcactttggragggtaaggtgggaggatctcttgaggcccagagttctaaaccagactaggcaacatagcaagactctgtctctacaaaaaaaatttttaattagctgga

SEQ ID NO: 288824 - DNA, 201 bp, Homo sapiens
aatgttctggtgtggcacttctgtgtaatatcctttctatattacataatggaattccagttctccctttaatgcacttggaagtagactgtgcaatgcaktggtaagaacataggctctggggtcaggcttacaggactgaatctacatgctgccacttacacaccttctaagctcgactccgggtgaattgtttaactg

SEQ ID NO: 288825 - DNA, 201 bp, Homo sapiens
ggcttagatagggagctgcagggtgatgaggaaatgtgtactagtttcctagggctgctgtgaaacaataggaatgttttgtttcacagttctgaaggatrtataagtctgaaatcaaagtgtcagtagggctgtgatccctgcaaaacctgtaggaaagaatgcttccatgcctctttctagcttctggtggcagctgtc

SEQ ID NO: 288826 - DNA, 201 bp, Homo sapiens
ggatagttaacatgagagtaaaaaaaaaaaaacctgagagagagtgagagaaagaaaacatgatgatatctgaatgtctggatgtgctttgaaaaaaaaaatcagtcctctcgttgtttggcccctgtgcagccaaatatccaaagtgatattggttggtttttgtcttttccttttcctccaaatgttctggtgtggcac

SEQ ID NO: 288827 - DNA, 201 bp, Homo sapiens
cagatgtgaagtgatatcctattgtggtttggatttgaatatccctgattattagtgatgtttagtatcttttcatatacctcttggccatttgtgtgctytctttagagaaatgtctattctggtcctttgcctatttttttttttttttttttttttttgctattgcacatcactcctttattatactgatatggaaaa

SEQ ID NO: 288828 - DNA, 201 bp, Homo sapiens
aacgtgggtttcagcaccatctagtgctgaaaatggggcagtgacctagcaaggggggaaaaaaagaaagaaagaaataggtaaatgaaataatacatgtraagtacaggcagtcttcactttgcatgataacactgttctgtaaacatgatatgcaagccaacacccttcaaagtgatctcaattatcagtgggaaaaat

SEQ ID NO: 288829 - DNA, 201 bp, Homo sapiens
aatacagttatttggtgtgttacatacatttattccacagttttgttttttttttcagtcagacacttagggactggaaacacaacagtgaacaaaacaayatccctattcccaggaagctggcatttctttctgattatattttgtaatttaaaaattcatttaaaaataattaaaaacatgtataatctgatctaaatg

SEQ ID NO: 288830 - DNA, 201 bp, Homo sapiens
ctttgtctataaaatgggaataataagagcatctgcttcttagggttagtcaaaggattaaatgagataatatggttccaaagtggcagcaaggaagcaakctggcttcacaccccccaatggaaaacccaaaactaatattcaacactgaaattatcaccagcaatatccgagaactcaaatatgaggatgagacatttg

SEQ ID NO: 288831 - DNA, 201 bp, Homo sapiens
tagaggtatataggatttggtgctatccgtggttttaggcatctctgggggtctttgaatgtatcccccttgggtaagggagcatctgttgtgttatagamagctctattggacagtgctgctctagactttttaggcatatgttagagaaggtactttcatctctcactacttcctctcctctctgcccactcctccgta

SEQ ID NO: 288832 - DNA, 201 bp, Homo sapiens
acacgtttcccctccttgatctggggaactatttcttcattccagaagggcagagctctggcaatagtatccttcagactctcacaggagggtagctgatsttctgtgaggtctgcatacctgcgatccttactgatgttgctgtagaaaggatggtcgggctccatcggaggtggtgggacatcataggagcgcctccag

SEQ ID NO: 288833 - DNA, 201 bp, Homo sapiens
tgatctcaattatcagtgggaaaaattacaattgttttgtgatgtttaaaaacttttgtcaaaatattaaaaactttcttactgttggatataaatatatagagaaatgaaaaaattgtaaacctaatatttctttattatgccataatttaaaacagaaatattgagaattaatgtgttttgcttttttttttttgagac

SEQ ID NO: 288834 - DNA, 201 bp, Homo sapiens
gtgatctcaattatcagtgggaaaaattacaattgttttgtgatgtttaaaaacttttgtcaaaatattaaaaactttcttactgttggatataaatatatagagaaatgaaaaaattgtaaacctaatatttctttattatgccataatttaaaacagaaatattgagaattaatgtgttttgcttttttttttttgaga

SEQ ID NO: 288835 - DNA, 201 bp, Homo sapiens
agtgatctcaattatcagtgggaaaaattacaattgttttgtgatgtttaaaaacttttgtcaaaatattaaaaactttcttactgttggatataaatatatagagaaatgaaaaaattgtaaacctaatatttctttattatgccataatttaaaacagaaatattgagaattaatgtgttttgcttttttttttttgag

SEQ ID NO: 288836 - DNA, 201 bp, Homo sapiens
aagtgatctcaattatcagtgggaaaaattacaattgttttgtgatgtttaaaaacttttgtcaaaatattaaaaactttcttactgttggatataaatatatagagaaatgaaaaaattgtaaacctaatatttctttattatgccataatttaaaacagaaatattgagaattaatgtgttttgcttttttttttttga

SEQ ID NO: 288837 - DNA, 201 bp, Homo sapiens
cttgaacccaggaggtggaggttgtggtgagctgagattgcaccattgcactccagcctgggcaacgagagcgaaactccatctcaaaaaaaaaaaaaaaaggcctaagagagctggttcaccccttccaccatggaggacacagctagaacgtgctatctatgagccagaaagtaggcccccaccaggcactgaatctgc

SEQ ID NO: 288838 - DNA, 201 bp, Homo sapiens
ggagaccaggagccttccctgacccccatgatctggtcaggtgcccctccttgatgctaaaacaatatcccatgcttacatctaccaaggcatctaagcayactgtattgccattatatatttactggtgtcttcccctcccttcccccaaatgtggactaactggggacttatctttgaatctctagtgcctgggtgcct

SEQ ID NO: 288839 - DNA, 201 bp, Homo sapiens
gtaatcccagcacttttggaggctgagacagaaggatccactgatcccaggagtttgagaccagctcggtcaagatggtgagatcccatctctatttttaktaaagagagataaataagagatacaagtccagtggaagaaaaaattgaaagcaatttaaatccctacctcagattctcaagaggtactcaaaggagaaca

SEQ ID NO: 288840 - DNA, 201 bp, Homo sapiens
tatttttggtttgtttggcttaagcagaggagagatggttttctaggtttctgtttcattgctagctaacaagtgagggctgtccacagcctggcatgccmtaagtgcctcatgtgtattaactcatgtaatccatccagcaatccagtgtggtggctcctgttatctccctttcatggacggggaaatgaggcacagtgc

SEQ ID NO: 288841 - DNA, 201 bp, Homo sapiens
taaaaagcagttgactctgtactctgtgagttctctaagtcttttactcactacacaagtgtagggtttagagtatgaactggaatcccaactatgatttkgggcaggttacggaatacatgtaaattgcttagcatagagcctagcatagaggacacattcacatccactctaacacatggccacaatccctgatccaaa

SEQ ID NO: 288842 - DNA, 201 bp, Homo sapiens
tcggtgtccgtgccgggcgcgggggaccggccccgtgaaggaagaaactcgcctccagttgaggaggctgggagccgccatcttcccaacccccgcccctstgcccacaatgcaccgctcccgcctcaaccggctgctccctggggagggcggggacccgcctccagctgtgctggggtcacgtggccgcgggcgccggcg

SEQ ID NO: 288843 - DNA, 201 bp, Homo sapiens
gttgcttctgcatcattcccagaatcctctgattttcctgagcatgtatatgcacaaaagagtgccacagggaagttagtgttgtgtctgatttgatttayagtcatgttgggttcaacattaggtcaaatatcaacctttccatgtgcagatcccatcaaagtagaaggtctatttttaaatatgtgtaggaacagttat

SEQ ID NO: 288844 - DNA, 201 bp, Homo sapiens
gctcccggatggccaccgctcggtgtccgtgccgggcgcgggggaccggccccgtgaaggaagaaactcgcctccagttgaggaggctgggagccgccatyttcccaacccccgcccctctgcccacaatgcaccgctcccgcctcaaccggctgctccctggggagggcggggacccgcctccagctgtgctggggtcac

SEQ ID NO: 288845 - DNA, 201 bp, Homo sapiens
cggccgccgcctcgcctcccctccccctccgcagctccagcaggcggggccgacgagccgccgccgcgcctacccgtgttgtagacgtgcagctcatccgmgatgccctcatttccccctccaaagatgatcatcagctcccggatggccaccgctcggtgtccgtgccgggcgcgggggaccggccccgtgaaggaagaa

SEQ ID NO: 288846 - DNA, 201 bp, Homo sapiens
ctctgtctgtcctgaagacaggcctgcaggcaatttcttgttaaaggcttggctatttattaccacagagaaaccacacacacggaagtcactagggctakgaaagctcacagaggtgtaaggggcacagttctggggctctttgttgtgacagtagcaggaaggctgatgagatgaccagagccctctgcttttattcct

SEQ ID NO: 288847 - DNA, 201 bp, Homo sapiens
ccacctctctgtctgtcctgaagacaggcctgcaggcaatttcttgttaaaggcttggctatttattaccacagagaaaccacacacacggaagtcactakggctaggaaagctcacagaggtgtaaggggcacagttctggggctctttgttgtgacagtagcaggaaggctgatgagatgaccagagccctctgctttt

SEQ ID NO: 288848 - DNA, 201 bp, Homo sapiens
aatttcctgagtacttagtgaagtagagcagctccactggaaattacatcccatagggcaagtagatctgttcagaaagagctgggatttggtggatcaargtcctggaggatcaagaaaagatggatcctgaagtccatgtatacctacatgtataccagggttgaatagatacattaattctctattatagattatata

SEQ ID NO: 288849 - DNA, 201 bp, Homo sapiens
agaggtcctcaaagataggggctccctgcccaggggcacttgtgatctgcagtggtgctcaagttatgacagtcctctttccgagggccagtccagaaggrcgtccacaccgagtatgcagacacaaggccgcctcaccacgtccccgccgctttagagcgcggctcacggaggggctcttgaccgttacctgccaaacac

SEQ ID NO: 288850 - DNA, 201 bp, Homo sapiens
aaagagtattctaagcaatggcactgttagggtaaatgcatagtctctcgaagtcatgacttatgaggggagtaatgttcaggtggagatagatagctgtktgtttaaaaagtagatcttagtcacattttatatttagacaagactgttcaaaagcaaatgttgccatttttcattaaggaggtgaaatgcagagaaaaa

SEQ ID NO: 288851 - DNA, 201 bp, Homo sapiens
tatataattccagaatgtgttctagaggagggaagcttcctttctcttactctttcctgctgtctggaatgtagatgtaatggctagaactggagcagccrtcttggaccatgagctggaagaagcctaatttcctgagtacttagtgaagtagagcagctccactggaaattacatcccatagggcaagtagatctgttc

SEQ ID NO: 288852 - DNA, 201 bp, Homo sapiens
agaggagggaagcttcctttctcttactctttcctgctgtctggaatgtagatgtaatggctagaactggagcagccatcttggaccatgagctggaagargcctaatttcctgagtacttagtgaagtagagcagctccactggaaattacatcccatagggcaagtagatctgttcagaaagagctgggatttggtgga

SEQ ID NO: 288853 - DNA, 201 bp, Homo sapiens
ttttcttttcttttttaactgaatctagtgatggcttcagatttcttctcaatctagcaatcccaacagcccataccatagccaatcagagctggcatgtraaatgaaacacaggggcactgatttttggagtatttttctgaagagcctttcccactttgctttttgttccaaggcagagcaaattcccttagccactgc

SEQ ID NO: 288854 - DNA, 201 bp, Homo sapiens
gtcacacattggacaagcctggtatataatttatgaaataagaaggatagttaacatgagagtaaaaaaaaaaaaacctgagagagagtgagagaaagaamacatgatgatatctgaatgtctggatgtgctttgaaaaaaaaaatcagtcctctcgttgtttggcccctgtgcagccaaatatccaaagtgatattggtt

SEQ ID NO: 288855 - DNA, 201 bp, Homo sapiens
atggaattccagttctccctttaatgcacttggaagtagactgtgcaatgcagtggtaagaacataggctctggggtcaggcttacaggactgaatctacrtgctgccacttacacaccttctaagctcgactccgggtgaattgtttaactgcatgcaccctagttcctcatctgtaaaatggaaattacatgacctaat

SEQ ID NO: 288856 - DNA, 201 bp, Homo sapiens
cctgaaccttgaagttcacggctgcagtgagctgtgatcacgccactgcactccagcctgagtaacagagcaagaccctgtctctttaaaaaaaaaaaaaagtaaaattggccggatgaggtggctcacgcctgtaatcccagcactttgggaggctgaggcggcggatcacctgaggtcaggtgtttgagaccagcctgg

SEQ ID NO: 288857 - DNA, 201 bp, Homo sapiens
tcaaatatcaacctttccatgtgcagatcccatcaaagtagaaggtctatttttaaatatgtgtaggaacagttatgcagagcttagatcaataaggttayggcattttatgatcttgagacagactcagaattacattttatgaaacatgcaacttaggccaggcatgatggctcatgcctataatcccagtactttggg

SEQ ID NO: 288858 - DNA, 201 bp, Homo sapiens
tggtgcatgactacagtcccagctactcgggaggctgaggagaaaggcccaggaattcaagtccagcctgggcaacatagcaagacacgtctctacataayaataataataattaatacataaaataaggtacaagatgctgggggtaaagagagaagaggaggggcatcatgtcaagcctctccaggagaaaggacacac

SEQ ID NO: 288859 - DNA, 201 bp, Homo sapiens
attttcgctcatgtgtgtgcagtgagtatttagagcataggatattgtgctgcccctgaaccttatgacttcccagaggtgaccaacgttttagctaaaarcatttagctaaatgtttgaatggaattgtgctttaaaataaggtacaacttgctgagcatggtggtgcatgactacagtcccagctactcgggaggctga

SEQ ID NO: 288860 - DNA, 201 bp, Homo sapiens
ccgggcggtgacagctgtcagggccgcggccgccgcctcgcctcccctccccctccgcagctccagcaggcggggccgacgagccgccgccgcgcctaccygtgttgtagacgtgcagctcatccgcgatgccctcatttccccctccaaagatgatcatcagctcccggatggccaccgctcggtgtccgtgccgggcgc

SEQ ID NO: 288861 - DNA, 201 bp, Homo sapiens
ttcccactgaccacgtctcccatccccacccagagcctcccgttcggtattttgggaagaagccacagcatcttcctttacgtccactttaattgagcatmtaggatgtgtgggcgaggcagtctcacaagcaacgtgagagaagctcgggtagaggttcgaagagctgggagcgcagggcggggacctcgcacgggaggg

SEQ ID NO: 288862 - DNA, 201 bp, Homo sapiens
tcagacagtgggggtcagggagaagatctataacattctgctaggtggatgagagattcaaaggagatgacatgatctgtgaaggaaattgcactgggcasgtgtcagctcaggctgctgtccacatgatgcctgggacatgtctgagggactagcctgctgcaagttaacagcacataattctggaagggcggtgggaaa

SEQ ID NO: 288863 - DNA, 201 bp, Homo sapiens
atctgtgcatacagtgtggacatctaagtcatacataacaagcctatcgcatccttggagcatggcacagcaggaataaaggagaaagaagctggaatcasacagtgggggtcagggagaagatctataacattctgctaggtggatgagagattcaaaggagatgacatgatctgtgaaggaaattgcactgggcaggtg

SEQ ID NO: 288864 - DNA, 201 bp, Homo sapiens
catatacaaaaatcaacacctttgcctctttgacagtggtaattattagcatgcccttcttaggtataaaagggataatggtatatctaggtttatgcacagttaagaatcaactataaatattcagacttgtattttaaaattacagattaaaagtgactcccaaaagaaaatcaatttcttcataaatgaaatatagta

SEQ ID NO: 288865 - DNA, 201 bp, Homo sapiens
cgtggcaggtgaatattaatcgggcctgttgataaactgtagaattttgtccattttctgtccattttctgcttctctgtagttttgttttaaatggagtytagtatctgattgtccctggctgaatctgataatccattaaggcagggaggaactgggtgtcagcaaaatagaatcacagcctcaggatgtagctttgga

SEQ ID NO: 288866 - DNA, 201 bp, Homo sapiens
tcatatacaaaaatcaacacctttgcctctttgacagtggtaattattagcatgcccttcttaggtataaaagggataatggtatatctaggtttatgcacagttaagaatcaactataaatattcagacttgtattttaaaattacagattaaaagtgactcccaaaagaaaatcaatttcttcataaatgaaatatagt

SEQ ID NO: 288867 - DNA, 201 bp, Homo sapiens
gtaaacacactcatgtaacatccagcatgttctcactaacacttagtataaaatcaatctttttaagtttgccattttgattagtgtccagtggtatctaraaatttgaagtttcattatttctaatgtcattgaacacttttcccacacactttgtaaccatttggaagtaagtgttcaagtctcttgcctattttgctg

SEQ ID NO: 288868 - DNA, 201 bp, Homo sapiens
cagttccttccctatcatatttacatgtctcaagtaaaacacagatgagtggcaaaaggtctactgcattctctggaacctgccaccccagagtagttaaytggctactagaggattaacacacagggctgagcaggtcaaagccagggctctgtcaggtaagggccagtttttactactgagcaactcacaaacaccact

SEQ ID NO: 288869 - DNA, 201 bp, Homo sapiens
taatagaacttcttgggggacaatgcggcaatctctatcaaaattgaaaaggcacacaaccttcaatctagcaattccacccacaatattttatcctacakatatatatatatatatatatatatatatatatatatatatatatatatatatatttgtacacatacactagacatacatagagggctgctcattgctgtg

SEQ ID NO: 288870 - DNA, 201 bp, Homo sapiens
gaaattaatagaacttcttgggggacaatgcggcaatctctatcaaaattgaaaaggcacacaaccttcaatctagcaattccacccacaatattttatcytacatatatatatatatatatatatatatatatatatatatatatatatatatatatatttgtacacatacactagacatacatagagggctgctcattg

SEQ ID NO: 288871 - DNA, 201 bp, Homo sapiens
  misc_feature (1)...(201): n = A,T,C or G
agtgacacaggaggaaacccaaagatactgcacaagggtttcaagaaaatgatcattttccagaaacaaaagattcgctggtcaaaagcatgcacatcctnttcccttacagaacacatatatgggctatctggactaccggaagaaggccatcaaggaccttggcatcagccccagcacctgctctttcaatcctggtgt

SEQ ID NO: 288872 - DNA, 201 bp, Homo sapiens
acgttcaagtaaaacatggcggtattctctgtaatatccccattgtgacactccatgtaatctcccgatacttctcttgtgactagtgtgctggtcactcrcagctgtcccacttggggagaggtaagctgatacacttggctaaaacaatccttatttgaaatggaattctgagtcatggcattaggaaagcagacattt

SEQ ID NO: 288873 - DNA, 201 bp, Homo sapiens
tcttgggtgggagggaaattaatagaacttcttgggggacaatgcggcaatctctatcaaaattgaaaaggcacacaaccttcaatctagcaattccaccyacaatattttatcctacatatatatatatatatatatatatatatatatatatatatatatatatatatatatttgtacacatacactagacatacatag

SEQ ID NO: 288874 - DNA, 201 bp, Homo sapiens
aaagaacccctataaactcttgggtgggagggaaattaatagaacttcttgggggacaatgcggcaatctctatcaaaattgaaaaggcacacaaccttcwatctagcaattccacccacaatattttatcctacatatatatatatatatatatatatatatatatatatatatatatatatatatatatttgtacacat

SEQ ID NO: 288875 - DNA, 201 bp, Homo sapiens
ccaggcttaagtgatcctcccacctcagcttttggagtagctgagattataggtgtgcactaccatgcctggctagtttttaaattttttctagagatgasgttttaccatgtttcccatgctggtcttgaactcctgagctcaagcaatcctcctgcatcagcctcccaaagtgctgggattacagatgtgagccactgc

SEQ ID NO: 288876 - DNA, 201 bp, Homo sapiens
accttcaatctctgaaacttcaagaatgtagtttggaaacaacaacctaggaggagagtttggagaagagggatggaaaatagcaccctgaagaagccagsattgatggggtaaagacaagaggaggcactcatgaaggaaatagagaataggtagccagagaagttaaaagggaactgggtgagggtgatgtcaaagaag

SEQ ID NO: 288877 - DNA, 201 bp, Homo sapiens
cctattggagggagctgtctgtatcctgccaggaccctgactgattcaactctatagtcactgtgcacaaccagtgtggccatatgcagcagcacagtgcrggcctcttatccccatggctgcaaggtggctacttcacacgcaagcttcaaggttggattttaaacaggaagaaagggcaaaagacaccaaagagctctt

SEQ ID NO: 288878 - DNA, 201 bp, Homo sapiens
tcttatccccatggctgcaaggtggctacttcacacgcaagcttcaaggttggattttaaacaggaagaaagggcaaaagacaccaaagagctctttgccmggaaaacactagctttcaaggaagtactagacagcagatgtctgctcacgtgccactctagctgcaggacatccaaggaggagaatcttttcaaataggc

SEQ ID NO: 288879 - DNA, 201 bp, Homo sapiens
aaggtggctacttcacacgcaagcttcaaggttggattttaaacaggaagaaagggcaaaagacaccaaagagctctttgccaggaaaacactagctttcraggaagtactagacagcagatgtctgctcacgtgccactctagctgcaggacatccaaggaggagaatcttttcaaataggcattttgctgtccatatga

SEQ ID NO: 288880 - DNA, 201 bp, Homo sapiens
ggggcctcctgattccaaggctgacctatgcatgcagccttgtgagtatgcaaacacatgccagaaagtgtggttggctcccacgtcatctattgaccacyttacttgaaagtaattggaatgaattactcctttctcccttggctgtaggttttagatgagctatgaagggtagaacctagtatgtgcaaagtaatttgg

SEQ ID NO: 288881 - DNA, 201 bp, Homo sapiens
ggcctttggccatgttctgccaatctgtactcaggacgttgccttctctgtgtttcagtgccctggttcccaagaaccattcaagagctggacagatttgycaatcagattctcagctatggagcggaactggatgctgaccaccctgtgagtccatggcccgtaggatgagattttttcagtgcctctcctctactcccc

SEQ ID NO: 288882 - DNA, 201 bp, Homo sapiens
ccttccttcatactcgtttctaattttagtacatcccaccccagccactagccacattgcctgtcctggaagttgaaaaataaacatttataattgaattrtggactgccaatgagtgcaaatctattattaagatatatcagtttagaagcttatgaactcgttccatcaaaaggctaaaaactcccagaaggttatctt

SEQ ID NO: 288883 - DNA, 201 bp, Homo sapiens
cgtggagagcgtggcacagtgtctaagacagagtgtgcatgcaaataagtagataatattctttgcttttctttattgcatgcctgtaatatttttggagytgtcacattcattgccctcaagtagcatcaagggatgaaattatgtttgtaagaaaatcctgaggctgaggaatacaacatgttttatgtctactacact

SEQ ID NO: 288884 - DNA, 201 bp, Homo sapiens
ctaggcctcagtttcttgcctattaaaagggagtgcatagttcatgggattgttaagaggaagaagtgaaaccatgcacgtggagagcgtggcacagtgtmtaagacagagtgtgcatgcaaataagtagataatattctttgcttttctttattgcatgcctgtaatatttttggagttgtcacattcattgccctcaag

SEQ ID NO: 288885 - DNA, 201 bp, Homo sapiens
tggacagttctgcatttttcaaataatgagaaagcatatatcaacagaaacaaaggtgaatttcctccaatctcccagacttccaaacagaaaaaaaaaaatcacctattatcacactattctaaaataatcaataaatcaatattaatatttgggtgtgcctccatccttcctcctttctcgctctctctgtctatatat

SEQ ID NO: 288886 - DNA, 201 bp, Homo sapiens
cataaacagtgcctggcacttagtacatcttcaacaaacgtttgttgaataaatgtgtgcatgaatgacagcacctcagtgatctcactctgatgttgccragaagggatgctcatgcaatgacttcagagtcttgagatcatacatataatgtatattatatatatattggtttgtacttaaacttggatcaaatgcact

SEQ ID NO: 288887 - DNA, 201 bp, Homo sapiens
tcactgtaagtactgagtttatcttgccttttttgtctatttatttaatgttcctgtttcctaataggatgtgaaattactttgagtagactctcctgtttatcataaacagtgcctggcacttagtacatcttcaacaaacgtttgttgaataaatgtgtgcatgaatgacagcacctcagtgatctcactctgatgttg

SEQ ID NO: 288888 - DNA, 201 bp, Homo sapiens
gtcactgtaagtactgagtttatcttgccttttttgtctatttatttaatgttcctgtttcctaataggatgtgaaattactttgagtagactctcctgtytatcataaacagtgcctggcacttagtacatcttcaacaaacgtttgttgaataaatgtgtgcatgaatgacagcacctcagtgatctcactctgatgtt

SEQ ID NO: 288889 - DNA, 201 bp, Homo sapiens
ttaccaacagagtactgatgaaataaattacgataatccacataaaaatacaatggagccattacaaaagaataaataaggtcttcctgtagtaaacagcrtgacctcaagatatatcattaagtttaaagtttaaaaaggcaaggtttagggccgggcgtggtgactcacgcctgtaatcccagcagtttggaaggctga

SEQ ID NO: 288890 - DNA, 201 bp, Homo sapiens
attctaaaataatcaataaatcaatattaatatttgggtgtgcctccatccttcctcctttctcgctctctctgtctatatatatatgtatatatatatawggtgtatatatatgcacacaaatatgtgtgtgtgtgtttgtgtgtattaactgtcacaacttactaaccagcacccaattgcaaacgtgtaggaagtttg

SEQ ID NO: 288891 - DNA, 201 bp, Homo sapiens
atctattcaggtatcccttcatccagtcaaggtgacacataaaattaaccatcatagagtgtgctctcagattgactttccattccagatttactggtttrctgtggagtttgggctctgcaaacaaggagactccataaaggcatatggtgctgggctcctgtcatcctttggtgaattacaggtatgaccttcacagga

SEQ ID NO: 288892 - DNA, 201 bp, Homo sapiens
ggtcactgtaagtactgagtttatcttgccttttttgtctatttatttaatgttcctgtttcctaataggatgtgaaattactttgagtagactctcctgyttatcataaacagtgcctggcacttagtacatcttcaacaaacgtttgttgaataaatgtgtgcatgaatgacagcacctcagtgatctcactctgatgt

SEQ ID NO: 288893 - DNA, 201 bp, Homo sapiens
ccgggaggcgtaggttgcagtgagccgagacaacaacactgcactccagcctgggtgatagagcaagactctgtctcaaataaataaattaaattaataartaataaaatatatgcaatatatacaaatataattatgtatatataaattatacaattttatgcaattgtaattttatattataaatatatatgcattttt

SEQ ID NO: 288894 - DNA, 201 bp, Homo sapiens
tggtcactgtaagtactgagtttatcttgccttttttgtctatttatttaatgttcctgtttcctaataggatgtgaaattactttgagtagactctcctgtttatcataaacagtgcctggcacttagtacatcttcaacaaacgtttgttgaataaatgtgtgcatgaatgacagcacctcagtgatctcactctgatg

SEQ ID NO: 288895 - DNA, 201 bp, Homo sapiens
ctttaccttggcatggaaacaagttttcttctggtgagaggttgaagactttattattatggaatgtcttcagagatggagatgttctctgtaattattawactggacaataaataattctgctgtctgacccaaagggacagactagcctctaatgctctttgctgtgcatatatccttgaaaaggtagtccaagatata

SEQ ID NO: 288896 - DNA, 201 bp, Homo sapiens
tttgggaggccgaggtgggcagatcatgaggtcaggagttcgagaccagcctggccaacatggcgaaatcctgtctctactaaaagtacaaaaattagccragtgtggtggcacgcacctgtattcccagctacttgggaggctgaggcaggaaaattgcttgaacccgggaggcgtaggttgcagtgagccgagacaaca

SEQ ID NO: 288897 - DNA, 201 bp, Homo sapiens
aggtatcccttcatccagtcaaggtgacacataaaattaaccatcatagagtgtgctctcagattgactttccattccagatttactggtttactgtggastttgggctctgcaaacaaggagactccataaaggcatatggtgctgggctcctgtcatcctttggtgaattacaggtatgaccttcacaggaaccaagga

SEQ ID NO: 288898 - DNA, 201 bp, Homo sapiens
gtgctctcagattgactttccattccagatttactggtttactgtggagtttgggctctgcaaacaaggagactccataaaggcatatggtgctgggctcstgtcatcctttggtgaattacaggtatgaccttcacaggaaccaaggatagatttaaaagtggtgggtacagaaaaccattattgtgctttcaatattgt

SEQ ID NO: 288899 - DNA, 201 bp, Homo sapiens
aattatatatatatatatatatatatatatatatagtgtatatatatgcatatatatacagatatatatagtatgtgtgtatacgtgtatgtgtatatatacatacacacatatgtaactcacagctgagcagtaatactgtctactatgtgccagtattgttttccataaatcacgcatattaactcatttaacatcatg

SEQ ID NO: 288900 - DNA, 201 bp, Homo sapiens
tctcagattgactttccattccagatttactggtttactgtggagtttgggctctgcaaacaaggagactccataaaggcatatggtgctgggctcctgtyatcctttggtgaattacaggtatgaccttcacaggaaccaaggatagatttaaaagtggtgggtacagaaaaccattattgtgctttcaatattgttgaa

SEQ ID NO: 288901 - DNA, 201 bp, Homo sapiens
atgaatttgtcgtgcctacttctccagactcagcttacacctctctccttttcactctctttacccgcccccccaacaactggcttatgtatgctcctcaraaaagtcccatttactcatatattagagattttgtatagatgtttcctctaccagaaatcccttcccctagctctttgcatttggagcctttccataatt

SEQ ID NO: 288902 - DNA, 201 bp, Homo sapiens
ctctcagattgactttccattccagatttactggtttactgtggagtttgggctctgcaaacaaggagactccataaaggcatatggtgctgggctcctgycatcctttggtgaattacaggtatgaccttcacaggaaccaaggatagatttaaaagtggtgggtacagaaaaccattattgtgctttcaatattgttga

SEQ ID NO: 288903 - DNA, 201 bp, Homo sapiens
aaattatatatatatatatatatatatatatatatagtgtatatatatgcatatatatacagatatatatagtatgtgtgtatacgtgtatgtgtatatatacatacacacatatgtaactcacagctgagcagtaatactgtctactatgtgccagtattgttttccataaatcacgcatattaactcatttaacatcat

SEQ ID NO: 288904 - DNA, 201 bp, Homo sapiens
tcagattgactttccattccagatttactggtttactgtggagtttgggctctgcaaacaaggagactccataaaggcatatggtgctgggctcctgtcawcctttggtgaattacaggtatgaccttcacaggaaccaaggatagatttaaaagtggtgggtacagaaaaccattattgtgctttcaatattgttgaaac

SEQ ID NO: 288905 - DNA, 201 bp, Homo sapiens
tggtggggaagaaaagtgagttcaaattgccagaacaactactggttctgtggaaagcagaaagacctatctgcctgtctatctatctatctatctatctrtctatctatctatccgtctatctatccatcatctatcatctacacctgtctatctatcatctatctacctatctatctgtccatcaatcatctatcatct

SEQ ID NO: 288906 - DNA, 201 bp, Homo sapiens
tgactttccattccagatttactggtttactgtggagtttgggctctgcaaacaaggagactccataaaggcatatggtgctgggctcctgtcatcctttbgtgaattacaggtatgaccttcacaggaaccaaggatagatttaaaagtggtgggtacagaaaaccattattgtgctttcaatattgttgaaaccctatt

SEQ ID NO: 288907 - DNA, 201 bp, Homo sapiens
ggatgattggccactgttgggtgttacaaatgtatatatttattgaataccttgaatggaaagtaattttatatacatatatatatatatatatatatttwttttttttttttgagacagagtctcgctctgtcgcccaggctggagtgcagtggcgcgatcttggctcactgcaacttccacctccgtggttcaagcaat

SEQ ID NO: 288908 - DNA, 201 bp, Homo sapiens
attccagatttactggtttactgtggagtttgggctctgcaaacaaggagactccataaaggcatatggtgctgggctcctgtcatcctttggtgaattayaggtatgaccttcacaggaaccaaggatagatttaaaagtggtgggtacagaaaaccattattgtgctttcaatattgttgaaaccctatttgtatccgt

SEQ ID NO: 288909 - DNA, 201 bp, Homo sapiens
aggatgattggccactgttgggtgttacaaatgtatatatttattgaataccttgaatggaaagtaattttatatacatatatatatatatatatatattwtttttttttttttgagacagagtctcgctctgtcgcccaggctggagtgcagtggcgcgatcttggctcactgcaacttccacctccgtggttcaagcaa

SEQ ID NO: 288910 - DNA, 201 bp, Homo sapiens
aaggatgattggccactgttgggtgttacaaatgtatatatttattgaataccttgaatggaaagtaattttatatacatatatatatatatatatatatwttttttttttttttgagacagagtctcgctctgtcgcccaggctggagtgcagtggcgcgatcttggctcactgcaacttccacctccgtggttcaagca

SEQ ID NO: 288911 - DNA, 201 bp, Homo sapiens
gggtgagatgagagaaggggcacaaatggcctatgggatgcagcagggaatactgatcctgatttaacagtgataataacttttcacttggggcctacagyactgcttatcagagaagccaaagcttctccccctggagctggagaagacagccatccaaaattacactgtcacggagttccagcccctgtattacgtggc

SEQ ID NO: 288912 - DNA, 201 bp, Homo sapiens
gtgagatgagagaaggggcacaaatggcctatgggatgcagcagggaatactgatcctgatttaacagtgataataacttttcacttggggcctacagtavtgcttatcagagaagccaaagcttctccccctggagctggagaagacagccatccaaaattacactgtcacggagttccagcccctgtattacgtggcag

SEQ ID NO: 288913 - DNA, 201 bp, Homo sapiens
ggggtttgttttacagactatttcatcactcaggtattaagcctagcacccattagttatttttcctgatcctctccctcctcccaccctccacccttcawtagactcagtgtgtgttgttcccctctatgtgtctgtatgttctcaccatttagctcccacttacaagtgagaacatgtggtctttggttttctcttcca

SEQ ID NO: 288914 - DNA, 201 bp, Homo sapiens
gcttttttccctctatatagcattctttagctagattttacttactcttgattttatttaatgataggagtttgtggctttattgtattcagtagtttcaytgtaagctatctctgtcttcttggagccaggggactaaataaacatgtgtatatatgtgtttgtacatacacatacacacacacagaggcttcccaagaa

SEQ ID NO: 288915 - DNA, 201 bp, Homo sapiens
ctcacaaactggcacatagtatgtatttaatcaatggtatttttaaaaattgcaagagcaataagcatgtgcctgctcgtctatcaagaaattaaaaggtrgagctagacacaaaccttaatcaggaattaaatggatattgtacatcttcatcatagacatccatcctatgaactttgcttagtttagcaagtgtgtcag

SEQ ID NO: 288916 - DNA, 201 bp, Homo sapiens
gggttacatttgcacaagtgaaacttcacattttgatagatttctccttaataatttgattttgaaatcagctacctacagatgtttacatctcttaaatkttaagcagtatcttgaacccaccaacaggctataatagtagcccttgaaaacccttggcataaagtgtgtgtatgaagtaatctggatccagagctttga

SEQ ID NO: 288917 - DNA, 201 bp, Homo sapiens
gaaagacacatacacacaaggcaggctgcagtaagtgctgtaaaagagacaatgagacagtagaggaattctgcaacagaagctgtggtgagaattaatcyatgatgtgttagactctccagctatatatatgcctggaccgatgtcaccacttatctgcagttctcctgtgatgtttccagggtacatgattaagactca

SEQ ID NO: 288918 - DNA, 201 bp, Homo sapiens
agatccaggctaagaatttgaatttggttcactctaaatcagaaagtattttataagcctaatctgaaccaggctctggacttggcccagggagtgatatrgagatgcagaccatgtagcttcttgcttcaaagtgggtctaatcatagtcttcatctctgtctacaagcactcctctggtgatctcactcaatttcatgg

SEQ ID NO: 288919 - DNA, 201 bp, Homo sapiens
caactttgatctggacagttccaaggcagcaagtcatgttgaaagtttcctgagaacattcctttttgatcagaggcaggacttgcttcccactacagtayaggatggagtggggctggagcacagggaatgtggggccccccttgttgtaggcaaactctaggctcacaaagaatggtgactaagagaacaaggcgccat

SEQ ID NO: 288920 - DNA, 201 bp, Homo sapiens
tggttccaactttgatctggacagttccaaggcagcaagtcatgttgaaagtttcctgagaacattcctttttgatcagaggcaggacttgcttcccactrcagtacaggatggagtggggctggagcacagggaatgtggggccccccttgttgtaggcaaactctaggctcacaaagaatggtgactaagagaacaagg

SEQ ID NO: 288921 - DNA, 201 bp, Homo sapiens
aagatgcagcctctctaaacaaaaggaaaattacttttatgtgaggtttggggaattatggagttcaaagatcgttggacttttggaagtggaagtgtttmgggattagttgaactttaactgtagaagcatcaccaatgacattcagaagtgtggttactgctgccaagatatctttgattgcttgggacagttttaaaa

SEQ ID NO: 288922 - DNA, 201 bp, Homo sapiens
aaaaaagctttctttttctttttctttctttttttttttttttttaaggcaaggtctcactctgtcacccaggctggactggagtgcagtggtataatcayggttcactgcagcctcagacttctgggctcaaacaatcctcccacctcagcctcctgagtggctgggactacaagcacatactttcatgcctggctgaat

SEQ ID NO: 288923 - DNA, 201 bp, Homo sapiens
caatcaaaatggtgccatatcactgatcttctcactcaaagaagaagttggtgcattggccaaagtattgcgcttatttgaggtcagtgctacaatcatgyttgtcttggataatgtcgtagcaaacttccatgttcttttctagttagatgcaatgaaaagaacacaggatctggaacaggcagatttgaatttgagctc

SEQ ID NO: 288924 - DNA, 201 bp, Homo sapiens
cgtttaaagaaagatgagtatgaatttttcacccatttggataaacgtagcctgcctgctctgacaaacatcatcaagatcttgaggcatgacattggtgmcactgtccatgagctttcacgagataagaagaaagacacaggtaagaattagaggaattttgcaacataagtaactccacactgtcttcataaaataaca

SEQ ID NO: 288925 - DNA, 201 bp, Homo sapiens
ccttctcgtttaaagaaagatgagtatgaatttttcacccatttggataaacgtagcctgcctgctctgacaaacatcatcaagatcttgaggcatgacaytggtgccactgtccatgagctttcacgagataagaagaaagacacaggtaagaattagaggaattttgcaacataagtaactccacactgtcttcataaa

SEQ ID NO: 288926 - DNA, 201 bp, Homo sapiens
cctgaaatgggtgtgtggttctgggaagctaaatacccatttcggagatcaagcatggggttggtgaatcactcatcctctgaatcatatgtgtgttcttsagtgtactaatctcatttttcctgctagagcctttcatccatgaaagcctccctgattcccatgcaggaactacctcaccttcttccaatctcttagtac

SEQ ID NO: 288927 - DNA, 201 bp, Homo sapiens
tttcagatcaattggggttgaagggaggataggattccttagagggctctgaaaagcccctgggattgtgggcaagataatacatgggtgtgcatgcatawtttttaggagacaagatttttcaaaggggctatggttcccaaagagttaagaatttttagagagaagccgcttagggctggaagggaatccatctggtta

SEQ ID NO: 288928 - DNA, 201 bp, Homo sapiens
ctgtgctgagtaaagctgacatttcagatcaattggggttgaagggaggataggattccttagagggctctgaaaagcccctgggattgtgggcaagatartacatgggtgtgcatgcataatttttaggagacaagatttttcaaaggggctatggttcccaaagagttaagaatttttagagagaagccgcttagggct

SEQ ID NO: 288929 - DNA, 201 bp, Homo sapiens
tctagaccttctcgtttaaagaaagatgagtatgaatttttcacccatttggataaacgtagcctgcctgctctgacaaacatcatcaagatcttgaggcrtgacattggtgccactgtccatgagctttcacgagataagaagaaagacacaggtaagaattagaggaattttgcaacataagtaactccacactgtctt

SEQ ID NO: 288930 - DNA, 201 bp, Homo sapiens
atgtgcagtttttttgtgtgaagataagttttcaactgattcaagtaaatacctaagaatgtgattgctgaggttaacttctttaaaaaattattttttttctactgtaaaatcgagtttctttcaaaaacacttggaaagactttgggtcaagaggagttcaggcaccatagctgaaagaagcatttgaataggcagaga

SEQ ID NO: 288931 - DNA, 201 bp, Homo sapiens
attgaatctagaccttctcgtttaaagaaagatgagtatgaatttttcacccatttggataaacgtagcctgcctgctctgacaaacatcatcaagatctygaggcatgacattggtgccactgtccatgagctttcacgagataagaagaaagacacaggtaagaattagaggaattttgcaacataagtaactccacac

SEQ ID NO: 288932 - DNA, 201 bp, Homo sapiens
acatttcatttatgttcaactagaaatccaatatagttttaggcaaactatattttcccttgcaactgtactcccttacatacatgtaagtgggaaagaayaaatgtgacaaacaaaatatcactcctgattccacaatctaaacaaaacactgcctctttctaggttttgttttttggtttttgtttgtttgttttttgg

SEQ ID NO: 288933 - DNA, 201 bp, Homo sapiens
cctgacccacattgaatctagaccttctcgtttaaagaaagatgagtatgaatttttcacccatttggataaacgtagcctgcctgctctgacaaacatcwtcaagatcttgaggcatgacattggtgccactgtccatgagctttcacgagataagaagaaagacacaggtaagaattagaggaattttgcaacataagt

SEQ ID NO: 288934 - DNA, 201 bp, Homo sapiens
cattgtatgattgtatcaaaatatctcatgtaccccacaaatatatacaactactatgtacccacatatattaaacattaaaaaattttaaaataaaagcrtatctcattggactgtagaaagtatcaagtgagataacctttccgatgtgcctggtactgaataactaagtgctgaattaatttttgtttctctctcttt

SEQ ID NO: 288935 - DNA, 201 bp, Homo sapiens
atgaggagaagcatgatggagaggatgttaatgtgggaagagatggcagtcatacctaactgtggattaactatcttactttggcaaattaaaaaaaaaaagatgaaaatatgtaaccagacaaactcatttctagagttcctctaagagcctcagagcttatgtagatgtgaggctctaaagctttagttcattagctac

SEQ ID NO: 288936 - DNA, 201 bp, Homo sapiens
taagactacctttctccaaatggtgcccttcactcaagcctgtggttttggtcttaggaactttgctgccacaatacctcggcccttctcagttcgctacracccatacacccaaaggattgaggtcttggacaatacccagcagcttaagattttggctgattccattaacagtaagtaatttacaccttacgaggccac

SEQ ID NO: 288937 - DNA, 201 bp, Homo sapiens
tgagatgagagaaggggcacaaatggcctatgggatgcagcagggaatactgatcctgatttaacagtgataataacttttcacttggggcctacagtackgcttatcagagaagccaaagcttctccccctggagctggagaagacagccatccaaaattacactgtcacggagttccagcccctgtattacgtggcaga

SEQ ID NO: 288938 - DNA, 201 bp, Homo sapiens
cttaagactacctttctccaaatggtgcccttcactcaagcctgtggttttggtcttaggaactttgctgccacaatacctcggcccttctcagttcgctrcgacccatacacccaaaggattgaggtcttggacaatacccagcagcttaagattttggctgattccattaacagtaagtaatttacaccttacgaggcc

SEQ ID NO: 288939 - DNA, 201 bp, Homo sapiens
aacctgacccacattgaatctagaccttctcgtttaaagaaagatgagtatgaatttttcacccatttggataaacgtagcctgcctgctctgacaaacakcatcaagatcttgaggcatgacattggtgccactgtccatgagctttcacgagataagaagaaagacacaggtaagaattagaggaattttgcaacataa

SEQ ID NO: 288940 - DNA, 201 bp, Homo sapiens
agagaaggggcacaaatggcctatgggatgcagcagggaatactgatcctgatttaacagtgataataacttttcacttggggcctacagtactgcttatsagagaagccaaagcttctccccctggagctggagaagacagccatccaaaattacactgtcacggagttccagcccctgtattacgtggcagagagtttt

SEQ ID NO: 288941 - DNA, 201 bp, Homo sapiens
gagaaccagagggaaaagataatggggactttctccagccctgacatcaccatacctgatattttgctttctatcccagaagactacaatatctcagactyctcatccacacaatgagaatactaaaaacctatcagtcaacagtaatttattgtacatttaaaaataactaaaagtataattggattgtttgtaacacaa

SEQ ID NO: 288942 - DNA, 201 bp, Homo sapiens
agaaggggcacaaatggcctatgggatgcagcagggaatactgatcctgatttaacagtgataataacttttcacttggggcctacagtactgcttatcakagaagccaaagcttctccccctggagctggagaagacagccatccaaaattacactgtcacggagttccagcccctgtattacgtggcagagagttttaa

SEQ ID NO: 288943 - DNA, 201 bp, Homo sapiens
ttcatcctattttcttcatctccaccctcagtaccactttagtccaaggcatcatggccatttctcacctggacaagtgcaatcacctattagctgctttygataccctccattccactctccaccttgcagccagagtggtcttgtcaaaacgcacatctaatggagccacctctgattacacacttcaagggcactcca

SEQ ID NO: 288944 - DNA, 201 bp, Homo sapiens
ggcacaaatggcctatgggatgcagcagggaatactgatcctgatttaacagtgataataacttttcacttggggcctacagtactgcttatcagagaagmcaaagcttctccccctggagctggagaagacagccatccaaaattacactgtcacggagttccagcccctgtattacgtggcagagagttttaatgatgc

SEQ ID NO: 288945 - DNA, 201 bp, Homo sapiens
gaatggcagaaataaaataaaaagagcattgaacttggactcagatagcctgtgtgactttgagcaagttacttaactactcagtttattttctcattttyaaaatggggttagcaatctataccttacagataatgtatttgaaaatactctgtaaatcaaaatgtaaaatacaaatagaaaaatagtttttagaaagat

SEQ ID NO: 288946 - DNA, 201 bp, Homo sapiens
aagccaaagcttctccccctggagctggagaagacagccatccaaaattacactgtcacggagttccagcccctgtattacgtggcagagagttttaatgmtgccaaggagaaagtaaggtgaggtggtgacaaaggtgagccactagctctgggggcctcctgactggtgccactcatctgtgggtggttggccaggaga

SEQ ID NO: 288947 - DNA, 201 bp, Homo sapiens
gaagccaaagcttctccccctggagctggagaagacagccatccaaaattacactgtcacggagttccagcccctgtattacgtggcagagagttttaatsatgccaaggagaaagtaaggtgaggtggtgacaaaggtgagccactagctctgggggcctcctgactggtgccactcatctgtgggtggttggccaggag

SEQ ID NO: 288948 - DNA, 201 bp, Homo sapiens
ccaaagcttctccccctggagctggagaagacagccatccaaaattacactgtcacggagttccagcccctgtattacgtggcagagagttttaatgatgscaaggagaaagtaaggtgaggtggtgacaaaggtgagccactagctctgggggcctcctgactggtgccactcatctgtgggtggttggccaggagagtg

SEQ ID NO: 288949 - DNA, 201 bp, Homo sapiens
gccaaagcttctccccctggagctggagaagacagccatccaaaattacactgtcacggagttccagcccctgtattacgtggcagagagttttaatgatsccaaggagaaagtaaggtgaggtggtgacaaaggtgagccactagctctgggggcctcctgactggtgccactcatctgtgggtggttggccaggagagt

SEQ ID NO: 288950 - DNA, 201 bp, Homo sapiens
ctaaaaaagaagtaaaatgccactgagaactctcttaagactacctttctccaaatggtgcccttcactcaagcctgtggttttggtcttaggaactttgytgccacaatacctcggcccttctcagttcgctacgacccatacacccaaaggattgaggtcttggacaatacccagcagcttaagattttggctgattcc

SEQ ID NO: 288951 - DNA, 201 bp, Homo sapiens
aagtaaaatgccactgagaactctcttaagactacctttctccaaatggtgcccttcactcaagcctgtggttttggtcttaggaactttgctgccacaayacctcggcccttctcagttcgctacgacccatacacccaaaggattgaggtcttggacaatacccagcagcttaagattttggctgattccattaacagt

SEQ ID NO: 288952 - DNA, 201 bp, Homo sapiens
ctagtgcgaggttaaaaccttcagccccacgtgctgtttgcaaacctgcctgtacctgaggccctaaaaagccagagacctcactcccggggagccagcakgtccactgcggtcctggaaaacccaggcttgggcaggaaactctctgactttggacaggtgagccacggcagcctgagctgctcagttaggggaatttgg

SEQ ID NO: 288953 - DNA, 201 bp, Homo sapiens
ggggacctaggcaagtgcctggtatattttagacatatagtgaattttagttatttttccccttcctaaagatagctatttcttttttcttttttttttttactttataagcttttaatttttatttatttttatttttctctctcttttttcttttgacttttattttaaattcagggttatatgtacaggtttgttaca

SEQ ID NO: 288954 - DNA, 201 bp, Homo sapiens
tagtgcgaggttaaaaccttcagccccacgtgctgtttgcaaacctgcctgtacctgaggccctaaaaagccagagacctcactcccggggagccagcatrtccactgcggtcctggaaaacccaggcttgggcaggaaactctctgactttggacaggtgagccacggcagcctgagctgctcagttaggggaatttggg

SEQ ID NO: 288955 - DNA, 201 bp, Homo sapiens
cctgcctgtacctgaggccctaaaaagccagagacctcactcccggggagccagcatgtccactgcggtcctggaaaacccaggcttgggcaggaaactcyctgactttggacaggtgagccacggcagcctgagctgctcagttaggggaatttgggcctccagagaaagagatccgaagactgctggtgcttcctggtt

SEQ ID NO: 288956 - DNA, 201 bp, Homo sapiens
gcaccgaggacagcacccacatttgttgccagtactgagggcagggaagtggatggtaatcctgaaaacctttattaattaattaattaattaattaatttatttatttatttatttatattttgagacagagtctcgctcttgttgcccaggctggagtacagtggtgcgatcttgtctcactgaaacctccgcctcccg

SEQ ID NO: 288957 - DNA, 201 bp, Homo sapiens
cttggcagtgagaatgagagatcccaatcaagttccaaagtcaaagctacgaagttgcaaatgagaacaggaacaagtggcagccaagctatctcaatacytcctaagtatacatctagattactcttatctttctttgcctagattgtgtattgggtagaggtagagaattgcagccattatgcttcttacttgggtgtt

SEQ ID NO: 288958 - DNA, 201 bp, Homo sapiens
gttttctttcttcttttcatcccagcttgcactggtttccgcctccgacctgtggctggcctgctttcctctcgggatttcttgggtggcctggccttccvagtcttccactgcacacagtacatcagacatggatccaagcccatgtatacccccgaaccgtgagtactgtcctccagctaccagttgccaggcacaatg

SEQ ID NO: 288959 - DNA, 201 bp, Homo sapiens
acctaaaggtctcctagtgcctctgactcagtggtgatgagctttgagttttctttcttcttttcatcccagcttgcactggtttccgcctccgacctgtrgctggcctgctttcctctcgggatttcttgggtggcctggccttccgagtcttccactgcacacagtacatcagacatggatccaagcccatgtataccc

SEQ ID NO: 288960 - DNA, 201 bp, Homo sapiens
taaagtgggcataataaaagtgtctacttcatagggctattgtggggattagtagcatatctaaagtagcttaaaacagtgtcttacatacagtaggtcawatatagtgttagctattattaccattatcactgtcactatccttatcctccaaagtttgcaacaaactgagagacagatacaggaaccatagagatggtg

SEQ ID NO: 288961 - DNA, 201 bp, Homo sapiens
ttaagagaacagactttgaagctagactgcctgtggctgtgaccttgaataaaacctttaacctatctctgtctcagctttcccatcggtaaagtgggcawaataaaagtgtctacttcatagggctattgtggggattagtagcatatctaaagtagcttaaaacagtgtcttacatacagtaggtcatatatagtgtta

SEQ ID NO: 288962 - DNA, 201 bp, Homo sapiens
cctgaagacacagagaacatgggggcaagaggcaaggggatctcaaagacttcttcagctaattacttccattgccatggccaataataagaataataaamcagtaatactagcagttgggaagctacataatagtaattaagagaacagactttgaagctagactgcctgtggctgtgaccttgaataaaacctttaacc

SEQ ID NO: 288963 - DNA, 201 bp, Homo sapiens
cttagataaagaagggagtaagggtccaagcagagtgtgcttcagcctgaagacacagagaacatgggggcaagaggcaaggggatctcaaagacttcttyagctaattacttccattgccatggccaataataagaataataaaacagtaatactagcagttgggaagctacataatagtaattaagagaacagactttg

SEQ ID NO: 288964 - DNA, 201 bp, Homo sapiens
tgagaatgaagtaaggtgctgcatatggaaacaaccagcacagtcttgcatatacagcaggtattcagtgagtttggactgaattgaaatctgagtagctyaataggtaagtacattgagtcgcaagcctctctgtacagtatatccaggtgaaatgggtgttactctttctgtcaagaggatgttaatttagcaaaaaca

SEQ ID NO: 288965 - DNA, 201 bp, Homo sapiens
gatgtaaacctgacccacattgaatctagaccttctcgtttaaagaaagatgagtatgaatttttcacccatttggataaacgtagcctgcctgctctgayaaacatcatcaagatcttgaggcatgacattggtgccactgtccatgagctttcacgagataagaagaaagacacaggtaagaattagaggaattttgca

SEQ ID NO: 288966 - DNA, 201 bp, Homo sapiens
actctttagcttttcccatagggaaattatgagaatgaagtaaggtgctgcatatggaaacaaccagcacagtcttgcatatacagcaggtattcagtgartttggactgaattgaaatctgagtagctcaataggtaagtacattgagtcgcaagcctctctgtacagtatatccaggtgaaatgggtgttactctttct

SEQ ID NO: 288967 - DNA, 201 bp, Homo sapiens
agttaggagtgtgtgtttgtgtaagaaatgtgctattttcggggatggtgccaagagccctgagctctgagtctgtgcatctggtatgaatcctgccttcratcctctccagctgagtaaacctgcctcagttttgtcatctgtcaaatggacactgtatcaactctttagcttttcccatagggaaattatgagaatgaa

SEQ ID NO: 288968 - DNA, 201 bp, Homo sapiens
ctaggagaatgatgtaaacctgacccacattgaatctagaccttctcgtttaaagaaagatgagtatgaatttttcacccatttggataaacgtagcctgyctgctctgacaaacatcatcaagatcttgaggcatgacattggtgccactgtccatgagctttcacgagataagaagaaagacacaggtaagaattagag

SEQ ID NO: 288969 - DNA, 201 bp, Homo sapiens
cattcaatcaaacacctgaggctgtggattttgccgtgtacctgtccctgaaaagtattttctttcacacttaaagcccaaggtgcttcactgaggttttkttttgttttgttttgttttgtttgccctgtagttcctgctgtgttatgagttaggagtgtgtgtttgtgtaagaaatgtgctattttcggggatggtgcc

SEQ ID NO: 288970 - DNA, 201 bp, Homo sapiens
gaggccaaggcaggagaatggcgtgaaccctggaggcggagcttgcagtgagcccggatcgtgccactgcactctagcctgggtgacagagcaagactccmtccccaaaaaaaaaaaaaaaggaatttcaaggaggttgcaaagaacatgaaaccccaagtgtgattcctgtggtatgacagtggttgcatatcccagaag

SEQ ID NO: 288971 - DNA, 201 bp, Homo sapiens
cattttaaaaaaaggaaaaagttttattacgaaactagtttgtataaaacagggttatacatatttttgtaagtttgtaataaaacagtaagaaaaaaaaaggcagtaatagaaatctccaaaaggcaacctatcaaaaccaactggctgccactttgagtttggacagtagctgcataaactttgttcttcttgaacagt

SEQ ID NO: 288972 - DNA, 201 bp, Homo sapiens
tctcttctaggagaatgatgtaaacctgacccacattgaatctagaccttctcgtttaaagaaagatgagtatgaatttttcacccatttggataaacgtmgcctgcctgctctgacaaacatcatcaagatcttgaggcatgacattggtgccactgtccatgagctttcacgagataagaagaaagacacaggtaagaa

SEQ ID NO: 288973 - DNA, 201 bp, Homo sapiens
tccccattctctcttctaggagaatgatgtaaacctgacccacattgaatctagaccttctcgtttaaagaaagatgagtatgaatttttcacccatttgkataaacgtagcctgcctgctctgacaaacatcatcaagatcttgaggcatgacattggtgccactgtccatgagctttcacgagataagaagaaagacac

SEQ ID NO: 288974 - DNA, 201 bp, Homo sapiens
tcctcaccctccccattctctcttctaggagaatgatgtaaacctgacccacattgaatctagaccttctcgtttaaagaaagatgagtatgaatttttcmcccatttggataaacgtagcctgcctgctctgacaaacatcatcaagatcttgaggcatgacattggtgccactgtccatgagctttcacgagataagaa

SEQ ID NO: 288975 - DNA, 201 bp, Homo sapiens
taaaatgccactgagaactctcttaagactacctttctccaaatggtgcccttcactcaagcctgtggttttggtcttaggaactttgctgccacaatacytcggcccttctcagttcgctacgacccatacacccaaaggattgaggtcttggacaatacccagcagcttaagattttggctgattccattaacagtaag

SEQ ID NO: 288976 - DNA, 201 bp, Homo sapiens
agtgactgtctcctcaccctccccattctctcttctaggagaatgatgtaaacctgacccacattgaatctagaccttctcgtttaaagaaagatgagtakgaatttttcacccatttggataaacgtagcctgcctgctctgacaaacatcatcaagatcttgaggcatgacattggtgccactgtccatgagctttcac

SEQ ID NO: 288977 - DNA, 201 bp, Homo sapiens
tactattcagcaataaaaaagaatgagatcctgttatttgcaataacatggacagaactggaggtcattatgtcaaatgaaataagccaggcacagaaagmcaaacatcacatattctcactcatatgtggggtctaaaaatcaaaacaatctgattcatggagctagagagtagagagctaattaccagaggtggggaag

SEQ ID NO: 288978 - DNA, 201 bp, Homo sapiens
gtaaaatgccactgagaactctcttaagactacctttctccaaatggtgcccttcactcaagcctgtggttttggtcttaggaactttgctgccacaatayctcggcccttctcagttcgctacgacccatacacccaaaggattgaggtcttggacaatacccagcagcttaagattttggctgattccattaacagtaa

SEQ ID NO: 288979 - DNA, 201 bp, Homo sapiens
aatacctcggcccttctcagttcgctacgacccatacacccaaaggattgaggtcttggacaatacccagcagcttaagattttggctgattccattaacmgtaagtaatttacaccttacgaggccactcggtttctcagtaatcgaagactgtctttccctaccatcgccataggaaaaataataaatttattgaaata

SEQ ID NO: 288980 - DNA, 201 bp, Homo sapiens
gaggccctaaaaagccagagacctcactcccggggagccagcatgtccactgcggtcctggaaaacccaggcttgggcaggaaactctctgactttggacwggtgagccacggcagcctgagctgctcagttaggggaatttgggcctccagagaaagagatccgaagactgctggtgcttcctggtttcataagctcagt

SEQ ID NO: 288981 - DNA, 201 bp, Homo sapiens
caaggcaggagaatggcgtgaaccctggaggcggagcttgcagtgagcccggatcgtgccactgcactctagcctgggtgacagagcaagactccctcccmaaaaaaaaaaaaaaaggaatttcaaggaggttgcaaagaacatgaaaccccaagtgtgattcctgtggtatgacagtggttgcatatcccagaagctggc

SEQ ID NO: 288982 - DNA, 201 bp, Homo sapiens
ctcagcaccgaggacagcacccacatttgttgccagtactgagggcagggaagtggatggtaatcctgaaaacctttattaattaattaattaattaattwatttatttatttatttatttatattttgagacagagtctcgctcttgttgcccaggctggagtacagtggtgcgatcttgtctcactgaaacctccgcct

SEQ ID NO: 288983 - DNA, 201 bp, Homo sapiens
tgaggccctaaaaagccagagacctcactcccggggagccagcatgtccactgcggtcctggaaaacccaggcttgggcaggaaactctctgactttggayaggtgagccacggcagcctgagctgctcagttaggggaatttgggcctccagagaaagagatccgaagactgctggtgcttcctggtttcataagctcag

SEQ ID NO: 288984 - DNA, 201 bp, Homo sapiens
aagaaaatttgatctatatatctagcggaaagttaaaataggctctatggtgagaaaatcccaaaagacaattgattgtgggattggcctctttaagttargtggtattacctggactgtgggaccatgttgaaaagcctctaagaaatccccaaggcatgtacaggtatatctacaatgcaggtagattaaagatctagc

SEQ ID NO: 288985 - DNA, 201 bp, Homo sapiens
gattctcagcaccgaggacagcacccacatttgttgccagtactgagggcagggaagtggatggtaatcctgaaaacctttattaattaattaattaattwattaatttatttatttatttatttatattttgagacagagtctcgctcttgttgcccaggctggagtacagtggtgcgatcttgtctcactgaaacctcc

SEQ ID NO: 288986 - DNA, 201 bp, Homo sapiens
agaaagagttcatgcttgctttgtccatggaggtttaacaggaatgaattgctaaactgtggaaaatgttttaaacaaatgcatcttatcctgtaggaaamaagctatattgaagacaactgcaatcaaaatggtgccatatcactgatcttctcactcaaagaagaagttggtgcattggccaaagtattgcgcttattt

SEQ ID NO: 288987 - DNA, 201 bp, Homo sapiens
tggagattctcagcaccgaggacagcacccacatttgttgccagtactgagggcagggaagtggatggtaatcctgaaaacctttattaattaattaattwattaattaatttatttatttatttatttatattttgagacagagtctcgctcttgttgcccaggctggagtacagtggtgcgatcttgtctcactgaaac

SEQ ID NO: 288988 - DNA, 201 bp, Homo sapiens
cttgtataaaacccatgcttgctatgagtacaatcacatttttccacttcttgaaaagtactgtggcttccatgaagataacattccccagctggaagacrtttctcaattcctgcagagtaagtccacatcagggtcaatggccctgcagaaagttgggggaggattgaggcagaggagagggaaggggaagacaagtat

SEQ ID NO: 288989 - DNA, 201 bp, Homo sapiens
agagtggagattctcagcaccgaggacagcacccacatttgttgccagtactgagggcagggaagtggatggtaatcctgaaaacctttattaattaattwattaattaattaatttatttatttatttatttatattttgagacagagtctcgctcttgttgcccaggctggagtacagtggtgcgatcttgtctcactg

SEQ ID NO: 288990 - DNA, 201 bp, Homo sapiens
cctacagtactgcttatcagagaagccaaagcttctccccctggagctggagaagacagccatccaaaattacactgtcacggagttccagcccctgtatyacgtggcagagagttttaatgatgccaaggagaaagtaaggtgaggtggtgacaaaggtgagccactagctctgggggcctcctgactggtgccactcat

SEQ ID NO: 288991 - DNA, 201 bp, Homo sapiens
tataaaacccatgcttgctatgagtacaatcacatttttccacttcttgaaaagtactgtggcttccatgaagataacattccccagctggaagacgtttytcaattcctgcagagtaagtccacatcagggtcaatggccctgcagaaagttgggggaggattgaggcagaggagagggaaggggaagacaagtatgtgg

SEQ ID NO: 288992 - DNA, 201 bp, Homo sapiens
ggcctacagtactgcttatcagagaagccaaagcttctccccctggagctggagaagacagccatccaaaattacactgtcacggagttccagcccctgtrttacgtggcagagagttttaatgatgccaaggagaaagtaaggtgaggtggtgacaaaggtgagccactagctctgggggcctcctgactggtgccactc

SEQ ID NO: 288993 - DNA, 201 bp, Homo sapiens
gtataaaacccatgcttgctatgagtacaatcacatttttccacttcttgaaaagtactgtggcttccatgaagataacattccccagctggaagacgttyctcaattcctgcagagtaagtccacatcagggtcaatggccctgcagaaagttgggggaggattgaggcagaggagagggaaggggaagacaagtatgtg

SEQ ID NO: 288994 - DNA, 201 bp, Homo sapiens
taataacttttcacttggggcctacagtactgcttatcagagaagccaaagcttctccccctggagctggagaagacagccatccaaaattacactgtcayggagttccagcccctgtattacgtggcagagagttttaatgatgccaaggagaaagtaaggtgaggtggtgacaaaggtgagccactagctctgggggcc

SEQ ID NO: 288995 - DNA, 201 bp, Homo sapiens
taaaacccatgcttgctatgagtacaatcacatttttccacttcttgaaaagtactgtggcttccatgaagataacattccccagctggaagacgtttctyaattcctgcagagtaagtccacatcagggtcaatggccctgcagaaagttgggggaggattgaggcagaggagagggaaggggaagacaagtatgtggag

SEQ ID NO: 288996 - DNA, 201 bp, Homo sapiens
cccatgcttgctatgagtacaatcacatttttccacttcttgaaaagtactgtggcttccatgaagataacattccccagctggaagacgtttctcaattmctgcagagtaagtccacatcagggtcaatggccctgcagaaagttgggggaggattgaggcagaggagagggaaggggaagacaagtatgtggaggcaag

SEQ ID NO: 288997 - DNA, 201 bp, Homo sapiens
gagaaacagggtgtcctggttccaagagagatagaatacgtatgtggctttcctctgcctttttcttccatctgggattccagcccattgggtggttcccrcccacaatgaggaaagatcttccccactcagtccactgactcacatgccaatcccctccagaaacaccctcatagacatagacacaccccaaaataatgc

SEQ ID NO: 288998 - DNA, 201 bp, Homo sapiens
gcagttatgtgtactactccactacctaaaggtctcctagtgcctctgactcagtggtgatgagctttgagttttctttcttcttttcatcccagcttgcmctggtttccgcctccgacctgtggctggcctgctttcctctcgggatttcttgggtggcctggccttccgagtcttccactgcacacagtacatcagaca

SEQ ID NO: 288999 - DNA, 201 bp, Homo sapiens
atcctcaacctctccagtctcctggtgtcctgtctaccctccacctctccagtctcctggtgtcctgtctatcctcaacctctccagtctcctggtgtccyatctacactcagcctttctagtgtcctggtgtcccgtctaccctccacctcttcagtctcctggtatcctgtctaccctccacctctccagtctcctggt

SEQ ID NO: 289000 - DNA, 201 bp, Homo sapiens
ttatgtgtactactccactacctaaaggtctcctagtgcctctgactcagtggtgatgagctttgagttttctttcttcttttcatcccagcttgcactgbtttccgcctccgacctgtggctggcctgctttcctctcgggatttcttgggtggcctggccttccgagtcttccactgcacacagtacatcagacatgga

SEQ ID NO: 289001 - DNA, 201 bp, Homo sapiens
cactcagcctctccagtctcctggtgtcctgtctaccctccacctctccagtctcctggtgtcctgtctatcctcaacctctccagtctcctggtgtcctrtctaccctccacctctccagtctcctggtgtcctgtctatcctcaacctctccagtctcctggtgtcccatctacactcagcctttctagtgtcctggtg

SEQ ID NO: 289002 - DNA, 201 bp, Homo sapiens
ctggtgtgactctgaggccacagaagatgctcacacaatttttattcctttacccctttcacgtgttttattttaccccatcaggaatctttgagaaagcrtgaagatgagaaagatgttggaagactagggagagtagaaagcttttattttaaagtgttgttttttgttttaatgaaaatctagaatgaatgacttgta

SEQ ID NO: 289003 - DNA, 201 bp, Homo sapiens
ccagatctaccagtgattgacttactggtcttgctatgcctggtgtgactctgaggccacagaagatgctcacacaatttttattcctttacccctttcaygtgttttattttaccccatcaggaatctttgagaaagcgtgaagatgagaaagatgttggaagactagggagagtagaaagcttttattttaaagtgttg

SEQ ID NO: 289004 - DNA, 201 bp, Homo sapiens
tttggttccaaacattatagtagccccatgttatgacataaagagtaggaggaatataggcttgatattgggcatctaaatcccagatctaccagtgattracttactggtcttgctatgcctggtgtgactctgaggccacagaagatgctcacacaatttttattcctttacccctttcacgtgttttattttacccca

SEQ ID NO: 289005 - DNA, 201 bp, Homo sapiens
aaacccatgcttgctatgagtacaatcacatttttccacttcttgaaaagtactgtggcttccatgaagataacattccccagctggaagacgtttctcarttcctgcagagtaagtccacatcagggtcaatggccctgcagaaagttgggggaggattgaggcagaggagagggaaggggaagacaagtatgtggaggc

SEQ ID NO: 289006 - DNA, 201 bp, Homo sapiens
ctatcatttctattttttcataaatcaaaattattctttaaaaactgccttaaaaaattaaacctgggggaggagaatgtatgtctgagtgagagcaagcragcaatgggtgtagagaagagagacagcattttctgagcaacaaactgtccatgagaaagaatatatctgtaaaatgcacctatgtaactttttagcttt

SEQ ID NO: 289007 - DNA, 201 bp, Homo sapiens
gtggaatttttctctttcaaataatgtatgaaattcactgtagcaagtgatggcagctcacaggttctggtccccgactccctctgctaacctaacctgcrttctgctgtgcccctgccctgcttgagacacctattttgtgcctgtattctagtgggcagcccatccctcgagtggaatacatggaggaagaaaagaaaa

SEQ ID NO: 289008 - DNA, 201 bp, Homo sapiens
atattctcctgccagcccccattctccttattgccaatctctgcaactttacagctttgtgatacctgactggcccgtgcaggtaagtgaatttctacccyaggtaagcaattagagaattagaagagtagaaaaaccaagtgatttcccgaaagtgagagcaaatcctcattgtagcctgtatcattgcttaaccaaatc

SEQ ID NO: 289009 - DNA, 201 bp, Homo sapiens
catgaggtaggagctatttctgcccccatttttcagagatagaaactgatgcttagaggggttaggtaaatgtgcccaaggtcaaacagctagtaaatackgaagaaatcatttaaacccaggcattctgagtctagaacctacatacactcttaactgctattcagtactgccccagacagaacgggcttcatagtttgc

SEQ ID NO: 289010 - DNA, 201 bp, Homo sapiens
ttactagaatccagatatgtgagccttcccttccccaagagattcaggatctatgcggcctggcatatgtacttgaacaagctcagtgaagagaaggtatraggcattttataccttagcatggatttatatatttattttctctcctttgttccaatatttatttattatccttgatctagaacttatttatttatttag

SEQ ID NO: 289011 - DNA, 201 bp, Homo sapiens
tcagcactgtgggtggggaggaagatgggggacacatagaaattgtaaggaagagaaactgcctcctttaggatctaacaggggaagcaaatattctgagyagctggggagggaaggcagagcatgagaagttatctcagtaaaaggtagctttatagacatgatcttattcagtctaatgaaaataacatgaggtaggag

SEQ ID NO: 289012 - DNA, 201 bp, Homo sapiens
ggtacccggccgtgtgcggtgtcagtctgcccctgctggggggtgcctcccagttaggctactcgggggtcagggactcacttgagaaggcagtctgtacrttctcagatctcaaactccatgctgggagaaccactactctcttcaaagctgtcagacagggacatttaagtctgcagaggtttctgctgccttttgttt

SEQ ID NO: 289013 - DNA, 201 bp, Homo sapiens
tcactaaattaatattgattgtcttctatgtataagtgtaaaataatatgcaagacaccgtccctttcttcaagtagcttaacccaaaactatgctttagraaatagctaatgttcttcaagacattggtaaatgtcttatgattaaagtggttccataattaataaacttgggaaattcgggcatattattttacctgat

SEQ ID NO: 289014 - DNA, 201 bp, Homo sapiens
cagtctctgtctgtttccaaagtctgtttgtctcctgtatcagtgcttagtctcgataatggcgcgttcttgggcaagagcttacctgattttttttttttcaccatcattgctggctaccacaagaccttctgaacttgcctggctttcaataatacttaagcaaaatgctatctttttgcctaatccctgtcactcgtc

SEQ ID NO: 289015 - DNA, 201 bp, Homo sapiens
tacatggaggaagaaaagaaaacatggggcacagtgttcaagactctgaagtccttgtataaaacccatgcttgctatgagtacaatcacatttttccacytcttgaaaagtactgtggcttccatgaagataacattccccagctggaagacgtttctcaattcctgcagagtaagtccacatcagggtcaatggccctg

SEQ ID NO: 289016 - DNA, 201 bp, Homo sapiens
gaaagtacattcacttacttctgggttgctgggatttggggagagcggagacagatcctcctcaacctccttctcatagaaatgtgaaaccttatgaagamgagtgaaattggtgaatcacctcacaatcctggatgttaatcagttaacttggttactgaaaatcatctatagatagctggactctcagaagtacgttaa

SEQ ID NO: 289017 - DNA, 201 bp, Homo sapiens
ccccagctcagtcaggtggacaccatcaaagcaggtacaggcaaaagtccttcagatagtcagcaataacagatcatacttattatcttcttgctgtgtgyctgggggctttggtgaatgctttgtatatatcattttgtttagcctcaataataacttctcatttttctgatggggtaatcaaagcttacaaaggttaag

SEQ ID NO: 289018 - DNA, 201 bp, Homo sapiens
aatactgatcctgatttaacagtgataataacttttcacttggggcctacagtactgcttatcagagaagccaaagcttctccccctggagctggagaagwcagccatccaaaattacactgtcacggagttccagcccctgtattacgtggcagagagttttaatgatgccaaggagaaagtaaggtgaggtggtgacaa

SEQ ID NO: 289019 - DNA, 201 bp, Homo sapiens
ggaatactgatcctgatttaacagtgataataacttttcacttggggcctacagtactgcttatcagagaagccaaagcttctccccctggagctggagargacagccatccaaaattacactgtcacggagttccagcccctgtattacgtggcagagagttttaatgatgccaaggagaaagtaaggtgaggtggtgac

SEQ ID NO: 289020 - DNA, 201 bp, Homo sapiens
gttatgtgtactactccactacctaaaggtctcctagtgcctctgactcagtggtgatgagctttgagttttctttcttcttttcatcccagcttgcactrgtttccgcctccgacctgtggctggcctgctttcctctcgggatttcttgggtggcctggccttccgagtcttccactgcacacagtacatcagacatgg

SEQ ID NO: 289021 - DNA, 201 bp, Homo sapiens
tactctccgcctctccagtgtcctggtgtcctgtctacactcagcctctccattctcctggtgtcctgtttaccctctacctctccagtgtcctggtgtcytgtctaccctcaacctctccagtctcctgatgtcctgtctacactcagcctctccagtctcctggtgtcctgtctaccctccacctctccagtctcctgg

SEQ ID NO: 289022 - DNA, 201 bp, Homo sapiens
gtaatttattgtacatttaaaaataactaaaagtataattggattgtttgtaacacaaagaaaggataaatgcttgaggtgacagataccccatttaccckgatgtgattatgactcattgtatgattgtatcaaaatatctcatgtaccccacaaatatatacaactactatgtacccacatatattaaacattaaaaaa

SEQ ID NO: 289023 - DNA, 201 bp, Homo sapiens
tgtgtactactccactacctaaaggtctcctagtgcctctgactcagtggtgatgagctttgagttttctttcttcttttcatcccagcttgcactggttyccgcctccgacctgtggctggcctgctttcctctcgggatttcttgggtggcctggccttccgagtcttccactgcacacagtacatcagacatggatcc

SEQ ID NO: 289024 - DNA, 201 bp, Homo sapiens
ctgcaaccctgcaacctagaatttcattcatctttcacagtggttaacaagctcaaaaaaaagctttctttttctttttctttctttttttttttttttttaaggcaaggtctcactctgtcacccaggctggactggagtgcagtggtataatcatggttcactgcagcctcagacttctgggctcaaacaatcctccca

SEQ ID NO: 289025 - DNA, 201 bp, Homo sapiens
agaaccattcaagagctggacagatttgccaatcagattctcagctatggagcggaactggatgctgaccaccctgtgagtccatggcccgtaggatgagrttttttcagtgcctctcctctactcccctcccttcctcttaccttctctacttggagcaatgtacttgttcacttgttcaacaaacacttattgtgttcc

SEQ ID NO: 289026 - DNA, 201 bp, Homo sapiens
atgtgtactactccactacctaaaggtctcctagtgcctctgactcagtggtgatgagctttgagttttctttcttcttttcatcccagcttgcactggtktccgcctccgacctgtggctggcctgctttcctctcgggatttcttgggtggcctggccttccgagtcttccactgcacacagtacatcagacatggatc

SEQ ID NO: 289027 - DNA, 201 bp, Homo sapiens
gctgcaaccctgcaacctagaatttcattcatctttcacagtggttaacaagctcaaaaaaaagctttctttttctttttctttctttttttttttttttttaaggcaaggtctcactctgtcacccaggctggactggagtgcagtggtataatcatggttcactgcagcctcagacttctgggctcaaacaatcctccc

SEQ ID NO: 289028 - DNA, 201 bp, Homo sapiens
tgtactactccactacctaaaggtctcctagtgcctctgactcagtggtgatgagctttgagttttctttcttcttttcatcccagcttgcactggtttcygcctccgacctgtggctggcctgctttcctctcgggatttcttgggtggcctggccttccgagtcttccactgcacacagtacatcagacatggatccaa

SEQ ID NO: 289029 - DNA, 201 bp, Homo sapiens
tcaaagctgcaaccctgcaacctagaatttcattcatctttcacagtggttaacaagctcaaaaaaaagctttctttttctttttctttcttttttttttyttttttaaggcaaggtctcactctgtcacccaggctggactggagtgcagtggtataatcatggttcactgcagcctcagacttctgggctcaaacaatc

SEQ ID NO: 289030 - DNA, 201 bp, Homo sapiens
gtactactccactacctaaaggtctcctagtgcctctgactcagtggtgatgagctttgagttttctttcttcttttcatcccagcttgcactggtttccdcctccgacctgtggctggcctgctttcctctcgggatttcttgggtggcctggccttccgagtcttccactgcacacagtacatcagacatggatccaag

SEQ ID NO: 289031 - DNA, 201 bp, Homo sapiens
tccacattatgcagatgaggaaactgaggctcagaaatgggaatttacttgatccagatcacctagctagaaagcagcgaggcagacatctgaagccaagtctgcctagcgtcaaagcctatgtccctgggcagttatgtgtactactccactacctaaaggtctcctagtgcctctgactcagtggtgatgagctttgag

SEQ ID NO: 289032 - DNA, 201 bp, Homo sapiens
actactccactacctaaaggtctcctagtgcctctgactcagtggtgatgagctttgagttttctttcttcttttcatcccagcttgcactggtttccgcytccgacctgtggctggcctgctttcctctcgggatttcttgggtggcctggccttccgagtcttccactgcacacagtacatcagacatggatccaagcc

SEQ ID NO: 289033 - DNA, 201 bp, Homo sapiens
gggcagcccatccctcgagtggaatacatggaggaagaaaagaaaacatggggcacagtgttcaagactctgaagtccttgtataaaacccatgcttgctrtgagtacaatcacatttttccacttcttgaaaagtactgtggcttccatgaagataacattccccagctggaagacgtttctcaattcctgcagagtaag

SEQ ID NO: 289034 - DNA, 201 bp, Homo sapiens
actccactacctaaaggtctcctagtgcctctgactcagtggtgatgagctttgagttttctttcttcttttcatcccagcttgcactggtttccgcctcygacctgtggctggcctgctttcctctcgggatttcttgggtggcctggccttccgagtcttccactgcacacagtacatcagacatggatccaagcccat

SEQ ID NO: 289035 - DNA, 201 bp, Homo sapiens
taaggcattttataccttagcatggatttatatatttattttctctcctttgttccaatatttatttattatccttgatctagaacttatttatttatttagttttctaattgacaaataaaaattgtatataatttttaattatatacaattatataattgtatataattatataattgtatataaaatatggtgtacaa

SEQ ID NO: 289036 - DNA, 201 bp, Homo sapiens
tcctagtgcctctgactcagtggtgatgagctttgagttttctttcttcttttcatcccagcttgcactggtttccgcctccgacctgtggctggcctgcwttcctctcgggatttcttgggtggcctggccttccgagtcttccactgcacacagtacatcagacatggatccaagcccatgtatacccccgaaccgtga

SEQ ID NO: 289037 - DNA, 201 bp, Homo sapiens
ataaggcattttataccttagcatggatttatatatttattttctctcctttgttccaatatttatttattatccttgatctagaacttatttatttatttagttttctaattgacaaataaaaattgtatataatttttaattatatacaattatataattgtatataattatataattgtatataaaatatggtgtaca

SEQ ID NO: 289038 - DNA, 201 bp, Homo sapiens
ctcctagtgcctctgactcagtggtgatgagctttgagttttctttcttcttttcatcccagcttgcactggtttccgcctccgacctgtggctggcctgytttcctctcgggatttcttgggtggcctggccttccgagtcttccactgcacacagtacatcagacatggatccaagcccatgtatacccccgaaccgtg

SEQ ID NO: 289039 - DNA, 201 bp, Homo sapiens
tataaggcattttataccttagcatggatttatatatttattttctctcctttgttccaatatttatttattatccttgatctagaacttatttatttatttagttttctaattgacaaataaaaattgtatataatttttaattatatacaattatataattgtatataattatataattgtatataaaatatggtgtac

SEQ ID NO: 289040 - DNA, 201 bp, Homo sapiens
cccagcttgcactggtttccgcctccgacctgtggctggcctgctttcctctcgggatttcttgggtggcctggccttccgagtcttccactgcacacagyacatcagacatggatccaagcccatgtatacccccgaaccgtgagtactgtcctccagctaccagttgccaggcacaatgagcgccatcttttcctgctg

SEQ ID NO: 289041 - DNA, 201 bp, Homo sapiens
gtataaggcattttataccttagcatggatttatatatttattttctctcctttgttccaatatttatttattatccttgatctagaacttatttatttatttagttttctaattgacaaataaaaattgtatataatttttaattatatacaattatataattgtatataattatataattgtatataaaatatggtgta

SEQ ID NO: 289042 - DNA, 201 bp, Homo sapiens
ggcagggtttaaaagggggaagaggaatagaggctgcaagagattgtgattcatggacagtatgcagagatcaaatgacctgggttcagatcctggctccwctgctaactgtgtaactataggcaagttccttaacctctctaagccttaatcttgtcatcaataaaagggggcacttggtgcctaataaaacctacctct

SEQ ID NO: 289043 - DNA, 201 bp, Homo sapiens
aaaaatgtcaggctggatcgatgcaggccactaagaaatggattcaggtgatggcagtgggaagaaaggacctgatgcccagaggcatttctggagaagaygagatcagacttgtgattggctgaacacacactgtagtggggtggggtttagggggtgactcaacttcaagcccaggtacattcaagtctgaattgccct

SEQ ID NO: 289044 - DNA, 201 bp, Homo sapiens
gtaagtctgccttgcttgttgaggggaagagagaaaaacacacccctagcctgcttctcccttgccctcatccagttgaggatggaaaataccagcatgamgagtcctgccttctgtgtgtgcatgtgttcatgtgcatgcgtgtatgtgtgtgtgggggtgtgtttaaaccctccctttaataacacatgataaaaaatg

SEQ ID NO: 289045 - DNA, 201 bp, Homo sapiens
  misc_feature (1)...(201): n = A,T,C or G
tgtagatgaggtttctttaagaacagatcatgcacattggaatccacagcaaggaggctcatgctaaatcaaaggagttactaataaggtgtcactcacantatctggtaggagagctaagtttaaccgagactttagttttagggtataaccaagggaaggagacatgcactgtcatggcttgagagcccccattcaaag

SEQ ID NO: 289046 - DNA, 201 bp, Homo sapiens
  misc_feature (1)...(201): n = A,T,C or G
ttagcaagtgtgtcagtcagatatgctgtagatgaggtttctttaagaacagatcatgcacattggaatccacagcaaggaggctcatgctaaatcaaagnagttactaataaggtgtcactcacagtatctggtaggagagctaagtttaaccgagactttagttttagggtataaccaagggaaggagacatgcactgt

SEQ ID NO: 289047 - DNA, 201 bp, Homo sapiens
gaaagaaccctaaacgtgacttggaaataatgcccaaggtatattccattctccgggatttgttggcattttcttgaggtgaagaattgcagaatacattstttaatgtgacctacatatttacccatgggaggaagtctgctcctggactcttgagattcagtcataaagcccaggccagggaaataatgtaagtctgca

SEQ ID NO: 289048 - DNA, 201 bp, Homo sapiens
  misc_feature (1)...(201): n = A,T,C or G
ggaatttgggcctccagagaaagagatccgaagactgctggtgcttcctggtttcataagctcagtaagaagtctgaattcgttggaagctgatgagaatntccaggaagtcaacagacaaatgtcctcaacaattgtttctaagtaggagaacatctgtcctcggtggctttcacaggaatgaatgaccattgctttagg

SEQ ID NO: 289049 - DNA, 201 bp, Homo sapiens
  misc_feature (1)...(201): n = A,T,C or G
aacccaggcttgggcaggaaactctctgactttggacaggtgagccacggcagcctgagctgctcagttaggggaatttgggcctccagagaaagagatcngaagactgctggtgcttcctggtttcataagctcagtaagaagtctgaattcgttggaagctgatgagaatatccaggaagtcaacagacaaatgtcctc

SEQ ID NO: 289050 - DNA, 201 bp, Homo sapiens; identical to SEQ ID NO: 59638

SEQ ID NO: 289051 - DNA, 201 bp, Homo sapiens; identical to SEQ ID NO: 59640

SEQ ID NO: 289052 - DNA, 201 bp, Homo sapiens
aagaatggcaagtgagaatgactgtaacaatcaaaccttaatgactgaccaatattacatgtttattttgagccccaagtatggagatatggacaaataartgttctttgtttagtccagtagacaggtttctaaaatggtgtgttactgatatttggaaagtaaatcatggtgcccagttttatttttttttttaaccac

SEQ ID NO: 289053 - DNA, 201 bp, Homo sapiens
agaacagtgggaggagagggatgggcttccagcaacctttattattggcttattttcttacagcccattactttctcttgggaaaatattaagcaggcacycaaggcttgaggcccctgagttttcacatcctttctgaacctctgaacctgctttccagcattcttttatactttgttttacctcctggtcagtaatgcc

SEQ ID NO: 289054 - DNA, 201 bp, Homo sapiens
agatctcagcatatgggagcaagttaatgcttcctgagatctttgccaaaggtcaagaggtcatttttgtgtatttataattttccatcatttttatatayttctcaatattctttttaaactattcttttccttttttcatcctctgaatactgttttgacagatcttgttattagcatgctttcacggatgagaaaact

SEQ ID NO: 289055 - DNA, 201 bp, Homo sapiens
ctccgacctgtggctggcctgctttcctctcgggatttcttgggtggcctggccttccgagtcttccactgcacacagtacatcagacatggatccaagcscatgtatacccccgaaccgtgagtactgtcctccagctaccagttgccaggcacaatgagcgccatcttttcctgctgcaagaatgaggtttgggttcat

SEQ ID NO: 289056 - DNA, 201 bp, Homo sapiens
cctccgacctgtggctggcctgctttcctctcgggatttcttgggtggcctggccttccgagtcttccactgcacacagtacatcagacatggatccaagyccatgtatacccccgaaccgtgagtactgtcctccagctaccagttgccaggcacaatgagcgccatcttttcctgctgcaagaatgaggtttgggttca

SEQ ID NO: 289057 - DNA, 201 bp, Homo sapiens
gacctgtggctggcctgctttcctctcgggatttcttgggtggcctggccttccgagtcttccactgcacacagtacatcagacatggatccaagcccatktatacccccgaaccgtgagtactgtcctccagctaccagttgccaggcacaatgagcgccatcttttcctgctgcaagaatgaggtttgggttcattgct

SEQ ID NO: 289058 - DNA, 201 bp, Homo sapiens
ccgacctgtggctggcctgctttcctctcgggatttcttgggtggcctggccttccgagtcttccactgcacacagtacatcagacatggatccaagcccrtgtatacccccgaaccgtgagtactgtcctccagctaccagttgccaggcacaatgagcgccatcttttcctgctgcaagaatgaggtttgggttcattg

SEQ ID NO: 289059 - DNA, 201 bp, Homo sapiens
tgtacattttaaaatgaaagagcataattggattgtttgtaacacaaagaaagaataaatgcttgaggtacaggataccctattttccatgagtataagcrtgcaatgtgtaatgtgaccattaagcattgcatgcttgtatcaaaatatcttatgtactccataaatatacacctactacatactcacaacaactaaaaa

SEQ ID NO: 289060 - DNA, 201 bp, Homo sapiens
acctgtggctggcctgctttcctctcgggatttcttgggtggcctggccttccgagtcttccactgcacacagtacatcagacatggatccaagcccatgkatacccccgaaccgtgagtactgtcctccagctaccagttgccaggcacaatgagcgccatcttttcctgctgcaagaatgaggtttgggttcattgctg

SEQ ID NO: 289061 - DNA, 201 bp, Homo sapiens
cctgtggctggcctgctttcctctcgggatttcttgggtggcctggccttccgagtcttccactgcacacagtacatcagacatggatccaagcccatgtrtacccccgaaccgtgagtactgtcctccagctaccagttgccaggcacaatgagcgccatcttttcctgctgcaagaatgaggtttgggttcattgctgg

SEQ ID NO: 289062 - DNA, 201 bp, Homo sapiens
tgtggctggcctgctttcctctcgggatttcttgggtggcctggccttccgagtcttccactgcacacagtacatcagacatggatccaagcccatgtatrcccccgaaccgtgagtactgtcctccagctaccagttgccaggcacaatgagcgccatcttttcctgctgcaagaatgaggtttgggttcattgctggct

SEQ ID NO: 289063 - DNA, 201 bp, Homo sapiens
gtggctggcctgctttcctctcgggatttcttgggtggcctggccttccgagtcttccactgcacacagtacatcagacatggatccaagcccatgtatahccccgaaccgtgagtactgtcctccagctaccagttgccaggcacaatgagcgccatcttttcctgctgcaagaatgaggtttgggttcattgctggctg

SEQ ID NO: 289064 - DNA, 201 bp, Homo sapiens
tggcctgctttcctctcgggatttcttgggtggcctggccttccgagtcttccactgcacacagtacatcagacatggatccaagcccatgtatacccccraaccgtgagtactgtcctccagctaccagttgccaggcacaatgagcgccatcttttcctgctgcaagaatgaggtttgggttcattgctggctggtcca

SEQ ID NO: 289065 - DNA, 201 bp, Homo sapiens
ctgctttcctctcgggatttcttgggtggcctggccttccgagtcttccactgcacacagtacatcagacatggatccaagcccatgtatacccccgaacygtgagtactgtcctccagctaccagttgccaggcacaatgagcgccatcttttcctgctgcaagaatgaggtttgggttcattgctggctggtccacagg

SEQ ID NO: 289066 - DNA, 201 bp, Homo sapiens
atattaagcaggcactcaaggcttgaggcccctgagttttcacatcctttctgaacctctgaacctgctttccagcattcttttatactttgttttacctsctggtcagtaatgcctcaccctcagtcttctctaaaagtgtggttaatggcatcttcctgactatttgaagaccactggccaaatcccaccagctcactc

SEQ ID NO: 289067 - DNA, 201 bp, Homo sapiens
gctgctattagtctaaattgagacagggtgatcagtcatcaccaactgtgatttgattcagaatgtactccacatggacggctacagaggccctgtggtcrtctggtagcccaaggaatgcaaggccagatccccaagaggctgggcgtcaggccacagagctctctgaccactggtaactgagaaagcaaaactccctgc

SEQ ID NO: 289068 - DNA, 201 bp, Homo sapiens
tgctgctattagtctaaattgagacagggtgatcagtcatcaccaactgtgatttgattcagaatgtactccacatggacggctacagaggccctgtggtygtctggtagcccaaggaatgcaaggccagatccccaagaggctgggcgtcaggccacagagctctctgaccactggtaactgagaaagcaaaactccctg

SEQ ID NO: 289069 - DNA, 201 bp, Homo sapiens
acatgcagtgctactgaaattgctgctattagtctaaattgagacagggtgatcagtcatcaccaactgtgatttgattcagaatgtactccacatggacrgctacagaggccctgtggtcgtctggtagcccaaggaatgcaaggccagatccccaagaggctgggcgtcaggccacagagctctctgaccactggtaac

SEQ ID NO: 289070 - DNA, 201 bp, Homo sapiens
tgttggaaggttgggcatgctgacctttgcacacacccctgccacctggtccctgttcaacgcaaccaccaagtcaagacactgaaccctcctgcatacaragtggccacagaagtctccccacaaaatcaaagaagtcttataacctaggaagtcctttcttcactttcttctcccaaacacctacaaaatttgcttcct

SEQ ID NO: 289071 - DNA, 201 bp, Homo sapiens
aaattgattgctggatgtgaaggaagagagaagggggaagtaaaacaataactcctggcttatgggcttgggcaactaggtacatacatttttccagaatmggcttcttggccaattgtagggtgagcaaagggattgggcatggtcggtgctcccctagtctactgtttgcaagtcctccttgaccaatgtctataggat

SEQ ID NO: 289072 - DNA, 201 bp, Homo sapiens
actgttactatctcagagatggcaacaatcacattgtgtttatactttgggtacagagtatcagatcacaataagtttacttcttcatgacttataacctyatgggaggcacaagatatatatatgcaagtgaaagggccatatgcatgtttccgaaactgtagtttatgaaaaatatcccatgatcaaagagagaaactc

SEQ ID NO: 289073 - DNA, 201 bp, Homo sapiens
cagcacaaggagtggtgcagtcagcgggtgttcttctcgaaaggaccctctgttctctctgtcccgttgcatcctgtgtgatctctttgtccctgaacccrgcccttggcagtatgcatggatgtgtgacccaatatctctcatcaggtcctccaaagcagtcactttgaaaaatgaagtaaaggaaggactgtttccaag

SEQ ID NO: 289074 - DNA, 201 bp, Homo sapiens
ataggaattaaatttaaagctcctagtgtatattacttaaatactctctctccccgaaaagtaaaggtaaatgtggggacttttgacccccattccatccyatataccatgtagcctactcccaggagccctggggcgccaaggttgctccaggtgggattctgctctgtgtacccgttcaacagatctctgtctggggcc

SEQ ID NO: 289075 - DNA, 201 bp, Homo sapiens
ttgaaagtttcctgagaacattcctttttgatcagaggcaggacttgcttcccactacagtacaggatggagtggggctggagcacagggaatgtggggcyccccttgttgtaggcaaactctaggctcacaaagaatggtgactaagagaacaaggcgccattttggtcttggatttatcagtggtttctagttgaattg

SEQ ID NO: 289076 - DNA, 201 bp, Homo sapiens
tctataatgataataccactatcagatacttagaagcacttgtgtgccagacaccattctaagaactcttcatacatgagttcattttaatcctcccatcmaccctctgaaggacgtactattagtatagctattttgtaaatgggaaactagggaacagagggcttaagtaatttgcacaaagttccaaagtagagattg

SEQ ID NO: 289077 - DNA, 201 bp, Homo sapiens
ccagaactgctttagtctcatgctcatcaggctgtgtgtgaaggaggagctgagcttccataaggtctagcatatctctcattcacgcaggcattatcatycacaagtgtgtaccccctgctgtaaacatatcctgcttgttcataggtgatactgatgatctttttgctgtgaatcttgactcagcagacctcttgattt

SEQ ID NO: 289078 - DNA, 201 bp, Homo sapiens
ggtgacacataaaattaaccatcatagagtgtgctctcagattgactttccattccagatttactggtttactgtggagtttgggctctgcaaacaaggakactccataaaggcatatggtgctgggctcctgtcatcctttggtgaattacaggtatgaccttcacaggaaccaaggatagatttaaaagtggtgggtac

SEQ ID NO: 289079 - DNA, 201 bp, Homo sapiens
aggacaagtaaatccatcttaaatatcaatccgtgtctcttagattgttgtgattagatttgattgtgagtgacagaaacgtcaaaaaaatgagtttaaasaaagtagaagttaatttttctcatcaaattctaagtcagcagtctaaggctgctgaagtgatgctttatgatatcaataaccacaaatgcttcttctgtc

SEQ ID NO: 289080 - DNA, 201 bp, Homo sapiens
tgtggtacttatacacaatggagtactattcagccataaaaagaataagatcctgttgtttgaaaaaacatggatggaactggaggtcattatgttaaacraaataagccaggaacagaaagacaaactttccatgttctcacttatttatggaggctaaaaattaaaaagattgaatttttggagacagagagaagaaca

SEQ ID NO: 289081 - DNA, 201 bp, Homo sapiens
ggtgagtgttgatccttactcctaagccttccattttggcagcctcccctagctttcaccttgaatttttcttcagaccaagcataccctgataactttgsatttgatgtccctttctctgttatcaatggctgagccttctctgcccctaagtgtcttctattcctaatgacattgttgctctgtcctctgagccatcag

SEQ ID NO: 289082 - DNA, 201 bp, Homo sapiens
atggagaacagtttggaggttcctcaaaaattgaaaatagagctacaatatgatctagtaatcccactgctgggtatataccccaaataaaggaaattagwatgttgaagagaaatctgcatgcccatgtttattgcagcactattcacaataggcaaaatttgcaagcaacctatgcctattaacaaatgaatagatatg

SEQ ID NO: 289083 - DNA, 201 bp, Homo sapiens
aattaaccatcatagagtgtgctctcagattgactttccattccagatttactggtttactgtggagtttgggctctgcaaacaaggagactccataaagvcatatggtgctgggctcctgtcatcctttggtgaattacaggtatgaccttcacaggaaccaaggatagatttaaaagtggtgggtacagaaaaccatta

SEQ ID NO: 289084 - DNA, 201 bp, Homo sapiens
gggaggctggagagaaaagaatggttaatgttaacgttaatataactagaaagactgcagaacttaggactgatttttatttgaatccttaaaaaaaaaaatttcttatgaaaatagtacatggctcttaggagacagaacttattgtacagaggaacagcgtgagagtcagagtgatcccagaacaggtcctggctccat

SEQ ID NO: 289085 - DNA, 201 bp, Homo sapiens
ttcactcaagcctgtggttttggtcttaggaactttgctgccacaatacctcggcccttctcagttcgctacgacccatacacccaaaggattgaggtctyggacaatacccagcagcttaagattttggctgattccattaacagtaagtaatttacaccttacgaggccactcggtttctcagtaatcgaagactgtct

SEQ ID NO: 289086 - DNA, 201 bp, Homo sapiens
taaaattaaccatcatagagtgtgctctcagattgactttccattccagatttactggtttactgtggagtttgggctctgcaaacaaggagactccatawaggcatatggtgctgggctcctgtcatcctttggtgaattacaggtatgaccttcacaggaaccaaggatagatttaaaagtggtgggtacagaaaacca

SEQ ID NO: 289087 - DNA, 201 bp, Homo sapiens
agggaggctggagagaaaagaatggttaatgttaacgttaatataactagaaagactgcagaacttaggactgatttttatttgaatccttaaaaaaaaaaatttcttatgaaaatagtacatggctcttaggagacagaacttattgtacagaggaacagcgtgagagtcagagtgatcccagaacaggtcctggctcca

SEQ ID NO: 289088 - DNA, 201 bp, Homo sapiens
gaagagttctcagtagaaaacagggaggctggagagaaaagaatggttaatgttaacgttaatataactagaaagactgcagaacttaggactgatttttwtttgaatccttaaaaaaaaaaatttcttatgaaaatagtacatggctcttaggagacagaacttattgtacagaggaacagcgtgagagtcagagtgatc

SEQ ID NO: 289089 - DNA, 201 bp, Homo sapiens
cctgctttcctctcgggatttcttgggtggcctggccttccgagtcttccactgcacacagtacatcagacatggatccaagcccatgtatacccccgaaycgtgagtactgtcctccagctaccagttgccaggcacaatgagcgccatcttttcctgctgcaagaatgaggtttgggttcattgctggctggtccacag

SEQ ID NO: 289090 - DNA, 201 bp, Homo sapiens
aaagctgcaaccctgcaacctagaatttcattcatctttcacagtggttaacaagctcaaaaaaaagctttctttttctttttctttcttttttttttttyttttaaggcaaggtctcactctgtcacccaggctggactggagtgcagtggtataatcatggttcactgcagcctcagacttctgggctcaaacaatcct

SEQ ID NO: 289091 - DNA, 201 bp, Homo sapiens
tatttccattctttctgcccattcctcatgtagaaagactgagtctggcttggcttaaacctcctcccctccgagctctctgtgctttctgtctttcagtracatctgccatgagctgttgggacatgtgcccttgttttcagatcgcagctttgcccagttttcccaggtaaggaatggattttttagccttctagttat

SEQ ID NO: 289092 - DNA, 201 bp, Homo sapiens
aactctttagcttttcccatagggaaattatgagaatgaagtaaggtgctgcatatggaaacaaccagcacagtcttgcatatacagcaggtattcagtgmgtttggactgaattgaaatctgagtagctcaataggtaagtacattgagtcgcaagcctctctgtacagtatatccaggtgaaatgggtgttactctttc

SEQ ID NO: 289093 - DNA, 201 bp, Homo sapiens
tccattctttctgcccattcctcatgtagaaagactgagtctggcttggcttaaacctcctcccctccgagctctctgtgctttctgtctttcagtgacawctgccatgagctgttgggacatgtgcccttgttttcagatcgcagctttgcccagttttcccaggtaaggaatggattttttagccttctagttataggt

SEQ ID NO: 289094 - DNA, 201 bp, Homo sapiens
acagtgttcaagactctgaagtccttgtataaaacccatgcttgctatgagtacaatcacatttttccacttcttgaaaagtactgtggcttccatgaagdtaacattccccagctggaagacgtttctcaattcctgcagagtaagtccacatcagggtcaatggccctgcagaaagttgggggaggattgaggcagagg

SEQ ID NO: 289095 - DNA, 201 bp, Homo sapiens
tcaagatttcaggccagccaaacttcagctttctacttttatctggtctgacccagctgtgaaggacaattttaggatggttttttttttttcctgtctgsggttctgtgttcctcccctaccctattttagccaaaagaaaatgcaaatataaaacatgtttgagaagacaacagctttgctcctttgagtcttaaggaa

SEQ ID NO: 289096 - DNA, 201 bp, Homo sapiens
ttccattctttctgcccattcctcatgtagaaagactgagtctggcttggcttaaacctcctcccctccgagctctctgtgctttctgtctttcagtgacwtctgccatgagctgttgggacatgtgcccttgttttcagatcgcagctttgcccagttttcccaggtaaggaatggattttttagccttctagttatagg

SEQ ID NO: 289097 - DNA, 201 bp, Homo sapiens
tctttctgcccattcctcatgtagaaagactgagtctggcttggcttaaacctcctcccctccgagctctctgtgctttctgtctttcagtgacatctgcyatgagctgttgggacatgtgcccttgttttcagatcgcagctttgcccagttttcccaggtaaggaatggattttttagccttctagttataggtctgtg

SEQ ID NO: 289098 - DNA, 201 bp, Homo sapiens
tggcttggcttaaacctcctcccctccgagctctctgtgctttctgtctttcagtgacatctgccatgagctgttgggacatgtgcccttgttttcagatygcagctttgcccagttttcccaggtaaggaatggattttttagccttctagttataggtctgtgacctgaatttctcaaatgagttgagcccagggaggg

SEQ ID NO: 289099 - DNA, 201 bp, Homo sapiens
ggcttggcttaaacctcctcccctccgagctctctgtgctttctgtctttcagtgacatctgccatgagctgttgggacatgtgcccttgttttcagatcrcagctttgcccagttttcccaggtaaggaatggattttttagccttctagttataggtctgtgacctgaatttctcaaatgagttgagcccagggagggg

SEQ ID NO: 289100 - DNA, 201 bp, Homo sapiens
ctggctccatcctgcacatagttttggtgctgctggcaatacggtccccacaactgtgggaaggggttaggggcagggatctcatcaggaaagcatagggrtttaaagttctttatagagcacttagaagattgagaatccacaaattatattaataacaaacaaagtagtgtcgtgttatatagtaaatgtgaatttgca

SEQ ID NO: 289101 - DNA, 201 bp, Homo sapiens
ttaaacctcctcccctccgagctctctgtgctttctgtctttcagtgacatctgccatgagctgttgggacatgtgcccttgttttcagatcgcagctttkcccagttttcccaggtaaggaatggattttttagccttctagttataggtctgtgacctgaatttctcaaatgagttgagcccagggaggggtcctcatg

SEQ ID NO: 289102 - DNA, 201 bp, Homo sapiens
taaacctcctcccctccgagctctctgtgctttctgtctttcagtgacatctgccatgagctgttgggacatgtgcccttgttttcagatcgcagctttgyccagttttcccaggtaaggaatggattttttagccttctagttataggtctgtgacctgaatttctcaaatgagttgagcccagggaggggtcctcatgc

SEQ ID NO: 289103 - DNA, 201 bp, Homo sapiens
ctcccctccgagctctctgtgctttctgtctttcagtgacatctgccatgagctgttgggacatgtgcccttgttttcagatcgcagctttgcccagtttbcccaggtaaggaatggattttttagccttctagttataggtctgtgacctgaatttctcaaatgagttgagcccagggaggggtcctcatgccctctgca

SEQ ID NO: 289104 - DNA, 201 bp, Homo sapiens
atggggagaagaaagaaaagctatcattttgttgtcctaaaaattatgttgtcctcatttcaaacaggaaagcaaaagtatttgagagccagtgcagtgcyttggtgttgggtgaaacatagattgaatttgggccatttgtttaaacttcctaggcctcagtttcttgcctattaaaagggagtgcatagttcatgggat

SEQ ID NO: 289105 - DNA, 201 bp, Homo sapiens
agaagagcagagaagggtggagagtgcaagtggaggggaaaggaagaataagaaacaactttcagtgaagcagagaaaaccatccccatttgtccatttastcaacaaatacctatcttaccaggggcagggaagacaagacaagacaagtaaggtccctagcttcagggaggttaccatgtagtaggggataattgacaa

SEQ ID NO: 289106 - DNA, 201 bp, Homo sapiens
agatttgccaatcagattctcagctatggagcggaactggatgctgaccaccctgtgagtccatggcccgtaggatgagattttttcagtgcctctcctcyactcccctcccttcctcttaccttctctacttggagcaatgtacttgttcacttgttcaacaaacacttattgtgttcctatttacacgagggctgggaa

SEQ ID NO: 289107 - DNA, 201 bp, Homo sapiens
atatgatctagtgatcccactgctgggtatatacctataagaaaggaaatcagtatatcaaagagatgtctgttcttttatgtttgttgcagcactgttcrcaatagccaagatctggaagcaacccaagtctccatcaacatgggttttaaaaaaatgtggtactttaatacacaatggagtactattcagcaataaaaa

SEQ ID NO: 289108 - DNA, 201 bp, Homo sapiens
tgggtcacctgaggtcaaaagtttgagaccagcctggtcaacatggtagaactctgcctctacctaaactacaaaaattgggcaggcatgatggcgtgcayctgtaatcccagctactcgggaggctgaggcaggagagtcacttgaacccaggaggcagaggtttcagtgagccaagatcacatgcaactgtactccagc

SEQ ID NO: 289109 - DNA, 201 bp, Homo sapiens
tccatttttgtacaaccactatggagaacagtttggcagttccccaaaaaactaaaaatagagctactatatgatctagtgatcccactgctgggtatatwcctataagaaaggaaatcagtatatcaaagagatgtctgttcttttatgtttgttgcagcactgttcacaatagccaagatctggaagcaacccaagtct

SEQ ID NO: 289110 - DNA, 201 bp, Homo sapiens
cactttgggaggccaagggggtgggtcacctgaggtcaaaagtttgagaccagcctggtcaacatggtagaactctgcctctacctaaactacaaaaattrggcaggcatgatggcgtgcacctgtaatcccagctactcgggaggctgaggcaggagagtcacttgaacccaggaggcagaggtttcagtgagccaagat

SEQ ID NO: 289111 - DNA, 201 bp, Homo sapiens
tgtgctttcctctcaacctagatttagggcatttttatgtgagataggattaaaaattccatttttgtacaaccactatggagaacagtttggcagttccycaaaaaactaaaaatagagctactatatgatctagtgatcccactgctgggtatatacctataagaaaggaaatcagtatatcaaagagatgtctgttct

SEQ ID NO: 289112 - DNA, 201 bp, Homo sapiens
aagggtctaaatggacctttatgaactgctggaatcagctctccttgttttgctggaatgcagctgctgctcctcctgaggctcctgtttagatcacggasggaatttccccagattggccactagatagcacacatgctctttcctgccccatctaagcaggtcagaatcatgaatcatgggtgtcagattgaaagtcac

SEQ ID NO: 289113 - DNA, 201 bp, Homo sapiens
aaaaatcatctgcaagtttatggcacaagcaatctcttatttttatcttagtgcataaataaatttttcctttttgccagaataattttttttaaagaagygattagtttttcttctctcagatagcaatgatgtgctttcctctcaacctagatttagggcatttttatgtgagataggattaaaaattccatttttgta

SEQ ID NO: 289114 - DNA, 201 bp, Homo sapiens
attgaaaccccttggtggcaatgtcctggagaagcaagaaagatcttttagaagatgctgagccctgggtgactctaaagtgctgattcctttctcaagcscatgcaaacctgggtgggaaacaactcccattcttggcactgacaacagaggttcagtgtacaacgcaaatgctggacccactgaggaaggagagcttgg

SEQ ID NO: 289115 - DNA, 201 bp, Homo sapiens
gcaatgacttagatgtccataactggaaaataaagaagtcaagtgtggcaaatacacactgggatattctgaaccatttagaaaagcaaagaactagatayatattcagcagcatggctggatcctaagaacacagttgaaagaaaaaagaaactatgaaatctatagtacatccatagattgtagtaaatctatagtgcc

SEQ ID NO: 289116 - DNA, 201 bp, Homo sapiens
ataaatcaagtttgagagtgaaaaaggaggaagcagaaactttcccaaactttctgttcctagaatgtccttgggaaagccaaggaggcaggaggctgtcyttgaagtcactcttgtgaaaaataactactaattttcccgcatggaatgcagcctggaattacacaatagaggttttgtgactgtgaagtgccttgtgcc

SEQ ID NO: 289117 - DNA, 201 bp, Homo sapiens
taaattatacaattttatgcaattgtaattttatattataaatatatatgcattttttattgttcaattataccccaataaagatggaattttttaaaaasaatttaaaaaagagcatccccatcactttccatttccttatgcttctttattcttcttcttcaagaatttcctgacattgtcatgtatttacatttattt

SEQ ID NO: 289118 - DNA, 201 bp, Homo sapiens
gagtgcatgttccctatgattcataatagcaccactcttctatcccagaaaatttctaccccaggcctataagggaagaaagataaggaaatttatcacaktattgtttggggtggtgaaaaattagcaatgacttagatgtccataactggaaaataaagaagtcaagtgtggcaaatacacactgggatattctgaacc

SEQ ID NO: 289119 - DNA, 201 bp, Homo sapiens
taagaaaaggagggaaggaatatatgcatatacactatcataaatatttgcttaaagatctctagaagaaactgacaacattggttatctttggagaagaraatcaggtgcctgatgaacaggggaatgtgaaataattttcactaggttttatattttgatgtttgagccatatgagtgctcacctcctcaaaaataaat

SEQ ID NO: 289120 - DNA, 201 bp, Homo sapiens
gtggttccaattacaggaacagaacaggttctattttcccccaattacaggaaattggccttgcctctctgggtgcacctgatgaatacattgaaaagctygccacagtaagtcccttctctccctgggtggatggtggagtgctatagtctatggccctcaggtctttgaaactttcctactcccctggaagccaggtta

SEQ ID NO: 289121 - DNA, 201 bp, Homo sapiens
ggtcaaatgtactgcatggtgactattgttaatcacactttactgtgtacttgaaatttgctcagagagatctcaagtgtccttgtcccactccatacccrcacaggaaaaatgactacatgagatgatgaatatgttcattaacttgatcatggtaaccatgatgtatgcatttattaaataattacattgtatttataa

SEQ ID NO: 289122 - DNA, 201 bp, Homo sapiens
ccagggtcttccctctggggtctagaggcagaggatttcatagtaaatagcatgttgtctttaacatcaaaaggacaagagataagagttggcaaggatgyggagaagagggaacccttgtactctgctggtggggatgtcagttggcacagccattatggaaaacagcatgaaagtttctcaaacaattaaaatatagct

SEQ ID NO: 289123 - DNA, 201 bp, Homo sapiens
agtctgaaggaatggaagggggattggaggagacagactctgacgacctcaaacccctttcctaacatcactttttctgagcttgttcagcacacacaccrccattcatttattctttcaacagacactagaatgtaagccccaggatggcaggggctgtgtctgcttcatttaccagtggttttttggtgtctagtacag

SEQ ID NO: 289124 - DNA, 201 bp, Homo sapiens; identical to SEQ ID NO: 59336

SEQ ID NO: 289125 - DNA, 201 bp, Homo sapiens
aaaacatggggcacagtgttcaagactctgaagtccttgtataaaacccatgcttgctatgagtacaatcacatttttccacttcttgaaaagtactgtgkcttccatgaagataacattccccagctggaagacgtttctcaattcctgcagagtaagtccacatcagggtcaatggccctgcagaaagttgggggagga

SEQ ID NO: 289126 - DNA, 201 bp, Homo sapiens; identical to SEQ ID NO: 59682

SEQ ID NO: 289127 - DNA, 201 bp, Homo sapiens
aaagaaaacatggggcacagtgttcaagactctgaagtccttgtataaaacccatgcttgctatgagtacaatcacatttttccacttcttgaaaagtackgtggcttccatgaagataacattccccagctggaagacgtttctcaattcctgcagagtaagtccacatcagggtcaatggccctgcagaaagttggggg

SEQ ID NO: 289128 - DNA, 201 bp, Homo sapiens
gtatatgtaatacaggaagtggcatgcaaaacacttaatttaatagtctcagaaaaactgtccttctcctcttgtcatctctgtagcctcatttattcctkggcatgggctctctaggatcaccagcgatctttttatgtgaatatcttcctagcctcaagcaactgggtcttctctccaaggagcccacagagtttggtg

SEQ ID NO: 289129 - DNA, 201 bp, Homo sapiens
taaactgtggaaaatgttttaaacaaatgcatcttatcctgtaggaaacaagctatattgaagacaactgcaatcaaaatggtgccatatcactgatcttstcactcaaagaagaagttggtgcattggccaaagtattgcgcttatttgaggtcagtgctacaatcatgtttgtcttggataatgtcgtagcaaacttcc

SEQ ID NO: 289130 - DNA, 201 bp, Homo sapiens
atggaggaagaaaagaaaacatggggcacagtgttcaagactctgaagtccttgtataaaacccatgcttgctatgagtacaatcacatttttccacttcytgaaaagtactgtggcttccatgaagataacattccccagctggaagacgtttctcaattcctgcagagtaagtccacatcagggtcaatggccctgcag

SEQ ID NO: 289131 - DNA, 201 bp, Homo sapiens
tttcagtagcctcccattattcttataagaacccactgcctttgaagttcccgtaagagtgaaaaacctgctttgcctcctttcatgaactcagcactcaytgtggtgtctcaaaaaaggcagatgttctatatacacctgttgaagaagtgaattgagttggtggtaccaaagctgcttacaaaatgtaagatatatgta

SEQ ID NO: 289132 - DNA, 201 bp, Homo sapiens
ggaatacatggaggaagaaaagaaaacatggggcacagtgttcaagactctgaagtccttgtataaaacccatgcttgctatgagtacaatcacatttttmcacttcttgaaaagtactgtggcttccatgaagataacattccccagctggaagacgtttctcaattcctgcagagtaagtccacatcagggtcaatggc

SEQ ID NO: 289133 - DNA, 201 bp, Homo sapiens
cttatttatggaggctaaaaattaaaaagattgaatttttggagacagagagaagaacaatgggtaccagaggctgagaaggatagtgtggtggtgaaagygtggatggttaatggtacaaaaatatagtgatatagaatgaaaaacgtctagtatttgacagcacaacagagtgactatagtcaatgataatttcttgta

SEQ ID NO: 289134 - DNA, 201 bp, Homo sapiens
atccctcgagtggaatacatggaggaagaaaagaaaacatggggcacagtgttcaagactctgaagtccttgtataaaacccatgcttgctatgagtacartcacatttttccacttcttgaaaagtactgtggcttccatgaagataacattccccagctggaagacgtttctcaattcctgcagagtaagtccacatca

SEQ ID NO: 289135 - DNA, 201 bp, Homo sapiens
cctccgagctctctgtgctttctgtctttcagtgacatctgccatgagctgttgggacatgtgcccttgttttcagatcgcagctttgcccagttttcccrggtaaggaatggattttttagccttctagttataggtctgtgacctgaatttctcaaatgagttgagcccagggaggggtcctcatgccctctgcaagag

SEQ ID NO: 289136 - DNA, 201 bp, Homo sapiens
catccctcgagtggaatacatggaggaagaaaagaaaacatggggcacagtgttcaagactctgaagtccttgtataaaacccatgcttgctatgagtacratcacatttttccacttcttgaaaagtactgtggcttccatgaagataacattccccagctggaagacgtttctcaattcctgcagagtaagtccacatc

SEQ ID NO: 289137 - DNA, 201 bp, Homo sapiens
tcttgtgacatgttccccacctctgtgcagtgttaaaaaatacctcagtggtctactgactgactgtggatgcttcttctagatgtgcctttttttcctcmatttccttagcacccagcactgctctcattatagcagcacattgcattccaaccaaattgaacaaaaaggtggcttaaaaatcatctgcaagtttatggc

SEQ ID NO: 289138 - DNA, 201 bp, Homo sapiens
atctggccacccatcacctttttatggccaagtactaggttggttctgtggttccaattacaggaacagaacaggttctattttcccccaattacaggaarttggccttgcctctctgggtgcacctgatgaatacattgaaaagctcgccacagtaagtcccttctctccctgggtggatggtggagtgctatagtctat

SEQ ID NO: 289139 - DNA, 201 bp, Homo sapiens
ccatccctcgagtggaatacatggaggaagaaaagaaaacatggggcacagtgttcaagactctgaagtccttgtataaaacccatgcttgctatgagtasaatcacatttttccacttcttgaaaagtactgtggcttccatgaagataacattccccagctggaagacgtttctcaattcctgcagagtaagtccacat

SEQ ID NO: 289140 - DNA, 201 bp, Homo sapiens
tagacatccatcctatgaactttgcttagtttagcaagtgtgtcagtcagatatgctgtagatgaggtttctttaagaacagatcatgcacattggaatcyacagcaaggaggctcatgctaaatcaaaggagttactaataaggtgtcactcacagtatctggtaggagagctaagtttaaccgagactttagttttagg

SEQ ID NO: 289141 - DNA, 201 bp, Homo sapiens
tcatcagatattcaatgatcacagaggttgtggcctattgatagcatatgagttgtgattattgctccatacataaggttgtttttttttgtttgttttttgtgtgtgtgtgtgttttttttttttgagacagaatctcactctatcccccaggctacagtgcattggtacgatctcagcccacctcaacctccacctccc

SEQ ID NO: 289142 - DNA, 201 bp, Homo sapiens
ccacccatcacctttttatggccaagtactaggttggttctgtggttccaattacaggaacagaacaggttctattttcccccaattacaggaaattggcsttgcctctctgggtgcacctgatgaatacattgaaaagctcgccacagtaagtcccttctctccctgggtggatggtggagtgctatagtctatggccct

SEQ ID NO: 289143 - DNA, 201 bp, Homo sapiens
ctcatcagatattcaatgatcacagaggttgtggcctattgatagcatatgagttgtgattattgctccatacataaggttgtttttttttgtttgttttktgtgtgtgtgtgtgttttttttttttgagacagaatctcactctatcccccaggctacagtgcattggtacgatctcagcccacctcaacctccacctcc

SEQ ID NO: 289144 - DNA, 201 bp, Homo sapiens
tctgtggttccaattacaggaacagaacaggttctattttcccccaattacaggaaattggccttgcctctctgggtgcacctgatgaatacattgaaaasctcgccacagtaagtcccttctctccctgggtggatggtggagtgctatagtctatggccctcaggtctttgaaactttcctactcccctggaagccagg

SEQ ID NO: 289145 - DNA, 201 bp, Homo sapiens
gcccatccctcgagtggaatacatggaggaagaaaagaaaacatggggcacagtgttcaagactctgaagtccttgtataaaacccatgcttgctatgagkacaatcacatttttccacttcttgaaaagtactgtggcttccatgaagataacattccccagctggaagacgtttctcaattcctgcagagtaagtccac

SEQ ID NO: 289146 - DNA, 201 bp, Homo sapiens
ggttccaattacaggaacagaacaggttctattttcccccaattacaggaaattggccttgcctctctgggtgcacctgatgaatacattgaaaagctcgscacagtaagtcccttctctccctgggtggatggtggagtgctatagtctatggccctcaggtctttgaaactttcctactcccctggaagccaggttatc

SEQ ID NO: 289147 - DNA, 201 bp, Homo sapiens
ggcagcccatccctcgagtggaatacatggaggaagaaaagaaaacatggggcacagtgttcaagactctgaagtccttgtataaaacccatgcttgctakgagtacaatcacatttttccacttcttgaaaagtactgtggcttccatgaagataacattccccagctggaagacgtttctcaattcctgcagagtaagt

SEQ ID NO: 289148 - DNA, 201 bp, Homo sapiens
ttatactggacaataaataattctgctgtctgacccaaagggacagactagcctctaatgctctttgctgtgcatatatccttgaaaaggtagtccaagayatatagaaatgccatagaaattgtctctaacatctccatttgttaaattctttacaaatgcataaaactggttaaatatttaaggaagtagcttaattta

SEQ ID NO: 289149 - DNA, 201 bp, Homo sapiens
tggttccaattacaggaacagaacaggttctattttcccccaattacaggaaattggccttgcctctctgggtgcacctgatgaatacattgaaaagctcrccacagtaagtcccttctctccctgggtggatggtggagtgctatagtctatggccctcaggtctttgaaactttcctactcccctggaagccaggttat

SEQ ID NO: 289150 - DNA, 201 bp, Homo sapiens
attattatactggacaataaataattctgctgtctgacccaaagggacagactagcctctaatgctctttgctgtgcatatatccttgaaaaggtagtccmagatatatagaaatgccatagaaattgtctctaacatctccatttgttaaattctttacaaatgcataaaactggttaaatatttaaggaagtagcttaa

SEQ ID NO: 289151 - DNA, 201 bp, Homo sapiens
gctttactatctattcaggtatcccttcatccagtcaaggtgacacataaaattaaccatcatagagtgtgctctcagattgactttccattccagatttrctggtttactgtggagtttgggctctgcaaacaaggagactccataaaggcatatggtgctgggctcctgtcatcctttggtgaattacaggtatgacct

SEQ ID NO: 289152 - DNA, 201 bp, Homo sapiens
cagtttattgttcagggcacaataggcaacatgaggtccatattttcattgattctccttgtcccccaagtccatgggtaatgcagagtagatccaggtgkatgctgagcatacagtttcacagccaaggaacactgagcttaggacattctgattcatacagaagctgatggcaacttcctcatcctcctcttcaaagat

SEQ ID NO: 289153 - DNA, 201 bp, Homo sapiens
ctttactatctattcaggtatcccttcatccagtcaaggtgacacataaaattaaccatcatagagtgtgctctcagattgactttccattccagatttastggtttactgtggagtttgggctctgcaaacaaggagactccataaaggcatatggtgctgggctcctgtcatcctttggtgaattacaggtatgacctt

SEQ ID NO: 289154 - DNA, 201 bp, Homo sapiens
ttactatctattcaggtatcccttcatccagtcaaggtgacacataaaattaaccatcatagagtgtgctctcagattgactttccattccagatttactrgtttactgtggagtttgggctctgcaaacaaggagactccataaaggcatatggtgctgggctcctgtcatcctttggtgaattacaggtatgaccttca

SEQ ID NO: 289155 - DNA, 201 bp, Homo sapiens
tatctattcaggtatcccttcatccagtcaaggtgacacataaaattaaccatcatagagtgtgctctcagattgactttccattccagatttactggttkactgtggagtttgggctctgcaaacaaggagactccataaaggcatatggtgctgggctcctgtcatcctttggtgaattacaggtatgaccttcacagg

SEQ ID NO: 289156 - DNA, 201 bp, Homo sapiens
aagtttaaaaaggcaaggtttagggccgggcgtggtgactcacgcctgtaatcccagcagtttggaaggctgaggtgggtggatcatgagttcaggagatygagactaacctggccaacatgatgaaacactgtctctactaaaatacaaaaaattagctgggcatggtggtgcgcacctgtagacccagctactaaggat

SEQ ID NO: 289157 - DNA, 201 bp, Homo sapiens
ttagagaaataatcagaatttagacatcttaggtgtagacagttcacagaaataacaatagaaattacttttaaatatgtacaaacattgctcaaaataargtacattctaatttaaactataatatgtttttccccctctagaatggtgagaatcaaaaattttggtaagttctcatggatggtctataggccacatgcc

SEQ ID NO: 289158 - DNA, 201 bp, Homo sapiens
tgctgcagcatttaattcatccaataatacggaaagagcattttaattcattttgtgaataaggaaactaaggctccaggagataagacacttgccagttwcacaacgaaataagtggtagagactttctaggcttgctggaaaactttccactctgctctctgctatgataagctaaggatacagtagaaaaaaattata

SEQ ID NO: 289159 - DNA, 201 bp, Homo sapiens
tttcactagagatgtgtcaatgtgctgtgacatttctcttttgcttccattggaaggggagaagtattccctcctctttaccttataccaagttagggtgkttaaaaagaacctaccagagagcttggcctacgtcctctggattttgcaggtgtagaaactgcctaactcgtgtataaaggcaagaaactggataacttc

SEQ ID NO: 289160 - DNA, 201 bp, Homo sapiens
ggctgaatgaagccaggtggcccgataagaattttcctctggagaaggaaaaagtcacccagagctagaaatatgctggttctgctgccctctggcgttcrctgagcgccagccagcctgcacagccctgagtcaaggtggtgcaccctgactgaggtctgtggggaagaatgttgtttctctggtgggaggagaaaggaa

SEQ ID NO: 289161 - DNA, 201 bp, Homo sapiens
atgcataaaactggttaaatatttaaggaagtagcttaatttaaaaaaaaaacccatcagtctagttgctgctaatagtacattgaatgtgattgttttgyttttgctgctttggagtttgagactttctatacaggacatgcatgctaagagatggagaatcccattttgcagcattagattcaatactcactgtaagga

SEQ ID NO: 289162 - DNA, 201 bp, Homo sapiens
tcttggcaactttctcaagttcttcaaattttttgttttcgttttgttttattttgtcttgtttctcctaccaagagggctgaatgaagccaggtggcccrataagaattttcctctggagaaggaaaaagtcacccagagctagaaatatgctggttctgctgccctctggcgttcgctgagcgccagccagcctgcaca

SEQ ID NO: 289163 - DNA, 201 bp, Homo sapiens
tattagacctgtagttacactcagctgcaagaaaggctgggaaaggcagtttttattctatgaaggattggggaaaactaatattgagtttccatttccaygcgaaagaaggaaagaaaatggagaacctagctgtatatgccacaggtccctttctttcctatcaacttgccaagcaattcctgaacatcagtgtaactt

SEQ ID NO: 289164 - DNA, 201 bp, Homo sapiens
tcttgaagatgatggggtcctgaagccaccaaaggcccctggactcaggtgagcaccctgcagcctcgcagtgctacctcggggtccctcacagcctctgygacaaggtgcagagctcagaggtctgggatgtggtgagctgttttgatctttgtcttctttttacaaagacttgaatcctctgagtcttggcaactttct

SEQ ID NO: 289165 - DNA, 201 bp, Homo sapiens
gaaggttctggaaggttccaggttcttcccttcccttttcatctagatatttctactttgctctctgagattgcaaaaacttcctagggaaaagttctcasagcattatgtacatctccttcatgacacttgttaagattacaaatttgaatttattcctgtgatttgactaatgtctgtattagtctattctcatgctgc

SEQ ID NO: 289166 - DNA, 201 bp, Homo sapiens
ggagccaaatcaatatttattaatgatctgcccccaccgggtgcctccgctccacagagggcctctgttgccccagcctgcccaagtcattcattaaccgyggagcccagccgcccgccggagaggctgttaaggggctcacagaggccagcccaccggccgaggtatttggcaaggccattaatgagctaatctgattta

SEQ ID NO: 289167 - DNA, 201 bp, Homo sapiens
ctgcctggaaggttctggaaggttccaggttcttcccttcccttttcatctagatatttctactttgctctctgagattgcaaaaacttcctagggaaaakttctcacagcattatgtacatctccttcatgacacttgttaagattacaaatttgaatttattcctgtgatttgactaatgtctgtattagtctattctc

SEQ ID NO: 289168 - DNA, 201 bp, Homo sapiens
tgttggcatgccatctcttcttcctttgtgggagctgtggagatcagcacacagggactgcttctctggggggctggaggccattgcctaagaggagacawccgggagcctgggaggaggtggtgaaaacagccttctatttcagacccaagaaaccaggatttattgctctctctgagacaggctggaggcaagcctggg

SEQ ID NO: 289169 - DNA, 201 bp, Homo sapiens
gccatcatgctggattgagggagtattgtcgtgatgcactaagggccatgaatttagagtcaagagccaggatttgggtctccattttgtacactactagstaggtttgaattccatctgacacccttccagatggatgaccgcttctccttcatctgtgaaatggagcaaagacccactctcccaattcctgtggctcat

SEQ ID NO: 289170 - DNA, 201 bp, Homo sapiens
agctctaacacctacccaccccactgctatttccctctcataagctttaagttgtgggggagcaggttattttgtctgactcacatagttcctgtgtgggrgtacctacaaattttggaagcctgtggcttataaaactttggggctctatttaaggaaaggaatacaaaattttaaatataaaatttgatagaaaaatga

SEQ ID NO: 289171 - DNA, 201 bp, Homo sapiens
aaaattgaaaccccactctgaaactccctatacctttgccccttttttctctatagcatttgtcatcatctaacggagttgtgttggctttctgtctgccyctactagaaatgtggactccatgagggcaggggtaattgactgttttgtcacagtgctcaattaacatttgttgaatgaatgaatgaatccaagagacca

SEQ ID NO: 289172 - DNA, 201 bp, Homo sapiens
tgcctgctcgtctatcaagaaattaaaaggtagagctagacacaaaccttaatcaggaattaaatggatattgtacatcttcatcatagacatccatcctrtgaactttgcttagtttagcaagtgtgtcagtcagatatgctgtagatgaggtttctttaagaacagatcatgcacattggaatccacagcaaggaggct

SEQ ID NO: 289173 - DNA, 201 bp, Homo sapiens
agtgggcagcccatccctcgagtggaatacatggaggaagaaaagaaaacatggggcacagtgttcaagactctgaagtccttgtataaaacccatgcttrctatgagtacaatcacatttttccacttcttgaaaagtactgtggcttccatgaagataacattccccagctggaagacgtttctcaattcctgcagagt

SEQ ID NO: 289174 - DNA, 201 bp, Homo sapiens
tgatggtgatccaaatcccagcctcaccgtcactatggatccacttctctgaaccaccatttattccggaaagaacaggataatcatactcatcgaactcrcaagtttgttgtgagaattatatgtaaaatcagttcctagtactcacaaactggcacatagtatgtatttaatcaatggtatttttaaaaattgcaagag

SEQ ID NO: 289175 - DNA, 201 bp, Homo sapiens
catcagatattcagagatcaatgacctcatcagatattcaatgatcacagaggttgtggcctattgatagcatatgagttgtgattattgctccatacataaggttgtttttttttgtttgttttttgtgtgtgtgtgtgttttttttttttgagacagaatctcactctatcccccaggctacagtgcattggtacgatc

SEQ ID NO: 289176 - DNA, 201 bp, Homo sapiens
gtattctagtgggcagcccatccctcgagtggaatacatggaggaagaaaagaaaacatggggcacagtgttcaagactctgaagtccttgtataaaaccyatgcttgctatgagtacaatcacatttttccacttcttgaaaagtactgtggcttccatgaagataacattccccagctggaagacgtttctcaattcct

SEQ ID NO: 289177 - DNA, 201 bp, Homo sapiens
tcatcagatattcagagatcaatgacctcatcagatattcaatgatcacagaggttgtggcctattgatagcatatgagttgtgattattgctccatacataaggttgtttttttttgtttgttttttgtgtgtgtgtgtgttttttttttttgagacagaatctcactctatcccccaggctacagtgcattggtacgat

SEQ ID NO: 289178 - DNA, 201 bp, Homo sapiens
gagacacctattttgtgcctgtattctagtgggcagcccatccctcgagtggaatacatggaggaagaaaagaaaacatggggcacagtgttcaagactcygaagtccttgtataaaacccatgcttgctatgagtacaatcacatttttccacttcttgaaaagtactgtggcttccatgaagataacattccccagctg

SEQ ID NO: 289179 - DNA, 201 bp, Homo sapiens
ctcatcagatattcagagatcaatgacctcatcagatattcaatgatcacagaggttgtggcctattgatagcatatgagttgtgattattgctccatacataaggttgtttttttttgtttgttttttgtgtgtgtgtgtgttttttttttttgagacagaatctcactctatcccccaggctacagtgcattggtacga

SEQ ID NO: 289180 - DNA, 201 bp, Homo sapiens
gttttggttactttagccttgtggtatggtttgaagttgggtagtgtgatgcctctgactttgttctttttgcttaggattgttttgaatacctaggttcytttttggtttcatatgaattttagaatggtatcttcttattctgtgaaaaaaaatgtcattggtagtttcatagaaatagcaatgaatctgttgtgggta

SEQ ID NO: 289181 - DNA, 201 bp, Homo sapiens
cctgccctgcttgagacacctattttgtgcctgtattctagtgggcagcccatccctcgagtggaatacatggaggaagaaaagaaaacatggggcacagygttcaagactctgaagtccttgtataaaacccatgcttgctatgagtacaatcacatttttccacttcttgaaaagtactgtggcttccatgaagataac

SEQ ID NO: 289182 - DNA, 201 bp, Homo sapiens
aacttgaaaagcataaatagttttcaagaatacaactgttagtgttacttatttttcccactacctggaggtaacacttgttagagtttggtgtatttctktaatcattttatttatatacttacatatttcctctgacataattgatatatgacataattgacataattgataatatcaactgggtatacagtattacat

SEQ ID NO: 289183 - DNA, 201 bp, Homo sapiens
cctcatcagatattcagagatcaatgacctcatcagatattcaatgatcacagaggttgtggcctattgatagcatatgagttgtgattattgctccatacataaggttgtttttttttgtttgttttttgtgtgtgtgtgtgttttttttttttgagacagaatctcactctatcccccaggctacagtgcattggtacg

SEQ ID NO: 289184 - DNA, 201 bp, Homo sapiens
agtttttcaaaggcataataacagaacttgctgaacctaaagaacaatatcaatgttcaagtacaagaagattatagaacattaagcagatttaacccaartaggactacctgaagacatttaataatcaaaaaaggtcaaggataaaggaaggaggctaaaagcagcaagagaaaagaaacaaaaaacgtgcaacggatc

SEQ ID NO: 289185 - DNA, 201 bp, Homo sapiens
gctgtgcccctgccctgcttgagacacctattttgtgcctgtattctagtgggcagcccatccctcgagtggaatacatggaggaagaaaagaaaacatgsggcacagtgttcaagactctgaagtccttgtataaaacccatgcttgctatgagtacaatcacatttttccacttcttgaaaagtactgtggcttccatg

SEQ ID NO: 289186 - DNA, 201 bp, Homo sapiens
tgtacaacactgtgaagcaggtaggattgacagtcttattttactgatgaggaaactaaggctctgagagataaactggccactcccaggccatgctcctwgtgaataaatgaattagtattccaacacagcttttctgactttaaaacctgtgttctcactagcctaaagagagcacttctgaggtttaaccttagctat

SEQ ID NO: 289187 - DNA, 201 bp, Homo sapiens
tgctgtgcccctgccctgcttgagacacctattttgtgcctgtattctagtgggcagcccatccctcgagtggaatacatggaggaagaaaagaaaacatrgggcacagtgttcaagactctgaagtccttgtataaaacccatgcttgctatgagtacaatcacatttttccacttcttgaaaagtactgtggcttccat

SEQ ID NO: 289188 - DNA, 201 bp, Homo sapiens
gtcttaacctttctactaggcagaaacaacttacaatttgataataaaatgaatattttgcaacttattggtcttctaaaaagccagcatctactttgaartgattgtaactttataagtagtaaatatatgtccccttagagcacagagtgagcttgtgagacaatgatctcatatgacatttaaaaggcacacagtaat

SEQ ID NO: 289189 - DNA, 201 bp, Homo sapiens
ctgctgtgcccctgccctgcttgagacacctattttgtgcctgtattctagtgggcagcccatccctcgagtggaatacatggaggaagaaaagaaaacayggggcacagtgttcaagactctgaagtccttgtataaaacccatgcttgctatgagtacaatcacatttttccacttcttgaaaagtactgtggcttcca

SEQ ID NO: 289190 - DNA, 201 bp, Homo sapiens
tagcattctttagctagattttacttactcttgattttatttaatgataggagtttgtggctttattgtattcagtagtttcattgtaagctatctctgtyttcttggagccaggggactaaataaacatgtgtatatatgtgtttgtacatacacatacacacacacagaggcttcccaagaagactcattaaaactcca

SEQ ID NO: 289191 - DNA, 201 bp, Homo sapiens
ttatctggaagccagcccacttgccatcaccattggctgggatccccacttctgatctcagcaaggcctttggccatgttctgccaatctgtactcaggaygttgccttctctgtgtttcagtgccctggttcccaagaaccattcaagagctggacagatttgccaatcagattctcagctatggagcggaactggatgc

SEQ ID NO: 289192 - DNA, 201 bp, Homo sapiens
gtgaatttctaccctaggtaagcaattagagaattagaagagtagaaaaaccaagtgatttcccgaaagtgagagcaaatcctcattgtagcctgtatcaytgcttaaccaaatcaccctttcatgtgggaaatcaaaacaacaatgtttcctatatcaagatgtggaatttttctctttcaaataatgtatgaaattcac

SEQ ID NO: 289193 - DNA, 201 bp, Homo sapiens
tgggtgttccagtgtggggtgcatatatagttaggatagttaagccttctggttgaattgaactctgtattattatgtgatcctctacttcattatttttwatcattgttggtttaaagtctgttttgcctgaagtaacaatatctatccctgctcttttttgttttccatttgcttgatagatctttctcgatcttttta

SEQ ID NO: 289194 - DNA, 201 bp, Homo sapiens
gtgctgtgctggcttcagatctgacccagtgaagtcctagtggtggtgaccacaggggtgcttgtgtcactgctctgctcccccagctccagacagctcarcacagagtgagagactctattcatctgggaggaagtaaggattaaaaacaagagtctctgcctggtaatccagataattcttctggaccttatccaacac

SEQ ID NO: 289195 - DNA, 201 bp, Homo sapiens
ttacacaacgaaataagtggtagagactttctaggcttgctggaaaactttccactctgctctctgctatgataagctaaggatacagtagaaaaaaattwtatatatatatatatatatatatatatatagtgtatatatatgcatatatatacagatatatatagtatgtgtgtatacgtgtatgtgtatatatacata

SEQ ID NO: 289196 - DNA, 201 bp, Homo sapiens
gggctacatccagtgctgtgctggcttcagatctgacccagtgaagtcctagtggtggtgaccacaggggtgcttgtgtcactgctctgctcccccagctycagacagctcagcacagagtgagagactctattcatctgggaggaagtaaggattaaaaacaagagtctctgcctggtaatccagataattcttctggac

SEQ ID NO: 289197 - DNA, 201 bp, Homo sapiens
tcttctaggagaatgatgtaaacctgacccacattgaatctagaccttctcgtttaaagaaagatgagtatgaatttttcacccatttggataaacgtagmctgcctgctctgacaaacatcatcaagatcttgaggcatgacattggtgccactgtccatgagctttcacgagataagaagaaagacacaggtaagaatt

SEQ ID NO: 289198 - DNA, 201 bp, Homo sapiens
cagcccatccctcgagtggaatacatggaggaagaaaagaaaacatggggcacagtgttcaagactctgaagtccttgtataaaacccatgcttgctatgmgtacaatcacatttttccacttcttgaaaagtactgtggcttccatgaagataacattccccagctggaagacgtttctcaattcctgcagagtaagtcc

SEQ ID NO: 289199 - DNA, 201 bp, Homo sapiens
ctccaagaatgaaaataaagtaaaggtctttcatggtaaacaaaaccagctgattcttcacagagaacccctgaatagctggagaagaaaaaaaaaacttmcaataaatggtgcatttttttctctgctgggtgtagtattcaaggatcagggcagtattcaaacagaggtccattttttgctcagcaagagagtttagaa

SEQ ID NO: 289200 - DNA, 201 bp, Homo sapiens
ggtgcccttcactcaagcctgtggttttggtcttaggaactttgctgccacaatacctcggcccttctcagttcgctacgacccatacacccaaaggattraggtcttggacaatacccagcagcttaagattttggctgattccattaacagtaagtaatttacaccttacgaggccactcggtttctcagtaatcgaag

SEQ ID NO: 289201 - DNA, 201 bp, Homo sapiens
ctttctccaaatggtgcccttcactcaagcctgtggttttggtcttaggaactttgctgccacaatacctcggcccttctcagttcgctacgacccatacmcccaaaggattgaggtcttggacaatacccagcagcttaagattttggctgattccattaacagtaagtaatttacaccttacgaggccactcggtttct

SEQ ID NO: 289202 - DNA, 201 bp, Homo sapiens
tcctttcctaaccatcatcatcaaccctcaaggcagtcaggggcatctgtggcgcattcccccagcacttggccccacacagccaagctctaacacctacycaccccactgctatttccctctcataagctttaagttgtgggggagcaggttattttgtctgactcacatagttcctgtgtgggggtacctacaaatttt

SEQ ID NO: 289203 - DNA, 201 bp, Homo sapiens
accttagatcaagtagtgaggattaaaactatgtctatgtgaggctttggctagtttttctacctaagacatccttacctctcctttccacttgggaatcrtcttcctttcctaaccatcatcatcaaccctcaaggcagtcaggggcatctgtggcgcattcccccagcacttggccccacacagccaagctctaacacc

SEQ ID NO: 289204 - DNA, 201 bp, Homo sapiens
aaaaccagaatgtcaacagggtgctaacggagaccaatggaaggggcaactgactctccccagggaaggtaggcaaggagattgagggaagtagcaatgaraggagagcttgcaaaatgaagtcatcagagctttgcataagaaacaattcatggaccttagatcaagtagtgaggattaaaactatgtctatgtgaggct

SEQ ID NO: 289205 - DNA, 201 bp, Homo sapiens
agaaaattcctacgtggagagagattgcagccaggagaagcagacagacacaatgtcttgggtagacagaagttaggaacatcaccatttgagaaatatgyttgcagttattttccaagagcagataaatatctgttgggttttgtttaatctatggtgattataagggtcctggtggggaagaaaagtgagttcaaattg

SEQ ID NO: 289206 - DNA, 201 bp, Homo sapiens
gacaaaatgccctttttattgtggggctcagatctcagaggcgagtctgacagcaggttcaagtaggagatctgaacccctcaaatcaattaagctaaacyactttccactctagtttttaaaccattcaaaaagccatgtgggtgatagaaaataaaagtttttcagtttcttaattgcgaaagttccccacccaaaaca

SEQ ID NO: 289207 - DNA, 201 bp, Homo sapiens
gtacagtggcacaatctctgctcactgcaacctccgcctctcgggttcaagccattctcctgcctcagcctccccgagtagctgagattacaggcacatgmcaccacgcccggctaatttttatatttttagtagagacggggtttcgccatgttgttcaggctggtctcacactcctgacctcaggtgatccgcccacct

SEQ ID NO: 289208 - DNA, 201 bp, Homo sapiens
gacttgccttaaggcaaacagtgggttctggggggtcatgcgcaagggtgtgttgagagcagctctgtgccgggcacagtgctaggaaagaaagggtcaawctgcctgttcttaaggagctcacagcctggcaaaggggaagacacacccaggtaagtagaatagagggacaggtgctgtgacaaagacagggttggtgtg

SEQ ID NO: 289209 - DNA, 201 bp, Homo sapiens
ttttgatgattatgaataaagctgtgaataaacatttatgtgcagtttttttgtgtgaagataagttttcaactgattcaagtaaatacctaagaatgtgrttgctgaggttaacttctttaaaaaattattttttttctactgtaaaatcgagtttctttcaaaaacacttggaaagactttgggtcaagaggagttcag

SEQ ID NO: 289210 - DNA, 201 bp, Homo sapiens
caaataaaataaaatacctaggagttaacctaagaagtgaaaggtctctacaatgaaaactataagacattgatgaaagaaattgaagaggatgcaaaaamcatagaaagatattccatattcatagattggaaaaaataatattgttaaaacgtacatactacccaaagcaacatacagattcaatgcaatccctatcaa

SEQ ID NO: 289211 - DNA, 201 bp, Homo sapiens
gcatttctatatgccagcagcaaacaatctgaaaaagaaatgaagaacataatcccatttacaatatccacaaataaaataaaatacctaggagttaaccyaagaagtgaaaggtctctacaatgaaaactataagacattgatgaaagaaattgaagaggatgcaaaaaccatagaaagatattccatattcatagattg

SEQ ID NO: 289212 - DNA, 201 bp, Homo sapiens
agcaataaatttagatattagatataaatcaaataagtctgaccccctattcaagcagaacaatgttgcttctatattatttatttattgtaattccatakaatttcgtttggaaagtgggggtgtttcctatgtaaatatttttggcagccactgtcctaaatattttaaccaaatcaaaatcttatagtggcaattcta

SEQ ID NO: 289213 - DNA, 201 bp, Homo sapiens
cattgtgtaattataccacagtccacttcatcattcctctattatgggagtttagttagcttagaagttttggtgaaatgctatgtgaattttcccataarttaaatctctagcactagaaaaactgagtcataaaacataaattgttttattgttatcctcaaagctgtggaagtggatgcttccaggggtggggtatga

SEQ ID NO: 289214 - DNA, 201 bp, Homo sapiens
gatgagctttgagttttctttcttcttttcatcccagcttgcactggtttccgcctccgacctgtggctggcctgctttcctctcgggatttcttgggtgdcctggccttccgagtcttccactgcacacagtacatcagacatggatccaagcccatgtatacccccgaaccgtgagtactgtcctccagctaccagttg

SEQ ID NO: 289215 - DNA, 201 bp, Homo sapiens
aaagtttgattgattaactcataaacctgtaacttataaaatgcgtaccttcccatcctaaaaaaaaggctgatacactctctgaccttgtgaccaccttyagccctctgacaaattttttgaacattagtcaacacccacagtttcatttatttcttgctcttccctctggagtacccagagtgtgtctgtgggaatctt

SEQ ID NO: 289216 - DNA, 201 bp, Homo sapiens
tgatgagctttgagttttctttcttcttttcatcccagcttgcactggtttccgcctccgacctgtggctggcctgctttcctctcgggatttcttgggtdgcctggccttccgagtcttccactgcacacagtacatcagacatggatccaagcccatgtatacccccgaaccgtgagtactgtcctccagctaccagtt

SEQ ID NO: 289217 - DNA, 201 bp, Homo sapiens
gccataattatgtgtcttaacctttctactaggcagaaacaacttacaatttgataataaaatgaatattttgcaacttattggtcttctaaaaagccagyatctactttgaaatgattgtaactttataagtagtaaatatatgtccccttagagcacagagtgagcttgtgagacaatgatctcatatgacatttaaaa

SEQ ID NO: 289218 - DNA, 201 bp, Homo sapiens
gcatcttgggctttgtctttacccaaaagagccccactttggaaatcttaactttccattcccatatgtagcctcatcctctgattcttcctcatcctcayttctgccctacctctctccaacctcctttcctgagctctatttcttccaatctggtctccccccaactcaggaaagtttgattgattaactcataaacct

SEQ ID NO: 289219 - DNA, 201 bp, Homo sapiens
tgaagacaaaggcctagctagtggcagaaatccaggctcttttacagaggccaaaggcaagctatttcaggggcaagctggccttttgaaatatgaatgaytgatgcttcttctaattcaaattgtaaaaccaattatagtgggcttgaaaacacagaggggcatgaggaggaagatgaaaagcaaccataatttcagtta

SEQ ID NO: 289220 - DNA, 201 bp, Homo sapiens
aacctccattcctcttcagccaccccttgcaagtctgcatcttgggctttgtctttacccaaaagagccccactttggaaatcttaactttccattcccayatgtagcctcatcctctgattcttcctcatcctcacttctgccctacctctctccaacctcctttcctgagctctatttcttccaatctggtctcccccc

SEQ ID NO: 289221 - DNA, 201 bp, Homo sapiens
cggggtgggggatatttcatcgttccctctactctgaggcagagggtctggggaggaacagcccaggctgcggtggctcagggccaggtctcacagcctcyatcggtgggaagggccaccgtcctgttgcctgccctttattctctgccaggcaaatgactccttcatctttaaatgacttgcagccatttacatcggtga

SEQ ID NO: 289222 - DNA, 201 bp, Homo sapiens
acggactgggcctgtgtcttgcagccatgggggcaggtcctttaatggtttttgagtagagggccggggtgggggatatttcatcgttccctctactctgrggcagagggtctggggaggaacagcccaggctgcggtggctcagggccaggtctcacagcctctatcggtgggaagggccaccgtcctgttgcctgccct

SEQ ID NO: 289223 - DNA, 201 bp, Homo sapiens
ccactccagtagccttaacctccattcctcttcagccaccccttgcaagtctgcatcttgggctttgtctttacccaaaagagccccactttggaaatctkaactttccattcccatatgtagcctcatcctctgattcttcctcatcctcacttctgccctacctctctccaacctcctttcctgagctctatttcttcc

SEQ ID NO: 289224 - DNA, 201 bp, Homo sapiens
tctgcctgtgtacatctatggaggtttaagtcaagtgcttggtaaacagcaacctgtactaacaactctgccaactgcagggggcagcggggagtggcgaygttgaaactgaatcttaaaaactgagtaggagatgcgggtcagataaggaacggagagggcttatggctgaaagaacagtgtatgagaataccgagagtc

SEQ ID NO: 289225 - DNA, 201 bp, Homo sapiens
ctgccaatctgtactcaggacgttgccttctctgtgtttcagtgccctggttcccaagaaccattcaagagctggacagatttgccaatcagattctcagytatggagcggaactggatgctgaccaccctgtgagtccatggcccgtaggatgagattttttcagtgcctctcctctactcccctcccttcctcttacct

SEQ ID NO: 289226 - DNA, 201 bp, Homo sapiens
attcctgtcatttttgagaaatggtggtgatactggcatattaagatgatggagatagtaacccgatttttagacatgaaaagtagcaagtaagatagacwatagagatgttctgtggcctccacatgcaaggggcttcagcagagccactgggccctgctttcttggctcccttgccacacagtgggcctgattctgagc

SEQ ID NO: 289227 - DNA, 201 bp, Homo sapiens
gttctggaagccttgcactcacttcagggttcccaccacgtctattttggctctctggattctttttgaatctaccactttcttactcctggtgtgatctyaaatcagctatttaagcttttagagccccagtttcttacccgcgcaagaggggttatcatgccttccttattttgaaggtacgtcagaaatagcaactgt

SEQ ID NO: 289228 - DNA, 201 bp, Homo sapiens
tgggaacattaatagtaccccccccccacaggtaaaatatttagaacaccattcagtgttagttttattgctaacatgggtggtagagagcctaggttccycagctctgcagaaacaagggtctaaatggacctttatgaactgctggaatcagctctccttgttttgctggaatgcagctgctgctcctcctgaggctcc

SEQ ID NO: 289229 - DNA, 201 bp, Homo sapiens
atgaccattgctttagggggttggggatctggcctccagaactgccaccaattagctgtgtgtctttggacaagttactgtccctctctgttgtctgtttwctcttctgtacactgaaggggctggtccctaatgatctgggatgggatgtggaatccttctagatttcttttgtaatatttataaagtgctctcagcaag

SEQ ID NO: 289230 - DNA, 201 bp, Homo sapiens
agttaagccttctggttgaattgaactctgtattattatgtgatcctctacttcattattttttatcattgttggtttaaagtctgttttgcctgaagtamcaatatctatccctgctcttttttgttttccatttgcttgatagatctttctcgatctttttacttttagcctatggatgtcattcatgtcagatggttc

SEQ ID NO: 289231 - DNA, 201 bp, Homo sapiens
cgaggtatttggcaaggccattaatgagctaatctgatttaacttttcaaaacggaggcctgggtcgctggggtcagtctctatttccagctttgtgagakagaccgggtagggggaagggacctgcagccttcactaaagaaaataaggggtatgtgaagagaacttaggttaaaaagtgactatccctaaatccaggga

SEQ ID NO: 289232 - DNA, 201 bp, Homo sapiens
gagcagacctaagagttgttgaccttaaagagaaggtagagagagagatgggggtagaaagtttttcaaaggcataataacagaacttgctgaacctaaaraacaatatcaatgttcaagtacaagaagattatagaacattaagcagatttaacccaaataggactacctgaagacatttaataatcaaaaaaggtcaag

SEQ ID NO: 289233 - DNA, 201 bp, Homo sapiens
taccttccatttttacagtagacagaccttttggaagcaaatgggaaaggcacagtatctattagtcatacccacttttttgtgccctactcctgcctagkggatccactcctccccctcatcagatattcaatgatctcatcagatacccagtgatcatgacctcatcagatattcagagatcaatgacctcatcagata

SEQ ID NO: 289234 - DNA, 201 bp, Homo sapiens
gggaattcagaatacctgctttgaggaaaatcaacataattcaagataacatagagaaggaattcagaattctattggatgaatttatcaaaatttaaaayaattaaaaagaattgagcagaaattctgaagctgaaaagtgcaatagacatactgaagaatgtattacagtcataagataattgacgaagcagaagaaag

SEQ ID NO: 289235 - DNA, 201 bp, Homo sapiens
aaaatgaaattaaaggaaataagtggcaaaacaaatgaaataatctagactatactttagagcagtgtttcccaaataatattctgtcaaaatctgtatgwtagtaggtattttatcagaaaagaattccaagggtcattatatctgaaaaattccacatctaggttttagagagccatagtgcacatgaacttattaaag

SEQ ID NO: 289236 - DNA, 201 bp, Homo sapiens
tatatttattgaataccttgaatggaaagtaattttatatacatatatatatatatatatatattttttttttttttttgagacagagtctcgctctgtcrcccaggctggagtgcagtggcgcgatcttggctcactgcaacttccacctccgtggttcaagcaattcccctgtctcagcctcccaagtagctgggattg

SEQ ID NO: 289237 - DNA, 201 bp, Homo sapiens
taaagggagttttttaatctgaaagaaaatgatgttaatgagcattaagaaataatctgaaggtgaaaaacttactggtaatactaagcacagagaaaaaygtaatataataacattgtaaatatagtgtataaattactcatatcttgagtagaatgacgaaaagatgagtaaataaaaaataataactacaacaacaac

SEQ ID NO: 289238 - DNA, 201 bp, Homo sapiens
cccaacccaagagcagaaagagttgatatgctgccgtggcaatggcagagagcccgttagttgtttctaggtattccacctcacagaaatgcacagccacyaccaactgaagtgagaaggtggctgtggtgggagcccaggttgggaggccctgctgagtgcagtgtagcaggggcaaggaccagtgtcaagaataatctg

SEQ ID NO: 289239 - DNA, 201 bp, Homo sapiens
tcagttgcttctgggagctctgccctggagaaacacagaggtgctgccaatgggaacgtttagctgaaggtgggacagctgtgttgcaggcctaagccagygggccctgcctggtgaagaaaaaggtgtgtagagggctctgggggaagacagtctggcctcttttccataggtcttctgtagtgtgctggaaatgtgagt

SEQ ID NO: 289240 - DNA, 201 bp, Homo sapiens
tgggaaaatttttgtggacgatattttcaaatatctttcccaagttgcttgctctctcttcctgtctttcagggatgccagtgactcataagttaggtctstttacataatcccacatttctcagaggttttgcttattttaaaaattttgtttttccttatttttgtcgcactgaactaattcaaagaaccagtctttga

SEQ ID NO: 289241 - DNA, 201 bp, Homo sapiens
gagtagcagaaccagaatttgaacccagatagcccacatacttgcaagataccattatctcttgtcagtgaataagatagaggaggaggaggagacggggygcccagtatgcagtcaaaagaagatccagaaagacaagccaacttttcaccattatgaactctgtttctatagttttatttacttgtgaccaatccccct

SEQ ID NO: 289242 - DNA, 201 bp, Homo sapiens
gttctgtttttgtgataaatcacatttattgattttcctatgttgaatcaacattgcatcccaggaatatagtctacttgatcactgtggatttgctttgygatagtttcctgctatttttgtgtggttttctaagtctttttgtagacctctaagaatttatgaatctgggtgttccagtgtggggtgcatatatagtta

SEQ ID NO: 289243 - DNA, 201 bp, Homo sapiens
gtgcacaacgtgcaggtttgttacatatgtatacatgtgccatgttggtgtgctgcacccattaacttgtcaggtatatctcctaatgctatccctccccyttcccccgaccccacaacaggcccgtgtgtgatgttccccttcctgtgtccaagtgttctcattgttcaattcccacctatgagtgagaacatgcagtgt

SEQ ID NO: 289244 - DNA, 201 bp, Homo sapiens
tcagaatggccaattaatatatccaaaggtagtgagtagcagaaccagaatttgaacccagatagcccacatacttgcaagataccattatctcttgtcartgaataagatagaggaggaggaggagacggggcgcccagtatgcagtcaaaagaagatccagaaagacaagccaacttttcaccattatgaactctgttt

SEQ ID NO: 289245 - DNA, 201 bp, Homo sapiens
cctttgggtatgtacctcataataggattgctgggtcaaatggtatttctgtttttaggtctttgaggaattgccacagtctttcttttttttttttttttatactttaagttctagggtacatgtgcacaacgtgcaggtttgttacatatgtatacatgtgccatgttggtgtgctgcacccattaacttgtcaggtat

SEQ ID NO: 289246 - DNA, 201 bp, Homo sapiens
  misc_feature (1)...(201): n = A,T,C or G
caggtaatggccaaaatggccttccatgatctattcctggtaacttctctgcctggtgtcttcacacccccgcttcctgctcactctgccccagtcacacnggcctccttgttggtctgccctcacattgtgcattctcttactccaggacccttgcactggctgttccctcacgtttttctccctcactgatttcaggtt

SEQ ID NO: 289247 - DNA, 201 bp, Homo sapiens
cttttattttaggttcagggactatacctacaggtttgttacatgggtgaattttatatcacaggggtttggtgtaccgattattttgtcacccatgtagkgaacatagtatctgataggtaatttttcaatcctcacccttctcccaccctccaacctcaagaaggactcagtatctattgttctgttttttgtgtctat

SEQ ID NO: 289248 - DNA, 201 bp, Homo sapiens
tctctgccttcatttcgttatgtacccaggagtcattcaggagcaggttcttcagtttccatgtagttgagtggttttgagtgagtttcttaatcctgagytctagtttgattgcactgtggtctgagagacagtttgttataatttctgttctttcacatttgctgaggagtgctttacttccaactatgtggtcaattt

SEQ ID NO: 289249 - DNA, 201 bp, Homo sapiens
caggttcttcagtttccatgtagttgagtggttttgagtgagtttcttaatcctgagttctagtttgattgcactgtggtctgagagacagtttgttatawtttctgttctttcacatttgctgaggagtgctttacttccaactatgtggtcaattttggaatgagtgcaatgtggtgagaagaatgtatattctgttga

SEQ ID NO: 289250 - DNA, 201 bp, Homo sapiens
ttggcattgtcctgccctgccatagtggaaagcaacaccaggcagaactcagtcagcacccacagagggagcatttagaccaggcctagccagaggagaaytgcccatcctagtgttcaaaagtttagttcttgcaagtctcaccaacatgggctaaacagctcttgggtactaaagaaactcaaaaggcagtctaggcca

SEQ ID NO: 289251 - DNA, 201 bp, Homo sapiens
catggatgtatcaagggcaacatatttgaaactgagatcatgcttattccctcaactcgttccctccttttgtgttctatatttcagggtttagcaccatstgcccacacagtcaaaccaaaatcctggggtcatgccatactctcaccactctctcacaggcactccacaaccaccaagtcttaacaattatacacacac

SEQ ID NO: 289252 - DNA, 201 bp, Homo sapiens; identical to SEQ ID NO: 59570

SEQ ID NO: 289253 - DNA, 201 bp, Homo sapiens
actgacctcagtagattgttccaactttcaattatttatgcattggtttaaacattttctgtagtgctctatatttttagcctctactagctcatgtccaygccttttaggaaaatactctcctgagagtctttactgtaagtggcttagtaatgggctacaaaatgagaagcaggctcctgggggaagtacactgttcac

SEQ ID NO: 289254 - DNA, 201 bp, Homo sapiens
gcagggggactgtggtgtgcatagtctactcgggtgtttacatctctcccaacatctttgtgaatgaaatggagaagcaagccatagatgaaaatacggaygagacctttaagctgtgcagtttacaacacatttctggaccctataaaatgaaattaaaggaaataagtggcaaaacaaatgaaataatctagactatac

SEQ ID NO: 289255 - DNA, 201 bp, Homo sapiens
gcactccagcctgggtgatagagcaagactctgtctcaaataaataaattaaattaataaataataaaatatatgcaatatatacaaatataattatgtawatataaattatacaattttatgcaattgtaattttatattataaatatatatgcattttttattgttcaattataccccaataaagatggaattttttaa

SEQ ID NO: 289256 - DNA, 201 bp, Homo sapiens
ggaaaatgttttaaacaaatgcatcttatcctgtaggaaacaagctatattgaagacaactgcaatcaaaatggtgccatatcactgatcttctcactcawagaagaagttggtgcattggccaaagtattgcgcttatttgaggtcagtgctacaatcatgtttgtcttggataatgtcgtagcaaacttccatgttctt

SEQ ID NO: 289257 - DNA, 201 bp, Homo sapiens
ccctctggggtctagaggcagaggatttcatagtaaatagcatgttgtctttaacatcaaaaggacaagagataagagttggcaaggatgcggagaagagrgaacccttgtactctgctggtggggatgtcagttggcacagccattatggaaaacagcatgaaagtttctcaaacaattaaaatatagctaccatacttt

SEQ ID NO: 289258 - DNA, 201 bp, Homo sapiens
tcttttcatcccagcttgcactggtttccgcctccgacctgtggctggcctgctttcctctcgggatttcttgggtggcctggccttccgagtcttccackgcacacagtacatcagacatggatccaagcccatgtatacccccgaaccgtgagtactgtcctccagctaccagttgccaggcacaatgagcgccatctt

SEQ ID NO: 289259 - DNA, 201 bp, Homo sapiens
ccaaggcaatttcaagtcaccagggtcttccctctggggtctagaggcagaggatttcatagtaaatagcatgttgtctttaacatcaaaaggacaagagrtaagagttggcaaggatgcggagaagagggaacccttgtactctgctggtggggatgtcagttggcacagccattatggaaaacagcatgaaagtttctc

SEQ ID NO: 289260 - DNA, 201 bp, Homo sapiens
acgtgtatgtgtatatatacatacacacatatgtaactcacagctgagcagtaatactgtctactatgtgccagtattgttttccataaatcacgcatatyaactcatttaacatcatgttgttcttataaagcaatactttctagtactactattatcaccatttcaaagataggaagagtgaggcacaaagagatgtaa

SEQ ID NO: 289261 - DNA, 201 bp, Homo sapiens
aatttctgcgagttgtgtgggtcgttcgccacctgccggttatttcgcaaactgcagctgggactgcgaacatttgcaacttgattcattcaggactactwgattctattccattaattcttctccatacaatttggttcaaccatagagcatcgtgaggacttaatgacgttctcccctgatactcccattagagataac

SEQ ID NO: 289262 - DNA, 201 bp, Homo sapiens
ttcaccaccaccacacctttattctaagcccagcattgctttttggtgaagtgcatcggctgcaaaattgttctttcggctcagctagctcagtgatcttragcaaatcactttgtctctttgagcctatttgctcatcagtgaacagcaataatgtctaccacctgggactgttttgcgaattaaaggagatgatgaaag

SEQ ID NO: 289263 - DNA, 201 bp, Homo sapiens
aaatatcccccaggaattctctctttccttagcatgttatgaattatgtggcccttactttttaaaaaccttgactgttgggattttcttccttctcttastactccttctcaaacagcacagagtcagcgttgccaacttcctctctcattcacatctatctcctaattcagttgatcatttatgctaccgatattgatt

SEQ ID NO: 289264 - DNA, 201 bp, Homo sapiens
ctttgtttaacaagtaatctctgtttgccagagaaagcttcagatctatctatatctctctggcattacctcctcactattctctctctccctagtggggkcccctctgtgggtttccctagccacagccctcaggggtgtgttgtctgcagttggagccataaataatggctgcaccgtgagcctgtttgaggttactta

SEQ ID NO: 289265 - DNA, 201 bp, Homo sapiens
aaaagaaaacatggggcacagtgttcaagactctgaagtccttgtataaaacccatgcttgctatgagtacaatcacatttttccacttcttgaaaagtastgtggcttccatgaagataacattccccagctggaagacgtttctcaattcctgcagagtaagtccacatcagggtcaatggccctgcagaaagttgggg

SEQ ID NO: 289266 - DNA, 201 bp, Homo sapiens
gaccaggccgagcccctcagaaccagttggtgaagtcgagaagctcctgctcctcggggctgagcgggtcgtaagagccctcgtccgacgagtaggatgasaccggcgagccggccatggagttcaagtcgttggagtagttgggggagatggtgggcgacaggacgcctgcctggaaggcggcgctcaccgcgtcatgct

SEQ ID NO: 289267 - DNA, 201 bp, Homo sapiens
cttttcatcccagcttgcactggtttccgcctccgacctgtggctggcctgctttcctctcgggatttcttgggtggcctggccttccgagtcttccactrcacacagtacatcagacatggatccaagcccatgtatacccccgaaccgtgagtactgtcctccagctaccagttgccaggcacaatgagcgccatcttt

SEQ ID NO: 289268 - DNA, 201 bp, Homo sapiens
ttcttcttttcatcccagcttgcactggtttccgcctccgacctgtggctggcctgctttcctctcgggatttcttgggtggcctggccttccgagtcttscactgcacacagtacatcagacatggatccaagcccatgtatacccccgaaccgtgagtactgtcctccagctaccagttgccaggcacaatgagcgcca

SEQ ID NO: 289269 - DNA, 201 bp, Homo sapiens
taaatactctctctccccgaaaagtaaaggtaaatgtggggacttttgacccccattccatcccatataccatgtagcctactcccaggagccctggggcrccaaggttgctccaggtgggattctgctctgtgtacccgttcaacagatctctgtctggggcctcttagccatcaactctgtcagcaaagcatctccaaa

SEQ ID NO: 289270 - DNA, 201 bp, Homo sapiens
gctttgagttttctttcttcttttcatcccagcttgcactggtttccgcctccgacctgtggctggcctgctttcctctcgggatttcttgggtggcctgrccttccgagtcttccactgcacacagtacatcagacatggatccaagcccatgtatacccccgaaccgtgagtactgtcctccagctaccagttgccagg

SEQ ID NO: 289271 - DNA, 201 bp, Homo sapiens
acagtgataataacttttcacttggggcctacagtactgcttatcagagaagccaaagcttctccccctggagctggagaagacagccatccaaaattacwctgtcacggagttccagcccctgtattacgtggcagagagttttaatgatgccaaggagaaagtaaggtgaggtggtgacaaaggtgagccactagctct

SEQ ID NO: 289272 - DNA, 201 bp, Homo sapiens
tcttctcctaactttggactcagactcatactggaactgtagtctgggtccacagtttgtcaactgcagatcttgggactcagcctccataaccacacgarctaatttcttgaaatacatgtccatctacatctaatttcttactggttcttttttctggagaacccagactaatacagtcaccccgactctattttgcta

SEQ ID NO: 289273 - DNA, 201 bp, Homo sapiens
ggaaattggccttgcctctctgggtgcacctgatgaatacattgaaaagctcgccacagtaagtcccttctctccctgggtggatggtggagtgctatagkctatggccctcaggtctttgaaactttcctactcccctggaagccaggttatctggggaaaaaaatcagaatgtggtgggttacatttgcacaagtgaaa

SEQ ID NO: 289274 - DNA, 201 bp, Homo sapiens
agtcacttaaagagacagatcccagaaaatcctgaaactttctacctctgtgacctctggcaagttgctcatcgtctctcaggctctataaaatgagaggrttgagtaagatgcctcccctctgattctgactaaatagagaatacaggcgtggaccacatgatcctctagtggcaaccattcctctctttgaatagacga

SEQ ID NO: 289275 - DNA, 201 bp, Homo sapiens
gctgtctccaccaccgtggcaaacctggacgctggccccgagggcaaagggaaagtgtactcctaacagattcaggaggaagcagccgcagcctgagcgcrgcatctgccagggaaactgtgcgccccaggtcagctagttaactatttcatccctccccaccactcttccctaggccaagtatttgcagcacgggcaggg

SEQ ID NO: 289276 - DNA, 201 bp, Homo sapiens
cgcgcccttggatgctcttgcgttcaacagggctaggagactaccggctggggcgaggaatgcaggcgcctagagccttggagctcctgaaacgttcctgmcgcctccggaaagcaagggcagtttaccgaagtgactgaggtcagtcgtgtgtccccattgtgtggccacgtgtcctgtgtccatcaccaccttcccaaa

SEQ ID NO: 289277 - DNA, 201 bp, Homo sapiens
tagacccccaacaactctgcttcgttgaccctcagaacagtaccctgtgggactcctgagccgtaaggagtctccctggtagcgcgcagcggggccaggckctgtgctccggcccccgtgcggtgcccagctctgcaggttcccgaaagtgcgccccggggtggggttgcaatccgccccgtgacggcataataaataatt

SEQ ID NO: 289278 - DNA, 201 bp, Homo sapiens
ttcagtgttctgtcttgtcatgagggtgggggagtgggaaggacaaagcactgatcccctttggtgagtatcacccagagtacagacattgcagaaagatragaaggcttctctttctcctccaatacaataagggacttaatttctgcaccttcagacccctttcctatatcagaacactctggagctgaaccatacttc

SEQ ID NO: 289279 - DNA, 201 bp, Homo sapiens
tagaaaatttgctggtagccagcacgtgtttccttttccaggatgcatacacagagatctcaataccagggaagtagaggacagaacctcctctcctcctyccccctacacacaccatgaaatgggtgcccaaatggagtggaagtgcattgtagtgaagaagccttgtcttgtagtggccttactcattggcctcaggcc

SEQ ID NO: 289280 - DNA, 201 bp, Homo sapiens
gtgactgtctcctcaccctccccattctctcttctaggagaatgatgtaaacctgacccacattgaatctagaccttctcgtttaaagaaagatgagtatraatttttcacccatttggataaacgtagcctgcctgctctgacaaacatcatcaagatcttgaggcatgacattggtgccactgtccatgagctttcacg

SEQ ID NO: 289281 - DNA, 201 bp, Homo sapiens
aaactcatttctagagttcctctaagagcctcagagcttatgtagatgtgaggctctaaagctttagttcattagctacatgatgaatctgcctctgctgyctctgagtaggtggtaaacacatactgaatgaatgaatggcagaaataaaataaaaagagcattgaacttggactcagatagcctgtgtgactttgagca

SEQ ID NO: 289282 - DNA, 201 bp, Homo sapiens
aagaccttaagacctagtaactcaggagagtggacagcaggggtgttctggaatctcttcttacacctagacagccagcaaaacaactcttataaaagtcrgtgcaaaagatgtcaatataaccactaactatacacaaatgaattttcatcctatcttgttcttatctggatctcaaaggtgtctgtggccactggccat

SEQ ID NO: 289283 - DNA, 201 bp, Homo sapiens
tattctagtgggcagcccatccctcgagtggaatacatggaggaagaaaagaaaacatggggcacagtgttcaagactctgaagtccttgtataaaacccrtgcttgctatgagtacaatcacatttttccacttcttgaaaagtactgtggcttccatgaagataacattccccagctggaagacgtttctcaattcctg

SEQ ID NO: 289284 - DNA, 201 bp, Homo sapiens
tttgtttttccttatttttgtcgcactgaactaattcaaagaaccagtctttgagctctgaataatttcctcagctcagttgattctgctgttaatattgkgttatgaaattcttgtagtgagtcattcagctctattagatcagtttggttctttcttaaaatggaaattttgtctttcatctcttgaatcattttactg

SEQ ID NO: 289285 - DNA, 201 bp, Homo sapiens
cagtggtgatgagctttgagttttctttcttcttttcatcccagcttgcactggtttccgcctccgacctgtggctggcctgctttcctctcgggatttcktgggtggcctggccttccgagtcttccactgcacacagtacatcagacatggatccaagcccatgtatacccccgaaccgtgagtactgtcctccagcta

SEQ ID NO: 289286 - DNA, 201 bp, Homo sapiens
taacagtgataataacttttcacttggggcctacagtactgcttatcagagaagccaaagcttctccccctggagctggagaagacagccatccaaaattrcactgtcacggagttccagcccctgtattacgtggcagagagttttaatgatgccaaggagaaagtaaggtgaggtggtgacaaaggtgagccactagct

SEQ ID NO: 289287 - DNA, 201 bp, Homo sapiens
taccactatcagatacttagaagcacttgtgtgccagacaccattctaagaactcttcatacatgagttcattttaatcctcccatcaaccctctgaaggmcgtactattagtatagctattttgtaaatgggaaactagggaacagagggcttaagtaatttgcacaaagttccaaagtagagattggagctaggtggtc

SEQ ID NO: 289288 - DNA, 201 bp, Homo sapiens; identical to SEQ ID NO: 59272

SEQ ID NO: 289289 - DNA, 201 bp, Homo sapiens; identical to SEQ ID NO: 59274

SEQ ID NO: 289290 - DNA, 201 bp, Homo sapiens
cctctgactcagtggtgatgagctttgagttttctttcttcttttcatcccagcttgcactggtttccgcctccgacctgtggctggcctgctttcctctbgggatttcttgggtggcctggccttccgagtcttccactgcacacagtacatcagacatggatccaagcccatgtatacccccgaaccgtgagtactgtc

SEQ ID NO: 289291 - DNA, 201 bp, Homo sapiens
acaaagaaaggtaaaaattatccttttgccagctcattcacttaccttacatttgcaaggtaagattgtgggacaagacaggtccagctaacatttgtttsagaaccctttggaataaagagacttcaaagaggactaactttctttcttttaaaatggatattccttaatttatgtctactatctttagataattaaagg

SEQ ID NO: 289292 - DNA, 201 bp, Homo sapiens
ggcacagtgttcaagactctgaagtccttgtataaaacccatgcttgctatgagtacaatcacatttttccacttcttgaaaagtactgtggcttccatgragataacattccccagctggaagacgtttctcaattcctgcagagtaagtccacatcagggtcaatggccctgcagaaagttgggggaggattgaggcag

SEQ ID NO: 289293 - DNA, 201 bp, Homo sapiens
atatggcagggacgtccccctaggatgacctctggccccctgtaccatcgccccctaccgccaccccctccccataaagattatttccggaccagcttagsggatatcataaagaagggagtgctctgggatactcccagaccctcggagaagaaagatgcggggcgggggttgagtgatggcgcttagggcactggtggg

SEQ ID NO: 289294 - DNA, 201 bp, Homo sapiens
  misc_feature (1)...(201): n = A,T,C or G
cagagagggaaagaaaaggaaatatgaagcgggagccctgacggaagttaaaaaatatatacaaaatccccgggagacttcttagagtgggagcaaaaaangtgaaaatgctttttctcctccctgcacgccgcctcctcctccctcccctcctcccttcgcgggttggcttcgggagcctcgcgtggcgctcgcgtgtga

SEQ ID NO: 289295 - DNA, 201 bp, Homo sapiens
ttccagtgactgtctcctcaccctccccattctctcttctaggagaatgatgtaaacctgacccacattgaatctagaccttctcgtttaaagaaagatgvgtatgaatttttcacccatttggataaacgtagcctgcctgctctgacaaacatcatcaagatcttgaggcatgacattggtgccactgtccatgagctt

SEQ ID NO: 289296 - DNA, 201 bp, Homo sapiens
tttggcctgcgttagttccagtgactgtctcctcaccctccccattctctcttctaggagaatgatgtaaacctgacccacattgaatctagaccttctcrtttaaagaaagatgagtatgaatttttcacccatttggataaacgtagcctgcctgctctgacaaacatcatcaagatcttgaggcatgacattggtgcc

SEQ ID NO: 289297 - DNA, 201 bp, Homo sapiens
gaaagtcatgctcacacaacccacccaggaaagggtgtgtggcaggaggagcctcagcacttggcttcctggaaccactctgtgatcatcactccagccartggagatccagtgccactctgtctcactgtcccagcacctaggggtgagtcattcctgtcatttttgagaaatggtggtgatactggcatattaagatga

SEQ ID NO: 289298 - DNA, 201 bp, Homo sapiens
catctttggcctgcgttagttccagtgactgtctcctcaccctccccattctctcttctaggagaatgatgtaaacctgacccacattgaatctagacctyctcgtttaaagaaagatgagtatgaatttttcacccatttggataaacgtagcctgcctgctctgacaaacatcatcaagatcttgaggcatgacattgg

SEQ ID NO: 289299 - DNA, 201 bp, Homo sapiens
cttcctgtctttcagggatgccagtgactcataagttaggtctgtttacataatcccacatttctcagaggttttgcttattttaaaaattttgtttttcyttatttttgtcgcactgaactaattcaaagaaccagtctttgagctctgaataatttcctcagctcagttgattctgctgttaatattgtgttatgaaat

SEQ ID NO: 289300 - DNA, 201 bp, Homo sapiens
tgtggaaaatgttttaaacaaatgcatcttatcctgtaggaaacaagctatattgaagacaactgcaatcaaaatggtgccatatcactgatcttctcacycaaagaagaagttggtgcattggccaaagtattgcgcttatttgaggtcagtgctacaatcatgtttgtcttggataatgtcgtagcaaacttccatgtt

SEQ ID NO: 289301 - DNA, 201 bp, Homo sapiens
gaatctttctggatgaggggggctgagtaaagattgtgggtagggctcatccaatctgttgagggactgaggatgagtgagggagaacttactctctctasctgtcttggagctggggcactagtcttctcctaactttggactcagactcatactggaactgtagtctgggtccacagtttgtcaactgcagatcttggg

SEQ ID NO: 289302 - DNA, 201 bp, Homo sapiens
ggtctccccccaactcaggaaagtttgattgattaactcataaacctgtaacttataaaatgcgtaccttcccatcctaaaaaaaaggctgatacactctytgaccttgtgaccaccttcagccctctgacaaattttttgaacattagtcaacacccacagtttcatttatttcttgctcttccctctggagtacccaga

SEQ ID NO: 289303 - DNA, 201 bp, Homo sapiens
ccgcctcctcctccctcccctcctcccttcgcgggttggcttcgggagcctcgcgtggcgctcgcgtgtgaggctgccgctggcgccttcttgtttctaaraaaaaaaaaagcagaagcagcagcaaaagtcagtgctgaacgcgctctgccgcgtctcgcgttcctctcctactaaggctgcgctctcttgcgccgggtc

SEQ ID NO: 289304 - DNA, 201 bp, Homo sapiens
gcggccaaggagtcgcggaatcagagcgatccgggacgcgaggtgcggggcccgcgagggggacacagagagaacttgggtgcaggaacagagagggaaaraaaaggaaatatgaagcgggagccctgacggaagttaaaaaatatatacaaaatccccgggagacttcttagagtgggagcaaaaaaagtgaaaatgctt

SEQ ID NO: 289305 - DNA, 201 bp, Homo sapiens
tacctcggcccttctcagttcgctacgacccatacacccaaaggattgaggtcttggacaatacccagcagcttaagattttggctgattccattaacagyaagtaatttacaccttacgaggccactcggtttctcagtaatcgaagactgtctttccctaccatcgccataggaaaaataataaatttattgaaatatt

SEQ ID NO: 289306 - DNA, 201 bp, Homo sapiens
ttaagactacctttctccaaatggtgcccttcactcaagcctgtggttttggtcttaggaactttgctgccacaatacctcggcccttctcagttcgctaygacccatacacccaaaggattgaggtcttggacaatacccagcagcttaagattttggctgattccattaacagtaagtaatttacaccttacgaggcca

SEQ ID NO: 289307 - DNA, 201 bp, Homo sapiens
ttgtattcagtagtttcattgtaagctatctctgtcttcttggagccaggggactaaataaacatgtgtatatatgtgtttgtacatacacatacacacayacagaggcttcccaagaagactcattaaaactccattccccccgcctcagccctggctgttgaagaccctgctctagggaggtgtccgtgttcctaaaaa

SEQ ID NO: 289308 - DNA, 201 bp, Homo sapiens
gggcgacaggacgcctgcctggaaggcggcgctcaccgcgtcatgctcgtccagcagctgctgcagcgcgcggatgtactcgaccgccgagcgcagtgtcyccaccttactcatcttcttgttggccgcgccgttggggacgtgctcccgaagggtggcaaagcccaggttgaccaacttgacgcggttgcgctcgcgctc

SEQ ID NO: 289309 - DNA, 201 bp, Homo sapiens
ggaagaaggaggaagaggtgcagagcaggcaaaatcacagatgtgtaacatgtggctcatgccaccagctgggttgagacagctcctttcagagaagaagrggtggaaatatatacttggccatttgttcttcatgaaagatagcaactaacactcatagggcacttacaccatagtataacagcatttgctgcaaccccc

SEQ ID NO: 289310 - DNA, 201 bp, Homo sapiens
ggggcctacagtactgcttatcagagaagccaaagcttctccccctggagctggagaagacagccatccaaaattacactgtcacggagttccagcccctstattacgtggcagagagttttaatgatgccaaggagaaagtaaggtgaggtggtgacaaaggtgagccactagctctgggggcctcctgactggtgccac

SEQ ID NO: 289311 - DNA, 201 bp, Homo sapiens
acacatagaattttatgtattatttttcgacttaggctaatgatttagcaaactctggaatgtcagccctaaccccaaccttggttttctgtcacatgcaygtagtaagtgctagatcctggacattctttgagatttagtttaagactaagtttattttctgataggttatttgtgtactttcatggattttgtaactct

SEQ ID NO: 289312 - DNA, 201 bp, Homo sapiens
tcacacctcagtttcatgggatgttttggcaaaaatctgaattttctgaattgaaagaattttttgctaagggtcatcagtattcatgcagggcttgttaytctgagtcactaagagtttcctaacacagccttctctcattgagatgatgtaacatctattccattaatttcattaacttgcttacaagagagtaattgt

SEQ ID NO: 289313 - DNA, 201 bp, Homo sapiens
cagtgtcttcttggtcactgtaagtactgagtttatcttgccttttttgtctatttatttaatgttcctgtttcctaataggatgtgaaattactttgagkagactctcctgtttatcataaacagtgcctggcacttagtacatcttcaacaaacgtttgttgaataaatgtgtgcatgaatgacagcacctcagtgatc

SEQ ID NO: 289314 - DNA, 201 bp, Homo sapiens; identical to SEQ ID NO: 59641

SEQ ID NO: 289315 - DNA, 201 bp, Homo sapiens
aagataacattccccagctggaagacgtttctcaattcctgcagagtaagtccacatcagggtcaatggccctgcagaaagttgggggaggattgaggcaraggagagggaaggggaagacaagtatgtggaggcaagtatgaaagcatgtgcttgtaggaatgcatgcaggttgattcctccaggaagaactaaatttca

SEQ ID NO: 289316 - DNA, 201 bp, Homo sapiens
cttggggatatgctgagtgtgctatgccctgaaaatccagtgatatgtaaaagagtttcctgagtttaatcattattaacatatgtgagaccatctgaaamgagaaacatacaacacactgagagaaaccaataaactttggaaaaatccaggaagacagaaagaacagatagtgacttattggtctaaacgagtggggaa

SEQ ID NO: 289317 - DNA, 201 bp, Homo sapiens
gaacatttctaagaagtatctatccacattatgcagatgaggaaactgaggctcagaaatgggaatttacttgatccagatcacctagctagaaagcagcsaggcagacatctgaagccaagtctgcctagcgtcaaagcctatgtccctgggcagttatgtgtactactccactacctaaaggtctcctagtgcctctga

SEQ ID NO: 289318 - DNA, 201 bp, Homo sapiens
tacctttctccaaatggtgcccttcactcaagcctgtggttttggtcttaggaactttgctgccacaatacctcggcccttctcagttcgctacgacccakacacccaaaggattgaggtcttggacaatacccagcagcttaagattttggctgattccattaacagtaagtaatttacaccttacgaggccactcggtt

SEQ ID NO: 289319 - DNA, 201 bp, Homo sapiens
gctctgccagcttcagagcatctgaggaacatctcagtctagttgacaccacagagaaaaaaacaaaagagatggaggagttcctgtcatatggagaacawattgttgggagcctccttttggggcttcttagtacctcctgatattttccatcatgctttacattcagccagcactcaacaggtgactagatagagtgag

SEQ ID NO: 289320 - DNA, 201 bp, Homo sapiens
aaaattaaccatcatagagtgtgctctcagattgactttccattccagatttactggtttactgtggagtttgggctctgcaaacaaggagactccataavggcatatggtgctgggctcctgtcatcctttggtgaattacaggtatgaccttcacaggaaccaaggatagatttaaaagtggtgggtacagaaaaccat

SEQ ID NO: 289321 - DNA, 201 bp, Homo sapiens
aaggtgacacataaaattaaccatcatagagtgtgctctcagattgactttccattccagatttactggtttactgtggagtttgggctctgcaaacaagkagactccataaaggcatatggtgctgggctcctgtcatcctttggtgaattacaggtatgaccttcacaggaaccaaggatagatttaaaagtggtgggt

SEQ ID NO: 289322 - DNA, 201 bp, Homo sapiens
ctctgactcagtggtgatgagctttgagttttctttcttcttttcatcccagcttgcactggtttccgcctccgacctgtggctggcctgctttcctctcrggatttcttgggtggcctggccttccgagtcttccactgcacacagtacatcagacatggatccaagcccatgtatacccccgaaccgtgagtactgtcc

SEQ ID NO: 289323 - DNA, 201 bp, Homo sapiens
actgatcctgatttaacagtgataataacttttcacttggggcctacagtactgcttatcagagaagccaaagcttctccccctggagctggagaagacarccatccaaaattacactgtcacggagttccagcccctgtattacgtggcagagagttttaatgatgccaaggagaaagtaaggtgaggtggtgacaaagg

SEQ ID NO: 289324 - DNA, 201 bp, Homo sapiens
agtggtgatgagctttgagttttctttcttcttttcatcccagcttgcactggtttccgcctccgacctgtggctggcctgctttcctctcgggatttctygggtggcctggccttccgagtcttccactgcacacagtacatcagacatggatccaagcccatgtatacccccgaaccgtgagtactgtcctccagctac

SEQ ID NO: 289325 - DNA, 201 bp, Homo sapiens
ctgtggaaaatgttttaaacaaatgcatcttatcctgtaggaaacaagctatattgaagacaactgcaatcaaaatggtgccatatcactgatcttctcaytcaaagaagaagttggtgcattggccaaagtattgcgcttatttgaggtcagtgctacaatcatgtttgtcttggataatgtcgtagcaaacttccatgt

SEQ ID NO: 289326 - DNA, 201 bp, Homo sapiens
ctttgtggttttatctacctttggtctttgatgatggtgacacacagatggggttttggtgtggatgtcctttttgtttgttagttttccttctaacagtyaggaccctcagctgcagatctgttggagttggctggaggtccactccagaccctgtttgcctgggtgtcagcagcggaggctgcagaacagcaaatattt

SEQ ID NO: 289327 - DNA, 201 bp, Homo sapiens
acttggttatttgcataaatgcagtagttgacttcagaaacatccccaagttttagcatggatgatgggacattctcctcactgattctatcactacccartctgctacctcccactgttgtgcctaatgagctctgccagcttcagagcatctgaggaacatctcagtctagttgacaccacagagaaaaaaacaaaaga

SEQ ID NO: 289328 - DNA, 201 bp, Homo sapiens
ctttgagttttctttcttcttttcatcccagcttgcactggtttccgcctccgacctgtggctggcctgctttcctctcgggatttcttgggtggcctggycttccgagtcttccactgcacacagtacatcagacatggatccaagcccatgtatacccccgaaccgtgagtactgtcctccagctaccagttgccaggc

SEQ ID NO: 289329 - DNA, 201 bp, Homo sapiens
aacttcctcctttagctcagagaagttttatcgtctgaagccttcttctctcatcaaagtcattctctgtccagctttgttccattgctggcgaggagctrtgttcctttggacggggagaggtgctctgatttttagaattttcagcttttctgctctgttttttccccatctttgtggttttatctacctttggtcttt

SEQ ID NO: 289330 - DNA, 201 bp, Homo sapiens
agcatcatgttatctgccataacaatattaaaatgacttatcaccaatgcgacttttctaaaaaattgttactgattgaaaaaatgttactgattggttgrggaacagtcctggattcttgctgcccttaatttgctgtgtaactacatgcatgttgccttaccttcctgggctgaagactcctcacctgtatgtgaggag

SEQ ID NO: 289331 - DNA, 201 bp, Homo sapiens
agttttctttcttcttttcatcccagcttgcactggtttccgcctccgacctgtggctggcctgctttcctctcgggatttcttgggtggcctggccttcygagtcttccactgcacacagtacatcagacatggatccaagcccatgtatacccccgaaccgtgagtactgtcctccagctaccagttgccaggcacaat

SEQ ID NO: 289332 - DNA, 201 bp, Homo sapiens
tgggttcgaacttcctcctttagctcagagaagttttatcgtctgaagccttcttctctcatcaaagtcattctctgtccagctttgttccattgctggcraggagctgtgttcctttggacggggagaggtgctctgatttttagaattttcagcttttctgctctgttttttccccatctttgtggttttatctacctt

SEQ ID NO: 289333 - DNA, 201 bp, Homo sapiens
ccagctatatatatgcctggaccgatgtcaccacttatctgcagttctcctgtgatgtttccagggtacatgattaagactcatttaacattccaggaatrttctgctgatgaataatcactgagctggagtcaagagaagaagctttagatactaaccgaccctgtgatcatgagcaagtcacttcccttctctgtgcct

SEQ ID NO: 289334 - DNA, 201 bp, Homo sapiens
tgtgcatttgtcacgtagttctcgtgccatggttttcagctccatcaggtcatttaaggacttctctacattgtttattctagttagccattcatctaatyttttttcaaggtttttagcttctttgcaatgggttcgaacttcctcctttagctcagagaagttttatcgtctgaagccttcttctctcatcaaagtcat

SEQ ID NO: 289335 - DNA, 201 bp, Homo sapiens
tccttcatttcaactttggcgaatctgacaattatgtgtcttggagttgctcttctcgaggagtatctttgtggcattctctgtatttcctgaatttgaaygttggcctgccttgctaggttggggaagttctcctggatagtatccttcagagtgttttccaacttggttccattctccccgtcactttcaggtacaccg

SEQ ID NO: 289336 - DNA, 201 bp, Homo sapiens
actcagtggtgatgagctttgagttttctttcttcttttcatcccagcttgcactggtttccgcctccgacctgtggctggcctgctttcctctcgggatwtcttgggtggcctggccttccgagtcttccactgcacacagtacatcagacatggatccaagcccatgtatacccccgaaccgtgagtactgtcctccag

SEQ ID NO: 289337 - DNA, 201 bp, Homo sapiens
cccatttacatttaaggttaatattgttatgtgtgaatttgatcctgtcattatgatgttagctggttattttgctcgttagttgatgcagtttcttcccrgaatcaatggtctttacaatttggcatgtttttgcagtggctggtaccagttgttcctttccatgtttagtgcttccttcaggagctcttgtagggcagg

SEQ ID NO: 289338 - DNA, 201 bp, Homo sapiens
ccctttaccattgtgtagtgaccttctttgtctcttttgatctttgttggtttaaagtctgttttatctgagactaggattgcaacccctgccttttttcrttttccatttgcttgatagatcttcctccatccctttattttgggcctatgtgtgtctctgcacgtgagatgggtctcctgaatacagcacactgatacg

SEQ ID NO: 289339 - DNA, 201 bp, Homo sapiens
ttaggatagttagctcttcttgttgaattgatccctttaccattgtgtagtgaccttctttgtctcttttgatctttgttggtttaaagtctgttttatcwgagactaggattgcaacccctgccttttttcgttttccatttgcttgatagatcttcctccatccctttattttgggcctatgtgtgtctctgcacgtga

SEQ ID NO: 289340 - DNA, 201 bp, Homo sapiens
tgctcctgtattgggtgcatatacatttaggatagttagctcttcttgttgaattgatccctttaccattgtgtagtgaccttctttgtctcttttgatcwttgttggtttaaagtctgttttatctgagactaggattgcaacccctgccttttttcgttttccatttgcttgatagatcttcctccatccctttatttt

SEQ ID NO: 289341 - DNA, 201 bp, Homo sapiens
tgggtgctcctgtattgggtgcatatacatttaggatagttagctcttcttgttgaattgatccctttaccattgtgtagtgaccttctttgtctcttttkatctttgttggtttaaagtctgttttatctgagactaggattgcaacccctgccttttttcgttttccatttgcttgatagatcttcctccatcccttta

SEQ ID NO: 289342 - DNA, 201 bp, Homo sapiens
agctccttgaaagttggggtggcacccagctcatccaagaagcccacttatcccctagtgctttgcactgaggacacttgaagagtttttgcttattatayaagtggcccattttgatggtgtttttctttgtaggtgaaattggaatcctttgcagtgccctccagaaaataaagtaaagccatggacagaatgtggtct

SEQ ID NO: 289343 - DNA, 201 bp, Homo sapiens
accctccagtctcctggtgtcctactctaccctcaacccctaccatctcttggtgtcctgcctctaccctcaactgctaccatctattctcacacagcagscagaaggagtgcttggtaacacaagtgagatcatgaccatctatctgctcattaccctgcaatggctcctgtttcactgaaaggaaaaactcaagcccta

SEQ ID NO: 289344 - DNA, 201 bp, Homo sapiens
ccctgtctaccctccagtctcctggtgtcctactctaccctcaacccctaccatctcttggtgtcctgcctctaccctcaactgctaccatctattctcayacagcagccagaaggagtgcttggtaacacaagtgagatcatgaccatctatctgctcattaccctgcaatggctcctgtttcactgaaaggaaaaactc

SEQ ID NO: 289345 - DNA, 201 bp, Homo sapiens
ggtgatctcactcaatttcatggctttaaataccatctctactctgatgacggacacatttacatctgcagccaagacttcaatccccaaattcagacttrcatattgaattgcctattcaacatctccccttggatgtctataagacatctctaacatcctatccaaaactgagttctggatcttccttctcaaaccttc

SEQ ID NO: 289346 - DNA, 201 bp, Homo sapiens
ctatgtccctgggcagttatgtgtactactccactacctaaaggtctcctagtgcctctgactcagtggtgatgagctttgagttttctttcttcttttcwtcccagcttgcactggtttccgcctccgacctgtggctggcctgctttcctctcgggatttcttgggtggcctggccttccgagtcttccactgcacaca

SEQ ID NO: 289347 - DNA, 201 bp, Homo sapiens
ttaaacgctctcattactattgtgtgggagtctaagtctctttgtaggtctctaacgacttgctttatgaatctgggtgctcctgtattgggtgcatatayatttaggatagttagctcttcttgttgaattgatccctttaccattgtgtagtgaccttctttgtctcttttgatctttgttggtttaaagtctgtttta

SEQ ID NO: 289348 - DNA, 201 bp, Homo sapiens
tgagtgcaatgtggtgagaagaatgtatattctgttgatttggagtggagagttctgtagatgtctgttaggtccgcttggtgcagagctgagttcaattmctggacatccttgttaactttctttcttgttgatctgtctaatgttgacagtggggtgttaaacgctctcattactattgtgtgggagtctaagtctctt

SEQ ID NO: 289349 - DNA, 201 bp, Homo sapiens
gcctcataaaatgagttagggaggattccctctttttctattgattggaatagtttcagaaggaatggtaccagctcctccttgtacctctggtagaattyggctatgaatccatctggtcctgtactttttttggtgggtaggctattaattattgcctcaatttcagagcctgttattggtctattcagggattcaact

SEQ ID NO: 289350 - DNA, 201 bp, Homo sapiens
gaagtcaataccagggagaagacaggatgagaagtgttcatgactcatagctcacttaggtatatgggagcatgtccacaggaatattagctcttctgccyggtaccccactggggatactcttaagacccttggctgctgtgccctaccctgcacctgtctcttatttttccttccttttcttctttttaccttgtaccc

SEQ ID NO: 289351 - DNA, 201 bp, Homo sapiens
ataagctttttgatgtgctgctggattcggtttgccagtattttattgaggatttttgcattgatgttcatcagggatattggtctgaaattctctttttygttgtgtctctgccaggctttggtatcaggatgatgctggcctcataaaatgagttagggaggattccctctttttctattgattggaatagtttcagaa

SEQ ID NO: 289352 - DNA, 201 bp, Homo sapiens
gtgggcagcccatccctcgagtggaatacatggaggaagaaaagaaaacatggggcacagtgttcaagactctgaagtccttgtataaaacccatgcttgytatgagtacaatcacatttttccacttcttgaaaagtactgtggcttccatgaagataacattccccagctggaagacgtttctcaattcctgcagagta

SEQ ID NO: 289353 - DNA, 201 bp, Homo sapiens
gtaatggccaaaatggccttccatgatctattcctggtaacttctctgcctggtgtcttcacacccccgcttcctgctcactctgccccagtcacaccggyctccttgttggtctgccctcacattgtgcattctcttactccaggacccttgcactggctgttccctcacgtttttctccctcactgatttcaggttcat

SEQ ID NO: 289354 - DNA, 201 bp, Homo sapiens
aggctgatacgccaactcaattagaggtcctgtctatttccaacaaagtcaaccacagttctggcattgagtccactgactctgattaggacatagtcccrtctctcagccaggcacaatgcaggagaatgagggatttcaattggcttagtctggtcacatgcccacttctgaaggtaggagtggagtctctcctcacct

SEQ ID NO: 289355 - DNA, 201 bp, Homo sapiens
attacatttattgatttgtgtatgttgaaccagccttgcatcccagggatgaagcccacttgatcgtggtggataagctttttgatgtgctgctggattcrgtttgccagtattttattgaggatttttgcattgatgttcatcagggatattggtctgaaattctcttttttgttgtgtctctgccaggctttggtatca

SEQ ID NO: 289356 - DNA, 201 bp, Homo sapiens
agttgattatcagcttaaggagattttgggctgagacaatggggttttctaaatatacaatcatgtcatctgcaaacagggacaatttgatttcctcttttcctaattgaataccgtttatttctttctgctgcccgattgccctgaccagaacttccaacactatgttgaataggagtagtgagagagggcatccctgtc

SEQ ID NO: 289357 - DNA, 201 bp, Homo sapiens
aactgtggaaaatgttttaaacaaatgcatcttatcctgtaggaaacaagctatattgaagacaactgcaatcaaaatggtgccatatcactgatcttctyactcaaagaagaagttggtgcattggccaaagtattgcgcttatttgaggtcagtgctacaatcatgtttgtcttggataatgtcgtagcaaacttccat

SEQ ID NO: 289358 - DNA, 201 bp, Homo sapiens
agtcactgatctttgaagtcaggctttatttggtttacatctgtttgtgctgttccgaacacagttcattcccaggtggttttcaaaaggacttttttttwaaaatctttaatttagctttcattttaagttcaagggtacatgggcaggtatttacatataggtaaacttgtgtcatgggggtttgttttacagactatt

SEQ ID NO: 289359 - DNA, 201 bp, Homo sapiens
gggctctgttttgttccattggtgtatacctctgttttgataccagtaccatgctgttttggttactgtagccttgtagtatagtttgaaggcaggtagtktgatgcctccagctttgttcttttggcttaggattgtcttggcaatgcgggctcttttttggttccatatgaactttaaagtagttttttccaattctgt

SEQ ID NO: 289360 - DNA, 201 bp, Homo sapiens
ctcatttaagctttcggtgctctttttaccatgtctttcttcttcaaaatagtctcttacttcagggtctgatatagttcatccttgttttttttttttttttgcagattctattttgcgaatttgcctacttgcttaagtgtatttgtgaccccaaaatcgatactcactgtacactttcacagtcattcccagactagc

SEQ ID NO: 289361 - DNA, 201 bp, Homo sapiens
tccagcacctgttgtttcctgactttttaatgatcgccattctaactggtgtgagatggtatctcactgtggttttgatttgcatttctctgatggccagygatgatgagcattttttcatgtgtctgttggctgcataaatgtcttcttttgagaagtgtctgttcatatcctttgcccattttttgatggggttgtttt

SEQ ID NO: 289362 - DNA, 201 bp, Homo sapiens
agtgctgcaataaacatatgtgtgcatgtgtctttatagcagcatgatttataatcctttgggtatatacccagtaatgggatggctgtgtcaaatggtakttctagttatagatccttgaggaattgccacactgtcttccacaatggttgaaccagtttacagtcccaccaacagtataaaagtgttcctatttctcca

SEQ ID NO: 289363 - DNA, 201 bp, Homo sapiens
atagattgtagtaaatctatagtgccacatcacatatccatgaaaaatacatatacgcacaaacatttctatgtattttacaagttcaaggctaaacatcrtattagagaagttgcctctggggaaaggcagtgagagtgaggaattatgataaaagagaatgaataaaaaaacaagagaagggtcatgtaggttttgttt

SEQ ID NO: 289364 - DNA, 201 bp, Homo sapiens
gtacatgtgcacaacgtgcaggtttgttacatatgtatacatgtgccatgttggtgtgctgcacccattaacttgtcaggtatatctcctaatgctatccmtcccccttcccccgaccccacaacaggcccgtgtgtgatgttccccttcctgtgtccaagtgttctcattgttcaattcccacctatgagtgagaacatg

SEQ ID NO: 289365 - DNA, 201 bp, Homo sapiens
agccttgtggtatggtttgaagttgggtagtgtgatgcctctgactttgttctttttgcttaggattgttttgaatacctaggttcttttttggtttcatwtgaattttagaatggtatcttcttattctgtgaaaaaaaatgtcattggtagtttcatagaaatagcaatgaatctgttgtgggtagtatggccatttta

SEQ ID NO: 289366 - DNA, 201 bp, Homo sapiens
tagttttaagtactcagattcctaagctttctaatctgtaattaacgattaaaaaccattcagtgctctagggaaaggaagagttatactttgcaataacygtgtcataaaatcttttctaaacagagtaatcacattatttatctgggatttagatttggagtaaaaaaaaatgtgtagtagttttacttcacttttcaa

SEQ ID NO: 289367 - DNA, 201 bp, Homo sapiens
gggacattttataaatcatattatatcacctctaaggatctttcagtttgttatatatgtgtctattaagttagattgtgagctcctaaaagataaagcaytgtcttattcatctttaaatttctcagagcccaaatagtgcctggaacctagtagttgctcaataaaaggtattgaatttacaggattgaatggtgacat

SEQ ID NO: 289368 - DNA, 201 bp, Homo sapiens
ccgcctccgacctgtggctggcctgctttcctctcgggatttcttgggtggcctggccttccgagtcttccactgcacacagtacatcagacatggatccragcccatgtatacccccgaaccgtgagtactgtcctccagctaccagttgccaggcacaatgagcgccatcttttcctgctgcaagaatgaggtttgggt

SEQ ID NO: 289369 - DNA, 201 bp, Homo sapiens
aggcaaggtacatgaaagataaacaataaaggcaaatgggggtaagaactgttcatggatatctcattcctagaagcagcatgatgaagtggaaatccacrgattgaaggaattctcttttcttcctggattcctacttcagtgctcaaatctcaacttgccagcctagggaggaccacaaaatccaaatggaggtgctag

SEQ ID NO: 289370 - DNA, 201 bp, Homo sapiens
cattgagaaacactgatttacaaagtgcatggagagaaatggagcaagtgaagggggatcagcatggtgaaatataggctgttaggagtgctattgactawctgtctggtgactggaccagagtaaatcttttactttgcaagaaacaggactaaattcccatattatgtccatagcaaagggaattatgtagaaaaattg

SEQ ID NO: 289371 - DNA, 201 bp, Homo sapiens
catgtggtctttggttttctcttccattagtttgctaaggataatggcctccagctccatccatgttcctgcaaaggacatgatgtcattttttatggccrcatagtattccatggtgtatatgtacaacattttctttatccagtccaccactgatgggcaatgaagttgattccatgtctgtgctatcgtgaatagtgc

SEQ ID NO: 289372 - DNA, 201 bp, Homo sapiens
acgtgctgtttgcaaacctgcctgtacctgaggccctaaaaagccagagacctcactcccggggagccagcatgtccactgcggtcctggaaaacccaggsttgggcaggaaactctctgactttggacaggtgagccacggcagcctgagctgctcagttaggggaatttgggcctccagagaaagagatccgaagactg

SEQ ID NO: 289373 - DNA, 201 bp, Homo sapiens
ctattagtctaaattgagacagggtgatcagtcatcaccaactgtgatttgattcagaatgtactccacatggacggctacagaggccctgtggtcgtctrgtagcccaaggaatgcaaggccagatccccaagaggctgggcgtcaggccacagagctctctgaccactggtaactgagaaagcaaaactccctgcaacc

SEQ ID NO: 289374 - DNA, 201 bp, Homo sapiens
catttaagctttcggtgctctttttaccatgtctttcttcttcaaaatagtctcttacttcagggtctgatatagttcatccttgttttttttttttttttgcagattctattttgcgaatttgcctacttgcttaagtgtatttgtgaccccaaaatcgatactcactgtacactttcacagtcattcccagactagcac

SEQ ID NO: 289375 - DNA, 201 bp, Homo sapiens
tcatttaagctttcggtgctctttttaccatgtctttcttcttcaaaatagtctcttacttcagggtctgatatagttcatccttgttttttttttttttttgcagattctattttgcgaatttgcctacttgcttaagtgtatttgtgaccccaaaatcgatactcactgtacactttcacagtcattcccagactagca

SEQ ID NO: 289376 - DNA, 201 bp, Homo sapiens
atattttggacaatagtctaatagcaatgagaagcccttgaagggcttttgaagaggcaagtggcctcaccagacttgcactttataaatataatttgggmtgaagtggagggggtgagaggccacttacccagcagctacaatagtcaggcaagaaatggtggtggtcgaatgcaggtgcagcagtgagaatgaagtagg

SEQ ID NO: 289377 - DNA, 201 bp, Homo sapiens
gtatatatacatctatatatgtatatacatgtatatatacatctatatatgtatatacatgtatatatacatctatatatgtatatacatagagagagagrgggggagagagagagagagagaaagagagagagagaaaactctcccaaaacaaaaattcaaccaatcaagcaaccaaaacaaaaaacaaatctaaaaatc

SEQ ID NO: 289378 - DNA, 201 bp, Homo sapiens
cttcttttcatcccagcttgcactggtttccgcctccgacctgtggctggcctgctttcctctcgggatttcttgggtggcctggccttccgagtcttccwctgcacacagtacatcagacatggatccaagcccatgtatacccccgaaccgtgagtactgtcctccagctaccagttgccaggcacaatgagcgccatc

SEQ ID NO: 289379 - DNA, 201 bp, Homo sapiens
atatgtgtatatatatacgtatatataggtgtatatacatgtatatatgtatatatgtatatacatatatacatgtaatatacatctatatatacacgtawatatacatctatatatgtatatacatgtatatatacatctatatatgtatatacatgtatatatacatctatatatgtatatacatgtatatatacatct

SEQ ID NO: 289380 - DNA, 201 bp, Homo sapiens
ctcactcatagaccatccccctactttactttcttcaaaagacttagccctacctaaacttatttatatgtttattttctgcccaccagaatggcagcatrgctggggaggcagagtctgttttgttcattgctgtattcccaaagactagaacaccaccaagcacacggtacaggtctcagtaattattgtcaaatttat

SEQ ID NO: 289381 - DNA, 201 bp, Homo sapiens
atatacacacatatatgtatatatatgtgtatatatatacgtatatataggtgtatatacatgtatatatgtatatatgtatatacatatatacatgtaatatacatctatatatacacgtatatatacatctatatatgtatatacatgtatatatacatctatatatgtatatacatgtatatatacatctatatatgt

SEQ ID NO: 289382 - DNA, 201 bp, Homo sapiens
tcaatgccgcagattctcagaacaaattacattatattacattgccctctgtgtctttacaattactggtaggccctgatatatatatatatatacacacmtatatgtatatatatgtgtatatatatacgtatatataggtgtatatacatgtatatatgtatatatgtatatacatatatacatgtaatatacatctat

SEQ ID NO: 289383 - DNA, 201 bp, Homo sapiens
cagaatcaatgccgcagattctcagaacaaattacattatattacattgccctctgtgtctttacaattactggtaggccctgatatatatatatatatayacacatatatgtatatatatgtgtatatatatacgtatatataggtgtatatacatgtatatatgtatatatgtatatacatatatacatgtaatataca

SEQ ID NO: 289384 - DNA, 201 bp, Homo sapiens
ccagaatcaatgccgcagattctcagaacaaattacattatattacattgccctctgtgtctttacaattactggtaggccctgatatatatatatatatwcacacatatatgtatatatatgtgtatatatatacgtatatataggtgtatatacatgtatatatgtatatatgtatatacatatatacatgtaatatac

SEQ ID NO: 289385 - DNA, 201 bp, Homo sapiens
aaataaatgttctttgtttagtccagtagacaggtttctaaaatggtgtgttactgatatttggaaagtaaatcatggtgcccagttttatttttttttttaaccacatcatctcaaaccaacttaccttcacccagtagaaacgaggcacaacagtagttttaagtactcagattcctaagctttctaatctgtaattaa

SEQ ID NO: 289386 - DNA, 201 bp, Homo sapiens; identical to SEQ ID NO: 59705

SEQ ID NO: 289387 - DNA, 201 bp, Homo sapiens
gccactgactgccgaccccacgctcacggtcaccatctcacccccactggcccacacaggccctgggcccgtcctcgtcaggctcatctcctatgacctgygtgaaggacaggtagggttccagcctcagccagggacagggacagagccgaggagcgtgggcagcccccaccttggcatccccatggaggggtgcagccc

SEQ ID NO: 289388 - DNA, 201 bp, Homo sapiens; identical to SEQ ID NO: 59707

SEQ ID NO: 289389 - DNA, 201 bp, Homo sapiens
ggagcaggtggggggcagagcagggagctgagccctctactctgtttacagcacgtggtcctcactgatctttctgggtgggaggtggcttgtgcggctasaccctgggcaggccagccccgcccccgggtttattgccccaggctgctactggcacaagccacagaccagcagtcccagcccagggaagctcggaagatg

SEQ ID NO: 289390 - DNA, 201 bp, Homo sapiens; identical to SEQ ID NO: 59708

SEQ ID NO: 289391 - DNA, 201 bp, Homo sapiens
  misc_feature (1)...(201): n = A,T,C or G
ttcaggctagcctatcctcagcaacccagcccaggcattcctggaaacctcccctcaccagggctgaacccacaagtattgatcagcccagctgggccagncagctcctccctgtgtcccagccgtgaccctagagtcatgagaaagagatcccggggctgcccaaaccagcatcccagccacaatagccaggcatcaggt

SEQ ID NO: 289392 - DNA, 201 bp, Homo sapiens
cttgaacccgggaggcagaggttacagtgagccgagatcgcaccactgcactccagcctgggcaacagagcaagactccatctcaaaaaaaaaaaaaaaaagtaaaaaactaaaactgtagcatcttggccctcatggtaggcagtgtgggtctgataaaatgaacagagctgaggccaagctgggcacgccaggtgggct

SEQ ID NO: 289393 - DNA, 201 bp, Homo sapiens
gatttaaaatgagagacataagactcttctttcacttgaacactttgaggtcattgtagggttgttaattggcctgatttctattttattttattctattyttcatctcatttcatttatttgagacagactctcgctctattttccaggctggagtacaatggtgtgatcttggctcactacaacctccacctcccgggt

SEQ ID NO: 289394 - DNA, 201 bp, Homo sapiens
ccccagtggtggtggctgctgactcacgagggtggtggttgtagaaagtggctgtggcagtttcttaaaataaggtaacaatgaacttttctgcttcgatycactcacaaaactgttctctgtaacatgtgatgctgtttgatagcatttggtccacagtagaactttcaaaattggggtcaggccaggcacggtggctca

SEQ ID NO: 289395 - DNA, 201 bp, Homo sapiens
ccgggggttatgtcacctttctgtgcctcaattttgtcatctgccaaaagggatgataatggtctctccctcataggttgtggggcaggcgacatgagtcwcttcacataaaacacataaagaaatctcatcacctcctttgagaatgaaaaaaaaaaaaaaaagaaaagaaatcccagcactttgggagaccaaggcagg

SEQ ID NO: 289396 - DNA, 201 bp, Homo sapiens
  misc_feature (1)...(201): n = A,T,C or G
tgggtttacaggcatgagccactgcacctggaccccactgtctttccttaactgcctgtctgctctgtcagacgctgtctctccctgcccccgtggtggcnggctggtcctatgtctaggcctcagtctccctctctgactgtctttctgcctcaggtccctgtgcctggggggctgtctctggccatctccctgttcctg

SEQ ID NO: 289397 - DNA, 201 bp, Homo sapiens
ctgggcatggtggttcagacctgcaatcccagcactttgggaggctgaggtgggcagatcacttgaggtcaggggttcaagatcagcctggtcaacatgaygaaaccctgtctctagtaaaagtacaaaaatattagccaggtgtggtggtgcacacctgtaatcccagcactttgggaggccaaggtgggcagatcactt

SEQ ID NO: 289398 - DNA, 201 bp, Homo sapiens
actgagtcctgccacctatgaaccaaggactattttcatttccttgatctagaagaaaaaataggttcctagaggtaaactgcacctaatcttcccagtcwcacacacacacacacacacacacacacacacacacacacacacacacacatccttcactagaacacactgccccactgccaagacccccaccatgaccac

SEQ ID NO: 289399 - DNA, 201 bp, Homo sapiens
gttataaagtgatgtcaggatacagtgggacgtcgccacatgagaaaaccagtgctcggaatcacagacactaccaggatacaggtgagtgtgaatctggrggaattgaagcctctcagggacagtcattcatttacttaaaaaatactaaaaacttacggtgtatcaggttagctctggtcatccttcaacaatcctgag

SEQ ID NO: 289400 - DNA, 201 bp, Homo sapiens
atctcctatgacctgcgtgaaggacaggtagggttccagcctcagccagggacagggacagagccgaggagcgtgggcagcccccaccttggcatccccayggaggggtgcagccctggccagctctccccaacctcacacaccgtctccctcctcacccccaggacagtgaggagctcagcagcctgataaagtccaacg

SEQ ID NO: 289401 - DNA, 201 bp, Homo sapiens
tccccaacctcacacaccgtctccctcctcacccccaggacagtgaggagctcagcagcctgataaagtccaacggccaacggagcctggagctgtggccrcgcccccagcaggcaccccgctcgcggtccctgatagtgcacttccacggcggtggctttgtggcccagacctccagatcccacgagccctacctcaaga

SEQ ID NO: 289402 - DNA, 201 bp, Homo sapiens; identical to SEQ ID NO: 59710

SEQ ID NO: 289403 - DNA, 201 bp, Homo sapiens; identical to SEQ ID NO: 59711

SEQ ID NO: 289404 - DNA, 201 bp, Homo sapiens; identical to SEQ ID NO: 59712

SEQ ID NO: 289405 - DNA, 201 bp, Homo sapiens
gtgacgcagccgcgtctctccacagttcacgcctgccatccggccattcctgcagaccatctccattgggctggtgtccttcggggagcactacaaacgcmacgagacaggcctcagtgagtcccagccaggttctactcgcagcctactctcttggccctcctccccactcctgcccaagcagcctgacccactggggct

SEQ ID NO: 289406 - DNA, 201 bp, Homo sapiens
ttacaaaagctctgccacttgcagtgcaactttaacctcctcacttaaaacctgagcctcagtttcctctcctgtaaaatggggatgctggcaataatagagatttgaacctaggtggtgtgggtcccagagggttagcacgctaaagcagcaaacacacagaaagctctcagcacgggacctgcacggatatgctcaagg

SEQ ID NO: 289407 - DNA, 201 bp, Homo sapiens; identical to SEQ ID NO: 59715

SEQ ID NO: 289408 - DNA, 201 bp, Homo sapiens
gactggggatcagagggagaggtgaagggcacccctgcaggcagaccttccctagcaccccttctgtcccctccctccagtctctggccaacatggcatcrgccaccgtgagggtaagccgcctgctcagcctgccacccgaagcctttgagatgccactgactgccgaccccacgctcacggtcaccatctcacccccac

SEQ ID NO: 289409 - DNA, 201 bp, Homo sapiens; identical to SEQ ID NO: 59716

SEQ ID NO: 289410 - DNA, 201 bp, Homo sapiens
gcgctcccccttcgcggccgcgccgccactttgcggagcccaaggggaggacagctgcagtaccaggggcggggccgcgggccgtccgtcagcacggcggsgcccctgattggccagcgccgcccccctcccgcggacgcgggcatatgaggaggcggaggcggcggccgccgcagcctctgtgcggtgggaccaacggac

SEQ ID NO: 289411 - DNA, 201 bp, Homo sapiens
tgcctctaggccaaggtgtcaagagaaggaaaggaggatatgttgataggctctccctcccctaggaagagggcagagttggggagggggcgtctgggggygaggcatctgggttaaaagatgtggctcctccccctttcccagtctccatggcaacagcccagtctgcaggcccaacctcctttgctgcagaagcagctc

SEQ ID NO: 289412 - DNA, 201 bp, Homo sapiens
actgacgtcccgtgccctggtcaccgctcctgcagacatacgagcagaggaaggtggtggagttcacctgccacacggccttctttgtgagcatcgttgtygtccagtgggccgatctgatcatctgcaagacccggaggaactcggtcttccagcagggcatgaagtgagggccgggggcacatggtgactggacagcca

SEQ ID NO: 289413 - DNA, 201 bp, Homo sapiens
tctgtctctttctttccttctttgtctctccaggttgggtggagaaggaaacctactactgacctcagccccaccacatcgcccatctcttccccgtcccscaggcccaggaccgcccctgtcagtccccccaattttgtattctggggggaggagccctctcttcctgtggccccaccttggcccccaccccctccacta

SEQ ID NO: 289414 - DNA, 201 bp, Homo sapiens
agccgaggggggcggggggcagcagggtctcaggcagctggtcccaggctcccctcgccctgctggatggctctgccacctggttcccactcttctctctmttcccatctctccgggcacccactctgtcttctcacgggtctctgtctgtgtggtttccttgtctctctccctctctgtccctctctctgctgggcggct

SEQ ID NO: 289415 - DNA, 201 bp, Homo sapiens
gctcccaccacggattactccgaagaccccaggccccagccccgcccagggcaccctccacctgtgagcacgaaggatcctgggagactgcccctctgcgycccctccagtcccctgaaactctgcctctcgttagggccccgcactcaagccctcctgctctcccctctgcaggcccagctggtggttctgtgccttccc

SEQ ID NO: 289416 - DNA, 201 bp, Homo sapiens
ccgcccagggcaccctccacctgtgagcacgaaggatcctgggagactgcccctctgcgtcccctccagtcccctgaaactctgcctctcgttagggcccygcactcaagccctcctgctctcccctctgcaggcccagctggtggttctgtgccttcccctacagtttcctcatcttcgtctacgacgaaatccgcaaac

SEQ ID NO: 289417 - DNA, 201 bp, Homo sapiens
ttgccttcgactgtgatgacgtgaacttcaccacggacaacctctgctttgtgggcctcatgtccatgatcgacccaccccgggcagccgtccctgacgcrgtgggcaagtgtcgcagcgcaggcatcaaggtgtggcttggggtggctgggggaggcaaagccaggcgtggggcgggagaggccatccctaaaaaacaat

SEQ ID NO: 289418 - DNA, 201 bp, Homo sapiens
actccgaagaccccaggccccagccccgcccagggcaccctccacctgtgagcacgaaggatcctgggagactgcccctctgcgtcccctccagtcccctraaactctgcctctcgttagggccccgcactcaagccctcctgctctcccctctgcaggcccagctggtggttctgtgccttcccctacagtttcctcatc

SEQ ID NO: 289419 - DNA, 201 bp, Homo sapiens
ggccctggactgaaccctctctctgctgcacctacccccaggtggacaactcctccctgactggcgaatccgagccccagactcgctctcccgactgcackcacgacaaccccttggagactcggaacatcaccttcttttccaccaactgtgtggaaggtgaggcgggtgcagagaagacacacagctggggcagacaca

SEQ ID NO: 289420 - DNA, 201 bp, Homo sapiens
agcctcgccctctgcccgcacaccctcccagagaacctcgccagttcttggctggcctaggcactcaccgtctcccccaaactcctgttcctcagacagarcacaagatgtcagtggaagaggtctgccggaaatacaacacagactgtgtgcaggtgtggccaggctgtgggctgggaccctgggaactagggaggagga

SEQ ID NO: 289421 - DNA, 201 bp, Homo sapiens
gagatggagaccagcgtgggcaacatagggagagcatgtctctataaaaaattagccaggcatggtggtgtggacctgtggtcccagctacgtgggagacygaagcgggaggatcgcatgagcctgggagatcaaggctgcagtgagctgtgatctcgccactgttctccagcctgggtgacagagtgagaccctgtctta

SEQ ID NO: 289422 - DNA, 201 bp, Homo sapiens
ctcaaaaataaataaataaataaataaaataaaataataagcctggcgcagtggctcacgcctttaatcccaacagtttgggaggctgaggcaggaggacygcttgaggtcaggagtttgagacaagcctggacaacatagtaagaacccatctctaccaaaaaatgtgaaggctgggcgcagtggctcatgcctgtagtc

SEQ ID NO: 289423 - DNA, 201 bp, Homo sapiens
agtcccagctacacaggaggcggaggcgggaggatcacctgagcctcagaagtcgaggctgcagtgagctgtgattgctgcactccagcctgggcatcagrgtgagacattgtttcaaaaaacgaaaacaaagtcacatagacacagaacacaaaaggggagagccccgcaaagatgggcacagaaacagagagagactga

SEQ ID NO: 289424 - DNA, 201 bp, Homo sapiens
tcggggcatgtctccccatctctgtctctccctatgtctctgcctctctgtctctgtgtctgtgctgctgtctctgggtgtctgcactgtgcctccccctrtctctgcggggtggcaggtgcagggtgggtgctctctgggcccagccctgcccttctgtgcctccaggaacaagatcctgatcttcgggctgtttgagga

SEQ ID NO: 289425 - DNA, 201 bp, Homo sapiens
atcaaagcaatcaaagaagccacaccacaggcagcctgcttcaccttcccttccctccctccctcccttcctccctccctccgtccctgcctgcctgcctkccttccttctttccttccttccttccttccttccttccttccttccttccttccttccttccttccccttccttccttccttccccctcccctcccctcc

SEQ ID NO: 289426 - DNA, 201 bp, Homo sapiens
tgccgggcctagagcagtgcctggcccaccgtgggtgcttgggaccctggcattgactcaggggagcagacgtgggcaggaccaaccagtgagctatctgwggggggggtctgcaccccatccttctccacctcctcctctctgctgttgatgtgtgcggatccccagaggagtggagcagccacccttgggggctgtccc

SEQ ID NO: 289427 - DNA, 201 bp, Homo sapiens
ccgggaggttgaggctgtagtgggccatgattgaaccactgcactctagcctgtgtgacagagggagactccatctcaagaaaataataataataataatwattataataataataattattattattatttttaaaaattttttctctggctgctttgctgccagcttcaccccagaagtccattctctgtgaggttccg

SEQ ID NO: 289428 - DNA, 201 bp, Homo sapiens
actgcactgcagcctgggcaacagagtgagaccctgtcccaaaaagaaaataatggtgggtgggctggggggtagaaaaggacgctggacaggccgggcgyggtggctcacgcctgtaatcccagcacttcaggaggccgaggagggcagatcacgaggtcaggagattgagaccatgcaggctaacacagtgaaaccccg

SEQ ID NO: 289429 - DNA, 201 bp, Homo sapiens
aagatttgagagagacagagagagggagagagagaaagagaatgagagatatatggggaaggagggggacggaagatttgagagagacagagagagggagrgagagagagagaaagagaaagagaggagatcttagtgatagtgagagagaaagagagattcagagatagagaggagatcccagagagagagagtgggaga

SEQ ID NO: 289430 - DNA, 201 bp, Homo sapiens
aaaatacaaaaaaattagccgggcgtggtggcaggtgcctgtagtgccagctactcgggaggctgaggcaggagaatggcgtgaacccgggaggcggagcytgcagtgagccgagatcgcaccactgcactccagcctgggcaacacagcgagactctgtctcaaaaaaaaaaaaaaaaaaaaaaaggacgttggatgagg

SEQ ID NO: 289431 - DNA, 201 bp, Homo sapiens
taacttgcctgcccttgctcgtcctccaggtgtgtctgacgctgaccgccaagcgcatggcccggaagaactgcctggtgaagaacctggaggctgtagaraccctgggctccacgtccaccatctgctcagataagacagggaccctcactcagaaccgcatgacagtcgcccacatgtggtttgacaaccagatccacg

SEQ ID NO: 289432 - DNA, 201 bp, Homo sapiens
ctgcccgaggagcagttccccaagggctttgccttcgactgtgatgacgtgaacttcaccacggacaacctctgctttgtgggcctcatgtccatgatcgrcccaccccgggcagccgtccctgacgcggtgggcaagtgtcgcagcgcaggcatcaaggtgtggcttggggtggctgggggaggcaaagccaggcgtggg

SEQ ID NO: 289433 - DNA, 201 bp, Homo sapiens
tctcaagcccaaccagggggaagccagggaccctgggggataccccctctgccagcctgggctgggggtcaagggagcttcccagagtggacagggatggmtgagccaagtcaggggccatgctgtgacgtccacatagactagtgccagggagtcgcaggcagaggaaccggtacacaggcaaggcggtgtgaggggctg

SEQ ID NO: 289434 - DNA, 201 bp, Homo sapiens
ggctccctggcatgggcgcctgctctgagcctgcctgtgccacaggccgcctgatcttcgacaacctaaagaagtccattgcctacaccctgaccagcaayatcccggagatcacgcccttcctgctgttcatcatggccaacatcccgctgcccctgggcaccatcaccatcctctgcatcgatctgggcactgacatgg

SEQ ID NO: 289435 - DNA, 201 bp, Homo sapiens
gcctctcctcggcttcctctctcctccttccaggaatgatccaggctctcggtggcttcttctcttactttgtgatcctggcagaaaatggcttcttgccyggcaacctggtgggcatccggctgaactgggatgaccgcaccgtcaatgacctggaagacagttacgggcagcagtgggtgagtagggcagggtgctgtg

SEQ ID NO: 289436 - DNA, 201 bp, Homo sapiens
ggcatccggctgaactgggatgaccgcaccgtcaatgacctggaagacagttacgggcagcagtgggtgagtagggcagggtgctgtgtctctgcccaccrtaagatccccggggtgagctgttccagccatgcatggccacttcctacgatggccccctcagtctcccatggcagcatcaaggcctttgctgggcacctg

SEQ ID NO: 289437 - DNA, 201 bp, Homo sapiens
ttttccaggccctcaggattctctgggggctgggcagctgggctgtggccctcgtgtcgctcatccaaccctgctgccgggcttgtccctgtaacttgcckgcccttgctcgtcctccaggtgtgtctgacgctgaccgccaagcgcatggcccggaagaactgcctggtgaagaacctggaggctgtagaaaccctgggc

SEQ ID NO: 289438 - DNA, 201 bp, Homo sapiens
ctttctccttgcagagggatgtggctggggatgcgtctgagtctgccctgctcaagtgcatcgagctgtcctctggctccgtgaagctgatgcgtgaacgmaacaagaaagtggctgagattcccttcaattccaccaacaaataccaggtactctgggctttccgggagagccagcctggacctcaggttccttatgacg

SEQ ID NO: 289439 - DNA, 201 bp, Homo sapiens
ttcagctactggcctcacctcggccctgcctgtgtcctcccctcagctgtccctgttctgacaaccctttctccttgcagagggatgtggctggggatgcrtctgagtctgccctgctcaagtgcatcgagctgtcctctggctccgtgaagctgatgcgtgaacgcaacaagaaagtggctgagattcccttcaattcca

SEQ ID NO: 289440 - DNA, 201 bp, Homo sapiens
cttcaattccaccaacaaataccaggtactctgggctttccgggagagccagcctggacctcaggttccttatgacgcctgtaaagaggtgtcatagagcsttgattttcccgtctgtaaaatgggaatgataatacccgcctggtggggagaggaacagggagagcttgagagtgggagccggatctctgttggagtgag

SEQ ID NO: 289441 - DNA, 201 bp, Homo sapiens
accaggtactctgggctttccgggagagccagcctggacctcaggttccttatgacgcctgtaaagaggtgtcatagagccttgattttcccgtctgtaaratgggaatgataatacccgcctggtggggagaggaacagggagagcttgagagtgggagccggatctctgttggagtgagacgctgaggagtaaagatct

SEQ ID NO: 289442 - DNA, 201 bp, Homo sapiens
aattagctgggcatggtggcacatgcctatagtcccagctacttggcaggctgaggcaggagaatcgccagaacctgggaagcagagattgcaatgagccragatcgcactactgcactccagcctgggcaacaagagcaaaactccgtctcaaaaaataaataggctgggcaccatgggctcacgcctgtaatcccacca

SEQ ID NO: 289443 - DNA, 201 bp, Homo sapiens
taatcccagcactttgggaggctgaagagggtggatcacaaagtcaggagatcgagaccatcctggctaacaaggtgaaaccccgtttctactaaaaatamaaaaaattagccgggcgtggtggcaggcgtctgtagtcccagctacttgggaggctgaggcaggagaatggcatgaacccggggggcggagcttgcagtg

SEQ ID NO: 289444 - DNA, 201 bp, Homo sapiens; identical to SEQ ID NO: 59752

SEQ ID NO: 289445 - DNA, 201 bp, Homo sapiens
gttttgagtaggggtcctgtgatgtcttgaatgcaaagatatgtactttagatttcaacacacacacacacacacacacacacacacacacacacacacccacggtgttttgagtaggggaagcccacgagtagataggctcactaaagccctggcgcggccttagagtggctccttagaagggagcctcgaattttcaca

SEQ ID NO: 289446 - DNA, 201 bp, Homo sapiens
ttctctttctgcaccttcttctaccctccaagcaggtcctatggtgtcttgaatgcaaagatatgtagtttatatgttatgccacgcgcgcgcacacacayacggtgttttgagtaggggtcctgtgatgtcttgaatgcaaagatatgtactttagatttcaacacacacacacacacacacacacacacacacacacac

SEQ ID NO: 289447 - DNA, 201 bp, Homo sapiens
ggtgttttgagtaggggtcctgtgatgtcttgaatgcaaagatatgtactttagatttcaacacacacacacacacacacacacacacacacacacacacmcccacggtgttttgagtaggggaagcccacgagtagataggctcactaaagccctggcgcggccttagagtggctccttagaagggagcctcgaattttc

SEQ ID NO: 289448 - DNA, 201 bp, Homo sapiens; identical to SEQ ID NO: 59750

SEQ ID NO: 289449 - DNA, 201 bp, Homo sapiens; identical to SEQ ID NO: 59751

SEQ ID NO: 289450 - DNA, 201 bp, Homo sapiens
ctgggcaacagagcaaaactctgtctcaaaaaaaaaaaaaaaaaaaaatttgcaagtggatgcagcaccactgcactcccttatattctcaccttgactcygcatttctcccctttggaattcagagtgccaagccccggctggactgcttgattgaagtatacaggagctgccaggagatcctggcacaccagaaagcca

SEQ ID NO: 289451 - DNA, 201 bp, Homo sapiens; identical to SEQ ID NO: 59760

SEQ ID NO: 289452 - DNA, 201 bp, Homo sapiens
gaggtagaggttgcagtgagccgagattgcgccactgcactgcagcttgggcaacagagagagactctgtctcaaaaataaataaataaaggaaaaagaaraaaagaatgcaaaatgagtttcacttagactttgctatttgatttattttcttacagcagaaggtgatttactacctctgcatcttattgaaagatccag

SEQ ID NO: 289453 - DNA, 201 bp, Homo sapiens
gcctggcgctgcagcgccgctactactccccgtcctgccgggaattctgcctcagctgccctcggctctcgctgcgttcgctcaccgctgtcacctgcackgtgtggctggcggcctacggactcttcaccctctgcgaggtaatggcaagtcggcccctccccgcgctcgaaggagggggttcggctttgggagggtctt

SEQ ID NO: 289454 - DNA, 201 bp, Homo sapiens
gaggctgcgcaggcttagggcggggcgtggtgacgcggctgccggaagcgggtctggagcgggcgagacgaccagggccggcgagcgcagtgcagcgccgygcggtgcgggcggccgagtgggggcgtcatggaggatgagcggagcttttcggatatctgcggcggccgcctggcgctgcagcgccgctactactccccg

SEQ ID NO: 289455 - DNA, 201 bp, Homo sapiens
ttctacatctctaaaatagaattcatgcctgccataccagcttcatgatattgtgagggttaaatgcagtaactttgtgacagctctcaaataaaaagaaytatcctaattttcaggataagttctagtttcatatgtagtgcctgaattgaatgtattatcccagaagtgatctaatcagagctaagtacagcagggcta

SEQ ID NO: 289456 - DNA, 201 bp, Homo sapiens
gaattgaatgtattatcccagaagtgatctaatcagagctaagtacagcagggctatttatttttgtaacttggatattgtttccattactgcatccattygcttttttgctgtcaaagcgtgtttcagagcatggtaatttagcatagaaatatgcagaattaagactgccctaattgcaggaaactatctaactatcta

SEQ ID NO: 289457 - DNA, 201 bp, Homo sapiens
tgaggccatttacatggtaagtatttaaaaggtaagtattacaggcctctctggaggaggtagccagcccatgggatgttcccagatttaaactaaaaccrtaaaagtgagacttatatttaaaaggtaaatctctttatttttaaagagatgcagcaggttttcatggatagggaattagcatttcaactttatcttcaa

SEQ ID NO: 289458 - DNA, 201 bp, Homo sapiens
caggctcaagccattctcccacctcagcctcctgagtagctgggactacaggcatgcaccaccatgcttggctcgttttttctatgttttgcagagatgcrgtctcactatgttgcctaggctggtcttgaattcctgggctcaagccatcctcctgctgtggcctccccaagtgttcagtttacaggtttgagccactac

SEQ ID NO: 289459 - DNA, 201 bp, Homo sapiens
taagtcagttaaaatgatgattaagttgacttgatagcccccctaaaatttaatttattgtatagttgaattttagtactagcctgagttcttatagcctrtgtatgtggtcatgtgaggaggaggaaatagatatttattaaatgcccactgactgccagatgctttactgaattccttactttagccctagaacgaagg

SEQ ID NO: 289460 - DNA, 201 bp, Homo sapiens
gactcatttgattccggctcttgtcatcttactgctgacacccttagtgtgccctacttgtcctccacctggtcctccaagtgcagaaactgcacttccaacccttagcgtcctctagttgtcctctactagctctccactgggtctggcagaggccatagtagttccaggtatctaaacctcatgatgaagggaacgtct

SEQ ID NO: 289461 - DNA, 201 bp, Homo sapiens; identical to SEQ ID NO: 59762

SEQ ID NO: 289462 - DNA, 201 bp, Homo sapiens
ggacctctggtcggcccctcctacagtgataggacaggagggcgggaactcacgggttctggggacgatattccgctgctggacagctctttaaatgacgwttagtgaaatgtgtgctcctggatagtacattccccttccgtggctgtgctctgctcggtgggttcactcagcatacatctagttcttgcgcgacggcct

SEQ ID NO: 289463 - DNA, 201 bp, Homo sapiens
tcgcttgaacctgggaggtggaggtagcagtgagccgagatcacgccactgcactccagcctgggcaacagagggagactctgtctcaaaaaaaaaaaaaaaaagtttgttcataagtcagttaaaatgatgattaagttgacttgatagcccccctaaaatttaatttattgtatagttgaattttagtactagcctgag

SEQ ID NO: 289464 - DNA, 201 bp, Homo sapiens
ctcacgcctgtaatcccagcactttgggaggccaaggcaggcggatcacctaaggtcgggagttccagaccagcctgaccaacatggtgaaaccccatctstactaaaaatacaaaaaattagccgggcatggtggcgagcgcctgtaatcccagctacttgggaggctgaggcaggagaatcgcttgaacctgggaggta

SEQ ID NO: 289465 - DNA, 201 bp, Homo sapiens
tggtaagtatttaaaaggtaagtattacaggcctctctggaggaggtagccagcccatgggatgttcccagatttaaactaaaaccataaaagtgagactkatatttaaaaggtaaatctctttatttttaaagagatgcagcaggttttcatggatagggaattagcatttcaactttatcttcaagaccaacttcaaaa

SEQ ID NO: 289466 - DNA, 201 bp, Homo sapiens
cccagctacttgggaggctgaggcaggagaatcgcttgaacctgggaggtagaggttgcagtgagccgagattgcgccactgcactgcagcttgggcaacrgagagagactctgtctcaaaaataaataaataaaggaaaaagaaaaaaagaatgcaaaatgagtttcacttagactttgctatttgatttattttcttac

SEQ ID NO: 289467 - DNA, 201 bp, Homo sapiens
ataaataatagacaccattttttgagcccttaacacatcacttagtcaactgtaagtaacacagaacaactaaaatagccttaagagataaggaccttttmtattaacaagaagtcataaggtaggagggctccagagttcacgtggagactcatttgattccggctcttgtcatcttactgctgacacccttagtgtgcc

SEQ ID NO: 289468 - DNA, 201 bp, Homo sapiens
aggcatgtgccaccacacctggctaatttttgtattttttgtagagacagggtctcactaggttgcccaggctggtcttgaactcctggcctcaagcgatycccccatgttggcttcccaaagtgttgggattataggcatgagccaccatgcctggcccaaacattttcattaaaagactagatagtaaatatagcaggt

SEQ ID NO: 289469 - DNA, 201 bp, Homo sapiens
acacctggctaatttttgtattttttgtagagacagggtctcactaggttgcccaggctggtcttgaactcctggcctcaagcgatccccccatgttggcytcccaaagtgttgggattataggcatgagccaccatgcctggcccaaacattttcattaaaagactagatagtaaatatagcaggttctgtggggtctgt

SEQ ID NO: 289470 - DNA, 201 bp, Homo sapiens; identical to SEQ ID NO: 59766

SEQ ID NO: 289471 - DNA, 201 bp, Homo sapiens
ttcagaacagcatgatcctctctgctgccatcttcatcaccctcttaggtctgcttggttatctccattttgtgaagattgatcaggagactctgttaatyattgattcccttggcattcagatgacttcatcttatgcttcaggcaaagaaagcactaccttcatagaaatgggcaaggtcaaggatattgtcatcaatg

SEQ ID NO: 289472 - DNA, 201 bp, Homo sapiens
agtcaactgtaagtaacacagaacaactaaaatagccttaagagataaggaccttttctattaacaagaagtcataaggtaggagggctccagagttcacrtggagactcatttgattccggctcttgtcatcttactgctgacacccttagtgtgccctacttgtcctccacctggtcctccaagtgcagaaactgcact

SEQ ID NO: 289473 - DNA, 201 bp, Homo sapiens; identical to SEQ ID NO: 59770

SEQ ID NO: 289474 - DNA, 201 bp, Homo sapiens
tttgtatttttagtagtgatggggtttcaccatgttggccaggatggtctcgatctcttgaccttgtgatccacctgccttggcctcccaaagtgctaggrgtacaggcgtgagccacctcactcggctgggtcctttcgatttttagagacagtgtcttatgctggtacccaagctagagtgcagttctatgatcatagc

SEQ ID NO: 289475 - DNA, 201 bp, Homo sapiens
ttctatgatcatagctcactgcagcctcgaactcctgggctcaaacgatcctcctgcctcagcctccctagtagctggaattacaggtgcaagctactgcrttcagctgatttaggccctaaagttggaattttggaagaaaaatttctgagattgctgtgatggacattttgctgatggaggtttcccctagacctatcc

SEQ ID NO: 289476 - DNA, 201 bp, Homo sapiens
actctgagaccctttcttttcctttataccattgtatagctgatcttaggcaaaatttaaaaacaaaagcctgcttttatgccaggtcccttctgtacttrtctctctcatgccggtgtactctgcttacccccatcaagtacccgaggaatcagtgaccgcatcttcctttaaactctactgcaacactttctaagggct

SEQ ID NO: 289477 - DNA, 201 bp, Homo sapiens; identical to SEQ ID NO: 59759

SEQ ID NO: 289478 - DNA, 201 bp, Homo sapiens
cttttttagcttaatatgtaggtaaaggcattaaatttgtatctctttaaatgataggcttttcatatttccttgtattacctatcagtatttcctcttaytttaaactacctatcttctctattagtcaagtagaatctgaatattatgtatttgtatctatttttatatatttttaacaattctttatatattttaggt

SEQ ID NO: 289479 - DNA, 201 bp, Homo sapiens; identical to SEQ ID NO: 59761

SEQ ID NO: 289480 - DNA, 201 bp, Homo sapiens
gcagagctctcggcgcgcaactgaggctgcgcaggcttagggcggggcgtggtgacgcggctgccggaagcgggtctggagcgggcgagacgaccagggcsggcgagcgcagtgcagcgccgtgcggtgcgggcggccgagtgggggcgtcatggaggatgagcggagcttttcggatatctgcggcggccgcctggcgct

SEQ ID NO: 289481 - DNA, 201 bp, Homo sapiens
tttacatattaaactgcacttcttgtgtttgagggctgttttacaacttgtgacatttctcaagggtccattttgtttttcctcttgcttattcttagagrtggagttcatgaaatttagacagattaaaaagctatcatttgatctcccacctcgcatagttcacaagctgtgctgtaagcctagctgggactctttcca

SEQ ID NO: 289482 - DNA, 201 bp, Homo sapiens
ggaagcgggtctggagcgggcgagacgaccagggccggcgagcgcagtgcagcgccgtgcggtgcgggcggccgagtgggggcgtcatggaggatgagcgragcttttcggatatctgcggcggccgcctggcgctgcagcgccgctactactccccgtcctgccgggaattctgcctcagctgccctcggctctcgctgc

SEQ ID NO: 289483 - DNA, 201 bp, Homo sapiens
agcccccagcagagctctcggcgcgcaactgaggctgcgcaggcttagggcggggcgtggtgacgcggctgccggaagcgggtctggagcgggcgagacgrccagggccggcgagcgcagtgcagcgccgtgcggtgcgggcggccgagtgggggcgtcatggaggatgagcggagcttttcggatatctgcggcggccgc

SEQ ID NO: 289484 - DNA, 201 bp, Homo sapiens
gtatgctcattatagttacccagtttgtcgtattctgttacagtaccacaaaatggaccaagacacctcgtaccttggttttaccatttcttttctgtgtygccttttccttttgttgttttcgaagctggctttacttctcatatgagtttactaacagtataacttcaaggagtccagaaataagcatttctttttttt

SEQ ID NO: 289485 - DNA, 201 bp, Homo sapiens
agaaggccttcatcagatgccagccccttgatcttggacttctcagcttccataatcataagccagtttctgtatgctcattatagttacccagtttgtcrtattctgttacagtaccacaaaatggaccaagacacctcgtaccttggttttaccatttcttttctgtgtcgccttttccttttgttgttttcgaagctg

SEQ ID NO: 289486 - DNA, 201 bp, Homo sapiens
gatatagctaaattatttcctataaccagggcacttttgatgctgttactgagacatatttattgtcctgcttaagatacaagtttccttgtttactttcytcaaaaatatagtgtacactcataactctggacacactcttcctgtattttaattaaatccaagtatcctttttttttttctcgctctgtctccaggctg

SEQ ID NO: 289487 - DNA, 201 bp, Homo sapiens; identical to SEQ ID NO: 59783

SEQ ID NO: 289488 - DNA, 201 bp, Homo sapiens
ggagtccagaaataagcatttctttttttttttttactactccaggcatctctgaccaatgtgaatagcaggatctcagctatatgacattgtccaaggcyctgtagaatgggccttatggacttacttgaagaagatggatatacatgggtgtcaggcaggcactaatattaaattatataaataggggaatataaagac

SEQ ID NO: 289489 - DNA, 201 bp, Homo sapiens; identical to SEQ ID NO: 263954

SEQ ID NO: 289490 - DNA, 201 bp, Homo sapiens; identical to SEQ ID NO: 59784

SEQ ID NO: 289491 - DNA, 201 bp, Homo sapiens; identical to SEQ ID NO: 59785

SEQ ID NO: 289492 - DNA, 201 bp, Homo sapiens
gtgagatggaagtataaattactgtgagcagtacttctgatgtcaccatgggcaaaagagtccatatgtgaaggtcacatgcttatttacatccttttctsttttgggctattctgcaaaatcaagtcctgtcttaccctctcttcatgccacccccaaccaggctctggcgttacgacgtattctgtacaccctggcaca

SEQ ID NO: 289493 - DNA, 201 bp, Homo sapiens
ataccccagagggatttttctggaaaaaaaaaaaatatatgtgtgtatatatatatatatatgtgtgtgtgtgtatatatatatatgtgtgtgtgtgtgtrtatatatatatatatatattccaggagctgtattcccaactcagcagggttatgggagtcgggccagagctggacttttatagttgtctctttcattcct

SEQ ID NO: 289494 - DNA, 201 bp, Homo sapiens; identical to SEQ ID NO: 59786

SEQ ID NO: 289495 - DNA, 201 bp, Homo sapiens
tggttaaggagaagaaagaactaagtacaggtcctactaagttgtcactcctggagctacatacagtaaggggatgtgggaaacagcctagaggcttgttytctgaggagggaggtgatggtttgtggggaccatgagttaatctgcctccctgtcagcattttcgcactatgcaggtagcttcaatggctaagagtatgt

SEQ ID NO: 289496 - DNA, 201 bp, Homo sapiens
aatgaatattattaatttatttttctttacctatttgctaatcagatacctctgttgtgaagaaagggtaaaaatgtgtgttttttaaaaaaatgttggarataacattagatttataatgccagctcaaaaacagagctgaccatttctctttcatatgttggctgacaggagctcgagtatatttagcttgccgggatg

SEQ ID NO: 289497 - DNA, 201 bp, Homo sapiens
ggcagagatggttgagctcatgttcccgctgttgctcctccttctgcccttccttctgtatatggctgcgccccaaatcaggtctgtgcaaatgtattgcsttctcttgagaattcttgttgcggggcgggagggaaacatagaatccccaccaaagctttcttggaaaactcccctgggggggctccaagatggcggagc

SEQ ID NO: 289498 - DNA, 201 bp, Homo sapiens
ccggagactaaaaggtgggcctagaggaaatgaatgtggagacatgagtcagagagaggcaggtaaaagccacaggaatggaaactgtttccagagcccaycacctggagaggacctgcttccgtggctataattgggtacagttttagtaagtagtctacaactgaatattggaggtggctggctgggacagtgagactc

SEQ ID NO: 289499 - DNA, 201 bp, Homo sapiens
cctgggaaagtagttgtggtcacaggagctaatacaggtatcgggaaggagacagccaaagagctggctcagagaggcaagttcacctcctttcaattccytcctattactgctgttttacccctcacagtaatgatgattcattctcattgtttcttcccagttttggaattcaagaacacctaaggattccactgattt

SEQ ID NO: 289500 - DNA, 201 bp, Homo sapiens
caaagatttactactgtctttagtaaagacagttttctgttactaaacagaataccacagactgggtaatttctaaagaaatttacttagctcatggttcyggaggctgagaagtctaagaacatggtgcctggcatttggttagggccttcttgctgtgtcataatatggcagagggcatcacatggtgagagggcaagc

SEQ ID NO: 289501 - DNA, 201 bp, Homo sapiens
tgtcacagcaagctagccaacatcctcttcacccaggaactggcccggagactaaaaggtgggcctagaggaaatgaatgtggagacatgagtcagagagaggcaggtaaaagccacaggaatggaaactgtttccagagcccatcacctggagaggacctgcttccgtggctataattgggtacagttttagtaagtagt

SEQ ID NO: 289502 - DNA, 201 bp, Homo sapiens
aggaattcgggtcagggtggcaaagcaaagcgcgatgacagtgaggacgacgtctagacgcaaacatacatcaaatcgggccgaagcccgctgtcgccgcrcgggctgaacctggcacccggagcaacgcgcgaccccgggacgagacgctctcgtccgagccaaactacatcccccggcgtgcactgcagcgcccgcccc

SEQ ID NO: 289503 - DNA, 201 bp, Homo sapiens; identical to SEQ ID NO: 59781

SEQ ID NO: 289504 - DNA, 201 bp, Homo sapiens
ggcggctcacgcctgtaatccctgcactttgggaggctgaggtgggcaaactacttgagcccaggagttcaagaccagcctaggcaacataatgagacccyatctctataaaaaatgcaaaaattagccaggcgtggtggcgtgtccctgtggtcctggctacttgggaggctgagataggaggatcacctgagcctgggg

SEQ ID NO: 289505 - DNA, 201 bp, Homo sapiens; identical to SEQ ID NO: 59782

SEQ ID NO: 289506 - DNA, 201 bp, Homo sapiens; identical to SEQ ID NO: 263993

SEQ ID NO: 289507 - DNA, 201 bp, Homo sapiens
gatttgaaactgggcagtctgtctacaaaatccatgcccataaccaccacattgtgttgactcccagtgtgtctgcagttcagaggagcagtttggactgyggacaaaatgtgagcaccatagaattatggagagggagtctggtgagccacgagaactccaacatttaatgtttgtgtagaagatgatgaactggtccag

SEQ ID NO: 289508 - DNA, 201 bp, Homo sapiens
ctaagagcaatgggaaactgttaaaattaaagccttttcaaaatgggggcaagaggggttgcagcagttgatttcatcagcagaggtgagaaatgagggtrgtttggactaggtggtggaattggagggtagtagaaacttctgagagagatttggtttgggaaagcttgttgactggagatgcatgctttaggtgggcat

SEQ ID NO: 289509 - DNA, 201 bp, Homo sapiens; identical to SEQ ID NO: 263970

SEQ ID NO: 289510 - DNA, 201 bp, Homo sapiens
gtaataaagatctgagctgagactggtgaggtaggtagatgccaaacccttagaggccacagtaaggattttagtgtttattctaagagcaatgggaaackgttaaaattaaagccttttcaaaatgggggcaagaggggttgcagcagttgatttcatcagcagaggtgagaaatgagggtagtttggactaggtggtgg

SEQ ID NO: 289511 - DNA, 201 bp, Homo sapiens; identical to SEQ ID NO: 263973

SEQ ID NO: 289512 - DNA, 201 bp, Homo sapiens
tagcagagacgggggtttcaccatgttggccaggctggtcttgaactcttgacctgaagtgatccgcccgcctcggcctcccaaagtgctgggatgacgcstgagccaccatgcccgacgtgaagacaggaatttatacccatggagtgcaagaagggaccttgtaatttttaacacgtgacacttagtggcagatgagac

SEQ ID NO: 289513 - DNA, 201 bp, Homo sapiens; identical to SEQ ID NO: 59787

SEQ ID NO: 289514 - DNA, 201 bp, Homo sapiens
taggcctcagatgaaagaaactattgaacagggaacctatttattcacagagaacatattcatggccttaattcaagacaggattaaatactttcacgagytggcaaaaccaactgtgccaatctgagatattcattgctaccctgggagttaatgtatgtgacccaagccatcaggaagacgatattctattatcaatga

SEQ ID NO: 289515 - DNA, 201 bp, Homo sapiens
acatgttactctgatacagtaagtcacctgacagagttaccatcttacatatttaaataaaaagtcaatgctgtcttattaataacatgttatcagtcaawtattaatgtttaatatgacatggactacctcaaccatatctagcatagatctaaaataatttaaaaaaatttttctgttccaaaccatgtgagaagacca

SEQ ID NO: 289516 - DNA, 201 bp, Homo sapiens
ttctcaattcctcttcttttgtgtatgtatatgtgttagccattttttatttccacccttaagttaccaattatataaatggaaaacgtgcttttccttayaaaattaatattttaatataggaggctttcaaggttcctgaccttgaaagaggttttcttttccgacttctactttaaatcaaatatgtcttttcctata

SEQ ID NO: 289517 - DNA, 201 bp, Homo sapiens
aaagattaatactgacttccatacacataagaagcattaaaggaagcctggttatcttttgagacgaagtctcgctctgtcacccaggctggagtgcagtkgcgcaatcttggctcaccgcaacctccgccttccaggttcaagggattcgcatgcctcagcctcccgagcagctgggattacaggggcccgccaccatgc

SEQ ID NO: 289518 - DNA, 201 bp, Homo sapiens
ctatccagtgggtccctgtaggtttatttctgaagagtctgctaaataaagtctttctctttttctgcagcactacagttatccaaaatgtcaataaagckcaagtgaagattcgagcgaagaaagataatgtagcaggtaacgtttcaaccttttagaaaccctttggggagaaaagaggtgacattttaaaattaacct

SEQ ID NO: 289519 - DNA, 201 bp, Homo sapiens
tgtttcatggcttccctttgctgctgaaagcttttcccttaatagcagaaagaaaaagaagggtaaaatatttaagataaaaggataagaattttttttttaatcaagaagggaaaacactagacatatctcttcacttatattcccttccaaatccttttgccaacacaggagtaatgtcagctatgatgtgtaagcctc

SEQ ID NO: 289520 - DNA, 201 bp, Homo sapiens
aggcacttcatgtttacattcaatgaagattagtgaattcatctttccatatttgttattattctgaattatctccttttggggaattttatagggaagayattttactctaattaaaaatgttgtctgactggtcctttcaggttatgaactgactggtttagccagaggtggggaacagttggctaaattaaagaggaa

SEQ ID NO: 289521 - DNA, 201 bp, Homo sapiens
ataactataaatgtgttcccgtgaacaaaaccacataactcaaattgaagaactctatttattcattcatttattctttaaatttttttgcagaaacgagrtctccatatgttggccacgcttgtcttgaactcctggcctcaagtgatcctcccgcctcagtctcccaaagtgctgggattacaggtgcaaaccaccaca

SEQ ID NO: 289522 - DNA, 201 bp, Homo sapiens
taaaagagatattaatcacaaatatagaggataaaatttaaaactcattaaatctttttagttacataatctgtcaattagcattaaaggatatttattttagaaaaaaatttattaaagttgatcaaacctcatttagcttttatggaatattataatgatctataatgttttatctttattagtttaatgtgtgctgct

SEQ ID NO: 289523 - DNA, 201 bp, Homo sapiens; identical to SEQ ID NO: 59795

SEQ ID NO: 289524 - DNA, 201 bp, Homo sapiens
ataaaagagatattaatcacaaatatagaggataaaatttaaaactcattaaatctttttagttacataatctgtcaattagcattaaaggatatttattttagaaaaaaatttattaaagttgatcaaacctcatttagcttttatggaatattataatgatctataatgttttatctttattagtttaatgtgtgctgc

SEQ ID NO: 289525 - DNA, 201 bp, Homo sapiens
aataaaagagatattaatcacaaatatagaggataaaatttaaaactcattaaatctttttagttacataatctgtcaattagcattaaaggatatttattttagaaaaaaatttattaaagttgatcaaacctcatttagcttttatggaatattataatgatctataatgttttatctttattagtttaatgtgtgctg

SEQ ID NO: 289526 - DNA, 201 bp, Homo sapiens
tttttaaattttttaccttcacctgttgactttctaatagctgtttgcactaagtaggcagcaagctagttgtggggaaataaagatgaggactatcccgrggtagtgacaactgcagaactcctaggacgtgatgactcagtcaaaacttctgcactgaaagacatcgacactagtttatcttctagcaatgtaaggcct

SEQ ID NO: 289527 - DNA, 201 bp, Homo sapiens
aaaataaaagagatattaatcacaaatatagaggataaaatttaaaactcattaaatctttttagttacataatctgtcaattagcattaaaggatatttattttagaaaaaaatttattaaagttgatcaaacctcatttagcttttatggaatattataatgatctataatgttttatctttattagtttaatgtgtgc

SEQ ID NO: 289528 - DNA, 201 bp, Homo sapiens
ttggcgagtacaatacagaggtcacaatcattggctacagattacaaatacaagctaaaatgttctacatgcaagtaaatcatgaagtaaaacttcatgawtcagaaacaaatcagtgtcattttcagcgtcagtaggttgcatattaatcagtatgtcagcagtctgagaaacttaagatttccttactcagggacagga

SEQ ID NO: 289529 - DNA, 201 bp, Homo sapiens
cctggcccaattcacaatatttttaagatcctaccattcactgtaagaatatactgtgaagccatatatatatatacacacacacacacacacacacacamgtgtatatatgtgtatatatgtatatatatacacatataatacatattatatacatataattttagcttgctcttttatgtaatgaaatgtaagtgaatg

SEQ ID NO: 289530 - DNA, 201 bp, Homo sapiens
gagtcttcaatgactgtaaagagacattttgatttttaaaataatttgcatcatttaattacttcctaataatactgatatatatatatatatatatattwgattaagggacttgctctgttgcctaggctagagtgcagtggtgtgatcacagctctctgcaacctcaatctgctgcactcaagtggcccctcatctcag

SEQ ID NO: 289531 - DNA, 201 bp, Homo sapiens
agagtcttcaatgactgtaaagagacattttgatttttaaaataatttgcatcatttaattacttcctaataatactgatatatatatatatatatatatwagattaagggacttgctctgttgcctaggctagagtgcagtggtgtgatcacagctctctgcaacctcaatctgctgcactcaagtggcccctcatctca

SEQ ID NO: 289532 - DNA, 201 bp, Homo sapiens
ataaggatgcggtaccagggaatgaactagtaagagtaatatccgtcatttttgaagaatgcagatattaatattctacttaagaaggttgttttaagaaycagacataatgtatacgctgaatacaatggctagcatagaccgacatttacatatagtggctacaaccagtgttatcagagaaagctggaatactttcct

SEQ ID NO: 289533 - DNA, 201 bp, Homo sapiens
aacctttttcctcttctttttattcttctttgcacaccacagttttcctgttgagcaatcataaacataactataaatgtgttcccgtgaacaaaaccacrtaactcaaattgaagaactctatttattcattcatttattctttaaatttttttgcagaaacgagatctccatatgttggccacgcttgtcttgaactcc

SEQ ID NO: 289534 - DNA, 201 bp, Homo sapiens
tggtgtttcaccatgttggccaggctggtctcaaaactcctgacctcaagcaatccacctgccttggcctgccaaagtgctgggattacacgcatgagccmccgtgcctggcccttgattattctttaaaatgaaatgatgatttagattgggtgcctcctacataaaaactgagagaagaaactagaattcagctgttat

SEQ ID NO: 289535 - DNA, 201 bp, Homo sapiens
tgataggtctcttcctatttgctggctgatgataaagtgacatttcctcataggttaagatctcctcgttgtcataatctttgggaaaaaaaagttaagcycttcaaacaaaattatggccatgtattaaagatataaatactcatagatcttcacccaaaattagacaaaagcacaatttattgtcattacatccttgct

SEQ ID NO: 289536 - DNA, 201 bp, Homo sapiens
ccttcacttgataagacctcttgtgagaccagtcagtgcagagtcagccagtgataattgttctctttaaggggaggcacatgtttggggtacagtgaacrtaggttggagccttagtttgagcattgggaaagtcagtggaatcaaaagtctggttcaagtccctgccctgccttttcttcactgagtaactttgagaaa

SEQ ID NO: 289537 - DNA, 201 bp, Homo sapiens
actatcaacaatacattatgttaaatgcacacattgagatggatagctccttctcaggctggaaactaaacgaccttcacttgataagacctcttgtgagrccagtcagtgcagagtcagccagtgataattgttctctttaaggggaggcacatgtttggggtacagtgaacgtaggttggagccttagtttgagcattg

SEQ ID NO: 289538 - DNA, 201 bp, Homo sapiens
agacccctctcgttccctttttagagcatttacgaaacaggcttacaattgttaatatgtatctcttccaactctgaagtgtcccttcaagtatctttgaragccatttctttgaaacgtaatcatcaggagggataggggctttgtctcccagtctgtgtgagaggatagaatagtaacttactaattgccaggtagtat

SEQ ID NO: 289539 - DNA, 201 bp, Homo sapiens
gctgctcttagagtttcaggaattaaaattgcccatttcacaaagatgccattccctaggaggaaaataaaattaacatggtaaattcaattttatcaacmagtttaccttttactataaactggctggaatatgcagtactacaatttgacttaaatttgatccagctctttgagcccaagttctagtatttactatcaa

SEQ ID NO: 289540 - DNA, 201 bp, Homo sapiens
ttagtacatgcgattttaaaacaccagtcatatgaaattatatccccttaaatcactgtgtctaggttatactgtgtctaggttatacaaccttattgttkaattttattacccaaacacttgtttttttgagaccgagtcttgctctgttgtccaggctgcagtgcagtggcatgatcacagctcactgcctcaacctcc

SEQ ID NO: 289541 - DNA, 201 bp, Homo sapiens
acattttttccttactttgcataaataagactgttatatagacagcacatgcctatataccttcgtcttttttaatgactgtatatcattccatcataggygaactctgatgtatttagcatttagcttgtttctcccttttgctattaccataaggctggagtacccatcttttaaaccttgcacgtgtttttgtacaca

SEQ ID NO: 289542 - DNA, 201 bp, Homo sapiens
tttctcccttttgctattaccataaggctggagtacccatcttttaaaccttgcacgtgtttttgtacacatgtgggaataaatttgtaggataaattcckcaaagtggaattgttggtcttgaaaataattgcatttaaaattttgatatatattagtggatagatttttaaatccttaatatacctccagtggaaacta

SEQ ID NO: 289543 - DNA, 201 bp, Homo sapiens; identical to SEQ ID NO: 59798

SEQ ID NO: 289544 - DNA, 201 bp, Homo sapiens
aattcaaagtgaagtagataaaaattccattagaacacggccagagaccaaccaaaagaaagatgctggccgggcacggtggctcacgcctgttatcccaktactttgggaggccgaggaggctggatcacgaggtcacgagatcgagaccatcctggctaacacggtgaaacccagtctctactaaaaatacaaaaaaaa

SEQ ID NO: 289545 - DNA, 201 bp, Homo sapiens
aggctacagtaaccaaaacagcatgctactggtaccaaaacagagatacagaccaatggaacagaacagagccctcagaaataataccacacatctacaaycatctgatctttgacaaacctgacaaaaagaagaaatggggaaaggatgccctatttaataaatggtgctgggaaaactggctagccatatgtagaaagc

SEQ ID NO: 289546 - DNA, 201 bp, Homo sapiens
gatggccaattcaaagtgaagtagataaaaattccattagaacacggccagagaccaaccaaaagaaagatgctggccgggcacggtggctcacgcctgtwatcccagtactttgggaggccgaggaggctggatcacgaggtcacgagatcgagaccatcctggctaacacggtgaaacccagtctctactaaaaataca

SEQ ID NO: 289547 - DNA, 201 bp, Homo sapiens
aggatggccaattcaaagtgaagtagataaaaattccattagaacacggccagagaccaaccaaaagaaagatgctggccgggcacggtggctcacgcctkttatcccagtactttgggaggccgaggaggctggatcacgaggtcacgagatcgagaccatcctggctaacacggtgaaacccagtctctactaaaaata

SEQ ID NO: 289548 - DNA, 201 bp, Homo sapiens
cttcaaactatactacaaggctacagtaaccaaaacagcatgctactggtaccaaaacagagatacagaccaatggaacagaacagagccctcagaaatartaccacacatctacaaccatctgatctttgacaaacctgacaaaaagaagaaatggggaaaggatgccctatttaataaatggtgctgggaaaactggct

SEQ ID NO: 289549 - DNA, 201 bp, Homo sapiens
caaaagaataaagctgaaggcatcaccctatccaacttcaaactatactacaaggctacagtaaccaaaacagcatgctactggtaccaaaacagagatayagaccaatggaacagaacagagccctcagaaataataccacacatctacaaccatctgatctttgacaaacctgacaaaaagaagaaatggggaaaggat

SEQ ID NO: 289550 - DNA, 201 bp, Homo sapiens
gccaggcactggtattaagtattttgtttatattacttcattacaacaaccataagaggcacatattattttaaccccctattttacagaggaaaaattgkagacacaggaaacttgagtagtcttaagttaaaaagctagaaagtagcaaatccagaatttaagtctaagcagtctaccttcagaatttttacaccctaa

SEQ ID NO: 289551 - DNA, 201 bp, Homo sapiens
tggttacattttgcatccagtgagtaacaccatcatcttcttagtttctatatctatttatttatttatttatttatttatttatttatttatttatttttgagaccaagtcttgctgtgttgcccaggctggagtgcagtagcacgaactcggcctcttcagtagccagtaccacaggcgtgcaccaccatgcctggcta

SEQ ID NO: 289552 - DNA, 201 bp, Homo sapiens
ttggttacattttgcatccagtgagtaacaccatcatcttcttagtttctatatctatttatttatttatttatttatttatttatttatttatttatttttgagaccaagtcttgctgtgttgcccaggctggagtgcagtagcacgaactcggcctcttcagtagccagtaccacaggcgtgcaccaccatgcctggct

SEQ ID NO: 289553 - DNA, 201 bp, Homo sapiens
atgtatacaggaaatgtactacaatatgggattggctgaagttatacataattccattctaaaggccaaagaattggccacattctatttaatatacttaygctgcaggtacaacataaaaacccaactacacgaaaaagtaactggaatactttattaaatagaggcatgaaagagtgagtttttctttgtgaaggcttg

SEQ ID NO: 289554 - DNA, 201 bp, Homo sapiens
gttggttacattttgcatccagtgagtaacaccatcatcttcttagtttctatatctatttatttatttatttatttatttatttatttatttatttatttttgagaccaagtcttgctgtgttgcccaggctggagtgcagtagcacgaactcggcctcttcagtagccagtaccacaggcgtgcaccaccatgcctggc

SEQ ID NO: 289555 - DNA, 201 bp, Homo sapiens
acttctatcattgagtaataaagcactattagaaataccaataccagcgcaggggctcccccgcctgtaatctcagcactttgggaggccaaggtaggtgratcacatggggccgggagcttgagaccagcctggccaacagggcaaaaccccgtctctattaaaaatacaaaaaatagccaggcgtgatggtgcacatct

SEQ ID NO: 289556 - DNA, 201 bp, Homo sapiens
tggccacattctatttaatatacttacgctgcaggtacaacataaaaacccaactacacgaaaaagtaactggaatactttattaaatagaggcatgaaaragtgagtttttctttgtgaaggcttgcattttcaatgttcttttaatattatgtactttctaccatattgtgtcttacctggaacaagcccggctagagg

SEQ ID NO: 289557 - DNA, 201 bp, Homo sapiens
ctggttggttacattttgcatccagtgagtaacaccatcatcttcttagtttctatatctatttatttatttatttatttatttatttatttatttatttatttttgagaccaagtcttgctgtgttgcccaggctggagtgcagtagcacgaactcggcctcttcagtagccagtaccacaggcgtgcaccaccatgcct

SEQ ID NO: 289558 - DNA, 201 bp, Homo sapiens
aaagagacaataaagacaaatgccctccaacttatttcttttgctaaagtgtctgattattccttttgataataataataataattattattattattatttatttcctggttccagattgtgtctttattcctctttctgacagacagcagagcatttgtctggcatatattctctcttaccacaatatagatgattttc

SEQ ID NO: 289559 - DNA, 201 bp, Homo sapiens
ttcaatcacagagaccagacttgcttccccctcaccggccgccgatcctcctcagcgtgcgcttcgctcactccaccgcgcatgcggaacctcctcgcatscgcaagcgctgaacgaatagaggcccctcttcatcattaaccatagagtctgggtcctccgagaacaaggacgaatgtagatcatggaaggacctgaaaa

SEQ ID NO: 289560 - DNA, 201 bp, Homo sapiens
ccaggctggtcttaaactcctaatctcaggtgatcctcctgcttggcctcccaaagtgccaggattaggggcatgagccactgtgcacggccaagactgtwttcttagtacaagtaactattactagaaggaaaattttaagagtattaaaatttaaaggggtcgggtgcagtggcttatgcctgtaatcccaacactttg

SEQ ID NO: 289561 - DNA, 201 bp, Homo sapiens; identical to SEQ ID NO: 59796

SEQ ID NO: 289562 - DNA, 201 bp, Homo sapiens
actcctaatctcaggtgatcctcctgcttggcctcccaaagtgccaggattaggggcatgagccactgtgcacggccaagactgtattcttagtacaagtwactattactagaaggaaaattttaagagtattaaaatttaaaggggtcgggtgcagtggcttatgcctgtaatcccaacactttgagaggccaaggtggg

SEQ ID NO: 289563 - DNA, 201 bp, Homo sapiens
gcatggcatcacctctgccttgatacaagatctgcttgttaaagccatgttcctgaatcttgacagcacatggccctagtgcaggcctaatgtctacagcrggcacaagagccactcactgacactacctacaccctcactctaacttaacatgaactgccaatagtttagctcttggagttgaaaacagttgtcagttac

SEQ ID NO: 289564 - DNA, 201 bp, Homo sapiens
cagtggtttactgaataaaatctgttttcactactttaacgaatgtctggctgggtttatctttgacagcagtcagaataacttttttgtttttactttgraacttttactttgagactaagaggcaaaaatagacatctttgggcttaggtaagaaaatgataggctcatgaaggtgaaactactatttgaaagctctca

SEQ ID NO: 289565 - DNA, 201 bp, Homo sapiens
cagccaacttaataggccatgcaaatttgaacagaaaaaggcgacatataaactgtctacatttgttcaaataaaattatgtagaagaaaaaaaatcaatyaaatatgtacatgacacaaattactccttaaacataattgcttatgttaaattaaatgatgtcagtattattccagtgtttagctctgggtataggaaat

SEQ ID NO: 289566 - DNA, 201 bp, Homo sapiens
ggcagaccttgttaggttaaaaacctatttctatatatttaatacctttttctctccaatattcttttcctaaaatgttcaaatgactttcaggtcttccyttccttttgatcttaaagtcaactgtcataatatttcccaaggacatatataattttattctaatgctaaacaagtgttttcaatgaccatttgttgatc

SEQ ID NO: 289567 - DNA, 201 bp, Homo sapiens
aaaagagacaataaagacaaatgccctccaacttatttcttttgctaaagtgtctgattattccttttgataataataataataattattattattattatttatttcctggttccagattgtgtctttattcctctttctgacagacagcagagcatttgtctggcatatattctctcttaccacaatatagatgatttt

SEQ ID NO: 289568 - DNA, 201 bp, Homo sapiens
gaaaagagacaataaagacaaatgccctccaacttatttcttttgctaaagtgtctgattattccttttgataataataataataattattattattattatttatttcctggttccagattgtgtctttattcctctttctgacagacagcagagcatttgtctggcatatattctctcttaccacaatatagatgattt

SEQ ID NO: 289569 - DNA, 201 bp, Homo sapiens
tctgcacaaatgagaattgagctcagccctttcccctactatcagtggtttactgaataaaatctgttttcactactttaacgaatgtctggctgggtttrtctttgacagcagtcagaataacttttttgtttttactttgaaacttttactttgagactaagaggcaaaaatagacatctttgggcttaggtaagaaaa

SEQ ID NO: 289570 - DNA, 201 bp, Homo sapiens
aatgaattaaatagaaaagagacaataaagacaaatgccctccaacttatttcttttgctaaagtgtctgattattccttttgataataataataataatwattattattattatttatttcctggttccagattgtgtctttattcctctttctgacagacagcagagcatttgtctggcatatattctctcttaccaca

SEQ ID NO: 289571 - DNA, 201 bp, Homo sapiens
aacccgggaggcagaggttgcagtgagcagagatagtgccactgcactccagcctgggcaacaagagcgaaaccccatctcaaaaaaaaaaaaaaaaaaaatgaagggaaattagaaaatacttctaacaaaatggtaacaaaaatacaatgccaaaacttacgggatgcaactaaagaactgtttcgagggaaatttata

SEQ ID NO: 289572 - DNA, 201 bp, Homo sapiens
agcagttattatgaattgtagttatttatttaaaaatattcatgatgatgacatcatcataaacagcaaatgtaattccttctcctctcaaaatgattttmtctgaaaaatctgagtttattctaacacgtataatcaagactggtagcattttaatttatagactcagtgtgtatatccataaggttcagatttgccacg

SEQ ID NO: 289573 - DNA, 201 bp, Homo sapiens
gaacccgggaggcagaggttgcagtgagcagagatagtgccactgcactccagcctgggcaacaagagcgaaaccccatctcaaaaaaaaaaaaaaaaaaaatgaagggaaattagaaaatacttctaacaaaatggtaacaaaaatacaatgccaaaacttacgggatgcaactaaagaactgtttcgagggaaatttat

SEQ ID NO: 289574 - DNA, 201 bp, Homo sapiens
tgaacccgggaggcagaggttgcagtgagcagagatagtgccactgcactccagcctgggcaacaagagcgaaaccccatctcaaaaaaaaaaaaaaaaaaaatgaagggaaattagaaaatacttctaacaaaatggtaacaaaaatacaatgccaaaacttacgggatgcaactaaagaactgtttcgagggaaattta

SEQ ID NO: 289575 - DNA, 201 bp, Homo sapiens
aggctgaggcaagagaattgcttgaacccgggaggcagaggttgcagtgagcagagatagtgccactgcactccagcctgggcaacaagagcgaaaccccrtctcaaaaaaaaaaaaaaaaaaaatgaagggaaattagaaaatacttctaacaaaatggtaacaaaaatacaatgccaaaacttacgggatgcaactaaa

SEQ ID NO: 289576 - DNA, 201 bp, Homo sapiens
aggttgggttaataaaacactgggagtggtagagactgttaaactagacaccaggtgcttgatataagagcaacagtcatcactcaggtccagcagactgytgtcacctaggaatactagcccaacattatcagagcttttgattttaagagaagctacaactttcgagctttttaatcttagcaatcaatcaaaataaaa

SEQ ID NO: 289577 - DNA, 201 bp, Homo sapiens
gacatataaatgaattcaagcctaacaaagtagcttcaacccaaagtggcaccattttgttttttatttttcctttttaggaaagtatctctgatgactamattagtttcctaagcaaatactgccttgcccagtgcatagaagcacagtccctctgctcaatattcccaatgaagtcatttaagtgttaatgatttaaca

SEQ ID NO: 289578 - DNA, 201 bp, Homo sapiens
taggatactgtgctcatacataaaaatgcaaaaactgtcaaatgtgctatcctcccatgtatacaaaaaactattagcatcatgaggaagaaactttttamgtcaatacagattataatgaacacctgccattcataaaaatgtaacatacattctattatactatgctgatgagggaagggaagctaagtgagtaaatca

SEQ ID NO: 289579 - DNA, 201 bp, Homo sapiens
accattgagcactgagtgaacgagactccatctgcaatcccggcacctcgggaggccgaggctggcggatcactcgcagttaggagctggagaccagcctkgccaacacagcgaaaccccgtctccaccaaaaaaatacgaaaaccagtcaggcgtggcggcacgcgcctgcaatcgcaggcactcggcaggctgaggcag

SEQ ID NO: 289580 - DNA, 201 bp, Homo sapiens
aaacatgtccccttaataatcttaatctataatgtaagctaaagttttagtttagtctaagttagggatagtttcatcaataaaaaatttggagcatcctrtttctgccctaagatcacgtttggtacaataaattctatgatgttacttttcctgactccttataaagttatgcatctttccttctcaaaaatcatgttg

SEQ ID NO: 289581 - DNA, 201 bp, Homo sapiens
attctatgatgttacttttcctgactccttataaagttatgcatctttccttctcaaaaatcatgttgatgctccaattaatgtcatagtatatagtatayagtataatacaagttgtattgcctcgataatacggtcatcttaatatgtatacaggaaatgtactacaatatgggattggctgaagttatacataattcc

SEQ ID NO: 289582 - DNA, 201 bp, Homo sapiens
ctaagtttctatcttctgtatcactttaaagcagcaggaactgattctctatggaacaggaaattataaggggcccaaactgaaatttgtttagaaaatawtcagtacatacttgaaggacaaatttaaatttcttaataatgactatttttaatttaaaaattgtcaaaatctttggttaaagttcctctttcactgaca

SEQ ID NO: 289583 - DNA, 201 bp, Homo sapiens
taaattcattaattgaaaccaattacaattccatacttaagctcttgatttttgagtttgatgaaaaagaaacacagaaaacagtgattaagaaacagaayttaggccaggcgcggtggctcatacctgtaatcccagcactttgggaggtttaggcgggtggatcacctgaggtcggaagttcaagaccaaccttaccaa

SEQ ID NO: 289584 - DNA, 201 bp, Homo sapiens
  misc_feature (1)...(201): n = A,T,C or G
aagctattaagataaccaacaggcgtgtaaatgccattgaacatggtgagtattaggtactgtgaggtgctttgtcacttgtccataccctccacttgtcntgaaactgctagaattcagggactgtactgaagactgaaagatgaataagatgcttcccttgcccacagtgcaaagagagaagtgtgtccatagtaaaaa

SEQ ID NO: 289585 - DNA, 201 bp, Homo sapiens
gagtgtagagtctgatccacaaagtctgagcaaaaaaactggtgcttctaatggaatgttttttgtttttttaagaatcaaaagacatataaatgaattcragcctaacaaagtagcttcaacccaaagtggcaccattttgttttttatttttcctttttaggaaagtatctctgatgactaaattagtttcctaagcaa

SEQ ID NO: 289586 - DNA, 201 bp, Homo sapiens
agtatcctaccagagtttgggaaactatatagagtagcctactttaaaatactgactgaaggaaagggccattttacaaagataagcaggcagcaaggctmtgtgcaaaacttatcctgaaccctctaattatcaggcacatgggttcaagaaagtgaaactcacctcaaatcacccctgccaatgaagacaactaactta

SEQ ID NO: 289587 - DNA, 201 bp, Homo sapiens
  misc_feature (1)...(201): n = A,T,C or G
cataagcaatccacgaactttaaaatcattctttgttcttttcttactgctaatgttttgaatattgttcattctctgctttcagaggccctcctctagcngtaatgacttttctccctttttggaaaaaggacagttatcaaaacatacttaattgtgacatctcactcttggtctcatttaatgttaaaactatccagt

SEQ ID NO: 289588 - DNA, 201 bp, Homo sapiens
ttctgtatcactttaaagcagcaggaactgattctctatggaacaggaaattataaggggcccaaactgaaatttgtttagaaaataatcagtacatactygaaggacaaatttaaatttcttaataatgactatttttaatttaaaaattgtcaaaatctttggttaaagttcctctttcactgacaacagtgttttaat

SEQ ID NO: 289589 - DNA, 201 bp, Homo sapiens
gaaaaaaattcaggaaatcataatttaaaaaagatcagcatattttgtatacctttaagtagattagagtgtgttgagtgtagagtctgatccacaaagtytgagcaaaaaaactggtgcttctaatggaatgttttttgtttttttaagaatcaaaagacatataaatgaattcaagcctaacaaagtagcttcaaccca

SEQ ID NO: 289590 - DNA, 201 bp, Homo sapiens
caacataaaaacccaactacacgaaaaagtaactggaatactttattaaatagaggcatgaaagagtgagtttttctttgtgaaggcttgcattttcaatrttcttttaatattatgtactttctaccatattgtgtcttacctggaacaagcccggctagaggttgattatcttcgtccccttccctgtaggcctgccac

SEQ ID NO: 289591 - DNA, 201 bp, Homo sapiens
cagaggaaaaattggagacacaggaaacttgagtagtcttaagttaaaaagctagaaagtagcaaatccagaatttaagtctaagcagtctaccttcagartttttacaccctaacttttcctttctgtttcatctatatttcaaactttgggtatttaaagacattgggactgttctggagaagctgatatttaggaaat

SEQ ID NO: 289592 - DNA, 201 bp, Homo sapiens
agtttatctcagcaccaggcaaagtgctttacatggtgcagacataacagcatttattaacaaataaatggatgaattattatccctttactctatatccctatttttatcatcctgtatgtattcctttgccttctccgatagcttattaaacttcccttagttctgctctcctttctttattctactgccatcctggga

SEQ ID NO: 289593 - DNA, 201 bp, Homo sapiens
acagagggggatttggcaggtcataggacaatagtggagggaaggtcagcagataaacaagtgaacaaaggtctctggttttcctaggcagaggaccctgmagacttccgcagtgtttgtgtccgtgggtacttgagattagggagtggtgatgactcttaacgagcatgctgccttcaagcatctgtttaacaaagcaca

SEQ ID NO: 289594 - DNA, 201 bp, Homo sapiens
acggccaagactgtattcttagtacaagtaactattactagaaggaaaattttaagagtattaaaatttaaaggggtcgggtgcagtggcttatgcctgtratcccaacactttgagaggccaaggtgggcagatcacgaggtcaggagatcaagaccatcctggctaacacggtgaaacccatctctactaaaaatacaa

SEQ ID NO: 289595 - DNA, 201 bp, Homo sapiens
taatttggaaacctaccaaatgtgacatgtaggttatcaatagcatggaaatagtgttagccctatggaaatctcacaagaattttgtttttgttttgttrtgaagagacagggtcttactctgtcacccaagctggagtacagtggcacagtaatagctcactgcagcctcaaacgatcctcccatcacagattaccaag

SEQ ID NO: 289596 - DNA, 201 bp, Homo sapiens
accgcaacctccgccttccaggttcaagggattcgcatgcctcagcctcccgagcagctgggattacaggggcccgccaccatgcccagctaatggttgtwtttttagtagaggctcggtttcaccatgttggccaggctggtcttaaactcctaatctcaggtgatcctcctgcttggcctcccaaagtgccaggattag

SEQ ID NO: 289597 - DNA, 201 bp, Homo sapiens
aatgagaattgagctcagccctttcccctactatcagtggtttactgaataaaatctgttttcactactttaacgaatgtctggctgggtttatctttgayagcagtcagaataacttttttgtttttactttgaaacttttactttgagactaagaggcaaaaatagacatctttgggcttaggtaagaaaatgataggc

SEQ ID NO: 289598 - DNA, 201 bp, Homo sapiens
tcacttgaccccaggaggcggtggttgcagtgagctgaagaccacaccactgcactgcagcctgggcgacagagtgagactctgtctcaaaaaaaaaaaaagaaggcaagttcctaaattcattaattgaaaccaattacaattccatacttaagctcttgatttttgagtttgatgaaaaagaaacacagaaaacagtga

SEQ ID NO: 289599 - DNA, 201 bp, Homo sapiens
atcacttgaccccaggaggcggtggttgcagtgagctgaagaccacaccactgcactgcagcctgggcgacagagtgagactctgtctcaaaaaaaaaaaaagaaggcaagttcctaaattcattaattgaaaccaattacaattccatacttaagctcttgatttttgagtttgatgaaaaagaaacacagaaaacagtg

SEQ ID NO: 289600 - DNA, 201 bp, Homo sapiens
ggtttagccagaggtggggaacagttggctaaattaaagaggaattatgccaaagcagtggaactactggtggaactagcttctctgcaggtaagtagcaraagacctggagaactcctgtagtttgatttgtaacagtcaagtggaggagagtcaggtcttgagtcagcatatactgtgctttgtacttttaactgttcc

SEQ ID NO: 289601 - DNA, 201 bp, Homo sapiens
tggtcttctcacatggtttggaacagaaaaatttttttaaattattttagatctatgctagatatggttgaggtagtccatgtcatattaaacattaatawttgactgataacatgttattaataagacagcattgactttttatttaaatatgtaagatggtaactctgtcaggtgacttactgtatcagagtaacatgt

SEQ ID NO: 289602 - DNA, 201 bp, Homo sapiens
tataggaaaagacatatttgatttaaagtagaagtcggaaaagaaaacctctttcaaggtcaggaaccttgaaagcctcctatattaaaatattaattttrtaaggaaaagcacgttttccatttatataattggtaacttaagggtggaaataaaaaatggctaacacatatacatacacaaaagaagaggaattgagaa

SEQ ID NO: 289603 - DNA, 201 bp, Homo sapiens
ctatagctttaaaataagtcttcacattaggtaatgtgactcttccactgtattctttttcaaaattgttatgactatttttagttcctttgctttctgtrtgatatttagaatcatcttgataatttatacattctgttgggattttgattgagattgtgtctaatttagagatcaacctgaagataattgacatcttaa

SEQ ID NO: 289604 - DNA, 201 bp, Homo sapiens
ttttaattccttaacaccgttgtagaagtagctgatgatatgtgttgacactagaataagcaacatataggttagtagggcagtgggtaaacacgggagtwctaaatttctttagaaggtaagatctcagagatgtttaggaactgacttaaaagtgggaatagggagaaaatctctaatacggaaaattattattgagct

SEQ ID NO: 289605 - DNA, 201 bp, Homo sapiens
gcatggtggcgggcccctgtaatcccagctgctcgggaggctgaggcatgcgaatcccttgaacctggaaggcggaggttgcggtgagccaagattgcgcmactgcactccagcctgggtgacagagcgagacttcgtctcaaaagataaccaggcttcctttaatgcttcttatgtgtatggaagtcagtattaatcttt

SEQ ID NO: 289606 - DNA, 201 bp, Homo sapiens
gaggcttacacatcatagctgacattactcctgtgttggcaaaaggatttggaagggaatataagtgaagagatatgtctagtgttttcccttcttgattaaaaaaaaaattcttatccttttatcttaaatattttacccttctttttctttctgctattaagggaaaagctttcagcagcaaagggaagccatgaaaca

SEQ ID NO: 289607 - DNA, 201 bp, Homo sapiens
tgtggtggtttgcacctgtaatcccagcactttgggagactgaggcgggaggatcacttgaggccaggagttcaagacaagcgtggccaacatatggagayctcgtttctgcaaaaaaatttaaagaataaatgaatgaataaatagagttcttcaatttgagttatgtggttttgttcacgggaacacatttatagttat

SEQ ID NO: 289608 - DNA, 201 bp, Homo sapiens
gactctgtttcaaaaaaaaaaaaaagaaagaaaaactacctggactgtgatgtcacttgattaaaatacagtattaataaagacagtgtcacaatttcagwactaaacattattccatggctaatcatgtcaaaaatgcctggaaatggatgcgagaaagactgagtccccatggatggctcatgccaaatcaaacagtac

SEQ ID NO: 289609 - DNA, 201 bp, Homo sapiens
agcagcacacattaaactaataaagataaaacattatagatcattataatattccataaaagctaaatgaggtttgatcaactttaataaatttttttctaaaataaatatcctttaatgctaattgacagattatgtaactaaaaagatttaatgagttttaaattttatcctctatatttgtgattaatatctctttta

SEQ ID NO: 289610 - DNA, 201 bp, Homo sapiens
gcagcacacattaaactaataaagataaaacattatagatcattataatattccataaaagctaaatgaggtttgatcaactttaataaatttttttctaaaataaatatcctttaatgctaattgacagattatgtaactaaaaagatttaatgagttttaaattttatcctctatatttgtgattaatatctcttttat

SEQ ID NO: 289611 - DNA, 201 bp, Homo sapiens
cagcacacattaaactaataaagataaaacattatagatcattataatattccataaaagctaaatgaggtttgatcaactttaataaatttttttctaaaataaatatcctttaatgctaattgacagattatgtaactaaaaagatttaatgagttttaaattttatcctctatatttgtgattaatatctcttttatt

SEQ ID NO: 289612 - DNA, 201 bp, Homo sapiens
gcacacattaaactaataaagataaaacattatagatcattataatattccataaaagctaaatgaggtttgatcaactttaataaatttttttctaaaataaatatcctttaatgctaattgacagattatgtaactaaaaagatttaatgagttttaaattttatcctctatatttgtgattaatatctcttttatttt

SEQ ID NO: 289613 - DNA, 201 bp, Homo sapiens
cattcacttacatttcattacataaaagagcaagctaaaattatatgtatataatatgtattatatgtgtatatatatacatatatacacatatatacacktgtgtgtgtgtgtgtgtgtgtgtgtatatatatatatggcttcacagtatattcttacagtgaatggtaggatcttaaaaatattgtgaattgggccagg

SEQ ID NO: 289614 - DNA, 201 bp, Homo sapiens
ctgagatgaggggccacttgagtgcagcagattgaggttgcagagagctgtgatcacaccactgcactctagcctaggcaacagagcaagtcccttaatcwaatatatatatatatatatatatcagtattattaggaagtaattaaatgatgcaaattattttaaaaatcaaaatgtctctttacagtcattgaagactc

SEQ ID NO: 289615 - DNA, 201 bp, Homo sapiens
tgagatgaggggccacttgagtgcagcagattgaggttgcagagagctgtgatcacaccactgcactctagcctaggcaacagagcaagtcccttaatctwatatatatatatatatatatatcagtattattaggaagtaattaaatgatgcaaattattttaaaaatcaaaatgtctctttacagtcattgaagactct

SEQ ID NO: 289616 - DNA, 201 bp, Homo sapiens
aggaaagtattccagctttctctgataacactggttgtagccactatatgtaaatgtcggtctatgctagccattgtattcagcgtatacattatgtctgrttcttaaaacaaccttcttaagtagaatattaatatctgcattcttcaaaaatgacggatattactcttactagttcattccctggtaccgcatccttat

SEQ ID NO: 289617 - DNA, 201 bp, Homo sapiens
ggagttcaagacaagcgtggccaacatatggagatctcgtttctgcaaaaaaatttaaagaataaatgaatgaataaatagagttcttcaatttgagttaygtggttttgttcacgggaacacatttatagttatgtttatgattgctcaacaggaaaactgtggtgtgcaaagaagaataaaaagaagaggaaaaaggtt

SEQ ID NO: 289618 - DNA, 201 bp, Homo sapiens
ctgtttttaaacaagtgcatttttctgctgttgtgtgcttcaaaagtctggttaatttcagaattctaatgaatagagtatttctgaagcagaaagtgtgsgggaaatggtcaacttttaaatctaattacaattactctagttgtgtaaataaattttttcttaagataactgaaggttagtattgttgaatggaaaaaa

SEQ ID NO: 289619 - DNA, 201 bp, Homo sapiens
agcaaggatgtaatgacaataaattgtgcttttgtctaattttgggtgaagatctatgagtatttatatctttaatacatggccataattttgtttgaagrgcttaacttttttttcccaaagattatgacaacgaggagatcttaacctatgaggaaatgtcactttatcatcagccagcaaataggaagagacctatca

SEQ ID NO: 289620 - DNA, 201 bp, Homo sapiens
cactatgcctggctaattttgtatttttagtagagacggggtttcaccatgttggccaggctggtctggaactcctgacctcaagtgatccacatgctttrgcctcccaaagtgctgggattacagacagttgtgagcctctgtgctcaaccaactgactttaataagtaattgtaatttaaagtttcaatatttgtttgt

SEQ ID NO: 289621 - DNA, 201 bp, Homo sapiens
agataacacttcgattacttttcttaatttaaaggttccagaacgcttgaaagagttttgttcctgctattttgttttgtttttgagatggagtctcgctstgttgcccaggctgtagtgcagtagtgcaatctgggctcactgcaacctctgcccctacccaccggggttcaaacaattcttctgcctcagcctccctag

SEQ ID NO: 289622 - DNA, 201 bp, Homo sapiens
acaaaagggtcttgcctctgaaggaaaacaaggaaaagtggtatagctaaagaacagtacaaggtcaggaaaaggtatttttaaagataagggattagagyatttttataggccaatggaaaggagcagtagaataaaagaatagccttttaattccttaacaccgttgtagaagtagctgatgatatgtgttgacactag

SEQ ID NO: 289623 - DNA, 201 bp, Homo sapiens
gtccaggctggagtgcagtggtgtgatctctgctcactgcagccttggcctcccaggttcaagcaatcctcccaagtagctgggaccacaggcgtgccacygcacttggctgatttttaaatttatttgtagagataaggtcttggctatgttgcccagactgtattatttaaaaattttttgagacagggtctcactctg

SEQ ID NO: 289624 - DNA, 201 bp, Homo sapiens
tttatataagggacttgagcatctgcaaatttttctgtctgtgggaggtcttggaaccaatctcccactgataccgagggataactatatatataaaatamggaagactaaatatatatatgtttgaaaggaagactaaagttgttttgatttggggcgggaaagatagcgaacctcaagaatcaaccaaagaactgttaa

SEQ ID NO: 289625 - DNA, 201 bp, Homo sapiens
ccatgataaatggttgctaaattatgattctgcaaaagtaatcccataaatagacatctaggtaaattttacaaccagtgaaattcttaggccaaaaaatmaatagccacacaaatcaaacctacacactgtgaattaaaatgaagccagtgttagggtttctcaaagaaccagaacaggaaagattattcaaatagaaga

SEQ ID NO: 289626 - DNA, 201 bp, Homo sapiens
ctgtgacattttctacagttctagtgtggcatttaccaaatagcactgtattggttttttatttgtttacttatctgatatctatactagattttaagtgyctttctttttttttttttttttttagattttaagtttcttaaggatacggactctgcctcagcagcctttttcttgacaatgactatccaagtttttggt

SEQ ID NO: 289627 - DNA, 201 bp, Homo sapiens
ttttacagataaaaacatgtttatttctttctcttgtgtggaatgtctcagtcatatggaaactgtatgtttaactttttaagaaactgccagactctacmattttacattctcatcagcattatatagaggttccccttccttcacattctctccagtgcttaatattgtcactttttaattttagccattttcttgttt

SEQ ID NO: 289628 - DNA, 201 bp, Homo sapiens
ttttttttgtatttttagtagagactgggtttcaccgtgttagccaggatggtctcgatctcgtgacctcgtgatccagcctcctcggcctcccaaagtamtgggataacaggcgtgagccaccgtgcccggccagcatctttcttttggttggtctctggccgtgttctaatggaatttttatctacttcactttgaatt

SEQ ID NO: 289629 - DNA, 201 bp, Homo sapiens
gctttctacatatggctagccagttttcccagcaccatttattaaatagggcatcctttccccatttcttctttttgtcaggtttgtcaaagatcagatgrttgtagatgtgtggtattatttctgagggctctgttctgttccattggtctgtatctctgttttggtaccagtagcatgctgttttggttactgtagcct

SEQ ID NO: 289630 - DNA, 201 bp, Homo sapiens
tgtatttttagtagagactgggtttcaccgtgttagccaggatggtctcgatctcgtgacctcgtgatccagcctcctcggcctcccaaagtactgggatwacaggcgtgagccaccgtgcccggccagcatctttcttttggttggtctctggccgtgttctaatggaatttttatctacttcactttgaattggccatc

SEQ ID NO: 289631 - DNA, 201 bp, Homo sapiens
tatttttagtagagactgggtttcaccgtgttagccaggatggtctcgatctcgtgacctcgtgatccagcctcctcggcctcccaaagtactgggataamaggcgtgagccaccgtgcccggccagcatctttcttttggttggtctctggccgtgttctaatggaatttttatctacttcactttgaattggccatcct

SEQ ID NO: 289632 - DNA, 201 bp, Homo sapiens
gaaggatcacatcgcttattagttacagaatatgtaccagaaaattaacagattattgattgtttaatacatataagctattattatgattatgtactctktgccaggcactacagagataactgtgttgtaaagaaaagttgagaaccactgctatcaaatacattgctttcccattataggtataaaaatgtattaata

SEQ ID NO: 289633 - DNA, 201 bp, Homo sapiens
agccagttttcccagcaccatttattaaatagggcatcctttccccatttcttctttttgtcaggtttgtcaaagatcagatggttgtagatgtgtggtaytatttctgagggctctgttctgttccattggtctgtatctctgttttggtaccagtagcatgctgttttggttactgtagccttgtagtatagtttgaag

SEQ ID NO: 289634 - DNA, 201 bp, Homo sapiens
cataatctaacaaggagtgtatttaaatgaagaaggatcacatcgcttattagttacagaatatgtaccagaaaattaacagattattgattgtttaatamatataagctattattatgattatgtactctgtgccaggcactacagagataactgtgttgtaaagaaaagttgagaaccactgctatcaaatacattgct

SEQ ID NO: 289635 - DNA, 201 bp, Homo sapiens
atcctttccccatttcttctttttgtcaggtttgtcaaagatcagatggttgtagatgtgtggtattatttctgagggctctgttctgttccattggtctrtatctctgttttggtaccagtagcatgctgttttggttactgtagccttgtagtatagtttgaagttggatagggtgatgccttcagctttattcttttg

SEQ ID NO: 289636 - DNA, 201 bp, Homo sapiens
cactcaaactggacgacagagtctcaaaaaaaaaaaaaaagttcaaggatcctgtcttaataaccatagtatctagccaggggtaaataattaaatttgtrtacaaatcactcctcttttttaaatctttgatgattctcttattctatggaattaaggatttgtatttaagacctttcataggatggacccaatcaaact

SEQ ID NO: 289637 - DNA, 201 bp, Homo sapiens
tagccaggcatggtggtgcacgcctgtggtactggctactgaagaggccgagttcgtgctactgcactccagcctgggcaacacagcaagacttggtctcaaaaataaataaataaataaataaataaataaataaataaataaatagatatagaaactaagaagatgatggtgttactcactggatgcaaaatgtaacca

SEQ ID NO: 289638 - DNA, 201 bp, Homo sapiens
tcacagttagaaagaagtcaaaatttggatgaaagacagaaaaatctaccaaaaattttaagcaaatgtagttttaataatagctcttgtaactggcatcsattttcctgattgttggactagtggttttcctgatagcctagttgggtttgtattaagcattttgtcttctgtccctgtttgcattatgacccaagatgt

SEQ ID NO: 289639 - DNA, 201 bp, Homo sapiens
agtacccgttaaaattgtagaatgtttattttaaagtgtttgttaggccaaatactgttttttaaaacctgtctcctcgtttgtcattggggatgacagtsgtatttaaatttgtagaattgtttaaagattaagtatatttaacatatgtagcacagtgttgagtacatagtgagaatcagtaaatattaatagtattag

SEQ ID NO: 289640 - DNA, 201 bp, Homo sapiens
agccaggcatggtggtgcacgcctgtggtactggctactgaagaggccgagttcgtgctactgcactccagcctgggcaacacagcaagacttggtctcaaaaataaataaataaataaataaataaataaataaataaataaatagatatagaaactaagaagatgatggtgttactcactggatgcaaaatgtaaccaa

SEQ ID NO: 289641 - DNA, 201 bp, Homo sapiens
agatgtgcaccatcacgcctggctattttttgtatttttaatagagacggggttttgccctgttggccaggctggtctcaagctcccggccccatgtgatycacctaccttggcctcccaaagtgctgagattacaggcgggggagcccctgcgctggtattggtatttctaatagtgctttattactcaatgatagaagt

SEQ ID NO: 289642 - DNA, 201 bp, Homo sapiens
gccaggcatggtggtgcacgcctgtggtactggctactgaagaggccgagttcgtgctactgcactccagcctgggcaacacagcaagacttggtctcaaaaataaataaataaataaataaataaataaataaataaataaatagatatagaaactaagaagatgatggtgttactcactggatgcaaaatgtaaccaac

SEQ ID NO: 289643 - DNA, 201 bp, Homo sapiens
caagccttcacaaagaaaaactcactctttcatgcctctatttaataaagtattccagttactttttcgtgtagttgggtttttatgttgtacctgcagcrtaagtatattaaatagaatgtggccaattctttggcctttagaatggaattatgtataacttcagccaatcccatattgtagtacatttcctgtatacat

SEQ ID NO: 289644 - DNA, 201 bp, Homo sapiens
aggcatggtggtgcacgcctgtggtactggctactgaagaggccgagttcgtgctactgcactccagcctgggcaacacagcaagacttggtctcaaaaataaataaataaataaataaataaataaataaataaataaatagatatagaaactaagaagatgatggtgttactcactggatgcaaaatgtaaccaaccag

SEQ ID NO: 289645 - DNA, 201 bp, Homo sapiens
cctctagccgggcttgttccaggtaagacacaatatggtagaaagtacataatattaaaagaacattgaaaatgcaagccttcacaaagaaaaactcactytttcatgcctctatttaataaagtattccagttactttttcgtgtagttgggtttttatgttgtacctgcagcgtaagtatattaaatagaatgtggcca

SEQ ID NO: 289646 - DNA, 201 bp, Homo sapiens
gaaaatcatctatattgtggtaagagagaatatatgccagacaaatgctctgctgtctgtcagaaagaggaataaagacacaatctggaaccaggaaataaataataataataataattattattattattatcaaaaggaataatcagacactttagcaaaagaaataagttggagggcatttgtctttattgtctcttt

SEQ ID NO: 289647 - DNA, 201 bp, Homo sapiens
aatactgaaacagttaatttttggataccttttcttcttctactagaaatagaagacttgttttcttcacttaaacatatccaacatactttggtagattmtcagagccaggaggatatttcactgcttttacaacttgttcaaaataaggatttccagaatgcatttaagatacacaatgccatcacagtacacatgaac

SEQ ID NO: 289648 - DNA, 201 bp, Homo sapiens
aatagtaataaatttgtaactacagtttaaattctttgatttttttaaattaatgattgtcaataaaaagaactggtattgttcatatggtatcataaacwtaaaataatggtattttctatatccccaaattctgttctgtggggggaaaaaaagtcctatgagatataagtagatacaaccgaaccaaaagaattctgt

SEQ ID NO: 289649 - DNA, 201 bp, Homo sapiens
ttttttttccaagttttatattgtaattttatttttagatctatgttccattttgagtttatttttgtataaaatgagagaagtacaagttgtttcacttrtttgtttgtccagttccatgaccatttgtttaaaacatgatctttttcccattgtattcctcttgtctctttgtcaaaagctatttgactgcatttgttt

SEQ ID NO: 289650 - DNA, 201 bp, Homo sapiens
tgattgatcatggggcatactggaattttgtgtgattgtaaacttttttaaaggttggctttaagataaagtttatttcaagccaacagacaaaatcccartgccagtaaatcttgagttttagttcagcctgcttctgagaagttgattatttttactatcaaatttttgtttagctattgttacagatatttccaaata

SEQ ID NO: 289651 - DNA, 201 bp, Homo sapiens
attggttgaaaaacaatattttggaacattggatccctaaaaaacatgtaaataaactgatgaatcattatccctgtaccctatccccatttcatcattasgacttcaaatgtgaacagcttatagatattaaaaaaaggaaaaagaaaatgttgggctggaagataattgcgtccaaacagttctacaatttgaaatgta

SEQ ID NO: 289652 - DNA, 201 bp, Homo sapiens
caaagtgttgggattacaggcataagccactgcacccgacccctttaaattttaatactcttaaaattttccttctagtaatagttacttgtactaagaawacagtcttggccgtgcacagtggctcatgcccctaatcctggcactttgggaggccaagcaggaggatcacctgagattaggagtttaagaccagcctgg

SEQ ID NO: 289653 - DNA, 201 bp, Homo sapiens
taatcagtacatacttagagttaacgaaaataaatttcatagtttttgtaggcatcctaaaggaatcttatccttctgttttttataccttatccttttayacttaaaatttatagcaagattgatagttcatttgaccaaatcacaatactttctgctttcccctcttatccagaattgtatccctcgctgtgtctctta

SEQ ID NO: 289654 - DNA, 201 bp, Homo sapiens
cccagcccttatgatttttgatcatatacttactgaatcataggatcgttgagttggaagtaatcttagtggttatatagtctaacctcttcattttccaygaaaaagaaagtgaggcttgcaggagttaagtaatccgtagtctgactgctagttaggggcagacttggaactacatgaatgctaaaatgctgttctcca

SEQ ID NO: 289655 - DNA, 201 bp, Homo sapiens
ctgaaccactttgcatttccaccagcaatatatgagaggtcagttgctttacattcctgtcagcacttggtatggtcagtctttagatttagccattttartagtatctcgttgggatttttctttgcatttcccccatgactgaggatgttgagcatcttttcatgtgcttatttgccatctgtttatctttggtaaagt

SEQ ID NO: 289656 - DNA, 201 bp, Homo sapiens
gcttcccaaagtgctgggattacaggcgtgagccactgcacccagcctactatagctttaaaataagtcttcacattaggtaatgtgactcttccactgtrttctttttcaaaattgttatgactatttttagttcctttgctttctgtatgatatttagaatcatcttgataatttatacattctgttgggattttgatt

SEQ ID NO: 289657 - DNA, 201 bp, Homo sapiens
gctttaaaataagtcttcacattaggtaatgtgactcttccactgtattctttttcaaaattgttatgactatttttagttcctttgctttctgtatgatrtttagaatcatcttgataatttatacattctgttgggattttgattgagattgtgtctaatttagagatcaacctgaagataattgacatcttaataatt

SEQ ID NO: 289658 - DNA, 201 bp, Homo sapiens
tgatttgcataagggtaatcagtacatacttagagttaacgaaaataaatttcatagtttttgtaggcatcctaaaggaatcttatccttctgttttttayaccttatccttttatacttaaaatttatagcaagattgatagttcatttgaccaaatcacaatactttctgctttcccctcttatccagaattgtatccc

SEQ ID NO: 289659 - DNA, 201 bp, Homo sapiens
aaccccagatacaggtctctgatccaggtgattcatcgactgtataaatgacctgcaaatgtttttcacaataatgatttgcataagggtaatcagtacayacttagagttaacgaaaataaatttcatagtttttgtaggcatcctaaaggaatcttatccttctgttttttataccttatccttttatacttaaaattt

SEQ ID NO: 289660 - DNA, 201 bp, Homo sapiens
actttaataagtaattgtaatttaaagtttcaatatttgtttgttttcagaaaagtaatatctttgtgttttttcctcaaattataaaagcaacacatactttttttgtgtgaatattttgtaagatatccaaatagtatagaagtggaaagtagggaatatttggtctattatcctcatttttcagagatattagttgaa

SEQ ID NO: 289661 - DNA, 201 bp, Homo sapiens
cccaccttggcctctcaaagtgttgggattacaggcataagccactgcacccgacccctttaaattttaatactcttaaaattttccttctagtaatagtwacttgtactaagaatacagtcttggccgtgcacagtggctcatgcccctaatcctggcactttgggaggccaagcaggaggatcacctgagattaggagt

SEQ ID NO: 289662 - DNA, 201 bp, Homo sapiens
tttagtagagacagggcagaaagaaaaaaatctaatagagtaagtaggaggacgaagtgttccagaaactattgacacacacacacacacacacacacacaatgaaactgataggttacctgatttgtttgaatgtatacattaaaaaaatattgattctttttaccaaagaatgtgggtattgtgaacccaaaatatctg

SEQ ID NO: 289663 - DNA, 201 bp, Homo sapiens
ttgggaatgtggacacttcccaaaggaggtgggaaattgcagggctcatatgggaaacagcaagtagtttgattcagaagacaggggagggagaaagaaartggaaaaagtattctaggactaagtcaagtggagccatatgaatgtcaggctaaggtgttctgcagaatagttgttaaaatgccctggagtcaagcagac

SEQ ID NO: 289664 - DNA, 201 bp, Homo sapiens; identical to SEQ ID NO: 59811

SEQ ID NO: 289665 - DNA, 201 bp, Homo sapiens
tgagaagatatataggaaactgttggcactgtgcctagcaagtagtgttgctgcttttacttctactgtgacctcctccatcactgcttactcaaccatttaaataattgttctgctcttgtcctctgtaaaataggggtagtaattctttctatttttttagaggtggggtctcactgtattgccccaggctggtgtatg

SEQ ID NO: 289666 - DNA, 201 bp, Homo sapiens; identical to SEQ ID NO: 59804

SEQ ID NO: 289667 - DNA, 201 bp, Homo sapiens
gagaagatatataggaaactgttggcactgtgcctagcaagtagtgttgctgcttttacttctactgtgacctcctccatcactgcttactcaaccatttaaataattgttctgctcttgtcctctgtaaaataggggtagtaattctttctatttttttagaggtggggtctcactgtattgccccaggctggtgtatgc

SEQ ID NO: 289668 - DNA, 201 bp, Homo sapiens; identical to SEQ ID NO: 59805

SEQ ID NO: 289669 - DNA, 201 bp, Homo sapiens
agaagatatataggaaactgttggcactgtgcctagcaagtagtgttgctgcttttacttctactgtgacctcctccatcactgcttactcaaccatttaaataattgttctgctcttgtcctctgtaaaataggggtagtaattctttctatttttttagaggtggggtctcactgtattgccccaggctggtgtatgct

SEQ ID NO: 289670 - DNA, 201 bp, Homo sapiens
aaaatcatctatattgtggtaagagagaatatatgccagacaaatgctctgctgtctgtcagaaagaggaataaagacacaatctggaaccaggaaataaataataataataataattattattattattatcaaaaggaataatcagacactttagcaaaagaaataagttggagggcatttgtctttattgtctctttt

SEQ ID NO: 289671 - DNA, 201 bp, Homo sapiens
gaagatatataggaaactgttggcactgtgcctagcaagtagtgttgctgcttttacttctactgtgacctcctccatcactgcttactcaaccatttaaataattgttctgctcttgtcctctgtaaaataggggtagtaattctttctatttttttagaggtggggtctcactgtattgccccaggctggtgtatgcta

SEQ ID NO: 289672 - DNA, 201 bp, Homo sapiens
aaatcatctatattgtggtaagagagaatatatgccagacaaatgctctgctgtctgtcagaaagaggaataaagacacaatctggaaccaggaaataaataataataataataattattattattattatcaaaaggaataatcagacactttagcaaaagaaataagttggagggcatttgtctttattgtctcttttc

SEQ ID NO: 289673 - DNA, 201 bp, Homo sapiens
tgtggtaagagagaatatatgccagacaaatgctctgctgtctgtcagaaagaggaataaagacacaatctggaaccaggaaataaataataataataatwattattattattattatcaaaaggaataatcagacactttagcaaaagaaataagttggagggcatttgtctttattgtctcttttctatttaattcatt

SEQ ID NO: 289674 - DNA, 201 bp, Homo sapiens
cccatgtgtatgtttgtattcatctgattagttgtatcctaaagccaaatgtaagtgaattttcttactttagaataatatattctctcttttaaataatmaagagttaaatgttgcgtgaaatattagagaagatgggagcttaatttctactgaaaaatcaggtaagaggaaatagctccacctacagggcaaataatt

SEQ ID NO: 289675 - DNA, 201 bp, Homo sapiens
tataaatttccctcgaaacagttctttagttgcatcccgtaagttttggcattgtatttttgttaccattttgttagaagtattttctaatttcccttcattttttttttttttttttttgagatggggtttcgctcttgttgcccaggctggagtgcagtggcactatctctgctcactgcaacctctgcctcccgggtt

SEQ ID NO: 289676 - DNA, 201 bp, Homo sapiens
gtgagctctgattacgccactgcactccagcgtggtgacagagtgagacctggtctcaaaaaaaaaaaaaaaaaaagaaaaaaactgttcttgaataataygtatttgtgaagtgcttttaaaaatgtaccctttatggctgcgcgtggtggctcacgcctgtaatctcagcactttgggaggccaaggtgggtggatcac

SEQ ID NO: 289677 - DNA, 201 bp, Homo sapiens
cgtggcaaatctgaaccttatggatatacacactgagtctataaattaaaatgctaccagtcttgattatacgtgttagaataaactcagatttttcagakaaaatcattttgagaggagaaggaattacatttgctgtttatgatgatgtcatcatcatgaatatttttaaataaataactacaattcataataactgct

SEQ ID NO: 289678 - DNA, 201 bp, Homo sapiens
ataaatttccctcgaaacagttctttagttgcatcccgtaagttttggcattgtatttttgttaccattttgttagaagtattttctaatttcccttcattttttttttttttttttttgagatggggtttcgctcttgttgcccaggctggagtgcagtggcactatctctgctcactgcaacctctgcctcccgggttc

SEQ ID NO: 289679 - DNA, 201 bp, Homo sapiens
taaatttccctcgaaacagttctttagttgcatcccgtaagttttggcattgtatttttgttaccattttgttagaagtattttctaatttcccttcattttttttttttttttttttgagatggggtttcgctcttgttgcccaggctggagtgcagtggcactatctctgctcactgcaacctctgcctcccgggttca

SEQ ID NO: 289680 - DNA, 201 bp, Homo sapiens
tttagttgcatcccgtaagttttggcattgtatttttgttaccattttgttagaagtattttctaatttcccttcattttttttttttttttttttgagayggggtttcgctcttgttgcccaggctggagtgcagtggcactatctctgctcactgcaacctctgcctcccgggttcaagcaattctcttgcctcagcct

SEQ ID NO: 289681 - DNA, 201 bp, Homo sapiens
ttttattttgattgattgctaagattaaaaagctcgaaagttgtagcttctcttaaaatcaaaagctctgataatgttgggctagtattcctaggtgacarcagtctgctggacctgagtgatgactgttgctcttatatcaagcacctggtgtctagtttaacagtctctaccactcccagtgttttattaacccaacct

SEQ ID NO: 289682 - DNA, 201 bp, Homo sapiens; identical to SEQ ID NO: 59808

SEQ ID NO: 289683 - DNA, 201 bp, Homo sapiens; identical to SEQ ID NO: 59809

SEQ ID NO: 289684 - DNA, 201 bp, Homo sapiens
caacatgatttttgagaaggaaagatgcataactttataaggagtcaggaaaagtaacatcatagaatttattgtaccaaacgtgatcttagggcagaaayaggatgctccaaattttttattgatgaaactatccctaacttagactaaactaaaactttagcttacattatagattaagattattaaggggacatgttt

SEQ ID NO: 289685 - DNA, 201 bp, Homo sapiens
ggaattatgtataacttcagccaatcccatattgtagtacatttcctgtatacatattaagatgaccgtattatcgaggcaatacaacttgtattatactrtatactatatactatgacattaattggagcatcaacatgatttttgagaaggaaagatgcataactttataaggagtcaggaaaagtaacatcatagaat

SEQ ID NO: 289686 - DNA, 201 bp, Homo sapiens
gtcttatgagtacatattatctaggcaaatagaataaggcaattcaggtagctgagacagctagtataatcacagttgttgtggggagacagcatggtttrtgcagggaacaagcagtttaatgctgaatcaaaaaggttaaggcataaggaatgccaggagatagggctggaaaagacgaaagaatcagatggtgatggt

SEQ ID NO: 289687 - DNA, 201 bp, Homo sapiens
ctcttcctttcattgaattcattaaatatttcagtgctatttgtcagacattctgccaatagtcagatatgaagctgaataagatacaattctatcttcaytgagctcagtctagtggggaaatagccctattgataattttagatcaaatgttcagtcttatgagtacatattatctaggcaaatagaataaggcaattc

SEQ ID NO: 289688 - DNA, 201 bp, Homo sapiens
tgtcagtgaaagaggaactttaaccaaagattttgacaatttttaaattaaaaatagtcattattaagaaatttaaatttgtccttcaagtatgtactgawtattttctaaacaaatttcagtttgggccccttataatttcctgttccatagagaatcagttcctgctgctttaaagtgatacagaagatagaaacttag

SEQ ID NO: 289689 - DNA, 201 bp, Homo sapiens; identical to SEQ ID NO: 59806

SEQ ID NO: 289690 - DNA, 201 bp, Homo sapiens
taagaaaaaatatttctaggtgatgggattattggtggttttaaatttctttatttttgcattcctcccctcacttgtttttatattgaatgtgtattagwtttataattaaaacacctttgtaaaaatgcaagttattctgttgtgtaatttttaaaagagttttacttaaaacctatgaaatgaccatgattgacaata

SEQ ID NO: 289691 - DNA, 201 bp, Homo sapiens
tcttgagtagctgggacctactgcaagtgccactatgcccagctaattttttgtatttttagtagagacagggcttcaccatgttgcccaggctggtctcraattcctgggctcaagcgatctgcccacctcagcctcccaaagtgctgggattacaggcatgagtcacagtgcctggcttcttgctcactttcttaaagg

SEQ ID NO: 289692 - DNA, 201 bp, Homo sapiens
taagttagttgtcttcattggcaggggtgatttgaggtgagtttcactttcttgaacccatgtgcctgataattagagggttcaggataagttttgcacakagccttgctgcctgcttatctttgtaaaatggccctttccttcagtcagtattttaaagtaggctactctatatagtttcccaaactctggtaggatact

SEQ ID NO: 289693 - DNA, 201 bp, Homo sapiens
taaatgcttctgttctgatgtcatacagacttggtgtgtgttttggctctaccacttagatttctgacctcgaaaaacaacttaacctctccctacttgtytttctcatttgtaaactgatgataactttgaggagttggaaggattaagtgagaagatatataggaaactgttggcactgtgcctagcaagtagtgttgc

SEQ ID NO: 289694 - DNA, 201 bp, Homo sapiens
cctcgaaaaacaacttaacctctccctacttgtttttctcatttgtaaactgatgataactttgaggagttggaaggattaagtgagaagatatataggamactgttggcactgtgcctagcaagtagtgttgctgcttttacttctactgtgacctcctccatcactgcttactcaaccatttaaataattgttctgctc

SEQ ID NO: 289695 - DNA, 201 bp, Homo sapiens
tggctatttgatgtaatctcattcgtctgtttttgcctttgttgcctgtgcttttggggtcaaattaaaaaaaatcattggccagacccatgttgtgttattttttcatgtgttttcttgtagcagttttgcactttctgatctcacgtttaagtttttgaatccattttgagttgatttttgtaccgtaaatggtatgag

SEQ ID NO: 289696 - DNA, 201 bp, Homo sapiens
attaaaacactgttgtcagtgaaagaggaactttaaccaaagattttgacaatttttaaattaaaaatagtcattattaagaaatttaaatttgtccttcragtatgtactgattattttctaaacaaatttcagtttgggccccttataatttcctgttccatagagaatcagttcctgctgctttaaagtgatacagaa

SEQ ID NO: 289697 - DNA, 201 bp, Homo sapiens
gtaactgcctctgctgtcttcataagatggcctgttatttacacacaatgaggtaattctctagttcagtcatttaccagcttctgaattgtcaaaggacttttttttttttttttaaagagagggagagtgcaattgctttggactgggaggactttttcacttttatgatgtatatagactacatgtatgggctagagt

SEQ ID NO: 289698 - DNA, 201 bp, Homo sapiens
gattcttcccatccatgagcatggaatgttcttccatttgtttgtgtcctcttttacttggttgaccagtggtttctagttctccttgaagaggtccttcmcatcccttgtaagttggattcctaggtattttattctctttgtagcaattgtgaatgggagttcactcatgatttggctctctatttgtctgttattggt

SEQ ID NO: 289699 - DNA, 201 bp, Homo sapiens
cttgaagaggtccttcacatcccttgtaagttggattcctaggtattttattctctttgtagcaattgtgaatgggagttcactcatgatttggctctctrtttgtctgttattggtgtataagaatgcttgtgatttttgcacattgattttgtatcctgagactttgctgaagttgcttatcagcttgagattttgggc

SEQ ID NO: 289700 - DNA, 201 bp, Homo sapiens
agtaccaaaacctgaggacagactggttttggtactgtcattgctttgatccacttgctgtggtaaaattaattaatcccaaaattatcatctcttgggtytcataggaaaattactgataaaatgatttaaaatagccataaaaggtatagaattactgggttcctgtattatgaattacctttttttttttgagaaagt

SEQ ID NO: 289701 - DNA, 201 bp, Homo sapiens; identical to SEQ ID NO: 59803

SEQ ID NO: 289702 - DNA, 201 bp, Homo sapiens
atatagcttcagccggattcacttagtaagagaacagttgtgagtttatggttttgtttgttttgcctaagcacacaaaattggacatcatttctcttaattttttttttttgctttttcctgtttctgtttgaatgttctattgctgacttttttacaaattcagattaaaggatacctctattccaatgtgtaatctgc

SEQ ID NO: 289703 - DNA, 201 bp, Homo sapiens
aacctgaggacagactggttttggtactgtcattgctttgatccacttgctgtggtaaaattaattaatcccaaaattatcatctcttgggtttcataggraaattactgataaaatgatttaaaatagccataaaaggtatagaattactgggttcctgtattatgaattacctttttttttttgagaaagtctcattcc

SEQ ID NO: 289704 - DNA, 201 bp, Homo sapiens
gtggcaggcctacagggaaggggacgaagataatcaacctctagccgggcttgttccaggtaagacacaatatggtagaaagtacataatattaaaagaayattgaaaatgcaagccttcacaaagaaaaactcactctttcatgcctctatttaataaagtattccagttactttttcgtgtagttgggtttttatgttg

SEQ ID NO: 289705 - DNA, 201 bp, Homo sapiens
agcactttgggaggccaaggtgggtggatcacttgagtccaggagttcaagaccagcttgggtgacagtgaaatcttgtctctacaaaaaatacaaaaaarttagttgggtgtggtgttatgcacctgtagtcccagctactggggaggctgaggtgggaaggatcacttgagcctgggagctcaggactgcagtgagcca

SEQ ID NO: 289706 - DNA, 201 bp, Homo sapiens
taggttagtagggcagtgggtaaacacgggagttctaaatttctttagaaggtaagatctcagagatgtttaggaactgacttaaaagtgggaatagggaraaaatctctaatacggaaaattattattgagctgactcagtgtattttgtatacccttggtacatttttaatccagaattatcttcccatcctcagagtt

SEQ ID NO: 289707 - DNA, 201 bp, Homo sapiens
tcccaggatggcagtagaataaagaaaggagagcagaactaagggaagtttaataagctatcggagaaggcaaaggaatacatacaggatgataaaaatagggatatagagtaaagggataataattcatccatttatttgttaataaatgctgttatgtctgcaccatgtaaagcactttgcctggtgctgagataaact

SEQ ID NO: 289708 - DNA, 201 bp, Homo sapiens
ttgtatttttagtagagatgggtttcaccgtgttagccaggatggtcttgatctcctgacctcgtgatctgcccaccttggcctctcaaagtgttgggatyacaggcataagccactgcacccgacccctttaaattttaatactcttaaaattttccttctagtaatagttacttgtactaagaatacagtcttggccgt

SEQ ID NO: 289709 - DNA, 201 bp, Homo sapiens
ctaatcctggcactttgggaggccaagcaggaggatcacctgagattaggagtttaagaccagcctggccaacatggtgaaaccgagcctctactaaaaawacaaccattagctgggcatggtggcgggcccctgtaatcccagctgctcgggaggctgaggcatgcgaatcccttgaacctggaaggcggaggttgcggt

SEQ ID NO: 289710 - DNA, 201 bp, Homo sapiens
caaaaattgtattatttttatttttaaattatacatatatatatttttagggtgctacagttcgtaatgaaatggactctgtcatcattagccggatagtmaaagggggtgctgcagagaaaagtggtctgttgcatgaaggagatgaagttctagagattaatggcattgaaattcgggggaaagatgtcaatgaggttt

SEQ ID NO: 289711 - DNA, 201 bp, Homo sapiens
aagtgtgggggaaatggtcaacttttaaatctaattacaattactctagttgtgtaaataaattttttcttaagataactgaaggttagtattgttgaatrgaaaaaatagaatttaaaaataaatgcttaacaaaaattgtattatttttatttttaaattatacatatatatatttttagggtgctacagttcgtaatg

SEQ ID NO: 289712 - DNA, 201 bp, Homo sapiens
aaaaaactcaagaaatttagtgaaacattcagaagtattctttgtttacatggcttaaaatatcagttaaacattaggtatcatataataataaagcctayggaaacctcaaattttaaggtctagattaaatctttgatgatctagcatatttactaataaacacaaaccaaatttcttagatattatagtgcttttttt

SEQ ID NO: 289713 - DNA, 201 bp, Homo sapiens
tcttacaagtatttttattattttaatttgtacttaaaaaatatgaccctgcatacaggtgctactgatacttcctataatctaggaagaataatctttayttttgtttcttaggtacaaactgttttgaagccagttcatcataaggaaggacaagaactaactgctttgctgaatactccacatattcaggtagaaaat

SEQ ID NO: 289714 - DNA, 201 bp, Homo sapiens
aaatttaatgcagcacgtattgagtttctaatatgagcatacatagatagcagtgtgcagggttctcagagccactaccagtagatgggaagtctatagartatttgcagtctagttgagaagataaggtactcatccataaaaatttgataataggccaggcaccgtggctcactcctgtaattctagcactttgggatc

SEQ ID NO: 289715 - DNA, 201 bp, Homo sapiens
ttttttcttaagataactgaaggttagtattgttgaatggaaaaaatagaatttaaaaataaatgcttaacaaaaattgtattatttttatttttaaattwtacatatatatatttttagggtgctacagttcgtaatgaaatggactctgtcatcattagccggatagtaaaagggggtgctgcagagaaaagtggtctg

SEQ ID NO: 289716 - DNA, 201 bp, Homo sapiens
gctggtcttgaactcctgacctcaggtgatttgcacgtctcggcctcccaaagtgctgggattacaggcgtgggccaccatgcttggcctcataccaatgktttaaggcaaaaaatcagcaggagaaatgacagtaattgtagtaatgtagtaaaaggaagcttggggtatttatttcatgctgtaattctaggccaagcc

SEQ ID NO: 289717 - DNA, 201 bp, Homo sapiens
tgtgaatatggctcactgcagcctcaacctccaggactcaagccatcctcccactttccccagtggctggtactataggtacatgccaccatgccaggccratttttaaaattttttgtagagacaagatctccctatattgcccaagctggtcttgagcagctgagcacaagggatccttccacctcaacctccaaaagt

SEQ ID NO: 289718 - DNA, 201 bp, Homo sapiens
ttttttgagatggagtctcgctctgtcacccaggctggagtgcagtggtgtgatctcagctcactgcggcctctgcctctcaggttcaagcgattctcctgcctcagccttctgagtagctggggttacagacacccaccaccacacctggctagtttttgtatttttcttagtagagacggggttttgccatgttggcca

SEQ ID NO: 289719 - DNA, 201 bp, Homo sapiens
caagcaatcctcccaagtagctgggaccacaggcgtgccaccgcacttggctgatttttaaatttatttgtagagataaggtcttggctatgttgcccagrctgtattatttaaaaattttttgagacagggtctcactctgtcacccaggctggagtacagtggtgtgaatatggctcactgcagcctcaacctccagga

SEQ ID NO: 289720 - DNA, 201 bp, Homo sapiens
gtgggatgggcatcatgccgggccctgagcttcctgagacctcttgtttcaggagagccggatctatgctgtggccacatcgggcatgcggctctcagatrtgtctcccagaagtaatactgcatgctgcggtgagttccaagtgaggcttggaggcaccaaacacccaaggtgggcagggtgggcaagcggggaggagaa

SEQ ID NO: 289721 - DNA, 201 bp, Homo sapiens
ctcatgcaggtaggcatgccaggggtggagcagctgacagaagccattggcaagggctgccaggtgggaaaggtgggaggaggtgactgggcaggtatacrgtgagcccagccagcgggcagcctctgtgctccaagctgcatcagtacggctgagctgtctatgcacagatgggtgattgcattctggacacagcctgac

SEQ ID NO: 289722 - DNA, 201 bp, Homo sapiens
ggagctgctggctgacaaggtgagtccctcagagcagggagctgcctctccacacgcagaggtttatggcagggagggccgtgtgagagagggagagttgsggaaagtcaactttcagtaagatgcttttccccatatgcaaaatgaaacccaaggtagtttaagaccaaagtccgagcagtttactaagctgttatcttg

SEQ ID NO: 289723 - DNA, 201 bp, Homo sapiens
ccaaggagaacgctctggtgtggattgctgtgaatgaggatggcgtcagcatcctggaccacaacactatggtatgaaaggatgcaggctgctccctgacycctcctcttcctcaacatggtcttttcttctcctctgtggactcaaaagcctgaaccaagtgaccatggctgccctacccccactcctgcccaagcacca

SEQ ID NO: 289724 - DNA, 201 bp, Homo sapiens
cttgcccttcagcatccccgtgcactttaccaacgggacttaccatgtgaggagctgggcgtgctctttgccccgagtcttctcacgtcaccatccagagwatacccctgggccttaggctcaggcttggcagattgttcactgttgccccagaagtagatattatgaactcactgcatgaacagggaagctgagatgctg

SEQ ID NO: 289725 - DNA, 201 bp, Homo sapiens
acagggtttcaccatgttggccagtctggttgaactcctgacctcaggtaagccgcctgcctccacctcccaaagtgctgggattacaggcttgagccacygtgcccagcctcgtgagcacatctttgggccacatctccttttatgttctagatgctattggtttgcctttgtttgctgattacaacaataacagtcatt

SEQ ID NO: 289726 - DNA, 201 bp, Homo sapiens
tcccccgggagtacctggacttggggatcggtcagatccagccgctcctgggaagggccctcggagcggacgtgcaggctgccaccttgctatcggtgctygctccctttcaccccttcccgcacccctccccatctcacctcaggttatttcttctgtgatttctgagtgttgtctttgggaccctatggctcaggctcg

SEQ ID NO: 289727 - DNA, 201 bp, Homo sapiens; identical to SEQ ID NO: 59841

SEQ ID NO: 289728 - DNA, 201 bp, Homo sapiens
tgaggtcaggagtttgaccagactggccaacatggtgaaaccctgtctctactagaaatacaaaaattagccagtgtggtggcatccgcctgtaatccccrctactcaggaggctgaggcaggaaaattgtttgaacctgagaggcggaggttgcagtgagccgagattgcaccattgtactccagcctgggtgacagagc

SEQ ID NO: 289729 - DNA, 201 bp, Homo sapiens
gcagagagccgagattgcaccattgtactccagcctgggtgacagagcgagactccatctcaaaaataataataataataataataataataataataataacttaatcttaggctgggcgcagtggctcaacacactttagaataatgaggcaggtgggtcacttgagcccaggagttcgagaccagcctgggcaccatg

SEQ ID NO: 289730 - DNA, 201 bp, Homo sapiens
acatgccctttatggacgagtcctctgggtctgacgatgactgcagctctcaggcgagtttccgaatctcggtcccctcctctgagtccaggaagaccagyggactaggcagcccccgggccatcaagagaggtacagagaaggggagcaggggcagggtgcagcagcaaggagcccctcacctcttcccatgggcacttg

SEQ ID NO: 289731 - DNA, 201 bp, Homo sapiens
aggggagcaggggcagggtgcagcagcaaggagcccctcacctcttcccatgggcacttgaacatgggggtccccacttgatctgagctcgtgaccccccrgcagctccacccccagccccagagaccgggtcccgggtgggtggtcaagtctcagcagctcctgggctgcgtgagtcggggaggtgtgggacccgggcct

SEQ ID NO: 289732 - DNA, 201 bp, Homo sapiens
tctccgcctcctgggctcaagcgattctcctgcctcagcctccggagtagctgggactacaggcatgcaccaccacgcccggctaattttgtgttattagyagagacgtggtttctccatgttggtcaggctggtctcgaactcccaacctcaggtgatcctcgcctcaggtgatcacctcagcctctcaaagtgctggga

SEQ ID NO: 289733 - DNA, 201 bp, Homo sapiens
gacttggagccctttctcttcccagctccgtatttgtgtattttatgtatttggaaataagcatatgattttaattgaacaaaagatctgttgctaaaaaaaaaaaaaaaaaaattgaaaaccattgtctttatattttttattttttgaggcaaagtctcactctgttgcccaagctggagtgcagtggcaccatctcag

SEQ ID NO: 289734 - DNA, 201 bp, Homo sapiens
caggagatcgagaccatcttggctaacacggtgaaaccccgtctcttctaaaaatataaaaaattagctgggcgtggtggcgggtgcctgtagtcccagcwactcgggaggctaaggcaggagaatggcgggaacccgggaggcggagcttgcagtgagccgagatcgcgccactgcactccagcctgggcgacagagcaa

SEQ ID NO: 289735 - DNA, 201 bp, Homo sapiens
cagtttcatttcctctgcaaagttagaggcttgtccttggttaaattccatgaccactctgggcagaaataatcctttttatgccgaattttacttgggcycgatgtatctgccctacacgagcacagaaactccctgccctgctgcagggccctccttggcatccttcctcaccgcccctctgtctcctgccgcccctcc

SEQ ID NO: 289736 - DNA, 201 bp, Homo sapiens
aattttttgtagggatggagtatccctatgttgcccaggctagtctcaaactcctggcctcaagtgatcctcctttgtcagccataagagccaccttaccyggtctgagagccaggctttaaatgtagttccagctgctttgaagcccagctctcacattccagctgtacttcctcttaagggacattgccagagctaagg

SEQ ID NO: 289737 - DNA, 201 bp, Homo sapiens
gggcgtggtggcgggtgcctgtagtcccagctactcgggaggctaaggcaggagaatggcgggaacccgggaggcggagcttgcagtgagccgagatcgcrccactgcactccagcctgggcgacagagcaagactctgtctcaaaaaaaaaaaacaaaaacaaaaagaaggactgggagggtcggcagtaatgaggacca

SEQ ID NO: 289738 - DNA, 201 bp, Homo sapiens; identical to SEQ ID NO: 59838

SEQ ID NO: 289739 - DNA, 201 bp, Homo sapiens
gaccagggccttcccgttcagtatttcattttattcttgaaaaagaaaatgctcctcatcattgcattcattagattatttctgtgtgggtaaaaaaaaamccccaaaacccaactctgtctggcttaagcaaaggggatttattagaaggatcctggggcagctcacagaactgaaggaactatccagcaatcatgactt

SEQ ID NO: 289740 - DNA, 201 bp, Homo sapiens; identical to SEQ ID NO: 59839

SEQ ID NO: 289741 - DNA, 201 bp, Homo sapiens
gtaaggagatctcatcctgtttgcaatcccctttgtaacttgctcctggggaaaacaagacacaatgctagctccttcccaggcccctgaggcatgatcaygttccgtgttccggggagagcttaagaaatcacagtggccagaagcccagcctctctctctcccaggcaggaccaatggggcagtaaccatctggggagg

SEQ ID NO: 289742 - DNA, 201 bp, Homo sapiens
gttgacggaagataaaccactatcttccccataaattaaagatggcggtgagtgggagatgagtcccctctcagtagtaactgcccttgctctctggttcygtgctttgggcagattcgccgctctggaggcaccccatgctgtgctacagcaaagacggcctatacgcctccctcaccaccctgccctctgaggccttgc

SEQ ID NO: 289743 - DNA, 201 bp, Homo sapiens
taaggagatctcatcctgtttgcaatcccctttgtaacttgctcctggggaaaacaagacacaatgctagctccttcccaggcccctgaggcatgatcackttccgtgttccggggagagcttaagaaatcacagtggccagaagcccagcctctctctctcccaggcaggaccaatggggcagtaaccatctggggaggg

SEQ ID NO: 289744 - DNA, 201 bp, Homo sapiens
cataaaagaaaaggcactgttttgtgagtcaagagacctggttttagtcccagctgtgccatgaatggacagaggcaagtcacttcttgccatagccttarttgccacagaagcacaaagacaatatcaaaccaggtcagggttggccgactttttctgtaaagtccaggtagtaactattttatgttttgtgggccacag

SEQ ID NO: 289745 - DNA, 201 bp, Homo sapiens
gttactggccactgcacaccccgtgtgagtgatgggaagacactatgagatcattgtacttttcaggtgggtgtcatggaagagaaggtaaaactatccartctgaagaatgtggactctgaggggagcctgcaccggaaataccaagaattgctgaaagccataaagggcaaagatgagctcatcagccagctagaggct

SEQ ID NO: 289746 - DNA, 201 bp, Homo sapiens
aaggagatctcatcctgtttgcaatcccctttgtaacttgctcctggggaaaacaagacacaatgctagctccttcccaggcccctgaggcatgatcacgttccgtgttccggggagagcttaagaaatcacagtggccagaagcccagcctctctctctcccaggcaggaccaatggggcagtaaccatctggggagggc

SEQ ID NO: 289747 - DNA, 201 bp, Homo sapiens
aagaatagaattttgacacatggaatctctgatcaattcttccattgattttagacataccttctcttctgagtagctcatagttagaagtggcagcatcytgggggttggtggacaaaatgactcctgctaaagctccttaggtcagaaaaaaggtcattttacaattggaatcagtaggtcaatctcataaaagaaaag

SEQ ID NO: 289748 - DNA, 201 bp, Homo sapiens
ggagatctcatcctgtttgcaatcccctttgtaacttgctcctggggaaaacaagacacaatgctagctccttcccaggcccctgaggcatgatcacgttccgtgttccggggagagcttaagaaatcacagtggccagaagcccagcctctctctctcccaggcaggaccaatggggcagtaaccatctggggagggcgg

SEQ ID NO: 289749 - DNA, 201 bp, Homo sapiens
aaaagaaacaatagagaattttttaaaaatgtgccctaagttccaaacaactggcttacaaaagagcccttgtcgtgtggccccagtggcttcctcattaycaatatccccaacttctgggggttagatcttgagacccaagggtctctaaaacgggtaggattcagagcaacagtttactgacccatcttctcttgaacc

SEQ ID NO: 289750 - DNA, 201 bp, Homo sapiens
ccacctaggagggaaagggaagtcgtacaggttcagcccatcacaggaaagtagccagtcacagagctggaagggatctgagagggggcctccagcccagmctcccacctgcacaggcttcgcttctgcagtgccagggccgtgggtgggaggagccacaagtgtcctgatttacatgaaccccactcactggctcctctc

SEQ ID NO: 289751 - DNA, 201 bp, Homo sapiens; identical to SEQ ID NO: 59825

SEQ ID NO: 289752 - DNA, 201 bp, Homo sapiens
gcatgagaaagccatcccactctggctttgccctcttcacggacgatccctcgggcagggacctggagcactgcctgcagggaagtgtcaaggtgacagcytcccactaagccagctgagcccctccctgctcagggatattggtggtggggaaagagcccatctgatgggtgtctgactgtttggtagctcatttggtgc

SEQ ID NO: 289753 - DNA, 201 bp, Homo sapiens
tggggtgcaggcgggctctgctgctgatactctgtgaaaccctgggcagctcaggccttctgtcagccttccctatactgcgtgtgcgtgtgtgtatatgmacacacacacacacacacacacacaaacatctgccaagaaaacagaccagaccaccctgggcaacatggcaaaaccccacctctacaaaaaatgcaaaaa

SEQ ID NO: 289754 - DNA, 201 bp, Homo sapiens
aagtgctaggattacgggtgtgagccaccacacccggctgacaaacatacatcttttcctctgtcctcacacaagtggttcacacctgcaggagggtatcrgctcatttggcctcctatccccttctttggatgtacatctcaggtcacctgctagactgcaagttcttggagacagaactgatgcctggcttacctgcgt

SEQ ID NO: 289755 - DNA, 201 bp, Homo sapiens
gagaagatgaacagggccctggcccccctcttgagatctgtcactggcctgctcctggagggaatgccatctgcccagttctctgcttcccccacaccccytcctgggttatgcccttgagtaatctcattcctctcttccctgctcagcttcaagccctcctgcccttgtttcccctgggtctttctctggcctggtcta

SEQ ID NO: 289756 - DNA, 201 bp, Homo sapiens
ttttggtagagacggggtttcgttatgttggccaggctagtcttgaactcctgacctcaggtgatctgcccgcctcagcctcccaaagtgctaggattacrggtgtgagccaccacacccggctgacaaacatacatcttttcctctgtcctcacacaagtggttcacacctgcaggagggtatcagctcatttggcctcc

SEQ ID NO: 289757 - DNA, 201 bp, Homo sapiens
gctgaacagctgaggtaggtaggctacaaggtcttgcagcaagtcactgtggggaggtctcaggcctggaatgaagacacgtcggcacttcattggcactrtttctctccatctgcccacaccaggcacctggcagatatgttgaccacaaaatgggcaacattgcaaggatgctcccctcctgagtgcatccgcatctac

SEQ ID NO: 289758 - DNA, 201 bp, Homo sapiens
ggggtgtctcatcaggaaaggcccctggcctcatcatccaatgactggggcggggctctagggccaggcttctgcacatggtgaccctgcccagggagctsagcccagcacgtgtcattttgttttattgtttattaggttattataaaaattccacatttacaaaaatgtgaatcagtatgaacgtggacaaggtaagaa

SEQ ID NO: 289759 - DNA, 201 bp, Homo sapiens
ttttcctgcacatgcctggagggggtgggatgggcatcatgccgggccctgagcttcctgagacctcttgtttcaggagagccggatctatgctgtggccrcatcgggcatgcggctctcagatatgtctcccagaagtaatactgcatgctgcggtgagttccaagtgaggcttggaggcaccaaacacccaaggtgggc

SEQ ID NO: 289760 - DNA, 201 bp, Homo sapiens
  misc_feature (1)...(201): n = A,T,C or G
cctcagtagagaggacagcagccacgggctcttcacctgccccatgaactcaggattagggagctgagagttgccttgaaaatccttaccctgacactctngagtcacttgagatgggcacttgaagtctggcctgtgtgcagtgtgtgcacagttctctaaagtggccttgatgccgtgttcacagtagggacatggcac

SEQ ID NO: 289761 - DNA, 201 bp, Homo sapiens
gggccgtgtgagagagggagagttgcggaaagtcaactttcagtaagatgcttttccccatatgcaaaatgaaacccaaggtagtttaagaccaaagtccragcagtttactaagctgttatcttgcttgcgtctttgctcgctcattaaggcacaccaaagacatgctgccaatcttctcggtcccccatcacttccgga

SEQ ID NO: 289762 - DNA, 201 bp, Homo sapiens
acactatgagatcattgtacttttcaggtgggtgtcatggaagagaaggtaaaactatccaatctgaagaatgtggactctgaggggagcctgcaccggarataccaagaattgctgaaagccataaagggcaaagatgagctcatcagccagctagaggctcagctggagaagctggtaagggctcatgcgcaagggagc

SEQ ID NO: 289763 - DNA, 201 bp, Homo sapiens
tccccatccgatggctttccgccctcttccaggatacgtggctctaccacctcacagtggctgcaggtggcagcagtgccaaggtgggcactgcctatgarcagctcattggaaaactgatggatggtgaaggagatccaggtaaggcaagggtggccaccactgcttgggttggagggtagtggcttggtgactattggt

SEQ ID NO: 289764 - DNA, 201 bp, Homo sapiens
aggaactcagcataagagctaataagtaagaaagccaggattcaagccaaggctagttcaattccttcacatctctgacctcctcttagattgcagaagcyaccttcatcatggccagctatatgaaccattgcactacaactgtgaacccccccaccaacccacccggagcctgccagctgtgggaactggatggacgac

SEQ ID NO: 289765 - DNA, 201 bp, Homo sapiens
ttatgctcttcactttttcttttttattctctcaagccccagcatcatgcagtcctcagttgggtgcttacgtgctcttctcttccttgcagcagtcctcraggcagggcagattcctctttaaggtgctcgcatgttacccctgggttctgctgacccaacattagctacaaagtgggacagtcccacagtgctccctct

SEQ ID NO: 289766 - DNA, 201 bp, Homo sapiens
ttggaaaaggatgaacatatatcttttttttttttttttttttgagacggagtctcgctcttgtttcccaggctggagtgcaatggcacaatatcggctcwctgcaacctctgcctcctgggttcaagcaattctcctgcctcagcctcctgagtagctgggattacaggcacacgccaccacgcctggctaatttttgta

SEQ ID NO: 289767 - DNA, 201 bp, Homo sapiens
cctttaaggtccttccagctctgaaatactgagagtctgacgttgtctgatgctgggattataggcatgagccaccatgcccagccaggctgctcctcttyagatgccaaccttttcaatcatctcctcttttgactactttgatggaaatacctcagttatctgcaattttgccttatttttttgttttttaactataaa

SEQ ID NO: 289768 - DNA, 201 bp, Homo sapiens
agtaacttgcccaagatttgttagccagtcactgccccccacaggtctgcccacccccaaagccatgctttttcctgcacatgcctggagggggtgggatrggcatcatgccgggccctgagcttcctgagacctcttgtttcaggagagccggatctatgctgtggccacatcgggcatgcggctctcagatatgtctcc

SEQ ID NO: 289769 - DNA, 201 bp, Homo sapiens
tttattgctcaccctgtccagggttccctctgtttgtgagggagctgctgccaccttgggtccaggaagcatgaagctccgcaggtcagcctcctggtggraggacttttccttagttttctttgctcttctgctctgagtccagccctggctggaccttgatcccttctctccttatcaggaaattttctgactttcttc

SEQ ID NO: 289770 - DNA, 201 bp, Homo sapiens
ccttctataggtgtccagtacccttggtatcgaagcaccataactattaatacctaaagctttcctccaataataatttagtctgtgtccctgtttttctytaaaatgaatgttgccatgaacatcactgtgcacatatatctttgggaacttatatctacatgtgtctgtaggacagagttctagaggtgggatttctgg

SEQ ID NO: 289771 - DNA, 201 bp, Homo sapiens
gccacctagcaagttcttcctattttcatatgcctggaggggacatctgattggcctggctaatcgtttcatggcaggtcataggtcactgaatagcccaygatggctggggtgccgcagggtgtcatggcaccctcactgtgaaaggggtggttccattagtagggagcccaaatggcatctccatctctaccataggtc

SEQ ID NO: 289772 - DNA, 201 bp, Homo sapiens
ttcctattttcatatgcctggaggggacatctgattggcctggctaatcgtttcatggcaggtcataggtcactgaatagcccatgatggctggggtgccrcagggtgtcatggcaccctcactgtgaaaggggtggttccattagtagggagcccaaatggcatctccatctctaccataggtcaaatctgtctccctgt

SEQ ID NO: 289773 - DNA, 201 bp, Homo sapiens
tcttactgatagggcctaaagccacaggactgcattcttgctttcctatttcttttacagcacctaggagattggctgaagtcagaagcacttcggcttgkagactataggtggaatgccgtgtttccaagactaggagaaaaccagctgttccccattcccctaacagagcagctagggctggcctctattctgtagcac

SEQ ID NO: 289774 - DNA, 201 bp, Homo sapiens
ggggagggttcacagacgtttcaggtgagcacgctcctggctgctagtattttaaacagaagaggtgctgggtttggatatggccgtgagtgagacaaagrtggggccaaatgagcatgaatgaaagacttcagatcaacatttggacgtgatcctaacttgtgagtacaagaaaggaagatgagacagaatatgagagat

SEQ ID NO: 289775 - DNA, 201 bp, Homo sapiens
ttcttactgatagggcctaaagccacaggactgcattcttgctttcctatttcttttacagcacctaggagattggctgaagtcagaagcacttcggcttkgagactataggtggaatgccgtgtttccaagactaggagaaaaccagctgttccccattcccctaacagagcagctagggctggcctctattctgtagca

SEQ ID NO: 289776 - DNA, 201 bp, Homo sapiens
tttccacagtccagagcagaattgtgattgcttatcttcatttgtcctttgttgactgccccaaaagaaaagatgtgatcaactaattcacacacacaaarattcagacttgaaataacagccctctcaagagtgctttcattttttttaaagtttgaaagaacaatgtataacctaaacaaatacatctccactggtttg

SEQ ID NO: 289777 - DNA, 201 bp, Homo sapiens
tcacttcacttctctatgctttagtttccttctcagtataccaaaataaaaaatacttggccgggagcagtggctcatgcctgtaatgtcagcactttgcsaggccgaggcgggcagatcacctgaggccaggagttcgtgaccagcctgaccagtgaaaccctgtctctactgaaaaaaataaaataaaataaaataaaa

SEQ ID NO: 289778 - DNA, 201 bp, Homo sapiens
gctgacaaggtgagtccctcagagcagggagctgcctctccacacgcagaggtttatggcagggagggccgtgtgagagagggagagttgcggaaagtcarctttcagtaagatgcttttccccatatgcaaaatgaaacccaaggtagtttaagaccaaagtccgagcagtttactaagctgttatcttgcttgcgtctt

SEQ ID NO: 289779 - DNA, 201 bp, Homo sapiens
cttggaatccagagacctgggtttgagtcctatataccttccaactatgaggtcttagccaagtcacttcacttctctatgctttagtttccttctcagtrtaccaaaataaaaaatacttggccgggagcagtggctcatgcctgtaatgtcagcactttgcgaggccgaggcgggcagatcacctgaggccaggagttc

SEQ ID NO: 289780 - DNA, 201 bp, Homo sapiens
gagatgctgaccaagaaataagaaagggcctccaaaagattgttggtaaaggagggacccaggtatgcccagttcatttacagtggataagctcacatccytcatgcactggccctttgcctgtgaacacagaaaccaacttgctttggccttttgtatttgcccttgctcctttccacctgctgtatccagacacctcca

SEQ ID NO: 289781 - DNA, 201 bp, Homo sapiens
cccttgtttcccctgggtctttctctggcctggtctacaagaatgtcactgtgcctgtctacacagcactgaagggggtaagaaactgctgcacaaagagrgggtgtctcatcaggaaaggcccctggcctcatcatccaatgactggggcggggctctagggccaggcttctgcacatggtgaccctgcccagggagctg

SEQ ID NO: 289782 - DNA, 201 bp, Homo sapiens
ccttctgtctttttagaagtgaaactggccagtatgccacctactgccagcgggcagtggagcggaccctgcggaccggggagcgggaagccaggccatcrcgcatggaagtggtgtccatcctgctgcgtaaccccttccaccactccttgcccttcagcatccccgtgcactttaccaacgggacttaccatgtgagga

SEQ ID NO: 289783 - DNA, 201 bp, Homo sapiens
gaaaatatccatgccagcaacctgctatataaaggtcctgaatgacaaattaatgtcccagaccagagtcttcagggcttttctcacaacctgccccagcyacagttttggtcctggctgagtctagatagggatccggggtgccaaagtggcagagatgagcagagcccataatactcccctcttccttctgtcttttta

SEQ ID NO: 289784 - DNA, 201 bp, Homo sapiens
ttcagagagaggagactccctcgtcccccactggctctcccattcatggaagactgctgtccacagcgacccctgggctgcctgcctgtgcgggatgcgcrcatagaggaagtagatcgatcctgtgactcagacgaggactatgaggctggaggaaccagacggttgctttcctcccactgcaccctggtgatccacccc

SEQ ID NO: 289785 - DNA, 201 bp, Homo sapiens
gtgtggattgctgtgaatgaggatggcgtcagcatcctggaccacaacactatggtatgaaaggatgcaggctgctccctgacccctcctcttcctcaacrtggtcttttcttctcctctgtggactcaaaagcctgaaccaagtgaccatggctgccctacccccactcctgcccaagcaccagtcctctagtctagaca

SEQ ID NO: 289786 - DNA, 201 bp, Homo sapiens
gaaatgctttgagtgtcaagtgtccttgcagggtggataagaaggactggctgggtgcggtggctcacgcctgtaattccagccctttgggaggccgaggygggcggatcacgaggtcaggagatcgagaccatcttggctaacacggtgaaaccccgtctcttctaaaaatataaaaaattagctgggcgtggtggcggg

SEQ ID NO: 289787 - DNA, 201 bp, Homo sapiens
ggatctgaactcccgctgccaaattgttcgaggggagggttcacagacgtttcaggtgagcacgctcctggctgctagtattttaaacagaagaggtgctrggtttggatatggccgtgagtgagacaaagatggggccaaatgagcatgaatgaaagacttcagatcaacatttggacgtgatcctaacttgtgagtaca

SEQ ID NO: 289788 - DNA, 201 bp, Homo sapiens
caacagcccccacctggcccatccactgtcagattttgactggtctcttcatatgcttctaccacaggtagaatatggggacttggagaagcctgccctgycaggccctggaggcacatcccctgccaaggctcagcatcttctccagcaggtcctagacaggttccaccccaggcgctatagacatggggcccccgctga

SEQ ID NO: 289789 - DNA, 201 bp, Homo sapiens
cccaaaggcccttggagctgagctggaggaagtggagctgggtaacaagccacctacacccccgctgcaccagttttcatcctgggtaagaggcaacctcygggctgggcagaggagcagagctaatggcaagaacactgctggctgagcacagccatgcactgagcaggagaggaggctgctggcatcctcatggtggcc

SEQ ID NO: 289790 - DNA, 201 bp, Homo sapiens
gcagtgagggaggggcctgtcttgcagagagctacacagatcagcaacatgccctttatggacgagtcctctgggtctgacgatgactgcagctctcaggsgagtttccgaatctcggtcccctcctctgagtccaggaagaccagcggactaggcagcccccgggccatcaagagaggtacagagaaggggagcaggggc

SEQ ID NO: 289791 - DNA, 201 bp, Homo sapiens
ataggctcataaatagtgggaaaagagtactttatctttttggaaataaaggtaacagacccagagaaagccccatccctgtttggaatccctgctgagtyctggtttcttattctcttctttgtaggctgtactttcgcagtcaagtcaaaggggagacggaccgagaacggctgctccttgcctctcaaaccagtagag

SEQ ID NO: 289792 - DNA, 201 bp, Homo sapiens
aaaacgggtaggattcagagcaacagtttactgacccatcttctcttgaacctcctttgccccaaaggtgaagggtggaggcaagagagggaactgttggrcactgattatattccaggtgttaaatgcttatgttaagtatttcattgattctcacagcagcctgaaaggtaagtattattacctccatttagagcagag

SEQ ID NO: 289793 - DNA, 201 bp, Homo sapiens
cattgatgacaatatccttgaccttgcccatttctatgaaggtagtgctttctttgcctgaagcataagatgaagtcatctgaatgccaagggaatcaatrattaacagagtctcctgatcaatcttcacaaaatggagataaccaagcagacctaagagggtgatgaagatggcagcagagaggatcatgctgttctgaa

SEQ ID NO: 289794 - DNA, 201 bp, Homo sapiens
aaaaaatgctgagtaacagaaaagtattaatgtgcttgacaccatgactgaaatactatgatcttgtttgtcaataaaaagcagctatctgtgaaccaggwaactgtgtgttttggaagatctgtttattaacagtaaataaataagccctgtacagaacacaggcactaggttgacagactcgtcttttgtaggacattt

SEQ ID NO: 289795 - DNA, 201 bp, Homo sapiens
ctgggatgctatagtctccacctccccatcctgtcatcggtccatatccacgattcccagcttcacggagcctatgtattcagagagaggagactccctcrtcccccactggctctcccattcatggaagactgctgtccacagcgacccctgggctgcctgcctgtgcgggatgcgcgcatagaggaagtagatcgatcc

SEQ ID NO: 289796 - DNA, 201 bp, Homo sapiens
acgccaccacgcctggctaatttttgtacttttggtagagacggggtttcgttatgttggccaggctagtcttgaactcctgacctcaggtgatctgcccrcctcagcctcccaaagtgctaggattacgggtgtgagccaccacacccggctgacaaacatacatcttttcctctgtcctcacacaagtggttcacacct

SEQ ID NO: 289797 - DNA, 201 bp, Homo sapiens; identical to SEQ ID NO: 59832

SEQ ID NO: 289798 - DNA, 201 bp, Homo sapiens
aaatcttctactactatcggagccatgaggacaaggtacttctcagcctcctcacaatacccactctcctgcttcccccgaagcacatgactgccactctrtgtcctgatgaaagtccctaccccacgtaaccccacaataaatacaaaatcagttggctggatccctccagagtgtgagattctgcctgtctgggtctct

SEQ ID NO: 289799 - DNA, 201 bp, Homo sapiens
ccgagtactccagagcctgctgaaggtgcaggccaccgggcctccagctctgcttcggggtggcaccaagcccaccgtgaagggctggctgaccaaggtasagggtggggctgatagggcaggaacatgtgcctcctgcgaatcaggggagccaggattggggtgccgagggtggtgggttcccccttatacggggctcct

SEQ ID NO: 289800 - DNA, 201 bp, Homo sapiens
gtgagtttcagaatgaaatagggaggttctcagaaggacccatgttcctgattaaggttccatttagctataaccagaatctagaataagtcacccatcayaacacagccagaatgctgggaatcatgtttccctttgcttatgacgtggaggaagatctgagggtaaatgaggtgctccggaaaggctccacattcagtg

SEQ ID NO: 289801 - DNA, 201 bp, Homo sapiens
aagtccccggtgagagtctccccgcccagcactgcagtcaaaaggtctccacatcacaccctggactatgtcagatgggacggaggagggggaatgtggcycaaggccagagggcaaaggtctggcaggtggggagaggcaacctcactgggcccctgaggctttgagccacacttggggacctaagcctggccgtgagtt

SEQ ID NO: 289802 - DNA, 201 bp, Homo sapiens
tgggcacttgaacatgggggtccccacttgatctgagctcgtgaccccccggcagctccacccccagccccagagaccgggtcccgggtgggtggtcaagkctcagcagctcctgggctgcgtgagtcggggaggtgtgggacccgggccttgactcctcctccctcggcaaggcgtctccatgtcctcactgagctccga

SEQ ID NO: 289803 - DNA, 201 bp, Homo sapiens
cagcccccgggccatcaagagaggtacagagaaggggagcaggggcagggtgcagcagcaaggagcccctcacctcttcccatgggcacttgaacatgggsgtccccacttgatctgagctcgtgaccccccggcagctccacccccagccccagagaccgggtcccgggtgggtggtcaagtctcagcagctcctgggct

SEQ ID NO: 289804 - DNA, 201 bp, Homo sapiens
tctgcaacagtggaacactgtgcaagcctcatggaggaaaaaatggttaaaggtaaggcttttggattcttttgtgagggatcctttaccacatggagatsatggtccccaaagggagtcaaggggagaagatgaacagggccctggcccccctcttgagatctgtcactggcctgctcctggagggaatgccatctgccc

SEQ ID NO: 289805 - DNA, 201 bp, Homo sapiens
aagaaaggagggagcactagggcaggcagaaggccagccccttgggttcagggacaggtgccacctcggagccaggtcctggttactccattctcccagcrtgctgccccacccccatatctcgccctccacagctcatctctgagaagaaaacctactacctgacggccgattcacccagcctgctggaggagtggatcc

SEQ ID NO: 289806 - DNA, 201 bp, Homo sapiens
gtatgatttgtaactcacatctgcaacagtggaacactgtgcaagcctcatggaggaaaaaatggttaaaggtaaggcttttggattcttttgtgagggaycctttaccacatggagatcatggtccccaaagggagtcaaggggagaagatgaacagggccctggcccccctcttgagatctgtcactggcctgctcctg

SEQ ID NO: 289807 - DNA, 201 bp, Homo sapiens
ggaactaactctggcctagctactattatgctcttcactttttcttttttattctctcaagccccagcatcatgcagtcctcagttgggtgcttacgtgcwcttctcttccttgcagcagtcctcgaggcagggcagattcctctttaaggtgctcgcatgttacccctgggttctgctgacccaacattagctacaaagt

SEQ ID NO: 289808 - DNA, 201 bp, Homo sapiens
gtcgtacaggttcagcccatcacaggaaagtagccagtcacagagctggaagggatctgagagggggcctccagcccagcctcccacctgcacaggcttcscttctgcagtgccagggccgtgggtgggaggagccacaagtgtcctgatttacatgaaccccactcactggctcctctccagccagccaccaaatctcca

SEQ ID NO: 289809 - DNA, 201 bp, Homo sapiens
gcctccggagtagctgggactacaggcatgcaccaccacgcccggctaattttgtgttattagtagagacgtggtttctccatgttggtcaggctggtctsgaactcccaacctcaggtgatcctcgcctcaggtgatcacctcagcctctcaaagtgctgggattacagacatgagccactgcgctcagctggaagatac

SEQ ID NO: 289810 - DNA, 201 bp, Homo sapiens
ttctcctgcctcagcctccggagtagctgggactacaggcatgcaccaccacgcccggctaattttgtgttattagtagagacgtggtttctccatgttgrtcaggctggtctcgaactcccaacctcaggtgatcctcgcctcaggtgatcacctcagcctctcaaagtgctgggattacagacatgagccactgcgctc

SEQ ID NO: 289811 - DNA, 201 bp, Homo sapiens
tgggaagataacattctattttattttattttattttattttatttattcatttattgagatggagtttcgctcttgttgcccaggctggagtgcaatggygccatcgcagctcgccacaatctccgcctcctgggctcaagcgattctcctgcctcagcctccggagtagctgggactacaggcatgcaccaccacgccc

SEQ ID NO: 289812 - DNA, 201 bp, Homo sapiens
tggctttctggtgtgccaggatctcctggcagctcctgtatacttcaatcaagcagtccagccggggcttggcactctgaattccaaaggggagaaatgcrgagtcaaggtgagaatataagggagtgcagtggtgctgcatccacttgcaaatttttttttttttttttttttgagacagagttttgctctgttgcccag

SEQ ID NO: 289813 - DNA, 201 bp, Homo sapiens
cacagtagggacatggcacctacatctcccctttctctctggccaagcagatgcaggagctggagcagaggctgctggaggcagagcagagagcagagaaygctgagacccaggtaaccaggggaggggatcggcgggaatatgcaggggaatgaccgtcggcccttccaggcccttcccacggacacaggtggacacata

SEQ ID NO: 289814 - DNA, 201 bp, Homo sapiens
ctcataaatagtgggaaaagagtactttatctttttggaaataaaggtaacagacccagagaaagccccatccctgtttggaatccctgctgagtcctggyttcttattctcttctttgtaggctgtactttcgcagtcaagtcaaaggggagacggaccgagaacggctgctccttgcctctcaaaccagtagagagata

SEQ ID NO: 289815 - DNA, 201 bp, Homo sapiens
tggttccattagtagggagcccaaatggcatctccatctctaccataggtcaaatctgtctccctgtggcttctatttgccagtcctggatttacttctaragttacctagttctcataatgccagttcatttctgtcttacaggtaaagcatggccactccaaggtggtctggtgcgctcttgttgggaaaatcttctac

SEQ ID NO: 289816 - DNA, 201 bp, Homo sapiens
ttcttggcccagttctgctactccttagctctatgcaaggctctaagcaagtcacagatgtgatgagttttctcatctgttcattgtgactaattgtgttygtcctccatctcagggataaagagagaaataacacatgcgtcgcaatgctttgacaagttacaaactctactgcaaatgtaaggtattcatttctgctca

SEQ ID NO: 289817 - DNA, 201 bp, Homo sapiens
gactctgaggggagcctgcaccggaaataccaagaattgctgaaagccataaagggcaaagatgagctcatcagccagctagaggctcagctggagaagcwggtaagggctcatgcgcaagggagcaccatgccctcttcgacatctgtactgctggcccccagcttcctgagctgttccgctcaagccctctagtgctgg

SEQ ID NO: 289818 - DNA, 201 bp, Homo sapiens
actggggttatgctagtgctctgcaagggccctgcccagataaaattgttggtcttgtctgtaattagtattccaaaggttcaggtggtgttgcatctccrtatcaatgttcagctagtaggtaaagggacatatttggagggaactaactctggcctagctactattatgctcttcactttttcttttttattctctcaa

SEQ ID NO: 289819 - DNA, 201 bp, Homo sapiens
tttgagaaccctgacttaagctatggtgttggaggagggacgaaaaggaaggaaaggataagtagggattgactcagccaggcagtctgagatatatctcrgagggaagagacttctgtttctagtaatatggacaacaaaataacaaaaaaaaacccactatgaatcacctggaaatactgggttaaatatttaaaatat

SEQ ID NO: 289820 - DNA, 201 bp, Homo sapiens
caactttcagtaagatgcttttccccatatgcaaaatgaaacccaaggtagtttaagaccaaagtccgagcagtttactaagctgttatcttgcttgcgtmtttgctcgctcattaaggcacaccaaagacatgctgccaatcttctcggtcccccatcacttccggagtcacctgtggctgcagcggagaggttctatta

SEQ ID NO: 289821 - DNA, 201 bp, Homo sapiens
tgcagtgagctgagattgcgccactgcactccagcctgggcgacagaggagacgatctccaaaacaaaacaaagaaatgctggttcgggaggcacacagcyctagacttttgggctatatccttggcagtgactgttgatcagcttctggttgtttcaaggacacctgtaagactggagacccagttgagccaagagtggg

SEQ ID NO: 289822 - DNA, 201 bp, Homo sapiens
ggtactgccgatagaaaggaatgaatatacatcaggaaagggcagcagaccttagacagtgattctcaaagtgtggtcagaaccgtttggccagaaccacstagagtgcttgttaagcatgcatattcctgggttctaccccagtcctctcaattgaagtctcctggggggttgctaataatctgcatgtttaacaagcgt

SEQ ID NO: 289823 - DNA, 201 bp, Homo sapiens
atcctaacaaggccagctcagggccggctctctcctgacgctctccctggccaggctctccctctagcagcccctgctctgctaccttctcatagtgaggkcttccccagctagcatgggagcccttccttggcaggaccacccatgttttatttagtcctctctgaaccatagcagggcatggtactctgaaaatacact

SEQ ID NO: 289824 - DNA, 201 bp, Homo sapiens
aggctctaagcaagtcacagatgtgatgagttttctcatctgttcattgtgactaattgtgtttgtcctccatctcagggataaagagagaaataacacaygcgtcgcaatgctttgacaagttacaaactctactgcaaatgtaaggtattcatttctgctcatccttgtgcatttttatgggaggtataagtgcaaggt

SEQ ID NO: 289825 - DNA, 201 bp, Homo sapiens; identical to SEQ ID NO: 59835

SEQ ID NO: 289826 - DNA, 201 bp, Homo sapiens
actcagagcctgagcacaaactgcagcgcacctcatcctactccaccgacgggctgggcctgggcggggtgagccgggaaacgggcgggggcagggtggargcagaatgcagcagaggctgctggggccctcagcacaagacataggcagtagctgcctgaagtgaggggtccctagagctgggggatgggggcagggggc

SEQ ID NO: 289827 - DNA, 201 bp, Homo sapiens
aacatagcgagagcttgtctctacaaaaaaataaacgaaattaactgggcctggtggtgtgtgtctatggtcccagctactcaggaggctgaggtgggagkatcagttgggcctgggaggtcaaggctgcagtgagccaagattgctccactgcaattcagtctggccaacagagcaagaccctgtctcaaaaaaaaaaaa

SEQ ID NO: 289828 - DNA, 201 bp, Homo sapiens
ctattctccctatttctaatgtgtgatagagcattccagaataaaaatagaaaaaaaaattgagctgagttttgtttccagctcacttcccctctctcatktccccatttattttttgccattaatgtatttgtgttagactagcctgttagtatgagatatctgctaccactactgaagcatcatcatgggaagaggaca

SEQ ID NO: 289829 - DNA, 201 bp, Homo sapiens
gggcaacatagcgagagcttgtctctacaaaaaaataaacgaaattaactgggcctggtggtgtgtgtctatggtcccagctactcaggaggctgaggtgrgaggatcagttgggcctgggaggtcaaggctgcagtgagccaagattgctccactgcaattcagtctggccaacagagcaagaccctgtctcaaaaaaaa

SEQ ID NO: 289830 - DNA, 201 bp, Homo sapiens
tattggggacagagggacttattgtactattctccctatttctaatgtgtgatagagcattccagaataaaaatagaaaaaaaaattgagctgagttttgyttccagctcacttcccctctctcatttccccatttattttttgccattaatgtatttgtgttagactagcctgttagtatgagatatctgctaccactac

SEQ ID NO: 289831 - DNA, 201 bp, Homo sapiens
gaaggagagacagggaggaaaagatgaggaggaaaagaaaggagggagcactagggcaggcagaaggccagccccttgggttcagggacaggtgccacctyggagccaggtcctggttactccattctcccagcgtgctgccccacccccatatctcgccctccacagctcatctctgagaagaaaacctactacctgacg

SEQ ID NO: 289832 - DNA, 201 bp, Homo sapiens
ccttgatttccactcctcactattaactttgcttgcatatggaggcacagcgttctccttccatgtcagggatatgccgcgtttattcagccaaccccttygtggtgaacacttagactatttccagttttgagtttttaaattttgtgttaccttatcaaataatatttcaacaaacgatttctgctcactggctttgcg

SEQ ID NO: 289833 - DNA, 201 bp, Homo sapiens
  misc_feature (1)...(201): n = A,T,C or G
agtagagaggacagcagccacgggctcttcacctgccccatgaactcaggattagggagctgagagttgccttgaaaatccttaccctgacactcttgagncacttgagatgggcacttgaagtctggcctgtgtgcagtgtgtgcacagttctctaaagtggccttgatgccgtgttcacagtagggacatggcacctac

SEQ ID NO: 289834 - DNA, 201 bp, Homo sapiens
gtgccatctcagctcactacagcttcaacctcccaggctcaagtgatccgcctgcctcagcctcctgagtagctgggactacaggcgcacaccgccacgcycagctaattaaaaaagaaaaattttagtagagatgaggtcttgatatgttgcccaggctggtcttgaactccagggctcaagtgatcttcccgccttagg

SEQ ID NO: 289835 - DNA, 201 bp, Homo sapiens
ccatcaataaggaacccttcaataagatcatgtaaaagccacacgataggatacattaaagctgttataaagcgtgcagagaaaatgtggcagatatataytttgatgtaggaatatctctaagttatattgttgagtacagtgtgtatggtgggccacgatttttgggtgggtgtgtgaatgccacatacatatgaatgc

SEQ ID NO: 289836 - DNA, 201 bp, Homo sapiens
gtggtgccatctcagctcactacagcttcaacctcccaggctcaagtgatccgcctgcctcagcctcctgagtagctgggactacaggcgcacaccgccaygctcagctaattaaaaaagaaaaattttagtagagatgaggtcttgatatgttgcccaggctggtcttgaactccagggctcaagtgatcttcccgcctt

SEQ ID NO: 289837 - DNA, 201 bp, Homo sapiens
cctgcaccggaaataccaagaattgctgaaagccataaagggcaaagatgagctcatcagccagctagaggctcagctggagaagctggtaagggctcatscgcaagggagcaccatgccctcttcgacatctgtactgctggcccccagcttcctgagctgttccgctcaagccctctagtgctggggaactcgctccct

SEQ ID NO: 289838 - DNA, 201 bp, Homo sapiens
catctctgagaagaaaacctactacctgacggccgattcacccagcctgctggaggagtggatccgagtactccagagcctgctgaaggtgcaggccaccrggcctccagctctgcttcggggtggcaccaagcccaccgtgaagggctggctgaccaaggtagagggtggggctgatagggcaggaacatgtgcctcctg

SEQ ID NO: 289839 - DNA, 201 bp, Homo sapiens
acttgtgagtacaagaaaggaagatgagacagaatatgagagatggagtgaaggaaggagagacagggaggaaaagatgaggaggaaaagaaaggagggavcactagggcaggcagaaggccagccccttgggttcagggacaggtgccacctcggagccaggtcctggttactccattctcccagcgtgctgccccaccc

SEQ ID NO: 289840 - DNA, 201 bp, Homo sapiens
acaagtccccggtgagagtctccccgcccagcactgcagtcaaaaggtctccacatcacaccctggactatgtcagatgggacggaggagggggaatgtgkcccaaggccagagggcaaaggtctggcaggtggggagaggcaacctcactgggcccctgaggctttgagccacacttggggacctaagcctggccgtgag

SEQ ID NO: 289841 - DNA, 201 bp, Homo sapiens
gtcccggctgggggttggccacaccatgggcacttggaccaggagtgcaagctgcagggttgggagaggactgttttgcagcctgagctgcagtgagggasgggcctgtcttgcagagagctacacagatcagcaacatgccctttatggacgagtcctctgggtctgacgatgactgcagctctcaggcgagtttccgaa

SEQ ID NO: 289842 - DNA, 201 bp, Homo sapiens
atattggtggtggggaaagagcccatctgatgggtgtctgactgtttggtagctcatttggtgctgagcccaaggtgctgccctagtcagcatttctgtgycatcctaaaatgtacctgggcagggagaaaaaagctgttgtgtgcccttgtctctggagacaagatcgctacacacctacttccctcgagtggctgtgca

SEQ ID NO: 289843 - DNA, 201 bp, Homo sapiens
tttctggttctgaccaatgtcattgacttatcactcttgacccaaatggaaatgcctccatgagaggtaagacccaagtttatcctttactccaccttggyctccatttgcaaaagagcaagacaagtttttccatcagatgaagtcagaaaatatcagccaatcgtttcagaatgtcacaaatatgaattatcatttcta

SEQ ID NO: 289844 - DNA, 201 bp, Homo sapiens
cctcctgttggtatgagatcagcatgaccctgcatctgctctgtgtcatactcggttatatgtttctggaggcaatacaaaataggctcataaatagtggraaaagagtactttatctttttggaaataaaggtaacagacccagagaaagccccatccctgtttggaatccctgctgagtcctggtttcttattctcttc

SEQ ID NO: 289845 - DNA, 201 bp, Homo sapiens
acagcgtgtgacaaggagctgtacacttgggggttaaataccagattggtgccaagtgcacttcatcaggttgctgcagccagttctagggcagcttatgwgtcttatgtgcagctggtgaaagtagatccctgtcagccacctaaacctgacacctccttggctggcgtgttaccccagacccacacactgaaaggacag

SEQ ID NO: 289846 - DNA, 201 bp, Homo sapiens
tatatggaatctggatttttatgtgacatgtgagatttggatgtgagaggcagtgtagtatagtggctgacagaatgtactctggagccagtctacttgartttgaattctggctttgaatcttagtaactgtgtgaccttaggcaagttaccttacctctctgttttagtttcctgatccacacaatagagatactaaca

SEQ ID NO: 289847 - DNA, 201 bp, Homo sapiens
aggttctccttaaggtttctcaggtttcgcggtttcctgaggctctcagctaacttacaatggagcgggacacactgagctgaggaaggcagggaggggcmctggggatcagtgaccaattctcttccccagccctgttttctcttccccagccctgttttctctgtcctttggtcccctcccgttctttccccacagaac

SEQ ID NO: 289848 - DNA, 201 bp, Homo sapiens
tagtgtggccagatcttttgattttttaagagaagatggaaacaagatgtatatggaatctggatttttatgtgacatgtgagatttggatgtgagaggcwgtgtagtatagtggctgacagaatgtactctggagccagtctacttgagtttgaattctggctttgaatcttagtaactgtgtgaccttaggcaagttac

SEQ ID NO: 289849 - DNA, 201 bp, Homo sapiens
ggaaggcagggaggggccctggggatcagtgaccaattctcttccccagccctgttttctcttccccagccctgttttctctgtcctttggtcccctcccrttctttccccacagaactcttcctcacacgcttatttatcttttcctctttctgcatgctggttcttagggctccccagaataatccagaagtcgattcc

SEQ ID NO: 289850 - DNA, 201 bp, Homo sapiens
aagaatctgcatgatgacaaagcccacatgtgattcttacgcccttgaaagtctctcctgcaactaacctctgccatggccttaccccgggccccattcasctgtctttctagtggatccctggagccccatgtggcccagagaggttctggggttgtggggtacagtggagcccacagacaagacttggagccctttctc

SEQ ID NO: 289851 - DNA, 201 bp, Homo sapiens
gaacctgacgataacactagtttaatgttaggatttatactacctgtgtggtttaggaaacccaagttctgggccagtgatacccctggggagcctggtarggacagaaacaaaacctctctggagacacaagacctcaattcagatcacacaggatccacacagaaaaaaagccttaatgaagaggaatatataatcaaa

SEQ ID NO: 289852 - DNA, 201 bp, Homo sapiens
tagatgaccctgggcaagtcccttcacctctaaggcaaaaaaacacaaatgtctacttctaagagttattttgagaattatatcagatcacatatgtaaakgtcctgacatagaataggtcttaaatgggaataattattttatttacaggtttgggtgggctggtctgggaaactgaccacctttcctaatgtttctgtg

SEQ ID NO: 289853 - DNA, 201 bp, Homo sapiens
tggccacatcgggcatgcggctctcagatatgtctcccagaagtaatactgcatgctgcggtgagttccaagtgaggcttggaggcaccaaacacccaagrtgggcagggtgggcaagcggggaggagaagactccaagcaacacccagggccagggttggctggcctaccctgttcccctccccagcaggtgaagttcag

SEQ ID NO: 289854 - DNA, 201 bp, Homo sapiens
taaaagctggtttataaaccttaggtagttttacctcttatttcatatttctacttatgaagcgaatgtattagccccacaatttataatttattttaaakgtaattttatcaggtacatataactacaggtcaaatcctattgtaaacaatgccactaaaattttctgtcatgttgtatggaaggagtgtgtgtacacat

SEQ ID NO: 289855 - DNA, 201 bp, Homo sapiens
tgatggtgataatttgaataccatctttctatgaaaagctgtgtatattaattttaatctctagggccttttttcaataacttgaaaatcacagcctcatsattagcaactttatatacacagctttaaaaaatttgctttaaactgtttcagagcttcttccctaagccataaactgtctcacctaaacaagatagacct

SEQ ID NO: 289856 - DNA, 201 bp, Homo sapiens
actgaaagaactttttaaactaaattacatagcactacataaaaatttacaaaattctaagtgtcgttgttagtagtagtataatttgatttggtcaatcmctgagtaacttaacaccctgaaaattccccttcctcatatggaccatgtttctatgcctgattttcccagtatttttggttgttgattgctggttagttg

SEQ ID NO: 289857 - DNA, 201 bp, Homo sapiens; identical to SEQ ID NO: 59843

SEQ ID NO: 289858 - DNA, 201 bp, Homo sapiens
gctagatactgttactacctatatcttaacagatgaggaaatttgaaacagagcagttatttgccaagagtttcagagctattaacagaagcctaatacaygttcttggactttgcagaaataatttgttgatccatgcggtttcattgctactgcggaaagtaagtctcttggccattgtgatgggtcaaaatctttgta

SEQ ID NO: 289859 - DNA, 201 bp, Homo sapiens
agtataggaggtaggtggttacacattttttaagctattaaatagaactttcacttgaaaaggtttttttctctctttcctcagcatctatctccctacayacacaaaaaaattgcatgtcacaattcatgaactcagtgagtgactctattttgaaaaatgttagattatatcaactgaagtctgttagaggcaaatgct

SEQ ID NO: 289860 - DNA, 201 bp, Homo sapiens
aatcttcaaattatgcttcggtattggtcagtttctactaaatgtatctagtacttgataaacgccattcaatcaccaagttcagtctttagtttatgatktatttcttctgcctttgaaatttaatttttcttccattatttggttttcttatttacaatgtgctaattgagctgttggatctgcattgtttgtatcttt

SEQ ID NO: 289861 - DNA, 201 bp, Homo sapiens
ttttttgggtatgtcatgaattcgtttggcttttcttaattgatatacatacaacttagtcctgagcttacacatgttcattgtatcattaaacatttagmctggttggtttaagttgatggccactgccaggtctcctttctgccttctcccctttatcccaatgctttagtttttttctgcctttttgtctgttgtgat

SEQ ID NO: 289862 - DNA, 201 bp, Homo sapiens
taaaaattttggggtaaaaaaaatggtctttagcgtagaagagctttacccgacttactttagttggttcaattggttgattttggtttgctttttgaaaytttgtattgtcttaatttggggcacattgaactcaataacagttcagttgcattataattcatttgggtaaagtttattgttggaggagggtaagtaaat

SEQ ID NO: 289863 - DNA, 201 bp, Homo sapiens
aggggcaaagtgataagagcaggattagaaagagacattaaaaattcaaggatactgagtttgttggcatcagaataaatcttggaggctgttttaagagrgaataaaacctagagggaaggaataaaaggcaaagatgttataaaacataggtaaaatatttaaaatattttgtcctgaattttgaattttaggcatatg

SEQ ID NO: 289864 - DNA, 201 bp, Homo sapiens
tgtgctcactcccgaggctttaaggaggaatctgtttcttgctttttttcaccttccagtggctgtcagcctcatcacttgcctggtagccacatcactcsaatctttaagaccagcgtcttcaaatctgtgtctgctctgtcttcacatcaccttctctgtgtgtgtcagatcttcccctgactctctattctaaggaca

SEQ ID NO: 289865 - DNA, 201 bp, Homo sapiens
tttaagaccagcgtcttcaaatctgtgtctgctctgtcttcacatcaccttctctgtgtgtgtcagatcttcccctgactctctattctaaggacatgtgrgttcacttagaggtctctggataatccaggatcctctctccatctcaagattcttaatcacatctgcaaagacctttttttccaaataaggtaacattta

SEQ ID NO: 289866 - DNA, 201 bp, Homo sapiens
atttttctcccaaatgtttaaaaccaaacctattatctcagtggtcatcaaaggtcctctagttaccagtatccacccttcttggaatgcctgtttagcartgttcttttgttatatgagtaagaataactctggtatttgctaagagaatataattttctccacattgtatgtatctatgtcctttgtttataaagcctg

SEQ ID NO: 289867 - DNA, 201 bp, Homo sapiens
aacgagacctcttgatactttgtgttcctcttatgttttcctagccttgacgttagcaactaacaatgataactaacattattgagctcttatgtgccagrgactattacaatagattttcaattattatctcattaaatcttcatagcagccctatgagctagatactgttactacctatatcttaacagatgaggaaat

SEQ ID NO: 289868 - DNA, 201 bp, Homo sapiens
gaaccaattccatacttacaataaatacttaatgtctaaatctgtggtagagtgcgaagtatgataatgttctaagttatggctttgcaagcatctaaatrtgcatttaatgaataccagtgcttctagtatagactaattaccagacatactggtactgaaagctaaatccctattataacaaaccagttccttaatatt

SEQ ID NO: 289869 - DNA, 201 bp, Homo sapiens
gttaattttgaaaaggcttcaactgaggaacactttcttctcatttctttgatgatagcttctctgtttctccttcagaaagtcttgttttttatatgcawatttactttttgggtgcactctccttgttaatgagttatttgcatctgattttgagtttattcagcaaatatttattaatgatttactgtatactctgtg

SEQ ID NO: 289870 - DNA, 201 bp, Homo sapiens
gcgcgcctgcgcggggccgcgctagaggcggcggcggcggcggtggcggcgctagggacgggagcgcgcgcgggagctagagagcagtggtctcggcgctsgtccggcccgcagcttcgggtcctcaggcggctgttgctccggaacgggtggttggggaggggggggtggggggactctagacagctgaggcgcgaaagc

SEQ ID NO: 289871 - DNA, 201 bp, Homo sapiens
ccatcagcaacctcagtatattatttcattgtcttgtgaaacttggcaaacttggatctctgagaagttcgatctctgcctaattgttatgcttctgtatrtaattttttttttctggtagttttttaaaagatttcttttctttattctgtcaccactacttactgtgtgaccttgggcaagttcaaaatggatataaaa

SEQ ID NO: 289872 - DNA, 201 bp, Homo sapiens
ctcactcctaagataagggcattactcaattcatgagggcagagccttcatcacccagttactttttatggactcattggttattactgtcacaatgacarttcaatttcaacatgagttttggaggtgacattcaaatcatagcagaagtcaatgtttaaaatcaatgtatatcctacatacccttcagaaagatactag

SEQ ID NO: 289873 - DNA, 201 bp, Homo sapiens
agtaggagacaaggattgtttagtcatggctgtgctccaaaatatctgtgtccatggacaagtcctttaaccttttgagtttcagcttccaaatcagtaargccagttgggcagattatattatcacatgtactgtccagttactacatttaaaaatttttttttatcaatattgtgtgtctagtcaacataccgttgcca

SEQ ID NO: 289874 - DNA, 201 bp, Homo sapiens
aaaagaaaatacatagtaaaatttattggctttttaaatggataatttcatatagtcagtcagtgccggcttagatccatttgttagagaacaatgctaaygagacctcttgatactttgtgttcctcttatgttttcctagccttgacgttagcaactaacaatgataactaacattattgagctcttatgtgccagaga

SEQ ID NO: 289875 - DNA, 201 bp, Homo sapiens
atagaaaatatgagaacagaagagtatttgttaaacaagactaagctgtgctgcataaagtaaggcactatcattgtgctggtattttctgattctcttartgcaataaatgttaaactttactactaccttagccatgttgcagggaattgacatgaatagttcctgggttttggctgggtgcggtggctcacgcctgta

SEQ ID NO: 289876 - DNA, 201 bp, Homo sapiens
ggtatttgctaagagaatataattttctccacattgtatgtatctatgtcctttgtttataaagcctggggggcgttccctattaggttaagtgtccctasgtaaatagaaaaatatgtagggttttattactcaactttttaaggtttctgctcaaattgtcagttgaataactcttgttactttggggctaacatgttg

SEQ ID NO: 289877 - DNA, 201 bp, Homo sapiens
tttgtctgttgtgatctgtgcttcatcaggctttcccccagttcctccttgttaatctccagattccaagtcagcaacacaatgaatgtctgcttatcgcragttgtgaattcccgcatatctctttcacttattaaaaagattgtttggtacatattttgtttataagacagttattgactttcctgtttctcttccttt

SEQ ID NO: 289878 - DNA, 201 bp, Homo sapiens
catgttgcatagggattttaacaataaaatatatagagcattttaaaaattattcactataattctgagtggattaaaccaaatgaccgggttcaagactytactatgagttcacctttgcttaataaaaggcaagactgaacattaattaatgacttcttggcccagccttagaatttttcagtttagggattagtttgg

SEQ ID NO: 289879 - DNA, 201 bp, Homo sapiens
gactaattttctcgattctctactgtgttttgcaagtgtgaccatgttctttgtaatcactaaatagtgattgtaaaagctcctgtttgaagcttttattwtttggaaactttttttttccatatgactttctatgaaacgatctataaaattgcttcaagtcaattttggaagtagggagactataacttataaatatac

SEQ ID NO: 289880 - DNA, 201 bp, Homo sapiens
ggccagactcgattttaccaggaactcactcctaagataagggcattactcaattcatgagggcagagccttcatcacccagttactttttatggactcaytggttattactgtcacaatgacaattcaatttcaacatgagttttggaggtgacattcaaatcatagcagaagtcaatgtttaaaatcaatgtatatcct

SEQ ID NO: 289881 - DNA, 201 bp, Homo sapiens
tgggattacaggcatgtgccaccatgtgtggctctaatcatttttaaagcaacaatcagtgggaaatttcagctccaaatgggagaaaaatttccaaagaktagccttttttttttttttttttttacagatttgctacagttttgttaatgtgcttatttctcattaccatagataactttgagatggctgccttggatt

SEQ ID NO: 289882 - DNA, 201 bp, Homo sapiens
tcagaggaaagtattaatatgcccactgtacagatgaggaagttgaggaatgctttattagtaggtgtgaagtgtcttaagcataatacctccctcctcarccttgctccctcatcctagttaagggaattgagacacagagataaggcaatttgctattgaccttcagcagatgacttaacctcaccgtggcttagtttc

SEQ ID NO: 289883 - DNA, 201 bp, Homo sapiens
agggtgctcagggaggcagcatagaatgggaaaagggcctacatgtaacccttgaggaatgccaatgtttaatggcttgggagatgaaaatgagcctgcaraggagacgacggaaaagcttaggggtaggaagaaagctgggagtgtgtgtgtagcatcttgaaaggccaatgggaagagtgtttctggagggagtgttat

SEQ ID NO: 289884 - DNA, 201 bp, Homo sapiens
aagatatattattgactaattttctcgattctctactgtgttttgcaagtgtgaccatgttctttgtaatcactaaatagtgattgtaaaagctcctgttwgaagcttttattttttggaaactttttttttccatatgactttctatgaaacgatctataaaattgcttcaagtcaattttggaagtagggagactataa

SEQ ID NO: 289885 - DNA, 201 bp, Homo sapiens
ttaaaaagatgacttacattagtcagctgcctaatgttggctcattgttacgttcctaaaatgatccctatttggtgatttgtaatatatattttactgaytttttggcatctgtattaataagtatgtttggactatagttttatttttttagtgctgtctttgtcaaattttatagaaggattatgataggtttgtaaa

SEQ ID NO: 289886 - DNA, 201 bp, Homo sapiens
ggtatgtcatgaattcgtttggcttttcttaattgatatacatacaacttagtcctgagcttacacatgttcattgtatcattaaacatttagcctggttsgtttaagttgatggccactgccaggtctcctttctgccttctcccctttatcccaatgctttagtttttttctgcctttttgtctgttgtgatctgtgct

SEQ ID NO: 289887 - DNA, 201 bp, Homo sapiens
gtataaggtagctagactttttttaaaaacataaaatgattttatgccatattaatcactactctagtatttaatcatcttagaatctgtaattctgaaamcagtttttggcacaactgtaggatactgttcaccaattatgaaaatatatcataggaccactatgtagaaataaattacccaattaccatctctgcaaga

SEQ ID NO: 289888 - DNA, 201 bp, Homo sapiens; identical to SEQ ID NO: 59842

SEQ ID NO: 289889 - DNA, 201 bp, Homo sapiens
ctttttttaaaaacataaaatgattttatgccatattaatcactactctagtatttaatcatcttagaatctgtaattctgaaaccagtttttggcacaaytgtaggatactgttcaccaattatgaaaatatatcataggaccactatgtagaaataaattacccaattaccatctctgcaagagttataagctgaatgt

SEQ ID NO: 289890 - DNA, 201 bp, Homo sapiens; identical to SEQ ID NO: 59845

SEQ ID NO: 289891 - DNA, 201 bp, Homo sapiens
accccaggtatgcagtatattgcttaatactctattgttccataaatatgcattccagaagtcagctgaccatttgtccttatctttgaggacaaagcccrtacatatgtaagcattagtgagcaatgtagaatataaagatttggtagcagtagagagtttacgctctacatcccactgcaagtaatttgaatattgcca

SEQ ID NO: 289892 - DNA, 201 bp, Homo sapiens
tattaagcagttatttatccacctcctacccccagcagtggaaagccattgagaaacttttagtacagaagtgatatggtgaaatttgtattttgaaagakttacttaggctgcagtttggagaatgaattagagggatgccaggatccacgtgaagagactaaagacgctagtattctgcagtgagaatgatggtaactt

SEQ ID NO: 289893 - DNA, 201 bp, Homo sapiens
tctaagatagaagtgaatcttagttaagttttaagataatcctatgtgcttttaaaagatttcatggtttgcggtttgcttttctttggctcccagtttctttttttttttttttgacttcttagtacaggtaacttttgaaggaattcagcttaccttagatgaaccaaaggaaagctaaaagccgagataatttagaaa

SEQ ID NO: 289894 - DNA, 201 bp, Homo sapiens
ggtatcattttctcaaaggaaatgattttgacattattgagagaaattagacattttaacaattgttttgtaaaacagtcttttcaaacttgcacgttggrgttttaaacacaaccactttacatgtgttgcgctccgaaaagtggagggatttgttgaaacactactctgctgagacttagggttccagagcacttggga

SEQ ID NO: 289895 - DNA, 201 bp, Homo sapiens
tggaaggatggcttgagcccaggaggcagaggttgcagtgagctgagattgcgctgctgcactccagcctggtgtgacagagcaagaccctgtctcaaaawaaataaataaataaataaaaaaaataaaaaaagagctccaggtatccagggagaaatagtggtaagagataaagaagcagaggcagacatagagatgcag

SEQ ID NO: 289896 - DNA, 201 bp, Homo sapiens
gccaaagcaggtggtcattaagggagagaacaatatggagcaagagaggtggttcctgcaagagtcctaggtaggactcggttggatggaggaggctttgmccttttacaaggtcttgagttcaaattccagttcactccttccacaaatgtttattaaccagctaggctgttttgtgctgggcctttagctcctagattt

SEQ ID NO: 289897 - DNA, 201 bp, Homo sapiens
cccacatttatcaaaactgcttttgcccagtataggagcaaactcctgccttcctgtctctcccatactgagagatatatgggaagaaagaggcacacttyaccatttctttgctttcctatttaccaagactttgtactcatgggaagtccttcttgaagtctaacttcaacccttgctgctgctggaaagccacataat

SEQ ID NO: 289898 - DNA, 201 bp, Homo sapiens
taaaattcacattctgggatcctggattagtggcctgttttggattcagtagttagtgaatatatctccactttctgttgacataggagtttccccaatgmcaaagcaggtggtcattaagggagagaacaatatggagcaagagaggtggttcctgcaagagtcctaggtaggactcggttggatggaggaggctttgcc

SEQ ID NO: 289899 - DNA, 201 bp, Homo sapiens
acatcagctctgttttccgattgatgcaggatgatgagatgaacattttcatcaacctcaccaaggatgagtttgtgtgagcagaagccagtacttggcawccctaagagactcccttaccacaaactccattttccacttcctggacctcctgcccagcagcgctgaggggactgattgcttctctttttatgtccgctc

SEQ ID NO: 289900 - DNA, 201 bp, Homo sapiens
gttacattggtgaaccagggtgaacatccctgggctcctccccctcccctggggagagctaatcctaaggatccagaagaccacctcgcctccctgcatgsccccattcccctgttctgtctctccacctccccctggtcctggccccagctctccatctaagcatatctgctctaatgcattgatctctggcttgctgtc

SEQ ID NO: 289901 - DNA, 201 bp, Homo sapiens
gagagtgtgtgtgtgtgtgtgtgtgtgtgtgtgtgtgtgtgtccttacgtttactcacagccttggcagctgatccactggagagtgctttgggctgggartctaagatgggggttctcatcgtagctctgggacaggcttactctggaatgttggaaaattcattcaacccttctgccccagttttattacctctgaaat

SEQ ID NO: 289902 - DNA, 201 bp, Homo sapiens
caagaccagcctggcgtggtggtaggcacctgtaatcccagctactcaggaggctgaggcaggagaatcgctcgaacccgggaggcggaggttgcagtgarccaagatcgcgccattgcactccagcctgggcaacggagtgagactccatctcaaaaaaaaaattatcattaaagtcaatttcacctatttctcttttcc

SEQ ID NO: 289903 - DNA, 201 bp, Homo sapiens
ccctcccccgtcccccagttctggtctctgtgcaaggaattatatagagaaggtcagctcttgacagggctcggggcgggggcttgtatgacagggggacrgtgtgtgaacttcatttgctcttcagcttgtctggatgggaagaattatatgagattaagtccttcctagatcctgtaccaggagggagcatcttttggg

SEQ ID NO: 289904 - DNA, 201 bp, Homo sapiens
cttaagtgccttccggaagcctgttctgcaattttactttcttctttccaatcctgccctctccaggacagagaatagtagggctctctttttcctaagamttttcccagctcatgtttccccaaactggctctcagacttcagtcactagattctcctaaactctgcctccttacctggaaggactgggtctgggggacc

SEQ ID NO: 289905 - DNA, 201 bp, Homo sapiens
atttccattttacaaatgagaaaactggggctgggggtgttaatttgcccaaccccttggtttctatgagcgagttctcttgactttcattctctgcttgygggtggagggcccttccctccctgttgagcccggtctctggataaggatcccctgacacctagcttcaggaagcccctccctacagttttttatcctctg

SEQ ID NO: 289906 - DNA, 201 bp, Homo sapiens
gggtagccagatatcttggttcaggaaggcagtggtagggagggatttggactcacagagaggaccgactcacagccatggtggggtggtggggaggcagrctgcttcaagcttgggagtccctctgccgtcagggacagaaggatgggatcagaagggtgtgacctgtacctatgctccccttcaccatatttttgtttc

SEQ ID NO: 289907 - DNA, 201 bp, Homo sapiens
tctctgtatctgctccctgcaggctgcgctacatggtgaagcagttggagaatggggagataaacattgaggagctgaagaaaaatctggagtacacagcwtctctgctggaagccgtctacatagatgagacacggtgagagagaccgacagacagagaaggagaaagatgtcagacatagtgttccagagagaggggtt

SEQ ID NO: 289908 - DNA, 201 bp, Homo sapiens
atgtttctgtaaaatgtaccttattagggagtatgctgttctcatgataaggtagctgtgcctaagcagcctctctgtatctgctccctgcaggctgcgcyacatggtgaagcagttggagaatggggagataaacattgaggagctgaagaaaaatctggagtacacagcttctctgctggaagccgtctacatagatga

SEQ ID NO: 289909 - DNA, 201 bp, Homo sapiens
cttgcattttatttctattggatggtgctgctctatagcatccctgaaagatgcgttccatttcctgcttaaacacttccatagttgggatgctcactacytcacatggagacctgtttcattattggagatgttagataaagaaataaaaagatatagagaaagaaaggaaacagggttgaagacagagagctggcatga

SEQ ID NO: 289910 - DNA, 201 bp, Homo sapiens
atttcaggagctgagaaacctggctgcattaaccaagagctggcctggaagcatggaagggatgggatgagtgatctagcctgtgtgtggaggttcctggraagtgaccagcaggcgtcacccctctctcattctttctctttcctcctgtagcactgcctgtcggagattgagctcctggccatcatctttgctgcagct

SEQ ID NO: 289911 - DNA, 201 bp, Homo sapiens
taacccgtgctgctacctaaacatatataagtgtgtgtgtgtctgtgtgtggggtgtgtgtgtagctttggagggtgtttgaagttatgtgaggccgggcrtggtggctcatgcctataattccagcactttgggaggccgaggcaggtggatagcttgaggtcaggaatttgagaccagcctggccaacacggtgaaaca

SEQ ID NO: 289912 - DNA, 201 bp, Homo sapiens
tgtagagactccactggcttcaggtatcagactgcatctctatgtgagagagagagagagagagtgtgtgtgtgtgtgtgtgtgtgtgtgtgtgtgtgtgkccttacgtttactcacagccttggcagctgatccactggagagtgctttgggctgggaatctaagatgggggttctcatcgtagctctgggacaggctta

SEQ ID NO: 289913 - DNA, 201 bp, Homo sapiens
aaatttacaagtaaaaaataaagctagctacatgtaatataacttacccaaaaaagtacaatctccggattattaattggcaggaatagattcccagtctyacgtccttaaagcagagaaagaccttgaaatcaaggtagatcccaacttgatctatgttgatggcctactggattttgcctttttgaatattggggaggc

SEQ ID NO: 289914 - DNA, 201 bp, Homo sapiens
ctcgttggacagtgctagggacatgtgctgggatgcagtgggagtgttgcaggttcggatggaggaaggtccttggccatttcaggagctgagaaacctgsctgcattaaccaagagctggcctggaagcatggaagggatgggatgagtgatctagcctgtgtgtggaggttcctgggaagtgaccagcaggcgtcaccc

SEQ ID NO: 289915 - DNA, 201 bp, Homo sapiens
ctggaagtggatggagcaattgcagttctgagacatggtgagtgtgggaagcccaggggctgccataggtgggttctatgaacattggggaattcccttckgacatttatcccaagtccctaggcctgagggtatcatcagttataccacatcctattttagaaaatcactgaagtctcttagaatccaaatatcactctg

SEQ ID NO: 289916 - DNA, 201 bp, Homo sapiens
ctgtagagactccactggcttcaggtatcagactgcatctctatgtgagagagagagagagagagtgtgtgtgtgtgtgtgtgtgtgtgtgtgtgtgtgtgtccttacgtttactcacagccttggcagctgatccactggagagtgctttgggctgggaatctaagatgggggttctcatcgtagctctgggacaggctt

SEQ ID NO: 289917 - DNA, 201 bp, Homo sapiens
cacaagggtagttggtgtgccaggtctttacctcgctgtagagactccactggcttcaggtatcagactgcatctctatgtgagagagagagagagagagwgtgtgtgtgtgtgtgtgtgtgtgtgtgtgtgtgtgtccttacgtttactcacagccttggcagctgatccactggagagtgctttgggctgggaatctaa

SEQ ID NO: 289918 - DNA, 201 bp, Homo sapiens
cccttggaatccagtggtggtatatgggttgagggttcttttgtgctgggttccttactgcctctctcgtgagttttagggatgcattctgcagtttctgrggagggaacataggggtgggaggaagaggtggcattcataaaggtgttggggagggaactgcttctcctcactgcacccataccccagtggcccctgaga

SEQ ID NO: 289919 - DNA, 201 bp, Homo sapiens
tacacaagggtagttggtgtgccaggtctttacctcgctgtagagactccactggcttcaggtatcagactgcatctctatgtgagagagagagagagagwgtgtgtgtgtgtgtgtgtgtgtgtgtgtgtgtgtgtgtccttacgtttactcacagccttggcagctgatccactggagagtgctttgggctgggaatct

SEQ ID NO: 289920 - DNA, 201 bp, Homo sapiens
tggcagcccagccctggggtcttaccgagttggctcccttggaatccagtggtggtatatgggttgagggttcttttgtgctgggttccttactgcctctytcgtgagttttagggatgcattctgcagtttctggggagggaacataggggtgggaggaagaggtggcattcataaaggtgttggggagggaactgcttc

SEQ ID NO: 289921 - DNA, 201 bp, Homo sapiens
gctttcagtggcgccagccctctctggatgtggaagtgggagaccccaaccctgatgtggtcagctttcgttccacctgggtcaagcgcattcaggagaayaagcagaaatggaaggaacgggcagcaagtggtgggtaccatggcagagggcaggggtgagaacttgtgtgggtggatcatggagcactaggaggtccat

SEQ ID NO: 289922 - DNA, 201 bp, Homo sapiens
ttagtagagatggggtttcaccatgttggccaggctggtctcgaactcttgacctcaagtgttctgcccacctcggtctcccaaagtattgggattacagrcgtgagccactgcgcccggcctgccttcccttttaactgttgttcccacatttatcaaaactgcttttgcccagtataggagcaaactcctgccttcctg

SEQ ID NO: 289923 - DNA, 201 bp, Homo sapiens
gcttaggagccaggtggtctccctccctttcctagaactgctccatctttccaaaagcaaagaatattctgcaatctagccaccaccttcctgccttcagkactgaggacatccccgccttctcagagctgttcttcttccatctagcgcccatcttctcattgggacctgctgccatagtggcccccacgcccttcagca

SEQ ID NO: 289924 - DNA, 201 bp, Homo sapiens
tcctagacctgctaccctggtacttccaccctaccccaccccgagaagggcagagacgcatgtgactcacccctgcccttggtttcccagacccctgctayagccagagaacaataaagaagggagaccaggcctgactgtgtgtgttcactgggtacaagttgaccaagcatcttcacatacatacactctttccagcat

SEQ ID NO: 289925 - DNA, 201 bp, Homo sapiens
  misc_feature (1)...(201): n = A,T,C or G
tgcacactgtggtccctgtaaatggtgcccctgtagatttggctaatttggtggccctggctgggaaatctcttcctgtgtgagggggtggtagggtggtnttgagggttctgagttttagcaaggctggagaggctcttcccaagtggggatgggttgaatgtagttcagcttgaaggcaggttgatggatgagaatccc

SEQ ID NO: 289926 - DNA, 201 bp, Homo sapiens
caaatgtggcaagtatgaactgagatgtgtacataaaatacatgatggatttcaaagacttagaaaaaagaatgtaagatattcatatatatatatatatwtttttttgttttgagacagagtttactcttgttgcccaggctgaagggcaatggtgtgatcttggctcactgcaacctctgcctctggggttcaagcaat

SEQ ID NO: 289927 - DNA, 201 bp, Homo sapiens
ctcaaatgtggcaagtatgaactgagatgtgtacataaaatacatgatggatttcaaagacttagaaaaaagaatgtaagatattcatatatatatatatwtatttttttgttttgagacagagtttactcttgttgcccaggctgaagggcaatggtgtgatcttggctcactgcaacctctgcctctggggttcaagca

SEQ ID NO: 289928 - DNA, 201 bp, Homo sapiens; identical to SEQ ID NO: 59870

SEQ ID NO: 289929 - DNA, 201 bp, Homo sapiens; identical to SEQ ID NO: 59861

SEQ ID NO: 289930 - DNA, 201 bp, Homo sapiens
ctagcactttggaggccaagatgggtggattctttgaacccaggagtttgagaccagcctgggcaacatggcaagaccctgtctctacaaaaaaaaaaaaattagccaggcatggtggcatgctcctgtagttctagctactcgggaggctgaggtggaaggatggcttgagcccaggaggcagaggttgcagtgagctga

SEQ ID NO: 289931 - DNA, 201 bp, Homo sapiens
ggagcgagtgaagacatagaatggagccaaagtgtgggtggagcagggaaatcctcccacgctcttctgtcccccagtccctgcaggaacaaaggaggtascttctcagaacagcagcagaacagggtgggcccatgccaggtgacagctaacctgcaccgcaccttagggagggttagggaaaaggagcccagccagggc

SEQ ID NO: 289932 - DNA, 201 bp, Homo sapiens
gggagatcctaactctaaaggactttagaataagagagggccctggcaggccagaaagtatggggtgtgtgtgtggagtgggttatttgacttcaggaggktgcagttcagcaccttcaagagggtgctttcagctgcttgagtccaggtcctcttcttagacttcccatttgtcaaatttattctttaatcttttttccc

SEQ ID NO: 289933 - DNA, 201 bp, Homo sapiens; identical to SEQ ID NO: 59857

SEQ ID NO: 289934 - DNA, 201 bp, Homo sapiens
aaactggattaactcactctagagaattcccaggtagactaaaactcgttggacagtgctagggacatgtgctgggatgcagtgggagtgttgcaggttcrgatggaggaaggtccttggccatttcaggagctgagaaacctggctgcattaaccaagagctggcctggaagcatggaagggatgggatgagtgatctag

SEQ ID NO: 289935 - DNA, 201 bp, Homo sapiens
ttccccaatgcgttgggcttcacccgccagctcttctccttagccccgcccaactcctcagctggccaatcacggccccagcgtacatgtattggtggcgwcatctcccagccaatcaggaggcgggctgggactgtgtgcgcacgtccacttggagctgcagaggctgggttcttccctccccaaccttggcgaaagcaa

SEQ ID NO: 289936 - DNA, 201 bp, Homo sapiens
agtctgaaggcgggagaggggttcctggtcctcagaccccttctgggtgcctcttttggcccctcctgggccatctcatcgcttctccttacctctgagcygattgacctctctctggttaattcatggttattccccaatttccattttacaaatgagaaaactggggctgggggtgttaatttgcccaaccccttggtt

SEQ ID NO: 289937 - DNA, 201 bp, Homo sapiens
cctctgagctgattgacctctctctggttaattcatggttattccccaatttccattttacaaatgagaaaactggggctgggggtgttaatttgcccaaycccttggtttctatgagcgagttctcttgactttcattctctgcttgcgggtggagggcccttccctccctgttgagcccggtctctggataaggatccc

SEQ ID NO: 289938 - DNA, 201 bp, Homo sapiens
ggttattccccaatttccattttacaaatgagaaaactggggctgggggtgttaatttgcccaaccccttggtttctatgagcgagttctcttgactttcmttctctgcttgcgggtggagggcccttccctccctgttgagcccggtctctggataaggatcccctgacacctagcttcaggaagcccctccctacagtt

SEQ ID NO: 289939 - DNA, 201 bp, Homo sapiens
tcctgccatttccagcaagtgaagaccatgaagacagccttgcaacagctggagaggtggcatctggtggggtgtggctggggccaggccagagggagggktgtgtgaactgggggggtatacacaagggtagttggtgtgccaggtctttacctcgctgtagagactccactggcttcaggtatcagactgcatctctat

SEQ ID NO: 289940 - DNA, 201 bp, Homo sapiens
caggttgctcatggatccaccagttgtagtttagtgaagtggagagatcaagacctggcagtcccccatatgttttgtgcgtgtgtgtgtgtgtgtgtgtkcgcgtgccaacttcaccttttactctgtccatcttgccctttaccttattctcctcccatttccatccccccccacctttttaaaaattgcttcttcttg

SEQ ID NO: 289941 - DNA, 201 bp, Homo sapiens
acaggttgctcatggatccaccagttgtagtttagtgaagtggagagatcaagacctggcagtcccccatatgttttgtgcgtgtgtgtgtgtgtgtgtgtgcgcgtgccaacttcaccttttactctgtccatcttgccctttaccttattctcctcccatttccatccccccccacctttttaaaaattgcttcttctt

SEQ ID NO: 289942 - DNA, 201 bp, Homo sapiens
tgtgccactacgcccagctaatttttgtatttttagtagagatggggtttctccatgttggtcaggctggtctcgaactcctgacctcaggtgatctgccygccttggcctcccaaagtcctggggattacaggcgtgagctaccgcgcccagccgatatctcattaatatattttataaggctgggcgtgatggttcatg

SEQ ID NO: 289943 - DNA, 201 bp, Homo sapiens
tatttctgtcctttctgggcttcttctgagaacagattcttgttttccgtctgattcagatgtgaaacttttcccgcagcctcccctctcacccagttcckgtaggctgggtctctgcctccccactctcttcttcctgcagccaggcccctccccaaagttctctctggtcagttgctcagttctactgggacctggagg

SEQ ID NO: 289944 - DNA, 201 bp, Homo sapiens
tccatactttcatgatgaaagggaagcagttgtcggttttcagcaaaaacgattcagccttcctgaagcctatttgatagctgttttggggttttgtacakgtgtttgctttttatttcttgagacccaggcttagtcaatactttcttaacttggcacccataatcaacatacagatttttcttagcaacagttgtctgc

SEQ ID NO: 289945 - DNA, 201 bp, Homo sapiens
aatcacatttggaagtagagggtgagggaggttgaagagccgtaatggggatattgggtcagcactttggggagcagtagatgttaaaggtgaagggaaaygtggatgatctgaagggccatagagaggggcggtcaaaggagtccaggtggagggtcccctcccaggccggcttcgggaggtcattccatccatcctctg

SEQ ID NO: 289946 - DNA, 201 bp, Homo sapiens; identical to SEQ ID NO: 59856

SEQ ID NO: 289947 - DNA, 201 bp, Homo sapiens
atgcagtgtggcagggctgcaggagggcagtagaggtgccaggctgactcacacatatccatgtgcagagttgtgcagatgtgagccacatgacatgtgtstgcatgagtgagcgtgggtcacagaggtatgtggagtgattgcacacagctgtagatctactgcatgggaatacttgtgccaacctgtgggtcatatgta

SEQ ID NO: 289948 - DNA, 201 bp, Homo sapiens
tgcttatgttgtattgttctttaaatacttcacctatggtgataagatgacacctttttatggcagatgggtctgatttatacactagctacttggagagkcgttagggagaactgaggcatagtgggcaacaaggcttggaatccaaatgtacttctcagtcctcctccttggctgcctctggccaatccaatttgctgg

SEQ ID NO: 289949 - DNA, 201 bp, Homo sapiens
cccaggtccataaatgggagaattcaggatggctcccctaacactagtggctcatcatacttaccttgcctgtattccaggtaacagggccctgcgaaagmgtgggtattactagtttcactatctcccacacatttctaaccaaaagcctttcctgaaaatgaattgttgtttcttcctttagtgtgagaagtgctcagt

SEQ ID NO: 289950 - DNA, 201 bp, Homo sapiens
ggccctccccagcctgaacatactttttgctgtcccagaggtgcccagccttgactccacttctgtgtctgggatcccaggtgggcgggactcctgggttyctgtgctctcagcggccccctcaggttcctctccttgctgctgttgccccaggtgatgttcaaccatcatctggagctctggggacacagagaaagggag

SEQ ID NO: 289951 - DNA, 201 bp, Homo sapiens
gagatccagtggatgggaggaagaagctgagactgggtgcctcattggtttaaccctggcttttgccctctttttgtataggccccatggagtgatcttcyatggttcttaccagttttgaaaatcatgctgccattctcctttttctgtctatggatgtggagctgctgtgaagattgcagcataaactatggttccctg

SEQ ID NO: 289952 - DNA, 201 bp, Homo sapiens
cctcaggaggtggtttgaaaaaagacagaggattccacatttgaggttgcatttgccacctttgcccagaggaaggcgaaagaggttggggatgcatgggrctagaaggccaggtgagatgctcagtaggaaagaagcctgcacatctatataactacaccctgccagggagttcctgaaatcaaaggaatggtagcttcc

SEQ ID NO: 289953 - DNA, 201 bp, Homo sapiens
ctcacagctgacactgcctctgggggtgggggtggcagcatctcagttgctggagaaatctggaaggctgttgtcgcagcaaccagcactcagttgaccascccaattcctggggggcttaggagccaggtggtctccctccctttcctagaactgctccatctttccaaaagcaaagaatattctgcaatctagccacca

SEQ ID NO: 289954 - DNA, 201 bp, Homo sapiens
tgtgtgtgtgtgtgtgtgtgcgcgtgccaacttcaccttttactctgtccatcttgccctttaccttattctcctcccatttccatccccccccacctttktaaaaattgcttcttcttgactatggtaggtgacttatcattgtttcttccttttctctccttcctgactgccaacatccttaggacctcacattccttc

SEQ ID NO: 289955 - DNA, 201 bp, Homo sapiens
ttctggtgtctggattgtgtttggttcagatttcaacagaagctatacaagagctcctggacaagatctgtaagtgacagaaggagaaactcggagggaarcctgtgcttgaagtcaacctacaaccttactcttctcaggctcactgttatttttagaaaccctggctcagaaatctccattgtgagctctgggagatag

SEQ ID NO: 289956 - DNA, 201 bp, Homo sapiens
tgcccctgtgccctagtatcccccagtcctgcaactgctccttttccctcagctggggttgcatctatggagcttatcgctgtctgagaagaaaacaccargtccagattccacttcagcactcagacctggcaaaggtgcactgagggagatgtgttggggttttggtagagaggaaggcttggtgggaaaagggtcagg

SEQ ID NO: 289957 - DNA, 201 bp, Homo sapiens
tcctgcatatctgcttggcaccatgtccctagttctcttctctgtgcccaccttgtttggaaacttcttgtggcctggactgagtgaacacacaggccaamggaattgccaaacttcctaaaccatgagcatctctcttccaagcaattgctttagaaattccaatctggaagatgtataataaatcaaattgcactagac

SEQ ID NO: 289958 - DNA, 201 bp, Homo sapiens
ctcatcacacttgcagtcagactcttgctaagcttttaatttactttcccatcccagactaccttcaacatctgttaggccccatggaagcagggcatctkctgggaacagctgttaggatgtagtttggagggctggtggggtggtccatgtggaggtggttaatgagcaaaatcaaatggtgtagggagggaggagagg

SEQ ID NO: 289959 - DNA, 201 bp, Homo sapiens
atcctgctgatccataatctgatgctgccctcatcacacttgcagtcagactcttgctaagcttttaatttactttcccatcccagactaccttcaacatytgttaggccccatggaagcagggcatctgctgggaacagctgttaggatgtagtttggagggctggtggggtggtccatgtggaggtggttaatgagcaa

SEQ ID NO: 289960 - DNA, 201 bp, Homo sapiens
accatgtttcctggataaaattggccactccctcccccgtcccccagttctggtctctgtgcaaggaattatatagagaaggtcagctcttgacagggctsggggcgggggcttgtatgacagggggacggtgtgtgaacttcatttgctcttcagcttgtctggatgggaagaattatatgagattaagtccttcctaga

SEQ ID NO: 289961 - DNA, 201 bp, Homo sapiens
catctgctgggaacagctgttaggatgtagtttggagggctggtggggtggtccatgtggaggtggttaatgagcaaaatcaaatggtgtagggagggagragaggggtggagaaatgaaccagagaaagagttcttctggactgggtactgggagcctcctctttagtttgccttcctctgaccttctcacccacccctc

SEQ ID NO: 289962 - DNA, 201 bp, Homo sapiens
tagatgggaattgagcagggaaaaaagagtgactgagaagggaaaaggataaaatcaacttattatccatacaatgcagggaggtccttagtgcccctgcycttgcccctgtgccctagtatcccccagtcctgcaactgctccttttccctcagctggggttgcatctatggagcttatcgctgtctgagaagaaaacac

SEQ ID NO: 289963 - DNA, 201 bp, Homo sapiens
tgacctggcagcccagccctggggtcttaccgagttggctcccttggaatccagtggtggtatatgggttgagggttcttttgtgctgggttccttactgyctctctcgtgagttttagggatgcattctgcagtttctggggagggaacataggggtgggaggaagaggtggcattcataaaggtgttggggagggaact

SEQ ID NO: 289964 - DNA, 201 bp, Homo sapiens; identical to SEQ ID NO: 59863

SEQ ID NO: 289965 - DNA, 201 bp, Homo sapiens
ccccattatcctaaaagcctaacaatagttgcatttcatttgcatatatttcatttgcatattactaatttccaggtcaacagtgcagaaatttcacacarcaaccccccacccccaccacttgccacctgtaccccagatctggtaggtctgaggtatcctctccagctttcctaccctgttccctcctctagggtgaca

SEQ ID NO: 289966 - DNA, 201 bp, Homo sapiens
tgaacccaggtgacagaggttgcagtgagctgagattgtgccactgcactccagcccgggcaacagagtgagaccctgtctcaaaaaaaaaaaaaaaaaaaggaagaagttatgtgatagggtgtgcgtgggaagttagggaatggtcctaacttccttttcctaaaagatcagtctcccttcccttgccatctgccccaa

SEQ ID NO: 289967 - DNA, 201 bp, Homo sapiens
tgagggtggctggggtagccagatatcttggttcaggaaggcagtggtagggagggatttggactcacagagaggaccgactcacagccatggtggggtgstggggaggcaggctgcttcaagcttgggagtccctctgccgtcagggacagaaggatgggatcagaagggtgtgacctgtacctatgctccccttcacca

SEQ ID NO: 289968 - DNA, 201 bp, Homo sapiens
ttccacaacccaagggtccctgtgcacactgtggtccctgtaaatggtgcccctgtagatttggctaatttggtggccctggctgggaaatctcttcctgygtgagggggtggtagggtggtgttgagggttctgagttttagcaaggctggagaggctcttcccaagtggggatgggttgaatgtagttcagcttgaagg

SEQ ID NO: 289969 - DNA, 201 bp, Homo sapiens
agtcctccggagatgctggaggagtcggattgcccgtcacccctggagctgaagtcagcccccagcaagaagatgtggattaagcttcggtctctgtaagwccccggcccgggaatggggggaagggaccttagggagcctgagcgggaggaggaggggggataactggagcagggctgtgggctggtagattctctttgg

SEQ ID NO: 289970 - DNA, 201 bp, Homo sapiens
tatttatttaatgaacttttactgagcatgttctgtgtgctctgaggatggaggccaagataaacaagccactgtcagcgtcatcaagacactcacagtckcctatgggccaaccgacagaattaattaaggttggaccggctgagactgcagaagctatggtggaatgggttccagcctctctctaagctaactgcatga

SEQ ID NO: 289971 - DNA, 201 bp, Homo sapiens
acccgcagccatagacctacatctaagagattgcagatccctgaactcttttccccaatgcgttgggcttcacccgccagctcttctccttagccccgccyaactcctcagctggccaatcacggccccagcgtacatgtattggtggcgtcatctcccagccaatcaggaggcgggctgggactgtgtgcgcacgtccac

SEQ ID NO: 289972 - DNA, 201 bp, Homo sapiens
aaatcaccatctgaagagctttgtttgctttgtgactgcctgggctgaactcaccaggcttctaagaagtctcccagttaatcaacaaaccccagaattcrtaagtgtaaaacatgaggtgattgttccttcaggcaaaacatccagtgaatgagatccctgggcccaccccaccacttttatcctggaagaagcttcagt

SEQ ID NO: 289973 - DNA, 201 bp, Homo sapiens
cagcatgtgtcttcctcccaatgttacaggaaaggggtcctgatccagaccccaaccgagggttcttggatcttgcagaagaaagaatttcaggcgagtcwgcagtgcaaagcaaaagcaagtttattaggaaagtaaaggaataaaagaatggctactctatagagcagtcccaagggctgctggttgcccatttttata

SEQ ID NO: 289974 - DNA, 201 bp, Homo sapiens
atttctgacttgtctttagaaattggaagatgtggtgatcctgagctcattttcacagggcagcaattgttggatctgaataaggactgccccacctcgcyctcttgtttcagggtgtgtttgctaactgttaagaggaaagtgaaaaacattcatggtcccctgaacctgctcaacttcacttgtgtctgtcatttttct

SEQ ID NO: 289975 - DNA, 201 bp, Homo sapiens
gcacaccaccacgaccagctaatttttgtatttttttagtagagacagggtttctccatgttggccaggctgatcttgagctccagacctcaagtgatgcrcccacctgggcctctcaaagtactgggattacaggtgtgaaccaccacgcccggccctttgctaatgtccttttactatcccgcgatccaacattatatt

SEQ ID NO: 289976 - DNA, 201 bp, Homo sapiens
ctagtagctgggactacaggtgcacaccaccacgaccagctaatttttgtatttttttagtagagacagggtttctccatgttggccaggctgatcttgarctccagacctcaagtgatgcacccacctgggcctctcaaagtactgggattacaggtgtgaaccaccacgcccggccctttgctaatgtccttttactat

SEQ ID NO: 289977 - DNA, 201 bp, Homo sapiens
cgtctctttgccagctaagtttgtgctcacatagatctgagacagtcgggagggaccagctggcagccaccagacaagtccatgattctcaatatcccacrattgggttgaacctaaagttgaagcacacacatctgagtaactaggtcactaaaacctactgaaaaacagccttttctaattcagggagttctcaatgct

SEQ ID NO: 289978 - DNA, 201 bp, Homo sapiens
cattattagggtttttgttactattagtgacgtatgtatgtttgtgtgtgtgcttaattaaggctgtgccttgcacataataggcaattaataaatagtagctatttaaaatgacctcttcacttttaaataaatggttttatttaaatatctttaaaaggttttattagaataattatatatgatgagcatatgcttctt

SEQ ID NO: 289979 - DNA, 201 bp, Homo sapiens
tcattattagggtttttgttactattagtgacgtatgtatgtttgtgtgtgtgcttaattaaggctgtgccttgcacataataggcaattaataaatagtagctatttaaaatgacctcttcacttttaaataaatggttttatttaaatatctttaaaaggttttattagaataattatatatgatgagcatatgcttct

SEQ ID NO: 289980 - DNA, 201 bp, Homo sapiens
atcattattagggtttttgttactattagtgacgtatgtatgtttgtgtgtgtgcttaattaaggctgtgccttgcacataataggcaattaataaatagtagctatttaaaatgacctcttcacttttaaataaatggttttatttaaatatctttaaaaggttttattagaataattatatatgatgagcatatgcttc

SEQ ID NO: 289981 - DNA, 201 bp, Homo sapiens
gcatgtgcctgtaatcccagctactcggaggctgaggcaggagaatcacttgaactggggaggtggaggttgcagtgagccgagatcatgccactgcactscagcctgggtgacagagcaaaactgtgtctcaaaaaaaaaaacaaagtgaaatctttccaggcatgcatatatatacatgcttgtgtacacatagacaca

SEQ ID NO: 289982 - DNA, 201 bp, Homo sapiens; identical to SEQ ID NO: 59903

SEQ ID NO: 289983 - DNA, 201 bp, Homo sapiens
gctgaacccagaagtaggtagaatgctaagcttattaaaggtgaaatctaggccgggcgcagtggctcacacctgtaatcccagcactttgggtggctgargtgggtggatcacttaaggtcaggagttcaagaccagtctggccaacatggtgaaaccccatctctactaaaaataaaacaattagctgagcatggtggc

SEQ ID NO: 289984 - DNA, 201 bp, Homo sapiens
ttacttttgccatttctgtaaagagtgcttacctttttgtgaacctggagatttgtgtaaactctgatcttgataccggtgattgatgacagagattgtawataatcatagagatcagatcttaacctagccttgtccaacccacagcccgcgggctgcatgtggctcaggacaactttgaatgtggcctaacataaattc

SEQ ID NO: 289985 - DNA, 201 bp, Homo sapiens
ttagaagtactagaagtacctttggccccaaataggtgggatgctgaacccagaagtaggtagaatgctaagcttattaaaggtgaaatctaggccgggcrcagtggctcacacctgtaatcccagcactttgggtggctgaagtgggtggatcacttaaggtcaggagttcaagaccagtctggccaacatggtgaaacc

SEQ ID NO: 289986 - DNA, 201 bp, Homo sapiens
ttcttccattccagtttatataaatatctggtatctgagccagaggctatgaaaaaaatgcaactggctatttcctgcacatagccagaaagaggattcayttactgataggagtaaaaactctgaagaagctgaatcttaagatataaattgtaccatctagtgactttttaaagcacctttacttaagtggctcatgca

SEQ ID NO: 289987 - DNA, 201 bp, Homo sapiens
acatttagaagtactagaagtacctttggccccaaataggtgggatgctgaacccagaagtaggtagaatgctaagcttattaaaggtgaaatctaggccsggcgcagtggctcacacctgtaatcccagcactttgggtggctgaagtgggtggatcacttaaggtcaggagttcaagaccagtctggccaacatggtga

SEQ ID NO: 289988 - DNA, 201 bp, Homo sapiens
caggtaaataaaactatgtattagaagattggcctagaactcttgggccttccttcagtgtctattgtttggttggctttggggagtgtgtgtgtgtgtgkatgtgtaatatttttaagattctagtttggcaaatgaaatgaaagtaaggacccaaagttatttttctggtccttaaatccttcaagttgaaagatcatt

SEQ ID NO: 289989 - DNA, 201 bp, Homo sapiens
tcaaatgggcttttcttctcagttactgagaattggtaagatttgattctgtgaatgaaaaatacaatgtttttcttccattccagtttatataaatatcyggtatctgagccagaggctatgaaaaaaatgcaactggctatttcctgcacatagccagaaagaggattcacttactgataggagtaaaaactctgaaga

SEQ ID NO: 289990 - DNA, 201 bp, Homo sapiens
atgtctcattcagatccacagcagatatttaaggatgctttcatttccacaccttttttgtactttctctctctctctctcgctctctctctctctctctccccctctctctcactctctctgtcagatatagggtgcgttctcttaattgatgttatttatgaaagcatgaaatgacaaggtcatagtttcacctcttct

SEQ ID NO: 289991 - DNA, 201 bp, Homo sapiens
aatgtctcattcagatccacagcagatatttaaggatgctttcatttccacaccttttttgtactttctctctctctctctcgctctctctctctctctctccccctctctctcactctctctgtcagatatagggtgcgttctcttaattgatgttatttatgaaagcatgaaatgacaaggtcatagtttcacctcttc

SEQ ID NO: 289992 - DNA, 201 bp, Homo sapiens
agattctaaattttggtataatatttaaaatcatacaagtagagcttaagtacgtaatgaaaagagaaaattgtcatatttatatataattaattggcatmattattagggtttttgttactattagtgacgtatgtatgtttgtgtgtgtgcttaattaaggctgtgccttgcacataataggcaattaataaatagtag

SEQ ID NO: 289993 - DNA, 201 bp, Homo sapiens
ctctcctgagcgtctttctgctctccttatcctgttctcttatccttatcccctccagtctctgcctaatttttagtgtttaataacaaccgaatgtctartaaatgactctcctctgagctgtaataaataaaatggtagtaatgaatgcaatcagtattagccaaaataaagaatttatgagtcattgctcattgtctt

SEQ ID NO: 289994 - DNA, 201 bp, Homo sapiens
tttgggaatattttcagatttatagaaaagttgtaaaataatacagtccctcattcagtctcccttaatgataacatcttacatcaccatgtcatattacraaattaacattggtgcatgactaactaaactacagactttattcagatttcactgttttttctactaatgttctgggtttttttttgacggaggctggct

SEQ ID NO: 289995 - DNA, 201 bp, Homo sapiens
atgtgtggcccagtgaagccaaaagattggacacccctgctaaacaaatgctaaatttcatttctgcttggaactcttcaacaagtatttattgaacaaaytttggtgggccattttgcataaccatatcttcgtagtatctaataccttttttgttagccttaaagttttggttttcctttttcaggaatacacagtgaa

SEQ ID NO: 289996 - DNA, 201 bp, Homo sapiens
aggtttttttttcagctcattagctacctttagtgttagtgtattttatgtgtggcccagtgaagccaaaagattggacacccctgctaaacaaatgctaratttcatttctgcttggaactcttcaacaagtatttattgaacaaattttggtgggccattttgcataaccatatcttcgtagtatctaatacctttttt

SEQ ID NO: 289997 - DNA, 201 bp, Homo sapiens
ttcagttctagttctcgtccaccaaaatcacaggcacgcttcactgagtcagataccatccctgaagggatttttctttataattagaacgtagttgatgsaattctattttccttttgacttttacttaattattggcttctgatctagcaccagtgaatatttattaataagaagaaaggaaatttacctgaaaattgt

SEQ ID NO: 289998 - DNA, 201 bp, Homo sapiens
ttcaccttaagtgtcataattctattttgagtatgtttttacttttgccatttctgtaaagagtgcttacctttttgtgaacctggagatttgtgtaaacyctgatcttgataccggtgattgatgacagagattgtaaataatcatagagatcagatcttaacctagccttgtccaacccacagcccgcgggctgcatgt

SEQ ID NO: 289999 - DNA, 201 bp, Homo sapiens
aagatataaattgtaccatctagtgactttttaaagcacctttacttaagtggctcatgcattttctcccagcagatcagtgcacttcaggtggctagtcygagtggtgtttacagctaattgatcacaaccagttacagatttctttgttccttccccactcccactgcttcaaattgactactgttaaaaaacaataca

SEQ ID NO: 290000 - DNA, 201 bp, Homo sapiens
gaaaattcctaatatcctgtctgcatttcctttcctccaggtaaataaaactatgtattagaagattggcctagaactcttgggccttccttcagtgtctrttgtttggttggctttggggagtgtgtgtgtgtgtgtatgtgtaatatttttaagattctagtttggcaaatgaaatgaaagtaaggacccaaagttatt

SEQ ID NO: 290001 - DNA, 201 bp, Homo sapiens
gggcttttcttctcagttactgagaattggtaagatttgattctgtgaatgaaaaatacaatgtttttcttccattccagtttatataaatatctggtatmtgagccagaggctatgaaaaaaatgcaactggctatttcctgcacatagccagaaagaggattcacttactgataggagtaaaaactctgaagaagctga

SEQ ID NO: 290002 - DNA, 201 bp, Homo sapiens
tttgttactattagtgacgtatgtatgtttgtgtgtgtgcttaattaaggctgtgccttgcacataataggcaattaataaatagtagctatttaaaatgmcctcttcacttttaaataaatggttttatttaaatatctttaaaaggttttattagaataattatatatgatgagcatatgcttcttcatatagttcaga

SEQ ID NO: 290003 - DNA, 201 bp, Homo sapiens
atgatagagatcaaggttttttggtaaactgtagcaccaggacctattggtattttacattgatgatactataataacaacccttttttaagccccaagcwttatctgcgtaaatacagttttaatctgtgatcagattgagcatcaatattttaaaacttcagaatcggacaccagatctgtgttgaatttaaagggtta

SEQ ID NO: 290004 - DNA, 201 bp, Homo sapiens
tctctgcctaatttttagtgtttaataacaaccgaatgtctagtaaatgactctcctctgagctgtaataaataaaatggtagtaatgaatgcaatcagtrttagccaaaataaagaatttatgagtcattgctcattgtcttgttgtgagaattttttaattagtttttttcaaatatagaatacatttgcacggttcaa

SEQ ID NO: 290005 - DNA, 201 bp, Homo sapiens
caatgtctcattcagatccacagcagatatttaaggatgctttcatttccacaccttttttgtactttctctctctctctctcgctctctctctctctctctccccctctctctcactctctctgtcagatatagggtgcgttctcttaattgatgttatttatgaaagcatgaaatgacaaggtcatagtttcacctctt

SEQ ID NO: 290006 - DNA, 201 bp, Homo sapiens
tcaatgtctcattcagatccacagcagatatttaaggatgctttcatttccacaccttttttgtactttctctctctctctctcgctctctctctctctctctccccctctctctcactctctctgtcagatatagggtgcgttctcttaattgatgttatttatgaaagcatgaaatgacaaggtcatagtttcacctct

SEQ ID NO: 290007 - DNA, 201 bp, Homo sapiens
ttctcctgaatgcttagtatctatcgtgctactgctatgaaattagatgcatgcacttagagcagcagaatgaagagttatcctgcaatgtggaggttttkttaaagttcagcttttagaaagttaggcgtctgggagtggtggctcatacctgtaatcccggcactctgggaggtggaggcgtgaggatccctggaacct

SEQ ID NO: 290008 - DNA, 201 bp, Homo sapiens
tgggccaaacctggcctgccacctgtttttatacagcttgtgagttaagaataatttttacatttttaaatggttgaaaaaaatctgtggaataatatttmatgacacataaaaattatatgaaattcaaattctagtattcataaatttcattggtacaaagccatgcccactcatttacacaatgtcaaggttactttt

SEQ ID NO: 290009 - DNA, 201 bp, Homo sapiens
gaaccttagccttttatctccaagtctaatgtgcagactgtaactcctgggccaaacctggcctgccacctgtttttatacagcttgtgagttaagaatartttttacatttttaaatggttgaaaaaaatctgtggaataatatttcatgacacataaaaattatatgaaattcaaattctagtattcataaatttcatt

SEQ ID NO: 290010 - DNA, 201 bp, Homo sapiens
gggtgaaaatgaaaagggaacgtttataacaatgctagttttcagccttcttttttttttcgaggtagagtcttgctctgttgcccaggcgtgcaatggcrcgatcttggctcattgcaacctccgcctcccgggttcaagcaattctcctgtctcagcctcccaagtagctgggacaacaggcatctgctaccacacccg

SEQ ID NO: 290011 - DNA, 201 bp, Homo sapiens
ataaagaaatcagcagccaagctggcttaggcagtggatgcttgagttttatctagaaccttagccttttatctccaagtctaatgtgcagactgtaactyctgggccaaacctggcctgccacctgtttttatacagcttgtgagttaagaataatttttacatttttaaatggttgaaaaaaatctgtggaataatatt

SEQ ID NO: 290012 - DNA, 201 bp, Homo sapiens
gaataaatagttgaaattgccaggaaatcacttcttattcaatagttccataaaagctggccgaagggggtgagcagttccttccacatcccggtgaacarctcctctccatccctttcttctcccctctcccctccaatctcttcctccccctttctttctctcccttgccccttccctccttctcatctttccctactt

SEQ ID NO: 290013 - DNA, 201 bp, Homo sapiens
tgagagatgttagcaccctaaacatcaccccaaaggattcctaccattctccttctgagaattccaaggaaagacttgtgtggttcaaattatccctcagkgttattctggcaggattgatcatagaactttaaaggagagaagggcctttaaaaaaaaactcatttaatgacttcaatattcacttgaggaagtagagac

SEQ ID NO: 290014 - DNA, 201 bp, Homo sapiens
tctccattataaatcgacactttccctttatcataattaagtaacttaattaagtcttctgtaaaaaagagcttttccttcctcctaccttttttttttttagcatcatcatttatggacatagagattttattgttgggtgttataatccataattgacatcattctttttgatgcttaaattttcccagatttggtagg

SEQ ID NO: 290015 - DNA, 201 bp, Homo sapiens
cctttctcagaaatagtatggtctcaagttaggaaattctaagcctgagctctgagagcaaatgagagatgttagcaccctaaacatcaccccaaaggatwcctaccattctccttctgagaattccaaggaaagacttgtgtggttcaaattatccctcagggttattctggcaggattgatcatagaactttaaaggag

SEQ ID NO: 290016 - DNA, 201 bp, Homo sapiens
ttgaactgggaggcgggggttgcagtgagccgagattgccccactgcattccagcctggacaacagaacgagactccatctcaaaaaaaaaaaaaaaaaaaggtattaatagccaagatctgggtgctagatgtctacgtttgtttctagtgccatttatttttggaagaaactgccctgtagaattttccctattctgga

SEQ ID NO: 290017 - DNA, 201 bp, Homo sapiens
acagtctcattcatcaggctatgactccctttctcagaaatagtatggtctcaagttaggaaattctaagcctgagctctgagagcaaatgagagatgttrgcaccctaaacatcaccccaaaggattcctaccattctccttctgagaattccaaggaaagacttgtgtggttcaaattatccctcagggttattctggc

SEQ ID NO: 290018 - DNA, 201 bp, Homo sapiens
ctagcacatatgtttttacaacaaatggccccagcttcccaagatccaggataagaagtcataaatagaaatcatataaaagccaaggtttttttctccaygttttaaaatggtggtttttttttcttgagtgagggaaaatgcagcaacaaaaataaagaacagtttcccgtgccaaaatcctgaatattcatttcgccc

SEQ ID NO: 290019 - DNA, 201 bp, Homo sapiens
acatcaaaacagtctcattcatcaggctatgactccctttctcagaaatagtatggtctcaagttaggaaattctaagcctgagctctgagagcaaatgaragatgttagcaccctaaacatcaccccaaaggattcctaccattctccttctgagaattccaaggaaagacttgtgtggttcaaattatccctcagggtt

SEQ ID NO: 290020 - DNA, 201 bp, Homo sapiens
aacatgctcctctattctctgtacttcccataaattactagctggacccagaggcatgatcacttcaggctccttttttctttctctttaacttttttttkccctgccagactatgtcagaagagatactgtgaacacacttctattgtatcacatcaggggttgtctcgttttcagtgatgccgaccttcatcggtgtgt

SEQ ID NO: 290021 - DNA, 201 bp, Homo sapiens
gctatatgtttgaccaagttatcaaaagccaagagagatacactaactctccaaagagtaacacacatacttaaaacaattttttgccaagtctattaaayattttgatatactaatgagagcaattaccaccagttcaataagtacacccagaaaatgagaataaaaatcttcaacaaggcaataaaccaccatatcatt

SEQ ID NO: 290022 - DNA, 201 bp, Homo sapiens
agagttgagtagatctgatagagaccatatggcctgcagaacttaaaatatttgctgactggtcctttatggaaaaagcttgccaatccctgaaacagccyggatacagaccaaattgctatatgtttgaccaagttatcaaaagccaagagagatacactaactctccaaagagtaacacacatacttaaaacaattttt

SEQ ID NO: 290023 - DNA, 201 bp, Homo sapiens
atgtcaaggttacttttgtttttctacagcagagttgagtagatctgatagagaccatatggcctgcagaacttaaaatatttgctgactggtcctttatrgaaaaagcttgccaatccctgaaacagcctggatacagaccaaattgctatatgtttgaccaagttatcaaaagccaagagagatacactaactctccaa

SEQ ID NO: 290024 - DNA, 201 bp, Homo sapiens
ggaattgtgttcggagtccctgtgacacacacacttgtgcacatgcagacacccatgggcatccaagagttgactgtgaaggggatctcccctttgctacyactgcttcttgcctctccctaatcacaatctattcttataagccccacacctatacgttaccctcagaatgggagtcaagatgaactcaagcttttcatt

SEQ ID NO: 290025 - DNA, 201 bp, Homo sapiens
gcctacatacacagagcaaccaaaccacaaaccacaaagaagctgccacaaacacccttttctgtccaaggattttaaaactgagcccagttgaactaacmtaagcgctaatggactcctaagagcgaatagtagccacagcacaaagctggtgtcttagagccccttggactctgctaggaccacatgattcagaagtct

SEQ ID NO: 290026 - DNA, 201 bp, Homo sapiens
tgctaaatttcatttctgcttggaactcttcaacaagtatttattgaacaaattttggtgggccattttgcataaccatatcttcgtagtatctaataccytttttgttagccttaaagttttggttttcctttttcaggaatacacagtgaaactaagtaatatccctacaattaagagattccttgaacctggcagcaa

SEQ ID NO: 290027 - DNA, 201 bp, Homo sapiens
agatcagggaacaaaaacccaagaaggtcacgaagaccagttggaacttcagtagagagagtctgagtaaaacaaaagaataggattcagatattgaataytatatctagggtgtcattgtttcagatttcaacatttttaaatgctttgatactgctttttccctttcttgcacattcactattgttaagtattaggaat

SEQ ID NO: 290028 - DNA, 201 bp, Homo sapiens
atactatcagacgtattaaaatatccccatacctgcatcacacattacatgtaattttaaaaataagtatttaagagttaagtggtgtttcagttgattgkttgacataatacgcttagtagaatttaaaaatacttactatttggaccattacattttttccatctcaagcaaatgtcagataattttgtacccagttga

SEQ ID NO: 290029 - DNA, 201 bp, Homo sapiens
gtactgctagcacatatgtttttacaacaaatggccccagcttcccaagatccaggataagaagtcataaatagaaatcatataaaagccaaggttttttyctccatgttttaaaatggtggtttttttttcttgagtgagggaaaatgcagcaacaaaaataaagaacagtttcccgtgccaaaatcctgaatattcatt

SEQ ID NO: 290030 - DNA, 201 bp, Homo sapiens
tgacaatcctcaggggtctgtattacaggtggagcagcccaaatctgaaatccgaaatgctcagaaattcaaaatgctttaaaatccgaaactgagtgccracatggagctcaaaggaaatcttcattggagtattttggatttgggattttttggtttgggatactcagccagtaaatataatgcaaatattccaaagtc

SEQ ID NO: 290031 - DNA, 201 bp, Homo sapiens
tgggtgagagctctggttcacgtggtatcagctcaactctggagggagtgaaaacagatcacctgttgggcagtcagccaggcctacctgatggacccccmagtaaaaaacctaggctccaaggcttgggtaaacttctccagttgacaatacaccatgggtattgtccttcgaatgaatcatgaatcatccaacctaagg

SEQ ID NO: 290032 - DNA, 201 bp, Homo sapiens
gggtgcgttctcttaattgatgttatttatgaaagcatgaaatgacaaggtcatagtttcacctcttctcagatactgcactgattcaatagcctcatcastctctccatgtggaatattgtaactgatgcacaccatttccctacagattttaaggggtcacggacaaagctttcttgttggtaatcagctgagccttgc

SEQ ID NO: 290033 - DNA, 201 bp, Homo sapiens
gaactcaagcttttcattttctctgttttgggacatgtaagaggaagtctaattttataattgggttgagtttatgactacacctcttgatgttctagcarcagaactgggaaataagagtgggccccttgaagatgatctatcacttagatttcttaaatcaccctgcccctccccaagcctcctgcatgcatttctgta

SEQ ID NO: 290034 - DNA, 201 bp, Homo sapiens
tcaggatgcattgtactatgccactctggctccagtagctatatttgacctggaattgtgttcggagtccctgtgacacacacacttgtgcacatgcagayacccatgggcatccaagagttgactgtgaaggggatctcccctttgctactactgcttcttgcctctccctaatcacaatctattcttataagccccaca

SEQ ID NO: 290035 - DNA, 201 bp, Homo sapiens
gcagaaacttcagaagatacagaaaacaaaaactacctcattcattcattcaacaaaagttgtcgaacagctgtctcagctgacatcctccctgataattygatatgagtagaagaaccatttccattttatttatcttccctttgctctttttgtttttggttttgttgtttttctcttcttgttatatctgcttttctg

SEQ ID NO: 290036 - DNA, 201 bp, Homo sapiens
agttcccaccttgtgtggatacagcagaaacttcagaagatacagaaaacaaaaactacctcattcattcattcaacaaaagttgtcgaacagctgtctcwgctgacatcctccctgataatttgatatgagtagaagaaccatttccattttatttatcttccctttgctctttttgtttttggttttgttgtttttctc

SEQ ID NO: 290037 - DNA, 201 bp, Homo sapiens
cttgcattcaccaagttcccaccttgtgtggatacagcagaaacttcagaagatacagaaaacaaaaactacctcattcattcattcaacaaaagttgtcraacagctgtctcagctgacatcctccctgataatttgatatgagtagaagaaccatttccattttatttatcttccctttgctctttttgtttttggttt

SEQ ID NO: 290038 - DNA, 201 bp, Homo sapiens
gaaccctgtactgtggcccctctcgagtgttgtcacttgtcagcttactgatgccttagctgattagcaacctctgtagcacaccacatttactttatgtsttacatagttagtgagatcagggaacaaaaacccaagaaggtcacgaagaccagttggaacttcagtagagagagtctgagtaaaacaaaagaataggat

SEQ ID NO: 290039 - DNA, 201 bp, Homo sapiens
aaaaaaagcaagagggaataaatagttgaaattgccaggaaatcacttcttattcaatagttccataaaagctggccgaagggggtgagcagttccttccrcatcccggtgaacagctcctctccatccctttcttctcccctctcccctccaatctcttcctccccctttctttctctcccttgccccttccctccttct

SEQ ID NO: 290040 - DNA, 201 bp, Homo sapiens
agtattcaatgacactgaacattcagaacagtatcctaaaaccaaaaaaagcaagagggaataaatagttgaaattgccaggaaatcacttcttattcaayagttccataaaagctggccgaagggggtgagcagttccttccacatcccggtgaacagctcctctccatccctttcttctcccctctcccctccaatctc

SEQ ID NO: 290041 - DNA, 201 bp, Homo sapiens
tacctagtagctgggactacaggtgcacaccaccacgaccagctaatttttgtatttttttagtagagacagggtttctccatgttggccaggctgatctygagctccagacctcaagtgatgcacccacctgggcctctcaaagtactgggattacaggtgtgaaccaccacgcccggccctttgctaatgtccttttac

SEQ ID NO: 290042 - DNA, 201 bp, Homo sapiens
acaactgcttttttgttttaaggattgacatgtacgtggaggggacactggatctgctggaactgcttatcatgcatcctttcttaaaaccagatgatcarcaaaaggaagtggttaacatggcccagaaggctataattagatactttcctgtgtttgaaaaggtaggtggcagagatgcctacatacacagagcaacca

SEQ ID NO: 290043 - DNA, 201 bp, Homo sapiens
ttcttcacggatttgtcatacagcttttgagacctttgaaagaaaaatacgttttgaagcaccgttcagttctagttctcgtccaccaaaatcacaggcaygcttcactgagtcagataccatccctgaagggatttttctttataattagaacgtagttgatggaattctattttccttttgacttttacttaattattg

SEQ ID NO: 290044 - DNA, 201 bp, Homo sapiens
cttctggatattttgaatttccacgtgaattttagaaccagattggcaatttctacttaaaacaaaaaaaccctgctggggttttttattgggattgcattgaatctgtagatcagtttgggaaaaattaacatctcaacaatattgagtcttcaagtatatgaatatctctccactctacttacatctttcatttctccc

SEQ ID NO: 290045 - DNA, 201 bp, Homo sapiens
atagagttttttctcaattattggaggcaggatagcctaacagttaagagtacaggctctggtttcaggttgccatagtttcaaatcatggttcctttackcaatagctgaataaccttgggcaagttacttaacttttctgtgcctcagttctctcatctgtaaagtaaagatcatagcaatacctacctaaggtgttgg

SEQ ID NO: 290046 - DNA, 201 bp, Homo sapiens
gttcttcaatttgttgtagattaggctgtcctgggttcacactgcccgaggtcaaacccaacccagtggaaggaggagcttccaagtccctcttctttccrgatgaagcaataaacaagcaccctcgcttcaggtgagtatggctttgtgttgaaatgcagatgcccttcactagacccctgacttctgagagtatagtat

SEQ ID NO: 290047 - DNA, 201 bp, Homo sapiens
gacaccacagatacattttctgttgagttgtcttagataactaatttgaggtatgatttcattccacttacttgtatgtaatcaaattcttcttttacacratgactcttaggtgaccaatttatgacgtttggttgtctgttttagtaccttaacaagaaatatccgacataggagaggagaaaaggttgtcatcaatgt

SEQ ID NO: 290048 - DNA, 201 bp, Homo sapiens
gtaccttaacaagaaatatccgacataggagaggagaaaaggttgtcatcaatgtaccaagtaagtctactgagaggtggtggggtgggagagagacatgwtgtattgttgtttaatcctggattctaaaccatttttatttttgtatttttataatacagtatttaaggacaagaatacaccatctccatttatagaaac

SEQ ID NO: 290049 - DNA, 201 bp, Homo sapiens
ctaaagagcaaagtaaaatatactttgaaaggaagtcatcaaagcacaaattataagtggtcgttatgaacttttttcaagactaaggaaaaaagaaacaratattaataatgaaagcagatgttcacagccatggtggaatgtatactatttatttgagtatgctcctagagtatctagattcttcagaaggtcctgtgt

SEQ ID NO: 290050 - DNA, 201 bp, Homo sapiens
ccaatcatctcggttattgcgtcaaaccccatttcagctctagtttgacttttaaatatgcagttacgattcagaatgctcatatagacaggctctaatcrgaaataaacataaatgtgttgaggtggtgggggtgtttaacaaaaagctaaaagtttgaagaacctctttgaggactagtgcagaaagttcaaggtgact

SEQ ID NO: 290051 - DNA, 201 bp, Homo sapiens
taaaatttagccttttagcactagaagtctaagagattttaattttcatttgtaaaaatagtgcacatttaaaatctgaatgtcttgcagagtggtcaggyatttttttattgggtctcttctccctcaattaaaaggataactgatgggtgccaaaaaacagtatcccagagtcaccttcagggcattgtgacctgtgta

SEQ ID NO: 290052 - DNA, 201 bp, Homo sapiens
aacctttgggaattttctagatgtcttttttattattgatgtctagtatagtttcattttgatcatagaatattctgttatttcaatgtgttgaatgtttsaccttttaatagcccagggtacagtctttcttgatgaatattccatgtacacttcagaataatatataattggtgtgtatagtgtgtagttttctttagt

SEQ ID NO: 290053 - DNA, 201 bp, Homo sapiens
gaaaaggttgtcatcaatgtaccaagtaagtctactgagaggtggtggggtgggagagagacatgttgtattgttgtttaatcctggattctaaaccattyttatttttgtatttttataatacagtatttaaggacaagaatacaccatctccatttatagaaacatttactgaggatgatgaagcttcaagggcttcta

SEQ ID NO: 290054 - DNA, 201 bp, Homo sapiens
ttctagtaggataaaatttagccttttagcactagaagtctaagagattttaattttcatttgtaaaaatagtgcacatttaaaatctgaatgtcttgcaragtggtcaggcatttttttattgggtctcttctccctcaattaaaaggataactgatgggtgccaaaaaacagtatcccagagtcaccttcagggcattg

SEQ ID NO: 290055 - DNA, 201 bp, Homo sapiens
tggttgcaggcttgtttaggagttagtgtaaggagaaaactaagtctctgagaagcaacagttggttctagcaaaaggatcaaaactattgtttgggccaktgcaagagagccagcagtgtggaatggaggagctggccctgaaccccagatgtcagtaggggtctgaagaccctgccctgcacgcatactctacctggac

SEQ ID NO: 290056 - DNA, 201 bp, Homo sapiens
aggctctaatcggaaataaacataaatgtgttgaggtggtgggggtgtttaacaaaaagctaaaagtttgaagaacctctttgaggactagtgcagaaagwtcaaggtgactgcagagaaggagcacttcagaaggcattacattttagtttgaaaaaccgtcaggaaattcttgaggcttccaactgatgattattctat

SEQ ID NO: 290057 - DNA, 201 bp, Homo sapiens
gatgtttcagtttctaacatatatgttccttagttcctccctccacccccaaccccacccccatcagtttcctagcaacattgtgtgtctccttcatatgrtgcctcaaaacgacactagaagcccaaattagtcatgtattcatagctttttaaggtataagaactttttttccttccattaaagccattatccacagtg

SEQ ID NO: 290058 - DNA, 201 bp, Homo sapiens
tctctgctcctcaggaggctgaggcaggaggattgcttgaatccaggaattctagtgcagccccgacaacattgccagatcccatctcttgaaaaaaaaaagcaactggaaagaattactattttttaaaaaatacttttaaaccttttttagagacagggtctcactatgttgctcaggctggtctcgaactcctgggct

SEQ ID NO: 290059 - DNA, 201 bp, Homo sapiens
atctctgctcctcaggaggctgaggcaggaggattgcttgaatccaggaattctagtgcagccccgacaacattgccagatcccatctcttgaaaaaaaaaagcaactggaaagaattactattttttaaaaaatacttttaaaccttttttagagacagggtctcactatgttgctcaggctggtctcgaactcctgggc

SEQ ID NO: 290060 - DNA, 201 bp, Homo sapiens
tgggggccccgtggctcttcagatgctgctctgtagctgggagatagggagtaggagctgggtgagattaagcttgcagtgatagggcctcatagcttttsttaaacacttggctgttttgttttcctaaaagagcacactcgaagaaaatcttcaattgtacctttttgtctttgtcaattgaaatttggtatggacagt

SEQ ID NO: 290061 - DNA, 201 bp, Homo sapiens
atccacagtcatcaaatatatatatatttaaatcatcaaatatatatgtttaaaatatagttgtgtgtgtgatgttatgtatgtataatgtcatgtacacraaagcacatacagtttctactttgtacttactggtcccctaaaagtgcttggagattaccatgtcaaacagtggttttcctatttgtgatgtcatcatta

SEQ ID NO: 290062 - DNA, 201 bp, Homo sapiens
ggggtgtttaacaaaaagctaaaagtttgaagaacctctttgaggactagtgcagaaagttcaaggtgactgcagagaaggagcacttcagaaggcattamattttagtttgaaaaaccgtcaggaaattcttgaggcttccaactgatgattattctattgaaaagtaaatttggttttctttctcatttggtaaatatt

SEQ ID NO: 290063 - DNA, 201 bp, Homo sapiens
atattctgatgtttttctgtttcatttgcttaatgagatcatgaagtgattatactttaattgaggagagtttggtttgttaacattttaaatgtcatccrtttggcatttaaaactgatatttaaaactcagaatgagctttaactttttgttcttttgccctacccatgttttaaacttgtgggctaagagtgaatttg

SEQ ID NO: 290064 - DNA, 201 bp, Homo sapiens
taatcttcactgctcacgccaactgtcatgattgaaagcttgtaacttcaggaaaaacaaaagtaggttctagttgtattctgcccagaagtctgactttgtgtttatgtcctttatttttactagaattccacgaggtattgttaataaatgtactagtgcaccctgcattgcaaattttatatggtttcagagtggaga

SEQ ID NO: 290065 - DNA, 201 bp, Homo sapiens
acctttattttcaataggtggaatacatgttggtatcttttgatcatgaaaataaaaaagtccggttggtcctgtctggggagaaagttcttgaaactctkcaagagaagggggaaaggacaaacccaaagtaagctctcatgtgctgatttagtgtttctgaaactgctaaaacttctagaatatagagttttttctcaa

SEQ ID NO: 290066 - DNA, 201 bp, Homo sapiens
ggcaggtaattggcaggccaggtcaggttaaccataaattttagttgttctcctaaaagcagttgaaggccttggaaaggttgggttgggcagatggcatyccctttttgctttgcagccctcacttgggctgtagtgtgagagtagctgtggagctggtgccagggcttactaggaggtgagtgagggagctccctgagg

SEQ ID NO: 290067 - DNA, 201 bp, Homo sapiens
ttgggctgtagtgtgagagtagctgtggagctggtgccagggcttactaggaggtgagtgagggagctccctgaggggagacaagggctgcctggatgccmgtgggtgctggtgataggaaaagtgggtggtttaaaagatgacagagtcagtgaactgctggggagagaagacacatcaaggcttttgctataggtcatt

SEQ ID NO: 290068 - DNA, 201 bp, Homo sapiens
ttcatccaatctgattctggtgagcaaggaatcccctcagatttaagtttattactctcccaaaggactattcctaaggttctaggctcatagtaaataaygcacatagcttcaagaattctcaagaacccttgtagctgggaactgttttctagataagatcactaccttcaattgtttacaaggtggatatgggcaggc

SEQ ID NO: 290069 - DNA, 201 bp, Homo sapiens
ttactctcccaaaggactattcctaaggttctaggctcatagtaaataatgcacatagcttcaagaattctcaagaacccttgtagctgggaactgttttytagataagatcactaccttcaattgtttacaaggtggatatgggcaggcaacagatactttattttatattaagaaaaggtaggggttaaaaataaggca

SEQ ID NO: 290070 - DNA, 201 bp, Homo sapiens
gcctggctcttcacagtattcccagcacctgcttagcaaagagctttgttgaatggatgaaaggacaaaggggttagtgctgggggtggggggcagggagygtgtccagcaagacagtgttttttggcactgagtagtcatcaactctaactagagccttagtcctcaaaatggttgcaggcttgtttaggagttagtgta

SEQ ID NO: 290071 - DNA, 201 bp, Homo sapiens
agttctagagcttacagtacatggttttaaaattgtataagtgctgttaagagtattgattgccttttcttggtttaatattaaaccagggtgttctgccraagaccgcatagtttctctgatatggttccaaagggatattctttccactgaaacactgtatgtatactagtaaatgcttcctaatggtagatgataaat

SEQ ID NO: 290072 - DNA, 201 bp, Homo sapiens
aaagcactaagttcatgacaggttatggtagcccctcccacccccccccccaaagtcatgtgacttcaaatctgggttgtagataaagtttagattagatktttcagtttctaacatatatgttccttagttcctccctccacccccaaccccacccccatcagtttcctagcaacattgtgtgtctccttcatatgatgc

SEQ ID NO: 290073 - DNA, 201 bp, Homo sapiens
aacacattctcattctctcttcatccaatctgattctggtgagcaaggaatcccctcagatttaagtttattactctcccaaaggactattcctaaggttstaggctcatagtaaataatgcacatagcttcaagaattctcaagaacccttgtagctgggaactgttttctagataagatcactaccttcaattgtttac

SEQ ID NO: 290074 - DNA, 201 bp, Homo sapiens
gatgagtgaaagaaaaatgatggtcttatactaagagtttctggaagactttaatttcaaaaacagtagtttagaactggaagggacattgggttttctcytattttcagatgatttaaaagccaaagactacaacacattctaagtggctatcattagggaaaattaaggctgctctgggcaggataaataccttgtaca

SEQ ID NO: 290075 - DNA, 201 bp, Homo sapiens
ttattgtccgttaacccctacccacccccagaagttcccttgtgccctttgcacgtgtgtgcatgcgtgtatgctagagagagagggggagagcacttcarttgattctggttttccttcagacaccacctttgagaaactgccttaaagagtgtgtggtcattaattagatgaaggggagaaaggaaggcattatggtca

SEQ ID NO: 290076 - DNA, 201 bp, Homo sapiens
ggtatggttggaaggagaggctgccactttagaaatgctcagctctacttactaggatagtgtttgtctcttcacaccagaaagaaccttggatttggggytcagtttgtgttctcatccaaggctgaagtggattgtcttacagaggtgcgtgtatgctggctttttggaactcaggtattttcctgtgagaagctccaa

SEQ ID NO: 290077 - DNA, 201 bp, Homo sapiens
catttacccagtgcagtaaagaacttggacaaataaaaaatcggtttcaagtactcttattttacgattcttactgtttatctcactgattctaatttttytttttattgttcagtattttcttatttgcctagtggtgaaaaattcaaacatacactgcacaaaaaataacctgatcagttatttcagtgcttcagacat

SEQ ID NO: 290078 - DNA, 201 bp, Homo sapiens
aaaatctcaatgccttgtcagtttggcttttggggtcccggtctttcaggtttctcactatacctttgaccgcatgtcatcctctttagcaccccccccccacttttttttttccaagattctcatttgttaagcactaaccaggtatcagatgctgtcctgcgcacttgggatagagaatgggaagaaagatccccgccc

SEQ ID NO: 290079 - DNA, 201 bp, Homo sapiens
tttgggaggctgagatgggcagatcacttgaggtcaggagtttgagacaagcctggtcatcatggcaaaatctcatctctactaaaaatacaaaaattagmcctggtggcatgtgcctgtaatcccagctactgaggagtctgaggcatgagaaacgcttgaacctgggaggcggaggttgcagtgagccaagatcgtgcc

SEQ ID NO: 290080 - DNA, 201 bp, Homo sapiens
tgactgttttggggcttttcaggaatcacttaaaaagcaccaagttcacagccaggcacggtggctcatgcctgtaatcccagcactttgggaggctgagrtgggcagatcacttgaggtcaggagtttgagacaagcctggtcatcatggcaaaatctcatctctactaaaaatacaaaaattagacctggtggcatgtg

SEQ ID NO: 290081 - DNA, 201 bp, Homo sapiens
caggagttcaaggctgcactgagctatgattgcaccactgcactccagcctgggagacagagcaagaccctttctcagaaaaaaaaaaaaaaaaaaaaaawtttttttttaaaagatatgagctagtcttgatcctcaagccaaaagtttcttcccactaatttaaaactcctcccttgtttggctttcgcttagtctttg

SEQ ID NO: 290082 - DNA, 201 bp, Homo sapiens
ccaggagttcaaggctgcactgagctatgattgcaccactgcactccagcctgggagacagagcaagaccctttctcagaaaaaaaaaaaaaaaaaaaaaaatttttttttaaaagatatgagctagtcttgatcctcaagccaaaagtttcttcccactaatttaaaactcctcccttgtttggctttcgcttagtcttt

SEQ ID NO: 290083 - DNA, 201 bp, Homo sapiens
cccaggagttcaaggctgcactgagctatgattgcaccactgcactccagcctgggagacagagcaagaccctttctcagaaaaaaaaaaaaaaaaaaaaaaatttttttttaaaagatatgagctagtcttgatcctcaagccaaaagtttcttcccactaatttaaaactcctcccttgtttggctttcgcttagtctt

SEQ ID NO: 290084 - DNA, 201 bp, Homo sapiens
gcccaggagttcaaggctgcactgagctatgattgcaccactgcactccagcctgggagacagagcaagaccctttctcagaaaaaaaaaaaaaaaaaaaaaaatttttttttaaaagatatgagctagtcttgatcctcaagccaaaagtttcttcccactaatttaaaactcctcccttgtttggctttcgcttagtct

SEQ ID NO: 290085 - DNA, 201 bp, Homo sapiens
gtttctgggccagggttcctcttggcagagagtggctgggaaaaactgctaaatagagagggccctgccgcaggggttcctggttgagggtttcggggccrgagaatggagaagtagggtagccctgtcacagcaaacatggaagcaagaatgaaactgcttagctccagcatctgcccctggggcatctccttcctccat

SEQ ID NO: 290086 - DNA, 201 bp, Homo sapiens
agcccaggagttcaaggctgcactgagctatgattgcaccactgcactccagcctgggagacagagcaagaccctttctcagaaaaaaaaaaaaaaaaaaaaaaatttttttttaaaagatatgagctagtcttgatcctcaagccaaaagtttcttcccactaatttaaaactcctcccttgtttggctttcgcttagtc

SEQ ID NO: 290087 - DNA, 201 bp, Homo sapiens
tttatctgaaatggggaaaaagatttggtctaggtggggagttaatttttatcgtatgttgatgtctgtatttgttttagcttcatttaaaattagtagtscgatttttctatattttggaagtgctgatggctgtttttaccaaaaggctttttggtgccacatgagtgttttgtatatggtgctttctgctgtggaaag

SEQ ID NO: 290088 - DNA, 201 bp, Homo sapiens
cacactcgaagaaaatcttcaattgtacctttttgtctttgtcaattgaaatttggtatggacagtgagcagtcttcttccttaattaaataccagatcawcttaatattttcctggatgtgtgaaaagttggttttcttctctgcttttgtatcacagaatattcagtccacaaattggcagacaatgagatttaagccc

SEQ ID NO: 290089 - DNA, 201 bp, Homo sapiens
gaaattgccaaaaacatctgaagccctaataaaaagtgaaagtatgtgtagtatcttcctattgatagcagatagtcaattttagaaagatttccactcaygtatatgtaaactttttaaagaaaacatatgctctaaaggggtaagttttgggtaataagaaaattaatttcaataaaatgaatgttctgtgtttgatga

SEQ ID NO: 290090 - DNA, 201 bp, Homo sapiens
tgtacgcctttagttcttcaaagctcttttacacttttttgctgactcctggtctggtttctatttttagtgcaaagtctttaacttctctcatgaggctrcttgttcctaaagtttcaggttccaaatacttgtgagattttcttgatttttagcaaaaggagcttactttggaggtctgtgtctaggtccacaccagtg

SEQ ID NO: 290091 - DNA, 201 bp, Homo sapiens
ttggtttaatattaaaccagggtgttctgccgaagaccgcatagtttctctgatatggttccaaagggatattctttccactgaaacactgtatgtatacyagtaaatgcttcctaatggtagatgataaatatttttgttgcttgtagatagaatttttccatctagtgtaagcttaggattgttttctttttcccagtg

SEQ ID NO: 290092 - DNA, 201 bp, Homo sapiens
ttcagttgattctggttttccttcagacaccacctttgagaaactgccttaaagagtgtgtggtcattaattagatgaaggggagaaaggaaggcattatrgtcaaaagaacagtgtaacaaaggaggaaaggtgagaaataccattggatagtatgtgaaggttattgtgcagtttagtgttgtaaatgcagtgaatagg

SEQ ID NO: 290093 - DNA, 201 bp, Homo sapiens
aaacacacacacttcatagctataaattgaaaccagtaaattacggctcagtttcctacatgggggaggaaccttccctttcctgtttaattctaagtggraatgcatttagagtttcaacattaggatttgcttgtgtctttccatggcctaggtccagcaactaaactttacaaaccagtgttctgcctagagatgaaa

SEQ ID NO: 290094 - DNA, 201 bp, Homo sapiens
atgttactcagtaactgacaggccatataatcaaaggatgggaaaggccatgggggaattaaaggcatggttaataagcttggttgtatgcgtatattacrtatctcataccacatcttttttcaaatgccatgagtaagatttacaaaaattaaagaaaatcttcacttctcaaaagtagacataatacagcatgcgttc

SEQ ID NO: 290095 - DNA, 201 bp, Homo sapiens
cttctgcccttgggagggctgtaaccttattccagatatgacaacctatgaactgtctttgcctttcctcactaaagtggggaggcaaaaccccaatggcraggcagcaggggaagagcactcaacttagaagaaccgggttataggccgggcgcggtggctcacgcctgtaatcccagcactttgggagtctgaagcggg

SEQ ID NO: 290096 - DNA, 201 bp, Homo sapiens
tgtctttgcctttcctcactaaagtggggaggcaaaaccccaatggcgaggcagcaggggaagagcactcaacttagaagaaccgggttataggccgggcrcggtggctcacgcctgtaatcccagcactttgggagtctgaagcgggcagatcacttgaggtcaggagttcgaaaccagcctggccaacatggtgaaacc

SEQ ID NO: 290097 - DNA, 201 bp, Homo sapiens
gtgagatgagattgcaccactgcactccaacctgggcaacagagcgagactccatctcaaaaaaacagaagaagaactgggttctagtcctgccttctgccttcgttaccctgggactcctggtgagacactgctatataaagggaaccagccacctgccctcccaacactgtatatctgttgcaaggctcagtcacagag

SEQ ID NO: 290098 - DNA, 201 bp, Homo sapiens
  misc_feature (1)...(201): n = A,T,C or G
cctcacataaataaaaagcctgttcctcccactgggaagcatttgagcagaaagtagaatccctaagggaatgagtcctaattgcaaaggtgaggaaggtnctgcaacttgtatgtctgatcaagaatattttgacttagtcgtgattctttttttcccttaggttgatgagaacatgaaggtagcacagaaaagagatgc

SEQ ID NO: 290099 - DNA, 201 bp, Homo sapiens
gtgctttttttcttatcagttcataaaataggggtgcatctgaaaatcactggcatcttagatgatgaaatggcatctggattgcttacttatcatttacrtccaactgtgttgatcttacatcatcatgggcccttttatagggctaaggaactctgtaagttaaataagctgaacagttctttagcctgcctttgtaca

SEQ ID NO: 290100 - DNA, 201 bp, Homo sapiens
gtgaaattgccaaaaacatctgaagccctaataaaaagtgaaagtatgtgtagtatcttcctattgatagcagatagtcaattttagaaagatttccactmacgtatatgtaaactttttaaagaaaacatatgctctaaaggggtaagttttgggtaataagaaaattaatttcaataaaatgaatgttctgtgtttgat

SEQ ID NO: 290101 - DNA, 201 bp, Homo sapiens
actcaaggcttctgtaaactttctggagtcacaaaggatagccgtagaaccctacctcacccctcaaatggtatactgccaatttcccacttcattcactytacttactgttctttattctctccacctctttgatcaaagatcgctcaaggaccctacagtcctctgaggcagtctcatgacactggcatttgtagtcct

SEQ ID NO: 290102 - DNA, 201 bp, Homo sapiens
ttacagttaactgaaacttgcttgttcagatacaattatattccattaacagtaattttttattgtatttcttttcttttttttaatattatgtatttatktatttatttatttatttatttattttgagacagggtctttcttgctctgtcacccaggctagagtgcagtgacaccatcacagtgtgctgcagccgcagc

SEQ ID NO: 290103 - DNA, 201 bp, Homo sapiens
tactttaggaggctgaggcagaaggattactggagcctaggagttaaagaccattctgggtagcatagtgagacctcgtccctggaaaaaaaaaaaaaaaaaaaaaaaaaaaaacttggtacagtgactcatgcctgtaatcccagctactcaggagcctgaggcaggaggatgacttgagcccaggagttcaaggctgca

SEQ ID NO: 290104 - DNA, 201 bp, Homo sapiens
gtactttaggaggctgaggcagaaggattactggagcctaggagttaaagaccattctgggtagcatagtgagacctcgtccctggaaaaaaaaaaaaaaaaaaaaaaaaaaaaacttggtacagtgactcatgcctgtaatcccagctactcaggagcctgaggcaggaggatgacttgagcccaggagttcaaggctgc

SEQ ID NO: 290105 - DNA, 201 bp, Homo sapiens
agtaaataatgcacatagcttcaagaattctcaagaacccttgtagctgggaactgttttctagataagatcactaccttcaattgtttacaaggtggatwtgggcaggcaacagatactttattttatattaagaaaaggtaggggttaaaaataaggcattgatggccaggtgaggtggcacgtgcttgtaatcccagt

SEQ ID NO: 290106 - DNA, 201 bp, Homo sapiens
tgttgttgtttaaatctgctaggctatctcctacagttactaacatttttttcctctttataatcatattacttagcccttaatgtttctgtgatgaggayggctgactcaaatgccttccaagaccagggaaatacacataaataagggaataaactgcagacagtgtgcacccctgaaaagcaaacagcccagtcacac

SEQ ID NO: 290107 - DNA, 201 bp, Homo sapiens
accattctgggtagcatagtgagacctcgtccctggaaaaaaaaaaaaaaaaaaaaaaaaaaaaacttggtacagtgactcatgcctgtaatcccagctaytcaggagcctgaggcaggaggatgacttgagcccaggagttcaaggctgcactgagctatgattgcaccactgcactccagcctgggagacagagcaaga

SEQ ID NO: 290108 - DNA, 201 bp, Homo sapiens
agtactttaggaggctgaggcagaaggattactggagcctaggagttaaagaccattctgggtagcatagtgagacctcgtccctggaaaaaaaaaaaaaaaaaaaaaaaaaaaaacttggtacagtgactcatgcctgtaatcccagctactcaggagcctgaggcaggaggatgacttgagcccaggagttcaaggctg

SEQ ID NO: 290109 - DNA, 201 bp, Homo sapiens
tgcatgctcatctgtcatcctgagcctaggctcctgatccagagtgggaacatggagacttctcagcgttcattcctttaacaggccctcacgtttgctaygtgcagagccttttggggaagacagatatttgtagacgtagtttctaacttcatatgttgtcatgtgtttaaaggaaaataaaaataattcagctgctca

SEQ ID NO: 290110 - DNA, 201 bp, Homo sapiens
cagtactttaggaggctgaggcagaaggattactggagcctaggagttaaagaccattctgggtagcatagtgagacctcgtccctggaaaaaaaaaaaaaaaaaaaaaaaaaaaaacttggtacagtgactcatgcctgtaatcccagctactcaggagcctgaggcaggaggatgacttgagcccaggagttcaaggct

SEQ ID NO: 290111 - DNA, 201 bp, Homo sapiens
taatgtccaaggaaattttatccagttgtgattacttcagctgattcaaaacagcgtccttagaggcacagggccgtgcagagcctggacccatgtaagayccctctgagccgccagcctgactgctctcagtgcaaagacccagaacccagccttccttcacctgaaacagctgcagcgtgcacacacacttcttgtgca

SEQ ID NO: 290112 - DNA, 201 bp, Homo sapiens
aaggcattgatggccaggtgaggtggcacgtgcttgtaatcccagtactttaggaggctgaggcagaaggattactggagcctaggagttaaagaccattytgggtagcatagtgagacctcgtccctggaaaaaaaaaaaaaaaaaaaaaaaaaaaaacttggtacagtgactcatgcctgtaatcccagctactcagga

SEQ ID NO: 290113 - DNA, 201 bp, Homo sapiens
aattgaatgctggaatcagatttttccattctgaatgtgtttaaataacatggccaaggataatttctttctgttttcttgacatttataggtagtataaratatgtgacttccaaataaacataaaccatcacacttcacgaaaaaagagatctttcgacttttaactgcctgtttcctatcttaattacaagtatttct

SEQ ID NO: 290114 - DNA, 201 bp, Homo sapiens
ccattctcctgcctcaccctcccgagtagctgggactacaggcgcccgccaccacgcctggctaattttttgtatttttagtagagacgggggtttcaccrtgttagccaggatggtctccatttcctgacctcatgatctgcccgcctcagcctcccaaagtgctgggattacaagcatgagccaccgcacccggcctgg

SEQ ID NO: 290115 - DNA, 201 bp, Homo sapiens
tattggaaaatcgttgtcttaatgtatcactttttattatcaccaatcatctcggttattgcgtcaaaccccatttcagctctagtttgacttttaaatawgcagttacgattcagaatgctcatatagacaggctctaatcggaaataaacataaatgtgttgaggtggtgggggtgtttaacaaaaagctaaaagtttg

SEQ ID NO: 290116 - DNA, 201 bp, Homo sapiens
tgtattgtttcctaattaagcattgtttttacctctaggagtagatattaagaaattagtatttcataaaatacccagccattcctcaaattgtttttttktttttttttttgaggcggagtcttgctctgtcacccaggccagagtgcagtgccgcgatctcggctcactgcaagctctgcctcctgagttcacgccatt

SEQ ID NO: 290117 - DNA, 201 bp, Homo sapiens
aaatcaactgatattacttttcatttgcaacattaaatgctagatggaaagaagttttcagaatctcgagaggtaaagaattaacaaccacagaattatcktctcagccaaattattctttaaatttcaggtgattctaacaaaactgaatggatcaagttagggctaaaagtatgccagaagtcttatctagtgtcttgg

SEQ ID NO: 290118 - DNA, 201 bp, Homo sapiens
cagttactctgttggtgggatccactataacacccaggtacgattcctgaatgggaacctgatgctgcctttgtgagatgtggttatgacacagtgtctgyactcagattcgtatgatggtggaatggcattaaacttggaggtcttgaagccctgtcgtcctgtccctggaggcataggtgacccccagtgagcactagc

SEQ ID NO: 290119 - DNA, 201 bp, Homo sapiens
cctcccaaaggaggtcctcccaattgcctcccaaaggccctactttctaatactgtcacaatgggcattaggcgtcagtgtatgaatttaagggaacacaracattcagaccatagcaccttgtaaggggatatggaaggagatgaatggtagatactcattagtgcttgacacttagagagttataatttcaaaactacc

SEQ ID NO: 290120 - DNA, 201 bp, Homo sapiens
cgtgatggttcacgcctgtaatcccggcactttgggaggccgaggcaggtggatcacttgaggtcaggagttcaagaccagcctgaccaacatggtgaaamccccctctctaataaaaatacaaaattagctgagagttgtggcacatgcctgtaatcccagctaccagggaggctggggcaggagaatcacttgaacctg

SEQ ID NO: 290121 - DNA, 201 bp, Homo sapiens
aaggcccagaacagcacggagctcgctgcagaggagtacaccctcatgagcatagacaccatcatcaatgggaaggtaggagggtggccctgtacagtacscctcactgtgcacatcccccggcagggagttcataaagtgtcctgcttcttgtaggaaggtgtgtttcctggactgatcccaattctgaactcttacctt

SEQ ID NO: 290122 - DNA, 201 bp, Homo sapiens
agcagtatttgtccttctgtgaccgatgtatttcacttaacataatgtcctcaagggtcatctaaattgtcccatactgtaggattttctttttttttttyttttttgaggctgaataatattccattgcttgtatgtaccacattttcttcattcttctgtcagtgaacgtttagttgtctctacatcttggctattgtg

SEQ ID NO: 290123 - DNA, 201 bp, Homo sapiens; identical to SEQ ID NO: 59921

SEQ ID NO: 290124 - DNA, 201 bp, Homo sapiens
taaaccatttacttagaaaatttaaaacatccagtatatcttatttaaatagctgtggtcattgaggaatgaaacattccacatatgtagggttttttggkttttttttacagttaactgaaacttgcttgttcagatacaattatattccattaacagtaattttttattgtatttcttttcttttttttaatattatgt

SEQ ID NO: 290125 - DNA, 201 bp, Homo sapiens
ggtttttgtaattaacccaaataccatgaaattattttttcatcattgcgacctcagatgtttctagaaagaagcatagtgatgaagacaaacagatgccstatctcccctagtagctatcaaccccggtggggagaaagaacttgaagtgtgactgaattgactgctgtgccactggaagattttttttttcttttttac

SEQ ID NO: 290126 - DNA, 201 bp, Homo sapiens
gcaggtgcctagcctgttaagtaaaatctcacaaatagcctaaaccatttacttagaaaatttaaaacatccagtatatcttatttaaatagctgtggtcrttgaggaatgaaacattccacatatgtagggttttttggtttttttttacagttaactgaaacttgcttgttcagatacaattatattccattaacagta

SEQ ID NO: 290127 - DNA, 201 bp, Homo sapiens
ctgcttagtaaagtagaaaaaatagttttaaagtaattttgtaaggctaatggaagacttactgtataaagcaaaaaggattttaaccacattcaaattaktgactgttttggggcttttcaggaatcacttaaaaagcaccaagttcacagccaggcacggtggctcatgcctgtaatcccagcactttgggaggctgag

SEQ ID NO: 290128 - DNA, 201 bp, Homo sapiens
ccaacttcaattttgtcatctattaaatgaggacaatactaccttccttgcagggttattgagattaaatggggtaatattagtgaggtggtttgcaggtrcctagcctgttaagtaaaatctcacaaatagcctaaaccatttacttagaaaatttaaaacatccagtatatcttatttaaatagctgtggtcattgagg

SEQ ID NO: 290129 - DNA, 201 bp, Homo sapiens
cattagagagatggaaaaaaaaaaaagaaactgcttagtaaagtagaaaaaatagttttaaagtaattttgtaaggctaatggaagacttactgtataaarcaaaaaggattttaaccacattcaaattattgactgttttggggcttttcaggaatcacttaaaaagcaccaagttcacagccaggcacggtggctcatg

SEQ ID NO: 290130 - DNA, 201 bp, Homo sapiens
ctcatcttagaagaaaagcataacccgctgctcattttttattattttaaatttgcttcagttatgtctctgggtggagtatagaatttttgagaagaatracattcctgccctgaagtgttgacagttgcccgacacaaaggaaagaattaagattgtgaagactgcctaggtgattaaagaaaaagaagccccactcta

SEQ ID NO: 290131 - DNA, 201 bp, Homo sapiens
cttttaccagcattttactgttttatgatctatcctttctgtttccctagactattttgttttccacaagttcctttgttcccccaccgcccccccacccyactaacatattaatgtcttttggagtggggagtaaacaaactgaggtggaaaactcatcttagaagaaaagcataacccgctgctcattttttattattt

SEQ ID NO: 290132 - DNA, 201 bp, Homo sapiens; identical to SEQ ID NO: 59919

SEQ ID NO: 290133 - DNA, 201 bp, Homo sapiens
aaggaaattttatccagttgtgattacttcagctgattcaaaacagcgtccttagaggcacagggccgtgcagagcctggacccatgtaagatccctctgwgccgccagcctgactgctctcagtgcaaagacccagaacccagccttccttcacctgaaacagctgcagcgtgcacacacacttcttgtgcatatatctc

SEQ ID NO: 290134 - DNA, 201 bp, Homo sapiens
  misc_feature (1)...(201): n = A,T,C or G
ctcattccactgtcaaaggtaaggatatgtttctttatggtgatgggtatagatctatctgtagatatatttatttatatatgctatttatttcccacctnatttcatttgaaattgtttaccctttgcaataaaatgtttctccatcagccctattctttattttcttttaaacctaagcttaatttctagacgctttcc

SEQ ID NO: 290135 - DNA, 201 bp, Homo sapiens
aagtgcctggcatagaatgtgatatactgggacccaagcgacagaccaccaaggtcaagggatactcaagccaaagagagcggtaaaggcaggggcagatracctagaagtgccttcctcagagtcccctaggcactctctctgttttccttatttgatctcgcgaagccgctgactcaagggaaactgggaatggcgtga

SEQ ID NO: 290136 - DNA, 201 bp, Homo sapiens
  misc_feature (1)...(201): n = A,T,C or G
attaagtatgtgcatggtagcaagtcagtccaagttaaggagggttgatttctgagaatagatgtgggcaaagggcttccagacccagatggggaattagnagatggcttgggaatgacatgatctgaggaagggcctgggtcagggaagagcatgtttgtgtagttggttcataacttctctgggcttctgcttgtctag

SEQ ID NO: 290137 - DNA, 201 bp, Homo sapiens
caagctcttcaccatactgccaccagtgaagtttgaaaacaatagttggccggacgcggtggctcacgcctgtaatcccagcattttgggaggccgaggcragcagatcatgaggtcaggagatcgagaccatcctggctaacacggtgaaaccccatctctactaaaaatacaaaaacaaaattagccagtcgtggtggt

SEQ ID NO: 290138 - DNA, 201 bp, Homo sapiens
agacctaaaaaatctaagagatgcatgttcaaaataattctttagtcaaaatacttgggaaacatgtagttttttgttttttggtttttttaaaatctcartgccttgtcagtttggcttttggggtcccggtctttcaggtttctcactatacctttgaccgcatgtcatcctctttagcaccccccccccacttttttt

SEQ ID NO: 290139 - DNA, 201 bp, Homo sapiens
ccacgtggttagtgactaccacatcggtttggatagtggagatattaaacatttccatcactccagaaagttctgtgggacagcactgctctagaatgaarcagtgccgtaggtgtccgaagatgcaagttctgattctaccttctcccttccacacaaacacattctcattctctcttcatccaatctgattctggtgag

SEQ ID NO: 290140 - DNA, 201 bp, Homo sapiens
tgagcaaggaatcccctcagatttaagtttattactctcccaaaggactattcctaaggttctaggctcatagtaaataatgcacatagcttcaagaattytcaagaacccttgtagctgggaactgttttctagataagatcactaccttcaattgtttacaaggtggatatgggcaggcaacagatactttattttata

SEQ ID NO: 290141 - DNA, 201 bp, Homo sapiens
catattgatttctctccagaattgtgtttatgctgaccactaaatatcaacttattaaaaaaaaaacttacgtggttttaatttttttttcgctccccccycgcccacaggagaactaatgacagttgccagatggatgagggagtttatcgcaaaccatcctgactacaagcaagacagtgtcataactgatgaaatgaa

SEQ ID NO: 290142 - DNA, 201 bp, Homo sapiens
cagactgcaggtcatgattcagtagtgggttgacatacatttagaagattccaaccaggacttttgtgtgtgtgtgtgtgtgtgtgtgtgtgtgtgtgtgkggcaagacacttaacatgagctctacctccttaacagatttttaagtgcacaaatatagtattgttaactacaggggcaatgttttacagatctctagaa

SEQ ID NO: 290143 - DNA, 201 bp, Homo sapiens
ctcccgggttcaagcaattctcctgcctcagcctcctgagtagctgggattacaggtgcctgccaccacgcccagctaatttttgtatttttagtagagayagggtttcaccatgttggtcagggtgatctcaaactcctgacttttcacccgcctcggcttcccaaagtgctgggattacaggcatgagccaatgtgccg

SEQ ID NO: 290144 - DNA, 201 bp, Homo sapiens
  misc_feature (1)...(201): n = A,T,C or G
cccacctgatttcatttgaaattgtttaccctttgcaataaaatgtttctccatcagccctattctttattttcttttaaacctaagcttaatttctagangctttccattcaagatgattgatggctagaagtagtcctacacattgatttcatccaccacaaaatcccaggttgattacaatgttaaattaggatgggg

SEQ ID NO: 290145 - DNA, 201 bp, Homo sapiens
gccttaactaacagaagtaaaagagagaggctgcttgttatttaatgtccaaggaaattttatccagttgtgattacttcagctgattcaaaacagcgtcyttagaggcacagggccgtgcagagcctggacccatgtaagatccctctgagccgccagcctgactgctctcagtgcaaagacccagaacccagccttcct

SEQ ID NO: 290146 - DNA, 201 bp, Homo sapiens
tcctggatctgtttaaatgatggtgcccctggcagtgagtgtgtccaagctcacttaggaccagagtggaagagcatggaacccatcaggtggccacacamaagcctgcagttggcttttggctctgtcactactcaggtttttgggcaactccctttacttcttttggctcagatttttcatcagttgaaagaagggctg

SEQ ID NO: 290147 - DNA, 201 bp, Homo sapiens
gtcctaggatgaaccaaacaagcggggacttcctgggaactagaagaaagcaagctggccagtgtgactaggaggctgaggaggaagtgcaggtatggggkaaagggaagctggcaggtaattggcaggccaggtcaggttaaccataaattttagttgttctcctaaaagcagttgaaggccttggaaaggttgggttgg

SEQ ID NO: 290148 - DNA, 201 bp, Homo sapiens
tggggagcaaagagtacaacctaggtatccagtggactctggtgggtggagggggagggggtgggatgtccaaggttccaggaggagtgaaataggaatgrggagcggaggacagtcttagggagggggagcagtgtgtgtagaagtcctaggatgaaccaaacaagcggggacttcctgggaactagaagaaagcaagct

SEQ ID NO: 290149 - DNA, 201 bp, Homo sapiens
ttgatagactctgtaacagtagagctgcagacacagttgcatgccagcttctgtcagctgtggtggctgcaccgtggtgagtgcactcagtgggggctcartgggaaagaccaggatactgtgatgacagaccagcagtgtggccgtgtctgccgcaggcgagggtggagggagcagcacgcctgccacacagttctgacc

SEQ ID NO: 290150 - DNA, 201 bp, Homo sapiens
acatattgatttctctccagaattgtgtttatgctgaccactaaatatcaacttattaaaaaaaaaacttacgtggttttaatttttttttcgctcccccstcgcccacaggagaactaatgacagttgccagatggatgagggagtttatcgcaaaccatcctgactacaagcaagacagtgtcataactgatgaaatga

SEQ ID NO: 290151 - DNA, 201 bp, Homo sapiens
cctcttctccggcaggtggcaatgcagtggtggatggttgtggcaaggcccagaacagcacggagctcgctgcagaggagtacaccctcatgagcatagayaccatcatcaatgggaaggtaggagggtggccctgtacagtacgcctcactgtgcacatcccccggcagggagttcataaagtgtcctgcttcttgtagg

SEQ ID NO: 290152 - DNA, 201 bp, Homo sapiens
ggagagtgacttgacctgcttgctgaaggaccatggtcttcctgactgtagggttagacagcattccatgccagtagctttcacctttgactaaaacaagygctctgtgaaacaacatttccacgaaacagcagttcccttcccatgagtgacatattctgatatttctattctaccctattaacgattattttttgttat

SEQ ID NO: 290153 - DNA, 201 bp, Homo sapiens
tgtcttgcagggaatgttttatttcaggaaagatatttgcaaaggtattacattatcttagatttctaatgtcagcttatgctgcaacaagctgctaaagmtcccctgaccctcttctccggcaggtggcaatgcagtggtggatggttgtggcaaggcccagaacagcacggagctcgctgcagaggagtacaccctcat

SEQ ID NO: 290154 - DNA, 201 bp, Homo sapiens
aaacatatgctctaaaggggtaagttttgggtaataagaaaattaatttcaataaaatgaatgttctgtgtttgatgagtgaaagaaaaatgatggtcttrtactaagagtttctggaagactttaatttcaaaaacagtagtttagaactggaagggacattgggttttctcttattttcagatgatttaaaagccaaag

SEQ ID NO: 290155 - DNA, 201 bp, Homo sapiens
ttccaggtagctggaattacagacacaaaccaccatgctcagctttggaaagagttcttaaaggaattctaattagtggcctcagacaaattctagagagkttcagtcacatccataaaacaagtattatagattgtgcttatttaatggtgagtattctcaccagtagagcagatgttgaatatccaaggtagtgattta

SEQ ID NO: 290156 - DNA, 201 bp, Homo sapiens
accctggcctgccagtgtgttaagttgtgtctaggggttatgatctgttggctccactactcaaatagagcaagaactgggaagtaaacaaaaactttatycctggaagcatatttgaggcctatacgcagatcgctttatacatagttcctgcagactcggtcatttagtatctcagctcaggatgtactgcaagaaatt

SEQ ID NO: 290157 - DNA, 201 bp, Homo sapiens
ttacatttcatatgatgtttgaaatcttgatgatagtttttagaaggagacaggcctgcactgggacagcatatgagtttgggtcactttggtaatatctstgtggctaagttatcactggtgtgtagtgaaactgaatgagtgatgacttaatctccacttaatggttctgtttctcagacatggtttaaaaagacagag

SEQ ID NO: 290158 - DNA, 201 bp, Homo sapiens
atttgtccttctgtgaccgatgtatttcacttaacataatgtcctcaagggtcatctaaattgtcccatactgtaggattttctttttttttttcttttttgaggctgaataatattccattgcttgtatgtaccacattttcttcattcttctgtcagtgaacgtttagttgtctctacatcttggctattgtgaataac

SEQ ID NO: 290159 - DNA, 201 bp, Homo sapiens
atgtaaggaatcaacttaaatttaaatggcacttcctctgggaagccttctgatcttctagaccggcttagactgtgctgttacatatgcacagctctctytggtcattttgagcactcgttcagataattcagcaatagcgtgttattggctgtcagtccagccagtgtaagcctgagaacaggagccacatctgcctgg

SEQ ID NO: 290160 - DNA, 201 bp, Homo sapiens
gattgcgccattgcactccagcctgggcgacaagagtgaaactccgtctcaaaaaaaaaaaaaagaaaagaaaaacagaacttaaattctttggaccacartttcctcatttgtaagactaattaaaaaaccctatcatttggtgttttgaattgcatgtttatatatatagattcttttagttgtattttttaacaattt

SEQ ID NO: 290161 - DNA, 201 bp, Homo sapiens
tcacgtttccctgcctttttcttctggaggccacactgaaaacaagtctggaagaatgttaatttttctcacctttattttcaataggtggaatacatgtyggtatcttttgatcatgaaaataaaaaagtccggttggtcctgtctggggagaaagttcttgaaactctgcaagagaagggggaaaggacaaacccaaag

SEQ ID NO: 290162 - DNA, 201 bp, Homo sapiens
ttaatattttcctggatgtgtgaaaagttggttttcttctctgcttttgtatcacagaatattcagtccacaaattggcagacaatgagatttaagccccytcctccaaactcagacattggatggagagtagaatttcgacccatggaggtaagacacatgcatcagcaagaactgactcaaaagtactctttcgccagc

SEQ ID NO: 290163 - DNA, 201 bp, Homo sapiens
ccttagtatttattttccctagcttaataagaatgaaagtgatctgcttttaaaagataaaagtatatttaaatcataccagaaaaaaagggtatttaaaytgccttcagattttaaaaaacataattttccttaataatactttttagggctcactaactttttttctgtatcttatgttgaggtttttatataattatc

SEQ ID NO: 290164 - DNA, 201 bp, Homo sapiens
caaagggcttccagacccagatggggaattaggagatggcttgggaatgacatgatctgaggaagggcctgggtcagggaagagcatgtttgtgtagttgrttcataacttctctgggcttctgcttgtctaggtgcaattaacagactttgagaactctgcctatgtggtgtttgtggtactgctcaccagagtgatcct

SEQ ID NO: 290165 - DNA, 201 bp, Homo sapiens
tgtctaggtgcaattaacagactttgagaactctgcctatgtggtgtttgtggtactgctcaccagagtgatcctttcctacaaattggattttctcattycactgtcaaaggtaaggatatgtttctttatggtgatgggtatagatctatctgtagatatatttatttatatatgctatttatttcccacctgatttca

SEQ ID NO: 290166 - DNA, 201 bp, Homo sapiens
tacctgatatatataataggcactctcttccattaacttcaagttctgttggtttgttgttcaattctgaggttttaagttgctttaaggctctcactagyctgatcttagctttgtacaatgcatgctcatctgtcatcctgagcctaggctcctgatccagagtgggaacatggagacttctcagcgttcattccttta

SEQ ID NO: 290167 - DNA, 201 bp, Homo sapiens
attaactgagttttggctctcttcctaagtaaccagagaagatagcagatgtgcacctgttcacatcttcagtacccccaggcttcttggttgttgatgcrtgcaccaggcttgatttgtcaattctccaagtcgtcacaaagttattcgctgagccactgcgaataactcttttaatagggagattattttcagtcctag

SEQ ID NO: 290168 - DNA, 201 bp, Homo sapiens
ccagattcagagcctaccaggaagtgggaggcagtggtgccatgcagcaggtccaaagataatctgagagtttagagatggaaaaggaagacacctcatargccatgtaggggacacctgtcacccatgacagctgatgtgaccaagggaaatgacttctgtgctatcagtccttcctattagatgaagagatggagagga

SEQ ID NO: 290169 - DNA, 201 bp, Homo sapiens
tgtcctccctcacagcacatgtaatattgacctcaaattcctaacttggaaaaactggggccatcactaaaagtgatgtagaatttgagctttacacttargaataaatatggagcttcatttttctgtgttgaaattagagctccttaagtcaagtaagagaataggattgggtttcagacttcagagggtgatctcagg

SEQ ID NO: 290170 - DNA, 201 bp, Homo sapiens
tttcggggccagagaatggagaagtagggtagccctgtcacagcaaacatggaagcaagaatgaaactgcttagctccagcatctgcccctggggcatctscttcctccatgaggggtttgccagactgtgctcatccccacaccccctgaaggaaatctggctgtcagcccatccctgcctgctcctcacacccagacca

SEQ ID NO: 290171 - DNA, 201 bp, Homo sapiens
tgactctcacttagtctctttagaaaactctcttttttctctctgttaggttgattagtctaacttcagttcctaggaactaaaatcctgaatttctcatrggcagtctgaatttagggcagcctaatttataacatgccttagaaggaaatcatgtgtgcattcttgcttgctcagcccaagaagtgtatcaggccctga

SEQ ID NO: 290172 - DNA, 201 bp, Homo sapiens
gacaaatgctaacaagtttagtaatgtgactgcagccttcccagctaatctgctggcaagcgagccctgtgaaaaggcagatgcaggacgagccctttctrtgaaaatcaggctgacctcatttgatagttatgcagcctgtgtcgatctcttcccagggcagcaggtagcaggccagaatcagaaccccaagtcaggagc

SEQ ID NO: 290173 - DNA, 201 bp, Homo sapiens
gttagttcctatattaacatgccccagcagatctctcagagatacaggtaatgaaaagagcaagtcacgacccgggcattccaccttacaatcctcatacrttacagatggtttatcttttatagactgcacttgatagactctgtaacagtagagctgcagacacagttgcatgccagcttctgtcagctgtggtggctg

SEQ ID NO: 290174 - DNA, 201 bp, Homo sapiens
catttctgttttttaacttctttatatatgcatgtttcctgttccaaaaatcacattttaatgaggttgaaatggtagctggtatgcctttctgaaaaacatgaagttatattagtaaattcattggaagctgtctatgactaatagttctacagactctgttgttcaccacaaaggtatatacggtatatatacctttat

SEQ ID NO: 290175 - DNA, 201 bp, Homo sapiens
aagttttgatatatgtatacatcataaaatcacctctgataataagtatattcattatctccaaaaatgtcatcatgcccctttggtaatttcttcctctsgccatcccatgcagctgatttgctttctgtagtttgcattttctagattttcatatttaagaaatcatagtttgcatttgatatctagtttcatatacct

SEQ ID NO: 290176 - DNA, 201 bp, Homo sapiens
  misc_feature (1)...(201): n = A,T,C or G
caggagccaaagaattgatactaatgcaaaatctttaatcacaaagttcccttgtagtgtcttgacaccacagatacattttctgttgagttgtcttaganaactaatttgaggtatgatttcattccacttacttgtatgtaatcaaattcttcttttacacgatgactcttaggtgaccaatttatgacgtttggttgt

SEQ ID NO: 290177 - DNA, 201 bp, Homo sapiens
ctcctacagaaaaaatcttttaagacttatcagttactgtgacctaccatatcatggttgaattcctccatgttaagaccctactgtctagaagtatggtrttagcagatgtactcattgattggtactgtctgtagtttcattttgaagcataaacctgagtaacattcagtaagactctgtatgttcagaaaagatgtc

SEQ ID NO: 290178 - DNA, 201 bp, Homo sapiens
ttgagcagaaagtagaatccctaagggaatgagtcctaattgcaaaggtgaggaaggtgctgcaacttgtatgtctgatcaagaatattttgacttagtcrtgattctttttttcccttaggttgatgagaacatgaaggtagcacagaaaagagatgctgtcttgcagggaatgttttatttcaggaaagatatttgcaa

SEQ ID NO: 290179 - DNA, 201 bp, Homo sapiens
tcctttgttcccccaccgcccccccaccccactaacatattaatgtcttttggagtggggagtaaacaaactgaggtggaaaactcatcttagaagaaaarcataacccgctgctcattttttattattttaaatttgcttcagttatgtctctgggtggagtatagaatttttgagaagaataacattcctgccctgaag

SEQ ID NO: 290180 - DNA, 201 bp, Homo sapiens
ttttgttttccacaagttcctttgttcccccaccgcccccccaccccactaacatattaatgtcttttggagtggggagtaaacaaactgaggtggaaaastcatcttagaagaaaagcataacccgctgctcattttttattattttaaatttgcttcagttatgtctctgggtggagtatagaatttttgagaagaata

SEQ ID NO: 290181 - DNA, 201 bp, Homo sapiens
tcagcttatgctgcaacaagctgctaaagctcccctgaccctcttctccggcaggtggcaatgcagtggtggatggttgtggcaaggcccagaacagcacrgagctcgctgcagaggagtacaccctcatgagcatagacaccatcatcaatgggaaggtaggagggtggccctgtacagtacgcctcactgtgcacatcc

SEQ ID NO: 290182 - DNA, 201 bp, Homo sapiens
tagtaggcctgctgcttttagaaatcaggtcttcaggatgtccacttctgccctacctcatgcaggtgtcttttccttaaacctctccaacttctcatctyccctcccctccaaaacacacacacttcatagctataaattgaaaccagtaaattacggctcagtttcctacatgggggaggaaccttccctttcctgttt

SEQ ID NO: 290183 - DNA, 201 bp, Homo sapiens
tgaagagaaatttataggatctgcagaagatttgggaaagttaagaaatggtaagatcaagtctctaagtgcctctgatgagggtatctagtagagaaggkaccgctgaagattgatttttttttttttttgacggagtctcgctgtgttgcccaggctggagtgcagtggcatgatctcggcttactgcaagctccgcct

SEQ ID NO: 290184 - DNA, 201 bp, Homo sapiens
caaaagaaaaacaaaaggggaaagttagaaattagtgagatttgttgtctacagggggatgagtgagaaatgggtgggaaaaagagggactaggaatggggaattagggacagagagagacagtgtctccaaagacactttttcatataactctggctcttagaatcatggtaaagttttgcataccagaaaactaagtaa

SEQ ID NO: 290185 - DNA, 201 bp, Homo sapiens
tttttatatatatgagaaatttatacaataaaatgctaagtacatggaaactaaatgtcattaaacataaactataaaccacaatgaggtcagggagggartggattgtgacaaactgcctgttaaatactgagtatattcagccagtggttattttgttgtgcacctattaagtgccaggttctgtcctgaggattggca

SEQ ID NO: 290186 - DNA, 201 bp, Homo sapiens
cacttatccaattaaaaaaaaatattttttgtgtagtcacgatgtttctactatgtgggagagtttggttgctttgataattctttttaaacagcagattsgtgggtttcataattaggattggttattttattgccataatcctagcttggcttttttcatgctttttgtttgttttgagacagtctcattctgtcaccc

SEQ ID NO: 290187 - DNA, 201 bp, Homo sapiens
aaaatcaaaatactatttcgtttttgaggttagcaggcaataatttctttttcattttataacctcagtcatttcaaccatcatttttcttcctgaaatastgggattcatagaaatttcatgttccttttttttccttctttctaaagatgggagtttgatgttccagcaagtaccaatggttgagattgatgggatgaa

SEQ ID NO: 290188 - DNA, 201 bp, Homo sapiens
aggtttccaaacactgatgaaccatgaactcaggaggatggggaataatgattccaggtgctcaagccttcagaggctggactccagccaacagcttaggrcaggcatagaatgtttgagagtctgtagatgaaggcctggggagggaagactgcaaagaagctgaatctcaggtcccagtaattccaagaatgatgccca

SEQ ID NO: 290189 - DNA, 201 bp, Homo sapiens
attttggggcactgagtttagaggccagtagaaaaatagtggctgggcattcctggggcactgaccttcactttcagtgagacttcctgaacaccaattcrgctctctgactctcaaggcattttatgaaaattgacttagaggaacagtgataccacttatccccaagttataattttccagcaaaatttcaatttacta

SEQ ID NO: 290190 - DNA, 201 bp, Homo sapiens
tttgctaaattgactgtacctctttcaatgggaaggagctatggaaaggaccatgtagcttataaacgcattaggaccttaaattaagttgttgaaccacragcatgacagtctttaacaaactaagcagtgatcttgtaaatcttctcatactgcctcataccctctcatctaggtcactagaaaaatacttttaaatgt

SEQ ID NO: 290191 - DNA, 201 bp, Homo sapiens
actcattcattcatccattcatgcattcattcattcattttagagaaaccaagagactgttaccatggcagggaagcccaagcttcactacttcaatggayggggcagaatggagcccatccggtggctcttggctgcagctggagtggaggtatgttctaagttaggtcatcttaagttggacctaattgactgtatcaa

SEQ ID NO: 290192 - DNA, 201 bp, Homo sapiens
tgagtgggtgagaccatgacagggcatcatgaccaggagcaggctgggccttgggcgtgtatactgaggtccagtattgcagagtcccatggggatgaggraacagtgaacgtgaggagggttcaggtgagtgtgattctagaagaggatgcattccatggatccagcaccctgacagaggtttccaaacactgatgaacc

SEQ ID NO: 290193 - DNA, 201 bp, Homo sapiens
agatagtgtgatgcctccagctttgttcttttggcttaggattgacttgatgatgcgggctcttttttgttccatatgaactttaaagaagttttttccamttctgtgaagaaagtcattggtagctaaaaatggtaacgtctgcaggctgtaaatagtcaataatgaggcataacaggaagaaactagtctgaatgtcag

SEQ ID NO: 290194 - DNA, 201 bp, Homo sapiens
tgttcttccatccacagagaacacagagtgatttaggtccttccttgagtgggtgagaccatgacagggcatcatgaccaggagcaggctgggccttgggygtgtatactgaggtccagtattgcagagtcccatggggatgaggaaacagtgaacgtgaggagggttcaggtgagtgtgattctagaagaggatgcattc

SEQ ID NO: 290195 - DNA, 201 bp, Homo sapiens
atagtcccagctactcaggtggctgaggtgggagggtcacttgggcctggtagatcaaggctgcaatgagccatgatcataccactgtacttaagcctggrcgacaaagtgagactctgtctcaaaaaaataaataaataaataaaataaaaaagaagattgagcagttctgacccattgtcagacccatgagcatgagca

SEQ ID NO: 290196 - DNA, 201 bp, Homo sapiens
tcaaggcattttatgaaaattgacttagaggaacagtgataccacttatccccaagttataattttccagcaaaatttcaatttactagaccccagtataraattctctattcaacaattttatgttcataagtagaacatgggctgtggaaggctctgaaccacactagaggttgctgttgagtctgtggaacacaggct

SEQ ID NO: 290197 - DNA, 201 bp, Homo sapiens
ggtttcctaaaatatgtcctggttgtaactgtgtatagaatttcaccaaggaaggggatcttttaggtggggtctcaagtaaggcacacatggctagagtygggcaatagcacatggatagggctgtagaattatgtttcatgggagtaattggaaaaactgctaatattgggcatagaagtgggcctgggagatgtaaat

SEQ ID NO: 290198 - DNA, 201 bp, Homo sapiens
atgttccttttttttccttctttctaaagatgggagtttgatgttccagcaagtaccaatggttgagattgatgggatgaagttggtacagaccagagccmttctcaactacattgccagcaaatacaacctctacgggaaagacataaaggagagagccctgtacggtatattttgtgttcttccatccacagagaacac

SEQ ID NO: 290199 - DNA, 201 bp, Homo sapiens
gtaacgtctgcaggctgtaaatagtcaataatgaggcataacaggaagaaactagtctgaatgtcagaagacctaggttctaatccagactttgacactarctagctagttggcaaattgcacatactttctttggggttcaacatattcattacaaacctggaggaagggctagctagatcccttctagctcaataattt

SEQ ID NO: 290200 - DNA, 201 bp, Homo sapiens
ggggaacgacacagcagcagggggaaagacacagcagcaggggccacgtgcgtcagggataagaaacccttcccctcctttgtccaagtgtgcgctcaccrttgttccatctgtgagagcgcacccttctatatagaagtaccttgccttgctgagaattaaaaagaaaattttatattcaagtactattctttttgcgtc

SEQ ID NO: 290201 - DNA, 201 bp, Homo sapiens
tcccattttgtaggttgcctgttcactctgatggtagtttcttttgctgtgcagaagctctttagtttaattagatcccatttgtcaattttggcttttgwtgccattgcttttggtgttttagacatgaagtccttgcccatgcctatgtcctgagtggtattgcctaggttttcttctagggtttttatggttttaggt

SEQ ID NO: 290202 - DNA, 201 bp, Homo sapiens
ggccacgtgcgtcagggataagaaacccttcccctcctttgtccaagtgtgcgctcaccgttgttccatctgtgagagcgcacccttctatatagaagtaycttgccttgctgagaattaaaaagaaaattttatattcaagtactattctttttgcgtcactgaaactttatatataacaacccaggtttacttcagatc

SEQ ID NO: 290203 - DNA, 201 bp, Homo sapiens
ctatggaacatatggagaaatgaagactctgaaatagtctactcctggaggaagagtgctgtcatgaaggtggagtcactgcccaagggagattggagagkgagagagcagattgtagagccacatcctgaatgtcaaggctacacgctgtagggcctggggcagacagaacatgcagtagcaggtgctaaacccctggcc

SEQ ID NO: 290204 - DNA, 201 bp, Homo sapiens
agagtcactaatctacaggattgatatgtaaggagaaagatagggatgactgaattgattaaaactttaagacatctttgcggaaaataaagtgagctacrtgttcttcctcttatcttcatttatcactgggtgtctgtttctgcctccatgctggtgctgatggaggggactcacttggtctctggcaggaggggtcaa

SEQ ID NO: 290205 - DNA, 201 bp, Homo sapiens
aaaggccagacctctcagagtatctgctagaggaaccatccccagtgccctgagaatgccctttccttgttttcatgcttggggcaccgtgaatgagctgwggtcatcagctcaggatcccacacagccttccccatccaaggacacacaagaacatgaataagacgaaaagaatagaaatagatgtggccattaccttga

SEQ ID NO: 290206 - DNA, 201 bp, Homo sapiens
gcttgtttttgtcaggtttgtcaaagatcagatagttgtagatatgcggcgttatttctaagggctctgttctgttccattgatctatatctctgttttgktaccagtaccatgctgttttggttactgtagccttgtagtatagtttgaagtgagatagtgtgatgcctccagctttgttcttttggcttaggattgact

SEQ ID NO: 290207 - DNA, 201 bp, Homo sapiens
ggtgggggacataaaaatggtaacttcttttttttttaatttatttatttattattattatactttaagttgtagggtacatgtgcacaatgtgcaggttmgttacatatgcatacatgtgccatgctggtgtgctgcacccaccaactcatcatccagcactaggtatatctcccaatgctatccctcccccctcccccc

SEQ ID NO: 290208 - DNA, 201 bp, Homo sapiens
aggttgttttctgtgtacaaatgaataccctgtttcattgtcacccagacatcagctctgcagctcagtgcctttcctccagtgacgttccctccctaatsatggacatttgtgagatcgtggggaggtgaagtaaaagacggagcaggccaggagcagtgggtcacacctttaatcccagcactttgggaggccgatagg

SEQ ID NO: 290209 - DNA, 201 bp, Homo sapiens
ccatttcacagccctcagagagacagccccacatgtcccatcttgggatctagtatctgggcccttggactggccatgttctgaccccagcctttttcagrccttcagtacccccaggtctccaaaatgagcttccagaccccaattttgaggcatgaaaagactcttgttctggaaaggaaatttgtggtcatgctaccc

SEQ ID NO: 290210 - DNA, 201 bp, Homo sapiens
atgagccaccatgcccagccctagtttgttttttaattactctatgctactgtagtctaaaacagtgagcgctataggcaaatggcaaaaaaaaaaaaaaagattgctcttgagatatctagccatgttatatcctataaagcacggactgaactttgagcaatgcactacactgtgcttaaagactatgacaacttctct

SEQ ID NO: 290211 - DNA, 201 bp, Homo sapiens
atgggaagtaaatactctcatgcccagttaggagtgagtcagggtttttaatatgccactttttctttctcaggcaactcatgcagcaattccagaacccygacttcccacccgaagtagaggaacaggatgccagcaccctgcctgtgtcttgtgcctgggagagtgggatgaaacgccacagagcagcctgtgcttcgg

SEQ ID NO: 290212 - DNA, 201 bp, Homo sapiens
actttccttgcttgtaggttggttttgcggattgccactgatgattccaaagcagtctgtcgtctcagtgtgaaattcggtgccacgctcagaaccagcargctccttttggaacgggcgaaagagctaaatatcgatgttgttggtgtcaggtgagattttggtgggatagctagaggtcaagacattgaacagtttgag

SEQ ID NO: 290213 - DNA, 201 bp, Homo sapiens
ccggcgtaatcaacccagcgttggacaaatactttccgtcagactctggagtgagaatcatagctgagcccggcagatactatgttgcatcagctttcacrcttgcagttaatatcattgccaagaaaattgtattaaaggaacagacgggctctgatggtatgtataaaggacgaatcacttcatgtataactgaaagct

SEQ ID NO: 290214 - DNA, 201 bp, Homo sapiens
tttatttctcagattgtcactgctgttccaagggcacacgcagagggatttggaattcctggagagttgcctttgtgagaagctggaaatatttctttcarttccatctcttagttttccatgtaagtattcagtttacatttatgttgcaggttaatcttaagaattgtattgctaaggcttctaagtgaatttctccac

SEQ ID NO: 290215 - DNA, 201 bp, Homo sapiens
cgcgccggcctctttcccaacccttcggcggccgcgcgctggccggggagccgttggggaggccctggcggccgcgcagcaggtgcaggggcgcagagccygggctcgccttggtacagacgagcgggccccggccttggcgccttcagtttccttccagtttttattttcgctgtgtctacagagcagatgacaccaatt

SEQ ID NO: 290216 - DNA, 201 bp, Homo sapiens
ctccccggccgcggaggaagggagggagcgagggcgggagccggggcgggctgcgggccccgggccccgggcacgtgtgcggcgcgcctcgccggcctgcrgagacacgtggtcgccgagcgggccacgaccttgaggcgccgcttcctcccggcccggggttctcccgcggctggataagggtgatccgggcgcctcgtt

SEQ ID NO: 290217 - DNA, 201 bp, Homo sapiens
tgcgcttccccatggggctggcctgcggcgcctgggcgctctgaggtgagggactccccggccgcggaggaagggagggagcgagggcgggagccggggckggctgcgggccccgggccccgggcacgtgtgcggcgcgcctcgccggcctgcagagacacgtggtcgccgagcgggccacgaccttgaggcgccgcttcc

SEQ ID NO: 290218 - DNA, 201 bp, Homo sapiens
cactcagcctgggctacagagtgagaccctgtctcaaaaaaaaaaaagaaaaagcatgttgctgtgggcttcctagagaatatgctgactgtagcacatcrtcaccccaaatgtgctttgctagacctatgcttcctctccttaaaatacttgaaatgtttagtcacttaggaagttaagccattatattggtgcttgaat

SEQ ID NO: 290219 - DNA, 201 bp, Homo sapiens
gctgactttgtttaaacataaaattgggcagactttaattgatttgtgaaatttttttcaaagtttgtttgaattagcccctatctcttctaacattatcstcttgtgctaattgattgaccattttaaataacttagctgttacagaaagaccgaaaggtgttcttcagtaaaatatattcaagtaagttacttaagtaa

SEQ ID NO: 290220 - DNA, 201 bp, Homo sapiens
gtgttcttcagtaaaatatattcaagtaagttacttaagtaacgccttaaaagatacagaaaagcaaaaaagtattggcgtattaaaaagaaatcaaaackttccaagtttaggcctgaacattgccttaaaaatatttaataaggcctcaaatgacccagtccgagactgcatgagcctatttattattaaattgtaaat

SEQ ID NO: 290221 - DNA, 201 bp, Homo sapiens
gggctgaagtgtcttggtgtgatattttgagtgatttctttgtgctgtctgacattacacttgataccatttggttttctaaagtgtgaatcagctttccyagaagtcttggataattggttacattggaaatcatggctcacacctgtaatccagcacttggggaggccaaggtggtaggatcacttgagcccaggagtt

SEQ ID NO: 290222 - DNA, 201 bp, Homo sapiens
ttatatagagacctaaaccagatgagaagtattattcatccagcatatggggaccaacatgtgatggcctcgatcggattgttgagcgctgtgacctgccygaaatgcatgtgggtgattggatgctctttgaaaacatgggcgcttacactgttgctgctgcctctacgttcaatggcttccagaggccgacgatctact

SEQ ID NO: 290223 - DNA, 201 bp, Homo sapiens
acacctgtaatccagcacttggggaggccaaggtggtaggatcacttgagcccaggagtttgagaccagcctgggcaacacagtgagaccccatctctacaaaaaaaattttaaaattagcctggtgtggtggcgggcacctgtaatcccagctacttggaaggctgaggtgggaggatcacttgagcccaggaggttgag

SEQ ID NO: 290224 - DNA, 201 bp, Homo sapiens
tacgaggattgtaaaataggtttcccgcgtgaagacataaactcagagatgaactcaagtcacgcagatagtgaggcagcattcaagccaggtcagaggaycccagcattcattcggtgtttccctaccctgggaacatgctgttaagcagctggagggtggcttgggcagtggactggctcagggggacatggtagagtt

SEQ ID NO: 290225 - DNA, 201 bp, Homo sapiens; identical to SEQ ID NO: 59943

SEQ ID NO: 290226 - DNA, 201 bp, Homo sapiens
ctgttggtcagtaaaaatcattctaagacttagtggaagtaggaaatgtttgtatggctgtgtataaaggctataatgtaatcccagcactttggaagacygaggcgggtggatcacctggggtcaggagtttgagacccacctggacaacgtggtgaaatcctgtctctaccacaaaaattagccgggcatggtggcagg

SEQ ID NO: 290227 - DNA, 201 bp, Homo sapiens
ttttatttctcagattgtcactgctgttccaagggcacacgcagagggatttggaattcctggagagttgcctttgtgagaagctggaaatatttctttcrattccatctcttagttttccatgtaagtattcagtttacatttatgttgcaggttaatcttaagaattgtattgctaaggcttctaagtgaatttctcca

SEQ ID NO: 290228 - DNA, 201 bp, Homo sapiens
catttatgttgcaggttaatcttaagaattgtattgctaaggcttctaagtgaatttctccactctatttgcattttgttgcatttcagaggaacatcaaraaatcatgaacaactttggtaatgaagagtttgactgccacttcctcgatgaaggttttactgccaaggacattctggaccagaaaattaatgaagtttc

SEQ ID NO: 290229 - DNA, 201 bp, Homo sapiens
gatttggaattcctggagagttgcctttgtgagaagctggaaatatttctttcaattccatctcttagttttccatgtaagtattcagtttacatttatgytgcaggttaatcttaagaattgtattgctaaggcttctaagtgaatttctccactctatttgcattttgttgcatttcagaggaacatcaagaaatcatg

SEQ ID NO: 290230 - DNA, 201 bp, Homo sapiens
attccctattttatttctcagattgtcactgctgttccaagggcacacgcagagggatttggaattcctggagagttgcctttgtgagaagctggaaatakttctttcaattccatctcttagttttccatgtaagtattcagtttacatttatgttgcaggttaatcttaagaattgtattgctaaggcttctaagtgaa

SEQ ID NO: 290231 - DNA, 201 bp, Homo sapiens
catccttctctcaccaagggcaacgtgttcccggcccctgctctctgccaatcctattccctgccagggtggcagaggcagccccgagcacccatggctcyggaataccacagacggtggcacctggccctgcattcctgctgtggcttcagcttcggctggagctggacagacgaagctggacccaggccccacacctca

SEQ ID NO: 290232 - DNA, 201 bp, Homo sapiens
caaagtgagttattcccccatctgagggcaagatcgggagcataagatatgtggattcttatcaaacaaacttaaatttctgattattatatttctatackttagtagaaagtagttgaaacccccattgagtcatgaagcctgggactcaaactacagaatatatcagcgacagtatttagaacaggattgtttttattt

SEQ ID NO: 290233 - DNA, 201 bp, Homo sapiens
tagtagaaagtagttgaaacccccattgagtcatgaagcctgggactcaaactacagaatatatcagcgacagtatttagaacaggattgtttttattttrattgtggctataagtgaacatctatcatgagacatttgctgcactttccttgcttgtaggttggttttgcggattgccactgatgattccaaagcagtct

SEQ ID NO: 290234 - DNA, 201 bp, Homo sapiens
aatttcccacaatgaaggctgctctttcttttctgtttcactctcttagatcaccggcgtaatcaacccagcgttggacaaatactttccgtcagactctrgagtgagaatcatagctgagcccggcagatactatgttgcatcagctttcacgcttgcagttaatatcattgccaagaaaattgtattaaaggaacagac

SEQ ID NO: 290235 - DNA, 201 bp, Homo sapiens
tgatgcctggtctcatgatgtcatgtcacaaggccctgtgatgttactcccccatgtgaatttcccacaatgaaggctgctctttcttttctgtttcactmtcttagatcaccggcgtaatcaacccagcgttggacaaatactttccgtcagactctggagtgagaatcatagctgagcccggcagatactatgttgcat

SEQ ID NO: 290236 - DNA, 201 bp, Homo sapiens
ttagatgaacggacatacacaggggagacagccctaaggtttgcagaaaaggctgattgtgctgtttgcgaagtcgaaataattggtgaaagtgtagaagrcagaacctctcaggaatgtctggggaggacaaagaatgtgttggctgactttgtttaaacataaaattgggcagactttaattgatttgtgaaatttttt

SEQ ID NO: 290237 - DNA, 201 bp, Homo sapiens
atttttttcaaagtttgtttgaattagcccctatctcttctaacattatcctcttgtgctaattgattgaccattttaaataacttagctgttacagaaaraccgaaaggtgttcttcagtaaaatatattcaagtaagttacttaagtaacgccttaaaagatacagaaaagcaaaaaagtattggcgtattaaaaagaa

SEQ ID NO: 290238 - DNA, 201 bp, Homo sapiens
tgtgctttgctagacctatgcttcctctccttaaaatacttgaaatgtttagtcacttaggaagttaagccattatattggtgcttgaatttataaaatayatccacatggtttgttaaaatcatgacgtaggcagaataggatttttatcctgttggcatgtatttgttaaaatgttttgacatcttgatgccttcctag

SEQ ID NO: 290239 - DNA, 201 bp, Homo sapiens
ttgggcagactttaattgatttgtgaaatttttttcaaagtttgtttgaattagcccctatctcttctaacattatcctcttgtgctaattgattgaccaytttaaataacttagctgttacagaaagaccgaaaggtgttcttcagtaaaatatattcaagtaagttacttaagtaacgccttaaaagatacagaaaagc

SEQ ID NO: 290240 - DNA, 201 bp, Homo sapiens
tatagacaaacatggcattttgttatgtataggctgggaacaattagaaatcaggctgcagaaatgtgagggttgggaacaaatagaaatcagtctgcctrattgtagttctctgcaggtcactagtttcccggtagttcagctgcacatgaatagaacagcaatgagagccagtcagaaggactttgaaaattcaatgaa

SEQ ID NO: 290241 - DNA, 201 bp, Homo sapiens
ggcaggtggatcacctgaggtaagaagtttgaaaccaacctggccaacagggcgaaaccccgtctctacgaaaaatacaaaaattagccaggcatggcagygcatgcctgtaatcgtagctgctgtggaggctgaggcaggagaatcgcttgaacccaaggggtggaggttgcagtgagccgagatcgcgccacttcactg

SEQ ID NO: 290242 - DNA, 201 bp, Homo sapiens
aggaaaaggcttagcaaatattgctgcaagatctcaaagtggggcagtgggaattgagcttgttttcattgcctattaggattttgttaaaaacttatatrtgtatgtttttactctcattaggctatcacataccctgaattgaacttgggaagggggcagaactgactctacaagtcttagagcatttggctattagag

SEQ ID NO: 290243 - DNA, 201 bp, Homo sapiens
gtgtgcatattaaccacataatcttaatttttaaataaatattattaagtattgtgaagttataagcaaatcgtgatttttaaaaataacacatgaagccwggcatggtggctcacgcctgtgatcctagcactttgggaggccgaggcaggtggatcacctgaggtaagaagtttgaaaccaacctggccaacagggcga

SEQ ID NO: 290244 - DNA, 201 bp, Homo sapiens
tttgatatatttagatacacaaatgccatttgttataactgcctagagtattaagtatagtaacatgctgtccaagttggtagcctggaagcagtagggawtaccacatagctaggtgtgcagtaggctgtggcatccaagtatatgtaagtatactccatgatattggcacaatgacaaaattgcctaattatgcatttc

SEQ ID NO: 290245 - DNA, 201 bp, Homo sapiens
ttgaacccaaggggtggaggttgcagtgagccgagatcgcgccacttcactgcagcctgggcaaaagagcgaaaccctttgtctcaaaaaaaaaaaaaaaatcacacatgaaaagatggttttcttttctctcctgcccctgcaggcaacatttcatacaccatttagtcacctaggccaaagtccggaaggatgctcctc

SEQ ID NO: 290246 - DNA, 201 bp, Homo sapiens
tgtttgatatatttagatacacaaatgccatttgttataactgcctagagtattaagtatagtaacatgctgtccaagttggtagcctggaagcagtaggsattaccacatagctaggtgtgcagtaggctgtggcatccaagtatatgtaagtatactccatgatattggcacaatgacaaaattgcctaattatgcatt

SEQ ID NO: 290247 - DNA, 201 bp, Homo sapiens
tcactacgttggccaggctggtctcgaactgctgacctcaggtgatttgcccacctctgcctcccaaagtgttgggattacaggcatgagccaccacaccyggcctaccttttctatgtttgatatatttagatacacaaatgccatttgttataactgcctagagtattaagtatagtaacatgctgtccaagttggtag

SEQ ID NO: 290248 - DNA, 201 bp, Homo sapiens
tggttagggacatgtaaattaaaaccacagtgagaccccactacatacatactagcatggttaaaatgaaaaagacttaatagctaggtttagtgaggatrtggagcaattggaactttcatacattgctggtgggaatgtcaaatggtacaaccactctagaaaacagtctagcagcttctgagctaaatatacatttac

SEQ ID NO: 290249 - DNA, 201 bp, Homo sapiens
gaaaattcaatgaatcaagtgaaactcttgaaaaaggatccaggaaacgaagtgaagctaaaactctacgcgctatataagcaggtaaatgcctacggtcsaacgttatttaaagaattttgggcaaatgacttcttaaataaatacactgtgtgtttactaaaatgtggccttaacattttggtttgtcttgctccctct

SEQ ID NO: 290250 - DNA, 201 bp, Homo sapiens
aaaactaaaaatgactatatactaaataaccaatattgaattaattccagtagttaaagccaaccaaaaaaaccactggggcaaaatcaagacaaatgacrgattgaggaaacaatttttcaactcatgtaacaaaagctgatctctccacgatactttttaaagtttgtctataaagcgatagatccacaagctaaaata

SEQ ID NO: 290251 - DNA, 201 bp, Homo sapiens
actccacctgctgctctctttctgaaaatcagcattttaaatgctgcttactggcaactttgcatgtacctgtttgtgtccctttagctgttgttggcagktttctcagtttcctgcttgtattccttaggctgtgtcttctgggtacatttttttgaataagttttcttttggataaaaaaagaagatacatgacattaa

SEQ ID NO: 290252 - DNA, 201 bp, Homo sapiens
cgcttgaacccgggaggcggaggttgcagcgagttgagattgcgccactgcactcaaggctgggcaaccgagcaagactccgtctcaaaaaaaaaaaaaaagcaaagaaggattggttcccattttacaaatgagaaaactgtggtacagagagggtaagaaactttcccaacgtccctaagtagtctgacgccagagcct

SEQ ID NO: 290253 - DNA, 201 bp, Homo sapiens
gcgccacttcactgcagcctgggcaaaagagcgaaaccctttgtctcaaaaaaaaaaaaaaaatcacacatgaaaagatggttttcttttctctcctgccyctgcaggcaacatttcatacaccatttagtcacctaggccaaagtccggaaggatgctcctcttacacttttccgaagataatgagcccagccaaggtaa

SEQ ID NO: 290254 - DNA, 201 bp, Homo sapiens
acagtagtaatatatatgtcatagtggaaaataaaattttgaaagatatgaaaaagtaccaagaaaagctacaaggtaaaaatcactccttatcttgccayctagagataaccagtcctaacgtttgggttattaacttatcttgtttaaccagtccctgactgctggaaccctaggctgtttccaatttttatcattaca

SEQ ID NO: 290255 - DNA, 201 bp, Homo sapiens
tgaacgctgaaggtaggagactcggaggagtcttgtaaacacaggaggaggtcatgaaggcttttctctttattcctgccaaatctgtaattcccacttgytgtgatattgcagcatgtgctcagtcacccaacctaatctctaagactgcggctggtttacagccctgaactcactgtccagaatacaagattcaaacca

SEQ ID NO: 290256 - DNA, 201 bp, Homo sapiens
tttctctttgacctctgttacctgttcatcctgctggtctcatgagatttgactggaaaacataaaagtgagctatagttgtaaacaaaattatcttgcaytgaggcagaggaatttagcaaattctcatccagccagaggaatgggagatttccatgaacgctgaaggtaggagactcggaggagtcttgtaaacacagg

SEQ ID NO: 290257 - DNA, 201 bp, Homo sapiens
tgcttcttgcttttcatttcaggcaacagagatgcttatttttggaaagaagttaacagcgggagaggcatgtgctcaaggacttgttactgaagttttcyctgatagcacttttcagaaagaagtctggaccaggctgaaggcatttgcaaagcttcccccaaatgttagtattcatcttttacttctaagaaccttgaa

SEQ ID NO: 290258 - DNA, 201 bp, Homo sapiens
aaagagcctttgcacaggctgttcctttgtgtaaactgttcttcccagccctctttttctagcccacctggcctctccttcagatctcaattcagttgtcscttccttaggaaagttctttcctgaactccctgattagaccaaccctcctggtacataccctcatttcatgacgcaccactcctctatttcaacagtagc

SEQ ID NO: 290259 - DNA, 201 bp, Homo sapiens
tgacccgaggtcgcgccactgcactccagcttgggtaacagagtgagactctgtctcaaaaaaaaaaaaaaaaaaaaaaaaaaggctctaagatcttttcyagtactgtcatactctgatttataaatatacaaaaaatgtttaaaaaaacacagatacccactccttcgcaattacccaacatcaattaagacacatatg

SEQ ID NO: 290260 - DNA, 201 bp, Homo sapiens
gctacttgggaagctgaggcaggagaatcgtttgaacctgtgaggtgcaggttgcaatgagccaagattgcgccactgcactccagcctgagtgacagagygagactctgtccaaaaacgaaagaaaataaagagagagagagatgaagcaagtaaggcagtttgataattgttgaacctggatgatgggtattgggaatt

SEQ ID NO: 290261 - DNA, 201 bp, Homo sapiens
agaaaggggcacgcctgctgagcccccttcactgactcccttccactgcaggtagattccctcccatctgctgagaaggctgtggctctatctggaatgcyagcaactgctcgtgtgttcttttgaatatttcttgtatgttcacatccattctcccctccttccacctgtgtgtatgttggaacaccagcttcgccagca

SEQ ID NO: 290262 - DNA, 201 bp, Homo sapiens
gttcattgcaccattttcgagttacataattgtgtttgtgtgttaggtttgggctttgtaacctgtattattttaatcatcttttttgccattaactctaytattcagtgtcatcgtcgtgaactccatttttagcttgtggcctgagtcctgtgcattcaagtttgccaccccacccccgctcactatgtgtgcttaaaa

SEQ ID NO: 290263 - DNA, 201 bp, Homo sapiens
tccgggcgggtgagccgccccagctgagcacccgggcctgcacttcccagccgggctgcttctggggtgcaaagcgtcgcttgctaaaagcgaggtaaacrcaagccgttatcactcgtgtggacttaacactctgcttcttggagaacacgtatgctataaagtgaaatggccgggtacagagtaacggctaagaagcac

SEQ ID NO: 290264 - DNA, 201 bp, Homo sapiens
ccaatgccacaatatagtaaatacagtaaatatccaggatccatatgacataatattggatccaaccatacaatagaatatctaaggccctgagaagaagytgtcatatggatccaggatccatatgacataatatttacaaaatgatgtgacataaaaagaaacatggaaatgtgaacacttggacagaaggagcagagt

SEQ ID NO: 290265 - DNA, 201 bp, Homo sapiens
ttattgtgcatccatacaaaggaatactactcagaaatagcgaggaacaaactactaatacatacaacagcatggtgactctcagaagtcagactcaaaakgctacagaatgtaggattccacttatacagcattctataaaagtcaaaactgtagggacagaaaacagattagcagttgcttgggggtgggagggaggga

SEQ ID NO: 290266 - DNA, 201 bp, Homo sapiens
catggtgcctggggtcctactttgaaaagcactcacagcattacaggctgaagtcatgtctttgaatgccactatagcactttgacgtccacaaacagtgrctgactgaattgggccaaatgctgacagcctacagatcactgacttgaggtcttcagtgggttgcatgttctttttcagccatgtagcaagggagcaaaa

SEQ ID NO: 290267 - DNA, 201 bp, Homo sapiens
taagcctctgattgcagtggtcaatggtccagctgtgggcatctccgtcaccctccttgggctattcgatgccgtgtatgcatctgacagggtaagtcagytcctagaaagcaagaggtcaggcaagcagcgcgagatgagagcctttgaatcctccttcagcgttgccagtcataagcaggttacatgttgtttgtggta

SEQ ID NO: 290268 - DNA, 201 bp, Homo sapiens
tctgcccgcctcggcctccccaagtgctgggattacaggcatgagtccacgtccagcctaggtcaactcttaaccttattgttggttttgtttttccaggycttgagaatttcaaaagaggtaatcaggaaaagagagagagaaaaactacacgctgttaatgctgaagaatgcaatgtccttcagggaagatggctatca

SEQ ID NO: 290269 - DNA, 201 bp, Homo sapiens
gggaagtggcaggacaaggaggcactgctggtggtggctgtggaaacacccagcctgacagaaggctttatctcagagtcagactgtcttgcccatgcttyagtcatgctgctttggcacatttaatgattttgtgtttccatttctgtagggaatttgtgggctgttttatagattttcctaagcctctgattgcagtgg

SEQ ID NO: 290270 - DNA, 201 bp, Homo sapiens
ggctcttagaataaagaaaaaacttcctcatgggatctacaaagcactgtcaggtctattctgccagtcctcatcctgcaccgacttccccctggctttcyctgagtcagctacagtggctcttacttcatctacagtggggataacctctccaaagagcctttgcacaggctgttcctttgtgtaaactgttcttcccag

SEQ ID NO: 290271 - DNA, 201 bp, Homo sapiens
gctggtggatcacttgagatcaggagttcaagaccagccgggccaacatagtgaaatgctgtctctactaaaaatacaaaaattagccggggcatggtggygggcacctgtaatcccagctactcaagaggctgaggcaggagaatcatttgaacccaggaggtggaggttacagtgagccaagatcgtgcctctgcactc

SEQ ID NO: 290272 - DNA, 201 bp, Homo sapiens
atgcatctttaaaacacagttcagcaaaataaagacaggagtgtacatactgtatgagtccatttgtagaaagttctacagtagacaaaagttcttctctrtggaaattgaagtcagaaagtgattgccttggagcaggtggggtgggatagctaggaaggagcctacgggaaacttttggggtgatggagatgttctgta

SEQ ID NO: 290273 - DNA, 201 bp, Homo sapiens
tagctaggtttagtgaggatgtggagcaattggaactttcatacattgctggtgggaatgtcaaatggtacaaccactctagaaaacagtctagcagcttytgagctaaatatacatttaccacacagaccagccataccacttaggtatttacctatgataatttaaaagagattcacccagtgacctgtacacaagtgt

SEQ ID NO: 290274 - DNA, 201 bp, Homo sapiens
taaatattcttttacatattatgaattttaaattaacattctttcataatttattcattaagaaacacaaaaatatgtcttaaatgtaaaaaaaaaaaaamctaaaaatgactatatactaaataaccaatattgaattaattccagtagttaaagccaaccaaaaaaaccactggggcaaaatcaagacaaatgacagat

SEQ ID NO: 290275 - DNA, 201 bp, Homo sapiens
ggaaatgaaatctaaatattcttttacatattatgaattttaaattaacattctttcataatttattcattaagaaacacaaaaatatgtcttaaatgtaaaaaaaaaaaaaactaaaaatgactatatactaaataaccaatattgaattaattccagtagttaaagccaaccaaaaaaaccactggggcaaaatcaaga

SEQ ID NO: 290276 - DNA, 201 bp, Homo sapiens
ctaaaaatataaaaattagccgggcatggtggcacacacctgtaatcccagctactcaggaggctgaggcaggagaatcacttgaacctggaaggcaaagkttgcagtgacccgaggtcgcgccactgcactccagcttgggtaacagagtgagactctgtctcaaaaaaaaaaaaaaaaaaaaaaaaaaggctctaagat

SEQ ID NO: 290277 - DNA, 201 bp, Homo sapiens
ggtaggttctgatatacccagaaggcactgtgattttcctaataatggaagcagaaataaatgaatataaatgaaacatgttgctatgagagaatttgcayagaagccatctaaggttggtgtagactgctcccagaagtatcttcatgtcacttagacatgaaagtaagtctttctgcttgcacgggggcttcatttttt

SEQ ID NO: 290278 - DNA, 201 bp, Homo sapiens
agtttcaatgccaaagacttccctggcatgtctgcctctctgggctcctgtgttatctatttttctgtcctatgatgggtatgagcttctctttcatatgsgtgtgtatagtaaaaaatttaaccttgccccagaagaggtgtggctttgccctcagcttctgggaagtgaatctctaatgactggtaggagtctttattt

SEQ ID NO: 290279 - DNA, 201 bp, Homo sapiens
gtgtatatatatatatgccagttttttatattagaccttgaaatactattaaggcacaaagtgcctcagtgtcacacgagtaaaagagacttacgagatayaatattcacatttgtagaccttacttagctcttgattagaataaatcaactgaaaaaggtatttttaagacaattggggaagttttgagtaaggacagag

SEQ ID NO: 290280 - DNA, 201 bp, Homo sapiens
ctaattgtagttctctgcaggtcactagtttcccggtagttcagctgcacatgaatagaacagcaatgagagccagtcagaaggactttgaaaattcaatraatcaagtgaaactcttgaaaaaggatccaggaaacgaagtgaagctaaaactctacgcgctatataagcaggtaaatgcctacggtcgaacgttattta

SEQ ID NO: 290281 - DNA, 201 bp, Homo sapiens; identical to SEQ ID NO: 59962

SEQ ID NO: 290282 - DNA, 201 bp, Homo sapiens
gtattgacttattatcttggaatccttacagccaattatttgcagccagtttgctgaggcaagtataaagaaaatatctatagacaaacatggcattttgktatgtataggctgggaacaattagaaatcaggctgcagaaatgtgagggttgggaacaaatagaaatcagtctgcctaattgtagttctctgcaggtcac

SEQ ID NO: 290283 - DNA, 201 bp, Homo sapiens
ttaactgaagccttgttttattaagttagtatcttaaccttgcttcttgcttttcatttcaggcaacagagatgcttatttttggaaagaagttaacagcrggagaggcatgtgctcaaggacttgttactgaagttttccctgatagcacttttcagaaagaagtctggaccaggctgaaggcatttgcaaagcttcccc

SEQ ID NO: 290284 - DNA, 201 bp, Homo sapiens
gcatgtgctcaaggacttgttactgaagttttccctgatagcacttttcagaaagaagtctggaccaggctgaaggcatttgcaaagcttcccccaaatgytagtattcatcttttacttctaagaaccttgaaaatgatttcctaagggaaaaatttatttgccttcagagaataagtcataaaaagcacaagacacatc

SEQ ID NO: 290285 - DNA, 201 bp, Homo sapiens
tattctctcccaggctggttaagtggctgctcaggtctttcactgtgtttcctagttgcccacgccctgtggcatgactcgaaggggattgtgacaagacyagaagctgagctataggaaaaggcttagcaaatattgctgcaagatctcaaagtggggcagtgggaattgagcttgttttcattgcctattaggattttg

SEQ ID NO: 290286 - DNA, 201 bp, Homo sapiens
gtattgatttaaagtttacaaataggccgggtgcagtggctcacacctgtaatttcagcactttgggaggccaaggcaggtggatcacctgacgtcaggarttcaagaccagcctggccaacatggtgaaaccctgtctttactaaaaatgcaaaaaaattagacaggcatggtggtgcatgcctgtagtgtcaactactc

SEQ ID NO: 290287 - DNA, 201 bp, Homo sapiens
agggaacaaaaccgaaacacggtggtggccttgaagtggtagaattatgagtgattttcccgactttatgtattttcttaaatggtcgtgtttttgctatktgtttttaaaactcacgctttatttaaaaataaatttgttccacattttgtggaaacttgtacatttcggctttctgtggatattttaaatttttctttc

SEQ ID NO: 290288 - DNA, 201 bp, Homo sapiens
ctgatctgcccgcctcggcctccccaagtgctgggattacaggcatgagtccacgtccagcctaggtcaactcttaaccttattgttggttttgtttttcyaggtcttgagaatttcaaaagaggtaatcaggaaaagagagagagaaaaactacacgctgttaatgctgaagaatgcaatgtccttcagggaagatggct

SEQ ID NO: 290289 - DNA, 201 bp, Homo sapiens
gctaatttttgtatttttagtagagatggggtttcaccatgttggccaggctggtcttgaactcctgacctcaactgatctgcccgcctcggcctccccamgtgctgggattacaggcatgagtccacgtccagcctaggtcaactcttaaccttattgttggttttgtttttccaggtcttgagaatttcaaaagaggta

SEQ ID NO: 290290 - DNA, 201 bp, Homo sapiens
gcagctgtgtggcattagtcacttgaaggaccagggctgtgccagcctcccttggtcccctgagtttggaggccactcggttcctttatggatgaccagtrtctcctaaggagagacatgatgacgtcttcactttcagagttacagtaagtaccaacagatgggaggttttgtgggggctcacggctgccagagccaccc

SEQ ID NO: 290291 - DNA, 201 bp, Homo sapiens
agcagcacagcacctcagccttgcagctgtgtggcattagtcacttgaaggaccagggctgtgccagcctcccttggtcccctgagtttggaggccactcrgttcctttatggatgaccagtatctcctaaggagagacatgatgacgtcttcactttcagagttacagtaagtaccaacagatgggaggttttgtggggg

SEQ ID NO: 290292 - DNA, 201 bp, Homo sapiens
gtcattgacctgcttttaacagggactgggtcaatggttcctgacctaaaattggggatctcattctttaatacttggagggcaaatattgtatttgaatyttgttctgattctcccactgaattgaaaattactttcaatatacatcatccttatttttttttttttaagagatgggagtctcactctgtcacccaagct

SEQ ID NO: 290293 - DNA, 201 bp, Homo sapiens
actcaggactgagagtttttcatggagacggcagggtgaaagagggaatgatgatgagggtaaaactaaatagtaataacagatgagaggaaaaagaaagmagattattgctgggaggtgatattgtcctatgagccaaggtttatgaataattgaggtgtctacttgaagtgttaaggctgttatcccagcatattcagg

SEQ ID NO: 290294 - DNA, 201 bp, Homo sapiens
agtcctccttatttcatcatacagaatatttagaagatgtgaaatcgatgatttaattgaatacgattaataattttaccgagtaaagtacattcttaaakgaaattgatgtgttttttcctgctactatttttcagtcgacagtttgtttcaaatgccttgattggtcctaacgtgccaacagttttggtcaccattgct

SEQ ID NO: 290295 - DNA, 201 bp, Homo sapiens
tcgtggctagttttgaccaagacaatgcagctgaggggacactgtgttgctcctgcacctggcctcaagacacctttcacggttctgcttacagtgttgawaaatcaccgtcagcatgaaaccaagcctgggacatcctgttggtggatgacacacaccatgggggagactggttcctccagctgagaccagggggcactg

SEQ ID NO: 290296 - DNA, 201 bp, Homo sapiens
aaaaaaaaaaaaaaaaaaagaccaccatttgcattcctaattctgactcaaggtacatatgtgcttatagcaattttagtgaaactatgggtagattctgsacatgttgactttagccatccgatatggaagaaatggattgtgttgtatcctagctttagaatattatgtggttaagtgcctctcatatctgcagtatat

SEQ ID NO: 290297 - DNA, 201 bp, Homo sapiens
catgtgtatgtatatgtgtatgtgcatgcatatgtatatgtaaatgtctatatgtatacacacatacacagcccattggttctgtttctctgcagaacaayggctaataagagttatctgttattatctctgatgtccagttgaggaaactgaggctcagagagattaagagactcttccaagatcaaaaaagtggaatag

SEQ ID NO: 290298 - DNA, 201 bp, Homo sapiens
catgcattttccttgggaacattacttggctctttttactttaaattcctcatctgaaaaatgaggataacaagatgtacctgtattagtctgttttcacrctgctatgaagaaatacctgagactgggtaatttataaagaaagagaggtttaatgcactcacagttccacatggctggggaggccttcaatcatggtgg

SEQ ID NO: 290299 - DNA, 201 bp, Homo sapiens
tcatatttccaatctgggctggcctcgtggctagttttgaccaagacaatgcagctgaggggacactgtgttgctcctgcacctggcctcaagacaccttycacggttctgcttacagtgttgataaatcaccgtcagcatgaaaccaagcctgggacatcctgttggtggatgacacacaccatgggggagactggttcc

SEQ ID NO: 290300 - DNA, 201 bp, Homo sapiens
tccttctcatatttccaatctgggctggcctcgtggctagttttgaccaagacaatgcagctgaggggacactgtgttgctcctgcacctggcctcaagamacctttcacggttctgcttacagtgttgataaatcaccgtcagcatgaaaccaagcctgggacatcctgttggtggatgacacacaccatgggggagact

SEQ ID NO: 290301 - DNA, 201 bp, Homo sapiens
gctgaacttgaactaatggggtgacactgaaaacaatatttttttgcatgcaaaaatgtcatgattgatagtggttctgtccttatgccccaggtagctgkcatgagacctgggattaagagtggggtggggtagaggagggaagagggcattggaaatggaacttgtttcctaagtaggcaactcacctggcttgtctct

SEQ ID NO: 290302 - DNA, 201 bp, Homo sapiens
tcaagaagttgcttctccttctcatatttccaatctgggctggcctcgtggctagttttgaccaagacaatgcagctgaggggacactgtgttgctcctgyacctggcctcaagacacctttcacggttctgcttacagtgttgataaatcaccgtcagcatgaaaccaagcctgggacatcctgttggtggatgacacac

SEQ ID NO: 290303 - DNA, 201 bp, Homo sapiens
ttctttatagcaatgtaagaacagactaatatgcatacatacctatgataaatctaatttgtatattgggcacagtaagagattaactaaaactaataatmgaacaattataacaatatactgttctaaaagttatatgaatgaggtgtctatctatccctttgtccctcaaatattttgttgtattgtaccacgggtaaa

SEQ ID NO: 290304 - DNA, 201 bp, Homo sapiens
tggaacttgtttcctaagtaggcaactcacctggcttgtctctcctgtgcccagtgccctccatgctccagctcctgggtaggagcattgccacagacagragggctatggacaagttctcctctttcttctcttcaatacctgcttcaaatatggcagaggtaagagaaatgggttaccctgacattccatgtctttcaa

SEQ ID NO: 290305 - DNA, 201 bp, Homo sapiens
aatgtcctgacagaaaggacactatcaggagggtatgctcagaatcccagtgctggcacatcccagaggcccagctattgcatctgtgcagtggggattargaacgtgctttgtagtgttaccccaaggaccaaatatgctaacacatgttagcacatgtttgttttatggttttaagttcagaaataaggtagcaccttt

SEQ ID NO: 290306 - DNA, 201 bp, Homo sapiens
tgggcatcggtgatcggcacagcgacaacatcatgatccgagcgagtgggcagctgttccacattgatttttgccactttctgggggaatttcaagaccamgtttggaatcaaccgtcagcgtgtcccattcatcctcacctatgactttgtccatgtgattgagcaggggaagactaataatatgagaaatttgaaaggt

SEQ ID NO: 290307 - DNA, 201 bp, Homo sapiens
gatttctcatgaatgggttaacactaccctttcagtactgtccttgtgacagcgaaggatttctcatgcgatctgattgtttaaaagcatatggcacattyccccactctctcttgcttctgcttttgccatgtgatgcacttgtgcaccctttgccttcttccatgattgtaagcttcctgggccttcccagaagccaag

SEQ ID NO: 290308 - DNA, 201 bp, Homo sapiens
caagaaaataacagaattctacttagtccagtgtctgtctatggatgggactctaaagacttggttattctcactttactgaacaggatgaggagtcagcaaaaaaaaaaaaaaaaaaaaaagggtatgtcaggtggagattttcttcccaacccttcagctttcctggccggcatgctttccttatggagggcctgtctc

SEQ ID NO: 290309 - DNA, 201 bp, Homo sapiens
gaaaatataacatgaaacatcagcccatgtgtaatagcagcaaaatgtataaaacatctaaagctggcatggtggcacatgcgtgtaatcctagcggcttygggggctgaggtaggagaatcgctggaacctgggaggcagaggttgcagtgagctgagatcgtgccaatgcactccagcctgggagacagagcgagactc

SEQ ID NO: 290310 - DNA, 201 bp, Homo sapiens
gaaagcagattattgctgggaggtgatattgtcctatgagccaaggtttatgaataattgaggtgtctacttgaagtgttaaggctgttatcccagcataytcaggctgctgtaacagactaccacacactgggtgctttaaacaaggagcattgatttcttacggtttgggaggctggaagttcaagatcagggtgctga

SEQ ID NO: 290311 - DNA, 201 bp, Homo sapiens
taaaaaaaaaaaaaaaaaaaagaccaccatttgcattcctaattctgactcaaggtacatatgtgcttatagcaattttagtgaaactatgggtagattctggacatgttgactttagccatccgatatggaagaaatggattgtgttgtatcctagctttagaatattatgtggttaagtgcctctcatatctgcagtat

SEQ ID NO: 290312 - DNA, 201 bp, Homo sapiens
atttatatgtatctatatatttatgtgtgcgtatatgtatatgtgtatgtataagtgtgtgtatatgtgtatatatgtatatgtgtatctatatgtatatrtgtatatgtatgtatgcatacatgcatatttatatgtgtgtatgtatatgtgtatgtgcgtgcatacattacatgtgcatgtgtatgtatatgtgcattt

SEQ ID NO: 290313 - DNA, 201 bp, Homo sapiens
tgtgagtataaagaacaatggcgaacacactagtataaggactaatctttccaggagagaaaaatgggagggaggacttcctagttcctcattctgggaargaatatataaggaattaataagtcaaatattctctcctgtctttttgactgctcccatgcagtgtttctattttactaaggtttggttctctccttttgt

SEQ ID NO: 290314 - DNA, 201 bp, Homo sapiens
ttatttcatcatacagaatatttagaagatgtgaaatcgatgatttaattgaatacgattaataattttaccgagtaaagtacattcttaaatgaaattgrtgtgttttttcctgctactatttttcagtcgacagtttgtttcaaatgccttgattggtcctaacgtgccaacagttttggtcaccattgctttgaaacc

SEQ ID NO: 290315 - DNA, 201 bp, Homo sapiens
caacatgtcaggtgaggagaaacccacacaattcgctacaaagggctcctgggggaaataagcacgtcagtaaccaagtcggatttttagaaggaaccccwgttggagctctgcagtgggaaagcataagtgtgcatttgacaaacagtaagaaggtggatctgcagagcaaagaatcctgcacaaaattcacatttaagg

SEQ ID NO: 290316 - DNA, 201 bp, Homo sapiens
aaagaaaggattccagaagccaccttcattgtttcgtagcatttagaacttcactattagctcccatcatgtaaatgtcctgacagaaaggacactatcargagggtatgctcagaatcccagtgctggcacatcccagaggcccagctattgcatctgtgcagtggggattaggaacgtgctttgtagtgttaccccaag

SEQ ID NO: 290317 - DNA, 201 bp, Homo sapiens
ctcatcagtcaagagactaaagcataatgagattgaaaggaaaattctgatgtgtcctagagaagaaaattatgttcacttagagtaaaatatctaatagrtcacaagcaacaaatatatgcatttaatgttttaacaaaaaagaggaaaattcctctcctttccagcatgtgtgtgtgagcaatggagtgcatacaatga

SEQ ID NO: 290318 - DNA, 201 bp, Homo sapiens
gtcaggatccacagtctccctctccgctttctctccattgccccacaactctcgaaacatcctctagagcaaatcaatctttatttctttgccattatcgrcccttccataaatcagtcttgcccactcagtagctggtgtggcagggcctgcagctgtccactgcctgcaaatggtgccttttcttcttagctcatcatc

SEQ ID NO: 290319 - DNA, 201 bp, Homo sapiens
agcttactgtaagatttttacttgattaacttaaaattttttttgactctttctaaacatagaaagagtattttaagtaataccctcactcactcacccaragccacttacacctgcagtccccactcaaccccagcaccctgctggctgaagtctgcgtggagcagtgcaccctcatggactccaagatgaagcccctgt

SEQ ID NO: 290320 - DNA, 201 bp, Homo sapiens
gttgggcgtgtcagcatcccagttcctggtagtatatccacacccatgagatatgatgactatttgcataataacagattgcttttcatttccttctcttygcttcagtcctgtgtgcattttcagatgaagcttttgtcaggatccacagtctccctctccgctttctctccattgccccacaactctcgaaacatcctc

SEQ ID NO: 290321 - DNA, 201 bp, Homo sapiens
ttagatgtgctgaggttcatcaggatgcagagtgggagctacttcagctcccctaccaggccattaggaaagctactcacctcacagcctcattgctgacrcagagtttaagctattcaggtgagacaggaacatcttttcatctatgtgaattttgatattccaagtagagaggaatggtgactctgtctcttgtggagg

SEQ ID NO: 290322 - DNA, 201 bp, Homo sapiens
aatttttttcttttgtcaattataaattaaccttagcttactgtaagatttttacttgattaacttaaaattttttttgactctttctaaacatagaaagrgtattttaagtaataccctcactcactcacccagagccacttacacctgcagtccccactcaaccccagcaccctgctggctgaagtctgcgtggagcag

SEQ ID NO: 290323 - DNA, 201 bp, Homo sapiens
tgtattttcttccatctctcaaacacatacagattgctcctacgtagggtgttttgcttccccttctcactgccaggagtattccttccgatatttcagcrtctggctcttcttatacaatctcagctaaaacgtcacaggcattccctggatcctcgaattaaaatagccattcgcgtctccctttacctcccattgtgc

SEQ ID NO: 290324 - DNA, 201 bp, Homo sapiens
gcccctgtggatcatgtacagcaatgaggaggcaggcagtggtggcagggtgagcgtcagccttaagagggatgatgacctctggcaggacatgctgaccrtgcagacgatccggctcatggacgtcctgtggaagcagcaggggctggacctgaggatgaccccctaaggctgcctccccactggggaccacacaggcgt

SEQ ID NO: 290325 - DNA, 201 bp, Homo sapiens
tttcttcttcccactggcagaaataaatttaatgaatggagaaaatgttctcacttctagttttcctctcatcgtatatttttaatcatggcacctgctastacttctctgtgctagcacgtgacaaatgaatgaacaagttgcaaatgaatactaatgaaaagctggaaataatgcatcatatttattttaacagttttt

SEQ ID NO: 290326 - DNA, 201 bp, Homo sapiens
aacaaccctaaatccattacctgttactatgtgacatttaaaaaaaaagtttctcaagacaaaattagcaaggagaatgtcattgttttatttactgcaartgtcttacttcatagaagacagcaaggttctcacacttgcttttgcattcaatctgttccaatatgttgcttcgattaaggtatactaagaaaatttgcc

SEQ ID NO: 290327 - DNA, 201 bp, Homo sapiens
agctgggcagctgttggagtcagggaattttgtctacaggaagcaaggatcaggtaagataactggatctgaggggaatgtctactcactaagagcaataragggctgtggcattcacactgacagttcagtgaggtgtaggggcaagatgggaggtgtcataggaaaattggagtgcagacagagtttctgatggaattc

SEQ ID NO: 290328 - DNA, 201 bp, Homo sapiens
gtattaattttatttaaaaataacaaccctaaatccattacctgttactatgtgacatttaaaaaaaaagtttctcaagacaaaattagcaaggagaatgwcattgttttatttactgcaaatgtcttacttcatagaagacagcaaggttctcacacttgcttttgcattcaatctgttccaatatgttgcttcgattaa

SEQ ID NO: 290329 - DNA, 201 bp, Homo sapiens
ataagaaaacaaagcctttactttcagcattcattggccgcttttctcttttgcagttgataaatataggagacgtaggtaataatctcagcatgtggggygagggcttgtttttaagaagtcatttgtcctcaacaccttaaaccttaggcaattaatgctagaaataatatgctgatttgtatgttgtgtgtgtgtgtg

SEQ ID NO: 290330 - DNA, 201 bp, Homo sapiens
caattacttcccactgggttcctcccatgacatgtggggattataggagctacaattcactatgagatttgtgtggagacacagccaaaccatatcaatayctcaaaggaccgatttcagaattaagcacatttctacatatatgtcgcttagggcagggcctggcatatagatatatttttagtaaaataataaatgtta

SEQ ID NO: 290331 - DNA, 201 bp, Homo sapiens
agactaaagcataatgagattgaaaggaaaattctgatgtgtcctagagaagaaaattatgttcacttagagtaaaatatctaatagatcacaagcaacamatatatgcatttaatgttttaacaaaaaagaggaaaattcctctcctttccagcatgtgtgtgtgagcaatggagtgcatacaatgaacagtgaactaag

SEQ ID NO: 290332 - DNA, 201 bp, Homo sapiens
agaaacccacacaattcgctacaaagggctcctgggggaaataagcacgtcagtaaccaagtcggatttttagaaggaacccctgttggagctctgcagtrggaaagcataagtgtgcatttgacaaacagtaagaaggtggatctgcagagcaaagaatcctgcacaaaattcacatttaaggggtggggtgggaagaga

SEQ ID NO: 290333 - DNA, 201 bp, Homo sapiens
gactaccacacactgggtgctttaaacaaggagcattgatttcttacggtttgggaggctggaagttcaagatcagggtgctgagtggccaggctgttagmgaaggctttcttcctggtttgcacatggtggccttcttgctgtattctcctatgacaaaaaatggaaagaaagatagtgaggtctctcctgtctcttctt

SEQ ID NO: 290334 - DNA, 201 bp, Homo sapiens
gtatatgtgtatatatgtatatgtgtatctatatgtatatgtgtatatgtatgtatgcatacatgcatatttatatgtgtgtatgtatatgtgtatgtgcrtgcatacattacatgtgcatgtgtatgtatatgtgcattttatgtatatttgcacatatttgtgtatgtgtacatatgtgtatgtgtatccacatgtgta

SEQ ID NO: 290335 - DNA, 201 bp, Homo sapiens
aagtatatgtatatgtatatgtgcatgtgtatatgtatgtatttgtgtacgtgtatgcatatgtgcatgtgtatctgtgtatgtgcacgtatatatgtatrtctgcatgtgtatgtatgtgtgtgtgtatgtgcatgtgtatgtatatgtgtatgtgcatgcatatgtatatgtaaatgtctatatgtatacacacataca

SEQ ID NO: 290336 - DNA, 201 bp, Homo sapiens
tatgtgcatgtgtatatgtatgtatttgtgtacgtgtatgcatatgtgcatgtgtatctgtgtatgtgcacgtatatatgtatgtctgcatgtgtatgtatgtgtgtgtgtatgtgcatgtgtatgtatatgtgtatgtgcatgcatatgtatatgtaaatgtctatatgtatacacacatacacagcccattggttctgt

SEQ ID NO: 290337 - DNA, 201 bp, Homo sapiens
cttaaacataagcaactgattgtcccaaataatcggaagtggaggggtaagataactacagcagttggctcaactcaggggccccagttgtatttctctgygactctcttgtggattttccatgatccattatgtgcacattatccagatggcctgaagaatgctgtccatgcatgggtttagtcctggttcctgagaccc

SEQ ID NO: 290338 - DNA, 201 bp, Homo sapiens
atgtgcatgtgtatatgtatgtatttgtgtacgtgtatgcatatgtgcatgtgtatctgtgtatgtgcacgtatatatgtatgtctgcatgtgtatgtatgtgtgtgtgtatgtgcatgtgtatgtatatgtgtatgtgcatgcatatgtatatgtaaatgtctatatgtatacacacatacacagcccattggttctgtt

SEQ ID NO: 290339 - DNA, 201 bp, Homo sapiens
tttaggcaattgaaacacaatggtaaatatttgtatatctaatcatagaaaaggtacaataaaatatagtataaaatatttttgaaagggtgtacctgtayagagcacttaaccatgaatggagcttgcaggactggaagttgctctgggtgagtgagtgagtgacgagtgaatgtgaaggccgaggacattagtgtacac

SEQ ID NO: 290340 - DNA, 201 bp, Homo sapiens
agtgagtgagtgacgagtgaatgtgaaggccgaggacattagtgtacactcctgcagactttataaacactcgacattagagctacattaaatttatgaatttttttcttttgtcaattataaattaaccttagcttactgtaagatttttacttgattaacttaaaattttttttgactctttctaaacatagaaagagt

SEQ ID NO: 290341 - DNA, 201 bp, Homo sapiens
tgcctgagctcagctgctccaaagacatccggtatctcaaggactccctggcaccggggaaaacagaggaggcgctgaagcacttccgagtgaagtttaamgaagcacttccgagtgaagtttaacgaagcacttccgagtgaagtttaacgaagccctccgcgagagctggaaaccgagtgaactggctggcccacaacg

SEQ ID NO: 290342 - DNA, 201 bp, Homo sapiens
cataaaaatcccacagaatttaagcttcaagaagaatcactcaggaatttcccctgcatggataagaaaacaaagcctttactttcagcattcattggccrcttttctcttttgcagttgataaatataggagacgtaggtaataatctcagcatgtggggcgagggcttgtttttaagaagtcatttgtcctcaacacct

SEQ ID NO: 290343 - DNA, 201 bp, Homo sapiens
acaaaaaagaggaaaattcctctcctttccagcatgtgtgtgtgagcaatggagtgcatacaatgaacagtgaactaagagcacgtgggagtctcagggaycagagcaaatcagcctttcagcatcagcagtctggctgcatagcctgtaaccccgaatttcaacctgttcaccaaaatggcactttgtaaaaaagaaaat

SEQ ID NO: 290344 - DNA, 201 bp, Homo sapiens
ctcctagatgggctgtctggttcctctcctaagttttccaccataaaaatcccacagaatttaagcttcaagaagaatcactcaggaatttcccctgcatrgataagaaaacaaagcctttactttcagcattcattggccgcttttctcttttgcagttgataaatataggagacgtaggtaataatctcagcatgtggg

SEQ ID NO: 290345 - DNA, 201 bp, Homo sapiens
agcacgtgggagtctcagggaccagagcaaatcagcctttcagcatcagcagtctggctgcatagcctgtaaccccgaatttcaacctgttcaccaaaatkgcactttgtaaaaaagaaaataagtcaaaaatatgccatattgatacaaattctggagtccactgcctcagttgccttttactaataacatgcattttcc

SEQ ID NO: 290346 - DNA, 201 bp, Homo sapiens
tcatacattgttgctaggtttcagcaggctttaatttgcaggtctgggaaaattacaccaagtctattttacttaattgaagttagcaacagtcatgtgtaaaaaaaaaaaaaaaaaaaagaccaccatttgcattcctaattctgactcaaggtacatatgtgcttatagcaattttagtgaaactatgggtagattctg

SEQ ID NO: 290347 - DNA, 201 bp, Homo sapiens
cttttttcctaaataaattgtttcagagaagtcacacattagtaaattctcaaacctaacatccggattctgggaggacagatgctttcctgcaagggtgktcttcactagaagagtatcagctcctagatgggctgtctggttcctctcctaagttttccaccataaaaatcccacagaatttaagcttcaagaagaatc

SEQ ID NO: 290348 - DNA, 201 bp, Homo sapiens
tgacccttcactaatcacctttgttttcattccttaaattttcccaggttctgttatgagccatggcagattcaagactgtctgtcttctccaaaatattrtcttctttccagcgacagtattcatccaatttaaatttattttattctgtgatcctttgatatacatattatatttaatgaatgtagtggattgatttca

SEQ ID NO: 290349 - DNA, 201 bp, Homo sapiens
tttttctccccatgttccatccaggagtgactaatagtgacaaacccagggacctagtgaatatggagaaagaagtgaaggtatgtcaggaattgagagcmtaccatgtgcactttttcttagaccatatagttttgttttcacaatcatgtgatgagttcttgtgtttgttagtttcatgtgtcaatttggctaggctgt

SEQ ID NO: 290350 - DNA, 201 bp, Homo sapiens
aaaaaaaaaaaaaaaaaaaagaccaccatttgcattcctaattctgactcaaggtacatatgtgcttatagcaattttagtgaaactatgggtagattctkgacatgttgactttagccatccgatatggaagaaatggattgtgttgtatcctagctttagaatattatgtggttaagtgcctctcatatctgcagtata

SEQ ID NO: 290351 - DNA, 201 bp, Homo sapiens
atcaccgtcagcatgaaaccaagcctgggacatcctgttggtggatgacacacaccatgggggagactggttcctccagctgagaccagggggcactgccyagcaagcccaccttccatgtgttgagctgcctggatcacattggtagctgcagattcatgagtgagcccagctgagagcagaaaaatggctcggcctccc

SEQ ID NO: 290352 - DNA, 201 bp, Homo sapiens
caagtacttctttatagcattgggagaacagactaatatagggggcagtacaacttcatccactaaggctctgtagactactgtagcatcattccagctgycaatgctctcatcacttctgccattcaggaatttccttttttgtgtgaactcatctatttatttgtgatttttttttttttttgagatggagtctcacac

SEQ ID NO: 290353 - DNA, 201 bp, Homo sapiens
gttcatgaagagggatcttttaaatgatgcaaataaatagccagatgaagatatacacagggtgaggtctggaagggtcccgagtggatgagctctgtctkcatggaggcggggtgcatcacccccaccccagctcgtggatgagctcttcttcaccttcctgtctgcctccgtgtgtttagctctctggaaactccctga

SEQ ID NO: 290354 - DNA, 201 bp, Homo sapiens
gctgactgtcctctaattcaattctgacattatctacccagaaacagcgtcagatcccacgggttgaggactcagttcccaagactgctccctcctgcccrctagttgcaaatttgggcctccagaacttctgactgattggcttcaagtttgactggcttcaagttggggttcccatgacctcctatttgagattgatta

SEQ ID NO: 290355 - DNA, 201 bp, Homo sapiens
tacataatttgtatctggattgtaggtttgataagttctgatatctgctctctaatatgttacctgagggctaacccatttttttttttttacaatctcartttaaatcaccgatgagaagtctttgtttattgttccttaaaaactgtaacttggatgaatctcaaaggcattatgcctagtgaagaaaggttatgcact

SEQ ID NO: 290356 - DNA, 201 bp, Homo sapiens
cccaatacagttgcctatgctttgttctacatgaggcagcctatttctctgttccagagagagatcaaaaactattagaaaggtgttaatgacattctagmacccaatgaagactttctccatgatggaataagaagacttgaatagaatggaaaaggaaagataattatcttctaatgatgtgattagatgacatttaaa

SEQ ID NO: 290357 - DNA, 201 bp, Homo sapiens
ggtattgattgtcccatttagagaggacaatcagtagtcagtcctaaacaatatttttgacatctctgcatggccagatctcctagttatagctttttttwaaaaagaaaaagttgaatatggcattttaaagaaagtgaactctcaatttataatcacatcttactgattcataactgttatagaacacttgtgggtcaa

SEQ ID NO: 290358 - DNA, 201 bp, Homo sapiens
gaaatgaatgaatgaagttggctgtgggttatgcagaataggtggggatttgtcccatttatacaagtcttatttaaatagggtatttggtcccatttagrtagggtattgattgtcccatttagagaggacaatcagtagtcagtcctaaacaatatttttgacatctctgcatggccagatctcctagttatagctttt

SEQ ID NO: 290359 - DNA, 201 bp, Homo sapiens
gaaagagaattaatctctcttttaaagagaagaaggtacagagaaattcagcggtcagacttactgagagagagagaaagctcccagcatttgtggggttrtagaggaggggcccccacccagggtgggccaaagaggctttcaagagagctggtgcctatgttttggggtgtttgcatctgctgttcctctacagggatc

SEQ ID NO: 290360 - DNA, 201 bp, Homo sapiens
ttccaaagagcaatctgacattgctgtcaaattaaacatatcaaaccccagagatccactcctaggtatgtaactcaaagacagtctcataaaccttaatktaaaaaaaaatatgccaggaaagtaactgcaaggtggttatgatggtggggagctggagacagtctggatgtccatctctggcagagtcaggatacaaaa

SEQ ID NO: 290361 - DNA, 201 bp, Homo sapiens
ttattggccacctgctatgtgccaggcaatgtgctaagccctggagaaatgaagatgagaaagagaattaatctctcttttaaagagaagaaggtacagasaaattcagcggtcagacttactgagagagagagaaagctcccagcatttgtggggttgtagaggaggggcccccacccagggtgggccaaagaggctttc

SEQ ID NO: 290362 - DNA, 201 bp, Homo sapiens
gattggattccctggtggacatgaaatgcagaatgaattgaaatgggaaaaaacaataggagcatggagggcagagagaaatctgtggtctgaggaagagwtgacaagggcctgtggctgttttcatggactaagggaggaggctggagacttcagaaggttggggaggtaaaacttacaagaacgaaagacactggattt

SEQ ID NO: 290363 - DNA, 201 bp, Homo sapiens
ctctggcagagtcaggatacaaaagtggggatacacagcgtggagttcctctacagtgctgagaatcagtaaatgtgatgaatacaaaacaacagggatasattgtttttaacttttattttaggttaggggtacacgtgcaggtttgttatgtaggtaaactcatgccatggtgggagttgttgtacagattatttcatc

SEQ ID NO: 290364 - DNA, 201 bp, Homo sapiens
gggacttctcgggtagttctaacgcgcagccaggattaagaaaaatgcacgtaagggtcaactatgaccttcatcaagaagtagcggttgggaaccagggrtgctcccgtccatcaaggcctgaatgagatgctcctgggaaagagacttcagtgcttcctcccacatcccttaaggtctcaagcagagccaggaaattaa

SEQ ID NO: 290365 - DNA, 201 bp, Homo sapiens
aaatgtgatgaatacaaaacaacagggatagattgtttttaacttttattttaggttaggggtacacgtgcaggtttgttatgtaggtaaactcatgccayggtgggagttgttgtacagattatttcatcacccaggtactaagcctagtacccaatagttatttctttctgatccttgccctcttcccaccctccaccc

SEQ ID NO: 290366 - DNA, 201 bp, Homo sapiens
aaaaagaaagaaagaaagagaagaaagaaaggaaggaaggaaggaaggaaggaaggaaggaaggaagggagggagggagggagggagggagggagggaggraggaaggaagggacttctcgggtagttctaacgcgcagccaggattaagaaaaatgcacgtaagggtcaactatgaccttcatcaagaagtagcggttgg

SEQ ID NO: 290367 - DNA, 201 bp, Homo sapiens
tcaagattttgtccaaagcaggagtagtagtcctcaaggaaaaatctggggctgttaccagatgtagggaaaatagttcctgagcaatttaaaataacagrtgggaggaaagtccaaacaatgagcattagattattctttcagtaacttttgcagagctacatagaaaacaaaggagacagaagcttaaaagggttgcag

SEQ ID NO: 290368 - DNA, 201 bp, Homo sapiens
tttcctcatggattgcctataggagaggggaatggaagagaagtatgaggataaaactgaaaacatgagttaatacatatattttttaaaggagctgtgcraagggcatacatgataagctattaagccatagagtcaggagtacgattaactttgaacgcctgatgttaaaaaaaagaatagggagagaaagagaaagag

SEQ ID NO: 290369 - DNA, 201 bp, Homo sapiens
tctgattggaatttcaatctttatgacacctttttagtctttgtaacacaattggttcctaatagcctaactttggacatgcatccccacccttggcccaycaagattttgtccaaagcaggagtagtagtcctcaaggaaaaatctggggctgttaccagatgtagggaaaatagttcctgagcaatttaaaataacaga

SEQ ID NO: 290370 - DNA, 201 bp, Homo sapiens
gatgcctgacttaattggatttgctccagaaagcttaggatacatgattggattccctggtggacatgaaatgcagaatgaattgaaatgggaaaaaacartaggagcatggagggcagagagaaatctgtggtctgaggaagagttgacaagggcctgtggctgttttcatggactaagggaggaggctggagacttcag

SEQ ID NO: 290371 - DNA, 201 bp, Homo sapiens
aaaaaaattagccaggcatggtggcaggcacctgtagtcccaactacttgggaggctgacatgggagattcacttgagcccaggagttcgaggctgcaatragctataattgcaccactgaactccagcctgggtgatagagtgagactgtttctagcttttcaggtttctttaatgtgttagcgattgggagagatgagc

SEQ ID NO: 290372 - DNA, 201 bp, Homo sapiens
aaaaacacctaactcctccaggaagggagaaataataagggcacagtcagggaaggctttatggtggaggtgacgatgagctgagagatgttttgccaggyaggttaaggagggcttcatgcaaagggtacaacatgtcaaggttcccttagcatgaaaaatacagtttttggaggagtacagactggcttcaaataatct

SEQ ID NO: 290373 - DNA, 201 bp, Homo sapiens
tctctggaggtggtggctccaaaatttctatatgggggaaggggtaggagtggccccatcagaggaaggatagaaagcttgtctgggagttgccatgcatsctgtttcgtggcatgcattcactctgattgactaatggagactagagggggataaagatccctttggcctccacttggtaccatcactgtccccatgtgc

SEQ ID NO: 290374 - DNA, 201 bp, Homo sapiens
tctcaaaccatgtttttcttctactctcacactgcaaaaatcataatcacagaataagaactctgtgactagatgtatgtatgtgtgtgtgtgtgtgtgtkaacacattgccatgtgagtgccatgtatcccaagtgtggaagccactgagtggctctacattttgcttctgctgtactaggacaaacttttgggttaatt

SEQ ID NO: 290375 - DNA, 201 bp, Homo sapiens
ttctcaaaccatgtttttcttctactctcacactgcaaaaatcataatcacagaataagaactctgtgactagatgtatgtatgtgtgtgtgtgtgtgtgtgaacacattgccatgtgagtgccatgtatcccaagtgtggaagccactgagtggctctacattttgcttctgctgtactaggacaaacttttgggttaat

SEQ ID NO: 290376 - DNA, 201 bp, Homo sapiens
gcccaagttacatcatagacactatagatttgcataacttttaccattttccagcagacggaagaagggttttgaggaagggacacattttgctaatcatrtaaatgtgccatgtagactggtgacaagtgacagtcctgtcaagatatctttactcaatattcatttccgtgacctgcaattcctttccctgagctgcca

SEQ ID NO: 290377 - DNA, 201 bp, Homo sapiens
ttctctttttgacatgttgtgtagggaaaaactttctcaaaccatgtttttcttctactctcacactgcaaaaatcataatcacagaataagaactctgtgactagatgtatgtatgtgtgtgtgtgtgtgtgtgaacacattgccatgtgagtgccatgtatcccaagtgtggaagccactgagtggctctacattttgc

SEQ ID NO: 290378 - DNA, 201 bp, Homo sapiens
attctctttttgacatgttgtgtagggaaaaactttctcaaaccatgtttttcttctactctcacactgcaaaaatcataatcacagaataagaactctgtgactagatgtatgtatgtgtgtgtgtgtgtgtgtgaacacattgccatgtgagtgccatgtatcccaagtgtggaagccactgagtggctctacattttg

SEQ ID NO: 290379 - DNA, 201 bp, Homo sapiens
atatgtatatatatgtatatatatacatatatatatatacacacacacacggacatatatatattgacatatatgtatatatacacacaaacacacacacmtatatgtatgcacacacacgtatctatgataaagtttaagcttcaaattagggatagaagagttaatgcagaattagtcacagtattgttgttaagagat

SEQ ID NO: 290380 - DNA, 201 bp, Homo sapiens
agagaagattgatgtcagctaggttcatttttttccccttttgttggcaaactgttttgttttgttttcccttcctggatgcctatacagtttttttttttccattatttaaatagaaacggagcctctaaagtcagactgtcctgagttcaactctctgctgctttgcttagtaacctatgtcctcctgggcaacttatt

SEQ ID NO: 290381 - DNA, 201 bp, Homo sapiens
tagctgggatcacaggcatgcatcaccacgcctggctaaattttttttgttatttatttatttactagtagagacggggtttcaccatgttggccaggctrgtctcaaactcctggtctcaagtgatccacccacctcagcctcccaaagtgatgggtttataggtgtgagccaccatgcccagccaggacaaaatctttt

SEQ ID NO: 290382 - DNA, 201 bp, Homo sapiens
ctcctgactcttcaatattggattggtggagccttctttattcccctgttacttccctctgaggtagaagttatataggctatttctgttctttttgtttkttttcttcatttttgtatttttaatagtacttatctgatcacactaagacttggcaaagagtaacttagagaacgactccaaacctccctattccccaat

SEQ ID NO: 290383 - DNA, 201 bp, Homo sapiens
gcccagagtatatctatcttagtgactgagtgcatacaaatcacatgtttaccactctcctaggaagaaggccctcaagacactgtaattaacaaatacayccaagtgctgctgttttaaaaagacaaaatagtcaggctttggctatataaatcaaggatcatgcctgtaatctcagcactttgggaagctgaggcagga

SEQ ID NO: 290384 - DNA, 201 bp, Homo sapiens
agtcacctagccctcccaaagttctgggattacaggcgtgtgccaccacgctagccttgtctttttgcctaagcctatgctcaactcttgtccttctgctyaaatgtcccccaggttttctctgatcacttaatttcctcattacacttgttctctttcttttcctttatcacaagttgtaattatttttttttattttgc

SEQ ID NO: 290385 - DNA, 201 bp, Homo sapiens
gggataggagagagacttttctgtatatctttttcatttttttgtgctgtgtgaatatattccttgaaaaattaaaatggaaatcgtgcattgtggaaaarttaggaaactgattaaagaattttaaaattacccaaagtgtacccacagttgtaatcaatgttaggattttgctttttaccattttagacaaatcatgtg

SEQ ID NO: 290386 - DNA, 201 bp, Homo sapiens
gctagccttgtctttttgcctaagcctatgctcaactcttgtccttctgcttaaatgtcccccaggttttctctgatcacttaatttcctcattacacttrttctctttcttttcctttatcacaagttgtaattatttttttttattttgcccattatctcctccaccaaaccagaggccccatgagggcagcaagtact

SEQ ID NO: 290387 - DNA, 201 bp, Homo sapiens
gtattcaagtcttccccatcccacacccacattcctgaatgatgttggggtctgaagtaacggctgggaagattccactgtggtctgaggccagggtggccagcatagatgtccaaccaggcttctactgaaaggcatcagatcaggatactggaaggcagctatgggaaatgcatctcataaaaggagtgaatgctggtg

SEQ ID NO: 290388 - DNA, 201 bp, Homo sapiens
aagcttcctggaggaggtggtatgttatttggacctcaatggccagagaggatttccttggatagagatgtttttggttgggggctaataaggagggggamcctatagggatgctgtttctaaatacattcacttcatgattttacctctgtttacagtcgaatcacaaaataaagtggttgccgggagcgggggctcaca

SEQ ID NO: 290389 - DNA, 201 bp, Homo sapiens
gagactccgccaaaaagcaagcaaacaaacaaacaaacaaacaaacaaaccatgaagcttatacacagggctgggtaggatgtcaattttgctttctcagrcagtttaatttcactggatcaagagcggaagacaatgcaacttctttgtgtgcttttaactgtgtaaaagaagacccactgcagaaaatggtccctggaa

SEQ ID NO: 290390 - DNA, 201 bp, Homo sapiens
agggcgagactccgccaaaaagcaagcaaacaaacaaacaaacaaacaaacaaaccatgaagcttatacacagggctgggtaggatgtcaattttgctttytcaggcagtttaatttcactggatcaagagcggaagacaatgcaacttctttgtgtgcttttaactgtgtaaaagaagacccactgcagaaaatggtccc

SEQ ID NO: 290391 - DNA, 201 bp, Homo sapiens
atgggcaagtcacagagacagaggaaaagggaaagacccagggtcaagaaaggcattgagctatgcttgacccagattccactggaattcacttgtaaatrtgaattttgacatctgatacctacagggtgcttgttatgtgtcagggaccattcttggggcttcacatgatatcatgcatctcattttatctcattgaat

SEQ ID NO: 290392 - DNA, 201 bp, Homo sapiens
tttactaagcttgccacacctggttctgaaagaatatggaatgtagatgcaggtgactcagtcatcaataggtatttattgagcacctactgtgtgtcagycacatagtcactggggagagaggaatgaaaaaaacagacaacaatttctgccttcatgctgcttacttttctacagggtaggaaggagatagtcaataaa

SEQ ID NO: 290393 - DNA, 201 bp, Homo sapiens
ccctcatgttggtttataagagtcacattgtataaaagctatttatataatgacttccagactttcaaccaccagtactgagatctctggctgaaagtgtrggctctggagccacaaagccctgtgtcaaatcatggctcaacctctcaccagacatgtgaccatgaacaagtttcttaacctttcaatgcctcagtttcc

SEQ ID NO: 290394 - DNA, 201 bp, Homo sapiens
ccgcttgcttgcacagaatgtgagtgcctttctcattctagtggtgtagatgaagtctaacctggagcatgtggtcttgctaacaggaggaggctaagagrtgagcaggggtgcaccataaagatcagccgggaagaatttctgttcacccttgatcagtactttgcacctgtagaatgacagaggaacattgggatggtg

SEQ ID NO: 290395 - DNA, 201 bp, Homo sapiens
gactcactgtctctgctggagctaactccggtgcaggttaatccattcgtttgtcaaatgctttccattggccaggcttggtgccaggctgctgtaggccrgttcagctgccactttgttctcctaatgggctgcatggctgggctgaagcactgtgaggttcacaagcagcttgacgaggtgggtaaaagccacccggga

SEQ ID NO: 290396 - DNA, 201 bp, Homo sapiens
gtgtatctggtatgcagggctgtagaataactttggttagacctctatgaatcattcctgtatgatcgagtgacagggtgcatggggacggggtgggggarcacacagctccctattgatcagatcccctggaggacttgaggagaggtcatctccacctgtgagggctcagggcaggtgatagggaagtggggctttgcg

SEQ ID NO: 290397 - DNA, 201 bp, Homo sapiens; identical to SEQ ID NO: 59966

SEQ ID NO: 290398 - DNA, 201 bp, Homo sapiens
cactaccagagagcccagccttctgcagtgggttctctccaatttgctgtctttctgccatgccatctctgatgcttacctcaactatgtgtctggcctgrgttctcccccacccacatttcctccccgaggtaagagctgcagggtggtatctcctagctgcttggacaggtgggcaaagcaacaccaggctgatgaggg

SEQ ID NO: 290399 - DNA, 201 bp, Homo sapiens
ctgtgggtcacaatagaagaggcagaaggacagcattaccctttcttctcaccatgtcattgaggggactgccagggcctggaccccatgtggtttatgcyccaaggatgaagggactctgccccttcagctttatcaacttccctcttatagcgcagggattagagcagccttgtcagtgagggaataatcaaacaactg

SEQ ID NO: 290400 - DNA, 201 bp, Homo sapiens
ctttgtagtctccacttgtcacacagcaggactagggataaattccacaatacacaaggggtggataaaggaataggctttactggggaaacttgcaagcygtgggtcacaatagaagaggcagaaggacagcattaccctttcttctcaccatgtcattgaggggactgccagggcctggaccccatgtggtttatgccc

SEQ ID NO: 290401 - DNA, 201 bp, Homo sapiens
agtagctgaaagtggatcataactgtcacatctctatattggcaatgcttagtcctgtgcctggcatgcagtagtgtattcattcccgaggcaagtgtttrctgggcacctactatacaccaggggtacaaagataagcgaggtgcagtctctttgctcagtggtcctctatgtggacataccatgtaagaaggatccctt

SEQ ID NO: 290402 - DNA, 201 bp, Homo sapiens
ttcaacaagacccctacacgagattcaaatgcacattaaagtgtgacaggcacaggcttatggggtccacttccagggagaagggagggcagggagagaarttaagcccagaccacagaagaagagatatcctgggagttacctccagatagtgtcccacggtcagctgcagataggaccaaagaaattgaagtccaattg

SEQ ID NO: 290403 - DNA, 201 bp, Homo sapiens
  misc_feature (1)...(201): n = A,T,C or G
tgcaacttggtcattgcctccagctcccaatgacgtattcagaacaccaagagaagagcccatacacttctcttggcatcagctacctgaattgggtagangtgctcacaggttcttgttttagagatccgcttgcttgcacagaatgtgagtgcctttctcattctagtggtgtagatgaagtctaacctggagcatgtg

SEQ ID NO: 290404 - DNA, 201 bp, Homo sapiens
atgtgccattttgtttcctggatgctaatgtcactggggaacatctcacgagagcaagctgactcaggctggaagctagaaagtagagcctagctagagayaggcactgggctgctccccacagttctgatcatgagtgaagagagctgtggtgggtcctgagctggctgggacagacgtcagaagggagtgagtgagagg

SEQ ID NO: 290405 - DNA, 201 bp, Homo sapiens
aggtccctcccatgacacataggaattacgggagctacaatttgatatttgggtggggacacagccaaaccatatcagccccctttgtgttggcaatcagrtatctggagtggaaccagcctttgatttcaggtgttctccagcagtgctctgccctgctgagtatagagagagggcactcaggtgctcctggcacccagt

SEQ ID NO: 290406 - DNA, 201 bp, Homo sapiens
ccttccataaaatttaaacttatctgcaatccaaatagtgatccagaaccacactgttttaattactacagctttacaatatatatattaatatgggctaytacaattccatcccccacggctcttcaaaatgcgttggctcttttcattaatatactgatccaatagaaactttatagttattatgtcaaattcaatttt

SEQ ID NO: 290407 - DNA, 201 bp, Homo sapiens
ttaggtgactcagacactacctgtgtggttgtcggtgcacacacttgggtgattgtgctgaagctacctggactggagacaagaatgtgtgtcttgctaamccgtggatgataattaaattcatggaagcagcagcaatgacccaggagcacgtatagctggagaagaaggtcagaggtagggtgtgaccaggaaatagat

SEQ ID NO: 290408 - DNA, 201 bp, Homo sapiens
ccaggaggaggatgcaacaggcccctgggtggaagggctgatgtagctgggcctgaggcctggccccagggaaacctatttgatgatgtattccttctgcycacacaggagcctgatgcccaggaccctcgagagccagatcacgctggagaagacgcccagctactttgtcactcaagaggctcctcgacgcatcttcaa

SEQ ID NO: 290409 - DNA, 201 bp, Homo sapiens
ttgtgctgaagctacctggactggagacaagaatgtgtgtcttgctaacccgtggatgataattaaattcatggaagcagcagcaatgacccaggagcacrtatagctggagaagaaggtcagaggtagggtgtgaccaggaaatagattaacaaaatggggaggaggggcagaggatggtgtcacttcataaaccatggt

SEQ ID NO: 290410 - DNA, 201 bp, Homo sapiens
aggtgactcagacactacctgtgtggttgtcggtgcacacacttgggtgattgtgctgaagctacctggactggagacaagaatgtgtgtcttgctaaccygtggatgataattaaattcatggaagcagcagcaatgacccaggagcacgtatagctggagaagaaggtcagaggtagggtgtgaccaggaaatagatta

SEQ ID NO: 290411 - DNA, 201 bp, Homo sapiens
agtcaccgtgttgtacaatagatctcaaaggtattcctcttatctaattgaaattttgtatcctttgacccacatctccccacccgccccagcctctggtraccacccttctacttatttatatttttatcagaatacattttgcttccacaatctgaggattcatgccttttatcaatcccggaaaattctcagccatca

SEQ ID NO: 290412 - DNA, 201 bp, Homo sapiens
gatcaggatactggaaggcagctatgggaaatgcatctcataaaaggagtgaatgctggtggataaaaagatccaactgaaggtcctggggtgagttgaasgggatacgagatgaggaaagatgggccatgagccacagtggaaggggtatcccagggttttccccaaacaagacagttcacaatctactgacagcaccga

SEQ ID NO: 290413 - DNA, 201 bp, Homo sapiens
ggggatacacagcgtggagttcctctacagtgctgagaatcagtaaatgtgatgaatacaaaacaacagggatagattgtttttaacttttattttaggtyaggggtacacgtgcaggtttgttatgtaggtaaactcatgccatggtgggagttgttgtacagattatttcatcacccaggtactaagcctagtacccaa

SEQ ID NO: 290414 - DNA, 201 bp, Homo sapiens
catccctgattatagaactcagcagctggtgagcatcctacacccctcaacagaatgtggttcataatgatcaaagagacccagccctcacattttggggsttcacaagcttccctaaactttcatccttattatgagttacaatgtggatgtgggcggtattcaagtcttccccatcccacacccacattcctgaatgat

SEQ ID NO: 290415 - DNA, 201 bp, Homo sapiens
tctaccacttattgcctgtttcatcttaggcaggtcacttcatcttctgagcctcagtttcctcacttggaaaacaagggcaagaagacttctgatggctrtcacaaggactaaatggaatttggactattgccaatacagttcctacaataggcactcagaaaatgctagcttcctctccttgattttatttcctgcaat

SEQ ID NO: 290416 - DNA, 201 bp, Homo sapiens
gggggctaataaggagggggaacctatagggatgctgtttctaaatacattcacttcatgattttacctctgtttacagtcgaatcacaaaataaagtggytgccgggagcgggggctcacacctgtaatcccagcactttgggaggccaaggtggcggataacctgaggtcaggagttcgagaccagcctggccaacatg

SEQ ID NO: 290417 - DNA, 201 bp, Homo sapiens
ttcttcctgaatcccatgagctaggtacggtgggtgacaggatgttccgctctctgtccactgccttgtcagttcacagcttgccatcataaagccagggyccactgggcagacatagccaaagaacccttgcacccattggagtggactgtgctttccaaagggggaggtgcagagttgcaggcagtgtggatcttagta

SEQ ID NO: 290418 - DNA, 201 bp, Homo sapiens
aatggcgtgaacccgggaggcagagcttgcagtgagccgagatagagccactgcactccagcctgggtgacagggcgagactccgccaaaaagcaagcaaacaaacaaacaaacaaacaaacaaaccatgaagcttatacacagggctgggtaggatgtcaattttgctttctcaggcagtttaatttcactggatcaaga

SEQ ID NO: 290419 - DNA, 201 bp, Homo sapiens
cctccctagccctgtatggtgctgaagtgtaggactggcccacatgtgggtggtgtaatgtcccggctccctgttaacacataggtcacagaattctcacmattcacctgaccctttgaagactttctagaaacatctgcatagtaatgacgttggggaggggtaacatggtagctgacagagtagctgaggctaaatctg

SEQ ID NO: 290420 - DNA, 201 bp, Homo sapiens
gggatgaatgtcaagcatgacttacctgcatggctgggagctgcttctggctgtcacctgtgagctcagtttgggctttcaaccagagtgactacccatgrcctttctgtagggcctgggcttcctgcacatggcagctgggttctgggaaggagcatctcaagggcaagcgtttccagaggtccaggcagaagctgcagg

SEQ ID NO: 290421 - DNA, 201 bp, Homo sapiens
gaggctgaggcaagagaatggcgtgaacccgggaggcagagcttgcagtgagccgagatagagccactgcactccagcctgggtgacagggcgagactccrccaaaaagcaagcaaacaaacaaacaaacaaacaaacaaaccatgaagcttatacacagggctgggtaggatgtcaattttgctttctcaggcagtttaa

SEQ ID NO: 290422 - DNA, 201 bp, Homo sapiens
gcttgagcaagtttcttaaactctatcagcctctattttctcatccatcccaatgggcaggaaaacagcccttgccctgtataccttccaaggcttttctraagtgccttaaaggtgtaaaaaaggcacttcactttaagtgatgcttctaaaccagcagccaaaatgtggaatttgaaggtgggccctgcgggtgaaggc

SEQ ID NO: 290423 - DNA, 201 bp, Homo sapiens
actccggctcacccaagctgggtaccaagcggttgccccaagccctcattgtgggcgtgaagaaggggggcacccgggccgtgctggagtttatccgagtrcacccggacgtgcgggccttgggcacggaaccccacttctttgacaggaactacggccgcgggctggattggtacaggtaaggaccaggagctccgctcc

SEQ ID NO: 290424 - DNA, 201 bp, Homo sapiens
gaagaattttctccagctggttattaatgcgtgtttctcctgcagaaaagctcagccatttctctcatcattccaggcttgactctccagccctaaggacmacatacccttgatggtgactcgtgttcaccaaggaaccgaattcattctgtacttttccagaaaagatgaaaaagtgttccttttggtccttcataaaat

SEQ ID NO: 290425 - DNA, 201 bp, Homo sapiens
gcacttttggaggccgacgctgggtaatcgcttcagcccaggagttggagaccagcctgggcaacatagggagacctcttctctaaaaaaaaaaaaaaaaattagccaggcatggtggcaggcacctgtagtcccaactacttgggaggctgacatgggagattcacttgagcccaggagttcgaggctgcaataagctat

SEQ ID NO: 290426 - DNA, 201 bp, Homo sapiens
gcttgaacctgggaggcaggggttgcagtgagtcaagatagcaccactgcattccagcctgggcaacagagcaagactccgtctcagaaaaaaaaaaaaaagaaagaaagaaaaaaagatatttgtattgtgaaattcaaaagtgacaaagggtattcagagaaaattaatcccttcctttctacctcgtctttcagccaa

SEQ ID NO: 290427 - DNA, 201 bp, Homo sapiens
agctacttgggaagctgaggcagaagaattgcttgaacccgggaggtggagattgcagtgagccaagattgcaccactgtattctagcctggcgacagagygacactctgtttcaaaaaaaaaaaaaagaggggtggggagactttatgttagatgattttgccaaaccataaggtgatgtaagtgttctgagcatattta

SEQ ID NO: 290428 - DNA, 201 bp, Homo sapiens
aattgtcttcctaaagactgcatcaatgtatatgtctaccaaaattaggagagtgttagttcttcacattcttgccatcataattgttacaattaaaaaawttttttttccagccttacaggtgaataatattatctcatcatgattttagtttgtgtttccttaattttagagatttatcttttcatatgtttattttct

SEQ ID NO: 290429 - DNA, 201 bp, Homo sapiens
tcaccaaggaaccgaattcattctgtacttttccagaaaagatgaaaaagtgttccttttggtccttcataaaatccccacatcccttaggatatttttaygtagtcttggtttccaaactgagaaaggaatcgggttctgactaatctcacgaaagaaattatagaaacatttttttctctactgaacatgccatcccat

SEQ ID NO: 290430 - DNA, 201 bp, Homo sapiens
atctgctgtttttatctacagctttaggcagtagaggtcatatgcatattggacaagggacaactttgttagaaagaggaccccactgggcttataatagrgggccctggatttaccaaaagtagggggaccgcaggcctgatttagcacctttgcaggttactcctggctcgcaatggttgtagttgtggggacgagtgg

SEQ ID NO: 290431 - DNA, 201 bp, Homo sapiens
gcctctccggttccaaccactccggctcacccaagctgggtaccaagcggttgccccaagccctcattgtgggcgtgaagaaggggggcacccgggccgtrctggagtttatccgagtacacccggacgtgcgggccttgggcacggaaccccacttctttgacaggaactacggccgcgggctggattggtacaggtaag

SEQ ID NO: 290432 - DNA, 201 bp, Homo sapiens
gacaggcagaggtccctacagcagaagtggctgggcctccttcaagactggaagactgccatgatcacaaaaattccaaggaaggcatctccccagcgtcygcagccaaaacaaataaaaatccactgagacagggcatcctctgaggctgattgtctggtcaagcaagaatcctggcacacttattggcctcaacaggtt

SEQ ID NO: 290433 - DNA, 201 bp, Homo sapiens; identical to SEQ ID NO: 59965

SEQ ID NO: 290434 - DNA, 201 bp, Homo sapiens
agtgacagcaattttctccagtgctgtttggcaacccagggacagaactggaaaggataaaaggctggaaggatgcattattagagactggggagagcaaytagaacaggaaaattgatgaggatgaagatgatgctattgaaatgattgttcattgggtacagagaaggtatggaataaagtgaaatcaagagaatccca

SEQ ID NO: 290435 - DNA, 201 bp, Homo sapiens
aactctgctttagggaacagatttgaagcttacacactgaaataaaactgaataacaaggcttgattaggcccaaagactgaaggggaagaaaatttcctrttttatgattttaaattcaaagtcttgaatgcagggcattagagtgggaaggaagattcaagagaatgctaatgtgaaagagaaatggactcagaaaaag

SEQ ID NO: 290436 - DNA, 201 bp, Homo sapiens
cagtactgagatctctggctgaaagtgtaggctctggagccacaaagccctgtgtcaaatcatggctcaacctctcaccagacatgtgaccatgaacaagkttcttaacctttcaatgcctcagtttccttatatgtaaagtgatgataacaatatttactactgtattgggctagagttgaggattaaattattcacata

SEQ ID NO: 290437 - DNA, 201 bp, Homo sapiens
ataattatttaaataagcaaacaaaaaataaagagatattcacgtggcagaatccagcatagcagataaaagaaaatatatactcctatgggaagttctcragatatattgttcagctaaaaaaacaaaacaaaacaaaacaaaacaaaagcaaagtaaaaaacatattatcttttgtataaagggaggaatagataatgt

SEQ ID NO: 290438 - DNA, 201 bp, Homo sapiens
aggaggaggctaagaggtgagcaggggtgcaccataaagatcagccgggaagaatttctgttcacccttgatcagtactttgcacctgtagaatgacagargaacattgggatggtgggacagagagggctggagaatgaatacctgccaaggtggcctcagagatgacacaattctctttaaagccaaacaaagctttga

SEQ ID NO: 290439 - DNA, 201 bp, Homo sapiens
atacctgccaaggtggcctcagagatgacacaattctctttaaagccaaacaaagctttgatgcaaatggaggtttgttgggattggttctaagttcaatrttgagagcctggatgcatgaacccttggtggaagagctgggagaccatccaaactttgccttgcctctgggccaacctgtctacaacctccccaatcatg

SEQ ID NO: 290440 - DNA, 201 bp, Homo sapiens
acaaaagtcagagataaagttgttttcactagggaatcagcaatttatgagacagtggcacaaggcttttctttattttaattttgaggctcatgtgagasaggacgtcccttttgtaaaatctcaggatgcaaaataccttttcttccattctggaaaacatgacgtgaagcttaaaaacatgacatgggctgggcgtgg

SEQ ID NO: 290441 - DNA, 201 bp, Homo sapiens
gcagattccagagtctgtaggtttaaccaccaaactcttgggccttcctaattgtaaagagctgtcaaactgacctattgcatgagaagtgcctttccatrgattaagtaaaagttagccttaaccatccaattctccgcattcagcaactgactggaggcaccagtagacagaagaaatcacctgtgtttaacagaaaag

SEQ ID NO: 290442 - DNA, 201 bp, Homo sapiens
ttaagcaccacaatttgacccatttaacagaggagaaaactgaggcttaaagaggttaaatagcttacccgtgattactcaggaggtgggcaagtagaatkagaaaccacgtcaggcagattccagagtctgtaggtttaaccaccaaactcttgggccttcctaattgtaaagagctgtcaaactgacctattgcatgag

SEQ ID NO: 290443 - DNA, 201 bp, Homo sapiens
gaatgttctttgtgattgcttttatcttgctgttaaagctttctttaaagagatcccagttatatacatttttgtgcaataggtgaccttcttgaggaagsctcttttaatgcaaaaacacatatatctttgttttgtcaaactttttaggtcttacccagtaccaggcactgtacaaagtacatcacacttaattattac

SEQ ID NO: 290444 - DNA, 201 bp, Homo sapiens
cacatatcatcaccttagggattaggtttcaatatataaattttgggatgacacaaacactcagtctatagcaccctccaaactatttacacagctgcagrcacctgtagcagacacgattggtgcttggctcagatccctcttagtcttcaccctcacatgatgaaggctgtgactcagtaggggcatgcttggcccatg

SEQ ID NO: 290445 - DNA, 201 bp, Homo sapiens
ctgccccagggcaaacttgcacaagttccaaattagtatgctttaaatagatgaagtttgagtgttcaatctgaactagaaaggctcctcagggtgtgtgwgtgtgtgtttggttaggttgctgaaacagacacaaaatggcagtgtcttaaaagactgaaatgtatttctctcttactaacagcccagagtggacggcag

SEQ ID NO: 290446 - DNA, 201 bp, Homo sapiens
ggctgccccagggcaaacttgcacaagttccaaattagtatgctttaaatagatgaagtttgagtgttcaatctgaactagaaaggctcctcagggtgtgwgtgtgtgtgtttggttaggttgctgaaacagacacaaaatggcagtgtcttaaaagactgaaatgtatttctctcttactaacagcccagagtggacggc

SEQ ID NO: 290447 - DNA, 201 bp, Homo sapiens
gtccatttggccgtgacctcagagggccctgaggagctgtactttgcaatcaggagtccaggcaaggaatcacctggattttaattctgacttttctcagycttgggcatgtcacatcacttctctgggcctttccatgagagtgcagagctgagtcatttctgaaggcttttccacgctcagatctgatgactgcaggtg

SEQ ID NO: 290448 - DNA, 201 bp, Homo sapiens
gcacaaggagctggaattgtggtgcaaagcacatgccatctttgacatcaaatcaattctgacttttggttttgatggtgacaggcacctgacttacaaargtaagtagaagcaaatccagccagaggattgcatgggcacatttgcctgataagggtggccataggtcaaagggcacaagatttctccaagacttcttaa

SEQ ID NO: 290449 - DNA, 201 bp, Homo sapiens
tgtttttgagatgacatacagtttttttccccttttacctaaagattctgatatcagccacccacctgctactcttgctagttagaattaatgtcttggaygcgtcttaccctcgttttgctcataaatttctccattaatatgatgaaaattacattgccatctctttcccccaaatttgtaaatacatatatgcaacat

SEQ ID NO: 290450 - DNA, 201 bp, Homo sapiens
aataagtatatctacagaatcattttaaatgctcagaattattttaaatagcatctagttggatagatatactattatttatacaatcattaaccaaatcrcctactgatagacatttagattgctcccactttttgctctttaacaatgaaaggacagcagcaagtatcgtacccaatgattttcctcagaataaattta

SEQ ID NO: 290451 - DNA, 201 bp, Homo sapiens
ttaaaaaagaaagaaagaaagagaagaaagaaaggaaggaaggaaggaaggaaggaaggaaggaaggaagggagggagggagggagggagggagggagggmgggaggaaggaagggacttctcgggtagttctaacgcgcagccaggattaagaaaaatgcacgtaagggtcaactatgaccttcatcaagaagtagcggt

SEQ ID NO: 290452 - DNA, 201 bp, Homo sapiens
tttgaatcagttgttctaggacagagcccagacatgtttatttaaaaaagaaagaaagaaagagaagaaagaaaggaaggaaggaaggaaggaaggaaggraggaaggaagggagggagggagggagggagggagggagggagggaggaaggaagggacttctcgggtagttctaacgcgcagccaggattaagaaaaatg

SEQ ID NO: 290453 - DNA, 201 bp, Homo sapiens
tttgtcaatctaatgcatgaaaactatctccttttaatttgaattttggggtatttaaaaatatttattagccatttgcattcattttctgaaatttttgsttaattttttccctgttggagatatttctttccatttttaaaagaggatgtttaatgattaatgctgcttatactggattgactttatcttttagtgttt

SEQ ID NO: 290454 - DNA, 201 bp, Homo sapiens
aggtgcagtctgccacagtggttctaagcactggtggcccactggaatcatctggagagttttaaaattgcaggtaccagccgggcacggtggctcatgcytgtaatcccagcactttgggaggctgaggcaggcagatcacgaggtgaagagatcgagaccatcctggccaacatggtgaaacccatctctactaaaaat

SEQ ID NO: 290455 - DNA, 201 bp, Homo sapiens
actctctgaagtttatggccacttctagctgaaacactgtaggatctgaattattaattctgtgaaaaatgagttaagtcattgcaaagctctgtggtggygcagtccctactttaggccccctttcctgtattttctctagcacaaacatctccattaacaagaaatccttgggtaacttggccaaatctttgtctgtca

SEQ ID NO: 290456 - DNA, 201 bp, Homo sapiens
ctgctttgatggttttaataaagatatgaaatcatctaacagctttcattttgctcaggcgagatggcttaaagtggaggtagcatttcctaggatcaatmcccattttcagaagtggttggttaaactctctgaagtttatggccacttctagctgaaacactgtaggatctgaattattaattctgtgaaaaatgagtt

SEQ ID NO: 290457 - DNA, 201 bp, Homo sapiens
cccagcccaagttcctactaaggacttgctatctttcaggctcttccttacaagtgacaggctggagtctgaaccaaatatacttcccaatacttgcccckggcttgactggtcctgtctatcatagacgtccctaaactaaccaaagaaaagaacattacgttctactgtagcttggagtcttcactcccaaataggtgg

SEQ ID NO: 290458 - DNA, 201 bp, Homo sapiens
aaaaaaaaatgttgtttcagatcactttagttccacatgaatttattggccacctgctatgtgccaggcaatgtgctaagccctggagaaatgaagatgakaaagagaattaatctctcttttaaagagaagaaggtacagagaaattcagcggtcagacttactgagagagagagaaagctcccagcatttgtggggttg

SEQ ID NO: 290459 - DNA, 201 bp, Homo sapiens
accttgtctatcatattcatgactgtatccctgaagctcagaaaggtgtctggcacacgatgggtgctcaataaatatgcgttgagtgaatactcttagcratgagggatgattaggaattgatgagtctgttcggggctacaaacttgtccacccctttactaagcttgccacacctggttctgaaagaatatggaatgt

SEQ ID NO: 290460 - DNA, 201 bp, Homo sapiens
acctgctatgtgccaggcaatgtgctaagccctggagaaatgaagatgagaaagagaattaatctctcttttaaagagaagaaggtacagagaaattcagyggtcagacttactgagagagagagaaagctcccagcatttgtggggttgtagaggaggggcccccacccagggtgggccaaagaggctttcaagagagct

SEQ ID NO: 290461 - DNA, 201 bp, Homo sapiens
cgaatcacaaaataaagtggttgccgggagcgggggctcacacctgtaatcccagcactttgggaggccaaggtggcggataacctgaggtcaggagttcragaccagcctggccaacatggtgaaaccccatctctactaaaaatacaaaaattagctgggcgtggtggcgtgcgcctgtattcccagctacttgggagg

SEQ ID NO: 290462 - DNA, 201 bp, Homo sapiens
agaaagagaattaatctctcttttaaagagaagaaggtacagagaaattcagcggtcagacttactgagagagagagaaagctcccagcatttgtggggtygtagaggaggggcccccacccagggtgggccaaagaggctttcaagagagctggtgcctatgttttggggtgtttgcatctgctgttcctctacagggat

SEQ ID NO: 290463 - DNA, 201 bp, Homo sapiens
atgtgccaccatgcccagctaatttttaaaaatttttgttgggacagggtcttgcttggttgctcaagctgctatcaaactactgggctcaagtgatcctyccatcttggcttcccaaagtgctgggattataggcgtgagccaccacacccagcctcaaatgcatttttaaatggtttaatttctttctggctttaaact

SEQ ID NO: 290464 - DNA, 201 bp, Homo sapiens
atagacaggttaaataatttgtgtaagaacacactagttagaggttgggctgacttttaaacccaggttcttctgactccaaattgagctcctgccgaggyagaaggaaaagcagaagcttcatttacaatagtttacggagaggatgcgggtgtttgcgggactctccgtaacttctcatcacaggattctatccataat

SEQ ID NO: 290465 - DNA, 201 bp, Homo sapiens
tttttgttttttgtggttttttggattgaaggcaaaatattacacgatggctaaactgtacacttcccttcggttgaggtttgaagtcaacaattaatgcytctcttcactttctggttctaaactaagttaaaaaaataggtgcagatggaaattaaaatataatttaacttgtattcctcatcaagctagattgaagaa

SEQ ID NO: 290466 - DNA, 201 bp, Homo sapiens
tagagatagggtttcgccatgttagccaggctggtcttgaactcctgacctcaagtgacccacccaccttggcctcccaaagtgctgggattacaggcatragccatcgctcccagccaacatttttcactcttatgtgacatattgccacccctcccccatcccccgttttccctctttaaggatctgtgagaggtggct

SEQ ID NO: 290467 - DNA, 201 bp, Homo sapiens
agccagttgagagaaagtagagcttgcaggaagctgacaggaatgggaacaaagaggtcaacataagggaagatgactctcacgacagaatcctaacttcycagcaaggtgagggcaggagggtacttgggggccttggaaagctggagaagactcttcacagcatctaagagacttatgacaaaggctcgtaggttactt

SEQ ID NO: 290468 - DNA, 201 bp, Homo sapiens
tctaaagagggtcccaaaatccacattaagccatattggaatggaaagagccaaaagaagccagttgagagaaagtagagcttgcaggaagctgacaggartgggaacaaagaggtcaacataagggaagatgactctcacgacagaatcctaacttctcagcaaggtgagggcaggagggtacttgggggccttggaaag

SEQ ID NO: 290469 - DNA, 201 bp, Homo sapiens
aaggtgggaagatcacttgagtccagtagtttaagatgagcacgggcaacatagcaagaccctatctctaaaaaacattaaaaaattagctgggtgtggtrgcacacctgtagtcccagctacatgggaggctgaaatgggaggatcgcttcaacctgggaggttgaggctgcagtgagccatgatcatgccactgtactc

SEQ ID NO: 290470 - DNA, 201 bp, Homo sapiens
aggaagaaggcagtgtttaccctcaaggtgttgcttgtctgaccaagtaagacagtgccgtgtaatgagtgcaacaatacgggtattacaaggtattcagraggcagagagaagcaaaggatgaattctttcttgcatagagggggataatgagggcttcttggaggaagtgatgctggtgctgatacctgaaggacaagc

SEQ ID NO: 290471 - DNA, 201 bp, Homo sapiens
gccaggggagtttgaggcagcagtgagccctgatggcaccactgtactccagcctgggcgacagcataagactctgtcacgcacacacacaaaaaaccccmaaacagaacaaaggttctgggcggacatatcttttggaaggtcaccattcaaacctctacatagttttagagtgaaatttctgagttaaccatttcagag

SEQ ID NO: 290472 - DNA, 201 bp, Homo sapiens
gcgtgagcctgggaggtcgaggctgcagtaagctgagactgtgccactgtactccagcctgggagacagagtgagaccctgtctgaaacaaacaaacacaraccagcatgagagaagtggaatgtaggccattgagaagatccagaatggtttggggagagttaggaatttgtaaaggggatgagggcttcaatgagtaaa

SEQ ID NO: 290473 - DNA, 201 bp, Homo sapiens
cctgctccaggttcacataagtataaggatttggggctgtggacttggaaggaaatggtcccacggtatgagagggggctcatgacttcgctcaactaggmgaggataaacggccacaggtgctgtgcctgccacatggctcagtgtgtgggggtttagcaggtttagttttaagaaccagtttcttgcaataaggccttt

SEQ ID NO: 290474 - DNA, 201 bp, Homo sapiens
acactgtcaatatagagatgccacagtcatgatccctgccttcagggacactgaactctagagggatgatagactcagataatgtatcaaaaatgggttaygtctatagtgggtaccatggaatcacaagagtaaaaaaacacctaactcctccaggaagggagaaataataagggcacagtcagggaaggctttatggtg

SEQ ID NO: 290475 - DNA, 201 bp, Homo sapiens
accccatgtggtttatgccccaaggatgaagggactctgccccttcagctttatcaacttccctcttatagcgcagggattagagcagccttgtcagtgarggaataatcaaacaactggctgattggatttagataccagctatttacaggagttatctgggacacccagctgcccagcacctgaatacctgaggaccta

SEQ ID NO: 290476 - DNA, 201 bp, Homo sapiens
cactggagtgcaacggcgcaatctcagctcactgcagccttgacttcctgggctcaagtgatcctcccacctcagccccatcaagtagctgagactacaggtatataccaccatgcctggctaatttttgtatttttttgtagggacacggtttcaccatgttgcccaggctggtctcaaactcctgagctcaagcaatcc

SEQ ID NO: 290477 - DNA, 201 bp, Homo sapiens
gcagcattaatgcggctgcacacccagcaggcattgccatccatcagtctgtcagcctctctgggggccgctggagtgtaaattaatctggaggtaccaaytccactgctgaattcttcctccaatatgtttgtgtctgaaattgttccctgggcccccagagaagataaggcagtcacttctgccttctgccatcaaagc

SEQ ID NO: 290478 - DNA, 201 bp, Homo sapiens
tacaggcacctgccaccaggcctggctgatttttgtattttcagtagagacagggtttcgccatgttggccaggctggtcttgaactcctgacctcaggtsatccgcctgcctcagcttcccaaagtgctgagattacaggcacctttttcaatattgaatgattcactttgtctcatttaatatcttttttcctaggatt

SEQ ID NO: 290479 - DNA, 201 bp, Homo sapiens
acagagctcagcctctgggactattgaagaacattctgctaacttaggtattggagagtaatcaaaccacatgaggaaagactcatagctgctaactctcstatcttgatttgtcttctttccaataaaagtgtgggggccgggagtagctcattcctgtaatcccaacactttgggaggccaaggtgggaagatcacttg

SEQ ID NO: 290480 - DNA, 201 bp, Homo sapiens
caactatgaattggtcccttcttcttttctttctttctttttttttttttttgttgtttgtttgtttttgtttttgagacagtttcgctctgttgcccagrctggagtgcagtggcatgatctcagcccactgcaacctccacctcctgagttcaagctattctcctgcctcagcctcccgagtagctgggattacaggca

SEQ ID NO: 290481 - DNA, 201 bp, Homo sapiens
agatcgagatcatcctggccaacacggtgaaaccccatctctactaaaaaaaaaaaaaaaaaaaatacaaaaagttagccgggcgtggtggcaggtgcctrtagtcccagctactcaggaggctgaggcaggagaatggggtgaacccaggaagtggagcttggagtgagccgagatcgtgccactgcacttcagcctggg

SEQ ID NO: 290482 - DNA, 201 bp, Homo sapiens
tactctttccccactagcctgaaaactcccctagagaccaggaaccttgtctatcatattcatgactgtatccctgaagctcagaaaggtgtctggcacamgatgggtgctcaataaatatgcgttgagtgaatactcttagcgatgagggatgattaggaattgatgagtctgttcggggctacaaacttgtccacccct

SEQ ID NO: 290483 - DNA, 201 bp, Homo sapiens
agatcttcattttttcctttacttattcgacgtgttatttccatgtatatcagctagagaatgcaaagtcaggaagtattctgaagccaacagcagttaastttcagatccatttctgagcctgggccctacccaggactgttgttaatttaaagataaattcatccatgaccgtgctctatcttacaattctgggcactg

SEQ ID NO: 290484 - DNA, 201 bp, Homo sapiens
gtgggccgggcgtgatggctcacgcctgtaatcccagcactttgggaggccgaggcaggtggatcacgaggtcaggagatcgagatcatcctggccaacayggtgaaaccccatctctactaaaaaaaaaaaaaaaaaaaatacaaaaagttagccgggcgtggtggcaggtgcctatagtcccagctactcaggaggctg

SEQ ID NO: 290485 - DNA, 201 bp, Homo sapiens
gagctggtgcctatgttttggggtgtttgcatctgctgttcctctacagggatcattcttcccccagagcatctcaggtctggctacttctcatcatgcakgtcccagctccaatgtcacctcctcaaagagaccattctcagccacctagtctaggctggctcacctcctcaccactctctatctttcctcaccaccttg

SEQ ID NO: 290486 - DNA, 201 bp, Homo sapiens
tcagactgaggttaagtgacttgcctgaggctgcacagtagtaagtagcgaaacagaaattcagacttttcccttgtacgatcttcatttgaaaaaaaaaatgcacttgacccaagaagtcaaagggtgcaacaaggatataatttgtatttccaaggattaacattacaaaggattaatttaaacattaattcataatta

SEQ ID NO: 290487 - DNA, 201 bp, Homo sapiens
gtcctagtttcctcagtacaaaaactggaatagcatgagttcctactttgtagggttattgtgaagatcaagtgagatgatttagagtttagaacagcaartggcccacagtcactgcacaataagtgtcagctattgtcttgtttatgtccaaagcatcgatgaccacgtgtatggctgatgactgctgcgtacccattt

SEQ ID NO: 290488 - DNA, 201 bp, Homo sapiens
aaaatacaaaaattagctgggcgtggtggcgtgcgcctgtattcccagctacttgggaggctgaggaaggagaatcacttgaaccttggaggcagaggttkcagtgagccgaaatcatgctgctgcactccagcctagacaaaaagagcaaaactccatctcaggaaaaaaaaatgttgtttcagatcactttagttccac

SEQ ID NO: 290489 - DNA, 201 bp, Homo sapiens
tggggagatatgagagatgccatttaataatcacattaataatcagactttggggttttctacaaggattttctttttaaaggagcattgctttattttttctctttgaaaccattgaaatgtttttcaccataatagaatgatactttttctcatattttacttttagggatatctaataaaccagttatttataagctt

SEQ ID NO: 290490 - DNA, 201 bp, Homo sapiens
acctatagggatgctgtttctaaatacattcacttcatgattttacctctgtttacagtcgaatcacaaaataaagtggttgccgggagcgggggctcacmcctgtaatcccagcactttgggaggccaaggtggcggataacctgaggtcaggagttcgagaccagcctggccaacatggtgaaaccccatctctactaa

SEQ ID NO: 290491 - DNA, 201 bp, Homo sapiens
gcccatgaaggccgaggtgggaggatcgcttgaggccaggagtttgagaccagcctgggcaatataacgagaccccatctctacgggaaaaaaaaaaaaaaactagccaggcatggttgtatgtgcatacagtcccagctactcgggaggctaaggtgggaggatcacttaagcttctaggagttcaaggctgcagtgagc

SEQ ID NO: 290492 - DNA, 201 bp, Homo sapiens
gcaaggtgagtgtgtgtgccaaccagaggcttctctgtctcagttcctccatctgcacactgggactaatcatattgactgccacatagggttgctgtgargattcaatgaacaattacacataaaagtgctcgaaacatctgtggcgcatgagaggtattaaaagcctgttagttgtcattattggccattgatttcttc

SEQ ID NO: 290493 - DNA, 201 bp, Homo sapiens
gaaactactatggaaggcagtttcagcatagctatgaaaaattcgaactctgagatcagaaggaatacgttggaatctcagctccaccacatgcaaggtgwgtgtgtgtgccaaccagaggcttctctgtctcagttcctccatctgcacactgggactaatcatattgactgccacatagggttgctgtgaagattcaat

SEQ ID NO: 290494 - DNA, 201 bp, Homo sapiens
accacgcccgggtaatttttgtatttttaatagagacgggccttcaccgtgttggccaggctggtctcaaactcctgacctcaagtgattcacttgcctcrgcctcccaaagtgctggaattacaggtttgagccactgcgcccagcctagtccttaattttttactgaagatgctcctctgctggggataaagtggggaa

SEQ ID NO: 290495 - DNA, 201 bp, Homo sapiens
aagcatgaactcaaaatggagataaagttgcagaaactactatggaaggcagtttcagcatagctatgaaaaattcgaactctgagatcagaaggaatacrttggaatctcagctccaccacatgcaaggtgagtgtgtgtgccaaccagaggcttctctgtctcagttcctccatctgcacactgggactaatcatattg

SEQ ID NO: 290496 - DNA, 201 bp, Homo sapiens
agcatacaaagacagatcttattggagagagagagagagggagagaagcccggattccaagcatgaactcaaaatggagataaagttgcagaaactactayggaaggcagtttcagcatagctatgaaaaattcgaactctgagatcagaaggaatacgttggaatctcagctccaccacatgcaaggtgagtgtgtgtgc

SEQ ID NO: 290497 - DNA, 201 bp, Homo sapiens
tgccatcccattttatatcagcttacctttttcacccactttgaagagtttttaagaattgaggtttaactttgcatatagcagcatgcacaaattggaakggtacagcttgataaatttttacatctgcacacacctgtgtaaccagtacccagatcaaggtctgggacatgctatcacctcagaaagccccccatgcac

SEQ ID NO: 290498 - DNA, 201 bp, Homo sapiens
tgccgataataccaaaccctatatataatgtttttttcctatgtgtgtgtgtgtgtgtatatatatgtgtatatatatacacatatatatacacagatatrtgtatatatatgtatatatatacatatatatatatacacacacacacggacatatatatattgacatatatgtatatatacacacaaacacacacacata

SEQ ID NO: 290499 - DNA, 201 bp, Homo sapiens
agatggctttcttccacctcagggtgctccctagcctcagtgcttgctgctgggtgaaggaaccccagatcaaccctgaggctgatggagagatgagtggrcattgaagcaaggcctcacggtggcacaagggctttttaggaagcatacaaagacagatcttattggagagagagagagagggagagaagcccggattcc

SEQ ID NO: 290500 - DNA, 201 bp, Homo sapiens
gaagacccactgcagaaaatggtccctggaatttcccttggttaacagaggcaatgcagagggtgtctatgatgacagggcttcccaagcttgcctttaayagggctgatggtcaattaaagggagatggctttcttccacctcagggtgctccctagcctcagtgcttgctgctgggtgaaggaaccccagatcaaccct

SEQ ID NO: 290501 - DNA, 201 bp, Homo sapiens
tgcctttatgtatcacagttatgagtgtataaaagtatgaaatataaaatatcatacatatttaataatttaatacccttaatgtatatttaacatcttayaatatatggtagaatatatagtatatttaatatagtaatagataaatatgtatttaatataattatatatagacagacagggtcttagtttgtcgcccag

SEQ ID NO: 290502 - DNA, 201 bp, Homo sapiens
tagacaataccagagtatcatgtaaaaattttgtcttccttttaatatccaagtacacaaatacacagaccagttattgtgcatatgaagtattttctgayttttttaacctaccaatttacactggcattttccctatatctctagcattttctaaaatgttattataatcacagcatagcagttcattaaatgaatgtg

SEQ ID NO: 290503 - DNA, 201 bp, Homo sapiens
gtatcacagttatgagtgtataaaagtatgaaatataaaatatcatacatatttaataatttaatacccttaatgtatatttaacatcttacaatatatgrtagaatatatagtatatttaatatagtaatagataaatatgtatttaatataattatatatagacagacagggtcttagtttgtcgcccaggctggagtg

SEQ ID NO: 290504 - DNA, 201 bp, Homo sapiens
accctctagggttccccaccagccccacccagcccactgcactcatctgttacctgcctggcccacgtaagtacctcaaccagcaactctgacgtggaccrctgggtgatggactgcctcattgaggatggggagagagcagccctggacctgagaatacaagattctccctaacatcatcccagagaacccaaaacctgg

SEQ ID NO: 290505 - DNA, 201 bp, Homo sapiens
cacctgatatgagccaggcactgtgctaggcatggaagtaatgaagaggaagaaggcagtgtttaccctcaaggtgttgcttgtctgaccaagtaagacaktgccgtgtaatgagtgcaacaatacgggtattacaaggtattcagaaggcagagagaagcaaaggatgaattctttcttgcatagagggggataatgagg

SEQ ID NO: 290506 - DNA, 201 bp, Homo sapiens
tggttcccaatgtgttacagttgcctacagtattcaggacagcaacatgctgtctaggtttgtagcctaggcacaagactataccatataatatgggtgtrtagtaggctctaacatctaggtttgtgtaagtacattctgtgacgttcacacaacaaagttgcctattgtcacatttctcagaacatatctctgtcttgg

SEQ ID NO: 290507 - DNA, 201 bp, Homo sapiens
tcgccctgtgaggctctcccagagctgagttgataaagtggtcaggactcctctgcagctgagagtgtttggagcctgagggtcaatcccaaatcacatasagggaagggcacaggggccaaggctgcacgaatgtgtcctaatgggacaatcctaatagtggccagcattgacagaacactcacctatacagtcacgtat

SEQ ID NO: 290508 - DNA, 201 bp, Homo sapiens
cagtgcacaaaagcttttcaagtgtctgcatgtgccatgtttgcgactatcctgttggccaaagcaagtctggagccaagttttgagtcaacctgggaggrcactaccagaggggttaatacaggaaggggacttcatgtagccatttttgcaaacagcaggccccttcaggaccataagccaagctagaaaactgttcct

SEQ ID NO: 290509 - DNA, 201 bp, Homo sapiens
cagagtgcttgagatgatggaggccccatctctgagtgatctcccattcttcagcaggcttgcctgggcttactcaatggagatcacagggttccgggaayagcaggagggcaagcgtcagtgcacaaaagcttttcaagtgtctgcatgtgccatgtttgcgactatcctgttggccaaagcaagtctggagccaagttt

SEQ ID NO: 290510 - DNA, 201 bp, Homo sapiens
tcatctgttacctgcctggcccacgtaagtacctcaaccagcaactctgacgtggaccgctgggtgatggactgcctcattgaggatggggagagagcagycctggacctgagaatacaagattctccctaacatcatcccagagaacccaaaacctggacttatttggcaatcagcttccccacctagagccctcatgtt

SEQ ID NO: 290511 - DNA, 201 bp, Homo sapiens
cagcaggcaaaaagagagcttgtgcagagaaactcccccttttaaaaccatcagatctgtgagactcatttactaacatgagaacagcgcaggaaagaccygccgccataattcaatcacctcccactgggttcttcccaccacatgtgggaattgtgggagttacaattcaagatgagatttgggtggggacacagccaa

SEQ ID NO: 290512 - DNA, 201 bp, Homo sapiens
gtttaatggacttacagttccacatggctggggaggcctcacagtcatggtggaaggcaagaaggagaaattcgtgtcttacatggatggcagcaggcaamaagagagcttgtgcagagaaactcccccttttaaaaccatcagatctgtgagactcatttactaacatgagaacagcgcaggaaagacccgccgccataa

SEQ ID NO: 290513 - DNA, 201 bp, Homo sapiens
gagacttcataagcctggagccagccctcagtgaataacagacaaagatgtggaagataaatacaacagctttcttgttcttcagttgggacaactctagsttggatcccacactgccttccagagctcccagtgggaccaagcctcagtttcccacagtggtaactggcttaacagcaccctctttattggcttcctttc

SEQ ID NO: 290514 - DNA, 201 bp, Homo sapiens
ctcttcctcaaacatgtcaggttcactctgcctcagagcctttgtactcagccctcttactggaattctctttccccagaaggccacactctccctaacarctctatttaaaatgacaattgccctcttcccttgtattagtctgttattgtgctgctaatgaagacctagctgagagtgggtaatttataaaggaaagag

SEQ ID NO: 290515 - DNA, 201 bp, Homo sapiens
gcctggcaacagagcaagactccatcaaaaaaaaaaaaaaaaaaaaaaaaagtctggaaggatctacaacacactgttaatactgtttgtccctccatggkgggaatgattatacaagatcttcattttttcctttacttattcgacgtgttatttccatgtatatcagctagagaatgcaaagtcaggaagtattctgaa

SEQ ID NO: 290516 - DNA, 201 bp, Homo sapiens
tgctccacagttccttcccgtgttgagtttggaaggttctccgctctatctgaaagcccctatcctcaagttcgagtgacagaaaacctcaaatgtatagratgaacattctcttagtagagtgggaattgaagtctcaaagtaacatataaacttaaaaaccaaaaattcatgcctggctcctgcagcatgtaaactcac

SEQ ID NO: 290517 - DNA, 201 bp, Homo sapiens
agagaggacgtcccttttgtaaaatctcaggatgcaaaataccttttcttccattctggaaaacatgacgtgaagcttaaaaacatgacatgggctgggcrtggtggctcatgcctgtaatcccagcactttgggaggctgaggcaggtggatcacgaggtcaggagatcgagaccatctggttaacagagtgaaaccctg

SEQ ID NO: 290518 - DNA, 201 bp, Homo sapiens
cacagggttacaatggatttcttcattattcttactggtggaaagtcagcagtattctccacaattaccacatctacatagattgtcacgtatctgtagaygtcagtgtcacaaaagtcagagataaagttgttttcactagggaatcagcaatttatgagacagtggcacaaggcttttctttattttaattttgaggct

SEQ ID NO: 290519 - DNA, 201 bp, Homo sapiens
aatgttggggtatcattactataagaaggatgaatagttggtagatggcacaaataatagacatacattacagaagaattctccacttaattctgcaaaarcactctgcttcctaagtatggtagattgtgaactggctcagcagggattccatgtgaaactgggcaggttttgtactgcacaaccatgcatacctaaggg

SEQ ID NO: 290520 - DNA, 201 bp, Homo sapiens
ttccttttggtccttcataaaatccccacatcccttaggatatttttacgtagtcttggtttccaaactgagaaaggaatcgggttctgactaatctcacraaagaaattatagaaacatttttttctctactgaacatgccatcccattttatatcagcttacctttttcacccactttgaagagtttttaagaattgag

SEQ ID NO: 290521 - DNA, 201 bp, Homo sapiens
agcttctgggttcaaacctttgctttgccacctttgaactggatggccttgggtaacttccctaatttcagttttcccatcagcaaaatagagaaaaaaawatatatatatatatattatatatatatatatatgtctactctcagttttatcccttgtagaaagttagtcaggctctgatcccacctagacatctatctt

SEQ ID NO: 290522 - DNA, 201 bp, Homo sapiens
caaaatttaaacagtgacataaagaagaaagatgagccccaaggaagtctaatcacgtcttcctccaatgtgcacagggcatgggaaggtatacacagtamctttgcacgttatcatcacacaggactccaacactctattccaatgacccaaggagaaataaatattcaagggtgttttttggtgggatagagaaaattt

SEQ ID NO: 290523 - DNA, 201 bp, Homo sapiens
tgcctacagtattcaggacagcaacatgctgtctaggtttgtagcctaggcacaagactataccatataatatgggtgtgtagtaggctctaacatctagktttgtgtaagtacattctgtgacgttcacacaacaaagttgcctattgtcacatttctcagaacatatctctgtcttggagtgacacatgtctgtacata

SEQ ID NO: 290524 - DNA, 201 bp, Homo sapiens
atacacaaggtcaggtgtggtggctcacacctgtaatcccagcacttggggaggccgaggtgggaggatccattgagcccaggaatttgagagcagtctgracaacatggtgagacctcatctctacagaaaatgtttaaaaattggccaggcatggcggtgcacacctgtggtcccagctactagggaggctaagttggg

SEQ ID NO: 290525 - DNA, 201 bp, Homo sapiens; identical to SEQ ID NO: 59968

SEQ ID NO: 290526 - DNA, 201 bp, Homo sapiens
taggcacaagactataccatataatatgggtgtgtagtaggctctaacatctaggtttgtgtaagtacattctgtgacgttcacacaacaaagttgcctawtgtcacatttctcagaacatatctctgtcttggagtgacacatgtctgtacataatattgcattcctttcttccctcccaagttcaaaaccagtcgagtc

SEQ ID NO: 290527 - DNA, 201 bp, Homo sapiens
tggtggcacacctgtagtcccagctacatgggaggctgaaatgggaggatcgcttcaacctgggaggttgaggctgcagtgagccatgatcatgccactgyactccagcctgggtgacagagtgagaccttgtctctaaaaatgaaataaagttaaattaaaattaaaaactgggggaaaaaaaccttcagtaacaaagta

SEQ ID NO: 290528 - DNA, 201 bp, Homo sapiens
tttcactggatcaagagcggaagacaatgcaacttctttgtgtgcttttaactgtgtaaaagaagacccactgcagaaaatggtccctggaatttcccttkgttaacagaggcaatgcagagggtgtctatgatgacagggcttcccaagcttgcctttaatagggctgatggtcaattaaagggagatggctttcttcca

SEQ ID NO: 290529 - DNA, 201 bp, Homo sapiens
gggttagttgggctcactgaccacccaaaagcatcctccctgtaagccaggtggaaacactgaaggatatgaagcgggggcctaacagggtcaaaaaaaaagaaataaatacattatggagcattttagaaggtggtaagtgatgcagagaaaaacaacaagaattgagggtaaggggtaccgagggaagggtgttccaat

SEQ ID NO: 290530 - DNA, 201 bp, Homo sapiens
tggccaccagccaccatgaacactccccaagtgagaaagccagaagtgtctgctctaggtggaggctaaaggacctctcacactgccttccaaatggtggyatagttatttgggagggagaattttttcagatttcagacatttttgtgccaccttcatgacatttgccaaagcccagcatgacctctactattattttct

SEQ ID NO: 290531 - DNA, 201 bp, Homo sapiens
aagcacgtgcgcgcgcgcgcacacacacacacacactaaccaatttgacaatatggtgtgcgtgtgtgtgtgtgtgtgtgtgtgtgtgtgtgtgtgtgtgtggggcagaggaagggttaattgcaacaaaaaccaaaatgttaaatatttgaataaatatgcagaatgaatttgtatgaaggctgggcacagtagctcatg

SEQ ID NO: 290532 - DNA, 201 bp, Homo sapiens
accctatcacttgttacaggagcattttaggtggagaagatgctgacagccccagtactttccagctacacacattgttaagcctgttttggatgttaacrtgtgaaaataccactgaaaggttctaagaagcgtctttaacatctctgaaattagcatgtatcttatgattgatggtgtcttagattgaagatataggat

SEQ ID NO: 290533 - DNA, 201 bp, Homo sapiens
caagcacgtgcgcgcgcgcgcacacacacacacacactaaccaatttgacaatatggtgtgcgtgtgtgtgtgtgtgtgtgtgtgtgtgtgtgtgtgtgtgtggggcagaggaagggttaattgcaacaaaaaccaaaatgttaaatatttgaataaatatgcagaatgaatttgtatgaaggctgggcacagtagctcat

SEQ ID NO: 290534 - DNA, 201 bp, Homo sapiens
gacacatgtctgtacataatattgcattcctttcttccctcccaagttcaaaaccagtcgagtcaagagtcagagtcaatggccatcaaaatgtcagctayagcaaactatgcatccgacaaaggactagtaaccagaatctataaggaaatcaaataatcagcaagaataaaacaaataatctcatcaaaaagtgggcta

SEQ ID NO: 290535 - DNA, 201 bp, Homo sapiens
cgcaagcacgtgcgcgcgcgcgcacacacacacacacactaaccaatttgacaatatggtgtgcgtgtgtgtgtgtgtgtgtgtgtgtgtgtgtgtgtgtgtgtggggcagaggaagggttaattgcaacaaaaaccaaaatgttaaatatttgaataaatatgcagaatgaatttgtatgaaggctgggcacagtagctc

SEQ ID NO: 290536 - DNA, 201 bp, Homo sapiens
ggcagaggggagaattcgcgcaagcacgtgcgcgcgcgcgcacacacacacacacactaaccaatttgacaatatggtgtgcgtgtgtgtgtgtgtgtgtrtgtgtgtgtgtgtgtgtgtgtggggcagaggaagggttaattgcaacaaaaaccaaaatgttaaatatttgaataaatatgcagaatgaatttgtatgaa

SEQ ID NO: 290537 - DNA, 201 bp, Homo sapiens
tctgcctataaaaccaaagaaaaccaactgacaacctgctggaactaataaaagattttggcagaggggagaattcgcgcaagcacgtgcgcgcgcgcgcrcacacacacacacactaaccaatttgacaatatggtgtgcgtgtgtgtgtgtgtgtgtgtgtgtgtgtgtgtgtgtgtgtggggcagaggaagggttaat

SEQ ID NO: 290538 - DNA, 201 bp, Homo sapiens
aggataaaggcagagggtggatggggtgggggtgatgagcacactctgctggggggcatcccagttggaaatccacctcagggatcggacactgagtgcaygtgacccgagtgagctggccccactttacatgagattagctgtgtctgaggtgtggcaagggaaggaaaggagctcggagctaatgagctgagttcctgg

SEQ ID NO: 290539 - DNA, 201 bp, Homo sapiens
atctccacccctctttattgtcattcatgtacatgcccacagactcgctgtaggatgttgagtttgtgatgctgtcactgcttctctgtaggatagaagckctctgcaacttggtcattgcctccagctcccaatgacgtattcagaacaccaagagaagagcccatacacttctcttggcatcagctacctgaattgggt

SEQ ID NO: 290540 - DNA, 201 bp, Homo sapiens
cacacccacacatgtgcacctgcatgcacaattgcagcatctatgcagacttaggcctttatacagaaattccctgtcttggtccaggcgaacgtcacacrgtatgattaaatgaaaccattgagtccataaacccccccccatttgtcttgcagcactctgtcagccttgcagcatgctgtagatataatacttagtgcc

SEQ ID NO: 290541 - DNA, 201 bp, Homo sapiens
gaagcagcagttttaggaggctccactggtagagtctacaggggaatcacgtgtaaatgctgtcccttgctgatttatgatgggcctgtttgtgatcctcygaacagcagtgggacctacaatgaaattagcaatttcctaacaggtactaaacaagcagaactgcaaatgagatttatgttgttgttggaacagcccgga

SEQ ID NO: 290542 - DNA, 201 bp, Homo sapiens
aacacttggagaaaatctgaacatggagagtaggattattattttaaaacataagtttatagtaattaaaagtatagtactgctgtggaaagatcggtggkatagaagagaaaatccattttaaaaatagagtttactatatggcaaggtggcatttgaatcagtgggaaagacttatttaacaaatagtgttgagacaac

SEQ ID NO: 290543 - DNA, 201 bp, Homo sapiens
ctcaatggcaattacctgccaccctctcccttcatcctttgtggttcccaacactcagtgctccacagttccttcccgtgttgagtttggaaggttctccrctctatctgaaagcccctatcctcaagttcgagtgacagaaaacctcaaatgtataggatgaacattctcttagtagagtgggaattgaagtctcaaagt

SEQ ID NO: 290544 - DNA, 201 bp, Homo sapiens
ttaagggcaaactaaccaggcacctgttatacttgcaatcccagctgttcaatatagtcatgttataccattgctatctcacacatttctgttacctgccyggctcctgcagcatgtgagcttcacccgccctggactattggatcatttggactcagagcatttgatgtgtgggttctgtagcttctactgctgtcctgt

SEQ ID NO: 290545 - DNA, 201 bp, Homo sapiens
aggatgcaaaataccttttcttccattctggaaaacatgacgtgaagcttaaaaacatgacatgggctgggcgtggtggctcatgcctgtaatcccagcamtttgggaggctgaggcaggtggatcacgaggtcaggagatcgagaccatctggttaacagagtgaaaccctgtctctactaagaatacaaaaaattagcc

SEQ ID NO: 290546 - DNA, 201 bp, Homo sapiens
atcatacatatttaataatttaatacccttaatgtatatttaacatcttacaatatatggtagaatatatagtatatttaatatagtaatagataaatatrtatttaatataattatatatagacagacagggtcttagtttgtcgcccaggctggagtgcagtggtgtggtcgtagctcaatgcagcctcgaattcctgg

SEQ ID NO: 290547 - DNA, 201 bp, Homo sapiens
atttgtaaataatgtccaaaaaaaagtcctgctaggccgggcgcggtggctcatgcctgtaatcccaacactttgggaggccgaggagggcagatcatgakgtcaggagttcgagaccagcctgaccaacatggtgaagccccgtctctactaaaaatacacaaaaaattagccgggcatggtggcgcatgcctgtaatcc

SEQ ID NO: 290548 - DNA, 201 bp, Homo sapiens
gatcccaggaagttgaggctgcagtgagccatgaccctgccactgcactccagcctgggtgacgagtaagaccctatctcaaaaaaaaaaaaaaaaaaaaaagaggaaaagaaaaaaccctcatatgcacaatattagaaagataaaatgcagattttttgaaaaattaaattgcacttattaaaagttgaaacctcattt

SEQ ID NO: 290549 - DNA, 201 bp, Homo sapiens
ttgggaagctgaggcaggaagatcacttgagcccaggagtttgagagcagcctaggcaacatagggagaccctgtctccacaaaaaaaaaaaaaaaaaaaatagccgggcatggtggtacacacctgtagtcccagctactcaggaggctgaggtggcaggatcacttgatcccaggaagttgaggctgcagtgagccatg

SEQ ID NO: 290550 - DNA, 201 bp, Homo sapiens
attttgcatgaaatctttatttcttacatcacattttaaaaatgatacacaaggtcaggtgtggtggctcacacctgtaatcccagcacttggggaggccraggtgggaggatccattgagcccaggaatttgagagcagtctggacaacatggtgagacctcatctctacagaaaatgtttaaaaattggccaggcatgg

SEQ ID NO: 290551 - DNA, 201 bp, Homo sapiens
tttgggaagctgaggcaggaagatcacttgagcccaggagtttgagagcagcctaggcaacatagggagaccctgtctccacaaaaaaaaaaaaaaaaaaaatagccgggcatggtggtacacacctgtagtcccagctactcaggaggctgaggtggcaggatcacttgatcccaggaagttgaggctgcagtgagccat

SEQ ID NO: 290552 - DNA, 201 bp, Homo sapiens
acctggccagggcccttctgaaggttcttttttctccctgtcttttttaaaaaataattttaacttttattttagattcaggaggtgcacgtacaggtttkttacctgggtatattgtgtgatactgaggtttgggatacaaatgattccgtcacccagagagtgagcatagtacacaacagtcagtttttcaacccttgc

SEQ ID NO: 290553 - DNA, 201 bp, Homo sapiens
gtggaggataaagatttggaacatctcctacggggatgaagggggcagccctcatgggcaggatctgggtctgttttgttcactgcttatgtcttcaacatccagcattgcttggaatgcagtgaatactaaggaaactctccccagcttaaggttcttcacttaatcacatctgcaaaaactgcttttcttaatgaggtc

SEQ ID NO: 290554 - DNA, 201 bp, Homo sapiens
gtggatgcagaatgggaggggtctgagcgtgtgcaccccagctccctgacatattcctcaatctgaagtccagccacattgctcttcctcaaacatgtcargttcactctgcctcagagcctttgtactcagccctcttactggaattctctttccccagaaggccacactctccctaacagctctatttaaaatgacaat

SEQ ID NO: 290555 - DNA, 201 bp, Homo sapiens
ctggtccgaggggatttctgacttgggcatgtaggggtgattggcagtggggtggatgcagaatgggaggggtctgagcgtgtgcaccccagctccctgamatattcctcaatctgaagtccagccacattgctcttcctcaaacatgtcaggttcactctgcctcagagcctttgtactcagccctcttactggaattct

SEQ ID NO: 290556 - DNA, 201 bp, Homo sapiens; identical to SEQ ID NO: 59967

SEQ ID NO: 290557 - DNA, 201 bp, Homo sapiens
tgaagtataggataattagatcactatattattacaaatataattctaagagagcttattttggaatcctttttttgtttgtttgtttgtttgtttgtttkaaaggaagtgagctattctcgggaagtagtcatttttataaggatgtgagagtagaaaaagacaaacttgcagctagacagccagggttcaagtcccagc

SEQ ID NO: 290558 - DNA, 201 bp, Homo sapiens
atgttagccagaatggtctcgatctcctgaccttgtgatccgcccgcctcggcctggcaaagtgctgggattacaggcgtgtgccaccgcgcctggctccrtctctggcttttcttagcattagacaccactgaccatttgctccttctggaaactatatggtctgttgttgcctgccacttcatctgagtattagtttgg

SEQ ID NO: 290559 - DNA, 201 bp, Homo sapiens
ccatttaccttgatgtgattattatgcattgcatgtctgtatcaaaatatctcatataacccataaatatatacatctagtatgtgcccacaaattttttytaaaaaattttaaagaagagctcttggactatcaaaaaagatgtacaagcatgcatgttttgtttgtgatgtgagttgggcttttttccagaaaattcag

SEQ ID NO: 290560 - DNA, 201 bp, Homo sapiens
gagaaaaaattcttttattgggtgctgatttaaaaatcaaaacataccaaaaatttatagttctatctagaaaaatgaggaaattgggcaacactggaccygtattcctgcttgttaatgatcagctggaaagaagtggtttcttctttagatggggcacaccctctagggttccccaccagccccacccagcccactgca

SEQ ID NO: 290561 - DNA, 201 bp, Homo sapiens
aaaagctgctgcacaggtaactctgagagttatgtgaaattttctttcctgggtagcagtaacttcagtctttttcttcaattcaagtcaggatattgtakgcttttttttttgtttttgagatgacatacagtttttttccccttttacctaaagattctgatatcagccacccacctgctactcttgctagttagaatt

SEQ ID NO: 290562 - DNA, 201 bp, Homo sapiens
aggtgtatggtagctgaatagtttggaccagaatcctggctggggagaaaattgttatgaaaagctatcgattaggtgtccacagctgctgaaactcaacygcggaagcttctggagctgcatttatgaaagggcagggggcatggagaagggcaagaatgtgatggggcgaggaggcaatctgtttaaaggacaatggtt

SEQ ID NO: 290563 - DNA, 201 bp, Homo sapiens
ttcctatgtgtgtgtgtgtgtgtatatatatgtgtatatatatacacatatatatacacagatatatgtatatatatgtatatatatacatatatatatayacacacacacacggacatatatatattgacatatatgtatatatacacacaaacacacacacatatatgtatgcacacacacgtatctatgataaagttt

SEQ ID NO: 290564 - DNA, 201 bp, Homo sapiens
gccgataataccaaaccctatatataatgtttttttcctatgtgtgtgtgtgtgtgtatatatatgtgtatatatatacacatatatatacacagatatakgtatatatatgtatatatatacatatatatatatacacacacacacggacatatatatattgacatatatgtatatatacacacaaacacacacacatat

SEQ ID NO: 290565 - DNA, 201 bp, Homo sapiens
cagcctactgtctgactaccctgtcttctgattcttgcttcacggaagcaacagattttcaattatttgggctctctctccacttctatgttcctccataytactaagtaacctgtttatattgagaagtcttacaaatcacaaaaaaaggatagccttgggagttaaaattgcagctgtcagttactcaggtaaaagata

SEQ ID NO: 290566 - DNA, 201 bp, Homo sapiens
agagaggacaatcagtagtcagtcctaaacaatatttttgacatctctgcatggccagatctcctagttatagctttttttaaaaaagaaaaagttgaatrtggcattttaaagaaagtgaactctcaatttataatcacatcttactgattcataactgttatagaacacttgtgggtcaaacaggacatgtctgtgggc

SEQ ID NO: 290567 - DNA, 201 bp, Homo sapiens
tacatgtccaacaagtatcaatgtgctcactgtggcccctcagggacccagttgagagacacttcatctcaacataggcttctaaggtcatcacagaaaargaaaaggaatggagtaaattgcgcacttgttctcaacttgtctgcctggaggcagcttcaggcaaggcttgattcaggacacaaactataccattgtgct

SEQ ID NO: 290568 - DNA, 201 bp, Homo sapiens
ttctgggctggggaaagctcttacactgacccgtttgctaatgatagcccggacatcaataatggaatgtgaaagacaatcttctaatcaatttttttttyctgctggtttagattaaagcacagaaaatgcccaaatgctccatctgcttcctctaagatttctggtaggctggagcccaattatggctgccttatccat

SEQ ID NO: 290569 - DNA, 201 bp, Homo sapiens
gtacatataatatattcgaggcactatcctaggtgttttgtatgcaccatgccatttcatctttccagcaaccccacagatacctgttaccatcatgatcrtttcataaatgagaaaagcgaggttcagaggggctaaatgacacctcgttaaaaaaaatcagttaggtttcaatcccatgactttgtttatgatttcctg

SEQ ID NO: 290570 - DNA, 201 bp, Homo sapiens
aaactcagcaacagtgctatgtcgtcaatgtcgtcaccaacccagcatctctgtctacacaaccccaaactcaggctctgttttctgagcaaataaccagwctcactgattatttctttggattccaacagaatccaccaggtgtttcagtgtcttgtagatggcttccagagctttctaacagctaaggccccgcaggca

SEQ ID NO: 290571 - DNA, 201 bp, Homo sapiens
taccattttatactgctattcatatcagtacatatagtagatataatatgctttatattccattttataacttgcaattttatttaacaatgtgatgcagrtatctctccatgccaataagtatatctacagaatcattttaaatgctcagaattattttaaatagcatctagttggatagatatactattatttatacaa

SEQ ID NO: 290572 - DNA, 201 bp, Homo sapiens
atttctgatgggaaagagttttgggaggtccctcctggggtagctggatttgaatctggaggagcaggagaggctgtgtctgcttccattcagtagctgaygtgtccatttggccgtgacctcagagggccctgaggagctgtactttgcaatcaggagtccaggcaaggaatcacctggattttaattctgacttttctc

SEQ ID NO: 290573 - DNA, 201 bp, Homo sapiens
cttctagtagtttcccccaacgtgggccttgagctgggggtttttgcaagttgaggggttgagcatccttggggacacagaaggagggtgaggccacagayaatcccagccctggcttgtgacttctccacatttgacaaggtcaccatggcaggtttcaaataccttcagcttccaggccctggctggctggctgcttcc

SEQ ID NO: 290574 - DNA, 201 bp, Homo sapiens
tcctttgcatgacaagcacattcagactgcccggactaagtaaatttcaagtattaatgaataggtatgagtctcttgtaattagcatctcaatcattgtrtgcaaatgaaagatgcttaaaaatcctagtttaaatgagtaaaatctgtagtacatgaatctgctcagcaaactctgatttttttaatccagtgcaaatg

SEQ ID NO: 290575 - DNA, 201 bp, Homo sapiens
gtgtgtgtgtatatatatgtgtatatatatacacatatatatacacagatatatgtatatatatgtatatatatacatatatatatatacacacacacacygacatatatatattgacatatatgtatatatacacacaaacacacacacatatatgtatgcacacacacgtatctatgataaagtttaagcttcaaatta

SEQ ID NO: 290576 - DNA, 201 bp, Homo sapiens
gcttcttcttaaaaaaaaaaaaaaaacaagagagacttggctacactgagcctgccctgcagcatggcaacaattggctgctgcctttggatggggcctgmgctccccagttttacaactccccatgtaggcaccctcccttgctgatttgtgccatttgccaggctcctgtaggcatttgagttcccagccctgccttga

SEQ ID NO: 290577 - DNA, 201 bp, Homo sapiens
ctttattttaattttgaggctcatgtgagagaggacgtcccttttgtaaaatctcaggatgcaaaataccttttcttccattctggaaaacatgacgtgargcttaaaaacatgacatgggctgggcgtggtggctcatgcctgtaatcccagcactttgggaggctgaggcaggtggatcacgaggtcaggagatcgaga

SEQ ID NO: 290578 - DNA, 201 bp, Homo sapiens
aatcctaaggaagtttctcaggcttcttattatcactgatttgcttttctgcattgttaatttatctgttactgtattaaatgctttttttttttttttttgagacagggtctcactctgtcattcaagcttgggtgcagtggaatgatcatagctcacttcaacctcaaactcctgggctcaagcggtcctcccacctca

SEQ ID NO: 290579 - DNA, 201 bp, Homo sapiens
caatgtcaactcacagggttacaatggatttcttcattattcttactggtggaaagtcagcagtattctccacaattaccacatctacatagattgtcacrtatctgtagacgtcagtgtcacaaaagtcagagataaagttgttttcactagggaatcagcaatttatgagacagtggcacaaggcttttctttatttta

SEQ ID NO: 290580 - DNA, 201 bp, Homo sapiens
agggcctggatgacccatatttgaagatctacattggcccaaacccctgggcttcttgtgtgaagtgcagggatgctgccggcctcacggaaaatagacarcgtgtaagcccagctataggggagacagcttggtaaactaagtgaagacttgatttcacctccttttctcccttggctgggcacccttggccagaaaaca

SEQ ID NO: 290581 - DNA, 201 bp, Homo sapiens
gaaaagtgctctacgtattcaagttgatttctctctcccttttgttctctgctgtctgttagagagaccataacttaacacgaggctctatgattatccccatgctggctgccaagggaaggaaccctgacaccgtaccatgcatggtggtgattttctgaggcccttagattgtttgcattcatcttaccagcaggttat

SEQ ID NO: 290582 - DNA, 201 bp, Homo sapiens
ctggaatcctataattcttattttaatgtgtccttttccttcaactggctggtaagccccttaattgctggtgctatgtttcatttgttgtttattcttaacatggctgcagcgaaatgtagctggaagagcctggattttggcgtcaaaggagcctctaccacttattgcctgtttcatcttaggcaggtcacttcatct

SEQ ID NO: 290583 - DNA, 201 bp, Homo sapiens
agtattaatgaataggtatgagtctcttgtaattagcatctcaatcattgtatgcaaatgaaagatgcttaaaaatcctagtttaaatgagtaaaatctgkagtacatgaatctgctcagcaaactctgatttttttaatccagtgcaaatggacccttttacccaggctgccccagggcaaacttgcacaagttccaaat

SEQ ID NO: 290584 - DNA, 201 bp, Homo sapiens
caatctgacattgctgtcaaattaaacatatcaaaccccagagatccactcctaggtatgtaactcaaagacagtctcataaaccttaatgtaaaaaaaaatatgccaggaaagtaactgcaaggtggttatgatggtggggagctggagacagtctggatgtccatctctggcagagtcaggatacaaaagtggggatac

SEQ ID NO: 290585 - DNA, 201 bp, Homo sapiens
attgtttgaacccgggaggcagaggttgcagtgagccgagatcatgccactgctctccagcctgggtggcagagtgagactcgatttaaaaaaaaaaaaaagtatatatgtatatttgtgtgtgtttatatatatgtatatattattgttggctgtggtcagtgctgcgcccaataatctcattgcaaaccctttctttgc

SEQ ID NO: 290586 - DNA, 201 bp, Homo sapiens
tagcatcattccagctgccaatgctctcatcacttctgccattcaggaatttccttttttgtgtgaactcatctatttatttgtgatttttttttttttttgagatggagtctcacactgtcacccaggctggagtgcaatggtgtgatctcggctcactgtaacctccgcctcctgggttcaagcaattctcctgcctca

SEQ ID NO: 290587 - DNA, 201 bp, Homo sapiens
tagctgggattacaggtgcctgccaccatgcctggctaattttttgtatttttagtatagacaggatttcactgtgttagttaggatggtctggatctccygaccttgtgatccgcctgcctcggcctcccaaagtgttgggattacaggcgtgagccactgcgcctggcctaaatcttttttcttggtaagttacccaat

SEQ ID NO: 290588 - DNA, 201 bp, Homo sapiens
acctgaggtcaggagttcgagaccagcctggccaacatggtgaaaccccatctctactaaaaatacaaaaattagctgggcgtggtggcgtgcgcctgtaktcccagctacttgggaggctgaggaaggagaatcacttgaaccttggaggcagaggttgcagtgagccgaaatcatgctgctgcactccagcctagacaa

SEQ ID NO: 290589 - DNA, 201 bp, Homo sapiens
agtccatggtttttagtacttagctcacttttaatgctcatcctcaatctttaagagtatttttttctaattgcattagtattatgtatttggaaaagccaaaaaaaaaaaacaaactacaaagaaaaacataacactgtcacttagagatatccagttaacatttttttaaaaacaaaaataataccatattgtagatca

SEQ ID NO: 290590 - DNA, 201 bp, Homo sapiens
agagctccccggaccctgggcatgcctgtccagtgaggtcgggggctaggctctcaggggaacatagaggccctgagctgctggtgacagtcccagtgtcrttccacacagcgatccactccccacaggtctagctgccttgctgggaccatccctctaggactaggcctgtgatagcatcctcatgcaagagttttgtga

SEQ ID NO: 290591 - DNA, 201 bp, Homo sapiens
ctacagagtggcagcagttcaggagatcagagctccccggaccctgggcatgcctgtccagtgaggtcgggggctaggctctcaggggaacatagaggccstgagctgctggtgacagtcccagtgtcattccacacagcgatccactccccacaggtctagctgccttgctgggaccatccctctaggactaggcctgtg

SEQ ID NO: 290592 - DNA, 201 bp, Homo sapiens
ccctttcagagttggatggcttggatccttctggcgatccagggcccaagccagaacattccttttgtccctctctccctccttccttccttccatcttcygtctttcctgaaatggattttgagttcactgggggctccgccacatctgttcagtctctggcatggcaccacctcagtgttccacacagcagccacagca

SEQ ID NO: 290593 - DNA, 201 bp, Homo sapiens
ggggaaaggggcacaaagctttcatgacctcttgagatgtgccacctacgtttcatctttctttctttcttcctttcttttccttcttttttttttttttwatttgagacagggtctcactctgtcacccaagctggagtgcagtggtacgatcataacttattgcagccttgaattcctgggctccagtgatcctcctgc

SEQ ID NO: 290594 - DNA, 201 bp, Homo sapiens
tgcagagggtctgccaagaacccgcagcccgcccaggtaaggacctcgggtaggaatgggagtgggagagagctggaggcattgtccaggagtggggtgarggacttccccctactcattctcctcctctgtctacatcttacacaaacccactttgccaggggcccctagaccctgctcctacacattcatatccccttt

SEQ ID NO: 290595 - DNA, 201 bp, Homo sapiens
tagggtgctgctcatgcttctgcaggtcttttatttctgtgctgtaacagcaatttacccccgagctgctccgagatctttgggagcatggctttcttccmtggtggctgtgtttgtccttgctgcaggcagaggaaacccttggctctggaaatgccatttaaggtagaggtaggaggacactggtagaccagggccagg

SEQ ID NO: 290596 - DNA, 201 bp, Homo sapiens
tctttcttgctgtttcataaagtgaggtgtggctctgtgtagagcagggatgactttgtctcagagttcagaggtgagtgacatgccttaatgtgaattgkgctgttgcaggattttcctggcccctaggtgggccaggcagagtggagtggcccaggatggaaacagatgttggctgtcagcaggggatggagagaggga

SEQ ID NO: 290597 - DNA, 201 bp, Homo sapiens
agggaagtttcaaggtctaatcgaaatgatagactgaaaataaagctgtccaaggtgagacagtaattcttcccattttatagaaaaaagtcattatttcmacttaaaccatttcagatgtgattgacctattggacacggaagtgctggatttggcactccctaaaagtacaaagactggggagggaggcaactgtctaa

SEQ ID NO: 290598 - DNA, 201 bp, Homo sapiens
actgtttgtaacttgttctttttatttaacactatatcacgaatactcttctgtatcataatcttcttccaaatatttttaaatgtctgtctaggatttcrttgttgtctactgttccatagactatataatcacagttcataaatgatgaatgtttagattaggttggactatataatgttgtattttaggtaaaaaatt

SEQ ID NO: 290599 - DNA, 201 bp, Homo sapiens
aataggtgatgtcattgtgaggtggtacagtatggtggttaagcatttggcccttaaaatctggctactgcttgccctactgcctgctagctgtgtgaccrcaggcaagtcacttaacctctccgcgcccagttttcttatttgtaaaatgatgatgatcataggagagttgtgaggcttaagcgcattaatatatgtaaa

SEQ ID NO: 290600 - DNA, 201 bp, Homo sapiens
cggcactttgggaggccaaggcaggaggatggcttgaggccaggaatttgagacccgcctagggtaacatagcaagatcctgtttctaaaaaaaaaaaaaraaatctatctatctatctatctatctatctatctatctatctatctatatctatctatctgtctaatatatatagtcccagctactcaggagactgaggt

SEQ ID NO: 290601 - DNA, 201 bp, Homo sapiens
aggctggagaggacccctacagacagcacgccttcaaccagctggagagtgacaagctgagcccagaccggcccatccgggacacccgccattacaggtayggcctccatcgtgtcagtggaggaagaaagactgagagaaagccaacattgtttagtttgtcttcttttacgtgtatctaagaaatgaggatgatttcct

SEQ ID NO: 290602 - DNA, 201 bp, Homo sapiens
agatgaacacagggctgggggagccccagaccttggccttgctgtcctgtaacgccagcactgtcagcctccagaaaccactcatgcagccaagtaaggcrgtactcctgcttcgcggcaaggacaccaccaggcctgctggctgtttctgggcctcagaagttctttctcacccagtcctgggcagcatcccctcctgtc

SEQ ID NO: 290603 - DNA, 201 bp, Homo sapiens
ctaggttgggcccctcttctgtgctctgtgcagacatctcacagaatggccagggcgctgttggagctgactcacggctgtgcctgcagctatgtgctcaragctaggctgggcctccgtctggtcctggcttgagggtagcaacaatgacttggatcaaggttgcttttacttctgaagcagctactccacagcacaaag

SEQ ID NO: 290604 - DNA, 201 bp, Homo sapiens
atgcctcatacctacatcacagggtagttaagaagatttgattatttactctaagtggtgctgttagaatggtgcccaacacttagtaagtgctgcattcmttttgtttgtattactgtccctctgctttctcgtcttccctgtgtcatgtattcattcatttaagatatattcattatgcacctactatgtgtcatgaac

SEQ ID NO: 290605 - DNA, 201 bp, Homo sapiens
tgcaggaagtgctgagtgccccatgtctcagagaggccttctccccagagcaggcagctaggcctttttctgcagagaagtcccaggcctcacaccatctmacatctctctcctaggaccacacccgcgtggtgagtcccatcattgatgtcatcagtctggataattttgcctaccttgcagcatctgctgaccttcgtg

SEQ ID NO: 290606 - DNA, 201 bp, Homo sapiens
ccaaggcaagcaccctgaggttgtcctgaccatcgcagacacctttctgcccccagcagggatcctgtcttttctaggacccctccctggtcctgttcccyggtgtcaaaggaggggaaagaagggtgggtgttgctttggatgggactctagtgagatgatattgtttttaaaaagtaaagaaaatcaacagcatccttc

SEQ ID NO: 290607 - DNA, 201 bp, Homo sapiens
ctgatcaggggagactccgaggggtggtggagtgaagggtctcagcagcccgcagctctgccctgagctctgtcctcaccttgctgtgtcccttagggttygactggagcctgcatttcaagtgggagcagatccctcttgagcagaagatgacccggacagaccccaccaggcccataaggtcagggctgcggtgggctc

SEQ ID NO: 290608 - DNA, 201 bp, Homo sapiens
atccaagatagctaaaatggatggggcctgaaggtgctaaagaacccaaagggaggggctggttagcccaatagcatctgctgcttggggtcagggatcakggctgataagaaatagggtagagatggcagagacttcacccagggaaagtcagctccaatcatgtgttgcagagaccatcctttctccattaaagtagca

SEQ ID NO: 290609 - DNA, 201 bp, Homo sapiens
aagccacagccctggcctgcctgtctccccacacccctaaacttcagatgcgcctttgaactgtatctggctagagacagtatggtcacccagggaacttytgtgaacatttcagaccagataggagtggcaggccagaggtactttgggaaagagggggcgactggaagaagcttgtcgatcatattatataggcaagat

SEQ ID NO: 290610 - DNA, 201 bp, Homo sapiens
tagaatcaaaattgctagaccagaggttgtgaacattttaaaggcttttgatgcatttgccaagttgttttctacaaagaaatgtaccttccacagctgtmtgtgagggcgccctgacccattgttactggtttacatttgctcgtcattctgcctcagcaaggtcctgagcctccaggtgggatccaagatagctaaaat

SEQ ID NO: 290611 - DNA, 201 bp, Homo sapiens
caaggtctaatcgaaatgatagactgaaaataaagctgtccaaggtgagacagtaattcttcccattttatagaaaaaagtcattatttcaacttaaaccrtttcagatgtgattgacctattggacacggaagtgctggatttggcactccctaaaagtacaaagactggggagggaggcaactgtctaaacatcagcca

SEQ ID NO: 290612 - DNA, 201 bp, Homo sapiens
tggggagtggttggaaatcacattttattcaccaggtgtttttggtttatagcagactcaggaaaaaagtcaggggccatccataaaatagggccagagcmtttttacttgcagtttcattgaaatttagtgaaaggtaaacccagcaggtacctgttttactggcagtaaaagaaaattgggcaacaattatttaaaatg

SEQ ID NO: 290613 - DNA, 201 bp, Homo sapiens
tgacttggcttcagtttttacaagggctgttccccctggcccctcaggaaggctgtctccatctgcagttgggagaaataacctggacaatatgactgtcrtcccagggttccagcaccccaaggcctgcgggggatgtctcccagcactgcatggggtgtggtccttctcccaccagggaacaggaaaggaaacctggaa

SEQ ID NO: 290614 - DNA, 201 bp, Homo sapiens
tggggttggctacttcctgaggcaggctcagggaggccctgtggaaccctccttttcatttggaagagttggaacctgagaccttgagctcagagatgtcraattatgtgcttagcttcccagctctcataatgaatggcagtctttcaacttgggacagagaatcaggtaagattttactcccaggggagtggggagtgg

SEQ ID NO: 290615 - DNA, 201 bp, Homo sapiens
ccagtgtgtttgatgtctgtctgtctctctcattctctctttctctgtgtgtgtatgggcatgtacacacaaacctagaatcatactgattttaacatgatttttttatttatgtaatatctattttatgagcactgtctcctgttgttagttttctaaaacagtgtttttcaaactttgtttagtaatggaacccttatt

SEQ ID NO: 290616 - DNA, 201 bp, Homo sapiens
cagtgtgtttgatgtctgtctgtctctctcattctctctttctctgtgtgtgtatgggcatgtacacacaaacctagaatcatactgattttaacatgatttttttatttatgtaatatctattttatgagcactgtctcctgttgttagttttctaaaacagtgtttttcaaactttgtttagtaatggaacccttattt

SEQ ID NO: 290617 - DNA, 201 bp, Homo sapiens
aaccgaaaggatggaaaatcacccataatcttcccatcctaacaaatcacagtttttagttttcagtatacccttcctgtcaaggtccgtaatttttacayaactgcaatcacaaagtgtatacaattttatcctgccctttcctccctttattgtgcaagcatttttctgtactgctacagagctttcatagctaatatt

SEQ ID NO: 290618 - DNA, 201 bp, Homo sapiens
ggaatggagagaggatgtgaatgaagtccaagtgatcccacttctaggctcagccctgccctcaagggactgtgtttccttaggtgagtcagtcccactcsctggaccttagtttcctcatctgtcaggtgagggttgaactacaggatctcggcggtccctatcagctgaaataatcttggactttgttgaacttctccc

SEQ ID NO: 290619 - DNA, 201 bp, Homo sapiens
aggttctattatggtttaattttataagtgaagagatggagattcagaaaatttaaataacttctaatagatcacatgtcaatgagtgagaaaatgtaggscttttaattccatatgtggttttttcttttatattattgcagtaagaacacataacatgagacctaccttcttagcaaatttggaagtgtaaaatccatt

SEQ ID NO: 290620 - DNA, 201 bp, Homo sapiens
cagcacaattactttattttaaaaaataaatttagtgtagactacatgtacagtgtttataaagtcgtgtaacatcctaggccttcccattcactcatcaygcactcactgactcacccagagcaattcccagtcctgcaagctccattcatggtatgtgccctatacaagtctaccattttttatcttctatactgtatt

SEQ ID NO: 290621 - DNA, 201 bp, Homo sapiens
accctcagagaaagagggttttgtgaggacaccagagaactggaactgcagttgaaaggggaggaagctgagcccccctctccatctgtccctcagggacrgtgccatctctcacacagagtttcttcatcttctggatacacaccccctacccctcactagctctggcttttccacacttctgctggcacatggcatgca

SEQ ID NO: 290622 - DNA, 201 bp, Homo sapiens
gccctccctccttcagcttgtagatagggagtggagtgggtaaggaggtgttgctggagaagtggcctatatcacaagaaggtgtgggaacccctctggcrggagtcatctcatagctcttccaacctgttggtagggaatgatagaacaattccaaatctctgcacttcacaatcagcctcccgttccctgtcgccactt

SEQ ID NO: 290623 - DNA, 201 bp, Homo sapiens
tgccatctctcacacagagtttcttcatcttctggatacacaccccctacccctcactagctctggcttttccacacttctgctggcacatggcatgcaaycatagtgaccccaacccagatctgcctcatggcccctcagctcagcatcctggtctgactcccccacccgccccagtgcaaccagtttcccacttctcga

SEQ ID NO: 290624 - DNA, 201 bp, Homo sapiens
agatggcctctgggctgggcaaagggcgggaaatggagacctggggagcctggtggacctggagaggaccctcgggtctgagcagagactgcctggaatgkcgggcctgatgccttggcctagccttaggtagaggaccctgggtggctcagatccctaggggaataagcagtgggcctccctccactttcttggtgagat

SEQ ID NO: 290625 - DNA, 201 bp, Homo sapiens
ccagctattcatacagctgacttgacaaggacacaacccagtgaggtcagggtccccacccaccctgctcttggtcagaacaatgggaaaggcaccttctwccacagacatgcgccaagccctgaccttgagccagcctgccaggcctccatgctgtgctcaccgaccaccaggcacaggcactcaggaggaaagggagtg

SEQ ID NO: 290626 - DNA, 201 bp, Homo sapiens
gtagagacggggtttcaccacgttggccaggatggtctcgaactcctgacctctcaggtgatccacccgcctcagcctcccaaagggctggggttgtaggygtgagccaccgcccccagccagcatggcctctttgaacttgccagctgtgctgttgcctctagggacctgcccttgccggctcctctgcccagaatgctc

SEQ ID NO: 290627 - DNA, 201 bp, Homo sapiens
ggggacaggtcacacctgctccagcagtggtcctgtctttgtgctgctgtaacagaatatcacagccagggtggcttataaacaacagaaattgatttctyacagtttcagagcctggaaacccaagatcaaggcaccagcaggtttggtgtctgatgagggctgctctctctgtttccaagatggtaccttgttgctgtg

SEQ ID NO: 290628 - DNA, 201 bp, Homo sapiens
gcaaacagccatctgctggccagcacagccaacacggagcccgcctttcctacctgcacttttttctcctggaccacactgcctcttgtgttcagatttgrggtgaaaacacagcttggaaatgatgcagctgcctctgagtgagatacgctaaccaaaaatcctaactgcagggcccaaatcctgtagaaaattttcctc

SEQ ID NO: 290629 - DNA, 201 bp, Homo sapiens; identical to SEQ ID NO: 59978

SEQ ID NO: 290630 - DNA, 201 bp, Homo sapiens
gttgtaggcgtgagccaccgcccccagccagcatggcctctttgaacttgccagctgtgctgttgcctctagggacctgcccttgccggctcctctgcccrgaatgctcttctcctgctagccacaggacttgctccctcatctgtttcaggtcttggctcaaatgtcccttttatagtgacaactcccctcatcagcctg

SEQ ID NO: 290631 - DNA, 201 bp, Homo sapiens; identical to SEQ ID NO: 59979

SEQ ID NO: 290632 - DNA, 201 bp, Homo sapiens
gtagtcccagcctcatttgtcatttttgactcctgctttctcaaaggtttttgcctctgtcaatacagcatcatgggtggttggaaagaagggaacttccyttctggaccaagaacagcccctaagtcattagggttcaacctcacccttattcccctccccgctacaggagcccctaagtcattagggctcaacctcacc

SEQ ID NO: 290633 - DNA, 201 bp, Homo sapiens
gctacattttgtttatccattcatccatcagtgaacctcccgggctgcttcgacattttggctaatgtaaataatggtgctgcaaacatggtgtacaagtrtctgtgcaagacgctgctttctgttctttggggtatatatgcagaagtggaattcctggatcatatggtaattctatttttaattttttgaggaatcacc

SEQ ID NO: 290634 - DNA, 201 bp, Homo sapiens
actactatataggatatagatctatatcctatagatataggatactattatatgaatagcatctgtagtcttatggtatatcttaaaacctggtaggtagtttttttttcagattttctctgattgttctctcatgtttaaactcttccagctgaatctcccttcccccaacacagctgttatttgatcagagttgcatta

SEQ ID NO: 290635 - DNA, 201 bp, Homo sapiens
actattgtacctctaggcctcagtttccacctctgtaaaataagaataagaggagcatttggagatagaaataagcccttggcatagcacccagtgcacaktagaccctcaatgagccgtcagcatcagctcattcctgttgaagatgcccagtcttccccccatactctgggctacagcagctgtggctggaaggatcag

SEQ ID NO: 290636 - DNA, 201 bp, Homo sapiens
cctatggaacttgggagatcagaaggccagcgctggggcaaagctgaaggcaggccaaccagagagcccaagaaagggccctggcagagaggaaaactggkcataaggtgacaggtctgagcgagagtgctcagaggagccggcccctgggatccccgaagccaagctgagtcacaggagctctgatgggaggctggcatc

SEQ ID NO: 290637 - DNA, 201 bp, Homo sapiens
cctgctttggagctgaggactcagaattggcaagaggggatgccaaggacatctgagccacaagctggtctgaaggcacacagagaaagctttgtgcttargctctgtggccagacagcctcaattttggtcccggctaagccactcagcagctatgtgaccttgggcatactattgtacctctaggcctcagtttccacc

SEQ ID NO: 290638 - DNA, 201 bp, Homo sapiens
tacacaaactcttgtatttttctgttcttccatgttcttttgagccatagtcaagaagcgcatgtccaggccaaggagtgacagcactgggcaagtccctrtctgagccacgagctgatgccctgatccttgagccaaggaaggaagcgacctccagcctgagcttgtcaggactcagctgtgtgccgggcaccagaggcc

SEQ ID NO: 290639 - DNA, 201 bp, Homo sapiens
ccctttgtgctgacccagcctacggggtgtgtaggtatctccttggccccattcattctgcccctgcaagtcctgccaggctcccgatggcattctgggtrcctgtgcccctcttctcccaggaggacaggatgagccagctatcccactgccaatgccttctggaatccgggccgtccttcttggtcccctgctggtcct

SEQ ID NO: 290640 - DNA, 201 bp, Homo sapiens
gagctattggttcctaattcaccattatccgtgagcatgggatacctcccagcatgggctctagtcctcatatcatcattaaaaacaaggtcaatattttktgcagtgtcttctcttttagaaatcccttctaagctcttgctgtgatgaaaatgggttttggaggaggggtaggagcagtggaggcgagaagccttttac

SEQ ID NO: 290641 - DNA, 201 bp, Homo sapiens
cgtctcaaaaaagaaaaaagaaagctgaggtggctcacggggtgtgtgtgtgtgtgtgtgtgtgtgtgtgtgtgtgtgtgtgtgtgtgtgtgtgtgtgcgygcgcgcgcgcgcacgcatgcacacgtgtagggaagcaaaggacgtgctggctgtagtgggcaggcctcctgccatggtggggccagtttgctggtagaag

SEQ ID NO: 290642 - DNA, 201 bp, Homo sapiens
ttaaatttatctctaaaagatttataccagtttatactcccactaataatgtattaaagagtacctagttccccacagcctatatcaaatattgtaaatcrttgctaaatattctattcagttgagagaacataatttatttactcttcttcctgctgttaacatttagattattttcaaattttcattcttacaaaacca

SEQ ID NO: 290643 - DNA, 201 bp, Homo sapiens
tattttcacagttgcccactacaaatttagcctcttaaaatgacaggaaaacaccaaccaatcgcaggttaaataagtttaccccttcagttctgatttgyaatatccaatattcttttgaaatatgaaacagactggtaaaggccaacagtaaatttctgccctcttgacagagttggagagttcagtccaggttctatt

SEQ ID NO: 290644 - DNA, 201 bp, Homo sapiens
aaaaatagtaagaattatgcagtgaatacccatacatctaccctagctcctacaattatttgtagaaatcttacaaaaatatgccgtgtttttgctttatsccctatctacccatctctccacccatcgctgtactttttgacttggcctttctgctccctgccttgcaggcatggctgttcagtgaccacctcatccagc

SEQ ID NO: 290645 - DNA, 201 bp, Homo sapiens
gctcctctgttctagaatcctttgtatttttatctcctgtccaaagctcgagatccccaagggagcaagtcccattttagttgacacctaatcaaagctgytggtactccttcagctcctgtggagcgtaggtctctggggcgcaatgaacacactttttcacgtgacaaacgtacctcgagcagctactgtgtgccaagc

SEQ ID NO: 290646 - DNA, 201 bp, Homo sapiens
gagtgagaaaatgtagggcttttaattccatatgtggttttttcttttatattattgcagtaagaacacataacatgagacctaccttcttagcaaatttkgaagtgtaaaatccattatgattgactataggtacgatgttgtacagcagactctagagctcattctttttgcttggctgaaacttcacacctgttgatt

SEQ ID NO: 290647 - DNA, 201 bp, Homo sapiens
agcaagtcccattttagttgacacctaatcaaagctgctggtactccttcagctcctgtggagcgtaggtctctggggcgcaatgaacacactttttcacrtgacaaacgtacctcgagcagctactgtgtgccaagcaaagcgacagatcacaaagaagctctcagctcttcagcagccttgtccagagacctagtcctc

SEQ ID NO: 290648 - DNA, 201 bp, Homo sapiens
gtgtttcttggggcctcagttgccttgaggttgtcctgtctcagcagttcatcctgctcatgtccttttcctcagccatagagcaggaccaggttgtttgrgggactggtaccctgagcaagaatgactttgtctcccgttaggtgtgactgctgctgagggtcatcaggaccttgagggtgtcgctggctgagaggaccc

SEQ ID NO: 290649 - DNA, 201 bp, Homo sapiens
acctaatcaaagctgctggtactccttcagctcctgtggagcgtaggtctctggggcgcaatgaacacactttttcacgtgacaaacgtacctcgagcagstactgtgtgccaagcaaagcgacagatcacaaagaagctctcagctcttcagcagccttgtccagagacctagtcctcactgtttcagcatttgctccat

SEQ ID NO: 290650 - DNA, 201 bp, Homo sapiens
tgctggccaggctgctcccgggccccttcccacggagacctcggcgctcccagagctgataggatgctgacgtctggcagagggtgtaggtaagccttggkggggaaagcacaagcctgactgctgccttttctctcagggtccccgtgaaggaagcactccccggcatcattaagcagggggtgaactgcttagaatctc

SEQ ID NO: 290651 - DNA, 201 bp, Homo sapiens
gatgggttgactgacagatgaaaggatggttagaggagagctgtatgatcaagcaaatatagcaaaatgttaacagtgggatccagatgggtgttcactayacaactctttcaacttctcagaatgtttgaaaaattttataataaaatgtcgatgttttaataaaaaaaagaaagggagtgtgatcaggcaggtcttgac

SEQ ID NO: 290652 - DNA, 201 bp, Homo sapiens
ctggtggaatagtcagagagcaattgtaataaagaagattgctatgaaaaccagcaacggaggccaccttccagcaccccaggagctcaaataaatgcatrcgcagaaacaacagggatgaagtctggcaggaatgaattgttttcactccctttctagaggagagggagccagtaggccagaaaatgtggtgtctatgga

SEQ ID NO: 290653 - DNA, 201 bp, Homo sapiens
accaacacctggagaatgagagaacccacatgtggagcaggggcatatttgagtctggtgttggcatgggctgtcatcctagcgagtggatagaagtcttmttttttttttagagacgaggtctcactctgccacccaggtgggagtgcagttgtgtgatcacagctcactgcagcctcaacctcctgagctcaagtgatc

SEQ ID NO: 290654 - DNA, 201 bp, Homo sapiens
atttcctcaccttcctcaggccttgactcaaacgtccccttcccagggagactttccctgaacactctgagtttgcagctccgcctccctccccagcatcrtctcctccatgttccttgtagccgttattatcatcggcattatctggccaattaattttgttgtatctccctgaacttgcctgtaagttctatgagggtg

SEQ ID NO: 290655 - DNA, 201 bp, Homo sapiens
tccgtctcaaaaaagaaaaaagaaagctgaggtggctcacggggtgtgtgtgtgtgtgtgtgtgtgtgtgtgtgtgtgtgtgtgtgtgtgtgtgtgtgtgygcgcgcgcgcgcgcacgcatgcacacgtgtagggaagcaaaggacgtgctggctgtagtgggcaggcctcctgccatggtggggccagtttgctggtaga

SEQ ID NO: 290656 - DNA, 201 bp, Homo sapiens
tgagtgggaggatcacttgagcccaaaaggtaggggctgcagtgagccctggttatgccattacactccagcctaagtgttagagtgaggaagagggaagrtgaggggaggtgaggggagggagggagggaaggtggaagaaggaaggaagggagggagggagggagggagggagggagggaggaaggaaggggagaggga

SEQ ID NO: 290657 - DNA, 201 bp, Homo sapiens
ctgcagctgcgtgagagtttatgtgtgcttttttcctgaggaaagagtccatagcttttaacagggtctcagcaggtgtgcgatcactcttccctacatcmcccagaaaaggttaagaaccattgcctcagggacagagtatgtagctttatttttttaaattattattatttgagacggagtctctctgtgttgcccagg

SEQ ID NO: 290658 - DNA, 201 bp, Homo sapiens
gtggtggcacacacctatgagtgggaggatcacttgagcccaaaaggtaggggctgcagtgagccctggttatgccattacactccagcctaagtgttagrgtgaggaagagggaagatgaggggaggtgaggggagggagggagggaaggtggaagaaggaaggaagggagggagggagggagggagggagggagggagg

SEQ ID NO: 290659 - DNA, 201 bp, Homo sapiens
atttcaggctccagggagtgccaaaggcttgggattgcaccagggattctgaatctggactccaagaatggacctcaggagtttgtgagcctctgaaagcmcctgcagctgcgtgagagtttatgtgtgcttttttcctgaggaaagagtccatagcttttaacagggtctcagcaggtgtgcgatcactcttccctacat

SEQ ID NO: 290660 - DNA, 201 bp, Homo sapiens
gggaggctgaggcgggcagaccacttgaggtcaggagttcaagactagcctggccaatgtgctaaaaccccgtctctactaaaaatacgaaaatatctggrtgtggtggcacatgcctgtagccccaactactcaggaggctgaggcaggagaatcacttgaacgcttgaacccaggaggcagaggttgcagtgagccaag

SEQ ID NO: 290661 - DNA, 201 bp, Homo sapiens
gggcacgcgggacaagggcagaatcctgtaagaagggatagatgagggaactttctggaatgatattactgctctatttcttggtagggatttggactacmcaggtgtatgcacttaccaaaattcatccaaaggcactttttttttttttttgagatgaagtctcgctattgtagcccaggctggagtgcaatggtgtga

SEQ ID NO: 290662 - DNA, 201 bp, Homo sapiens
aaccagtttggcccaaaaggaacttggggatttcaggctccagggagtgccaaaggcttgggattgcaccagggattctgaatctggactccaagaatggrcctcaggagtttgtgagcctctgaaagcccctgcagctgcgtgagagtttatgtgtgcttttttcctgaggaaagagtccatagcttttaacagggtctc

SEQ ID NO: 290663 - DNA, 201 bp, Homo sapiens
gtggaggctgagtgaattatacatcttgctcactgtggggagctgagactcaaatcaggtcttcctgcctcccagagccctagccacgcttctgcttcatraagcctccaagaagcgtattgaggaaactcctgggccaggtctctgggaggcctgtgactgtcactcccctgggctggctgctgggaaccccatcttcac

SEQ ID NO: 290664 - DNA, 201 bp, Homo sapiens
ggcatctgcctttacccaagggctggaggcttttgtcctgcagaggtaggcccagccaagagggagctgcctcctgtgtcttcagagatcccgacactcarctctggacatcacccaaggccgaggccttgcacttctgctcccagctagaatgaactagcttgtatcagagcagttcttctgctgagaacaactggacaa

SEQ ID NO: 290665 - DNA, 201 bp, Homo sapiens
gtgaggaagagggaagatgaggggaggtgaggggagggagggagggaaggtggaagaaggaaggaagggagggagggagggagggagggagggagggaggraggaaggggagagggagaggaaaagaaaagaaaaggagagaatcaacaataggggttggcttcagtgaatcactatacatagatctaaacaaatattatg

SEQ ID NO: 290666 - DNA, 201 bp, Homo sapiens
gcccttcacctgcattggcaggattctgttctagctgtgtgtggccctctctctgcccctggagggccctccctccttcagcttgtagatagggagtggartgggtaaggaggtgttgctggagaagtggcctatatcacaagaaggtgtgggaacccctctggcgggagtcatctcatagctcttccaacctgttggtag

SEQ ID NO: 290667 - DNA, 201 bp, Homo sapiens
atttatttttagagacagagtctccctctgtcacccaggatggagtgcagtggcacgatcttggctcactgaaacctctgcctcccgggttcaaacaattytgcctcagccttccaaatagctgggactacaggtgcatgccgccacacccggataatttcttttgcattttagtagagacggggtttcaccatgtggccc

SEQ ID NO: 290668 - DNA, 201 bp, Homo sapiens
caccaccatgcccagctaatttttgtatttttagtagagacgggtttcaccacgttggccaggatggtcttgaactcctgaccttgtgatccacccgcctyggcctcccatctcgctctgtcacccaggctggagtgcaatggtgcgatctcggctcactgcaacctccaccccctgggttcaagccattctgttgcctca

SEQ ID NO: 290669 - DNA, 201 bp, Homo sapiens
taatacctaatacaatgcctacacatcacgtcatttgcatggattcaatgtggtactcgatgcgtggcgaattcaagtttggctttggaaccttgtggaattttttttttttttctagatggagtctcattctgtcacccaggctggagtgcagtggcacaatctaggctcactgcaacctccatctcctgggttcaagcg

SEQ ID NO: 290670 - DNA, 201 bp, Homo sapiens
aattttttcctaagtatttttgatccaaggttggttgaatccatggatgcagaacccacagatactgagggctgactgtacatggggcgtattatattacaatgtaagatagttatctcctacttaagcttgtggtcagaaaagtttgaaaacactattaatgatgatcaatgaatcttctccctatttattcatatctat

SEQ ID NO: 290671 - DNA, 201 bp, Homo sapiens
attaagtcaaggagaatgtatgtctttacatcactgaatcttttccaagcatgagctgtgtcttccctttaaggtctgtttaactacagggtgggtggccrtaaagggaaacatggacaaatatacctaatcagtggtttatttctatcacattacaatacatgaaactgtgttgtttttactaacaatgtatggttcagt

SEQ ID NO: 290672 - DNA, 201 bp, Homo sapiens
tctctctcgggcattaatgaacagctagtgccctgtccctgccgccaggacccactgaaaggacgggtagccacacacatccctgagtagtcccagcctcrtttgtcatttttgactcctgctttctcaaaggtttttgcctctgtcaatacagcatcatgggtggttggaaagaagggaacttcccttctggaccaagaa

SEQ ID NO: 290673 - DNA, 201 bp, Homo sapiens
gtggtctctcccttgttgcccggagaaagcaaggacagaagcccacacaggggtcttttgggtcatgaggcccagctgtgcaggcaggcagggccaggggraattgggcagcatggatggagaggctgaaggctgggaagagggaaggggagaggggcagcctgcaggggtagctgaagaacaggaaggaggtgagaagcc

SEQ ID NO: 290674 - DNA, 201 bp, Homo sapiens
ttcacattcccactgaaagcgtgcaggagttccaatttctccacatcctcaccaacacttgtcttttttttttttttataataaccatccgacaagtatctttttttttttttttttgagagagagtctcactctattgcccaggctggggtagtgtgatctcggctcactgaaatctctgcctccccagttcaagtgatt

SEQ ID NO: 290675 - DNA, 201 bp, Homo sapiens
gcaagacccagtctctgcaaaaaatttaaaaattagctgggcgtggtggcatgcaggtgtagtcctagctactcagaggctgaggcaagaggattgcttgractcaggagttcgaggctgcagtgagctgtggtagcaccactgtaagaacaaggtcatgcctaaaaagaaaggaggagggggatgtgtcctagttatata

SEQ ID NO: 290676 - DNA, 201 bp, Homo sapiens
gtgaaggcactgaccaggagcccctgcatgactctgtgatgcgagacctccagtctcccaccaccctgctggccccacacttcatccctacaaagaaggcrgcttcccactagggggtgtagattactggcctcacaggtcagaagcttaggaagaataaatcttgtttacagaaataaaagatttacctaggccaggact

SEQ ID NO: 290677 - DNA, 201 bp, Homo sapiens
acctgggtctctgcctctcatcccttctcataaatgttccaagcaacactccatcctccacccaggcacttccgtaatgttctacaggagcaactcttctsccccttgtcaaacccggggtcggggaggcaccaggaggtgaaggcactgaccaggagcccctgcatgactctgtgatgcgagacctccagtctcccacca

SEQ ID NO: 290678 - DNA, 201 bp, Homo sapiens
aatccgggccgtccttcttggtcccctgctggtcctatttccaaggctagctgggtttcctgtatccgagaggctcctgtgcctcagacctggtgtgatgragtcagcaggccccagctcagtcttccctccccctcccttcactcagtctcctcacttataaaataaggggctccctcccctgcttacctcacaaggaat

SEQ ID NO: 290679 - DNA, 201 bp, Homo sapiens
gccattctggaaagcagccacagcctctccctccggcctgtgtgtgtctgagggatctgtgtgcccagcccacttgctggacctgtgggacactttaagcrcttttggatggtggggggatgcagcccaccctcggccctgccctgcagtggggctggtgcagtgtctcctgcacctagagcacccacctctctgagggca

SEQ ID NO: 290680 - DNA, 201 bp, Homo sapiens
agagtcaagaagccctgagattgtgcctaatagcactgataagaagtgagaatcccgctgtttggggagcacttcctaatgattgggtgattcagtcattygttcatcttaaaacaaaatgacggctgggtgcagtggctcatgcctgtaatcccagcactttgggaggctgagatgggtggatcatgaggtcaggagttc

SEQ ID NO: 290681 - DNA, 201 bp, Homo sapiens
cactttgggaggccaaggcaggaggatggcttgaggccaggaatttgagacccgcctagggtaacatagcaagatcctgtttctaaaaaaaaaaaaaaaartctatctatctatctatctatctatctatctatctatctatctatatctatctatctgtctaatatatatagtcccagctactcaggagactgaggtggg

SEQ ID NO: 290682 - DNA, 201 bp, Homo sapiens
ccagtcttcccagaggccactcctgctcctcacctccccctgctggccaggctgctcccgggccccttcccacggagacctcggcgctcccagagctgatrggatgctgacgtctggcagagggtgtaggtaagccttgggggggaaagcacaagcctgactgctgccttttctctcagggtccccgtgaaggaagcactc

SEQ ID NO: 290683 - DNA, 201 bp, Homo sapiens
gaactgcagttgaaaggggaggaagctgagcccccctctccatctgtccctcagggacggtgccatctctcacacagagtttcttcatcttctggatacayaccccctacccctcactagctctggcttttccacacttctgctggcacatggcatgcaaccatagtgaccccaacccagatctgcctcatggcccctcag

SEQ ID NO: 290684 - DNA, 201 bp, Homo sapiens
cctgtgcccctcttctcccaggaggacaggatgagccagctatcccactgccaatgccttctggaatccgggccgtccttcttggtcccctgctggtcctrtttccaaggctagctgggtttcctgtatccgagaggctcctgtgcctcagacctggtgtgatggagtcagcaggccccagctcagtcttccctccccctc

SEQ ID NO: 290685 - DNA, 201 bp, Homo sapiens
ccactgaaaggacgggtagccacacacatccctgagtagtcccagcctcatttgtcatttttgactcctgctttctcaaaggtttttgcctctgtcaatasagcatcatgggtggttggaaagaagggaacttcccttctggaccaagaacagcccctaagtcattagggttcaacctcacccttattcccctccccgcta

SEQ ID NO: 290686 - DNA, 201 bp, Homo sapiens
acatacatggtaaataaacattggtgactctgatacgtagttctttaatcattactgagattaaacacattttcatatttgtgtttaatttgcctcttcaragcgctcccttccctgtcattttgggattgattattgagcatgcattttggccccaggctctcctgaggctttcctctttctggactgaggggctctgtt

SEQ ID NO: 290687 - DNA, 201 bp, Homo sapiens
gagccttgggactttgggggacaggtgggaagccagttggcccagtcccagcgccaagccctatctactcctcttgtagggctgatccggtcccgagtgcrtggggcggacgtggctgcagctaccgttctcacctttctggatagccactgcgaagtgaacaccgagtggctgccgcccatgctgcagcgggtgaaggag

SEQ ID NO: 290688 - DNA, 201 bp, Homo sapiens
tctcatctccttgggccagaatcctagctaaggagatgtgtgacattttagtaagcattcctgtcaggaaagtctcaatacccacttcacatatttggtgkaggtgagcttggctctggtctgggctcagcctactggcaagataggacatagttagagccgtaaacccaagaagagtaggaatctgcagggtctggaaga

SEQ ID NO: 290689 - DNA, 201 bp, Homo sapiens
cgggcctggtggcatgcacttgtaatcccagctactcaggaaggggaggcacaagaattgcttgaacctggaaggtggagtttgcagtgagccaagatcgygccactgcactccagcctgggtgacagagcaagactctgtcataaataaataaataaataaatacataaataaaaagtgctaggaggttgtccaaggaag

SEQ ID NO: 290690 - DNA, 201 bp, Homo sapiens
tgcttgcacatggcaggggttgcaaactcaaattcttacagtggtcaggcaggtgatgtcaataagtcaaatgggtaaggatgagacaatagagagttgtrgggactggggcaaagtgcgatgcagaagccccactcagagggggcagctgctactcactgcagtggattagtaccattctggaatgcaagctcattgtgg

SEQ ID NO: 290691 - DNA, 201 bp, Homo sapiens
agtctgtttccactgggcagtgctggtgctcacattcattcacatcccctctcttaagtgctaggagggaccaggtgctgtggctcgtgcctgtaatcccrgcattttgggaggctgaggaggggagatcatctgaggtcaggagttcaagaccagcctggctaacatggtgaaaccccatctctactaaaaatacaaaaa

SEQ ID NO: 290692 - DNA, 201 bp, Homo sapiens
ccggggctctggaactgggactcacagcggggtgaggatgggctagctcaagacctatggaacttgggagatcagaaggccagcgctggggcaaagctgarggcaggccaaccagagagcccaagaaagggccctggcagagaggaaaactgggcataaggtgacaggtctgagcgagagtgctcagaggagccggcccct

SEQ ID NO: 290693 - DNA, 201 bp, Homo sapiens
gagaaaatgagattaatgggcccttcctaggctatctcttcaaggatcagaacttccagtcggtttcaatcaacccagaactctgtagattggaaaatagsttccacagcatcagagacttcaaaactcaatatgaggtccagaaaaaccaacacctggagaatgagagaacccacatgtggagcaggggcatatttgagt

SEQ ID NO: 290694 - DNA, 201 bp, Homo sapiens
tgggcccttcctaggctatctcttcaaggatcagaacttccagtcggtttcaatcaacccagaactctgtagattggaaaatagcttccacagcatcagaracttcaaaactcaatatgaggtccagaaaaaccaacacctggagaatgagagaacccacatgtggagcaggggcatatttgagtctggtgttggcatggg

SEQ ID NO: 290695 - DNA, 201 bp, Homo sapiens
aaaaagctgtcccaagacatcagaattgaacccaggctgcctgcagctgggaacagcacggcagggacagactcccagaatcatctgtgtttggtgcctcygcagaggagctgagacaagatgttggcaggggctttgcccttcggtttcattgttgatggttttaaactgacaaaagcagttgaaaaggttgcaaaaata

SEQ ID NO: 290696 - DNA, 201 bp, Homo sapiens
tggttggggccagcggctttggtcccaccccacccttagatctcctcaacactggtgatctggctttctagctgccgggttttatcttcacgtgacggctstgggggaactgagagggcattactaggggttataaattaggtgtggtgggaaccgaatttttaatggtttcagatctagatatggacgttatccccttag

SEQ ID NO: 290697 - DNA, 201 bp, Homo sapiens
cccgcctcggcctcccatctcgctctgtcacccaggctggagtgcaatggtgcgatctcggctcactgcaacctccaccccctgggttcaagccattctgytgcctcagcctcccaagtagctgggattacaggtgcgtgccactgcgcctggctaagttttgtatttttagtagagatggggtttcaccatgttggtcag

SEQ ID NO: 290698 - DNA, 201 bp, Homo sapiens
tgaggaggttggcaggggaggatgagggacttgtcatgagcaccctcgtacatgtggatggttcttcaccttgtcgagctcatgcttattcgtacagcgtytggagcagcagctgcccaagtctagctgcttacctacaaagtcgatgggtattgacagactgtcttccaaaaggaccgtgctaatctataccatccaagt

SEQ ID NO: 290699 - DNA, 201 bp, Homo sapiens
ctactaaaaatacaaaacttagccaggcatggtggcacgtgcctgcagtcccagctacatgagagactgaggcagaagaattgcttgaacccagggggcakaggttacagtgagctgagatcgcactactgtactccagcctgggcgacagagcgagactccgtctcaaaaaaaattaaaaaattaacattaacattttgc

SEQ ID NO: 290700 - DNA, 201 bp, Homo sapiens
tttgtttgtttgcttcagtttttttataagaaagaagcttggaggctgggtgcggtggcgcacgcctgtaatcccagcactttgggaggccgaggtgggcrgatcacgaggtcaggagatcgagaccatcctggccaacatggtgaagccctgtctctgccaaaaatacaaaaattagctgggtgtggtggtgtgcgcctg

SEQ ID NO: 290701 - DNA, 201 bp, Homo sapiens
gccttctagatttcagtccggaaactccacatctaatgggcgtatgcagctcctttaccagagccacttatgtgttgtgggacgttggcaaaggcacagtmtatgtctctgagacgttaggagcagggattctttaactctttctccctgatgaggaaaatagcagtgagggggcttgcaacaggcctgatcccgactcaa

SEQ ID NO: 290702 - DNA, 201 bp, Homo sapiens
  misc_feature (1)...(201): n = A,T,C or G
ccccttccttccctgggtcaggggcctgggaggctcttgggaggctgtatcggtcgcttgggctcctgaggcgcactaagtgctgactctgttctgggccntcggaccctgtatgcagggacagcgaggacagaggccacgggaacagatgtggggggccagggagctggccagacatcctgccccagtgactctgcaggg

SEQ ID NO: 290703 - DNA, 201 bp, Homo sapiens
  misc_feature (1)...(201): n = A,T,C or G
tgtcccttagggttcgactggagcctgcatttcaagtgggagcagatccctcttgagcagaagatgacccggacagaccccaccaggcccataaggtcagngctgcggtgggctctgggggaccccttccttccctgggtcaggggcctgggaggctcttgggaggctgtatcggtcgcttgggctcctgaggcgcactaa

SEQ ID NO: 290704 - DNA, 201 bp, Homo sapiens
gagactgaggcagaagaattgcttgaacccagggggcagaggttacagtgagctgagatcgcactactgtactccagcctgggcgacagagcgagactccrtctcaaaaaaaattaaaaaattaacattaacattttgccattgttctttcatcgaaaccactcacaatatatttttttttctggagtacttaatttctca

SEQ ID NO: 290705 - DNA, 201 bp, Homo sapiens
acaagctgagcccagaccggcccatccgggacacccgccattacaggtacggcctccatcgtgtcagtggaggaagaaagactgagagaaagccaacattrtttagtttgtcttcttttacgtgtatctaagaaatgaggatgatttcctcagactgtgtccagtgatttagacattcaaaaaccctcaccctctgttgct

SEQ ID NO: 290706 - DNA, 201 bp, Homo sapiens
acctgcttcggtacaggaacctcttattcagcaaaatgctgtgacttgcggcttcataatatggtgaattctggttccacaacttactagctgtgtgaacrtgggcaaagtatacctctgttctgtttcctcagtcacaaaacggggactgatatggtttggctgtgtccccacccaaatctcatcttgtagttcccataa

SEQ ID NO: 290707 - DNA, 201 bp, Homo sapiens
gttaaagatcactctttaaccagcacctggctggcttgcctttgggtgaggtgcccagcctgggcaactcactgtggccaggtgctcagaaccacagggcrcagaactcatagggtaggacaacaaagggtagggcacgcgggacaagggcagaatcctgtaagaagggatagatgagggaactttctggaatgatattac

SEQ ID NO: 290708 - DNA, 201 bp, Homo sapiens
tatgttggggcaggggtggtggctcacacctataatcccggcactttgggaggccaaggcaggaggatggcttgaggccaggaatttgagacccgcctagsgtaacatagcaagatcctgtttctaaaaaaaaaaaaaaaaatctatctatctatctatctatctatctatctatctatctatctatatctatctatctgt

SEQ ID NO: 290709 - DNA, 201 bp, Homo sapiens
aatgtaccatcgtctacatttccattgtaggcaccattgtagctggggctgtggcagtcgcatggagaaagggcctgtttgaccctcagagaaagagggtyttgtgaggacaccagagaactggaactgcagttgaaaggggaggaagctgagcccccctctccatctgtccctcagggacggtgccatctctcacacaga

SEQ ID NO: 290710 - DNA, 201 bp, Homo sapiens
actttgggaggccaaggcaggaggatggcttgaggccaggaatttgagacccgcctagggtaacatagcaagatcctgtttctaaaaaaaaaaaaaaaaabctatctatctatctatctatctatctatctatctatctatctatatctatctatctgtctaatatatatagtcccagctactcaggagactgaggtggga

SEQ ID NO: 290711 - DNA, 201 bp, Homo sapiens
gcaggaggatggcttgaggccaggaatttgagacccgcctagggtaacatagcaagatcctgtttctaaaaaaaaaaaaaaaaatctatctatctatctayctatctatctatctatctatctatctatatctatctatctgtctaatatatatagtcccagctactcaggagactgaggtgggaggatcacttgagccta

SEQ ID NO: 290712 - DNA, 201 bp, Homo sapiens
taattttttgttgctaagatggaaaccccagacctcattcctgtctggattactcacccccagttcctaggctgaggggccaggagtggatcaatttgctrattagaaaggggacccataggcctgagtgataccaactttcctccaaacagggggtccctaaatagttgcctacacttgcaaacagtcagtggggagacc

SEQ ID NO: 290713 - DNA, 201 bp, Homo sapiens
agttaaaataattttttgttgctaagatggaaaccccagacctcattcctgtctggattactcacccccagttcctaggctgaggggccaggagtggatcratttgctgattagaaaggggacccataggcctgagtgataccaactttcctccaaacagggggtccctaaatagttgcctacacttgcaaacagtcagtg

SEQ ID NO: 290714 - DNA, 201 bp, Homo sapiens
aagaacattaatttatgaaaatgcaacttcctgaagtggtcacttctaggggacagtgttcattcagatgcatcatttctgagaccctgaagaaaaaagakcagtcacttctttacactgtgtcagcgttcatacaacatttgggtgaagcccactagttccagccctagggcaggagctgggcagcctgtgggaagagtg

SEQ ID NO: 290715 - DNA, 201 bp, Homo sapiens
cagctccgcctccctccccagcatcatctcctccatgttccttgtagccgttattatcatcggcattatctggccaattaattttgttgtatctccctgarcttgcctgtaagttctatgagggtggaggctttgatctgtttgttcactgctttatctccagcacctggaacagtgcctgtcataaaatgggcactcagt

SEQ ID NO: 290716 - DNA, 201 bp, Homo sapiens
gccaggctcccgatggcattctgggtgcctgtgcccctcttctcccaggaggacaggatgagccagctatcccactgccaatgccttctggaatccgggcygtccttcttggtcccctgctggtcctatttccaaggctagctgggtttcctgtatccgagaggctcctgtgcctcagacctggtgtgatggagtcagcag

SEQ ID NO: 290717 - DNA, 201 bp, Homo sapiens
tgtccacatcaaagaatgccaaacatcttataatggcccaaccccccaggcccagattgtttcactgacagaggtaacaggaggcagagaaggcacacacrctgtaatccctcctgctcccctgtaactcccaggcctggtgactccttaatccaagaacgaacataacctgaactcaggtatgcaagcctgcagcagctg

SEQ ID NO: 290718 - DNA, 201 bp, Homo sapiens
gaggcaaatctttgtcctttgaggacaggtttgatttttggccaacagccaccattaagttgtagccaagtgcaatgaataagctagagatgattaacccwgataattataatcccaggtcccaaatacagcatgactctaaatgaacaagattaaactgactctaggagcaatttccaagaagttccagaacaatgtgag

SEQ ID NO: 290719 - DNA, 201 bp, Homo sapiens
ttgtcatgagcaccctcgtacatgtggatggttcttcaccttgtcgagctcatgcttattcgtacagcgtttggagcagcagctgcccaagtctagctgcwtacctacaaagtcgatgggtattgacagactgtcttccaaaaggaccgtgctaatctataccatccaagtatcaccttgctcctgagattctcatcgtcc

SEQ ID NO: 290720 - DNA, 201 bp, Homo sapiens
catgccattttccagaggtgacccctgtagagcggtttcctgtgtattctttcaggtatacctatgcatttacacatgcatatgtttataaactatttatrtaaaatgaatcacactgtatatatttatttcttctaacattcctttagaattctagtataaggataaagtatactttaattaatcagttgtctactgata

SEQ ID NO: 290721 - DNA, 201 bp, Homo sapiens
gacataatctaccaccccaaaaaagaggccagcaaaatcaacattattcatcaaggttttggatttggatttgtgttctgggaggtgatgcggggagtggygagtctgaccttgtaacagtggatgtggtatgagagggatagcacccagattacatggggacctcggagcccctgccctccagctgctagtagtcccatt

SEQ ID NO: 290722 - DNA, 201 bp, Homo sapiens
gcctctgcctggagacaaagcctgcccagctggtgaccagcaagtgtcaggctgacgcccaggcccagcagtggcagctgttgccacacacatgacggtarccctggggcctcctgtaccttttgcatgagacttcgggaccggaagggggttagggtgggggagtgcaaagtgggctgttcccatctcctcacatttctg

SEQ ID NO: 290723 - DNA, 201 bp, Homo sapiens
ctttaaacctgtgattttatatctcagcacaaaaaaaagtctataaaaaggatgaggtgaggccctccacagagcactgaaaaaccatcaaaggtctctgytgatcagccccatcccgggcttccgttatcctgatctagggtgggaactgaggggcagagctggattccaagttccagacaagaggattttgggggtgaa

SEQ ID NO: 290724 - DNA, 201 bp, Homo sapiens
atcaggacaaacagaggtagttttccctctcgcacataccccccaccatacgacagagtgtggtcagggctgtatcctggggcctggtgcagtacctgtayatactagggagccccctctgggggctctgagatctctggtaaagagcccccaggccttggaaggtctcccaacctgctgcttccctcccaggaccccagg

SEQ ID NO: 290725 - DNA, 201 bp, Homo sapiens
tagggtatcaggacaaacagaggtagttttccctctcgcacataccccccaccatacgacagagtgtggtcagggctgtatcctggggcctggtgcagtayctgtacatactagggagccccctctgggggctctgagatctctggtaaagagcccccaggccttggaaggtctcccaacctgctgcttccctcccaggac

SEQ ID NO: 290726 - DNA, 201 bp, Homo sapiens
actgctccccagcttgttgtctgcagcagggctgtcagtgttgggcagtgacagggaggaattccctggcagccagggtaggggtgattcctctgcagatkctaccaaatgtcctgagctgggaagagagaaggaagaaactctagggtatcaggacaaacagaggtagttttccctctcgcacataccccccaccatacg

SEQ ID NO: 290727 - DNA, 201 bp, Homo sapiens
ggctacagaggaaaaagtctgaaaagattttttcccacttaaaaaataacaattacataaacatagtaacaaccgaaaggatggaaaatcacccataatcttcccatcctaacaaatcacagtttttagttttcagtatacccttcctgtcaaggtccgtaatttttacataactgcaatcacaaagtgtatacaatttta

SEQ ID NO: 290728 - DNA, 201 bp, Homo sapiens
gtacagggggctggcaaatcaaagatgaacaagacattctagctcctgtcttcaagttgcttacagtaaggtgggaatcggtgataacagaggcatggatraataccaggagagggtgtgcttaagaatgatttggctcatccttacccatcctgatttggaaaaatggattcctgctttttgggtgctcacacctgccct

SEQ ID NO: 290729 - DNA, 201 bp, Homo sapiens
tgatccggtcccgagtgcgtggggcggacgtggctgcagctaccgttctcacctttctggatagccactgcgaagtgaacaccgagtggctgccgcccatkctgcagcgggtgaaggaggtgagccactgtctctggggagctgggcgtccttggggactcagccactacgttcctggcaccgaggcctatgggacagtat

SEQ ID NO: 290730 - DNA, 201 bp, Homo sapiens
ttacacgtggctgctcactcatgacaaataatgctcccgggtggaaaacttgccacccaccctggacaggactctggggccttcactgagcacctgcttcrgtacaggaacctcttattcagcaaaatgctgtgacttgcggcttcataatatggtgaattctggttccacaacttactagctgtgtgaacatgggcaaag

SEQ ID NO: 290731 - DNA, 201 bp, Homo sapiens
ttgagactcatatggacttcctttgtccatatgagtctcggaaaattggccaaatccccaactaagccatgctctccactcatggagccccgagtgctggkcatggatgcctgtgccccaaccctgacttgatcaaccatctgtccatccctatccccagctacagggtgcactagtctcaagggagagtgggtaatgtcc

SEQ ID NO: 290732 - DNA, 201 bp, Homo sapiens
caccgctgtcaaaaggaggcatggctcaagagggccagtgagagcctgtacaaggagaccaactgggtcaagagggaggttggggccagcccaagaggtgycagctggagcagcctgtggtttggttggtggctggttttccgacctctcaggtgcacagagctggctgacgagcagatgtgtttttccttagctcatgtc

SEQ ID NO: 290733 - DNA, 201 bp, Homo sapiens
caatctgccgccctcagcctcccaaagtcctaagatcacaggcgtgaaccaccgcacctggctgacatgctacatttttatgcattttcttgtttacttgyatttttttgccccttattttatggagttcccgtcttctcacttccctgctagagtacaagggaatctagagcagtgtctgacatataatgaaaatttgct

SEQ ID NO: 290734 - DNA, 201 bp, Homo sapiens
gagtctccctctgtcacccaggatggagtgcagtggcacgatcttggctcactgaaacctctgcctcccgggttcaaacaattctgcctcagccttccaartagctgggactacaggtgcatgccgccacacccggataatttcttttgcattttagtagagacggggtttcaccatgtggcccaggctggtctcgaactc

SEQ ID NO: 290735 - DNA, 201 bp, Homo sapiens
tcggacctgccagccaccagcgtcatcatcaccttccacaatgaggcccgttccaccctgctgcgcacagtgaagaggtaagtccagccatgggactctcrtctcagtggtgctggcaggggaggacattgggattgggcgctgtggccagacagcttgaagcccagcaggtgctggaggctgagtcctgtacttctgaga

SEQ ID NO: 290736 - DNA, 201 bp, Homo sapiens
accatctgatatgctgtatttattttattttttatttttatttttttcattttatttatttatttatttttagagacagagtctccctctgtcacccaggwtggagtgcagtggcacgatcttggctcactgaaacctctgcctcccgggttcaaacaattctgcctcagccttccaaatagctgggactacaggtgcatg

SEQ ID NO: 290737 - DNA, 201 bp, Homo sapiens
actggccctcttcagctcccagcctgattcatttttctccatggccctaactaccatctgatatgctgtatttattttattttttatttttatttttttcwttttatttatttatttatttttagagacagagtctccctctgtcacccaggatggagtgcagtggcacgatcttggctcactgaaacctctgcctcccgg

SEQ ID NO: 290738 - DNA, 201 bp, Homo sapiens
ggcctttctgctccctgccttgcaggcatggctgttcagtgaccacctcatccagcagcaggggaagtgcctggctgccacctccaccttaatgtcctccyctggatccccagtcatactgcagatgtgcaaccctagagaaggcaagcaggtgagtctccttgcctctggcccagaggcccagcagcccgaggggccatg

SEQ ID NO: 290739 - DNA, 201 bp, Homo sapiens
gggctggaattagggtgaggcaaattatctatgcacagagccagatcctgtctttaccttaattttttttttttttttgagacaaagtctcactcttgtcrccgaggctggggtgcagtggcacagtatcagctcactgcaacctccgcttcccaggttcaagcgattctccggcctcagcctcccaagtagctgggatta

SEQ ID NO: 290740 - DNA, 201 bp, Homo sapiens
caacgagcactaagctagaagctggtttacaaggataagtaagacccagttcctgccctcaagttgctcagccctgtaagggactgagtgggtgtgggaarggctgtgggggccgtgtcagggcgtatgccgagtatagcacagtcttggacagcttcactgagggctgaatctttgaagatgagcgtgtgcttggtggac

SEQ ID NO: 290741 - DNA, 201 bp, Homo sapiens
aacaaaggagtgctaatatcccttcaaagtcttgatttcaattcttttggataaatacccagagtgggcttgctggatgttatggaagttctattgttaatttttttaagagcttccatactgttttctgtagcagctgcgccatttcacattcccactgaaagcgtgcaggagttccaatttctccacatcctcaccaac

SEQ ID NO: 290742 - DNA, 201 bp, Homo sapiens
aagctagaagctggtttacaaggataagtaagacccagttcctgccctcaagttgctcagccctgtaagggactgagtgggtgtgggaaaggctgtggggrccgtgtcagggcgtatgccgagtatagcacagtcttggacagcttcactgagggctgaatctttgaagatgagcgtgtgcttggtggacacaggaaggaa

SEQ ID NO: 290743 - DNA, 201 bp, Homo sapiens
ccagtcaaaaacacaggacccgtctaccccaggcctgccacagaacacacggcatcttcttgaccagtgtagcccccatcagtgaatcaagagactttccmggacatatgagtcactcaccattcctggttttccagatcaagaccccacacacctcaccatggtttgtgactctgcccactgttggtccatctttgtgca

SEQ ID NO: 290744 - DNA, 201 bp, Homo sapiens
tctgaattctccctgaagtttctcaagtcctcaaagactgaagtgctaagagccaaaagtgtttcttgggatcagtgaccctccaagtccaaagcaaactracagtgtctgccactgcctagctcaattctttgtgtactgctttccagcagggactgaaagaagggccagtcaaatctaggaagtgacctggacagccgc

SEQ ID NO: 290745 - DNA, 201 bp, Homo sapiens
agaccttggccttgctgtcctgtaacgccagcactgtcagcctccagaaaccactcatgcagccaagtaaggcagtactcctgcttcgcggcaaggacacyaccaggcctgctggctgtttctgggcctcagaagttctttctcacccagtcctgggcagcatcccctcctgtctgcctgtgctgcagaagaggttacatc

SEQ ID NO: 290746 - DNA, 201 bp, Homo sapiens
agtgggtgtgggaaaggctgtgggggccgtgtcagggcgtatgccgagtatagcacagtcttggacagcttcactgagggctgaatctttgaagatgagcrtgtgcttggtggacacaggaaggaacatcaggtgaggggtgtggcaaaggcttggcgtagtaaccccaattccatcttgtagggtcatctcatgggattg

SEQ ID NO: 290747 - DNA, 201 bp, Homo sapiens
cagggactgaaagaagggccagtcaaatctaggaagtgacctggacagccgcctagtggcctaatttacagggggaggaaatgaaggtcaggagagagtaycatttgtttaaagttgcacagcttgtttggacagactagggctggaatccaggcctcctggcttccagcatcccggcaggactcttcccactaccccctg

SEQ ID NO: 290748 - DNA, 201 bp, Homo sapiens
ttcccaagccacacagactacaggagagcccagcctagaataacctactcatgttccctatgcaacagaaataatggtgcctggtattgatttatttttcytatttttaaaattttgtattgtagtaaaatacatataagataaactttaccatcttaaccatttttaaatgtacaattcaatggcattaaagacattcac

SEQ ID NO: 290749 - DNA, 201 bp, Homo sapiens
agcccagcctagaataacctactcatgttccctatgcaacagaaataatggtgcctggtattgatttatttttcttatttttaaaattttgtattgtagtraaatacatataagataaactttaccatcttaaccatttttaaatgtacaattcaatggcattaaagacattcacattgttgtgtgaccatcactaccatt

SEQ ID NO: 290750 - DNA, 201 bp, Homo sapiens
aaatgtacaattcaatggcattaaagacattcacattgttgtgtgaccatcactaccattcatctacagagctctttcatcttcccaaactcaaagtctaygcccattaaacactaactccccatttcccctctccctagcccttggaggctactatcctactttctgtctctatgactgtgactactctaggtacctcat

SEQ ID NO: 290751 - DNA, 201 bp, Homo sapiens
tagctgcgattacagacatgtgccaccatacctggctaattttgtattttgtgtagagacagggtttcattgtgttggccaggctggtctcgaactcctgwcctcaggtgatccacctgccttggcctaccaaagtgctgggattataggtgtgagccactgcgcctagccctgacaagtattttattgtggttttgatat

SEQ ID NO: 290752 - DNA, 201 bp, Homo sapiens
atgtctgcactagctgggctttgttttctttatgtgaagacaactcaagttgcatggtgaggtttcatcgctttcagagaggctgtaacctgggaccaccygcatcccctggaggcgattccttgagtagttcccttgcccgctgcctgtgtggacacagtgttgtgtggcgttggagtgcacaggcctggagtcaaccag

SEQ ID NO: 290753 - DNA, 201 bp, Homo sapiens
gtttttgttttttttaactgttgagttgtaggagttccttagaatttttggaaattaacctcttataagaaatatgacttgcaaatattttctctcagtcktttcactctgttgattgtgtccgttgctgtgcagaagcttttttagttagatttaatccggctttgtttatttttgtttttgttgcttgtgtttttgatg

SEQ ID NO: 290754 - DNA, 201 bp, Homo sapiens
agttgtaggagttccttagaatttttggaaattaacctcttataagaaatatgacttgcaaatattttctctcagtcttttcactctgttgattgtgtcckttgctgtgcagaagcttttttagttagatttaatccggctttgtttatttttgtttttgttgcttgtgtttttgatgtcatgtccacgaaatcattgcaa

SEQ ID NO: 290755 - DNA, 201 bp, Homo sapiens
ttcaccccccagcttacctgactctgaaccgcctcaggtgctcactgagaaacttaaagggggaattgccctgggggctatgtacatttttaaatgagacrctttaaatccagggtagtggtgggttgatgaggtgccacatgctgctgctgggccctgtcagaaagctgaggtgggccaggcacggtggctcacacctgt

SEQ ID NO: 290756 - DNA, 201 bp, Homo sapiens
gtggttctggcaagggttttgtttcttagaagaaattcaaagaaatgtctgggctagctgcagtgctcagacgttcagccgctgggaccagttttgagctrtgagactcctgtcgctggtgggtttgagcctttccttttattcctttattgaaggaagggagatttccaaaccaagacgtgttcttttgtccccaaagaa

SEQ ID NO: 290757 - DNA, 201 bp, Homo sapiens
gttggagaacttgaaaggtgaaccacagagtggttctggcaagggttttgtttcttagaagaaattcaaagaaatgtctgggctagctgcagtgctcagaygttcagccgctgggaccagttttgagctatgagactcctgtcgctggtgggtttgagcctttccttttattcctttattgaaggaagggagatttccaaa

SEQ ID NO: 290758 - DNA, 201 bp, Homo sapiens
acagggttgcaagtgagatggaggttagataaagggtgagcatcagttagggtcctggcagaatacggaaggtgcaaccgacttgagtgtttattaaaggkcttatttacatggtgcgggcaggatagagggaaccatagggacagcacagtactgggcagggctgtgacttctgggagctgtaaccaccccaaggtctga

SEQ ID NO: 290759 - DNA, 201 bp, Homo sapiens
ccttcattcaggtctctactccaaagtcaccagagagcctttcctgactattctaactaaaatattaatagtatgggcactccttctttgttttcttcttytttttttttttttttagtactttcatccccagctgacatagtctccactgatttatttatctttgtagcttctgtcttacccagtagatggtacacttcc

SEQ ID NO: 290760 - DNA, 201 bp, Homo sapiens
  misc_feature (1)...(201): n = A,T,C or G
cacacccgcgtggtgagtcccatcattgatgtcatcagtctggataattttgcctaccttgcagcatctgctgaccttcgtggaggtgagttctgctcccnggggtggggctgtagacatgaaaggaggtaggtgaggctaggcaggcaaaaacccttgcttgctgctctttccagctgtgccagagaccctcatgaacac

SEQ ID NO: 290761 - DNA, 201 bp, Homo sapiens
ctttgggggacaggtgggaagccagttggcccagtcccagcgccaagccctatctactcctcttgtagggctgatccggtcccgagtgcgtggggcggacrtggctgcagctaccgttctcacctttctggatagccactgcgaagtgaacaccgagtggctgccgcccatgctgcagcgggtgaaggaggtgagccactg

SEQ ID NO: 290762 - DNA, 201 bp, Homo sapiens
cactctggcaggggcaggagaagctgggcctcctccctcctgaccaggcaggtctccgcccagagcagagtgctgcccaaaatgaggctggtgaggctatygggggacaggcacagaagaacagaacctgacatgtgtgggtctcccaggcaccaagctctgtccctgtcgtcttgtttgatcctgacagtcagggattat

SEQ ID NO: 290763 - DNA, 201 bp, Homo sapiens
agaatcatccggcctctcttgctgcccttctttccgatgaaataatgctgacgatgatatttcagggttgtccaggggtcaatgaggcgggatagagggargcatcgtgaaatctgggagccccaggccagcgaaaaatgtggaagggccgtacccgcactctcctagcactgggtgtgaggcagcgtcgtttccccttcg

SEQ ID NO: 290764 - DNA, 201 bp, Homo sapiens
gagtccccgactttcctcatctcctattgttccctccatgcactgtgctccttccacactgacctcctttctttccaacaggacctcaagttgtcctgccytgggcgctttgcacaggccatcctctctgcctagaacacccctagctcctcagatctgaccatggttggctcctctctccagccctctccagcctgtacc

SEQ ID NO: 290765 - DNA, 201 bp, Homo sapiens
caacccgggctaggttgggcccctcttctgtgctctgtgcagacatctcacagaatggccagggcgctgttggagctgactcacggctgtgcctgcagctrtgtgctcaaagctaggctgggcctccgtctggtcctggcttgagggtagcaacaatgacttggatcaaggttgcttttacttctgaagcagctactccac

SEQ ID NO: 290766 - DNA, 201 bp, Homo sapiens
aggaagcctccactctcatcccagctcagtgtgcgtgaccggccttaagcaaggcattagcccctctctgggtctatgcccttgtgtgttctgtctagagsgtgaaagtcaccatctccagtctttcctcttcctgccgtcacctgcacgaacagtctgagttcctgatgctgaagcaccaccccccgctccccatgacct

SEQ ID NO: 290767 - DNA, 201 bp, Homo sapiens
aaatgaatcacactgtatatatttatttcttctaacattcctttagaattctagtataaggataaagtatactttaattaatcagttgtctactgatagasatttatttccaccatttttattaaaaataatgcagtaattaatatatttgtacatttcacatatttacatgagtttaattgtagggctaatgcctagaaa

SEQ ID NO: 290768 - DNA, 201 bp, Homo sapiens
actgtcaatctgcaggcgcttggcagcatccattctggtttgtagtcccctcaggacaccttgccttagaggtctggtgcactccaggactcacccccccmatatcccgcaaagaacattggttaagagcatgggctttggagtcggaatgaccagtttaaatccagaccttgtgacttaatagctctgaccctggatgct

SEQ ID NO: 290769 - DNA, 201 bp, Homo sapiens
tgagacgggaggatcgcttgagccagggtggttgagcctgcagtgagctgagattgcgcccctgcacttcagcctgagggacaaagtgagactctgtctcaaaaaaaaaaaaaaaaaaaaaaattaggctgggcacagtggctcacacctgtaatcctagcattttgggaggccgaggtgggcagatcacttgaggtcagg

SEQ ID NO: 290770 - DNA, 201 bp, Homo sapiens
agactgtcaatctgcaggcgcttggcagcatccattctggtttgtagtcccctcaggacaccttgccttagaggtctggtgcactccaggactcacccccsccatatcccgcaaagaacattggttaagagcatgggctttggagtcggaatgaccagtttaaatccagaccttgtgacttaatagctctgaccctggatg

SEQ ID NO: 290771 - DNA, 201 bp, Homo sapiens
gagacgggaggatcgcttgagccagggtggttgagcctgcagtgagctgagattgcgcccctgcacttcagcctgagggacaaagtgagactctgtctcaaaaaaaaaaaaaaaaaaaaaaattaggctgggcacagtggctcacacctgtaatcctagcattttgggaggccgaggtgggcagatcacttgaggtcagga

SEQ ID NO: 290772 - DNA, 201 bp, Homo sapiens
agacgggaggatcgcttgagccagggtggttgagcctgcagtgagctgagattgcgcccctgcacttcagcctgagggacaaagtgagactctgtctcaaaaaaaaaaaaaaaaaaaaaaattaggctgggcacagtggctcacacctgtaatcctagcattttgggaggccgaggtgggcagatcacttgaggtcaggag

SEQ ID NO: 290773 - DNA, 201 bp, Homo sapiens
cctgggagtggcagagccttctgtggccacttaggggcacagccagctccctctttgttcttaagctttagatgcctgttccaccagcactgacccccccrtcaggcaccacttttgacaactgccttgcattgtttcattgtattcctctcttccagttatttcttccatgtgatttgcagctgaatgtaagtgatgcat

SEQ ID NO: 290774 - DNA, 201 bp, Homo sapiens
tccagcctgggcgacagagcgagactccgtctcaaaaaaaattaaaaaattaacattaacattttgccattgttctttcatcgaaaccactcacaatatatttttttttctggagtacttaatttctcataggtaatatattaatcaggttctaagaccaaggagtataagaagatatttctttcactctggaaagtccta

SEQ ID NO: 290775 - DNA, 201 bp, Homo sapiens
ccatgtgatttgcagctgaatgtaagtgatgcatgcgggaactgtgctggaagctccttgcatccccacattgatgcacacagcaagatttctttttttctttttttttttttgagatggagtctcactctgtcacccaggctggagtgaggtggcatgatctcggctcactgtaacctccacctcccgggttcaagcgat

SEQ ID NO: 290776 - DNA, 201 bp, Homo sapiens
gaactcactattatgagaacagcaccaagggggatggtgttaaactattcataagaaatctcccccatggtccaatcacctccctccaggccccatctccracactggggattacaattcaacatgagatttgggtgggaacgcagagccaaaccacatcacatatgcaagaaaatataaatatatagtcttgctcaggtg

SEQ ID NO: 290777 - DNA, 201 bp, Homo sapiens
tagtcctcccccaccaccatccactggccctcttcagctcccagcctgattcatttttctccatggccctaactaccatctgatatgctgtatttattttwttttttatttttatttttttcattttatttatttatttatttttagagacagagtctccctctgtcacccaggatggagtgcagtggcacgatcttggct

SEQ ID NO: 290778 - DNA, 201 bp, Homo sapiens
ctagatggagtctcattctgtcacccaggctggagtgcagtggcacaatctaggctcactgcaacctccatctcctgggttcaagcgattctcctgcctcrtcctctagagtagctgggattacaggcacgtgccaccatgcccagctgattttttgtgtttttaatagagatggggtttcaccatgtcagccaggctggt

SEQ ID NO: 290779 - DNA, 201 bp, Homo sapiens
gtgtgtgtgtgtgtgtgtgtgtgtgtgtgtgtgtgtgtgtgtgtgcgcgcgcgcgcgcgcacgcatgcacacgtgtagggaagcaaaggacgtgctggctktagtgggcaggcctcctgccatggtggggccagtttgctggtagaagctgctcttccttgcagccctgcaggctgtagtgtccgctggactccaaattgt

SEQ ID NO: 290780 - DNA, 201 bp, Homo sapiens
aggatgatgatgataatgatgacagtaatgagctcaatccttttatcttaggtagagaattaaggttcacctgtttcttaaaaatttttattataaaaaayaaatccttatttatataaaaaaacctgacatgtatgaaggaaaaggtaaaagtcttcagttttctatctcacccccatgccattttccagaggtgacccc

SEQ ID NO: 290781 - DNA, 201 bp, Homo sapiens
gacaagggaactggggtttaaggagcttcagcgatttgcccagggtgatgaatagagcagccatggctccaacctgtggggcccaacccaaaggccagcckcctactcatactcatactcccttcctgcgagaccccaggcctggtcagcatggggaatagatggagtgaattgagatgatagaagaccttggaagccaga

SEQ ID NO: 290782 - DNA, 201 bp, Homo sapiens
gccagcttgtgcactctgcaagcaaaggcatcagtcaggggtatgggcatgcgcaatactaacagcccctttcctgaggtctcctcccctgcgggcatccrgtttgctactttcagtccttgtactcagcccactgtgcctgttgtacagacaagggaactggggtttaaggagcttcagcgatttgcccagggtgatgaa

SEQ ID NO: 290783 - DNA, 201 bp, Homo sapiens
gagcaattcccagtcctgcaagctccattcatggtatgtgccctatacaagtctaccattttttatcttctatactgtatttttactctactttttatacrtttagatacgtacacatgtgaaaatacttattgtgttaccatcgcctaccattcaggacagtaatatgctgtacaggtttatagcctaggagcaataggg

SEQ ID NO: 290784 - DNA, 201 bp, Homo sapiens
gaggtggagtggagtactgccataggtacaggcactcctcagtctggcctgagagtggggcagggcaacccttcggccagtagtgatgaccatacctcttsccaatccccatccccaaccctttcctgggcttagtatggggcaattttcatggcagccaaaccactagtggcctgatgcccatgtctaaatgagcttgcc

SEQ ID NO: 290785 - DNA, 201 bp, Homo sapiens
ggcgggagtacagtggcataatctcggctcactgcaacctctgcctcccaggttcaagcaattttcctgcctcagcctcctgagtagttgggactagaggygtgcaccaccatgcccagctaatttttgtatttttagtagagacgggtttcaccacgttggccaggatggtcttgaactcctgaccttgtgatccacccg

SEQ ID NO: 290786 - DNA, 201 bp, Homo sapiens
ctttttgcagccctccattccgccctcgtccctgtttccccagaacaccaaggcaagcaccctgaggttgtcctgaccatcgcagacacctttctgccccyagcagggatcctgtcttttctaggacccctccctggtcctgttccctggtgtcaaaggaggggaaagaagggtgggtgttgctttggatgggactctagt

SEQ ID NO: 290787 - DNA, 201 bp, Homo sapiens
tccgacctctcaggtgcacagagctggctgacgagcagatgtgtttttccttagctcatgtctgtctggggctttctagacagagcctggaaatgatgccrctgtttggttgttttccttctacttatgttcttggtgttccttcaagctttttccactgctcttcctggaatgggccacggggatcatgtgtatatgtgt

SEQ ID NO: 290788 - DNA, 201 bp, Homo sapiens
atcacaaagtgtatacaattttatcctgccctttcctccctttattgtgcaagcatttttctgtactgctacagagctttcatagctaatattattattgktattttttcttgatttcagaggtataattattcagcaagataaatgagaacatctagataaacaaaaatgggatcaaaatgcacatattaatttgtagct

SEQ ID NO: 290789 - DNA, 201 bp, Homo sapiens
gtgagacttattcactatcacaagaatagcacgggaaagatgattcagttacccacattgattcagttacctcccattgggtccctcccacagcatgtggraactctgagagatacaattgaagatgagatttgggtggggacacagccaaatcatatcatctgtttccaaaaaaagaaaaaaaaagaagaccaaagaaga

SEQ ID NO: 290790 - DNA, 201 bp, Homo sapiens
tacagtatggtggttaagcatttggcccttaaaatctggctactgcttgccctactgcctgctagctgtgtgaccgcaggcaagtcacttaacctctccgygcccagttttcttatttgtaaaatgatgatgatcataggagagttgtgaggcttaagcgcattaatatatgtaaagtgctggaaccaatgcctggcttta

SEQ ID NO: 290791 - DNA, 201 bp, Homo sapiens
cccaggatgggtggcatcggggttctgggccagtgtgggatgcagcatgggggtggaggcgcggggcctctggcctggctgttggtgtgccttctctgccwggcagaagtattctcaggcacaagactggacaaagaaaaacattgacctgccctgaggatgccctcatggctggctctgacctctgtgctcccttctcag

SEQ ID NO: 290792 - DNA, 201 bp, Homo sapiens
tgaggcaggagaatcgcttgtacccaggaggtggaggttgcagtgagccgagatcacgccactgcactccagcctgggcaacagagtgagactctatctcaaaaaaaaaaaaagaaagaaagaagcttgaagcaaatctaacaaaatataaacagttgttaattctggtggcagtgcaagtaatagtattctttgtctttg

SEQ ID NO: 290793 - DNA, 201 bp, Homo sapiens
catactagggagccccctctgggggctctgagatctctggtaaagagcccccaggccttggaaggtctcccaacctgctgcttccctcccaggaccccagsatgggtggcatcggggttctgggccagtgtgggatgcagcatgggggtggaggcgcggggcctctggcctggctgttggtgtgccttctctgccaggcag

SEQ ID NO: 290794 - DNA, 201 bp, Homo sapiens
ttgggaggccaaggcaggaggatggcttgaggccaggaatttgagacccgcctagggtaacatagcaagatcctgtttctaaaaaaaaaaaaaaaaatctrtctatctatctatctatctatctatctatctatctatctatatctatctatctgtctaatatatatagtcccagctactcaggagactgaggtgggagga

SEQ ID NO: 290795 - DNA, 201 bp, Homo sapiens
acaacagggatgaagtctggcaggaatgaattgttttcactccctttctagaggagagggagccagtaggccagaaaatgtggtgtctatggatggctggkgagggaggaagtgacgggataggcctttggtgtcttaacagaggcttgtttcctccaggggacccagtaccctgggaggagtgagactgctccccagctt

SEQ ID NO: 290796 - DNA, 201 bp, Homo sapiens
accactaccctacaccccctctcaaggagaattattgcacagcctctcaagatttcccccaggggggtcccaggctagtgggactcctgcctgtctgaccyggtctgctctgcagggcaggaaacaggcctgggaattcgggctgtaagctgctgtcagtagaatgaatgccacaatgaaaaaacgggcactggtggaata

SEQ ID NO: 290797 - DNA, 201 bp, Homo sapiens
gtcttcttttacgtgtatctaagaaatgaggatgatttcctcagactgtgtccagtgatttagacattcaaaaaccctcaccctctgttgctggtttaccyggcctactgaggccctgccaagaccaaggaaaccgctccgctggggccaaggaggccccaaggcacttcagtctggcgccccagcaaaagtgacctggga

SEQ ID NO: 290798 - DNA, 201 bp, Homo sapiens
tcagccggccaagctcactccctcccccacaattcataggcccttgaacagcatggtttctcaaggggtagaaggcaaatttccctccgccaccactaccytacaccccctctcaaggagaattattgcacagcctctcaagatttcccccaggggggtcccaggctagtgggactcctgcctgtctgacctggtctgctc

SEQ ID NO: 290799 - DNA, 201 bp, Homo sapiens
cagaccttggccttgctgtcctgtaacgccagcactgtcagcctccagaaaccactcatgcagccaagtaaggcagtactcctgcttcgcggcaaggacamcaccaggcctgctggctgtttctgggcctcagaagttctttctcacccagtcctgggcagcatcccctcctgtctgcctgtgctgcagaagaggttacat

SEQ ID NO: 290800 - DNA, 201 bp, Homo sapiens
accatcatgagtttgtacaaagcagcggctctcaacttggtagcacattggaactgcctggagagctttaaaaacatctgatgcttttgtcccacctccasagattctggtttagttggtcttgggtatggcctggacatcaggctttttgccatcttcccacgtgattctaatgtgtggccaaggttgagaactactgac

SEQ ID NO: 290801 - DNA, 201 bp, Homo sapiens
attatttttatgataggaaaagaacatccctcttgaaaaataaacatattaaaaatcctttgaattttattgctaaaatacttattaacaaacacatcttstttccaaacacatcttttttttagatctcatggtggatgttcctggacatggaaaggtgatggtggacattgcatatggcggtgcattttatgcatttgt

SEQ ID NO: 290802 - DNA, 201 bp, Homo sapiens
acttcattatttttatgataggaaaagaacatccctcttgaaaaataaacatattaaaaatcctttgaattttattgctaaaatacttattaacaaacacrtcttctttccaaacacatcttttttttagatctcatggtggatgttcctggacatggaaaggtgatggtggacattgcatatggcggtgcattttatgca

SEQ ID NO: 290803 - DNA, 201 bp, Homo sapiens; identical to SEQ ID NO: 59984

SEQ ID NO: 290804 - DNA, 201 bp, Homo sapiens
agtgtatataatttatatagaaaaatcttttattaaaatttatgttttgacattacggctgaagaaaattgatttgtaaataggatccaagaccctcactrttttaaaccatctctcatagtacaagtggggaatagacattttccttcttagtgttcacagggatgcccttgggtttccctctctcggcctcaggggtgt

SEQ ID NO: 290805 - DNA, 201 bp, Homo sapiens
gggatgacttctcctgaaccagcttcccaatttcatcctggtcccgggattggtggccaatgccccatttagttgttacaatcaagggaagagggcaggcmgactgaaccctgggaccgtcacctgtgtctcctggtaagtgctgatcttcaccctcactttagctttccaccttccagcagtccctcatttctatcaact

SEQ ID NO: 290806 - DNA, 201 bp, Homo sapiens
ggacactcctttgccaacagatgtctttcccctgagagcttaggcttccctaaaataaaaacatgaaagacaagctttctcccctgccataggcttccctraaaggcagtgatcaccaagctagcttaaattagggaagaggaaaatttgagaaggggcgaaataaacatcacccagccccctttctttggaaatacagat

SEQ ID NO: 290807 - DNA, 201 bp, Homo sapiens
aacatgaaagacaagctttctcccctgccataggcttccctaaaaggcagtgatcaccaagctagcttaaattagggaagaggaaaatttgagaaggggcraaataaacatcacccagccccctttctttggaaatacagattcaagatttcaaactactgaccttcaggtgaaactttggggatgttgagacttaaaatg

SEQ ID NO: 290808 - DNA, 201 bp, Homo sapiens
tgtacaagacacggtaccaaatcataaattagaaattattataaaattattaaatgttttaaaaaataatatagacatcaaaatgccaacataaacaatgmctatattaatgcctccatattcttttatatttccttattttattttttttttgagacagagtctccctctgttgcccacgctggaatgcagtggtgcaat

SEQ ID NO: 290809 - DNA, 201 bp, Homo sapiens; identical to SEQ ID NO: 59985

SEQ ID NO: 290810 - DNA, 201 bp, Homo sapiens
tctcccctgccataggcttccctaaaaggcagtgatcaccaagctagcttaaattagggaagaggaaaatttgagaaggggcgaaataaacatcacccagycccctttctttggaaatacagattcaagatttcaaactactgaccttcaggtgaaactttggggatgttgagacttaaaatgctcaaataaaaaccctgg

SEQ ID NO: 290811 - DNA, 201 bp, Homo sapiens; identical to SEQ ID NO: 59988

SEQ ID NO: 290812 - DNA, 201 bp, Homo sapiens
gaatagtgcttagtgtattttaaagcattttaaaatctgtcttgtccaactaaactccaagaaggggaaaagcctatgttttattccttgtacttctcgtmtcttctacagtaatcggcacatagtaggtgctcactaaatcttgagcaaagtaaatcaaattgaaatttcagtgatatgcttgtatagaagaaaagaaaa

SEQ ID NO: 290813 - DNA, 201 bp, Homo sapiens; identical to SEQ ID NO: 59992

SEQ ID NO: 290814 - DNA, 201 bp, Homo sapiens
gagctcggcggctccgcctcccggtaacccgggcgacagctccgaagttcctccctcgcttccgggtttaggctccgagaccccgccccccggacgtggcwggttagcgtcccgccctcctcccgcggagtcagtgggtgagggtcgggcttgaagccatagctgcgggaccgtactcgtctcccccgacgcagaccatgg

SEQ ID NO: 290815 - DNA, 201 bp, Homo sapiens; identical to SEQ ID NO: 59996

SEQ ID NO: 290816 - DNA, 201 bp, Homo sapiens
cagatatatccaattcctaatacagtaaatattgatagatataacttatataaagaaaaactctttggggtcctcaaatcttaaggtataaaagggtcctragaccaaaaggtttgagaaccattaggatttggggtttttttttgtttttttgttttattttataatagtgttttatttgatataataggatgtgaaagc

SEQ ID NO: 290817 - DNA, 201 bp, Homo sapiens; identical to SEQ ID NO: 59989

SEQ ID NO: 290818 - DNA, 201 bp, Homo sapiens
tttccttcacatgataaaagtcaagagtacagttttcaagccagatataatacgagtgcaatattttgatagtatactcccttcatcttttttcaggaagygaaatgtggtgattttaaagctgttatagtggaagtatcaggacaagcccattacacgggtacagcaagctttataatagaagatgacgacccattgagg

SEQ ID NO: 290819 - DNA, 201 bp, Homo sapiens
agttatctaaaacacaagtctgaccatgtcattctccttaaaaaccttccctggcccataggattaacccttggcctttccttcacatgataaaagtcaakagtacagttttcaagccagatataatacgagtgcaatattttgatagtatactcccttcatcttttttcaggaagcgaaatgtggtgattttaaagctgt

SEQ ID NO: 290820 - DNA, 201 bp, Homo sapiens
ttccaccttccagcagtccctcatttctatcaacttgcccattctcttttcattaaacttgcttttcatgttgcgccagcatcaagataaagacatttttkattcagttttgttgttacaatccacagcatgttttactcttttgattataaacttgctctgttttaacacatcatgggttaaaagggcttctgtggacta

SEQ ID NO: 290821 - DNA, 201 bp, Homo sapiens
gtgattaaaaaatgaaatagtcacagataattggtggacaagagtaactttaaaggaaatttggtccattttaaagaaaaggaaactgaaactcagtgagrtgtagcaccctacccaactgcccaccctaagaaaaccagacccaagattctagaaaggttgggccagggaaatgattgtaggctcagggatgacttctcc

SEQ ID NO: 290822 - DNA, 201 bp, Homo sapiens
aaaatgaagtaatgaacagatatatccaattcctaatacagtaaatattgatagatataacttatataaagaaaaactctttggggtcctcaaatcttaargtataaaagggtcctgagaccaaaaggtttgagaaccattaggatttggggtttttttttgtttttttgttttattttataatagtgttttatttgatat

SEQ ID NO: 290823 - DNA, 201 bp, Homo sapiens
atgaaatttggagaagaatatgctgattgacaaatgtaaacatctggtcctcttgagaaacctattgccactggaaattaaagttttggctttcgagtccstaatctgtgccaggaactccccatacgtggaattttcaaaacaactcttttaggagaaatagcagttacagtttgcacaagacaccaaagccacactaat

SEQ ID NO: 290824 - DNA, 201 bp, Homo sapiens
gtaaaaacttcttttcaactaggacattggttatccagtgtggtcttggggccccagcgggcccctaaggtcctttccatgggttcagagggtcaaaactrtgttcataataatgacattatttgcttttcactctcattctctcaagagtgtacagtggggttcttcagaggctacgatgtgatatgtgataacccaacc

SEQ ID NO: 290825 - DNA, 201 bp, Homo sapiens
gagcaaccttaggcagctgaaatccacgagttaacgaagaatgcctctggagaaattgatgccattttcccagagaatggtgtcacttccagactgggagkccacttgagggagacagaatttatgtttacgattccatttttaaaacctcaacagtttaactagcgtggctaccagaattccccctaggcaactccagca

SEQ ID NO: 290826 - DNA, 201 bp, Homo sapiens
caatactgctcacatctatcccttcccatctcagtgagggtcttgcctcatcaattaacctttttcaggtgtctccagtctcctgccctccccccccccccgcccccagccacccccacactggttccttctcttaagtatttaaatgtgctaattgtaaacaaaatgaaacaaacatccctgtccctccttccctctgtg

SEQ ID NO: 290827 - DNA, 201 bp, Homo sapiens
tcttaaaaatcttcaagccatgcaaatcatctgttagaaagttggaccttgattccccctgaagaactaggtttcagattagcctgattatgaatgataastgatagaacaggcacttttagagcaaccttaggcagctgaaatccacgagttaacgaagaatgcctctggagaaattgatgccattttcccagagaatgg

SEQ ID NO: 290828 - DNA, 201 bp, Homo sapiens
tggcggtgcattttatgcatttgttactgctgaaaagttaggactagacatttgttctgcaaagaccagggaccttgtggatgcagcgagtgcagtgacakaggcagtgaaagctcaggtcagtaatactctgccttcataaccaattcccttctctgtggcatggaggaaatatacattattatgtctataaagaaaatt

SEQ ID NO: 290829 - DNA, 201 bp, Homo sapiens
aaaaaggtattttaaaaatgataaggattaaaaagttatgtctaagaatgacccatctgcattatttataaatttgaatcaaaatatttattttgcatgtkatctttttttgttacttgcagtttaaaattaatcatcctgatagtgaagaccttgcctttttatatggaactatattaacagatggaaaagatgcttata

SEQ ID NO: 290830 - DNA, 201 bp, Homo sapiens
gattgcaaggtttatatgatcgctaaagttccctaggcctattgagccattaaaaggttttgctggattctctagtacagatccttgtacagcttatcatrtaaagcagggcatctctataaccataacccttacaggagggatgacctggcaagctggcatctggtttctcatcagactactacctcccaggagctgaat

SEQ ID NO: 290831 - DNA, 201 bp, Homo sapiens
ataagttactaaacctggtctcctttcctcacctcccccacttctttgaagaattaaatgagaatgaatgaacaaagcagtttataaatcattaagatackaatgttgcttttctttaagaacaggaacacacattgcctggtttcaaatcctgataaccccctaaagctgtgcaaccttaggcaaattacttaatctctc

SEQ ID NO: 290832 - DNA, 201 bp, Homo sapiens
gggacctttccagcccagggcagagctgcaaccgggacgcgactaactacattaacggtttttctgggctggaactctggcaactaacctactccgcgaamccttgcaattaatagaaaggtaaatcactgccaacgtgtgtcagcagccttgcgtatttggtgcgtgtaatttcgattttccctgactcccatccgcctg

SEQ ID NO: 290833 - DNA, 201 bp, Homo sapiens
taagaaaaccagacccaagattctagaaaggttgggccagggaaatgattgtaggctcagggatgacttctcctgaaccagcttcccaatttcatcctggycccgggattggtggccaatgccccatttagttgttacaatcaagggaagagggcaggcagactgaaccctgggaccgtcacctgtgtctcctggtaagtg

SEQ ID NO: 290834 - DNA, 201 bp, Homo sapiens
agctgttatgagaagaatctgggattgcaatgtccccccaaatagagagggagccgagagaccaaagaatgactcagacaagtccaggttggcaagtagaygcatttattagaacttccatataaggcactcctgggaagcagctgaacaactgtggagacccatcctgcctcctgactctaagctgcttttaagctaatt

SEQ ID NO: 290835 - DNA, 201 bp, Homo sapiens; identical to SEQ ID NO: 59986

SEQ ID NO: 290836 - DNA, 201 bp, Homo sapiens
gacccatctgcattatttataaatttgaatcaaaatatttattttgcatgtgatctttttttgttacttgcagtttaaaattaatcatcctgatagtgaakaccttgcctttttatatggaactatattaacagatggaaaagatgcttataccaaggaaccaaccaccaacatttgtgtttttgcagatgaacaggtatt

SEQ ID NO: 290837 - DNA, 201 bp, Homo sapiens
aatggcagaactagggttggaaccctggcctatcatattgcttccctctcatccttaaaattttttgtagtttaaggagatatgtttcaattttctagaatagtgcttagtgtattttaaagcattttaaaatctgtcttgtccaactaaactccaagaaggggaaaagcctatgttttattccttgtacttctcgtatct

SEQ ID NO: 290838 - DNA, 201 bp, Homo sapiens
gccagatataatacgagtgcaatattttgatagtatactcccttcatcttttttcaggaagcgaaatgtggtgattttaaagctgttatagtggaagtatmaggacaagcccattacacgggtacagcaagctttataatagaagatgacgacccattgagggatggatttcttctcaagtgacttcttccatgattttaa

SEQ ID NO: 290839 - DNA, 201 bp, Homo sapiens
ttggtgtttctgaatattagagtttccttaaggatctctacatcatatagtgatctgaaacatgtgaaaccatttatgttgtatgcaaaaatttggaacayactgtcttcaaaatctgaaatggaacataaaaataacaacatacatttattggatacttcactgtgcatcagtttccaagctaagcacttgatacatgcc

SEQ ID NO: 290840 - DNA, 201 bp, Homo sapiens
tcccttcatcttttttcaggaagcgaaatgtggtgattttaaagctgttatagtggaagtatcaggacaagcccattacacgggtacagcaagctttatartagaagatgacgacccattgagggatggatttcttctcaagtgacttcttccatgattttaagggctttctttttaaagtaatcattatccttaaggact

SEQ ID NO: 290841 - DNA, 201 bp, Homo sapiens
ttccaacattagtccagccagatatgttcatagaaatgtgctaacctctttttccccgagtaccattcaatgaagaaccaatgtaaaaccagaggaagcaytgccataaatccaagatagagccaatcataaagttcaggagattctgtgcaaggctgacaatatttctgtgcattcgttctctgtcctcttgggcatacc

SEQ ID NO: 290842 - DNA, 201 bp, Homo sapiens
caacttactgtacaagacacggtaccaaatcataaattagaaattattataaaattattaaatgttttaaaaaataatatagacatcaaaatgccaacatraacaatgactatattaatgcctccatattcttttatatttccttattttattttttttttgagacagagtctccctctgttgcccacgctggaatgcagt

SEQ ID NO: 290843 - DNA, 201 bp, Homo sapiens
cgccagcctgtggattgaccatcctggggtcagtgctgcaaagactatgtgtatttggggtgggaggggtgtataaaataggactgcttttttagcaaagkctatatgcaggacagcttccttagaagggactcaaagtatgataagaattataaattgcagtaaaactatgtttcttcatctagacaaagacataatttc

SEQ ID NO: 290844 - DNA, 201 bp, Homo sapiens
tttgaagctctgaatttacatcagttttctgttccattaagcaggacagctaatagtctgagttaacaatttggcacaaaataatttctcctaatttttcrtgaattcaagagaaaaagtcatggatatcttaataaaaggtgtaattttgtacttctcatttgagtttgaactcaacaagatggcaaggggtggactttg

SEQ ID NO: 290845 - DNA, 201 bp, Homo sapiens
gtgtttgtgtgagtgtgtgtgtgtgtttatatagagacaggatgtcactatgttgcccaggatggcctcaaactcctggcctcaagtgattctcccagctyggcctcccaaagtgttgggattacaggtgtgagccaccacacctagcagttactaaatttaataatacatacatactaatatagtttatagttccttaaa

SEQ ID NO: 290846 - DNA, 201 bp, Homo sapiens
tatacattattatgtctataaagaaaattaaatgatgtttaaattattaatagtactaagaatagggtacttattaaaatcttaggctctagagcaagcttgtcccacccgtggcctgtgagccacatgcagcccaggatggctttgaatgtggcccaacacaaattttgtaaactttcttaaaacattatgagttttttt

SEQ ID NO: 290847 - DNA, 201 bp, Homo sapiens
cagcctgtggattgaccatcctggggtcagtgctgcaaagactatgtgtatttggggtgggaggggtgtataaaataggactgcttttttagcaaaggctrtatgcaggacagcttccttagaagggactcaaagtatgataagaattataaattgcagtaaaactatgtttcttcatctagacaaagacataatttctag

SEQ ID NO: 290848 - DNA, 201 bp, Homo sapiens
agtgacttagctaccctgccagtgcctgcttctttgtgtgcatatctgctgctttttgatgaatcaactgacttcatcgtctacaataaatctttttttcmtccaattgtttctcttgcctaatagtttctgcattcttacagaatgttatatcctctcacagcctttgtctctatcattggtgttaacttcagctctaga

SEQ ID NO: 290849 - DNA, 201 bp, Homo sapiens
ctccgaagttcctccctcgcttccgggtttaggctccgagaccccgccccccggacgtggctggttagcgtcccgccctcctcccgcggagtcagtgggtragggtcgggcttgaagccatagctgcgggaccgtactcgtctcccccgacgcagaccatggagagcgcgctggcggtgccccggctgcccccgcatgatc

SEQ ID NO: 290850 - DNA, 201 bp, Homo sapiens
tttcatagagaacattaattcctattatttttttcctacattgctaagaagttactcaaataactacttaaataactctagtttttacttgggaaagctawtttgataaaatcagtttagataataattctaggatattctttcacttctagcacgagtgaagcacattttaccttgaaattgggacctataaataaaaca

SEQ ID NO: 290851 - DNA, 201 bp, Homo sapiens
tggctttgaatgtggcccaacacaaattttgtaaactttcttaaaacattatgagtttttttgcaatttttttttagctcatcagctctcgttagtgttastgtatcttatgtgtggcccaagacaattcttctcccagtgtggcccagagaagccaaaagattggacatccctgctctagagcaaaactatctatgagtt

SEQ ID NO: 290852 - DNA, 201 bp, Homo sapiens
tttttagctcatcagctctcgttagtgttactgtatcttatgtgtggcccaagacaattcttctcccagtgtggcccagagaagccaaaagattggacatycctgctctagagcaaaactatctatgagttctagctttaccactggtaacgtatataaccttgggcaagttacgtaacctccatatgcctcagttttcct

SEQ ID NO: 290853 - DNA, 201 bp, Homo sapiens
cccagcaagcttctaattatcactgtggaattcttggtgtgccacagaaacatttatcagttattataacatcagaaagccaagttcatgggctctcctgrtgactgttcactggttctttgtcgactctgtatcccacaggtgcagagaagagcatttcttagaattcagtcaacagagtcccctgggctgacctctcca

SEQ ID NO: 290854 - DNA, 201 bp, Homo sapiens
tctcattcgaacctgtggtgacatagtcctgcctgtttgtttcttattggtgacctaacacatgaccttgtgtttttatgttaagtgaggttgatctcttrggggaaacattatctctcttttctttatttcagagggtatattacctctctctggaattttacatgggccgaacattacagaacaccatgatcaacctcg

SEQ ID NO: 290855 - DNA, 201 bp, Homo sapiens
tatgatttttactttgatcaaaagatgaaccagtttctagttggaagggttgcctataatttaaatcatgatctagtgctcctttaagatatcaaagaaaygcactaaaatgtgatagagaatagatacgggtgtacagaagtaattggaaacatttattttcacttcatatctggatgggtttattaacctgagttcaag

SEQ ID NO: 290856 - DNA, 201 bp, Homo sapiens
ccatccagtaagtcacatgatagttgcccctagaatcctttagatacagtaataatgcatgtcttttcatcattaacttacttttcatcattaggaaagaytattttgtcttttctcagggcatccataagtgtacgtaaaaatcctggaatgttccggtaaatctatttttaaaaaagaaaaaaaaattaatatttgccc

SEQ ID NO: 290857 - DNA, 201 bp, Homo sapiens
tacaagcagatctagacagacaaaattactaattttaacttacctttcttgcagtcattccagccacagatctgtcagagcagatttccactgcaggcacygaagcctcggggacaggcaatatgaagttcatgctaaatggggccctaactatcgggaccatggatggggccaatgtggaaatggcagaagaagctgggg

SEQ ID NO: 290858 - DNA, 201 bp, Homo sapiens
  misc_feature (1)...(201): n = A,T,C or G
gggaaagagtgtgatctgccttctagaccatttgaatgtttatcttaatgtgcatgtattactttaattatcaaaacagcccaacttaataaatgcttcantacaatacaagcagatctagacagacaaaattactaattttaacttacctttcttgcagtcattccagccacagatctgtcagagcagatttccactgca

SEQ ID NO: 290859 - DNA, 201 bp, Homo sapiens
gccttcccggatcaggcaagtatttagtctgtggatgcagttagggtccactgagggattgactgggatttcctatcagattaattcctctctctcagtgstaacaacgttgagcaggaatagtgtgcatcaagtctttcatagaaggtgggcatatcagtgctttctccagatgtgttaggacaaagaagccagaccctg

SEQ ID NO: 290860 - DNA, 201 bp, Homo sapiens
acatggtggtgctcgcttgtaattgcagctacttgggaggctggggcaggaagattgcttgagcctaggaggtcaaggctgcagagagctgtaatcgcacmactgcactccagcctgggtgacagagagagaccctgtaccaaaaaagagaaagaaaaaaagagaaatttcaatatattttataaagtagaagaaataaaa

SEQ ID NO: 290861 - DNA, 201 bp, Homo sapiens
ttgccttgaagggcaacatacatttagcaaagcaactcttacctcacggttattaacagtgtggggcttttacaaagcaggttgtgttggaagccaggagsaaagataaccatcttgaccctctctttgttcctgtatgcattgcgtgcaatttcatagagctgcaagcgacagaaagagactcaaaggatggccattcaa

SEQ ID NO: 290862 - DNA, 201 bp, Homo sapiens
aattacacatttattttctctgcctagctcctgaaggcatttgagtatatgatcccatctcattctgtgcattgtggtctgctcaagcttcctaaagcaamgcatcttgcccctgctcaattatcattggctcctcttgcctgccatagaacttaagcaagtattcgaaagcacttctcagtccaggtgggcctgttcttc

SEQ ID NO: 290863 - DNA, 201 bp, Homo sapiens
ccttgaagggcaacatacatttagcaaagcaactcttacctcacggttattaacagtgtggggcttttacaaagcaggttgtgttggaagccaggaggaargataaccatcttgaccctctctttgttcctgtatgcattgcgtgcaatttcatagagctgcaagcgacagaaagagactcaaaggatggccattcaaagc

SEQ ID NO: 290864 - DNA, 201 bp, Homo sapiens
tctgtacctataccaataagcttgattaaaagagtgttctgtaagtagcattttctaactgattctgtatattctagccacaagaatcttgactgaacccyttgtgtaggactcaacaggcccaggtatccaacgataaacatccctgtaaggcgtctgtctttagctgaagctggacaattggattcacagacgttaaga

SEQ ID NO: 290865 - DNA, 201 bp, Homo sapiens
tggtttctttatgcgtgtgcttaatctttttgattggtagttagaaccaaattgagcttgaaacaaacaaaaaagccttgagtttctgatctgaacttcastgactaagcaggcattgtatggaggaagtagggagggcatttttaaagcaattctcatgtgaagtccagcatgacggtgtgttgaaatcctttgggattt

SEQ ID NO: 290866 - DNA, 201 bp, Homo sapiens
tactgtatccttttgcaggtagaagaagcagatgattggctcagatatggaaacccttgggagaagtcccgcccagaattcatgctgcctgtgcacttctrtggaaaagtagaacacaccaacaccgggaccaagtggattgacactcaagtattcagagtgctcgtatagccagcgttttgtatagtatttagtacagta

SEQ ID NO: 290867 - DNA, 201 bp, Homo sapiens
gctgcctccgcagattttggaaatccggaagggagcctccgagcccaggtcccgggctggcaggggtctcgccggcgcttggacctcgtctcccacccccragcccactgcggccccagagccccgggaggggccgggcacttcctctgccctccggcctggggcaggggccgggacgcggtgggagtgcagcggggacgg

SEQ ID NO: 290868 - DNA, 201 bp, Homo sapiens
ggaatcactaaaataactccttatgcaactttaaaaatctagcatagcattttaaatattatatgagatgttatagcttcataaatttcctattccatttwctttcatcatacttgaaatcagatcactgaaaaacctatgcaaaacatattctaagtgctattttttggtgggtacagattcacaatgtcactttgtttg

SEQ ID NO: 290869 - DNA, 201 bp, Homo sapiens
atatgtgattgatatgggccataatgcttcattcattcacaattcagcagaccaaattaaagagatgcgtgtttaagtttcaatcctgccatgactgtgaycttgggcaagtcacttctctctcagcttcagctccctcatgtccaaaataagtgggttgcactaaatgagatccagcatcctccagttcaattattctgt

SEQ ID NO: 290870 - DNA, 201 bp, Homo sapiens; identical to SEQ ID NO: 60000

SEQ ID NO: 290871 - DNA, 201 bp, Homo sapiens
tgcccattagagaagtctcggccctagtgtcccagccacatggagtgtcccagagagcgcagctttggtgtgagctctgagggagcaagtcctctttgagrttctctgaaagaagatctaagctgtgcacttcttgggctgccttaattatgcttcaagggtcagaagggtccaactcttgtttgaaccgagactcaatcc

SEQ ID NO: 290872 - DNA, 201 bp, Homo sapiens
aaataaaataaaaataaaagtttgcagtttacacaatcaatcctggaagcattttatttacactgtgggtcccactgctgagctaacttgcatttacaaarcacctctagatactgtcataatgtatccagaaattcaattagagagagtgtgtgtttctgggccaacagaggcaaggttagggggcagaggtaatataag

SEQ ID NO: 290873 - DNA, 201 bp, Homo sapiens
ctacaggtgcacaccaccacactcggctaatttttaaattttttttagagataggttctcactatgttgcccaggctgctctcaaactcctgggatcaagygaccttcctgcctcaaaaaaattttatctttgttctcttatgactgggatagcggaagtttagtttttaattctgaattacagattacagttattgactt

SEQ ID NO: 290874 - DNA, 201 bp, Homo sapiens
atttttattctatctctctggcttgaagttttttgaagggaaggagctaagattgaagcaggaatactttgtggtggctgcaaccttgcaagatatcatcygccgtttcaaagcctccaagtttggctccacccgtggtgcaggaactgtgtttgatgccttcccggatcaggcaagtatttagtctgtggatgcagttag

SEQ ID NO: 290875 - DNA, 201 bp, Homo sapiens
tattcatgtcctttgccactttttcatgggatttttttttcttgctgatttgtttgagttccttgtagattctggatattagtcaaggctcacatttttartagaagttacagtttttaattctacgaccaggtaaagacagggcagctccatgatctataaaaatcgaagtgtgatggctcagggttaggaccatttctt

SEQ ID NO: 290876 - DNA, 201 bp, Homo sapiens
cacacggtccatggctgccagtgcttcctgatacgttgcctgccagcaggagggcggtcatgtgctggttgtgctcagctgcaggaactggggataaggtyggaggccaagtgtcctcaggctgtcattaaccttttccttcacttcttccctgcttcccagtacttggtactaccaattcctgagccttggggagctcca

SEQ ID NO: 290877 - DNA, 201 bp, Homo sapiens
ccatagctttagaagtcagcattttacatactttgtacttgctgagagcactatttacgtttttatccctcaatctgtgtatttaataagtgaaagacacrtaaggatagtagatagattgatcagaatgctgtcttaagtttcaccagtagctttacaaatggcttccccctcacacccagaacatgtttctattatctg

SEQ ID NO: 290878 - DNA, 201 bp, Homo sapiens
ttcaaactctatgagccataggataagtctcttgacatggcatttagcagacaatggattcctcccctatagtttaaagggaagcatcttcattcataagraagcatgggaaatatggcttacatgccaaaacattgtaaccatagcaggaattgccaactaggcaatgtacatccatggtttctcttagagtgaaaaata

SEQ ID NO: 290879 - DNA, 201 bp, Homo sapiens
caggcagctctaatttgcgtgcaaatcagcctgaaaggtcagaggctagatgtctagccccaggcacacctcaattacgtgtggcttatttccctgcaggraaagtggaaggaaggaggtgagaagtagaaggaatgcagacaatccagtctcctcaggttgccaaagaggagtcctggagggacactctgaatgttatgg

SEQ ID NO: 290880 - DNA, 201 bp, Homo sapiens
tttctattatctggactattcaggaacttagtggaattgagtgctctgactatgcacacttggaatggtcctgttgcagacagggcagggttgaagaaggktttggcccatgcagtggggtgcccaccttcagggcaagcagctgactccttcctttcccccaggcatgggagctcacccagaagaccttcgcctacacca

SEQ ID NO: 290881 - DNA, 201 bp, Homo sapiens
agtcctctatgaaaatagctggcctaggaggaagtggggagaaagacaattgcaacaacctcacagaagtttcacaatcacaccaaagccctgggtggaarggcactcacagtatgtatctcggagctggatccaagtggcttctgcaacccttctcttgcctcttagcacccacaccaagttcgtaatagccagtcatgc

SEQ ID NO: 290882 - DNA, 201 bp, Homo sapiens
ttttagagtagtgtttttcaaactctatgagccataggataagtctcttgacatggcatttagcagacaatggattcctcccctatagtttaaagggaagyatcttcattcataagaaagcatgggaaatatggcttacatgccaaaacattgtaaccatagcaggaattgccaactaggcaatgtacatccatggtttct

SEQ ID NO: 290883 - DNA, 201 bp, Homo sapiens
gcctcacatgggcacttcagcatcaagcatgatgctcccacatggggacagccagatgggcaagaagccagtgtccctttctcttccactgggacctttgrttatttgggtcacaagctcacagagcaccatccacatgcaaatgcccaactgtgtattcacccacttcccaaactgaaaaggtagaaagggagctttttc

SEQ ID NO: 290884 - DNA, 201 bp, Homo sapiens
tctggactattcaggaacttagtggaattgagtgctctgactatgcacacttggaatggtcctgttgcagacagggcagggttgaagaagggtttggcccrtgcagtggggtgcccaccttcagggcaagcagctgactccttcctttcccccaggcatgggagctcacccagaagaccttcgcctacaccaaccacacag

SEQ ID NO: 290885 - DNA, 201 bp, Homo sapiens
ggagctggatccaagtggcttctgcaacccttctcttgcctcttagcacccacaccaagttcgtaatagccagtcatgcgtgattcacattacccagcaarcttctaattatcactgtggaattcttggtgtgccacagaaacatttatcagttattataacatcagaaagccaagttcatgggctctcctgatgactgtt

SEQ ID NO: 290886 - DNA, 201 bp, Homo sapiens
tattctccaccagcgatgccagtaaggtttaagaataacacacacaaatctggttctctttttctccttccactgatattcccaacttccaaatgcatccmagtgatgacattctcacatgtgagaaccataagaaggttgagggctggttaaaagtcttacaaacagaaatatgaatttggtaaaccagccatgcctgat

SEQ ID NO: 290887 - DNA, 201 bp, Homo sapiens
gaggcaggaaaatcgcttgagcctgggagacagagattgcagtgagccgagattgcaccactgcattccagcctaggtgacagagtgagactctctcaaaacacacacacacacacacacacacacacaccacttggaactggatctcagataactgctattgattcttggttgttttaaatatatgtaactctaaacttc

SEQ ID NO: 290888 - DNA, 201 bp, Homo sapiens
aggcaggaaaatcgcttgagcctgggagacagagattgcagtgagccgagattgcaccactgcattccagcctaggtgacagagtgagactctctcaaaacacacacacacacacacacacacacacaccacttggaactggatctcagataactgctattgattcttggttgttttaaatatatgtaactctaaacttct

SEQ ID NO: 290889 - DNA, 201 bp, Homo sapiens
ttcttatagtcaattattctaattttattgtaaatatagcttagttaaaaaaaaaaaacacttggggccaggtgcaatggctcatgcctgtaatcccagcrctttgggagtctgaggcgggcaaatcatttgaggccagaagttcgagaccagcctggccaacatgacgaaaccctgtccctactaaaaatacaaaaaaat

SEQ ID NO: 290890 - DNA, 201 bp, Homo sapiens
tgactcgaatgcaagaggcatatgactatacttgtaacttataaatccagtctgcagcagggctggcttcctcagcatgtggtttgtgcagtcacacaggrctccatgctgggtttaattctctgctgtagtcatcttgaaattatttattattattattattattattattattattattgagacagagtttcactctat

SEQ ID NO: 290891 - DNA, 201 bp, Homo sapiens
gcgcctgtagccccagctactggggaggctgaggcaggagaatggcatgaacccaggaggcggagcttgcagtgagccgagatcgtgccactgtactccakcctgggcgacagagcgagactccatctcaaaaaaaatgaataaataaataaaaataaataaataaaaataatttttaaaaactgctgaaactacatttaa

SEQ ID NO: 290892 - DNA, 201 bp, Homo sapiens
actgcatttatatcagggcaagggcacatggagagtcaacatagaaatactgtaaaggaccatcagtgtggatggtttcagtcactagattgtaccaggtsggggaggaaccacatgttcctctaataccctctgcagccctgagaccctcttctccatttaggcctcacacaatttaagttggtaatggagccaggaata

SEQ ID NO: 290893 - DNA, 201 bp, Homo sapiens
aaggaatgcagacaatccagtctcctcaggttgccaaagaggagtcctggagggacactctgaatgttatggatcaagagagagaagttcagcctgggcarcatagggagaccccatacatacaaaaattttaaaaaattagctggacatggtggtgctcgcttgtaattgcagctacttgggaggctggggcaggaagat

SEQ ID NO: 290894 - DNA, 201 bp, Homo sapiens
caggaatagaattccattgcagtctcccagccccttgttcaacctatgtcatcacacttgggaaacaatgagcagctgcttctgtttaatcccacaggtgrtcctggctctgccatatgacacccccgtgcccggctacatgaataacactgtcaacaccatgcgcctctggtctgctcgggcaccaaatgactttaacct

SEQ ID NO: 290895 - DNA, 201 bp, Homo sapiens
aagatggtgctatttggatcatgaaagggggacaagaaaatcttaaaccaaccaactctaaaaccaacaagaaaatcttaaaccaatcttaaaccaacttaaacccactcatgtagattagcatagattagcgtgatctgctcaggtagtttaggcttggggaaaaagttagatattctccaccagcgatgccagtaaggt

SEQ ID NO: 290896 - DNA, 201 bp, Homo sapiens
  misc_feature (1)...(201): n = A,T,C or G
ctttaacctcagagactgtgagtacagcacaggccttggtttctttatgcgtgtgcttaatctttttgattggtagttagaaccaaattgagcttgaaacnaacaaaaaagccttgagtttctgatctgaacttcactgactaagcaggcattgtatggaggaagtagggagggcatttttaaagcaattctcatgtgaag

SEQ ID NO: 290897 - DNA, 201 bp, Homo sapiens
atggtgctatttggatcatgaaagggggacaagaaaatcttaaaccaaccaactctaaaaccaacaagaaaatcttaaaccaatcttaaaccaacttaaacccactcatgtagattagcatagattagcgtgatctgctcaggtagtttaggcttggggaaaaagttagatattctccaccagcgatgccagtaaggttta

SEQ ID NO: 290898 - DNA, 201 bp, Homo sapiens
acagaaatatgaatttggtaaaccagccatgcctgatattaagcaaaagatgattttacatggaattttagcatatatctattaatgaagattttgactgkttttttcctcttccactcacaaaataaaaggtttaaagtctttgcagactacgaagcctatgtcaagtgtcaagataaagtgagtcagctgtacatggtg

SEQ ID NO: 290899 - DNA, 201 bp, Homo sapiens
atcttctgattttgcatacacccaagttactagaaagccatttgcatctgtttcatttttttcatccttagtacattagtcacagtgtgctttaacattgycattaataatgaacaaaacaaaataaaacaatgcctgtgggatacttgccaccttcctgtgaagttaattatcagacaatttagtaggctttctatgggg

SEQ ID NO: 290900 - DNA, 201 bp, Homo sapiens
tggtgctatttggatcatgaaagggggacaagaaaatcttaaaccaaccaactctaaaaccaacaagaaaatcttaaaccaatcttaaaccaacttaaacccactcatgtagattagcatagattagcgtgatctgctcaggtagtttaggcttggggaaaaagttagatattctccaccagcgatgccagtaaggtttaa

SEQ ID NO: 290901 - DNA, 201 bp, Homo sapiens
aacaacaaaaacaaacaaacaaccacaacaaaaaaaaaaaccttgtcttttcccaagttcaggccaaggttgagatttgacatttcagcaggagttgtaattttttttttttttttttttgagacagatctcgctctgtcactcagacgggagtgcagcggcgtgatcctgactcactgcaaccttcacctctcggcctcc

SEQ ID NO: 290902 - DNA, 201 bp, Homo sapiens
gtgatgttccattctctgcagcagtcataatggaggagcacatctttgactcatgatctcagccaagaacccttgatgataggaagcacattgccattttgtaggtgagaacactgagtctctgaggaagtaaagttacctcagatcacactgctggccaatacatgtctgtatccccagattcccaggaccatattcagt

SEQ ID NO: 290903 - DNA, 201 bp, Homo sapiens
ttcatccaagttgctgcaaaagacattattttgttcctttttatgtctgagtagtattccatggtatatatataccacatattgttgttggttgatgggcrcctagactgattccacatctttgtaattgcgaattgtgctgctataaacgtgtgtgtgtacatgtgtctttttcacataatgacttcttttcctttggct

SEQ ID NO: 290904 - DNA, 201 bp, Homo sapiens
tgtcttcagtaaggaccaaaactaattttactgggaaataatcgtctgcagtaactgacaatatatactaagttagcatggggtaaaaaattgactagatytgttgggtaaaagggagttctcaggatcatgtttttgtttgtttgtttgtttgtttgtttttaagagtaagctgaaaaatccttttatactgtaattaca

SEQ ID NO: 290905 - DNA, 201 bp, Homo sapiens
ccgattcacttgcagtgtccttcctaccacatttctatgctcaactcttgcctgtcctgcaagtctcaggtttattgacaggtgttccagaggtcttcccrgaagtacccaggccctctgactaatgctggggataaaaataaaacatacaatttaaaaatatttgttatatcttctttattttattttacaagccttttg

SEQ ID NO: 290906 - DNA, 201 bp, Homo sapiens
gaagggaaggagctaagattgaagcaggaatactttgtggtggctgcaaccttgcaagatatcatccgccgtttcaaagcctccaagtttggctccacccrtggtgcaggaactgtgtttgatgccttcccggatcaggcaagtatttagtctgtggatgcagttagggtccactgagggattgactgggatttcctatca

SEQ ID NO: 290907 - DNA, 201 bp, Homo sapiens
tgagaggcagcatcttgtagaagagaagcctgggtcctaatttctcatttgagacctaatgtcaacttaggagacctgattacttttatgaggtatgctgyctcaactaggttaccaaacttccctgaacctcagttttctcaatggcaaaatggagatacaaactctacagaattattataaaaacatgtaaaatatctg

SEQ ID NO: 290908 - DNA, 201 bp, Homo sapiens
ctccatttcttagcccagtactcttctttgttttatgtgacctcaattacacatttattttctctgcctagctcctgaaggcatttgagtatatgatcccrtctcattctgtgcattgtggtctgctcaagcttcctaaagcaacgcatcttgcccctgctcaattatcattggctcctcttgcctgccatagaacttaag

SEQ ID NO: 290909 - DNA, 201 bp, Homo sapiens
ctttctccagatgtgttaggacaaagaagccagaccctgagccatccgttgccttcatgttgatgtctttccccacccaggtggccatccagctgaatgayactcaccctgcactcgcgatccctgagctgatgaggatttttgtggatattgaaaaactgccctggtccaaggtctggatagtttggcttctttttcctt

SEQ ID NO: 290910 - DNA, 201 bp, Homo sapiens
gcagcatcttgtagaagagaagcctgggtcctaatttctcatttgagacctaatgtcaacttaggagacctgattacttttatgaggtatgctgtctcaaytaggttaccaaacttccctgaacctcagttttctcaatggcaaaatggagatacaaactctacagaattattataaaaacatgtaaaatatctggcacac

SEQ ID NO: 290911 - DNA, 201 bp, Homo sapiens
ccacactcggctaatttttaaattttttttagagataggttctcactatgttgcccaggctgctctcaaactcctgggatcaagtgaccttcctgcctcaraaaaattttatctttgttctcttatgactgggatagcggaagtttagtttttaattctgaattacagattacagttattgactttgcattgccttgtagc

SEQ ID NO: 290912 - DNA, 201 bp, Homo sapiens
ctgattgattacaacttgctttaaaagtccagagacttttatctcttaatgaaagatatttaaatgagggtgatttattactttgaggtcgcggtgatcaygaaagtatgactgagtatatgtgattgatatgggccataatgcttcattcattcacaattcagcagaccaaattaaagagatgcgtgtttaagtttcaat

SEQ ID NO: 290913 - DNA, 201 bp, Homo sapiens
agaccgaggagggcggatcacaaggtcaggagatcgagaccatcctggctaacacggtgaaaccccatctgtactaaaaatacaaaaaattagccgggcgyggtggcgggcgcctgtagtcccagctactcgggaggctgaggcgggagaatggcgtgaacccgggaggcggagcttgcagtgagcccagatcgcgccact

SEQ ID NO: 290914 - DNA, 201 bp, Homo sapiens
gcagatcacctgaggttaggagttcaagaccaggctggccaacatggcaaaaccttgtttctactaaaaatacaaaaattagctgggcatggtggcaggcrcctgtagtctcagctactcaggaggctgaaggagaattgcttgaactaggagacagaggttgcagtgagctgagattgcgccactgcactccagcctggc

SEQ ID NO: 290915 - DNA, 201 bp, Homo sapiens
tgaagaagagtttcaaccggcacctgcacttcacgctggtcaaggaccgcaacgtggccaccacccgcgactactacttcgcgctggcgcacacggtgcgsgaccacctggtggggcgctggatccgcacgcagcagcactactacgacaagtgccccaaggtaaccgggggcgggacggcgggccggggtccagcccgga

SEQ ID NO: 290916 - DNA, 201 bp, Homo sapiens
acattcctaatgggacacaaatcaatagctatattaaggcttatattgtgtttaccatttttgtgttgaaaaagattaaaaattaaattatctaacctcaraagacagctaattgagtgtccccatagctttagaagtcagcattttacatactttgtacttgctgagagcactatttacgtttttatccctcaatctgtg

SEQ ID NO: 290917 - DNA, 201 bp, Homo sapiens
catccgaccagcccagtacaattttacattagaacaatatacatcacaggtggtgtttgggccaagtcttcattgaagatttccactcctcccagactcakgaccactgcttgctcaggaaatctctgtagaaaaaggacccagatcagctcacaccctttccctacctaaataagcaaaatattatacattttcatgttg

SEQ ID NO: 290918 - DNA, 201 bp, Homo sapiens
agccccttgttcaacctatgtcatcacacttgggaaacaatgagcagctgcttctgtttaatcccacaggtggtcctggctctgccatatgacacccccgwgcccggctacatgaataacactgtcaacaccatgcgcctctggtctgctcgggcaccaaatgactttaacctcagagactgtgagtacagcacaggcctt

SEQ ID NO: 290919 - DNA, 201 bp, Homo sapiens
acatctttcaatcattgatacagcaaaagtactcaagtccgaacggggctccagcaaaggcagctttttgaaagtgctgaaatggagggatggcacctccrtagagctaactcaacccctccctgtggtagtgaagtttatattgagtacaccaaagattttgcttaagacatgaacagcgttatcccaatgttgcattaa

SEQ ID NO: 290920 - DNA, 201 bp, Homo sapiens
atgcagagacctaggctgtgccaggataaaggaagataaccctatgagaatgagtttagtgtcaccactgccctctttcccctccctcagtatttggattstttgtgaaccaaaaaagggaggaactaaaaaatttggtttgatgagagaatgtgccaaggaaaaagactcaggagaatattagggatagagtggaagaca

SEQ ID NO: 290921 - DNA, 201 bp, Homo sapiens
agcctccattactctggcagtgggtctgacactgatccattaatggaatgatgctactaaatgcagggttgcacttagggatgaggaaaggccttgttcawatgtttaaaagtattttcttctatacaaaaaactcttgcctaaaaaaaaaaaagaaaagaaaaggaaagaaaagaatgctttcctctcagagccatctta

SEQ ID NO: 290922 - DNA, 201 bp, Homo sapiens
tcaaggcaatttgtgaaaatgatcagctttaaaaattctgttgtcatactttctctgttgcttaatgagatgtaaaatacacttcctccttaaaggagaascttgaagtcttaaccctaatgtgctaagttgttttcatgaatatatttaactttttctttcctgagcttcaggcaccttcatacccaaaacaggtagccc

SEQ ID NO: 290923 - DNA, 201 bp, Homo sapiens
tcatgctaaatggggccctaactatcgggaccatggatggggccaatgtggaaatggcagaagaagctggggaagagaacctgttcatctttggcatgagsatagatgatgtggctgctttggacaagaaagggtaagagaatagcttctctttgctaggcaggactgcccctcccccctagaaggtatgtgacctcagag

SEQ ID NO: 290924 - DNA, 201 bp, Homo sapiens
ataacatctctcccttggagtagcctatagccaggcagggtgatgtgatccatgtctacttgctcaaaatttatatcatacttttttttttttttgagacrgagtctcgtcctgttacgcaggctggagtgcagtggcacgatctcagctccctgcaatctccacctcccagcctcagcctcctgagtagctgggattaca

SEQ ID NO: 290925 - DNA, 201 bp, Homo sapiens
catgtaagaagtaacagagtcaataatggacttttagagcttacacttttctccatgctgcagctgcaccatctcatacagtttgcctctgcagtcagtayctgatgccagaacaagctgcaagggagctgacgctagattaggtacacagctaaacctgaatacctttacccagagctgtaggaaatggctgtccctctg

SEQ ID NO: 290926 - DNA, 201 bp, Homo sapiens
ggaaagagtgtgatctgccttctagaccatttgaatgtttatcttaatgtgcatgtattactttaattatcaaaacagcccaacttaataaatgcttcaakacaatacaagcagatctagacagacaaaattactaattttaacttacctttcttgcagtcattccagccacagatctgtcagagcagatttccactgcag

SEQ ID NO: 290927 - DNA, 201 bp, Homo sapiens
aaaagagacactgcttaaaactcagttaaccagatccttcctatgcacttaagagtatgttaaatgttaacacactaaaaaatttattatgctagcacccsctttgatcactaccccagttctgtgctcctccctatagggggtcatagggaacagtttagtatttagaattccagaccttttttctgcatattcattcac

SEQ ID NO: 290928 - DNA, 201 bp, Homo sapiens
taagatcttaaggtgttacagatggctacagtgttccctcttaccaaacatctttcaatcattgatacagcaaaagtactcaagtccgaacggggctccarcaaaggcagctttttgaaagtgctgaaatggagggatggcacctccgtagagctaactcaacccctccctgtggtagtgaagtttatattgagtacacca

SEQ ID NO: 290929 - DNA, 201 bp, Homo sapiens
tcccaaagtgctgggattacaggtgtgagccaccatgcccagccagttgtaaattttttaatatccaagttttttaaaagtcacaaataattcaatatttwttgagcacccactctgtagcagacatgtcctggaagctaaggaaataaagcctcagaggggcattaggcgtcttttttatgccgggcactgtgctggcac

SEQ ID NO: 290930 - DNA, 201 bp, Homo sapiens
caaaggcagctttttgaaagtgctgaaatggagggatggcacctccgtagagctaactcaacccctccctgtggtagtgaagtttatattgagtacaccaragattttgcttaagacatgaacagcgttatcccaatgttgcattaaacctgagtgaccagcaagggctttctcttcctttggctagagaattgtggcctt

SEQ ID NO: 290931 - DNA, 201 bp, Homo sapiens
atgtttattataaagctcactgcgcactgggactctgggctgtatatgcatatgttgtttacagaatccaaaggcctggaacacaatggtactcaaaaacwtagctgcctcggggaaattctccagtgaccgaacaattaaagaatatgcccaaaacatctggaacgtggaaccttcagatctaaagatttctctatccaa

SEQ ID NO: 290932 - DNA, 201 bp, Homo sapiens
aatgctgcctccgcagattttggaaatccggaagggagcctccgagcccaggtcccgggctggcaggggtctcgccggcgcttggacctcgtctcccaccmccgagcccactgcggccccagagccccgggaggggccgggcacttcctctgccctccggcctggggcaggggccgggacgcggtgggagtgcagcgggga

SEQ ID NO: 290933 - DNA, 201 bp, Homo sapiens
gagcagatttccactgcaggcaccgaagcctcggggacaggcaatatgaagttcatgctaaatggggccctaactatcgggaccatggatggggccaatgkggaaatggcagaagaagctggggaagagaacctgttcatctttggcatgaggatagatgatgtggctgctttggacaagaaagggtaagagaatagcttc

SEQ ID NO: 290934 - DNA, 201 bp, Homo sapiens
aagtaaaataagagtgaaaaatcgcctctatagatgtggctattacaaacttttagaaatatacatcactggtaatctctcatttaagaggaacaaccagraaaagttagataactcgttatgactcatgagaattttcttttgcaatcaaagtctttgacagcattcctcacagattacatttcagaaattagtgtctga

SEQ ID NO: 290935 - DNA, 201 bp, Homo sapiens
gagcctatttagcaggcatgtccaggacaaccaacactttgacacaacctaaccaaacaacacatggtatctaattttagccttggaaaaggataccatgygctactcactatactccagaatttccaaggatctcatttcttatctcttaactattatcagatggaagatttaaaagaaactcagaaaacaaatctcaat

SEQ ID NO: 290936 - DNA, 201 bp, Homo sapiens
atcttctatttactcttctacatgttttagattccataaataatgtgtattttgtaatcattaaaagttataaaaatgaaataggttgttcctctccccartggagtaacctagagttccatgttgagagcctatttagcaggcatgtccaggacaaccaacactttgacacaacctaaccaaacaacacatggtatctaa

SEQ ID NO: 290937 - DNA, 201 bp, Homo sapiens
agtgctagaaaaaaatacatcaaagcttcaacagaagttgtctctggaagatgggcaacttttactgtcttctatgtactcttctacatatctcattttcygtaagaaatatatatactatcttctatttactcttctacatgttttagattccataaataatgtgtattttgtaatcattaaaagttataaaaatgaaat

SEQ ID NO: 290938 - DNA, 201 bp, Homo sapiens
attaattttaacaaaataggaaatcattgtgttacctataagtagaggatatagagttataagggtaataaaacctcagctatccagagaaggccagaaasataaaggaaaagtgctagaaaaaaatacatcaaagcttcaacagaagttgtctctggaagatgggcaacttttactgtcttctatgtactcttctacata

SEQ ID NO: 290939 - DNA, 201 bp, Homo sapiens
gcaccgaagcctcggggacaggcaatatgaagttcatgctaaatggggccctaactatcgggaccatggatggggccaatgtggaaatggcagaagaagcyggggaagagaacctgttcatctttggcatgaggatagatgatgtggctgctttggacaagaaagggtaagagaatagcttctctttgctaggcaggactg

SEQ ID NO: 290940 - DNA, 201 bp, Homo sapiens
tcttctatacaaaaaactcttgcctaaaaaaaaaaaagaaaagaaaaggaaagaaaagaatgctttcctctcagagccatcttaattctagacataggagscaaaacaaacaaacaaacaaaataccaaaaactattctactgaaagtgtagtatatatgtcagtgtgaagaagtcagatggaagtgactagatttggaat

SEQ ID NO: 290941 - DNA, 201 bp, Homo sapiens
cagatcacactgctggccaatacatgtctgtatccccagattcccaggaccatattcagtattctattctacactcagagtcttgccttctttaatatgcyatggttacaagacacaaaccaagtgtcctgatttttttataagatgaaatcagacagtgttgttaactgttatagcaaataaatctggcacacatttaat

SEQ ID NO: 290942 - DNA, 201 bp, Homo sapiens
caactggcaaacttcaactgtttctttattaaaattttattttattttattttactttattttttgagatggagtctcactctgtcacccagggtggagtrcagtggcatgatcacagctcactgtagccctgacctcccgggctcaagcaatcctcccacctcagcttcctgagtagctgggactacaggtgcacaccac

SEQ ID NO: 290943 - DNA, 201 bp, Homo sapiens
gacctaggcctccaccaaggtagcaactgctaaaatgtatccttaaaaatttaaatgcaccttagaaaacactttatgtatacatatatttactgttttgttgttttgttttgttttgttttgttttgttttgtttgagacagagtctcactctcgcccaggctgaatgaagtgcagcggcgccatcttggctcactgcat

SEQ ID NO: 290944 - DNA, 201 bp, Homo sapiens
acctaggcctccaccaaggtagcaactgctaaaatgtatccttaaaaatttaaatgcaccttagaaaacactttatgtatacatatatttactgttttgttgttttgttttgttttgttttgttttgttttgtttgagacagagtctcactctcgcccaggctgaatgaagtgcagcggcgccatcttggctcactgcatc

SEQ ID NO: 290945 - DNA, 201 bp, Homo sapiens
cctaggcctccaccaaggtagcaactgctaaaatgtatccttaaaaatttaaatgcaccttagaaaacactttatgtatacatatatttactgttttgttgttttgttttgttttgttttgttttgttttgtttgagacagagtctcactctcgcccaggctgaatgaagtgcagcggcgccatcttggctcactgcatcc

SEQ ID NO: 290946 - DNA, 201 bp, Homo sapiens
ctaggcctccaccaaggtagcaactgctaaaatgtatccttaaaaatttaaatgcaccttagaaaacactttatgtatacatatatttactgttttgttgttttgttttgttttgttttgttttgttttgtttgagacagagtctcactctcgcccaggctgaatgaagtgcagcggcgccatcttggctcactgcatcct

SEQ ID NO: 290947 - DNA, 201 bp, Homo sapiens
taggcctccaccaaggtagcaactgctaaaatgtatccttaaaaatttaaatgcaccttagaaaacactttatgtatacatatatttactgttttgttgttttgttttgttttgttttgttttgttttgtttgagacagagtctcactctcgcccaggctgaatgaagtgcagcggcgccatcttggctcactgcatcctt

SEQ ID NO: 290948 - DNA, 201 bp, Homo sapiens
gggatacaacaatgaacatgtttcattccacacgtgttcatcaaatatctactccatcacagtcgtctgtctaaacaggatggttcctgccctcataaagwagagcaagtaggtgtgtccaagctcctctcccacctcccttgctctccaataactgtgcagatgaatcccaaatatggatccctagtctgaattcctttt

SEQ ID NO: 290949 - DNA, 201 bp, Homo sapiens
aggcctccaccaaggtagcaactgctaaaatgtatccttaaaaatttaaatgcaccttagaaaacactttatgtatacatatatttactgttttgttgttktgttttgttttgttttgttttgttttgtttgagacagagtctcactctcgcccaggctgaatgaagtgcagcggcgccatcttggctcactgcatccttc

SEQ ID NO: 290950 - DNA, 201 bp, Homo sapiens
ggctctagctacccatttgttgcagctgacttcacgtggttattttgctttccagaagtggtaaaaccggcagcctgaggctgaataaggatagcagacatactttgttggccaagacatttttcaggaatttaatttttagcgcctgtggtcaggacttgcacactccatttcttagcccagtactcttctttgttttat

SEQ ID NO: 290951 - DNA, 201 bp, Homo sapiens
gctctagctacccatttgttgcagctgacttcacgtggttattttgctttccagaagtggtaaaaccggcagcctgaggctgaataaggatagcagacatactttgttggccaagacatttttcaggaatttaatttttagcgcctgtggtcaggacttgcacactccatttcttagcccagtactcttctttgttttatg

SEQ ID NO: 290952 - DNA, 201 bp, Homo sapiens
ctctagctacccatttgttgcagctgacttcacgtggttattttgctttccagaagtggtaaaaccggcagcctgaggctgaataaggatagcagacatactttgttggccaagacatttttcaggaatttaatttttagcgcctgtggtcaggacttgcacactccatttcttagcccagtactcttctttgttttatgt

SEQ ID NO: 290953 - DNA, 201 bp, Homo sapiens
tctagctacccatttgttgcagctgacttcacgtggttattttgctttccagaagtggtaaaaccggcagcctgaggctgaataaggatagcagacatactttgttggccaagacatttttcaggaatttaatttttagcgcctgtggtcaggacttgcacactccatttcttagcccagtactcttctttgttttatgtg

SEQ ID NO: 290954 - DNA, 201 bp, Homo sapiens
atctagtcaggatggaacaagtcatttgcctgaccaacaattctttcatcgtaaaatgagcaatccaatgtgatctccagggctgcagagctctgtcatgrgtgcccagtggtgctgtggactctgctgtgtgatccccagcactttggggcagggagctagctggcaatcagtcccatccgtgcccaagttcacagatgc

SEQ ID NO: 290955 - DNA, 201 bp, Homo sapiens; identical to SEQ ID NO: 60009

SEQ ID NO: 290956 - DNA, 201 bp, Homo sapiens
agtactcagtattcataagttgtttcagttaaagatgttttaaatttaatataatataattgaagtgctaggttcatatttcctgacaaataaattctaarcaatactgtatccttttgcaggtagaagaagcagatgattggctcagatatggaaacccttgggagaagtcccgcccagaattcatgctgcctgtgcact

SEQ ID NO: 290957 - DNA, 201 bp, Homo sapiens
  misc_feature (1)...(201): n = A,T,C or G
aacaagaatatttgtaatttactataatttattcctgtcattttccctcatgaaatgtgtttggatgtgcttggctgatgtttattataaagctcactgcncactgggactctgggctgtatatgcatatgttgtttacagaatccaaaggcctggaacacaatggtactcaaaaacatagctgcctcggggaaattctcc

SEQ ID NO: 290958 - DNA, 201 bp, Homo sapiens
aagttgaatctattcaatggggacttgagggctctaatctcttgccattcttctacttcatcatggctgccttctgtcaatgcgtttgaccttcttccccaaaggctgccccaggatatcacatggccaaaatgatcataaagctgatcacttcagtggcagatgtggtgaacaatgaccctatggttggaagcaagttga

SEQ ID NO: 290959 - DNA, 201 bp, Homo sapiens
ggtgctatttggatcatgaaagggggacaagaaaatcttaaaccaaccaactctaaaaccaacaagaaaatcttaaaccaatcttaaaccaacttaaacccactcatgtagattagcatagattagcgtgatctgctcaggtagtttaggcttggggaaaaagttagatattctccaccagcgatgccagtaaggtttaag

SEQ ID NO: 290960 - DNA, 201 bp, Homo sapiens
agaaagccaagttcatgggctctcctgatgactgttcactggttctttgtcgactctgtatcccacaggtgcagagaagagcatttcttagaattcagtcracagagtcccctgggctgacctctccatccctgctggctgggacagattccattgagtcattcctctaaagaaatgcctagtccagctgccacctgcacc

SEQ ID NO: 290961 - DNA, 201 bp, Homo sapiens
tcccaatgacaatgtgagtgatcaaggttgctttcttagtggcaacagaggcagcttatttcacaagagcctgttcagtaacctataaaacacatttaatrttgatgtttttccatgtgcagaacaagctccgtatttcttcctgaattgtgtagatttctcctcccaaccaagtaaggaaaacaaatctgtatagtgcat

SEQ ID NO: 290962 - DNA, 201 bp, Homo sapiens; identical to SEQ ID NO: 60005

SEQ ID NO: 290963 - DNA, 201 bp, Homo sapiens
tttataattagaaatgagttatttttaaaaatcaatacccattgtgcagtagtatctgtgctttagaatacaaatgtggttcttcatataacaatgttttrtggctgccatgtgttttagggaaagactggaaattttggctcagcttaatgactctatcttttgcctgtgctctgttgaatgtagcctgcttcttggatt

SEQ ID NO: 290964 - DNA, 201 bp, Homo sapiens
agtgctttctccagatgtgttaggacaaagaagccagaccctgagccatccgttgccttcatgttgatgtctttccccacccaggtggccatccagctgartgacactcaccctgcactcgcgatccctgagctgatgaggatttttgtggatattgaaaaactgccctggtccaaggtctggatagtttggcttcttttt

SEQ ID NO: 290965 - DNA, 201 bp, Homo sapiens
atcattggtggtaaagtaagttgaatctattcaatggggacttgagggctctaatctcttgccattcttctacttcatcatggctgccttctgtcaatgcrtttgaccttcttccccaaaggctgccccaggatatcacatggccaaaatgatcataaagctgatcacttcagtggcagatgtggtgaacaatgaccctat

SEQ ID NO: 290966 - DNA, 201 bp, Homo sapiens
gagaattttcttttgcaatcaaagtctttgacagcattcctcacagattacatttcagaaattagtgtctgaacaagccttttaaaagtacttgagtcttctgctatcagaatcacaatctttactttgggcttctatctcatttttaagaaatgatcaaactttgttattcatgtatcaaggcaatttgtgaaaatgatc

SEQ ID NO: 290967 - DNA, 201 bp, Homo sapiens
agaattttcttttgcaatcaaagtctttgacagcattcctcacagattacatttcagaaattagtgtctgaacaagccttttaaaagtacttgagtcttctgctatcagaatcacaatctttactttgggcttctatctcatttttaagaaatgatcaaactttgttattcatgtatcaaggcaatttgtgaaaatgatca

SEQ ID NO: 290968 - DNA, 201 bp, Homo sapiens
gaattttcttttgcaatcaaagtctttgacagcattcctcacagattacatttcagaaattagtgtctgaacaagccttttaaaagtacttgagtcttctgctatcagaatcacaatctttactttgggcttctatctcatttttaagaaatgatcaaactttgttattcatgtatcaaggcaatttgtgaaaatgatcag

SEQ ID NO: 290969 - DNA, 201 bp, Homo sapiens
cctttaacactgaacagaagcataaccaaggttgaactcgtaagatacagttgtcaagacctgtgtgacaggtaggaatccaaacaggtgccatggaaackggggcacaacttcaagcactggtgcatcttccacatatgtcttcaaatgtgcaaattatttttccatttaaaaaaaatacccagtttcatgggttgccta

SEQ ID NO: 290970 - DNA, 201 bp, Homo sapiens
atagggggtcatagggaacagtttagtatttagaattccagaccttttttctgcatattcattcacattatatacatatgtacacacaaacacacacacayatatatatatatacacacacatacacacacatgtaaatgtctggaatatatatcttccagaccttttttctacatatttacacacacacatacacatata

SEQ ID NO: 290971 - DNA, 201 bp, Homo sapiens
gtctctgaggaagtaaagttacctcagatcacactgctggccaatacatgtctgtatccccagattcccaggaccatattcagtattctattctacactcagagtcttgccttctttaatatgctatggttacaagacacaaaccaagtgtcctgatttttttataagatgaaatcagacagtgttgttaactgttatagc

SEQ ID NO: 290972 - DNA, 201 bp, Homo sapiens
tctctgaggaagtaaagttacctcagatcacactgctggccaatacatgtctgtatccccagattcccaggaccatattcagtattctattctacactcagagtcttgccttctttaatatgctatggttacaagacacaaaccaagtgtcctgatttttttataagatgaaatcagacagtgttgttaactgttatagca

SEQ ID NO: 290973 - DNA, 201 bp, Homo sapiens
cccctaatatcagctgaaaataacatctctcccttggagtagcctatagccaggcagggtgatgtgatccatgtctacttgctcaaaatttatatcatacttttttttttttttgagacggagtctcgtcctgttacgcaggctggagtgcagtggcacgatctcagctccctgcaatctccacctcccagcctcagcctc

SEQ ID NO: 290974 - DNA, 201 bp, Homo sapiens
aatatatcataccataaaaaagaaattatttccataaaaagcaaaatgcatctgtcaagaaagcagcaggccttttcagagtatagtcatgcccccactcaacacgtaacactgttcttacaaaggcagatttggagaaggctgatgaaaattccacatgctgggaagatttttaaaggttgatgggcttttaatttttga

SEQ ID NO: 290975 - DNA, 201 bp, Homo sapiens
  misc_feature (1)...(201): n = A,T,C or G
tctacctctcaacagacaaacaagaatatttgtaatttactataatttattcctgtcattttccctcatgaaatgtgtttggatgtgcttggctgatgttnattataaagctcactgcgcactgggactctgggctgtatatgcatatgttgtttacagaatccaaaggcctggaacacaatggtactcaaaaacatagct

SEQ ID NO: 290976 - DNA, 201 bp, Homo sapiens
tttggagaaggctgatgaaaattccacatgctgggaagatttttaaaggttgatgggcttttaatttttgagtctcttcaaggaagatttgcaggcgtggmgtgttcatcgtgcaccccctgaaattgtgttgctaaaattctatatttaccatctcctctcatggggagtgcagtaacagtcctctatgaaaatagctgg

SEQ ID NO: 290977 - DNA, 201 bp, Homo sapiens
tcaatgcgtttgaccttcttccccaaaggctgccccaggatatcacatggccaaaatgatcataaagctgatcacttcagtggcagatgtggtgaacaatsaccctatggttggaagcaagttgaaagtcatcttcttggagaactacagagtatctcttgctgaaaaaggtactaccctcattgcaaaatatgcaggggc

SEQ ID NO: 290978 - DNA, 201 bp, Homo sapiens
ggagtacaaggcctcactggtcatgtgagagacctctgggaacagtgagttttgctgaggtcaccatggactgatcctgtgtggccatctgtctcttcctrtcctctcaccacacttacctttggaggatagggagttgggacagtaatcacataagagaaaaatgctctagattctggggatgggagaaagattagccct

SEQ ID NO: 290979 - DNA, 201 bp, Homo sapiens
catttaattatgtaaaatactaatttttgcttatatgatgacttagcatttatttcctatgtaataattttgtatatcattaaaagatgtcaaactaatgmtcttgtaaattttaattaatttcaataaaaaagagggatagttcttaaatggaaagaattggcttgacaattgtttccagtccttactttagcctccctt

SEQ ID NO: 290980 - DNA, 201 bp, Homo sapiens
tcatcttcagtgttttcatatgaaatattcttcataaattatacatttaaattttttaatcccaagataaatggtcatactaaagtgcttaactttttttwaaaaaaaatctgtatttcttagttatgccccgtggtgccctgcttgtcaaaatcttcaaccggaatgggaaagttttgctgaatggggagaagatcttga

SEQ ID NO: 290981 - DNA, 201 bp, Homo sapiens
aatgccttaaaattttaagttatagcttaacagctaataattactatgtgccaagcactattctaataatttttatataattcttttaatatgtgtattayacataaggcttaaaagtactttcctgagatttatctacttactgtatttcatagtttcattacttggaagaataacagtaattacattttaaggcttatg

SEQ ID NO: 290982 - DNA, 201 bp, Homo sapiens
gggtatggactaaaatatttttatcttaaacatttttaccactatcactttaacaaaaatgaacagatttttagtttttttttttcttttgattttagacktgccataactactttattgaagaccttggattgccagtgtggggatcatatactgtttttgctttagcaactctgttttccggactgttattaggactcg

SEQ ID NO: 290983 - DNA, 201 bp, Homo sapiens
catcttcagtgttttcatatgaaatattcttcataaattatacatttaaattttttaatcccaagataaatggtcatactaaagtgcttaactttttttawaaaaaaatctgtatttcttagttatgccccgtggtgccctgcttgtcaaaatcttcaaccggaatgggaaagttttgctgaatggggagaagatcttgag

SEQ ID NO: 290984 - DNA, 201 bp, Homo sapiens
gcatagtcttaattctacctttctttaggttttgaaaacctaacagtctgcagctagttaacctgacttgtccacctccctgctgggggctcagtgtgcartggttgcaaaatggagattccctggttgtgtatacacctcatttcttgaatgtgttgctttaagggttcttgaagacattaccctctttttattcttgcc

SEQ ID NO: 290985 - DNA, 201 bp, Homo sapiens
catatattctacattcagatttcttacaatgtttatttttacagtgtatgatatttgtggcagattgcctttgtccttcaaaaaggcgcagaccacagccrtacccatacccttcaagtaagtatattttaaaatgtttattttttattcacgatagtcctattcatttctgtaatcacaatcacacatttcacaggttgc

SEQ ID NO: 290986 - DNA, 201 bp, Homo sapiens
tggcctatgtaaaacctgctgtgtgttctttatttgtaggactgagtggacggtttatcataactgctcttcctactatttatcagtaagtatttgaagaytctaaattatggagaaggatgcattatagtgtaatcagaagtagtaggcctctggcttggatcatgctggaagagctgaggtaatctcattatattcagc

SEQ ID NO: 290987 - DNA, 201 bp, Homo sapiens
tttcatttttggagtgctaggaagaaagatatttaaaaatgtgattatttaaaatagttacattagctgtggcatatattctacattcagatttcttacartgtttatttttacagtgtatgatatttgtggcagattgcctttgtccttcaaaaaggcgcagaccacagccatacccatacccttcaagtaagtatattt

SEQ ID NO: 290988 - DNA, 201 bp, Homo sapiens
tcccaagataaatggtcatactaaagtgcttaactttttttaaaaaaaaatctgtatttcttagttatgccccgtggtgccctgcttgtcaaaatcttcamccggaatgggaaagttttgctgaatggggagaagatcttgaggttaatattgcgaaagtagatgtcacagagcagccaggtactgtaagtctttggttag

SEQ ID NO: 290989 - DNA, 201 bp, Homo sapiens
gaatggggagaagatcttgaggttaatattgcgaaagtagatgtcacagagcagccaggtactgtaagtctttggttagttttgtttctttgctgtttggkttgatatatttatccttttttctacattgcatagtcttaattctacctttctttaggttttgaaaacctaacagtctgcagctagttaacctgacttgtc

SEQ ID NO: 290990 - DNA, 201 bp, Homo sapiens; identical to SEQ ID NO: 60053

SEQ ID NO: 290991 - DNA, 201 bp, Homo sapiens
tctataggccccggggcctgaaataacttgtcttttggtgttgaccatacaaactttttaaaagaatactgactctgatagaatcctttctgtgcaatatygtggaatacgtaactggtgtacacaaagaggtaagtgttctcaaacaagatgggtaagtcagtgaataggcacaattttagaaactttaaaagagttgaa

SEQ ID NO: 290992 - DNA, 201 bp, Homo sapiens
ttaccaagtacctactggagctttgttgttttcttgtatttattaatttagtcctaatgacaactgcaagacaggtaagcattgcacatctttcaggtgartcagcccagaggtgtggtacaaataggtaaaatttgaatctaattcttgttccaaatctttttttgtttgtttttgtttttgttttttttcttcagtgtg

SEQ ID NO: 290993 - DNA, 201 bp, Homo sapiens
agcatttaccaatcttgtaattgtactgttaatggaagcatttatatttgcagttcttaaagaacttttacttatctgttacctcgtttgctcttcagcamctctgtagtagagtgcataggtgttactgctcccattttgtacttgaggagactaaggttcacagtcacacagaagtgacaaagctgattttaactaaat

SEQ ID NO: 290994 - DNA, 201 bp, Homo sapiens
atcatcttcagtgttttcatatgaaatattcttcataaattatacatttaaattttttaatcccaagataaatggtcatactaaagtgcttaacttttttwaaaaaaaaatctgtatttcttagttatgccccgtggtgccctgcttgtcaaaatcttcaaccggaatgggaaagttttgctgaatggggagaagatcttg

SEQ ID NO: 290995 - DNA, 201 bp, Homo sapiens
ggaaggagactggatgatagaattgtgagtgcggggcggccagggtcctacgtccgtgcctggacacacgacttcaccccgcacgttcctcgtgcgggtcrcaggctccccaggactgcgcctccgagttgcggagcgagcgtccccgacttctgcagctccccaaactcttgggatctgccgccagcttggtcccacccc

SEQ ID NO: 290996 - DNA, 201 bp, Homo sapiens
ttaatagcattctacttgccaatagcactgcccttctgaggtgtgaaaaaacaaatatctctagacattgttaagtgttccttgaggagggcgagaacttrcccttggtagggaaccactgctgtaaactagtattcaccaggaccgcctggggtgtggcatagaaaaggggctgttagcccaaaataaagatggatgcca

SEQ ID NO: 290997 - DNA, 201 bp, Homo sapiens
taatttcagttcagtttataaataggtgggtaattagaatgactttgataactaaaatggctcaaacaatttttatttttataatattcatggtttttttkatcttatcttgaataactttccttttggacatccaaacatgataaatttatgccaaagcagttttggggcatatgagacattgtatcttgattttactct

SEQ ID NO: 290998 - DNA, 201 bp, Homo sapiens
tgttgctgtgtgaatccattagatttacagtatcgtaatatacaagttttctttaaagccctctcctttagaatttaaaatattgtaccattgaagagttyggatgtgtaacttgtgatgccttagaaaaatatcctaagcacaaaataaacctttctaaccacttcattaaagctgaagaccagtatgatttctggttgc

SEQ ID NO: 290999 - DNA, 201 bp, Homo sapiens; identical to SEQ ID NO: 60048

SEQ ID NO: 291000 - DNA, 201 bp, Homo sapiens
atagtttcattacttggaagaataacagtaattacattttaaggcttatgatttaaaaaaatgtaacctcattgttaaattgggggctaaaatgtcatgastaggtaaatagtataatttgctattaatacttgtacattgctaatgcttttgaatgttagaattgactgtaaagtgaagtgaaaaaatagcaaaataaat

SEQ ID NO: 291001 - DNA, 201 bp, Homo sapiens
tacccttaaaagtttttcatctgcataaaattaaccaccttatcatcttcagtgttttcatatgaaatattcttcataaattatacatttaaattttttaatcccaagataaatggtcatactaaagtgcttaactttttttaaaaaaaaatctgtatttcttagttatgccccgtggtgccctgcttgtcaaaatcttca

SEQ ID NO: 291002 - DNA, 201 bp, Homo sapiens
ttcaggggagaggaactgtgacactttttcagtcatcatcatgagtaacttgttttagatcgtgcctgtaaaatagtgttataagcaatatattaagcaayagtgatcgtgtgtgtatatgcaaaatacagtcaagtattactcaaggatattttttaactcattatggtccaactatataaatacagcaatcagaagtag

SEQ ID NO: 291003 - DNA, 201 bp, Homo sapiens
aattctgaaatgaattttcattcaggcaccattgaaagcttcaggggagaggaactgtgacactttttcagtcatcatcatgagtaacttgttttagatcktgcctgtaaaatagtgttataagcaatatattaagcaatagtgatcgtgtgtgtatatgcaaaatacagtcaagtattactcaaggatattttttaactc

SEQ ID NO: 291004 - DNA, 201 bp, Homo sapiens
aaatcctgggagggtcttttaaaccgttcttcctcaaagcaccgccccactttttacaccacgcctccttttgctctgttccttcccccacaatattgggacaccctaggcggtagaagcagccgcttttctgtcatgcgcattgcggagagtcgttcttccctctttcccgacttcaccactcactgggatcagacccct

SEQ ID NO: 291005 - DNA, 201 bp, Homo sapiens
aaaatcctgggagggtcttttaaaccgttcttcctcaaagcaccgccccactttttacaccacgcctccttttgctctgttccttcccccacaatattgggacaccctaggcggtagaagcagccgcttttctgtcatgcgcattgcggagagtcgttcttccctctttcccgacttcaccactcactgggatcagacccc

SEQ ID NO: 291006 - DNA, 201 bp, Homo sapiens
ggacggtttatcataactgctcttcctactatttatcagtaagtatttgaagattctaaattatggagaaggatgcattatagtgtaatcagaagtagtargcctctggcttggatcatgctggaagagctgaggtaatctcattatattcagcaggtattttagagggcttgttttgcttagtgttatcctaggtgcctt

SEQ ID NO: 291007 - DNA, 201 bp, Homo sapiens
atcttcttgtatatgtcttaaatgtatttttgtcctcatatacagaaagttcttaattgattttacagtctgtaatgcttgatgttttaaaataataacayttttatattttttaaaagacaaacttcatattatcctgtgttctttcctgactggtaatattgtgtgggatttcacaggtaaaagtcagtaggatggaac

SEQ ID NO: 291008 - DNA, 201 bp, Homo sapiens
caaactgaatgtggcaatatataaaaagaattatacaccatggctaagtgggatttataccaagaatgcaaggttgatttcatgtcccaaaatcaatcaaygtaatacactgtatctttgggaggctgaggcaggcagatcatgaggtcaagagaaagagaccatcctggccaacatggtgaaaccccgtctctactaaaa

SEQ ID NO: 291009 - DNA, 201 bp, Homo sapiens
gacagaactttctacattgggaatgggaaggaggaggtggatctaaggaaggctgcaaagctcactaaatagtcactgaaatgagaggaagggaagcaccrtaccagatgcctccagtgatttaaagcagggtgtctgaggtgatgctattatagccaaaagtactagaaaaatgccttaaaattttaagttatagcttaa

SEQ ID NO: 291010 - DNA, 201 bp, Homo sapiens
ctctggcttggatcatgctggaagagctgaggtaatctcattatattcagcaggtattttagagggcttgttttgcttagtgttatcctaggtgcctttargtagttgagtgatgtgtgaaacagtctctgttctcaaagatttacagttgttttggaaagtgatgttcttgtgaaatggtgtgatcctgttcagcgtgtt

SEQ ID NO: 291011 - DNA, 201 bp, Homo sapiens
agagacggggtttcactgtgttagccaggatggtcttgatctcctgacctcgtgatttgcccacctcggcctcccagagtgctgggattacaggtgtgagmcactatgcacggcctacatgtttgatctttttagtttgaccttctaagtcaaacatattttcatgcttcttgagttagagaaggcattttatagaagtaa

SEQ ID NO: 291012 - DNA, 201 bp, Homo sapiens
tcttacaagatctgatggttttataaggggcttttccccttttgctcagcacttctctttcctgctgccatgtgaagaaggatgtgttcacttcccctttygccatgattttataagtttcctgaggcctccccagccaagctgaactgtgagtcaattaaatctttttcctctgtaaattagccagtctcgggtatgtcc

SEQ ID NO: 291013 - DNA, 201 bp, Homo sapiens
tgacctgagcaccccaggccatgtgtgctgcctgctccaggggcctgaaacatccttcctgtgtgacctgcagctgacccctccctaccctctggtccacsacaggctctcccagccgccttctgtgtcactactgttctctttgcctatttcctgcaggcagagctcagctcctgtgcctttggtgtggggagggtgttc

SEQ ID NO: 291014 - DNA, 201 bp, Homo sapiens
cttgctgttccctcactccatctctatgcacgagagctcagtgttgtgcgtgccgtctctcagctccctgctcggcctgtcaggcaggtcctgttggcagraagcctaaaagaatgaaaaactttgagatagagaattgcttagaaactgccttgacccactatctcctcagccttggcctaggccgtgcaaagttagtgg

SEQ ID NO: 291015 - DNA, 201 bp, Homo sapiens
ctagttctgtctttagggactgggcccctcattccggattgtgtgttaggggtgacgtcctcccccttcacctcaaggaagggacttccagtgtatgaacstttggctgtagccaggaggggcctagtgacctgagcaccccaggccatgtgtgctgcctgctccaggggcctgaaacatccttcctgtgtgacctgcagc

SEQ ID NO: 291016 - DNA, 201 bp, Homo sapiens
gaggaggatatcttggtcagaaaagagcttgaagaaattgccaggactcacccagaccagttcgacctgtggtacaccctggacaggcctcccattggtaygacatccagtgccctcactcaccatgggtcagcaccaacccttgaccactttgaggactggtctctgtctctttgttttgttttagttttgtaggaccag

SEQ ID NO: 291017 - DNA, 201 bp, Homo sapiens
ctccgggtgggttccgcggcggggtgtatttatggagtattgaagaaatatctccgtcgggacggccggaaggaaagaggccagaggcgcggaggccggcyagagccgggaacgaacgtccgaccgggaggttgggggccggagcgggaggcgtggggagaggtcgtgggcgggaccgcgaagggcggggagcggggcggg

SEQ ID NO: 291018 - DNA, 201 bp, Homo sapiens
acctggctaattttttgtatttttttgtagagatggggtttcgccatcttgcccaggctggtctcgaactcctgagctcaagcaatccacccgcctctggrctgggattacaggcgtgagctaccatgtctgacccctttctgtaatttttaatactcactctccaactttaatgatcttttcctgctccaaaaagcagtt

SEQ ID NO: 291019 - DNA, 201 bp, Homo sapiens
gagttggcagcgagcactccagctggagtggtggcagctttggccaggagtatgctgaccggtgtagtcagtccagggaacaagaggatggccctggaggrgctttttcagtgttgcttcttttctagacagaggaggatatcttggtcagaaaagagcttgaagaaattgccaggactcacccagaccagttcgacctgt

SEQ ID NO: 291020 - DNA, 201 bp, Homo sapiens
cccgcctctgggctgggattacaggcgtgagctaccatgtctgacccctttctgtaatttttaatactcactctccaactttaatgatcttttcctgctcyaaaaagcagttacactaagatcacaggtgggcagacatatcacccccattttacagatgaagagaccaaaacccagagaggtgaagtgacttgcctaggg

SEQ ID NO: 291021 - DNA, 201 bp, Homo sapiens
caaaacaaagggtttgagcttcaggagcagcagcagaactcttgtttgccgtgggagttggcagcgagcactccagctggagtggtggcagctttggccakgagtatgctgaccggtgtagtcagtccagggaacaagaggatggccctggaggggctttttcagtgttgcttcttttctagacagaggaggatatcttgg

SEQ ID NO: 291022 - DNA, 201 bp, Homo sapiens
ttacagatgaagagaccaaaacccagagaggtgaagtgacttgcctagggtagcacagggaggcagggcaggcctaggatccgggcatcccatatttgggytccttccctgctctcttcttcccacccctcttaacattgtgcccccagtatttgctcccttcactgaagctcagtcctttattcctgggccttatttaag

SEQ ID NO: 291023 - DNA, 201 bp, Homo sapiens
gaacctacatcccatggaggttcttcatccacatggaggaacttcatccacaaaacaaagggtttgagcttcaggagcagcagcagaactcttgtttgccrtgggagttggcagcgagcactccagctggagtggtggcagctttggccaggagtatgctgaccggtgtagtcagtccagggaacaagaggatggccctgg

SEQ ID NO: 291024 - DNA, 201 bp, Homo sapiens
gggaaggtatgaagcttgctgcaggtcagggactgtgggcttcagagacagggagaaagctggctgctcgctcactgtgttccaggcatcacacccatgtkgcagctcattcgccacatcaccaaggaccccagtgacaggaccaggatgtccctcatctttgccaaccaggtcagttcctgctgagcttgcagtggtagg

SEQ ID NO: 291025 - DNA, 201 bp, Homo sapiens
catcccatatttgggctccttccctgctctcttcttcccacccctcttaacattgtgcccccagtatttgctcccttcactgaagctcagtcctttattcytgggccttatttaagctaaatatgctttgactcagtgcttgatgccttttctataggtaactatgtccagctcttggcaaaaatcgataatgaattggtg

SEQ ID NO: 291026 - DNA, 201 bp, Homo sapiens
acagaagtgagaaaaggataacttgggctgggggaaggtatgaagcttgctgcaggtcagggactgtgggcttcagagacagggagaaagctggctgctcsctcactgtgttccaggcatcacacccatgttgcagctcattcgccacatcaccaaggaccccagtgacaggaccaggatgtccctcatctttgccaacca

SEQ ID NO: 291027 - DNA, 201 bp, Homo sapiens
agaggtcataagcattctctgtgtttccagggaatcttggaatcagaccagaccagacgagtgagcctaaaaaaacactggccgatcacctgggaatgatwgctgggggcacaggtaagaggcttctaggggctccatccagagagtgagccccgagacccattctgacttgggagtcatttgatcctcgaagggacaaca

SEQ ID NO: 291028 - DNA, 201 bp, Homo sapiens
ctattcccactttgtgcactggagcaccagggctagctgaggagactgccctggcctgcttctccagcttaaaatggtgcagacagtcccttagctggacrtgcctcctgggagtcctaaggaatgtcagtgatcttttgcagtctctttaggcaagaactgcagaggtcataagcattctctgtgtttccagggaatctt

SEQ ID NO: 291029 - DNA, 201 bp, Homo sapiens
ttgtggcagcttcatcttcagggattgcgtacagcaattcagagaggagaacactttctctgcaaagcttccagcagtaaatgcattttctagttgtacgkggctgtggcattgtgtctgggaatgtgaaagcagtgctgccttgcttttcagatctacttcaaaaatgtacacccccaatatcctgaaggtgggaagatg

SEQ ID NO: 291030 - DNA, 201 bp, Homo sapiens
cagttaaccttgtggcagcttcatcttcagggattgcgtacagcaattcagagaggagaacactttctctgcaaagcttccagcagtaaatgcattttctmgttgtacgtggctgtggcattgtgtctgggaatgtgaaagcagtgctgccttgcttttcagatctacttcaaaaatgtacacccccaatatcctgaaggt

SEQ ID NO: 291031 - DNA, 201 bp, Homo sapiens
gtccccaggccctaagtcacggggcacctcttagagctacgcaccctagttctgtctttagggactgggcccctcattccggattgtgtgttaggggtgaygtcctcccccttcacctcaaggaagggacttccagtgtatgaacgtttggctgtagccaggaggggcctagtgacctgagcaccccaggccatgtgtgct

SEQ ID NO: 291032 - DNA, 201 bp, Homo sapiens
ctgctcctgaccatcaccgtcactggggtcactgtgctcgtgttggtcctgaagagcatgaactccaggaggagagagccaatcaccttacaggaccctgmagccaagtacccgctgcccttgattgagaaagaggtaatgggtcagccctgtgggtggaaggcagtaagtggatgatggctgggatggcagggcatccag

SEQ ID NO: 291033 - DNA, 201 bp, Homo sapiens
tggaggggctttttcagtgttgcttcttttctagacagaggaggatatcttggtcagaaaagagcttgaagaaattgccaggactcacccagaccagttcracctgtggtacaccctggacaggcctcccattggtacgacatccagtgccctcactcaccatgggtcagcaccaacccttgaccactttgaggactggtc

SEQ ID NO: 291034 - DNA, 201 bp, Homo sapiens
atcttggtcagaaaagagcttgaagaaattgccaggactcacccagaccagttcgacctgtggtacaccctggacaggcctcccattggtacgacatccaktgccctcactcaccatgggtcagcaccaacccttgaccactttgaggactggtctctgtctctttgttttgttttagttttgtaggaccagatgtggggg

SEQ ID NO: 291035 - DNA, 201 bp, Homo sapiens; identical to SEQ ID NO: 60064

SEQ ID NO: 291036 - DNA, 201 bp, Homo sapiens
caggcttgtccatgcaggtggaattctccactggaaactgcctcacttactcctggttgtctccacagcccaagctgtgaactcacaagcaattccttctsgaggctctaacccagcccctaccacaacagatgccgtttataaagagttgaagcaactgctgtaaatattggtgaagtaattgactagtatcattaacac

SEQ ID NO: 291037 - DNA, 201 bp, Homo sapiens
agtccactcagtttctgagcgagtagaaactgagggagtaaactgactacatacatacaggaagttagtcaagggttagggttacaaaactttctcttgcstctagctcttagtatctcttgattgcactcctgtccctgccactaattgccttagtaatttgagtctcacattttggatccaacaggtcgtagctgccca

SEQ ID NO: 291038 - DNA, 201 bp, Homo sapiens
tcagcttcagggaccagcccctctagtgcctactctgcctgcttttttctcctcctgcctcctcctcctccctgcaccttaggtcttggtttctatccatmtctctgttccatcttccttgtctcttgactaatttcccgtatgtagtccactcagtttctgagcgagtagaaactgagggagtaaactgactacatacat

SEQ ID NO: 291039 - DNA, 201 bp, Homo sapiens
agtgctttttctctgagggcacatatgccctaggcagggctttccagcagtgaagctacagttaaccttgtggcagcttcatcttcagggattgcgtacarcaattcagagaggagaacactttctctgcaaagcttccagcagtaaatgcattttctagttgtacgtggctgtggcattgtgtctgggaatgtgaaagca

SEQ ID NO: 291040 - DNA, 201 bp, Homo sapiens
ttcgcgcacacactggttctcctcttttgggtgtgggcctaacaaaaagggctcaaggggctggagactggctgctggggcctccttgcttggaggctggmaagagctccatttcagtatctttctccgtggttttgtgaaataaactcaagtacaaagcagacagcccatgaagtgtggctctgtgggggacgtgctagg

SEQ ID NO: 291041 - DNA, 201 bp, Homo sapiens
tagtacagacttctaagcctttgtagagcagcttgtcacctcctccctggctgagggtgggtgtgcaggcggcctgggatcaggaactccacctggcatcsctcagcttgctcctgcatctccttcatttcaggctggaagtacagctcaggcttcgttactgccgacatgatcaaggagcaccttcctcctccagcgaag

SEQ ID NO: 291042 - DNA, 201 bp, Homo sapiens
aggctttttgcagggagcagtagtacagacttctaagcctttgtagagcagcttgtcacctcctccctggctgagggtgggtgtgcaggcggcctgggatyaggaactccacctggcatcgctcagcttgctcctgcatctccttcatttcaggctggaagtacagctcaggcttcgttactgccgacatgatcaaggagc

SEQ ID NO: 291043 - DNA, 201 bp, Homo sapiens
tgctgcagagggctgtttactagttctgaggctttttgcagggagcagtagtacagacttctaagcctttgtagagcagcttgtcacctcctccctggctsagggtgggtgtgcaggcggcctgggatcaggaactccacctggcatcgctcagcttgctcctgcatctccttcatttcaggctggaagtacagctcaggc

SEQ ID NO: 291044 - DNA, 201 bp, Homo sapiens
tgacagacagcagcagggcttcagggtccctgcagtgagcctgggacctggggtgattgctgcagagggctgtttactagttctgaggctttttgcagggwgcagtagtacagacttctaagcctttgtagagcagcttgtcacctcctccctggctgagggtgggtgtgcaggcggcctgggatcaggaactccacctgg

SEQ ID NO: 291045 - DNA, 201 bp, Homo sapiens
cggtatacctcgttgtgttctccttcctcgtcaatgctgacagctgacagacagcagcagggcttcagggtccctgcagtgagcctgggacctggggtgaytgctgcagagggctgtttactagttctgaggctttttgcagggagcagtagtacagacttctaagcctttgtagagcagcttgtcacctcctccctggct

SEQ ID NO: 291046 - DNA, 201 bp, Homo sapiens
cttttctataggtaactatgtccagctcttggcaaaaatcgataatgaattggtggtcagggcttacacccctgtctccagtgatgatgacagaggctttrtggacctaattataaaggtaaatagtgcccaccatatctggctagctcgtgcttccaagcctactgagggtggtggggtggaggggcagtgctttttctc

SEQ ID NO: 291047 - DNA, 201 bp, Homo sapiens
ccctcttaacattgtgcccccagtatttgctcccttcactgaagctcagtcctttattcctgggccttatttaagctaaatatgctttgactcagtgcttsatgccttttctataggtaactatgtccagctcttggcaaaaatcgataatgaattggtggtcagggcttacacccctgtctccagtgatgatgacagagg

SEQ ID NO: 291048 - DNA, 201 bp, Homo sapiens; identical to SEQ ID NO: 60067

SEQ ID NO: 291049 - DNA, 201 bp, Homo sapiens
aggccggccagagccgggaacgaacgtccgaccgggaggttgggggccggagcgggaggcgtggggagaggtcgtgggcgggaccgcgaagggcggggagyggggcgggccggctcggattccggaaggctgagactccagtgacccggcgggaggagaggcaactttccctgtcgggcttgagttgggagaggagcaggg

SEQ ID NO: 291050 - DNA, 201 bp, Homo sapiens; identical to SEQ ID NO: 60068

SEQ ID NO: 291051 - DNA, 201 bp, Homo sapiens; identical to SEQ ID NO: 60069

SEQ ID NO: 291052 - DNA, 201 bp, Homo sapiens; identical to SEQ ID NO: 60070

SEQ ID NO: 291053 - DNA, 201 bp, Homo sapiens; identical to SEQ ID NO: 60059

SEQ ID NO: 291054 - DNA, 201 bp, Homo sapiens
aacacccacccattccacacagccatcacatacacatctaatatgggcactgaccccttcaccactcacccttctgcttacggccaccacaccccttaccrcccacctcacctggacatgctgagcccccagacagctgctgcagcccagacagcatcccagcaaccactgtgcacagagcaccccacaggcgcgcctctc

SEQ ID NO: 291055 - DNA, 201 bp, Homo sapiens
cgggcccgcggcggggagcggcccccggccaaccccagttcgacgacgtgttgggcgtctcactccgggtgggttccgcggcggggtgtatttatggagtrttgaagaaatatctccgtcgggacggccggaaggaaagaggccagaggcgcggaggccggccagagccgggaacgaacgtccgaccgggaggttgggggc

SEQ ID NO: 291056 - DNA, 201 bp, Homo sapiens
catcaccgtcactggggtcactgtgctcgtgttggtcctgaagagcatgaactccaggaggagagagccaatcaccttacaggaccctgaagccaagtacycgctgcccttgattgagaaagaggtaatgggtcagccctgtgggtggaaggcagtaagtggatgatggctgggatggcagggcatccagacagtcatctc

SEQ ID NO: 291057 - DNA, 201 bp, Homo sapiens
ttgccgagcttaagtaagctgaggggcgctcagtgtggcagctctgcgtgtgcagggaaggggccaggatgcagaggggcagcgcaggagcgaggacgccrcggctcagcgccccgccagcctcatgatggagcgctgccctgggggcagggctgacccagagccagcggctcgtgagtgagagccccccgaccacggccc

SEQ ID NO: 291058 - DNA, 201 bp, Homo sapiens
acaggtttcccacgtcctgaggtgtggaagatgccctcttgctcctcctgagcctgtgagctcagggagatagatagggggatggatgtgggacagaaaayttcttcattattccaattgggctgacacgagagtggtacctcagtgagcattgaaaagaactgaacctagagccaaaaggcctaaaatctcatggaaggc

SEQ ID NO: 291059 - DNA, 201 bp, Homo sapiens
gagatagagaattgcttagaaactgccttgacccactatctcctcagccttggcctaggccgtgcaaagttagtgggacaaggtaatgtagaggcctctgsgagagtctaatatgaggcctcagagttcgctgcttcgtcccagcccagtggaagtgaagcaagttagagatggggcttgaaggaccagccagggagcccc

SEQ ID NO: 291060 - DNA, 201 bp, Homo sapiens
atgtcctcagtggacacttcagaaaatacagaatataaatatttacttactttttaaatcttttttctatatatgttatatatttgtaatttatatatgcttttttttttttcactcagcattaccacaacaggcattttcttctctttaagatgctttataaatattttcatcatagtttttatcaagttgcactataat

SEQ ID NO: 291061 - DNA, 201 bp, Homo sapiens
cacctcaaggaagggacttccagtgtatgaacgtttggctgtagccaggaggggcctagtgacctgagcaccccaggccatgtgtgctgcctgctccaggrgcctgaaacatccttcctgtgtgacctgcagctgacccctccctaccctctggtccaccacaggctctcccagccgccttctgtgtcactactgttctct

SEQ ID NO: 291062 - DNA, 201 bp, Homo sapiens
cctcagattagattaatttgctggagttgctcatagaattcagggaatcatgttagttatgttatcattttctaataaagcatattccgaagaacacagtygaacagccagatggaagagattcacagagcaaggcatatgggaagggtcacggagctcccatgccttctcccggcacactgtgccctagggacctccacg

SEQ ID NO: 291063 - DNA, 201 bp, Homo sapiens
ccatcttgtggtgtcacgtcatgcttttcggcttgttaggctcactaacgtgggtttatgcatgtgtttctaagtccagaagcaatttgcgggacccagaragtattgagatataggcatagttgatctgggccagatacttcatatataaaattaaaaagttggactagagactatcaaaccccagtaggtttaagaatc

SEQ ID NO: 291064 - DNA, 201 bp, Homo sapiens; identical to SEQ ID NO: 60107

SEQ ID NO: 291065 - DNA, 201 bp, Homo sapiens
  misc_feature (1)...(201): n = A,T,C or G
cttatctggaagttcttctgaagttggcagacaaatacaaaaagaaaatgtgggggtaagttactgagcttactgtctgagtgtcatctgaacagctgatnataggctttcttgagagtggttcccccgtgtttttgtaagctgtgttctatgtttgctctgctatatgttttttttttttttccctcctgcctcagcctc

SEQ ID NO: 291066 - DNA, 201 bp, Homo sapiens
cctgggcaacagagtgagactgcttcaaaaaaaaaaaaaaaaaattacctataaggtggttttagaaactgtaaagattgtgttattttgcattaagtgtwaattggattttatcctctgacctttttttaatagattagaggatttcctacaatcaagatatttcagaaaggcgagtctcctgtggattatgacggtggg

SEQ ID NO: 291067 - DNA, 201 bp, Homo sapiens
ccttaaaacgcattatacaaaacagcagtacaaaaatattttctctcttttttttttttttttgagacaaggtcttgccctatcaggctggagtgagtggygcatcacagcccactgcacccgtagcctcgacctccctgggctcagtgatcctcccacctcagcctctcgagtagctaggactataggcatgcaccacca

SEQ ID NO: 291068 - DNA, 201 bp, Homo sapiens
  misc_feature (1)...(201): n = A,T,C or G
gtagaaattaacagtgggtggtggcacacacctgtagtcccagctatgttggaggctgaaatgagatcacctgagcccaggagattgaggctgcagggagncatgattgcaccactgcactccagcctgggcaacagagagagactgtgtctcaaagaaacaaaacaaaacgaatatttttctatagcctagagccagagt

SEQ ID NO: 291069 - DNA, 201 bp, Homo sapiens
cggggggcgggagcctcgtgcgctggagccgggcgcggggtccagggccgggcgggagagccgcggagcccagccccggccggatcccggggagggggtcwgtattcccggagagtcgcaggggagcttgttccgggctcttctcgaactcgtgcgtggggacggaggttggcgggcgtcctgcactgctgcttgtttctg

SEQ ID NO: 291070 - DNA, 201 bp, Homo sapiens
cttcattgtgaataacatcagtgtgtacttaatacaaacctagatggcataacttactaaaaacctaggctacatggtatagcttatttctcttaggttayaaatctgttcggcatgttactgtactgaatattgtatgcagttgtaacacaatggcaagcatttgtgtatctaaacatagaaagggtgcagtaaaaatat

SEQ ID NO: 291071 - DNA, 201 bp, Homo sapiens
  misc_feature (1)...(201): n = A,T,C or G
ctctgtgttgtggctgtgctgccccatatccttgatactggtaagacagacggaaatgatttcccttagctgttctatgctagatgctctgagaatacttnctaaatggattaattttatggactcctttatctttacctttaaaaaactttgtctatttaaatcaggagctgcaggcagaaattcttatctggaagttct

SEQ ID NO: 291072 - DNA, 201 bp, Homo sapiens
gtattataaaatagttgtagattatttatagtactttctgaaattggagaaaacgctgtataaaaatctgattttattaagacatctagtttagcttagtrtttgtttaaaagaagtagagaagagggaaatgggaaatgcaaagtatctagtctgttgttaaggaagatctgtcttttgatgaggtgatgcgtgtggaag

SEQ ID NO: 291073 - DNA, 201 bp, Homo sapiens
  misc_feature (1)...(201): n = A,T,C or G
tgatttcccttagctgttctatgctagatgctctgagaatactttctaaatggattaattttatggactcctttatctttacctttaaaaaactttgtctntttaaatcaggagctgcaggcagaaattcttatctggaagttcttctgaagttggcagacaaatacaaaaagaaaatgtgggggtaagttactgagctta

SEQ ID NO: 291074 - DNA, 201 bp, Homo sapiens
acttggctttaaagacacctcatacctactttttccatcttttctatctggtatctcacagaaattgttccttttttatttgggaaattcccctgctttcycagctagatattaagcttcttattcatccatgttcatgttcggtaaacatttgtgagttattctcattaggagatggtgtttgagcagggagttttcgtt

SEQ ID NO: 291075 - DNA, 201 bp, Homo sapiens
ctcactaacgtgggtttatgcatgtgtttctaagtccagaagcaatttgcgggacccagaaagtattgagatataggcatagttgatctgggccagatacytcatatataaaattaaaaagttggactagagactatcaaaccccagtaggtttaagaatcactagcagaacttaataaaatgcacttcttccactaggaa

SEQ ID NO: 291076 - DNA, 201 bp, Homo sapiens
  misc_feature (1)...(201): n = A,T,C or G
atgttggaggctgaaatgagatcacctgagcccaggagattgaggctgcagggagccatgattgcaccactgcactccagcctgggcaacagagagagacngtgtctcaaagaaacaaaacaaaacgaatatttttctatagcctagagccagagtgggctgccgcagcttcagaagtaaaagagcagacgaaaggaaaag

SEQ ID NO: 291077 - DNA, 201 bp, Homo sapiens
aaaactgaaatgttaagccgggcgcggtggctcacacctgtaatcccagcactttggaaggccgaagcgggtggatcatctgaggtcaggagttcgagacmagcctgaccaacatggcgaaaccccgtctctactaaaaatacaaaattagtcgggcgtggtgtcgcgcgccagtgatcccagctactcagaaggctgagg

SEQ ID NO: 291078 - DNA, 201 bp, Homo sapiens
cagtcctcatggaccattttacttcatgctcagtgtagcaaatggaggtaaaaacgctctattttcaaagtggatgttgccacattgtgcgtcctgtccayctaatgcctttactgttttaaaggctctggtatatatgtgttcagtccaaatgctaattctgtgtggattagctcaattatactagcaaatacataaata

SEQ ID NO: 291079 - DNA, 201 bp, Homo sapiens
taatatatttactgagtatatctaagatcatttaaacatgtgttttcaaaatgaaaaataatattgaggccgggcacggtggctcacgcctgtaatcctcrcactttgggaggccaaggtgggcggatcacctgaggtcaggagttcaagaccagcctggccaacatggtgaaaccccatctctactaaaatacaaaaatt

SEQ ID NO: 291080 - DNA, 201 bp, Homo sapiens
gggcatgatggctgatgcctgtaatcctgagacgggagaatcgcttgaacccaggagacagtggttgcagtgagccaagattgcaccactgcactccagcstgggcagctgagtgagacgccgtctcaaaaaaaaagaaaaataatgagattacatttttccctccattaagtcttcagaattcagtgtgtttttaccagc

SEQ ID NO: 291081 - DNA, 201 bp, Homo sapiens
agattctcttctggtgttcaaggctaaagcccttattgactgattgcaaactgcaccctgtgctttattacctttttctgagtctatgtgaagcagataaygagttcttgtggagtctgctttagcggaaggaaaaattgttatttcttttacatttccacaggatgttgtcaaagttggtgcagttgatgcagataagca

SEQ ID NO: 291082 - DNA, 201 bp, Homo sapiens
ttataggtgtgagccatggcatctggtcaacattttactttctaaacttaattttttttttttaactttttggctcttgtaaaaacacttaccttaaaacrcattatacaaaacagcagtacaaaaatattttctctcttttttttttttttttgagacaaggtcttgccctatcaggctggagtgagtggtgcatcacag

SEQ ID NO: 291083 - DNA, 201 bp, Homo sapiens
ctctcttttttttttttttttgagacaaggtcttgccctatcaggctggagtgagtggtgcatcacagcccactgcacccgtagcctcgacctccctgggytcagtgatcctcccacctcagcctctcgagtagctaggactataggcatgcaccaccatgcctggctaatttttgtactttttttagagagggggtctca

SEQ ID NO: 291084 - DNA, 201 bp, Homo sapiens
atctgcctgccttggcctcccaaagtgctgggattacaagcatgacccatagcacctggccagtattttcttttatatccgtattctgtaaggtttttttygtttttttttttttttttttaattatactttaagttttagggtacatgtgccatgctggtgcactgcacccactaactcctcatctagcattaggtatat

SEQ ID NO: 291085 - DNA, 201 bp, Homo sapiens
aaagacttaaacgttagacctaaaaccataaaaaccctagaagaaaacgtaggtttttttcgtttttaaagtttgttttagttttttaaacttttttgtcwaaaactaggacacagggccgggcacggtggctcacgcctgtaatcccagcactttgggaggccgaggcgggcggatcacaaggtcaggagatcgagacca

SEQ ID NO: 291086 - DNA, 201 bp, Homo sapiens
gttgtaggcctgcagtcctagctactagggaggctgaggcacacccaggaggtggacgttgcagtgagctgagatcacaccactgcactccagcctgggcmaaagagtgtgacttggtctcaaagaaaaagaagtttgtggactgcttaagtttgtgattgtcatagagtagtatttattaaatcatgaagtcagaatgtg

SEQ ID NO: 291087 - DNA, 201 bp, Homo sapiens
tgcagcagcatgatcacggctcactacagccttgatttctcaggctcaggtaatcctcccacctcagcctccccagcactggtactacaggcatgtaccaycacgccctgctaatttttgtattttttatagagacggaatttcaccatgttgtccaagctggtctctaactccagggctcaagcaattcgcctgtctcgg

SEQ ID NO: 291088 - DNA, 201 bp, Homo sapiens
attggattttatcctctgacctttttttaatagattagaggatttcctacaatcaagatatttcagaaaggcgagtctcctgtggattatgacggtgggckgacaagatccgacatcgtgtcccgggcccttgatttgttttctgataacgccccacctcctgagctgcttgaggtaaaccacttcaactgcttgtagtcc

SEQ ID NO: 291089 - DNA, 201 bp, Homo sapiens
gcattagaataattacactgaacagaaatacgagcttcttaaagatagagtgtattcaatcactcttgcttatcattctcaaagtaatagaacatttatcragtactaatcatgtaacaggcaccgttctggtgtctttgtatagttttgttttgttttgttttgttttcatttaattctcacatgaacactgagaggtag

SEQ ID NO: 291090 - DNA, 201 bp, Homo sapiens
taaagatagagtgtattcaatcactcttgcttatcattctcaaagtaatagaacatttatcaagtactaatcatgtaacaggcaccgttctggtgtctttrtatagttttgttttgttttgttttgttttcatttaattctcacatgaacactgagaggtagatactgtttttaatctccattttatatatggggaaattg

SEQ ID NO: 291091 - DNA, 201 bp, Homo sapiens
acacagtgattcctataccctccgagtcattctgaagatgaaatatgtgtcacacaggtttgtctcatcacttaacgcttgcttaggtctatgctacattrgcaatgatagaaaatagtgttctgtgctaccctgttgtctttctcattacagtcacttgtatttaataaagatctacatgtattttcttgctctaatctc

SEQ ID NO: 291092 - DNA, 201 bp, Homo sapiens
atggcccaaaacgctgaaaagtttttttcctagtatacttcatgatttggcatatgtccagataaagactcggggaaggggcagtggttcagatgacggaratacctgacatagataaggagcagaggctgtttcatgttgaggccttgcccttctgtgttatcaagtgacatacttggtaggctcagccagcgatacagt

SEQ ID NO: 291093 - DNA, 201 bp, Homo sapiens
ctacatgtattttcttgctctaatctctcttccctttactgtaggaaaagggtctaacataacactatggaaaaggagactgtaatttgagagtcttagtstcctaaactgtcaataataaatggataccacaaattctgttttgtagataagtaaattgttagtgtctgctgtgagccactgaggcaactaaagaaagaa

SEQ ID NO: 291094 - DNA, 201 bp, Homo sapiens
gccactgtactccagcctgggcaacagggtgagactccatctcaaaaaataataataataaataaaaaaggaaaaggaattggttttccaagtgttaagtytagtgcaaaatgcattgtggggagaaagtgtgttctgtcagagatacacgtgtcagaactgtgtcacacctggtgaagccgacagtgaggtaaagacaca

SEQ ID NO: 291095 - DNA, 201 bp, Homo sapiens
actccagcctgggcaacagggtgagactccatctcaaaaaataataataataaataaaaaaggaaaaggaattggttttccaagtgttaagtttagtgcaraatgcattgtggggagaaagtgtgttctgtcagagatacacgtgtcagaactgtgtcacacctggtgaagccgacagtgaggtaaagacacagtcttggg

SEQ ID NO: 291096 - DNA, 201 bp, Homo sapiens
gagacagggtctcactttctcccaggctagagtgcagcagcatgatcacggctcactacagccttgatttctcaggctcaggtaatcctcccacctcagcytccccagcactggtactacaggcatgtaccaccacgccctgctaatttttgtattttttatagagacggaatttcaccatgttgtccaagctggtctcta

SEQ ID NO: 291097 - DNA, 201 bp, Homo sapiens
tggttttccaagtgttaagtttagtgcaaaatgcattgtggggagaaagtgtgttctgtcagagatacacgtgtcagaactgtgtcacacctggtgaagcygacagtgaggtaaagacacagtcttgggccgggccagatgaggcacttgctgaaggccgggctgaggaccgcctaccttccgtctcctgtaggtggcaga

SEQ ID NO: 291098 - DNA, 201 bp, Homo sapiens
tagtctcctaaactgtcaataataaatggataccacaaattctgttttgtagataagtaaattgttagtgtctgctgtgagccactgaggcaactaaagawagaattcaggtttcaccctcccaagactaaatgttatttcagccacactattctttttttcttttcttttttttttttttttaagagacagagtcttgct

SEQ ID NO: 291099 - DNA, 201 bp, Homo sapiens
aaaaaagatatcacaaacagattattctatttaagataatcagagttgctgggttgggccagatccatagtgctagtaaaagtattgggcataatttgttygaagctgaaattatgactaatttggtaaaggtttttgttgaagatttatatggaacatatgagtgactgaactttgtcatcttaggttttgctttatgtg

SEQ ID NO: 291100 - DNA, 201 bp, Homo sapiens
gtataaacatataagacatataatacatgtaagtataatctatttaaacaagtaagtggcagagccaggctgtgtccaggcattgcgatttcagagatgtytgtatgtgtgctaatcaccccacctccaccaccacagcttccacaggcttaagaatcagtagcagaaaaatctcctcttagagaacatgcctccaggtgt

SEQ ID NO: 291101 - DNA, 201 bp, Homo sapiens
gcagcatgatcacggctcactacagccttgatttctcaggctcaggtaatcctcccacctcagcctccccagcactggtactacaggcatgtaccaccacrccctgctaatttttgtattttttatagagacggaatttcaccatgttgtccaagctggtctctaactccagggctcaagcaattcgcctgtctcggcctc

SEQ ID NO: 291102 - DNA, 201 bp, Homo sapiens
aagcacattggaccagatagattctaaagggcttgttgagggtgtagagttgtaaattatagagtttaaatgtgatttaattgagcagtaattcggaagcttttttttttttttttgggtgggggacagagtcttgctgtgttgcccgggctggagtgcagtggcacgatctcagctcactgcaacctccgtttcccgagt

SEQ ID NO: 291103 - DNA, 201 bp, Homo sapiens
tcactacagccttgatttctcaggctcaggtaatcctcccacctcagcctccccagcactggtactacaggcatgtaccaccacgccctgctaatttttgyattttttatagagacggaatttcaccatgttgtccaagctggtctctaactccagggctcaagcaattcgcctgtctcggcctcgcaaagtgctgggatt

SEQ ID NO: 291104 - DNA, 201 bp, Homo sapiens
ccgccctgtgtgccattctgtgcatctggccctgggctctttctcattctcataaaggtctcatatgggctagaggcagccctgtctgtccatcctcaccytcatatgcattgtaatcttgaccttggggaaatgtggtttccatttctgggcacttggctttggaatgtagttatttatttgaaaatgggcgtacttaag

SEQ ID NO: 291105 - DNA, 201 bp, Homo sapiens
cgaggccagcttgggcaatgtggcaagaccctatcgctacgaaaataaaaagaaaagaaacaaattacccagacgtggtgccgtgtacttgtggtcccagytactcaggaggctgaggtgggaagatcacctgagcctgtgaggtagaagctgcagtgagctgtgattgtgccactgcactccagcctgggcaacagtgag

SEQ ID NO: 291106 - DNA, 201 bp, Homo sapiens
agatctctaatcccagcactttgggaggctgaggtgggaggatcacttgagtacaggagtttgagaaaactctaaaaaaaaaaaaaaaaaaaaagaaagttttttttttttttcttgacacagagtctcgttctgtcacccaggctggagtgcagtggcgcgatgtcagctcactgcagcctccgtctcctgggttcaggt

SEQ ID NO: 291107 - DNA, 201 bp, Homo sapiens
gagtttgagaaaactctaaaaaaaaaaaaaaaaaaaaagaaagttttttttttttttcttgacacagagtctcgttctgtcacccaggctggagtgcagtrgcgcgatgtcagctcactgcagcctccgtctcctgggttcaggtgattctcctgcctcagcctcctgagtagctgggattatagatgtccaccaccacgc

SEQ ID NO: 291108 - DNA, 201 bp, Homo sapiens
tgaggtgcaagaatctcttgattgtgggaggcagaggctacagtgagccaagctcacaccactgcgctccatcctggataatagaaggagactctgtcttaaaaaaaaaaagaaaagaaaagaaaggtgtttgggctgcaagttaaaatgcaagtatttggcctggtgaggtggatcacttgaggccaggagtttgagacc

SEQ ID NO: 291109 - DNA, 201 bp, Homo sapiens
tttttttttttgagaccgggtcttgctctgcctcccaggctcaagcaatcctcccacatcagcctctggagtagctgcggctacagatgcaccctaccatrccgagctaatttttgcatttttgtatttcatattttttctctacaagagatggagttttgccatgttgcccaggctggtctcaaactcctggctcaggtt

SEQ ID NO: 291110 - DNA, 201 bp, Homo sapiens
ccaacactttgggaggccaaggatcacttgaggccaggatttcaaaaccagcctggccaacatggtgaaaccccgtctctattaaaaatacaaatattagycgggtgtggtggtgtgtgcctgcagtcccagctactcaggaggctgaagtaggagaattgcttgaacccaggaggcagaggttgcagtgagctgagattg

SEQ ID NO: 291111 - DNA, 201 bp, Homo sapiens
caacactttgggaggccaaggatcacttgaggccaggatttcaaaaccagcctggccaacatggtgaaaccccgtctctattaaaaatacaaatattagcygggtgtggtggtgtgtgcctgcagtcccagctactcaggaggctgaagtaggagaattgcttgaacccaggaggcagaggttgcagtgagctgagattgc

SEQ ID NO: 291112 - DNA, 201 bp, Homo sapiens
cggagcccagccccggccggatcccggggagggggtctgtattcccggagagtcgcaggggagcttgttccgggctcttctcgaactcgtgcgtggggacrgaggttggcgggcgtcctgcactgctgcttgtttctgccacctgctttatgcagctcctacttttaaaaactgaaatgttaagccgggcgcggtggctca

SEQ ID NO: 291113 - DNA, 201 bp, Homo sapiens
gccaaggatcacttgaggccaggatttcaaaaccagcctggccaacatggtgaaaccccgtctctattaaaaatacaaatattagccgggtgtggtggtgygtgcctgcagtcccagctactcaggaggctgaagtaggagaattgcttgaacccaggaggcagaggttgcagtgagctgagattgcacctgtgctctcca

SEQ ID NO: 291114 - DNA, 201 bp, Homo sapiens
tttttacagtaagtttctaagatgtccatattcacctgtgtatgtttaagtaataagtatgcagatggtttaatgttcaatgggaagctagtttgcatatyagagttgaaaatactggttctgttgtcaaaatcatactgagaacaaggggataatacacatttaaatgtttacattgcctgtttttgtttattgtttttc

SEQ ID NO: 291115 - DNA, 201 bp, Homo sapiens
tagtgatgatgtgatcgaattaactccatcgaatttcaaccgagaagttattcagagtgatagtttgtggcttgtagaattctatgctccatggtaagtawtataaaatagttgtagattatttatagtactttctgaaattggagaaaacgctgtataaaaatctgattttattaagacatctagtttagcttagtgttt

SEQ ID NO: 291116 - DNA, 201 bp, Homo sapiens
atatcagagttgaaaatactggttctgttgtcaaaatcatactgagaacaaggggataatacacatttaaatgtttacattgcctgtttttgtttattgtktttcccagataaatgacagttactctcagccctgccaattctgtgagctgcagagttccctccatgggctttgatttcccccatcattccatttagattc

SEQ ID NO: 291117 - DNA, 201 bp, Homo sapiens
tctcactctcttgcccagggtggagtgcagtggcacaatctcggcttactgcaacctccgcctcccgggttcaaaagatcctcctgccttagcctcctgcrtagctgggactacaggcgcacgccaccatgcccggctaatttttgtgattttagtagagatggggtttgcaccatattggtcaggctggtctcgaactcc

SEQ ID NO: 291118 - DNA, 201 bp, Homo sapiens
  misc_feature (1)...(201): n = A,T,C or G
catcattccatttagattctcttctggtgttcaaggctaaagcccttattgactgattgcaaactgcaccctgtgctttattacctttttctgagtctatntgaagcagataatgagttcttgtggagtctgctttagcggaaggaaaaattgttatttcttttacatttccacaggatgttgtcaaagttggtgcagttg

SEQ ID NO: 291119 - DNA, 201 bp, Homo sapiens
tgaaagagtccgtgagtctattaattaactcattttaataaatggcagcctttctgggaaacctcatggtttctagatgactgctctgggactgtagactmctcctagcagatgtgggacagagatgttactgatgtgaatttatagcatccttaactgccatggaggaatggaaaaccacagatggcagagccatctgct

SEQ ID NO: 291120 - DNA, 201 bp, Homo sapiens
cgcggggtccagggccgggcgggagagccgcggagcccagccccggccggatcccggggagggggtctgtattcccggagagtcgcaggggagcttgttcygggctcttctcgaactcgtgcgtggggacggaggttggcgggcgtcctgcactgctgcttgtttctgccacctgctttatgcagctcctacttttaaaaa

SEQ ID NO: 291121 - DNA, 201 bp, Homo sapiens
ctgaaagagtccgtgagtctattaattaactcattttaataaatggcagcctttctgggaaacctcatggtttctagatgactgctctgggactgtagackcctcctagcagatgtgggacagagatgttactgatgtgaatttatagcatccttaactgccatggaggaatggaaaaccacagatggcagagccatctgc

SEQ ID NO: 291122 - DNA, 201 bp, Homo sapiens
aaatagccgttaagacatgaaatacagcagcaggttaccaatgcgaacaggtagttcgcatttatgtaaaacattcagaaaatgaagttttgaatttgttrgaacattcaaaggacttgagagcattttattgtaacttaaaaaaataaatacaactgtcactaacttttgtgagcaatttctctgaaaaagatcttagtt

SEQ ID NO: 291123 - DNA, 201 bp, Homo sapiens
gcttactgtctgagtgtcatctgaacagctgattataggctttcttgagagtggttcccccgtgtttttgtaagctgtgttctatgtttgctctgctatakgttttttttttttttccctcctgcctcagcctcccaagtagctgggattataggcgcccgccaccacacccagctaatttttgtatttttagtagggtca

SEQ ID NO: 291124 - DNA, 201 bp, Homo sapiens
aagatttatatggaacatatgagtgactgaactttgtcatcttaggttttgctttatgtgagcagtatcagctcatgggttgggtggcagcatcaacatcrtagtaaaagagttgtctgtcatcggtgacttgcctgagtccagctaatagaaggcagggaaggtaggggtgaggggtacagaatctgtcgtgtgtgagct

SEQ ID NO: 291125 - DNA, 201 bp, Homo sapiens
tgttttttttttttttccctcctgcctcagcctcccaagtagctgggattataggcgcccgccaccacacccagctaatttttgtatttttagtagggtcrgggtttcaccatgttgtctaggctggtctcaaaactcctgacctcaagtgatccacctgcctccacctcccaaagtcctgggattacaggtgtaagccac

SEQ ID NO: 291126 - DNA, 201 bp, Homo sapiens; identical to SEQ ID NO: 60120

SEQ ID NO: 291127 - DNA, 201 bp, Homo sapiens; identical to SEQ ID NO: 60106

SEQ ID NO: 291128 - DNA, 201 bp, Homo sapiens
cctaccttccgtctcctgtaggtggcagaactggtgaagccattgtagatgctgcgctgagtgctctgcgccagctcgtgaaggatcgcctcgggggacgragcggaggatacagttctggaaaacaagtaagaccataaaatgtcagtttttaatgtgtcataattttgaagccagagtggataccttgtataagatagt

SEQ ID NO: 291129 - DNA, 201 bp, Homo sapiens
catcaacatcatagtaaaagagttgtctgtcatcggtgacttgcctgagtccagctaatagaaggcagggaaggtaggggtgaggggtacagaatctgtcrtgtgtgagctgggaaggcagcccatcctggctgcctggctgctagcctctccatactccagcgtcgtaactaaacagtacttagtgtcttgcttctctgt

SEQ ID NO: 291130 - DNA, 201 bp, Homo sapiens
cttcgtcttcgtctgaagatgaagatgtggccttggacacgttgtctctgctaggctccccagctccaaagttctagggagagacttttttttcccctgartaaacacctgcttttctgcctttgaataataatttgttttagttttcctcacttatgaaaatgcacatgtttttagtgcagtcagtctgctgctgttttt

SEQ ID NO: 291131 - DNA, 201 bp, Homo sapiens
gggagggggtctgtattcccggagagtcgcaggggagcttgttccgggctcttctcgaactcgtgcgtggggacggaggttggcgggcgtcctgcactgcwgcttgtttctgccacctgctttatgcagctcctacttttaaaaactgaaatgttaagccgggcgcggtggctcacacctgtaatcccagcactttggaag

SEQ ID NO: 291132 - DNA, 201 bp, Homo sapiens
gtactgagcaagtaccaaattcatatcgattttacaaaaaagataaagttctttaaaagtagtacatctctgtagaagattatcctattttttgggttttkttttttttttttttttttttttgagaccgggtcttgctctgcctcccaggctcaagcaatcctcccacatcagcctctggagtagctgcggctacagatg

SEQ ID NO: 291133 - DNA, 201 bp, Homo sapiens
cggagagtcgcaggggagcttgttccgggctcttctcgaactcgtgcgtggggacggaggttggcgggcgtcctgcactgctgcttgtttctgccacctgytttatgcagctcctacttttaaaaactgaaatgttaagccgggcgcggtggctcacacctgtaatcccagcactttggaaggccgaagcgggtggatcat

SEQ ID NO: 291134 - DNA, 201 bp, Homo sapiens
aagtgttactgttttgtctcgccagaaataaagaccccagtttctggagcatagtgtgacaggtatctcagaatgttagccatactcccagatctctcttrtaagaatttctcttgaaacagtcatactagtttgaggggaggaggaaaatataagaattttccctgctgggctgttagtgaaaaactggaaacaatcaaa

SEQ ID NO: 291135 - DNA, 201 bp, Homo sapiens
acatggtgaaaccccgtctctattaaaaatacaaatattagccgggtgtggtggtgtgtgcctgcagtcccagctactcaggaggctgaagtaggagaatygcttgaacccaggaggcagaggttgcagtgagctgagattgcacctgtgctctccagcctgggcaacagagtgagactgcttcaaaaaaaaaaaaaaaaa

SEQ ID NO: 291136 - DNA, 201 bp, Homo sapiens
aattatatgatcttaggtaagttatcctttctgtgttaaagtttcctggtctgtgaaataatgggcaccatgacacataccacatagggttcttaaatgasttaatatatgcaaaatgtttagaaaaatgcctgatacagagtcacgcaagtgttactgttttgtctcgccagaaataaagaccccagtttctggagcata

SEQ ID NO: 291137 - DNA, 201 bp, Homo sapiens
tttaatctccattttatatatggggaaattgaggcacagagcctcaagtgtgtataaacatataagacatataatacatgtaagtataatctatttaaacaagtaagtggcagagccaggctgtgtccaggcattgcgatttcagagatgtttgtatgtgtgctaatcaccccacctccaccaccacagcttccacaggct

SEQ ID NO: 291138 - DNA, 201 bp, Homo sapiens
ccttaatcaacacagcattttcattgggtagccgtgtacaagcagaggaggctcttgtgagaactaggcaaaatttaaagacaaacaaaggtccctcaccrttactagaaaaaagaataacccaagtctatcttaatactgtcagtaaagagcgtctttatacggaaagggaaggacattcctaaggtgaaaaaccctggt

SEQ ID NO: 291139 - DNA, 201 bp, Homo sapiens
ttaatctccattttatatatggggaaattgaggcacagagcctcaagtgtgtataaacatataagacatataatacatgtaagtataatctatttaaacaagtaagtggcagagccaggctgtgtccaggcattgcgatttcagagatgtttgtatgtgtgctaatcaccccacctccaccaccacagcttccacaggctt

SEQ ID NO: 291140 - DNA, 201 bp, Homo sapiens
taatctccattttatatatggggaaattgaggcacagagcctcaagtgtgtataaacatataagacatataatacatgtaagtataatctatttaaacaagtaagtggcagagccaggctgtgtccaggcattgcgatttcagagatgtttgtatgtgtgctaatcaccccacctccaccaccacagcttccacaggctta

SEQ ID NO: 291141 - DNA, 201 bp, Homo sapiens
gagcttgttccgggctcttctcgaactcgtgcgtggggacggaggttggcgggcgtcctgcactgctgcttgtttctgccacctgctttatgcagctcctmcttttaaaaactgaaatgttaagccgggcgcggtggctcacacctgtaatcccagcactttggaaggccgaagcgggtggatcatctgaggtcaggagtt

SEQ ID NO: 291142 - DNA, 201 bp, Homo sapiens
aatctccattttatatatggggaaattgaggcacagagcctcaagtgtgtataaacatataagacatataatacatgtaagtataatctatttaaacaagtaagtggcagagccaggctgtgtccaggcattgcgatttcagagatgtttgtatgtgtgctaatcaccccacctccaccaccacagcttccacaggcttaa

SEQ ID NO: 291143 - DNA, 201 bp, Homo sapiens
catgtaagtataatctatttaaacaagtaagtggcagagccaggctgtgtccaggcattgcgatttcagagatgtttgtatgtgtgctaatcaccccaccyccaccaccacagcttccacaggcttaagaatcagtagcagaaaaatctcctcttagagaacatgcctccaggtgtttccatacgaggaagtagtcgtggg

SEQ ID NO: 291144 - DNA, 201 bp, Homo sapiens
ctagaccctgaaagagtccgtgagtctattaattaactcattttaataaatggcagcctttctgggaaacctcatggtttctagatgactgctctgggacygtagactcctcctagcagatgtgggacagagatgttactgatgtgaatttatagcatccttaactgccatggaggaatggaaaaccacagatggcagagc

SEQ ID NO: 291145 - DNA, 201 bp, Homo sapiens
gtttagtttcctgtgagtgaattcagactagaccctgaaagagtccgtgagtctattaattaactcattttaataaatggcagcctttctgggaaacctcwtggtttctagatgactgctctgggactgtagactcctcctagcagatgtgggacagagatgttactgatgtgaatttatagcatccttaactgccatgga

SEQ ID NO: 291146 - DNA, 201 bp, Homo sapiens
tgacagtagtactgcctcatggagcggttgtaaagaacaaagacgttgatacatgaaagccactaagaataatgcttcagcctttttccagtgcagcccarggagtgggagtggggaccgtccgttcctttcttgctcagcgttgcagcaatgggagtgaaattccaggggctccaactgcagcaggaagggcagaggggc

SEQ ID NO: 291147 - DNA, 201 bp, Homo sapiens
gtattcctctagtgatgatgtgatcgaattaactccatcgaatttcaaccgagaagttattcagagtgatagtttgtggcttgtagaattctatgctccayggtaagtattataaaatagttgtagattatttatagtactttctgaaattggagaaaacgctgtataaaaatctgattttattaagacatctagtttagc

SEQ ID NO: 291148 - DNA, 201 bp, Homo sapiens
cacttttgtttttatcttcaggtctggtgagctgtaccttctttctggcagtgaatggtctgtattcctctagtgatgatgtgatcgaattaactccatcraatttcaaccgagaagttattcagagtgatagtttgtggcttgtagaattctatgctccatggtaagtattataaaatagttgtagattatttatagtac

SEQ ID NO: 291149 - DNA, 201 bp, Homo sapiens
ttcagagtgatagtttgtggcttgtagaattctatgctccatggtaagtattataaaatagttgtagattatttatagtactttctgaaattggagaaaaygctgtataaaaatctgattttattaagacatctagtttagcttagtgtttgtttaaaagaagtagagaagagggaaatgggaaatgcaaagtatctagtc

SEQ ID NO: 291150 - DNA, 201 bp, Homo sapiens
tttttttttgagaccgggtcttgctctgcctcccaggctcaagcaatcctcccacatcagcctctggagtagctgcggctacagatgcaccctaccatacygagctaatttttgcatttttgtatttcatattttttctctacaagagatggagttttgccatgttgcccaggctggtctcaaactcctggctcaggttat

SEQ ID NO: 291151 - DNA, 201 bp, Homo sapiens
agtgccaggttagcaggcagacacataaggagtagtgcacctgaattctactgtgaacttgaaggctgggtgagaaaggggaaatagaattgtttccttcycctcttctgagttaaggactggatctaggcacattttcaaaacagtgtatctctttcctattttatcctttttttttttttttgagacagagtctcactc

SEQ ID NO: 291152 - DNA, 201 bp, Homo sapiens
agatactccctgtattttatctttggcctctcccactgcatatgtcttcctctcctagatcactcccatcttcaaagaaaaccttccttgttttctacatwtgcctgcctctggtctctataatgaaacctgcttaaagagttacctatattctctccaaccttctgcagactgcatgcctgttattttcactccaccaca

SEQ ID NO: 291153 - DNA, 201 bp, Homo sapiens
tctgtaaatgtctgcttcttagtgggcgaggccgagggtcctgtccttgccgggctcgccttggtcacagccttggctctgacagtccttaacctcggctytggcctcagaccaccttccccctatttactggctctgtgacttggagcaagttacttaaccactctgtgccagtgccttttcaacggtgttcaccatttt

SEQ ID NO: 291154 - DNA, 201 bp, Homo sapiens
ctaaaggaaagaggtgtctgtaataatctgcacgaacatgagacagaggtgccagctggcctttctagtcaagaagactaaggtcaatatggaagtagacrtaaggaaaatagtcttggttattgagttgcagtcccgggatctccacagatgcctacaaaagaagacatggtaatgctctaagtgcataaactagtttcc

SEQ ID NO: 291155 - DNA, 201 bp, Homo sapiens
gtgctgttaatggtgcacttttgtttttatcttcaggtctggtgagctgtaccttctttctggcagtgaatggtctgtattcctctagtgatgatgtgatygaattaactccatcgaatttcaaccgagaagttattcagagtgatagtttgtggcttgtagaattctatgctccatggtaagtattataaaatagttgta

SEQ ID NO: 291156 - DNA, 201 bp, Homo sapiens
cagtgactgtgcctgagacagttgctcgtataattaggttgttaatgtgcatttggttttaatgaaaaaagaaatgagcaacacgccctggtgcatttccrgaagcctgtgcatttccagaaggctgtgcatttccagaagcctgtgcatttccggaggcctgtgcatttccagaagcctgtgcatttccagaagcctgtg

SEQ ID NO: 291157 - DNA, 201 bp, Homo sapiens
aaagaagtagagaagagggaaatgggaaatgcaaagtatctagtctgttgttaaggaagatctgtcttttgatgaggtgatgcgtgtggaaggaaaactgmttttatgaggaaggaatcttgagcaaagaaaatggaggggccagtgattaacttcactctgtttcttgaagagaattatttcctgaaaaaatgtagttag

SEQ ID NO: 291158 - DNA, 201 bp, Homo sapiens
aaatgggaaatgcaaagtatctagtctgttgttaaggaagatctgtcttttgatgaggtgatgcgtgtggaaggaaaactgcttttatgaggaaggaatcytgagcaaagaaaatggaggggccagtgattaacttcactctgtttcttgaagagaattatttcctgaaaaaatgtagttagaaaatctggtttaatttaa

SEQ ID NO: 291159 - DNA, 201 bp, Homo sapiens
agatctgtcttttgatgaggtgatgcgtgtggaaggaaaactgcttttatgaggaaggaatcttgagcaaagaaaatggaggggccagtgattaacttcaytctgtttcttgaagagaattatttcctgaaaaaatgtagttagaaaatctggtttaatttaaaaattcttttcttaccttacattcaatgctggaagaac

SEQ ID NO: 291160 - DNA, 201 bp, Homo sapiens
gatgcgtgtggaaggaaaactgcttttatgaggaaggaatcttgagcaaagaaaatggaggggccagtgattaacttcactctgtttcttgaagagaattrtttcctgaaaaaatgtagttagaaaatctggtttaatttaaaaattcttttcttaccttacattcaatgctggaagaacccttgtggggtaaaaatgtaa

SEQ ID NO: 291161 - DNA, 201 bp, Homo sapiens
cttcatgctcagtgtagcaaatggaggtaaaaacgctctattttcaaagtggatgttgccacattgtgcgtcctgtccatctaatgcctttactgttttaraggctctggtatatatgtgttcagtccaaatgctaattctgtgtggattagctcaattatactagcaaatacataaatagtaattgtacaaactgttgta

SEQ ID NO: 291162 - DNA, 201 bp, Homo sapiens
ttctcagctagatattaagcttcttattcatccatgttcatgttcggtaaacatttgtgagttattctcattaggagatggtgtttgagcagggagttttygttcacactacgtaaaacttaagaagagaaatcgggctggacacggtggctcacacttgtgatcccagcactttgagaggctgaggtgggcggatcactt

SEQ ID NO: 291163 - DNA, 201 bp, Homo sapiens
atccaccgatcccagagggaaccagccctccagcctgctcatttggcctcctcagaattgctgttgccaaagccagtcagtcccagggcctcttgccacayctgcagtccaagtaccaggcccaggagccacgtgctggcatcccatggcacttgtaggtccagagtggggatgggatggacgggttttcctctaggtagg

SEQ ID NO: 291164 - DNA, 201 bp, Homo sapiens
aattgctgttgccaaagccagtcagtcccagggcctcttgccacacctgcagtccaagtaccaggcccaggagccacgtgctggcatcccatggcacttgyaggtccagagtggggatgggatggacgggttttcctctaggtaggctttggcaaaccgtgatgagattggattacctcttggcctgtatctgtggcagtc

SEQ ID NO: 291165 - DNA, 201 bp, Homo sapiens
agccacgtgctggcatcccatggcacttgtaggtccagagtggggatgggatggacgggttttcctctaggtaggctttggcaaaccgtgatgagattggwttacctcttggcctgtatctgtggcagtcagccccaaatccatggaaaattctacacaaatggatagggaagaagagagagagagaggagcagattggtg

SEQ ID NO: 291166 - DNA, 201 bp, Homo sapiens
gtatctgtggcagtcagccccaaatccatggaaaattctacacaaatggatagggaagaagagagagagagaggagcagattggtgttttagatgcccttrtgtgaaatgtgaagcttacactgatgttcttgtgaaaagacaaacttgaagatctatcaatattaaatgggcttttacttttaggagaccagttacacta

SEQ ID NO: 291167 - DNA, 201 bp, Homo sapiens
tggtgacagcattcaggtacaggttatgtgttgtactgaatgtattgataattacttgaaagtaaaagactatttgccaagcaaaaattacagtgctgagkaatgtacccaatttgaatacaaccgttttcactattttattcactaaagaaaaaccctaaaactttgttaagatgtagcagtagtgttattatttaaaac

SEQ ID NO: 291168 - DNA, 201 bp, Homo sapiens
  misc_feature (1)...(201): n = A,T,C or G
gttttcactattttattcactaaagaaaaaccctaaaactttgttaagatgtagcagtagtgttattatttaaaacaggaaaagtgttcttcttggcccanttgtttgatgtttaatgtcataaatgacagggcagaagtgatagttcaagtaagaaggatgtgattgagctgacagacgacagctttgataagaatgttc

SEQ ID NO: 291169 - DNA, 201 bp, Homo sapiens
aggctccttcagtgagcaaggcatcaacgagtttctcaggtaatttgttttcttaggttgtttgttgttttgtctgtttgtttggttctgttgtaggtttrtatttggaactaggtatatataagccaggtaataaatggaatttaaaatgcaaactaattccagagaattgaatgtttatacattagagtttttaaattg

SEQ ID NO: 291170 - DNA, 201 bp, Homo sapiens
agtcttagaaagctcgcaggcagcccatgttctagatcaactttgataattatttatgtatttaatttgtatttcagcaaatgctctgctatttttaaaarcttactgatagcaactgactttatctgatgcagggggcttagttgggaatgttgaatctggttgtaatgttgtccgtgattaaaaagataatgtcctcaa

SEQ ID NO: 291171 - DNA, 201 bp, Homo sapiens
gagtttgagaccagcctgggcaacatggggaaaccctatctctactaaaaatgtagaaattaacagtgggtggtggcacacacctgtagtcccagctatgytggaggctgaaatgagatcacctgagcccaggagattgaggctgcagggagccatgattgcaccactgcactccagcctgggcaacagagagagactgtg

SEQ ID NO: 291172 - DNA, 201 bp, Homo sapiens
cccatagttcccttagaaagggacagtgccttccaaaagctgggcttaagacgcaggggcgcttcgcatgtgatcggactccttaaaaacgaaatggaacscggcgtcttaggaattctgtaaatgtctgcttcttagtgggcgaggccgagggtcctgtccttgccgggctcgccttggtcacagccttggctctgacag

SEQ ID NO: 291173 - DNA, 201 bp, Homo sapiens
aatcctgagacgggagaatcgcttgaacccaggagacagtggttgcagtgagccaagattgcaccactgcactccagcctgggcagctgagtgagacgccrtctcaaaaaaaaagaaaaataatgagattacatttttccctccattaagtcttcagaattcagtgtgtttttaccagcatatcttagtttggggtagcca

SEQ ID NO: 291174 - DNA, 201 bp, Homo sapiens
cttagaaagggacagtgccttccaaaagctgggcttaagacgcaggggcgcttcgcatgtgatcggactccttaaaaacgaaatggaacgcggcgtcttasgaattctgtaaatgtctgcttcttagtgggcgaggccgagggtcctgtccttgccgggctcgccttggtcacagccttggctctgacagtccttaacctc

SEQ ID NO: 291175 - DNA, 201 bp, Homo sapiens
tatgtgttgtactgaatgtattgataattacttgaaagtaaaagactatttgccaagcaaaaattacagtgctgaggaatgtacccaatttgaatacaacygttttcactattttattcactaaagaaaaaccctaaaactttgttaagatgtagcagtagtgttattatttaaaacaggaaaagtgttcttcttggccca

SEQ ID NO: 291176 - DNA, 201 bp, Homo sapiens
tattttatctttggcctctcccactgcatatgtcttcctctcctagatcactcccatcttcaaagaaaaccttccttgttttctacatttgcctgcctctggtctctataatgaaacctgcttaaagagttacctatattctctccaaccttctgcagactgcatgcctgttattttcactccaccacaactgccagggct

SEQ ID NO: 291177 - DNA, 201 bp, Homo sapiens
tgtatattgtcatgtgttgcttaacattagagacgtgatctgaattatgatcaacttcagagatgctgaaaagacaggaatagaaatttctttaattgctrttgtatcagacgatttcttcattgtgaataacatcagtgtgtacttaatacaaacctagatggcataacttactaaaaacctaggctacatggtatagct

SEQ ID NO: 291178 - DNA, 201 bp, Homo sapiens
tgtacaaactgttgtattgttaaacgtctctgtatgtggtttttacaagcttatcatatatggcataggtaatttaccttgtttctgagagcgaccatacragagaaaactctgcaagacagcataattgagaaggcaggatctagatccactagttaatcattattacactggcagagttttactttgtggtgtttgggt

SEQ ID NO: 291179 - DNA, 201 bp, Homo sapiens
ggctctttctcattctcataaaggtctcatatgggctagaggcagccctgtctgtccatcctcaccctcatatgcattgtaatcttgaccttggggaaatrtggtttccatttctgggcacttggctttggaatgtagttatttatttgaaaatgggcgtacttaagttactccaacaatgtgcaaacaacatgataggtt

SEQ ID NO: 291180 - DNA, 201 bp, Homo sapiens
  misc_feature (1)...(201): n = A,T,C or G
ctatctctactaaaaatgtagaaattaacagtgggtggtggcacacacctgtagtcccagctatgttggaggctgaaatgagatcacctgagcccaggagnttgaggctgcagggagccatgattgcaccactgcactccagcctgggcaacagagagagactgtgtctcaaagaaacaaaacaaaacgaatatttttcta

SEQ ID NO: 291181 - DNA, 201 bp, Homo sapiens
cttttccatccgtataatcataggtacgaaggtcagggtaggagtcagactgaggagaacctggattgtagcaggagtagctccagagagtcgctcttccrtaaaatgagatgttgaccttccagggtgtccccttctgcagatctaacagtggctttctgtcgtctcccagcttcccgtggaggatgacattgacctcag

SEQ ID NO: 291182 - DNA, 201 bp, Homo sapiens; identical to SEQ ID NO: 60113

SEQ ID NO: 291183 - DNA, 201 bp, Homo sapiens; identical to SEQ ID NO: 60114

SEQ ID NO: 291184 - DNA, 201 bp, Homo sapiens
actctgacagtctctgaatttagtcctcctttcttaaactgaaattaaagaggcacaaaaccctgtaaaaatctgacttctgaattttttagtatctcacytaaacaacaaaacatactgtatgtaaatatgtagaagtagcatttcaggacattcccccgatagaccctaacttcagatactgggattgagtttaggccc

SEQ ID NO: 291185 - DNA, 201 bp, Homo sapiens
taatgcagatttgttacttatattaggattaagttcagcttaactgtttcaagcaagatagaaaaaaagaagcctggaatggtttccagttacttggcttyaaagacacctcatacctactttttccatcttttctatctggtatctcacagaaattgttccttttttatttgggaaattcccctgctttctcagctagat

SEQ ID NO: 291186 - DNA, 201 bp, Homo sapiens
cattaagtcttcagaattcagtgtgtttttaccagcatatcttagtttggggtagccacatgtagctagtggctatcatgctggataacctgttactgagrgagcagccccgctttggttagcctggcatccattcacaggcatcctttcccacctcttgaaatggaaaaggagatcatcctatcaaaggctactccatca

SEQ ID NO: 291187 - DNA, 201 bp, Homo sapiens
tatataccagggcttgaatatgattggctaaacttcacagactgttaaaactccctgattgataattgacctctgtgagtcattcctttgaaatctgtgcmgtctggagaacagttttgttacattaaattacctataaggccagagtggtggctcacacctgtaatcccaacactttgggaggccaaggatcacttgagg

SEQ ID NO: 291188 - DNA, 201 bp, Homo sapiens
tcctcttctgactctgggcattttattcagatactccctgtattttatctttggcctctcccactgcatatgtcttcctctcctagatcactcccatcttyaaagaaaaccttccttgttttctacatttgcctgcctctggtctctataatgaaacctgcttaaagagttacctatattctctccaaccttctgcagact

SEQ ID NO: 291189 - DNA, 201 bp, Homo sapiens
gtggattatgacggtgggcggacaagatccgacatcgtgtcccgggcccttgatttgttttctgataacgccccacctcctgagctgcttgaggtaaaccrcttcaactgcttgtagtccagaaagcttttttagctgatggtgaggaatgttaaagcagtgtgacacactgttcattttatgcccttaaagatactctct

SEQ ID NO: 291190 - DNA, 201 bp, Homo sapiens
atagagtgtattcaatcactcttgcttatcattctcaaagtaatagaacatttatcaagtactaatcatgtaacaggcaccgttctggtgtctttgtatakttttgttttgttttgttttgttttcatttaattctcacatgaacactgagaggtagatactgtttttaatctccattttatatatggggaaattgaggca

SEQ ID NO: 291191 - DNA, 201 bp, Homo sapiens
tgtaacaggcaccgttctggtgtctttgtatagttttgttttgttttgttttgttttcatttaattctcacatgaacactgagaggtagatactgtttttaatctccattttatatatggggaaattgaggcacagagcctcaagtgtgtataaacatataagacatataatacatgtaagtataatctatttaaacaagt

SEQ ID NO: 291192 - DNA, 201 bp, Homo sapiens
gttattcagagtgatagtttgtggcttgtagaattctatgctccatggtaagtattataaaatagttgtagattatttatagtactttctgaaattggagraaacgctgtataaaaatctgattttattaagacatctagtttagcttagtgtttgtttaaaagaagtagagaagagggaaatgggaaatgcaaagtatct

SEQ ID NO: 291193 - DNA, 201 bp, Homo sapiens
gcagtgagctgtgattgtgccactgcactccagcctgggcaacagtgagagcctgtctcaaaaaaagaaaaaaaaaaagatctcctttaaaaaaaaaaatmaaaatcaaaccttcacgtttaaataaagcttatagaatcgcaaaaaaaaacctaaagtatggaaatatgattattgaaatattaaaattttgatgttaat

SEQ ID NO: 291194 - DNA, 201 bp, Homo sapiens
aaacaggaaaagtgttcttcttggcccaattgtttgatgtttaatgtcataaatgacagggcagaagtgatagttcaagtaagaaggatgtgattgagctracagacgacagctttgataagaatgttctggacagtgaagatgtttggatggttgagttctatgctccttggtgtggacactgcaaaaagtaagtgcctt

SEQ ID NO: 291195 - DNA, 201 bp, Homo sapiens
catatgtcttcctctcctagatcactcccatcttcaaagaaaaccttccttgttttctacatttgcctgcctctggtctctataatgaaacctgcttaaakagttacctatattctctccaaccttctgcagactgcatgcctgttattttcactccaccacaactgccagggctcccagtgacttctttgtcactaaatc

SEQ ID NO: 291196 - DNA, 201 bp, Homo sapiens
gcctgttattttcactccaccacaactgccagggctcccagtgacttctttgtcactaaatccaatcagtagatggttttaagtctttgctactttatctyccagtagcatttgttagtgtggccccttccacatgtatcttggtttatgtgacaccactctggataattctcccaatccaccttccacatggcaactgga

SEQ ID NO: 291197 - DNA, 201 bp, Homo sapiens
tagtaaaattaacagttttataagttcttacagtattggctatatctgtgattcaaatgcagtgtaaatcttgaataccataattgttcattcatacctayagcgtacagaaccactttatcttgagcactaaaaagacagcatggtgtaataggaaaagcttggaaatggagagctgccctgccccttatatgtatgacc

SEQ ID NO: 291198 - DNA, 201 bp, Homo sapiens
gaacctactgttctttaacaagcttgagaacctgctctacctgcaaggttctcaacctcattgtacctgaattatctataaatggtacacagtgattcctrtaccctccgagtcattctgaagatgaaatatgtgtcacacaggtttgtctcatcacttaacgcttgcttaggtctatgctacattggcaatgatagaaaa

SEQ ID NO: 291199 - DNA, 201 bp, Homo sapiens
aacctgctctacctgcaaggttctcaacctcattgtacctgaattatctataaatggtacacagtgattcctataccctccgagtcattctgaagatgaamtatgtgtcacacaggtttgtctcatcacttaacgcttgcttaggtctatgctacattggcaatgatagaaaatagtgttctgtgctaccctgttgtcttt

SEQ ID NO: 291200 - DNA, 201 bp, Homo sapiens
gcatcttggtgaaggccttggattcttataataaaacttttacggtcaggcatgatggctcacgattataatttcagcaatttgggagaccacggtgggtraattgcttgagcaccagagttcgaggccagcttgggcaatgtggcaagaccctatcgctacgaaaataaaaagaaaagaaacaaattacccagacgtggt

SEQ ID NO: 291201 - DNA, 201 bp, Homo sapiens
cccagccggggcatcactgccacgcacctgagcacggactccacaaacactctcagggccttgatgtggatccaggcaatgaaggcttcactgaagttcaycttgagccagcgcagcagggggccctgcaaagacagaagagccaggtgacccctgctgaacaccccgcctgacacagagccaagaaaggacttgggtttt

SEQ ID NO: 291202 - DNA, 201 bp, Homo sapiens
actgtgtctcaaagaaacaaaacaaaacgaatatttttctatagcctagagccagagtgggctgccgcagcttcagaagtaaaagagcagacgaaaggaaragtgaaactggcagctgtggatgctacagtcaatcaggttctggcctcccgatacggggtgagtatacttataaggctcatttcattgtgaaatacatgg

SEQ ID NO: 291203 - DNA, 201 bp, Homo sapiens; identical to SEQ ID NO: 60115

SEQ ID NO: 291204 - DNA, 201 bp, Homo sapiens; identical to SEQ ID NO: 60117

SEQ ID NO: 291205 - DNA, 201 bp, Homo sapiens
tgaggtgggaggatcacttgagtacaggagtttgagaaaactctaaaaaaaaaaaaaaaaaaaaagaaagttttttttttttttcttgacacagagtctcrttctgtcacccaggctggagtgcagtggcgcgatgtcagctcactgcagcctccgtctcctgggttcaggtgattctcctgcctcagcctcctgagtagc

SEQ ID NO: 291206 - DNA, 201 bp, Homo sapiens
taataggaaaagcttggaaatggagagctgccctgccccttatatgtatgaccatagatgggccatttggtctagacctttatttacaaaatggggataaktcctactttctagttagtaatgctgtcaaaaattaagtgatctaacatttgatagtgatttgaaaaattgaacgtgttgtatgatggaggatttagcagt

SEQ ID NO: 291207 - DNA, 201 bp, Homo sapiens
tggcaacagaaagcaatgctgactgcttcttagatttagtactgaagaacattcttcgaaaaaagaaaaggattaagtgttatttttagctctgttgactrgtagggactttgtctatgaaagatgtaacataacatcctaggatgaagcagcagctgtacttgagtctgaattagaacagtgttgttcaggtggtttttt

SEQ ID NO: 291208 - DNA, 201 bp, Homo sapiens
atagatgggccatttggtctagacctttatttacaaaatggggataagtcctactttctagttagtaatgctgtcaaaaattaagtgatctaacatttgawagtgatttgaaaaattgaacgtgttgtatgatggaggatttagcagtaaaacaatgaacaatggtgtacactccttccagaaaaagtgtaccatttagtt

SEQ ID NO: 291209 - DNA, 201 bp, Homo sapiens
accacgcccagctaatttttgtgtttttagtagagacagggtttcaccatgttgggcaggatggtcttgaactcctgacctcaggtgttccacgtgcctcygcctcccaaagtgctgagatcccaggcgtgagccaccacagctggccagaaaatgaactttctaaagagattctattagatctagttttgcctttaaact

SEQ ID NO: 291210 - DNA, 201 bp, Homo sapiens
aggatgaagcagcagctgtacttgagtctgaattagaacagtgttgttcaggtggttttttgagccatgttgaggtttctctctaaaaatagctggtgacrgcattcaggtacaggttatgtgttgtactgaatgtattgataattacttgaaagtaaaagactatttgccaagcaaaaattacagtgctgaggaatgtac

SEQ ID NO: 291211 - DNA, 201 bp, Homo sapiens
agtgatctaacatttgatagtgatttgaaaaattgaacgtgttgtatgatggaggatttagcagtaaaacaatgaacaatggtgtacactccttccagaaraagtgtaccatttagttattccaaaaaggtccatttgaaatcttccaaattctaattgtgaagcaagcatgtgaaaatgtaactaagatggcatgtacac

SEQ ID NO: 291212 - DNA, 201 bp, Homo sapiens
tttagcagtaaaacaatgaacaatggtgtacactccttccagaaaaagtgtaccatttagttattccaaaaaggtccatttgaaatcttccaaattctaaytgtgaagcaagcatgtgaaaatgtaactaagatggcatgtacacacactacttgagaacacaggccagtctcacttataatttgctatatcaacaaatta

SEQ ID NO: 291213 - DNA, 201 bp, Homo sapiens
ttatcaaggcatcacaaggtgataggattttttcagctccattataatccacaggaccaccctcatatatgtgttctctccttgaccctgtggatgtgacygtatatgtaaatttaaaaggtgaaattttgatagtaatgccatttcagagaacttttgggttcttaagatactagtaagttcagaatttgttttcctaaa

SEQ ID NO: 291214 - DNA, 201 bp, Homo sapiens
ttcatgataaagtcacaataattgactgtggagtgttgtttacattcgtaaggaaattctaaatttcgattacagattagtgaaaataaagactttttttycatccaaattcatagactccctcccctaaatttttcctaaaaggccaccttggcttcagatttattctttttttttttttttcttttttttcctaaaagg

SEQ ID NO: 291215 - DNA, 201 bp, Homo sapiens
aaaaaaaaaaaacacaaaaactaggacacaaacacgcacattagcctaggtctactcagggtcagagttatcaaggcatcacaaggtgataggattttttmagctccattataatccacaggaccaccctcatatatgtgttctctccttgaccctgtggatgtgactgtatatgtaaatttaaaaggtgaaattttgata

SEQ ID NO: 291216 - DNA, 201 bp, Homo sapiens
aatttttatccaccagccctttgggagtctggaccccagttgcagaacccctgggtagactgtatgccatatttatatgtatgtggcattatgatgtatgygcagatcaaatagaagagaggatgaactctgacagtctctgaatttagtcctcctttcttaaactgaaattaaagaggcacaaaaccctgtaaaaatctg

SEQ ID NO: 291217 - DNA, 201 bp, Homo sapiens
  misc_feature (1)...(201): n = A,T,C or G
gaggaagtagtcgtgggagaaatgttttcaatgaaagtgacggtgcgaaggtcttgtttgccagcttacctttaggtgttgtatcatgcagcctcctgatngtcccttgtcttttgggtcccacagattatcaacgaggacattgccaagaggacgtgtgaggagcaccagctctgtgttgtggctgtgctgccccatatc

SEQ ID NO: 291218 - DNA, 201 bp, Homo sapiens
gacttctacctgtatgattgtagtgtttggaatcaaaaacttgtcaggcagctctgacactggatggctgtgatattgggtaaatttcttctcaacatcarttccatcatctgtaaaatgaaataacaagaggacctgccctcagcttcatgctgattaaatgaagtcatctataagtgttttcatcatggtgctggcacc

SEQ ID NO: 291219 - DNA, 201 bp, Homo sapiens
aaataacaagaggacctgccctcagcttcatgctgattaaatgaagtcatctataagtgttttcatcatggtgctggcacctagcatttgtgcatttggtycttagagacctaattagaagagaatttactttgtttttaaaaatgcattaaatcaccaatggataaactatggtgtctgcatacagtgaatgttacacag

SEQ ID NO: 291220 - DNA, 201 bp, Homo sapiens
tctataagtgttttcatcatggtgctggcacctagcatttgtgcatttggttcttagagacctaattagaagagaatttactttgtttttaaaaatgcatyaaatcaccaatggataaactatggtgtctgcatacagtgaatgttacacagcaataaaaataaacagtatagctacctacaacctcaatgagtggtaagg

SEQ ID NO: 291221 - DNA, 201 bp, Homo sapiens
tggtgcaatgaagagacacaatagcttaaaactaaactgtaagattatttttcaagtagcttctccaagtataatacctcagcttctagaaaaagtaatcrctgctaacatttgaaaagtcaaaattctatgcaagggtctgggagattaacacgattgagcataatagctcctttcaaaccatttcctagggactaggct

SEQ ID NO: 291222 - DNA, 201 bp, Homo sapiens
tagcagcagtagcatgttaccagtctctcttgaatgttttaaatagctaaactttaagaagagatacttaattttacttaaagctcaatatgaaagcaacstgaaattagttctaagtatcagtcttgccttgtttatgtactgaattgctagaatatggaaatattttcaggatttataatagccatgttttctaaggat

SEQ ID NO: 291223 - DNA, 201 bp, Homo sapiens
gagaaccactagtccagggcattttataaaacaagattaattgtagattttttttcttttaaatcatctggagaaaattatctcaacttcagtttcccctrtgtaagtagcctcagtgtcctaacatagccctaaatattattataagttggggtgggttctggagacctggtaaacagggaattctgaagatctttattc

SEQ ID NO: 291224 - DNA, 201 bp, Homo sapiens
gagcagaagttatttacccaaagtcactgccctaaatgagcaagactagagttagaagtcaggtctcctgccaacctgtcccatggtcttttgatctcctyattttgctccccttttgttcaatttaagtttgtctataccgaaagggttgtcagagtcattctagttccttagacaggaatagtaaaaccaagactgaac

SEQ ID NO: 291225 - DNA, 201 bp, Homo sapiens
cacttggtttaatactttgctcttgcactcgaaattttcaatactttttgaaccaagactccacatttttatttcttactggatctcacaaattatgtaamcagttgtgcccagaagttgtttttggttgcctaaaatataatttcaaaacaagcactatttaagttacagtaacaaatccactacccagcccagtcagat

SEQ ID NO: 291226 - DNA, 201 bp, Homo sapiens
tagttctcactgccaaaacatgattgtttcaacctccgcaggcctgtacacatctccagctctctgacctgggactcacttacacacagtgtggattagcrgaaagggtgggctttccagccagaggggctttaccttgagcaagtccttaacttcttttaatgtcaatttctttaactataaagtgagaataattttata

SEQ ID NO: 291227 - DNA, 201 bp, Homo sapiens
ggtggaccaaatgagaggggctccgggacggaacggagcccgcacgcgtaccagccgccctcgccccagccgctgcactttaatggctacctcggcttccscgagctgaggccagcacgcttgtctgtgctcatgctcctctccaggtcacaatttgcgctgaagtttctagacccgtcattcgtgcccattacgaattct

SEQ ID NO: 291228 - DNA, 201 bp, Homo sapiens
ctgcattgttttcttggcatgactgcacaaagcaatgatcaggaaccttctcctgtgtgtgtagtgtcctctcataaaaaggacatatcaggaccaatttsaatagcaaaaaaaaaaaaaagcattccacttgggcttgattgagcaccatgatttacagctaacaagtctggcaagtactgccaaagccatctatttaaa

SEQ ID NO: 291229 - DNA, 201 bp, Homo sapiens
aaaaacatctaaaacaacaaacatctatacgccccaccctcaccatcaggtgtatctgcattgttttcttggcatgactgcacaaagcaatgatcaggaamcttctcctgtgtgtgtagtgtcctctcataaaaaggacatatcaggaccaatttgaatagcaaaaaaaaaaaaaagcattccacttgggcttgattgagc

SEQ ID NO: 291230 - DNA, 201 bp, Homo sapiens
gttgcctaaaatataatttcaaaacaagcactatttaagttacagtaacaaatccactacccagcccagtcagatagaccttgctgattgaaactttcaaygctgacctctgaatccaaatgtacttattgttccacaggtactggaaaaacaaacatttgtcacctaaacggctgagcacaggtattcttatgtacaccc

SEQ ID NO: 291231 - DNA, 201 bp, Homo sapiens
cctaaagtgtggtaaccatgttacccattccagctgggttaaagtggaggaggatcttggccaggccaggtgcccaggtgactagtgctgaggtgcgatcrttttccgtatcattgtgtgcaccaccaccaatccagaaccatttgctctctttgagaacattgtagcactggatattccctctttccactgaagtcagat

SEQ ID NO: 291232 - DNA, 201 bp, Homo sapiens
acaattcctatcgtttcatctgtggaagcagtactcatcaataaatcagcaagtgacaggacatttttcaaaactgcatggaaatgttaccattttatacygttataatcatacacaaacaaaagagtatttttcccctgctctcaaagatacgttgttgacacagtttcagaagcacaaggcagaaaaactgccccaaaa

SEQ ID NO: 291233 - DNA, 201 bp, Homo sapiens; identical to SEQ ID NO: 60141

SEQ ID NO: 291234 - DNA, 201 bp, Homo sapiens
ttttatgagcatgttgttatctcttgggatttgatagacagattagccagagatgcaatattttcttctagtctggtgattttcaactctggttgtatatkagaatcacttgagagctttaaaaatactattgtctaggctctgcctcaagagatcctaatgtaaattatctggtgggcagggaggtggaggccaggtact

SEQ ID NO: 291235 - DNA, 201 bp, Homo sapiens
tcaaggaccacaattatgtatgtataatcttttttggattcaatgagcctaagattccctctgaatgaaatgtcagcataagtcataagatggaaaatcarttcttctgaatggaatgcttttcatgaatttctttttattttaggcaagaaattcttcagcatgtcgatgtaataaaaaatttttctttgaccaagaata

SEQ ID NO: 291236 - DNA, 201 bp, Homo sapiens
aagtgtgaatacttattttacaaaccactctatttagggagttgtgttttgatcttagcatttctagttattgctctctctctcttttaaaagtttaatcwatgggcagaattaaaacaaattcagtgggtattcatggtctcatgaaaatactgttcagatgaaaagtcagcatacagtcatatgattaacattttaaaa

SEQ ID NO: 291237 - DNA, 201 bp, Homo sapiens; identical to SEQ ID NO: 60136

SEQ ID NO: 291238 - DNA, 201 bp, Homo sapiens
aaaaacttgaaaaatagaataaagtggtattgtttctttgaaacacacggaaaatgccataatctgtctccatcaaattactcgtgaaaatgctggcccaratgtatgtagatatttaactatggttttgttttggttttgcctgttttcattgtctttacagcttttaacttactgtaaaggtacctaacttaattccta

SEQ ID NO: 291239 - DNA, 201 bp, Homo sapiens; identical to SEQ ID NO: 60138

SEQ ID NO: 291240 - DNA, 201 bp, Homo sapiens
taaattatctggtgggcagggaggtggaggccaggtacttggtattttttaacaactctcctgatgattccaatatgcagtcagaattgagaaccactagyccagggcattttataaaacaagattaattgtagattttttttcttttaaatcatctggagaaaattatctcaacttcagtttcccctatgtaagtagcct

SEQ ID NO: 291241 - DNA, 201 bp, Homo sapiens
ctctccaggtcacaatttgcgctgaagtttctagacccgtcattcgtgcccattacgaattctctcacccaggaactccaagagaaaccttctaagtggamatttaatcggacagcgtttttacatcaaaggtaggataggaggaaaagatccaaaaggtgcttttaagaattcaagagctcaaaacaaaacaaaacaaaa

SEQ ID NO: 291242 - DNA, 201 bp, Homo sapiens
ataatttagaagttgaaggctgaaaattgttgtgttcttctccatatatatacaactttcatcggggtcccttgagttaagaaatgccttctattttatargtaatctcaacagcagactttgaaatattgtgtttggttcaatatgctaagaagatatacaaataataataacttcgtgagtcttcatgtgcaaaatgac

SEQ ID NO: 291243 - DNA, 201 bp, Homo sapiens
aagcactatttaagttacagtaacaaatccactacccagcccagtcagatagaccttgctgattgaaactttcaacgctgacctctgaatccaaatgtacktattgttccacaggtactggaaaaacaaacatttgtcacctaaacggctgagcacaggtattcttatgtacacccttgcatcagcaatatgtgaagagat

SEQ ID NO: 291244 - DNA, 201 bp, Homo sapiens; identical to SEQ ID NO: 60137

SEQ ID NO: 291245 - DNA, 201 bp, Homo sapiens; identical to SEQ ID NO: 60139

SEQ ID NO: 291246 - DNA, 201 bp, Homo sapiens
aacatagccctaaatattattataagttggggtgggttctggagacctggtaaacagggaattctgaagatctttattccacaatagatttttcccatccygtagcctcttaagatgtaagatctgtttagttgacctctcataggaggaggaattacagcctaataaactggtttgtatctcaatggtagagggtagagt

SEQ ID NO: 291247 - DNA, 201 bp, Homo sapiens
tcgggtgtgtgtgggagcagagggtggaccaaatgagaggggctccgggacggaacggagcccgcacgcgtaccagccgccctcgccccagccgctgcackttaatggctacctcggcttccccgagctgaggccagcacgcttgtctgtgctcatgctcctctccaggtcacaatttgcgctgaagtttctagacccgtc

SEQ ID NO: 291248 - DNA, 201 bp, Homo sapiens
tttggattcaatgagcctaagattccctctgaatgaaatgtcagcataagtcataagatggaaaatcagttcttctgaatggaatgcttttcatgaatttstttttattttaggcaagaaattcttcagcatgtcgatgtaataaaaaatttttctttgaccaagaatagtgttcggattggacaactgatgcactatgat

SEQ ID NO: 291249 - DNA, 201 bp, Homo sapiens
gtggaccaaatgagaggggctccgggacggaacggagcccgcacgcgtaccagccgccctcgccccagccgctgcactttaatggctacctcggcttcccygagctgaggccagcacgcttgtctgtgctcatgctcctctccaggtcacaatttgcgctgaagtttctagacccgtcattcgtgcccattacgaattctc

SEQ ID NO: 291250 - DNA, 201 bp, Homo sapiens
tgaaaatgctggcccaaatgtatgtagatatttaactatggttttgttttggttttgcctgttttcattgtctttacagcttttaacttactgtaaaggtwcctaacttaattcctactaattgtagcggtttcattttatacacataagatggttttgaggttttgtttttttaggtggaagaaggatgagatttgttca

SEQ ID NO: 291251 - DNA, 201 bp, Homo sapiens
ttgaatagcaaaaaaaaaaaaaagcattccacttgggcttgattgagcaccatgatttacagctaacaagtctggcaagtactgccaaagccatctatttaaaaaaaaaaaaacagacaaaaggttagttgcaaaaagaccacccaatgcattttcatttcctcactgaaaaaaacttgaaaaatagaataaagtggtatt

SEQ ID NO: 291252 - DNA, 201 bp, Homo sapiens
caagtactgccaaagccatctatttaaaaaaaaaaaaacagacaaaaggttagttgcaaaaagaccacccaatgcattttcatttcctcactgaaaaaaayttgaaaaatagaataaagtggtattgtttctttgaaacacacggaaaatgccataatctgtctccatcaaattactcgtgaaaatgctggcccaaatgta

SEQ ID NO: 291253 - DNA, 201 bp, Homo sapiens
atacttattttacaaaccactctatttagggagttgtgttttgatcttagcatttctagttattgctctctctctcttttaaaagtttaatctatgggcakaattaaaacaaattcagtgggtattcatggtctcatgaaaatactgttcagatgaaaagtcagcatacagtcatatgattaacattttaaaaacacttat

SEQ ID NO: 291254 - DNA, 201 bp, Homo sapiens
gtgtacgcctgcggcaatgctagcgttctccccacaggcatcagcgactgctatggggccgaccctgccttctccctttgctcacaggtcatcgtgggctsggctgtcgggggcacagtgagtcccgtgatggggtaaacacatggctaagcgggtgcatgtggttgggtaatgagatcactgggctggtggaagaccagg

SEQ ID NO: 291255 - DNA, 201 bp, Homo sapiens
aaggtcttgatcatgctctgctctccttttctgcccagtttgagcctaagttggtctaccacaatgagacaacggtgcatcacatcctggtgtacgcctgyggcaatgctagcgttctccccacaggcatcagcgactgctatggggccgaccctgccttctccctttgctcacaggtcatcgtgggctgggctgtcgggg

SEQ ID NO: 291256 - DNA, 201 bp, Homo sapiens
gaggggggagttgagaggagagtcaaactgagtgggtgggaaaatggtagcttggggaacaaaaacagagaaaaagggagagagagaaacagagagaagasggaaatgggtatagttttgacaggaaggaagataatatggatttgatgtagaaggtcttgatcatgctctgctctccttttctgcccagtttgagcctaa

SEQ ID NO: 291257 - DNA, 201 bp, Homo sapiens
gaatgtcactaccagacactggaccgtgactccatgacatttgtaagtgacctctcaccccaccatggtcaccatgaccatagccccagtggagagcccaytcatggctttggctacccagtgacccctgtgatttcactgaagccccttccttcctccaatggcatcacacatccacacggggcttttcatgttctcaca

SEQ ID NO: 291258 - DNA, 201 bp, Homo sapiens
gaggttactaagggaaggcagaatgtccctggctagatttcatgtctgctctccagaaggggcttaaaggaggggggagttgagaggagagtcaaactgastgggtgggaaaatggtagcttggggaacaaaaacagagaaaaagggagagagagaaacagagagaagagggaaatgggtatagttttgacaggaaggaag

SEQ ID NO: 291259 - DNA, 201 bp, Homo sapiens
ccattccaccatgtagacatgagcaagtgccttgtgtaggtccttgggtgcagggatatgcagagtgctgctcaggggtggcagctcctcaatgcttatgkcaccccgcagagcaacaccgtgagggtgctggccacctatggcctggatgacactctgaagctgtatcgggagcgtacttttgtcaagtccatctttctg

SEQ ID NO: 291260 - DNA, 201 bp, Homo sapiens
tgggtgggaaaatggtagcttggggaacaaaaacagagaaaaagggagagagagaaacagagagaagagggaaatgggtatagttttgacaggaaggaagrtaatatggatttgatgtagaaggtcttgatcatgctctgctctccttttctgcccagtttgagcctaagttggtctaccacaatgagacaacggtgcatc

SEQ ID NO: 291261 - DNA, 201 bp, Homo sapiens
caggtcaagaacacagtccttaacaaatcgggtgcacctcttccctgttacagatgaatggagctcctatgcctgacatataggtatatggctacctgctrcacacccacttggctggacgggctctgcaagcagtgcaatacaggtgagggaagaccttgaagctctcccttctgcaggtgggaatgaattttaagaata

SEQ ID NO: 291262 - DNA, 201 bp, Homo sapiens
gctacatgctcagatacagtgaactgaggaggttactaagggaaggcagaatgtccctggctagatttcatgtctgctctccagaaggggcttaaaggagrggggagttgagaggagagtcaaactgagtgggtgggaaaatggtagcttggggaacaaaaacagagaaaaagggagagagagaaacagagagaagaggga

SEQ ID NO: 291263 - DNA, 201 bp, Homo sapiens
aactcaaacttggtaacccaatttcatatttgagtgatttcaattttgatcaaataaataaaggtatgatctcacaatatgtggcaaatgtggagactttytttctttagacagataatttgaaaaggcatggctacatgctcagatacagtgaactgaggaggttactaagggaaggcagaatgtccctggctagatttc

SEQ ID NO: 291264 - DNA, 201 bp, Homo sapiens
ggctggttcccagcccttcttgctgccaaatctaactccttccaacagagctaccagtttccagatgacgtaggcgtctctattgggacccccttggaccytcagtggatccgactggagattcattacagcaattttaacaaccttcctggtgagcatccagaggatttaaggaagggaagctggtggggctggctgttt

SEQ ID NO: 291265 - DNA, 201 bp, Homo sapiens
tcactaatgtaagacaccttcatcccacccagcagcctccagctcccttctcctcaccccactcaacccagatcccttctcttgcccccagtattcagtayatcccttgggtggagattactctgactcttctctgtctcctaaggactgccaatctgaccctaatgtgaacccccttccctggcctggcccttgccctac

SEQ ID NO: 291266 - DNA, 201 bp, Homo sapiens
gtaggtccttgggtgcagggatatgcagagtgctgctcaggggtggcagctcctcaatgcttatggcaccccgcagagcaacaccgtgagggtgctggccrcctatggcctggatgacactctgaagctgtatcgggagcgtacttttgtcaagtccatctttctgctacaagtcgtccaccctgacgatctggatgtccc

SEQ ID NO: 291267 - DNA, 201 bp, Homo sapiens
tgcaattagaacagatgagtgactgacaatagttgagaggcagatagtctagcccaaatcaggatagtggcagtgaagctgaggacagggcagatatatgsaatgctttttggaataacatcaataattgtccaccaatgaaaatagagcagcaaatagggcagtgagctggctctaccttaagggaaaaggagaatggca

SEQ ID NO: 291268 - DNA, 201 bp, Homo sapiens
ccattaatgagatgtgcctcatcttcctcttctactatccccaaaataacatctccagctgcatggggtaccctgacattatctacgtggcccacgagctrggggaggaggcatcagagtgagtcatcctgaaatacaggacctcgtgtgtgtggaagggaccttggggaggactgggggaggaagaaaggaagccctacc

SEQ ID NO: 291269 - DNA, 201 bp, Homo sapiens
tatttctgaattcccgacttctcttcctctaggaatggaacacaacttcgaaaaatctgtaaagacgattcctatgacttcaacctgcaggagactcgagrtttgccctctagagtggagatcaagccggtgagagtctgagggaggccaggcagagttgggggcagcagcatcatacctcattactgacaaccaagaaag

SEQ ID NO: 291270 - DNA, 201 bp, Homo sapiens
  misc_feature (1)...(201): n = A,T,C or G
cgctgagtccttcatgtcctatgggctgtgtaggacggagaagtttgaggaggtggagctgggaggcgcacccttcctgaggaggaaacacactctccttnccccccatcccagatctggtcagatccacaagcccacacagcctgaaccccagacttggagaataattacagcctggtgctcaggagattcactaacatg

SEQ ID NO: 291271 - DNA, 201 bp, Homo sapiens
aggaggaaacacactctccttaccccccatcccagatctggtcagatccacaagcccacacagcctgaaccccagacttggagaataattacagcctggtrctcaggagattcactaacatgagttttgcaaggaagggaaggagtcagggctttgagaacaagggaagtgcagaaggaagaagggtcagaaaggttcaat

SEQ ID NO: 291272 - DNA, 201 bp, Homo sapiens
cctggtgagcatccagaggatttaaggaagggaagctggtggggctggctgtttttttcggtattgggaacgcattgtgggatgtgtgctgactccctgtkgtcaaagccccaccccagctttcctgagcctctttctctccacattgtgacccactctcctgcctcctgtgattgactgttcctctctgcaccaggtgtg

SEQ ID NO: 291273 - DNA, 201 bp, Homo sapiens
agcccttcttgctgccaaatctaactccttccaacagagctaccagtttccagatgacgtaggcgtctctattgggacccccttggaccttcagtggatcygactggagattcattacagcaattttaacaaccttcctggtgagcatccagaggatttaaggaagggaagctggtggggctggctgtttttttcggtatt

SEQ ID NO: 291274 - DNA, 201 bp, Homo sapiens
actgaacatgtgacgtaggtgaatgagtccttctttagacacatagagatggggaattctggagaaggaaaaaactgagaaagccatatataaggagagcrtggggtgcacatgaagaagtttggttggcaaaagatatctaaaggaatggaatgaggatgaggtagataaagttggaaacagtccttgaagcaggggtga

SEQ ID NO: 291275 - DNA, 201 bp, Homo sapiens
aagggggggaaatcaagcagcaggtcaagaacacagtccttaacaaatcgggtgcacctcttccctgttacagatgaatggagctcctatgcctgacatayaggtatatggctacctgctacacacccacttggctggacgggctctgcaagcagtgcaatacaggtgagggaagaccttgaagctctcccttctgcaggt

SEQ ID NO: 291276 - DNA, 201 bp, Homo sapiens
atctaaaggaatggaatgaggatgaggtagataaagttggaaacagtccttgaagcaggggtgatcctgacccacctatatctccaggacagcagggctarctctataaatatttgccaggtaagtaaatggaatgaatgaatgggttggaatttattagatagaatcaaataattggtttagtgatgactgactattcca

SEQ ID NO: 291277 - DNA, 201 bp, Homo sapiens
cccccatcccagatctggtcagatccacaagcccacacagcctgaaccccagacttggagaataattacagcctggtgctcaggagattcactaacatgasttttgcaaggaagggaaggagtcagggctttgagaacaagggaagtgcagaaggaagaagggtcagaaaggttcaataagaattacagtggtaaatatca

SEQ ID NO: 291278 - DNA, 201 bp, Homo sapiens
  misc_feature (1)...(201): n = A,T,C or G
cagtggtaaatatcagtcatcagaggaaagtgtcaaataccaagggggggaaatcaagcagcaggtcaagaacacagtccttaacaaatcgggtgcacctnttccctgttacagatgaatggagctcctatgcctgacatataggtatatggctacctgctacacacccacttggctggacgggctctgcaagcagtgcaa

SEQ ID NO: 291279 - DNA, 201 bp, Homo sapiens
cagactgcaagtctctaagactgctgagagaatgaaaccattagattgtgagatagtcttgcaccacttacttgctaaagcccactaaatgcaggtcactrgggaaaattcaaagctgtctgagaaatagttacatgaagagccacatgagagaatgaatgtcatacatacttcagataatatgtgagacttcaagaatta

SEQ ID NO: 291280 - DNA, 201 bp, Homo sapiens
atctatgtcttccagactgcaagtctctaagactgctgagagaatgaaaccattagattgtgagatagtcttgcaccacttacttgctaaagcccactaamtgcaggtcactagggaaaattcaaagctgtctgagaaatagttacatgaagagccacatgagagaatgaatgtcatacatacttcagataatatgtgaga

SEQ ID NO: 291281 - DNA, 201 bp, Homo sapiens
ctgtcatctggctcagcttctgtgcacccttccacagttcctcattccagaggatgacaccacgtatgcctgcacctttcttcctctccctattgtgagcragaagcatcacatttacaaggtatggtggaccagatgggggacattgtcaaggcagggaagggtgctggagcagagcagggggtgtggtcaaccctggag

SEQ ID NO: 291282 - DNA, 201 bp, Homo sapiens
atcttcctcttctactatccccaaaataacatctccagctgcatggggtaccctgacattatctacgtggcccacgagctgggggaggaggcatcagagtragtcatcctgaaatacaggacctcgtgtgtgtggaagggaccttggggaggactgggggaggaagaaaggaagccctacccactacctcctttatttttc

SEQ ID NO: 291283 - DNA, 201 bp, Homo sapiens
accatgtagacatgagcaagtgccttgtgtaggtccttgggtgcagggatatgcagagtgctgctcaggggtggcagctcctcaatgcttatggcaccccrcagagcaacaccgtgagggtgctggccacctatggcctggatgacactctgaagctgtatcgggagcgtacttttgtcaagtccatctttctgctacaag

SEQ ID NO: 291284 - DNA, 201 bp, Homo sapiens
tcctagttcttacttcttgaccttcactggacccaaggatcagcacttggtggacgaagacactctgaaggaggatgggagccaggatgctgagctgctgsggctgacggaagatgctgtctacaccaccatgcacttttccaggcccttccgctcctgcgaccctcatgacctggatattacggtaaaatagagagcaga

SEQ ID NO: 291285 - DNA, 201 bp, Homo sapiens
caaggccaggagccctgaatccctatggctggttcccagcccttcttgctgccaaatctaactccttccaacagagctaccagtttccagatgacgtaggmgtctctattgggacccccttggaccttcagtggatccgactggagattcattacagcaattttaacaaccttcctggtgagcatccagaggatttaagga

SEQ ID NO: 291286 - DNA, 201 bp, Homo sapiens
ctagttcttacttcttgaccttcactggacccaaggatcagcacttggtggacgaagacactctgaaggaggatgggagccaggatgctgagctgctgcgsctgacggaagatgctgtctacaccaccatgcacttttccaggcccttccgctcctgcgaccctcatgacctggatattacggtaaaatagagagcagaga

SEQ ID NO: 291287 - DNA, 201 bp, Homo sapiens
agtgacccctgtgatttcactgaagccccttccttcctccaatggcatcacacatccacacggggcttttcatgttctcacaccccatgcatctaagatargaacagggatttctcacattatctgccaataacccaccaagaccatggaaatatagtatgctatagcgactaagagcagagattctggggcctcattgcc

SEQ ID NO: 291288 - DNA, 201 bp, Homo sapiens
agagggcatgcgagagggagtgtgacttgctcaagatcaccagcaagtgagcctcggaggcagaaatagaacttaactagttctcactcccagtgtgaagytccttccattccaccatgtagacatgagcaagtgccttgtgtaggtccttgggtgcagggatatgcagagtgctgctcaggggtggcagctcctcaatgc

SEQ ID NO: 291289 - DNA, 201 bp, Homo sapiens
ctttcctgagcctctttctctccacattgtgacccactctcctgcctcctgtgattgactgttcctctctgcaccaggtgtgtatgattcctcggggattygcgtgtactacacttctcagctgcgcaaatacgacacggatgtcctccagctgggcttcttcacgtttcccatccacttcatccccccgggcgctgagtc

SEQ ID NO: 291290 - DNA, 201 bp, Homo sapiens
aggggtggcagctcctcaatgcttatggcaccccgcagagcaacaccgtgagggtgctggccacctatggcctggatgacactctgaagctgtatcgggarcgtacttttgtcaagtccatctttctgctacaagtcgtccaccctgacgatctggatgtccctgaggacaccatcatccatgacttggagatcactaatg

SEQ ID NO: 291291 - DNA, 201 bp, Homo sapiens
gctgagtccttcatgtcctatgggctgtgtaggacggagaagtttgaggaggtggagctgggaggcgcacccttcctgaggaggaaacacactctccttaycccccatcccagatctggtcagatccacaagcccacacagcctgaaccccagacttggagaataattacagcctggtgctcaggagattcactaacatga

SEQ ID NO: 291292 - DNA, 201 bp, Homo sapiens
gcccgtctcaatttacaagactggctatcctgtctccctactgccccctcccttaatccttaagtgagattgggatcagaatgtctccacgcacctgttayctctctctctctggtgttactgctcctcaaggtcagtgcctcccaggctccgacctctcctcttctcttggctcagctctggtcctgggccaagataagc

SEQ ID NO: 291293 - DNA, 201 bp, Homo sapiens
tggtcaaccctggaggatgaggtctggaaaatttcttggaggaagcaagaaggaagtagttgcaagaacagggggacaggcagggcttggtagaggtcgcrgctacatcatttcctgagcccagaaatgtaactcccagcgctattttatttaagccccacaatgcaacagacatgttgatgaaggttaagaattaataat

SEQ ID NO: 291294 - DNA, 201 bp, Homo sapiens
cactagggaaaattcaaagctgtctgagaaatagttacatgaagagccacatgagagaatgaatgtcatacatacttcagataatatgtgagacttcaagwattagggatgcaggaatattagactttatggacatgagatttgaaatgggagaagtaaagcaaggacaggtggtgaaactccattatccataaaagtgtg

SEQ ID NO: 291295 - DNA, 201 bp, Homo sapiens
catatttgagtgatttcaattttgatcaaataaataaaggtatgatctcacaatatgtggcaaatgtggagactttttttctttagacagataatttgaaraggcatggctacatgctcagatacagtgaactgaggaggttactaagggaaggcagaatgtccctggctagatttcatgtctgctctccagaaggggctt

SEQ ID NO: 291296 - DNA, 201 bp, Homo sapiens
agcttggggaacaaaaacagagaaaaagggagagagagaaacagagagaagagggaaatgggtatagttttgacaggaaggaagataatatggatttgatrtagaaggtcttgatcatgctctgctctccttttctgcccagtttgagcctaagttggtctaccacaatgagacaacggtgcatcacatcctggtgtacgc

SEQ ID NO: 291297 - DNA, 201 bp, Homo sapiens
ggctctgcaagcagtgcaatacaggtgagggaagaccttgaagctctcccttctgcaggtgggaatgaattttaagaatagtgatttattctgtagcataygattatgtccggttgagaaaaaggaagaggtagaactatctttagagtagaaataactgaaataagactgtggaagatgaagttttttgtttatttttat

SEQ ID NO: 291298 - DNA, 201 bp, Homo sapiens
tgcagtcactgctcccagctctttattgaggaccttgcctctgtgctgaggacagtgctctgtccagcaggacagattgcaggataagggatcctgggccygtctcaatttacaagactggctatcctgtctccctactgccccctcccttaatccttaagtgagattgggatcagaatgtctccacgcacctgttatctc

SEQ ID NO: 291299 - DNA, 201 bp, Homo sapiens
tcaggtcggtgaccctcttgtggtgtcttccctgtcacaggcacttgataaatgcagaagggaagcagggccagccccagccccatctccctagagagccycacacaggtgtagcaatggcctggcttcctggggtggaagccagataaggatccaggagaagagaccctctgagtctgcagtcactgctcccagctcttt

SEQ ID NO: 291300 - DNA, 201 bp, Homo sapiens
ggtgttctaatattctaaccttccttctgtgttgcttccattgtttgcataatactaatgtgctcaatcgggcaagctcagcctgccatgcagccattaarttaatttctctgaaaggtaattgatggccggaagggaaagcacaaagcatcccaaaggcaaactcatgtttatttctcatcttcttcccctcacctcctc

SEQ ID NO: 291301 - DNA, 201 bp, Homo sapiens
gggagctaaaggaacagctactgctccaaagcatgacatttgaagctcctagttcttacttcttgaccttcactggacccaaggatcagcacttggtggasgaagacactctgaaggaggatgggagccaggatgctgagctgctgcggctgacggaagatgctgtctacaccaccatgcacttttccaggcccttccgct

SEQ ID NO: 291302 - DNA, 201 bp, Homo sapiens
aaactctgaagctctcgaatgttcatctgcaagggagatgctccaggtcccaggagccatggcccatgaccttctcttcaggctttttccacttttggccstgggagtccccttacaaagcaaccgccttggccccacatctcgcctgcgctattccaggttcctagatccttctaatgtcattttcctgcgttgggactt

SEQ ID NO: 291303 - DNA, 201 bp, Homo sapiens
gtcttgatcatgctctgctctccttttctgcccagtttgagcctaagttggtctaccacaatgagacaacggtgcatcacatcctggtgtacgcctgcggsaatgctagcgttctccccacaggcatcagcgactgctatggggccgaccctgccttctccctttgctcacaggtcatcgtgggctgggctgtcgggggca

SEQ ID NO: 291304 - DNA, 201 bp, Homo sapiens
tattattgttttcctggcaggaagtttctgctgccccggcaatctgcaatgggatgcttcaaggaatcctgtcttttgcggatggatgtgttttgagagcygatgttggcatctatgccaaaattttttactatataccctggattgaaaatgtaatccaaaataactgagctgtggcagttgtggaccatatgacacagc

SEQ ID NO: 291305 - DNA, 201 bp, Homo sapiens
gagatcaagccggtgagagtctgagggaggccaggcagagttgggggcagcagcatcatacctcattactgacaaccaagaaagttctcaagctgtaccastccctctgtgtcttactctcagccttcatgtttcactctgaacagggagatgaattgctggtagaatgtcactaccagacactggaccgtgactccatga

SEQ ID NO: 291306 - DNA, 201 bp, Homo sapiens
aactccattatccataaaagtgtgctctgccatgttcttcatgccatgctttgcccaaggagaaaaactacataataaagaacacctgggctctgctactstagtatcctaggggagctaaaggaacagctactgctccaaagcatgacatttgaagctcctagttcttacttcttgaccttcactggacccaaggatcag

SEQ ID NO: 291307 - DNA, 201 bp, Homo sapiens
tgagttttgcaaggaagggaaggagtcagggctttgagaacaagggaagtgcagaaggaagaagggtcagaaaggttcaataagaattacagtggtaaatrtcagtcatcagaggaaagtgtcaaataccaagggggggaaatcaagcagcaggtcaagaacacagtccttaacaaatcgggtgcacctcttccctgttac

SEQ ID NO: 291308 - DNA, 201 bp, Homo sapiens
tttattctgtagcatatgattatgtccggttgagaaaaaggaagaggtagaactatctttagagtagaaataactgaaataagactgtggaagatgaagtkttttgtttatttttatggataatctactcacagaatgaccccacccgcatgctacatctttattggcagacccctctgtatttcatcttctctttatttc

SEQ ID NO: 291309 - DNA, 201 bp, Homo sapiens
cattgtgacccactctcctgcctcctgtgattgactgttcctctctgcaccaggtgtgtatgattcctcggggatttgcgtgtactacacttctcagctgygcaaatacgacacggatgtcctccagctgggcttcttcacgtttcccatccacttcatccccccgggcgctgagtccttcatgtcctatgggctgtgtag

SEQ ID NO: 291310 - DNA, 201 bp, Homo sapiens
ggggaaatcaagcagcaggtcaagaacacagtccttaacaaatcgggtgcacctcttccctgttacagatgaatggagctcctatgcctgacatataggtrtatggctacctgctacacacccacttggctggacgggctctgcaagcagtgcaatacaggtgagggaagaccttgaagctctcccttctgcaggtgggaa

SEQ ID NO: 291311 - DNA, 201 bp, Homo sapiens
tgagggtgctggccacctatggcctggatgacactctgaagctgtatcgggagcgtacttttgtcaagtccatctttctgctacaagtcgtccaccctgaygatctggatgtccctgaggacaccatcatccatgacttggagatcactaatgtaagacaccttcatcccacccagcagcctccagctcccttctcctcac

SEQ ID NO: 291312 - DNA, 201 bp, Homo sapiens
acagatgtggacacaagcttagagagggcatgcgagagggagtgtgacttgctcaagatcaccagcaagtgagcctcggaggcagaaatagaacttaactmgttctcactcccagtgtgaagctccttccattccaccatgtagacatgagcaagtgccttgtgtaggtccttgggtgcagggatatgcagagtgctgctc

SEQ ID NO: 291313 - DNA, 201 bp, Homo sapiens
accctgtgtatactaaaaatacaaaattagccaggcgtggtggcacatgcctgtaatctcagctactagggaggctgaggcaggagaatcgcttgaacctyggaggtggaggttgcagtgagcggagattgcaccattgcaccctagcctgggcaacaagagcgaaactctatctcaaaaacaaaacaaaacaaaaaacaa

SEQ ID NO: 291314 - DNA, 201 bp, Homo sapiens
aaggatcctaattctagttcagagatgcattctaaagggtcttctttttcttcttgtcagctaatagtcttaaatttgcatattaaaggaaacaactcacrtaaaagtcagacagcaaaatttacctcgtaaggtacaaagtgaaagtctggtgagctggagggaaattaaaatgaatttaattaacaattggacataaaa

SEQ ID NO: 291315 - DNA, 201 bp, Homo sapiens
ataacctttataacctttacttaggagttggttaatatttcataaaaaccttgttaatttgacatgggctcatatgctggtcttgcatcagtgtgcctttracattaatgattaatttatagagaaactgaacttattttatctctcaacattggctcttacaatctcacatgcccctttcctgagaaagttgaatgactt

SEQ ID NO: 291316 - DNA, 201 bp, Homo sapiens
gtaataaccttaacttaaaaaaaaaatttaatctcagttttttccctaagcaaaccaaaacttaataataatatgacaacttgatcatataggtttttttaaaataaatcctcttattgtgacttacacagactgttcatgacatgcttggactttctggtttgtcctgaacatccctctttcttaagcaaccagtcattt

SEQ ID NO: 291317 - DNA, 201 bp, Homo sapiens
tactctaggactaaatttaccatacaagattctttcttatatgaaattatttatctttaagctttcttaccaaaaaaaacctctttatttttataactgtytttttttttttttttttttagatgaagtctggctgtcacccaggctagagtgcagtggcaagatctcagctcactgcaacctccgcttcctgggttcaag

SEQ ID NO: 291318 - DNA, 201 bp, Homo sapiens
gtagggcagtggtattgaaccttggttgtgggttagaatcacctagagaacagtgagggaaaaagtgtctgtgcctcacctctgggtcaggagtgaggctrggcaaaggaatactttaaagaacttccctgtgattaaaaagaaaaaaaaaatcattctatggagaatctcaaacatacgcaaaagtagaaagctgtatat

SEQ ID NO: 291319 - DNA, 201 bp, Homo sapiens
cctgtagggcagtggtattgaaccttggttgtgggttagaatcacctagagaacagtgagggaaaaagtgtctgtgcctcacctctgggtcaggagtgagsctaggcaaaggaatactttaaagaacttccctgtgattaaaaagaaaaaaaaaatcattctatggagaatctcaaacatacgcaaaagtagaaagctgta

SEQ ID NO: 291320 - DNA, 201 bp, Homo sapiens
ccagtgtatgagctgggattgcctcacactaagaatagcaggaacccctagaagtctagggccattgtggctttggggagcccaggctccttgtttttttytgctgtgttattctgaaggcagctcaggatcccaggatactgtgatagtccttcacctccagcctcagtccaggcagggacaagcaacgcacctgcatcg

SEQ ID NO: 291321 - DNA, 201 bp, Homo sapiens
tggtggtaggatgggggcttgtgaatgtttataaacagaaatccctcgaatacgaccctggctaggtaggtgcagttacagaggcacagaagggaggagaytgggcgaaagatttttgaattaggggattagaaaaggctgctcgggagagttatctgaaccagctaggacttggtcagatgcagtcagtttggtatagga

SEQ ID NO: 291322 - DNA, 201 bp, Homo sapiens
ggttcagaaatcctgcccctgcccctgcctgctgctctgtttgccaggcggtcctggtctccacccaggctccaccctaccagggtggaatggagttgggsagttgggcctaacagcacgggtcctgtcctctttcagggctgtcccggggctccctcccagctgcagccccaggtacttcctcgtctgcactccaacccc
